United States Patent Application Publication US 2013/0267429 A1 - sequence listing, part 13

SEQ ID NO: 286399 - DNA, 59 bp, Artificial
  Synthetic oligonucleotide
ctcgcgaattctatggctggttgcctcgttcaagaggaaataccgtcctatcccattga

SEQ ID NO: 286400 - DNA, 51 bp, Artificial
  Synthetic oligonucleotide
gctcgtcggtgataggcgacaggtacgagttcaaagtctcctttcccatgt

SEQ ID NO: 286401 - DNA, 51 bp, Artificial
  Synthetic oligonucleotide
agccctcggacttgcatgcagatccttacgggcaagatatctactccatga

SEQ ID NO: 286402 - DNA, 51 bp, Artificial
  Synthetic oligonucleotide
gacatctacatgtaataatagatgtctccgaggcgatagacaaatcggatt

SEQ ID NO: 286403 - DNA, 51 bp, Artificial
  Synthetic oligonucleotide
tgcttgccactcctatttcggggcctgcatttatgtggacgccgcacgctg

SEQ ID NO: 286404 - DNA, 51 bp, Artificial
  Synthetic oligonucleotide
agaacgtatgcagacgtgtcttccagcattggagatcttaagaggatactg

SEQ ID NO: 286405 - DNA, 51 bp, Artificial
  Synthetic oligonucleotide
agaaccaagaggattggagaattgtcgggacaaacccgttcaagcggagat

SEQ ID NO: 286406 - DNA, 51 bp, Artificial
  Synthetic oligonucleotide
ttccaagatcgctctcacacgtcgtcgagtcgtttaatgccctggacttct

SEQ ID NO: 286407 - DNA, 51 bp, Artificial
  Synthetic oligonucleotide
tatagcaggtagacagctacatacagtatcttcccagatagtctatacagc

SEQ ID NO: 286408 - DNA, 51 bp, Artificial
  Synthetic oligonucleotide
cccaaggtctgttgccttggcataccactccacagcccttgccacgtcctt

SEQ ID NO: 286409 - DNA, 51 bp, Artificial
  Synthetic oligonucleotide
acatgggtgtcggcatttgtctataatatctgtattctcggttcgaggatt

SEQ ID NO: 286410 - DNA, 59 bp, Artificial
  Synthetic oligonucleotide
ccaatactataccaggcccggtagtccataggacacattttcagagcgatgttgtaaga

SEQ ID NO: 286411 - DNA, 60 bp, Artificial
  Synthetic oligonucleotide
aatcagcggggagcatgggattgaccagagcgggaggtatgttgggacatctgacaacca

SEQ ID NO: 286412 - DNA, 51 bp, Artificial
  Synthetic oligonucleotide
cacggatcttcctaaccagatccttgtatgagatcttgaaccttcttacca

SEQ ID NO: 286413 - DNA, 51 bp, Artificial
  Synthetic oligonucleotide
ttggggataccattgaggcttgttttcgagggagaatttgacgtagagatg

SEQ ID NO: 286414 - DNA, 51 bp, Artificial
  Synthetic oligonucleotide
tcccagacgtcccgcttgtgtagcatatcgttgcaaggtcgtcccccttcg

SEQ ID NO: 286415 - DNA, 51 bp, Artificial
  Synthetic oligonucleotide
aaccctcgagtccgtcccgaccctttccatccacgagctaaaggaggacgg

SEQ ID NO: 286416 - DNA, 51 bp, Artificial
  Synthetic oligonucleotide
cggaaatctgtatcccgattgagcagaagtggttgtgcaatataacatagc

SEQ ID NO: 286417 - DNA, 51 bp, Artificial
  Synthetic oligonucleotide
aacctccccgctgcacgtctcagagtagcagacctcatccgtcgcaacact

SEQ ID NO: 286418 - DNA, 51 bp, Artificial
  Synthetic oligonucleotide
gttgtaagagacttgtacctggggaggatagacttgagtcttctagtgatt

SEQ ID NO: 286419 - DNA, 51 bp, Artificial
  Synthetic oligonucleotide
atgaggtctattccagataccatgataactctgggagctgacgatggctgt

SEQ ID NO: 286420 - DNA, 51 bp, Artificial
  Synthetic oligonucleotide
atgactctgtagtcttggagaccactcaatgaagcccttggattctccgct

SEQ ID NO: 286421 - DNA, 51 bp, Artificial
  Synthetic oligonucleotide
cagatgtacattgtggaccacggggagtttgaggtttcgaagagaggacag

SEQ ID NO: 286422 - DNA, 60 bp, Artificial
  Synthetic oligonucleotide
tgtattcgcctgtcaacattcttcacgtacaccctctggaccttgataagctggatgttc

SEQ ID NO: 286423 - DNA, 51 bp, Artificial
  Synthetic oligonucleotide
tcttacaagacatccttacacgcctgctgtcacatgccaatctgacccgtt

SEQ ID NO: 286424 - DNA, 51 bp, Artificial
  Synthetic oligonucleotide
atcaagttctcctaaggagtgtaagtacaacagctattacccgtacattcc

SEQ ID NO: 286425 - DNA, 51 bp, Artificial
  Synthetic oligonucleotide
ctctctcggcaagaactatttcactagaagaatcgtctcccatcgactcga

SEQ ID NO: 286426 - DNA, 51 bp, Artificial
  Synthetic oligonucleotide
tctcttatcctcgtttagaatgtcctgatacacaaggacaaagctacttct

SEQ ID NO: 286427 - DNA, 51 bp, Artificial
  Synthetic oligonucleotide
aaagactgtgatagttaaggggaccgaagtgtatgatacttcttgcggatg

SEQ ID NO: 286428 - DNA, 51 bp, Artificial
  Synthetic oligonucleotide
ttctgcgatatcttcggagccttcccgcccttggccctgacaatcggagca

SEQ ID NO: 286429 - DNA, 50 bp, Artificial
  Synthetic oligonucleotide
aattcttggtacaccacggggttgatttcccgggagatccaattcaatgt

SEQ ID NO: 286430 - DNA, 50 bp, Artificial
  Synthetic oligonucleotide
aagcaacttccctcatcaattgcataaagcggcatgtacacacttacgtc

SEQ ID NO: 286431 - DNA, 50 bp, Artificial
  Synthetic oligonucleotide
ttcgaaatttactgtacgggaaatcaaaagatcgactgattccgtggtgt

SEQ ID NO: 286432 - DNA, 50 bp, Artificial
  Synthetic oligonucleotide
gctcctcggtagtcttttccagtgtgaaggtttccgatcttaagtttgtt

SEQ ID NO: 286433 - DNA, 55 bp, Artificial
  Synthetic oligonucleotide
gaaagtgttgtgctccctacggtgggagacgacaatcccccgcctatatttggcc

SEQ ID NO: 286434 - DNA, 50 bp, Artificial
  Synthetic oligonucleotide
gtcaagcttcgatatctctctgaataaacaagtgtacacagaggatggaa

SEQ ID NO: 286435 - DNA, 50 bp, Artificial
  Synthetic oligonucleotide
aataagggtagatgtgcttggcgcaatcataggctcggtggtctaagggt

SEQ ID NO: 286436 - DNA, 50 bp, Artificial
  Synthetic oligonucleotide
ttggatacaccccaaccttgtcgccatatacattccgcccccttgaaccc

SEQ ID NO: 286437 - DNA, 50 bp, Artificial
  Synthetic oligonucleotide
aaacctctgggccggcaaaggactgtaacatagttggagacattctatgc

SEQ ID NO: 286438 - DNA, 50 bp, Artificial
  Synthetic oligonucleotide
aataagagcctcgttttcccttctaagttcaagaatctcttgctcacatg

SEQ ID NO: 286439 - DNA, 50 bp, Artificial
  Synthetic oligonucleotide
ggggcgcaataagctctgtggcggcaacaaaatgccccatcgagtttgta

SEQ ID NO: 286440 - DNA, 50 bp, Artificial
  Synthetic oligonucleotide
ttgataggtggttggatgatgagtcgaccatctagtgggcagtaagcatg

SEQ ID NO: 286441 - DNA, 50 bp, Artificial
  Synthetic oligonucleotide
ttgcagtggtcgggggtattgcataccaggcgtggagactggcaacgagg

SEQ ID NO: 286442 - DNA, 50 bp, Artificial
  Synthetic oligonucleotide
cccacctaagccatggcgggagagcggccccagaacctaagctaggaatg

SEQ ID NO: 286443 - DNA, 50 bp, Artificial
  Synthetic oligonucleotide
tattgagatgctcagcatcactgcacttgcacacatcaaggctgttgttc

SEQ ID NO: 286444 - DNA, 59 bp, Artificial
  Synthetic oligonucleotide
ctgtgaaagggatgatgagctatgcagtaagaataccaccggcggcccaagggaccgga

SEQ ID NO: 286445 - DNA, 50 bp, Artificial
  Synthetic oligonucleotide
tagtgttgtttctagaagtaggattgccccatacacatcattttccgatg

SEQ ID NO: 286446 - DNA, 50 bp, Artificial
  Synthetic oligonucleotide
taggagagcagtcaacgaaggacatactgtaggattgagagtcgatccaa

SEQ ID NO: 286447 - DNA, 50 bp, Artificial
  Synthetic oligonucleotide
tcactggtgtgcgaaagggtgtactcattaatccccagaaggctgaggtc

SEQ ID NO: 286448 - DNA, 50 bp, Artificial
  Synthetic oligonucleotide
ccctgcatataaggaatctccaccgagggtgaagtagatatcccaaacct

SEQ ID NO: 286449 - DNA, 50 bp, Artificial
  Synthetic oligonucleotide
cctggtagtgctaaacatagtgttcatagcatatgaggcattctttggat

SEQ ID NO: 286450 - DNA, 50 bp, Artificial
  Synthetic oligonucleotide
ccttgggcatgcaagtctaaacaaccttgatgcagaagcgagcaagctct

SEQ ID NO: 286451 - DNA, 50 bp, Artificial
  Synthetic oligonucleotide
taaacgcagatccagatcctccgatggcccagtcgcgctccgtaagcgac

SEQ ID NO: 286452 - DNA, 50 bp, Artificial
  Synthetic oligonucleotide
cgtatggcgtcatcctaggcccgaagattagaatttcccacgtgtatatg

SEQ ID NO: 286453 - DNA, 50 bp, Artificial
  Synthetic oligonucleotide
tcgggcccaggatggtgtgcgatgccctgggacattatggccgaaggggg

SEQ ID NO: 286454 - DNA, 50 bp, Artificial
  Synthetic oligonucleotide
atcttgtacattcctgcacctttctttatgataagcccgttgtggttgag

SEQ ID NO: 286455 - DNA, 55 bp, Artificial
  Synthetic oligonucleotide
ccgcaacaccttctccgcaacaccttctccgcaacaaaccgcccgaacagacacc

SEQ ID NO: 286456 - DNA, 50 bp, Artificial
  Synthetic oligonucleotide
tcgttactttccaccttctcgggaaacatcgttccccatggatactctct

SEQ ID NO: 286457 - DNA, 50 bp, Artificial
  Synthetic oligonucleotide
ctagagttatcgggctgacaacagggtcgcccagcaactttctaaccagc

SEQ ID NO: 286458 - DNA, 50 bp, Artificial
  Synthetic oligonucleotide
tctggatccagatccttgtggtaagctcccataaaacttcagatggctcg

SEQ ID NO: 286459 - DNA, 50 bp, Artificial
  Synthetic oligonucleotide
tctgttactgccgcatccaatcccctcttgatagtgttttctatcttctc

SEQ ID NO: 286460 - DNA, 50 bp, Artificial
  Synthetic oligonucleotide
ataaattacagcgccaaggttgcccgaaggctgcactgctccatgacttc

SEQ ID NO: 286461 - DNA, 50 bp, Artificial
  Synthetic oligonucleotide
tcttatcactgcattctgtgagaggtcgaatctttcaaggaccatcatcg

SEQ ID NO: 286462 - DNA, 50 bp, Artificial
  Synthetic oligonucleotide
aggtcatggacaagtaatgtcggctccttgaagtcaaagtccatgggtac

SEQ ID NO: 286463 - DNA, 50 bp, Artificial
  Synthetic oligonucleotide
aggcattgagatacgtccttgtttggaactcatcgtttggagtctcgatc

SEQ ID NO: 286464 - DNA, 50 bp, Artificial
  Synthetic oligonucleotide
gaatgtggcgattggatacaggggatacttcaatgaatcgcaagcaaggc

SEQ ID NO: 286465 - DNA, 50 bp, Artificial
  Synthetic oligonucleotide
agagtagtgctaaaatccattgcctgaacattctcagtaggatcatcgag

SEQ ID NO: 286466 - DNA, 60 bp, Artificial
  Synthetic oligonucleotide
ggcgtcagcacagggccttcggggcgtgagtagcatatattgcatgcatattcccgtccg

SEQ ID NO: 286467 - DNA, 50 bp, Artificial
  Synthetic oligonucleotide
actgaatagtaagacgaccgagaacctcagaggtgttcgaaggatcccca

SEQ ID NO: 286468 - DNA, 50 bp, Artificial
  Synthetic oligonucleotide
gaggggagcctctcaacagacatcccgtcaaacaggtggatccccgtgga

SEQ ID NO: 286469 - DNA, 50 bp, Artificial
  Synthetic oligonucleotide
gatcttatgcagccctaaccttaatggtataaaactcctcaacgaactaa

SEQ ID NO: 286470 - DNA, 50 bp, Artificial
  Synthetic oligonucleotide
gcagagcagaggatcgattttcagctcgcatataaagcgaacacccatct

SEQ ID NO: 286471 - DNA, 50 bp, Artificial
  Synthetic oligonucleotide
gtcaatgttcattgcgttaaggtatcttatggcttcgtggatgttgcttc

SEQ ID NO: 286472 - DNA, 58 bp, Artificial
  Synthetic oligonucleotide
ccgggcaatgatactccttcccggggctcatagttgtcttgtggcaccggctcctcaa

SEQ ID NO: 286473 - DNA, 52 bp, Artificial
  Synthetic oligonucleotide
gttgtaccgttccacaccgaaagctacgggtcgagccaggatcccccggaaa

SEQ ID NO: 286474 - DNA, 59 bp, Artificial
  Synthetic oligonucleotide
ggggcagtaggcggagcactcttttcggatgggcaatacctgtcgttgagcaaccgtgc

SEQ ID NO: 286475 - DNA, 58 bp, Artificial
  Synthetic oligonucleotide
gtccccgccggcacaacaggtccatagaacgagacgttacagtgcatagactcgggag

SEQ ID NO: 286476 - DNA, 59 bp, Artificial
  Synthetic oligonucleotide
agatccagagcaaacccaagtatgaatctagaggctaggtaggaggcaaagtccaatgt

SEQ ID NO: 286477 - DNA, 59 bp, Artificial
  Synthetic oligonucleotide
tgagacgggattctcgaatgtgctgccacccctcctatgctcgcattgttgacaacgcc

SEQ ID NO: 286478 - DNA, 59 bp, Artificial
  Synthetic oligonucleotide
aagcctttggagtatttccttgtcaatattcctagtcgcatcgtcgactatataatgaa

SEQ ID NO: 286479 - DNA, 59 bp, Artificial
  Synthetic oligonucleotide
ttcagtatcctccacagctcctcgccagacttcccgaatctctgcgggtctgcacagtc

SEQ ID NO: 286480 - DNA, 59 bp, Artificial
  Synthetic oligonucleotide
ctcggatcgaacaacctcgaaccgatgtcggtgcctctctcggatcttctccgctccag

SEQ ID NO: 286481 - DNA, 59 bp, Artificial
  Synthetic oligonucleotide
ctcttgggcctggagcacagacggccataaggactttgatccgagcagggcttaaggtc

SEQ ID NO: 286482 - DNA, 59 bp, Artificial
  Synthetic oligonucleotide
cgagaggttccgagcacccgaactattgttccagcctaagctccgtggtcttgagctga

SEQ ID NO: 286483 - DNA, 58 bp, Artificial
  Synthetic oligonucleotide
ttttgggagacaatcagcggggagcatgggattgaccagagcgggaggtatgttggga

SEQ ID NO: 286484 - DNA, 57 bp, Artificial
  Synthetic oligonucleotide
cgtctggcctcaagtgtggaaagtgcaaccgggtttacagcgagggcgttactagca

SEQ ID NO: 286485 - DNA, 58 bp, Artificial
  Synthetic oligonucleotide
gtgcaggagaggcaccgacgatatgactggtactgctgcctcatagcgggactggaca

SEQ ID NO: 286486 - DNA, 58 bp, Artificial
  Synthetic oligonucleotide
attcttctctcgaagagaggaactgcagaggacttcaagacacttcctggaaacgaca

SEQ ID NO: 286487 - DNA, 60 bp, Artificial
  Synthetic oligonucleotide
ccacatccattgggagccccgatgaggtcttatatgaaggacggcctgagaataggattc

SEQ ID NO: 286488 - DNA, 58 bp, Artificial
  Synthetic oligonucleotide
ctgacacttaggtccttcgcaagaatgaccgtgctccgcatgggatgcccgttttcct

SEQ ID NO: 286489 - DNA, 55 bp, Artificial
  Synthetic oligonucleotide
tgatccttgcatagttcctgagaaggtttcggaccttgggaccctcgtccgtcct

SEQ ID NO: 286490 - DNA, 58 bp, Artificial
  Synthetic oligonucleotide
cgattgacagctcgacggcgattgtggggtcgactgcgggaagcaactttgttgtcag

SEQ ID NO: 286491 - DNA, 58 bp, Artificial
  Synthetic oligonucleotide
gatatgactggtactgctgcctcatagcgggactggacacatgactccccgaggcctg

SEQ ID NO: 286492 - DNA, 58 bp, Artificial
  Synthetic oligonucleotide
gagtggtctcccgcctcagtactatccgggctcgcacaggcttaactgcggagatctg

SEQ ID NO: 286493 - DNA, 58 bp, Artificial
  Synthetic oligonucleotide
agaacagggctacctcattcagatcctcccagttgataaactaatggtcttgggatcc

SEQ ID NO: 286494 - DNA, 58 bp, Artificial
  Synthetic oligonucleotide
ggcaccgacgatatgactggtactgctgcctcatagcgggactggacacatgactccc

SEQ ID NO: 286495 - DNA, 57 bp, Artificial
  Synthetic oligonucleotide
gccccaggtgcgacagattgaagcaccctagcttgtctccagaaagggagtctgccc

SEQ ID NO: 286496 - DNA, 57 bp, Artificial
  Synthetic oligonucleotide
gacctaaatatcatactcctcagctccgttccgataccataaacccaatacagcgaa

SEQ ID NO: 286497 - DNA, 57 bp, Artificial
  Synthetic oligonucleotide
atgtgccgcagttgtttgtacggggcggttggcatctaagacgagcgctggactcgg

SEQ ID NO: 286498 - DNA, 54 bp, Artificial
  Synthetic oligonucleotide
agaggtgagttacgaaagtgttgtgctccctacggtgggagacgacaatccccc

SEQ ID NO: 286499 - DNA, 57 bp, Artificial
  Synthetic oligonucleotide
gttgagaatcgacttcatcacaaccccaaaggacgttgttgccccatgaagcacata

SEQ ID NO: 286500 - DNA, 55 bp, Artificial
  Synthetic oligonucleotide
gaattttgagtctccccggaactactttgggtattgttgactgagagcggtaaga

SEQ ID NO: 286501 - DNA, 57 bp, Artificial
  Synthetic oligonucleotide
ctctcaggtcatgcatggcctttccttgatgatacaacgtagacttgtgagatactt

SEQ ID NO: 286502 - DNA, 57 bp, Artificial
  Synthetic oligonucleotide
cgtgcgtgtaatgtgtttttccgtggggagtttatggacttcatcggaatatcgcag

SEQ ID NO: 286503 - DNA, 57 bp, Artificial
  Synthetic oligonucleotide
caggatgagaccagccgtctgtatacctggtccagaacggtaagaaatggggattcg

SEQ ID NO: 286504 - DNA, 53 bp, Artificial
  Synthetic oligonucleotide
aatccgaggacaagaaccaaagggccgggtcctcactcgggatttctgtggta

SEQ ID NO: 286505 - DNA, 57 bp, Artificial
  Synthetic oligonucleotide
ggaagaactagtggttagatggcaagtcgaccgctctgggcagtaagcgcgggtcta

SEQ ID NO: 286506 - DNA, 56 bp, Artificial
  Synthetic oligonucleotide
gtacacaggagacatccatacagtccacttaacaaactccggggcctcctcagggt

SEQ ID NO: 286507 - DNA, 57 bp, Artificial
  Synthetic oligonucleotide
gcgccgtttggtattctcatgaagagcggaaagacaatcagctatatagtcaggcgt

SEQ ID NO: 286508 - DNA, 56 bp, Artificial
  Synthetic oligonucleotide
ttcctaaccctctggttcatgtcgtccgtactcttgttccttatggtctcgggata

SEQ ID NO: 286509 - DNA, 59 bp, Artificial
  Synthetic oligonucleotide
ccagatccgaagatacaatcagggaaatcgctagctccggctctagagggattttcgag

SEQ ID NO: 286510 - DNA, 55 bp, Artificial
  Synthetic oligonucleotide
actctaacaaagtaacctcaccgtattcttcttatagaccactgtcagggtctaa

SEQ ID NO: 286511 - DNA, 56 bp, Artificial
  Synthetic oligonucleotide
attgttgtctcgcttgcaactatcggtgtcttagtcctaatatacctggtgtcgac

SEQ ID NO: 286512 - DNA, 55 bp, Artificial
  Synthetic oligonucleotide
tgtagatttaacttattaacccctggattttgcccttctgaaatgatcctcggac

SEQ ID NO: 286513 - DNA, 56 bp, Artificial
  Synthetic oligonucleotide
cggtctcaagaaggtttccgacagtataacgtggctgatgacctacgagcacgggg

SEQ ID NO: 286514 - DNA, 56 bp, Artificial
  Synthetic oligonucleotide
tttgtaaccgaggtgctcatatgcattgtaccactgtcgataatttccacgggaag

SEQ ID NO: 286515 - DNA, 56 bp, Artificial
  Synthetic oligonucleotide
gcccttccacccgataccacgtggaggtgcagagatacatcaggcacgaagtcaga

SEQ ID NO: 286516 - DNA, 56 bp, Artificial
  Synthetic oligonucleotide
tcgccattagacgacgccgagaactcccgcccttgctgtgctctcctgtatccata

SEQ ID NO: 286517 - DNA, 55 bp, Artificial
  Synthetic oligonucleotide
gttccggttccagggatatatgggcataatgcaagcgatgacctgtcctacaagc

SEQ ID NO: 286518 - DNA, 55 bp, Artificial
  Synthetic oligonucleotide
ctctggacctgtctctggaagggcctgttgttgatctgtttcctaggatgtatga

SEQ ID NO: 286519 - DNA, 55 bp, Artificial
  Synthetic oligonucleotide
ggctgttggtaaactcgtggtcccctgaatctctcttgtgccaaagctatagtcg

SEQ ID NO: 286520 - DNA, 60 bp, Artificial
  Synthetic oligonucleotide
ctaccatcacgattgtacataaatagaggcttagctgcagatccactaggattattcgat

SEQ ID NO: 286521 - DNA, 54 bp, Artificial
  Synthetic oligonucleotide
aaactgccgacggtctttatacgaagatatattaaccgttttcacttgtatcgc

SEQ ID NO: 286522 - DNA, 56 bp, Artificial
  Synthetic oligonucleotide
tgtagctcgttttcggcctttaaccatctcaggttacagctagcctattcgtctca

SEQ ID NO: 286523 - DNA, 55 bp, Artificial
  Synthetic oligonucleotide
cggtgcgaatgacacgccatctttacgcacagttactctacgaccgcttcttccc

SEQ ID NO: 286524 - DNA, 55 bp, Artificial
  Synthetic oligonucleotide
cgcgtcctctgacatcaggtgacgcacctgcgcccaagttcggcggtaacggata

SEQ ID NO: 286525 - DNA, 55 bp, Artificial
  Synthetic oligonucleotide
cgcaatacagtgtcgcacacatgaaccaattgcgaacttgaaagtggcacctact

SEQ ID NO: 286526 - DNA, 55 bp, Artificial
  Synthetic oligonucleotide
cgcaaacgctcatgaggctattcagtgggctgacacgacgaagtttgggatccag

SEQ ID NO: 286527 - DNA, 55 bp, Artificial
  Synthetic oligonucleotide
cgataccatacacgaactattcgatactaccgtggtatgactgcttatatgccac

SEQ ID NO: 286528 - DNA, 55 bp, Artificial
  Synthetic oligonucleotide
ccggcgccaagactggtatcagtcggcacatggaatcgtgatctcgtcagcctct

SEQ ID NO: 286529 - DNA, 55 bp, Artificial
  Synthetic oligonucleotide
ccaagcgtgtcttgttgcacctctcttacaagcgcttcctcatccgactcaactg

SEQ ID NO: 286530 - DNA, 55 bp, Artificial
  Synthetic oligonucleotide
atggtgacgctgtcacagtcgtgagttgtacatcctgctacctcgacgaagggtg

SEQ ID NO: 286531 - DNA, 60 bp, Artificial
  Synthetic oligonucleotide
aatccttcaatagctactgatactgtagttacatgaaatagtccactgtagatacctact

SEQ ID NO: 286532 - DNA, 55 bp, Artificial
  Synthetic oligonucleotide
agctcgacggaaggcaaatcattcgctctgactttatcctgattcacgctgactc

SEQ ID NO: 286533 - DNA, 55 bp, Artificial
  Synthetic oligonucleotide
aacggtcaatgcaacggagaaagtgggcaagtcccgtgtggtgctctccaagcca

SEQ ID NO: 286534 - DNA, 55 bp, Artificial
  Synthetic oligonucleotide
tgttcgcgtagatatcgagtcgtcaacagcaagacgagagtgtcgaccgaaagtg

SEQ ID NO: 286535 - DNA, 55 bp, Artificial
  Synthetic oligonucleotide
tgcctagcgaatacaaagcgaaaggaagtgcagcctagaagtacatgttttgagg

SEQ ID NO: 286536 - DNA, 55 bp, Artificial
  Synthetic oligonucleotide
tagtgcattgatccgagctttcagcttcgacgttgtttctcagacatccgcaagt

SEQ ID NO: 286537 - DNA, 55 bp, Artificial
  Synthetic oligonucleotide
gtgcagtacgcaaagcagctcaagccggtgcctctcaataaggcgattcgcagca

SEQ ID NO: 286538 - DNA, 55 bp, Artificial
  Synthetic oligonucleotide
gtcggagcaggccacactacatgtagaagcgggcacttacaacgagttgatggcc

SEQ ID NO: 286539 - DNA, 55 bp, Artificial
  Synthetic oligonucleotide
gtatcctggcatgcctcgagaggtggactgcttcaaggtgagcggaggtggtcgc

SEQ ID NO: 286540 - DNA, 55 bp, Artificial
  Synthetic oligonucleotide
ggtacaaaccaaccatggaccacgctcaaacgccaatgagcttcttcgcaaccga

SEQ ID NO: 286541 - DNA, 55 bp, Artificial
  Synthetic oligonucleotide
ggatggctgtgcgaaccaggcaacacgagtgctccgcccatgtcgcctaatccga

SEQ ID NO: 286542 - DNA, 60 bp, Artificial
  Synthetic oligonucleotide
tatggtctgtcaggtctttaaatacatgcttaggtccattaagtagattacacagatctt

SEQ ID NO: 286543 - DNA, 55 bp, Artificial
  Synthetic oligonucleotide
gcgagcgcatcgtagaatgtaatgttgcccagagtgagcgcaaagtccgagacgt

SEQ ID NO: 286544 - DNA, 55 bp, Artificial
  Synthetic oligonucleotide
gcctaccaaagcacgttcaagccggctggacattttccgtacgattgttcgttac

SEQ ID NO: 286545 - DNA, 55 bp, Artificial
  Synthetic oligonucleotide
gccaagtcctcaagcgcgatcgacctctagtttgtcattcgcgagtctgagttgg

SEQ ID NO: 286546 - DNA, 55 bp, Artificial
  Synthetic oligonucleotide
gcacggctgactgctcagtccatgggcaacgctacctctcgctagacgaccctca

SEQ ID NO: 286547 - DNA, 55 bp, Artificial
  Synthetic oligonucleotide
gatgtcgggtggcgtccttattgtctccctcgcaggtgttctggaggtcgggaca

SEQ ID NO: 286548 - DNA, 55 bp, Artificial
  Synthetic oligonucleotide
gaatcgaacgccgactcggaaccatcgttcatggttgtcggataagaccaacgcg

SEQ ID NO: 286549 - DNA, 55 bp, Artificial
  Synthetic oligonucleotide
ctggaggaaccaacgatgtcatcataagtgagcgactgcgacggcggggcgagag

SEQ ID NO: 286550 - DNA, 55 bp, Artificial
  Synthetic oligonucleotide
ctcccgcgggtgagaaagctatgtcactgccagatttgctcaagacactctcgtc

SEQ ID NO: 286551 - DNA, 55 bp, Artificial
  Synthetic oligonucleotide
ctcacggctgccacttaccccgcctcgtctgagatgcgaaatcgtgaattcgggt

SEQ ID NO: 286552 - DNA, 55 bp, Artificial
  Synthetic oligonucleotide
ctcaagtgcggcagagaaacacgagaaaattgtttcgcgttgattcgtccgtacg

SEQ ID NO: 286553 - DNA, 60 bp, Artificial
  Synthetic oligonucleotide
actagcttccggagtaggtatctacagtggactatttcatgtaactacagtatcagtagc

SEQ ID NO: 286554 - DNA, 54 bp, Artificial
  Synthetic oligonucleotide
gatatgcgaaagacaatcactcctgcatcccatcgcttctccatcacttctcaa

SEQ ID NO: 286555 - DNA, 54 bp, Artificial
  Synthetic oligonucleotide
gttgtgcaaggtgtactcacgactggttctgctacgcactaaccataccgtact

SEQ ID NO: 286556 - DNA, 53 bp, Artificial
  Synthetic oligonucleotide
gtacctctaagtgctaattgggcgggagaattcctatgtctagctggtgcttt

SEQ ID NO: 286557 - DNA, 52 bp, Artificial
  Synthetic oligonucleotide
atcatagttccactattactagataccataagactacgatttagtgtaggat

SEQ ID NO: 286558 - DNA, 51 bp, Artificial
  Synthetic oligonucleotide
tgacgactgaaaccgtacaagcacgttttctgttgcactcacagactcacg

SEQ ID NO: 286559 - DNA, 50 bp, Artificial
  Synthetic oligonucleotide
aaatctaggtgccacacaggcaggagagcgttggcagcgacccacccacc

SEQ ID NO: 286560 - DNA, 50 bp, Artificial
  Synthetic oligonucleotide
aaagtggcttcgccacatgttcgtccagccaatccttcgccgaggttgcg

SEQ ID NO: 286561 - DNA, 50 bp, Artificial
  Synthetic oligonucleotide
aaaggagcccacgtgtcgccgtcctcctgtgcgcctctcgtgtgcccatc

SEQ ID NO: 286562 - DNA, 50 bp, Artificial
  Synthetic oligonucleotide
aaaggaagcgttgctaccgtgcgatgcagcggtaacgtgggaagggggct

SEQ ID NO: 286563 - DNA, 50 bp, Artificial
  Synthetic oligonucleotide
aaagcgcctccgtacacatcgccgtgacctgtaaccgtggattgcgaccg

SEQ ID NO: 286564 - DNA, 58 bp, Artificial
  Synthetic oligonucleotide
taatgcatgggcatatgttttagtagttctgtacgtagtttccgaactgaacgactac

SEQ ID NO: 286565 - DNA, 50 bp, Artificial
  Synthetic oligonucleotide
aaagcaagcgcgctgattcgacgttcagtgtgtggggacaggtcgtgcga

SEQ ID NO: 286566 - DNA, 50 bp, Artificial
  Synthetic oligonucleotide
aaagatgcgcccaaattccagccctggggaaccaactacggcggagcgtc

SEQ ID NO: 286567 - DNA, 50 bp, Artificial
  Synthetic oligonucleotide
aaagacgggagcaacacaggcaagcgtcgggcagactcgtgccgacactg

SEQ ID NO: 286568 - DNA, 50 bp, Artificial
  Synthetic oligonucleotide
aaacgcgtcgttggccgtatgcgctcgtcaggggttagcgaatgtggtgg

SEQ ID NO: 286569 - DNA, 50 bp, Artificial
  Synthetic oligonucleotide
aaacgacgccgtgtcgaacacgcatgcagcaagaggcgatcccaaaccac

SEQ ID NO: 286570 - DNA, 50 bp, Artificial
  Synthetic oligonucleotide
aaacccgacccgctgccatacccaacgaggccatacctcgcgctaggtct

SEQ ID NO: 286571 - DNA, 50 bp, Artificial
  Synthetic oligonucleotide
aaaccccaagggtcgacgaatcatctgggacgctaccaagtcgcgctggg

SEQ ID NO: 286572 - DNA, 50 bp, Artificial
  Synthetic oligonucleotide
aaacattttagtcgcaccgtccagggccagacgccccgagggggacaccc

SEQ ID NO: 286573 - DNA, 50 bp, Artificial
  Synthetic oligonucleotide
aaacacgcggctgtcgagtagggccgtgcaccgggcagctagaatcctac

SEQ ID NO: 286574 - DNA, 50 bp, Artificial
  Synthetic oligonucleotide
aaaaggtcgcacgcatccaccgcttgttcccacatggcatcagagcgccg

SEQ ID NO: 286575 - DNA, 57 bp, Artificial
  Synthetic oligonucleotide
actccatcgacttggaattagttgtttgttgttacttcccataatgtgaagtgctag

SEQ ID NO: 286576 - DNA, 50 bp, Artificial
  Synthetic oligonucleotide
aaaaggggaacacgaacagcgccctagcaacaggcaccgagggtcaccgc

SEQ ID NO: 286577 - DNA, 50 bp, Artificial
  Synthetic oligonucleotide
aaaagcggtacccgatacgccacctagacgcgctgagaggcccggtgcaa

SEQ ID NO: 286578 - DNA, 50 bp, Artificial
  Synthetic oligonucleotide
aacccgcgttcgcccaccaaggagcgtcagacagtctcgggccgtgcgtt

SEQ ID NO: 286579 - DNA, 50 bp, Artificial
  Synthetic oligonucleotide
aacccgaatgcagacgactggcaccgcccagtcacctagttcgaggacgc

SEQ ID NO: 286580 - DNA, 50 bp, Artificial
  Synthetic oligonucleotide
aaccccaccaattccaacgacgatcgcctcctgagacgactcagctggga

SEQ ID NO: 286581 - DNA, 50 bp, Artificial
  Synthetic oligonucleotide
aaccccaagcagggcatctccacaccgccaggcacaggtcctacgtacat

SEQ ID NO: 286582 - DNA, 50 bp, Artificial
  Synthetic oligonucleotide
aaccagtcatgaatgccacgaggcatccaaccgggcggtttctgcggaga

SEQ ID NO: 286583 - DNA, 50 bp, Artificial
  Synthetic oligonucleotide
aaccaggcatgtgcggtgagccagagccaaacctgcgacccaagcgagaa

SEQ ID NO: 286584 - DNA, 50 bp, Artificial
  Synthetic oligonucleotide
aaccagctgtcccgtagtcctgtgctcgcacggtcgtggggccgtgttga

SEQ ID NO: 286585 - DNA, 50 bp, Artificial
  Synthetic oligonucleotide
aaccacgtccgcgaaccaagcgcataccgttgactcttcgtacgacccgg

SEQ ID NO: 286586 - DNA, 60 bp, Artificial
  Synthetic oligonucleotide
aggtggtgttctatatgatcgataccatacacgaactattcgatactaccgtggtatgac

SEQ ID NO: 286587 - DNA, 50 bp, Artificial
  Synthetic oligonucleotide
aaccacgagccgtgagccgatggctgtggccagcatttgtggatgtgaga

SEQ ID NO: 286588 - DNA, 50 bp, Artificial
  Synthetic oligonucleotide
aaccaccttgcaagcgatgccaacgaccctatctgcatcggcacgtgcta

SEQ ID NO: 286589 - DNA, 50 bp, Artificial
  Synthetic oligonucleotide
aaccacacgggagaacgaggagcccgggacgagaaaggcgtggtcaaggg

SEQ ID NO: 286590 - DNA, 50 bp, Artificial
  Synthetic oligonucleotide
aaccaacgctcctgtcgcactcgtcctccgtggcagagtagggctcgatg

SEQ ID NO: 286591 - DNA, 50 bp, Artificial
  Synthetic oligonucleotide
aacagggcgctccaaacgtcttgcgcgactacacactcgatgctagcccg

SEQ ID NO: 286592 - DNA, 50 bp, Artificial
  Synthetic oligonucleotide
aacagcgctgcggactccttcaatcgtcatgtgcatgctcgcaccgatgc

SEQ ID NO: 286593 - DNA, 50 bp, Artificial
  Synthetic oligonucleotide
aacagcgccttcacgcttctcagagagactcgcgactcggctgtgcacac

SEQ ID NO: 286594 - DNA, 50 bp, Artificial
  Synthetic oligonucleotide
aacagccatgtcgcgtcgtcaagtcactccacgcttcgtgcttcgccgcc

SEQ ID NO: 286595 - DNA, 50 bp, Artificial
  Synthetic oligonucleotide
aacagagaagggggcattcggccttaacgtcacgccacgccttctgacct

SEQ ID NO: 286596 - DNA, 50 bp, Artificial
  Synthetic oligonucleotide
aacacttgccgcccttggaagacgcgtgctgaaggcagaggcgacacgat

SEQ ID NO: 286597 - DNA, 60 bp, Artificial
  Synthetic oligonucleotide
cactcctaggaccgcgggatcgtcaagagaacattgatactcgtgataatacaactagta

SEQ ID NO: 286598 - DNA, 50 bp, Artificial
  Synthetic oligonucleotide
aacacgcgcagaatgcagacggccaagcaatggtggagccgatgcttgat

SEQ ID NO: 286599 - DNA, 50 bp, Artificial
  Synthetic oligonucleotide
aacacgcacgcatcgcgcttcactcgtgactgtgcaagccccgattccga

SEQ ID NO: 286600 - DNA, 50 bp, Artificial
  Synthetic oligonucleotide
aacaccaccaagcccgcctcagcttgcggaatggtcggaagcaccggaaa

SEQ ID NO: 286601 - DNA, 58 bp, Artificial
  Synthetic oligonucleotide
cctaacttcagctgcagtaatgtacttcaatggttacgctaaccctctcggaggttca

SEQ ID NO: 286602 - DNA, 57 bp, Artificial
  Synthetic oligonucleotide
taattgcccataccctcactggaacggctacgtaccgatactcgggcgcgcaaatct

SEQ ID NO: 286603 - DNA, 60 bp, Artificial
  Synthetic oligonucleotide
gagaaatatcaacaaatgactgattatgatagatatacaaccgaaagcaatcgactcatg

SEQ ID NO: 286604 - DNA, 56 bp, Artificial
  Synthetic oligonucleotide
gctttcgtctagtttaattatttgggctggtgaagataatttgagaggttccaagc

SEQ ID NO: 286605 - DNA, 56 bp, Artificial
  Synthetic oligonucleotide
tacagacatgaaggatctcccttgagaagtgcacaaaggaagcgcaacgggaggac

SEQ ID NO: 286606 - DNA, 50 bp, Artificial
  Synthetic oligonucleotide
cctgccgtgtgatacttgcgccacgggtgctgctagccaatacaccaagc

SEQ ID NO: 286607 - DNA, 50 bp, Artificial
  Synthetic oligonucleotide
gtcctcctcagatgggttgccgcactccagcacaccgtctgcgttggtgg

SEQ ID NO: 286608 - DNA, 50 bp, Artificial
  Synthetic oligonucleotide
acacaaccaccagcggttagttcctcgtgcgtggtaccccgccagcgttg

SEQ ID NO: 286609 - DNA, 50 bp, Artificial
  Synthetic oligonucleotide
acacaacacgaagatgcctcggacacccaacggacgcactgccgtggcac

SEQ ID NO: 286610 - DNA, 50 bp, Artificial
  Synthetic oligonucleotide
acacaaaacggaccatgcatgcaagcggagagggcggatcgaggctgtcc

SEQ ID NO: 286611 - DNA, 50 bp, Artificial
  Synthetic oligonucleotide
acacgaggtgggttaggcctggaagagcagtgacgctcatgcctggtccg

SEQ ID NO: 286612 - DNA, 50 bp, Artificial
  Synthetic oligonucleotide
acacgagcaggttgcatgaccggctccgtacatacggcatgggccagagc

SEQ ID NO: 286613 - DNA, 50 bp, Artificial
  Synthetic oligonucleotide
acacgacgctcttggcagcccctttcttgctcggtttaccaccgcctagc

SEQ ID NO: 286614 - DNA, 50 bp, Artificial
  Synthetic oligonucleotide
acacgacacgatcgctcgcaggcagtcccctcgctgtgaattttcgcgct

SEQ ID NO: 286615 - DNA, 50 bp, Artificial
  Synthetic oligonucleotide
caacctcatgccacacgttcaggcacgacgggaacaggagccccactagc

SEQ ID NO: 286616 - DNA, 56 bp, Artificial
  Synthetic oligonucleotide
ggtacacgctccaatacgctaccgacgatctcgcacaaccatgcgggcaacgcaca

SEQ ID NO: 286617 - DNA, 50 bp, Artificial
  Synthetic oligonucleotide
acacctccaaacgggatgacgcctccaaaggggatgacgcctccaaaggg

SEQ ID NO: 286618 - DNA, 50 bp, Artificial
  Synthetic oligonucleotide
acacctatagggtcggccttctgagaggttctctgtcatgcggattacag

SEQ ID NO: 286619 - DNA, 50 bp, Artificial
  Synthetic oligonucleotide
acaccggccgtgcggctccaagtgggatgcaccagcacctggcttcacgc

SEQ ID NO: 286620 - DNA, 50 bp, Artificial
  Synthetic oligonucleotide
acaccggcagcacagggaagacactgccgcctcccaaaccgtgagtgtca

SEQ ID NO: 286621 - DNA, 50 bp, Artificial
  Synthetic oligonucleotide
cgcgctctaatgacatcactcgcccgatgagatgtggcgtatcgccccgc

SEQ ID NO: 286622 - DNA, 50 bp, Artificial
  Synthetic oligonucleotide
caacgcttgcgacctcaaccatagcagcgaccgcgtctacccgtgactct

SEQ ID NO: 286623 - DNA, 50 bp, Artificial
  Synthetic oligonucleotide
cctgctttgccgattcgccttctgcatgagtgagcggtggcgagactggc

SEQ ID NO: 286624 - DNA, 50 bp, Artificial
  Synthetic oligonucleotide
acaccctctgctcgagagggggaacctggaaaccggaattggctgagggc

SEQ ID NO: 286625 - DNA, 50 bp, Artificial
  Synthetic oligonucleotide
acaccctcactgctatcgttcgtggtgagtggcactagccccgcggtcgt

SEQ ID NO: 286626 - DNA, 50 bp, Artificial
  Synthetic oligonucleotide
caacggaccacgtctatccgctcgtcgtggcgtgtaacacaccaccgcct

SEQ ID NO: 286627 - DNA, 53 bp, Artificial
  Synthetic oligonucleotide
gctgttttacacgaaagtggttctagtaaccctctaaatatagcgttatcggt

SEQ ID NO: 286628 - DNA, 50 bp, Artificial
  Synthetic oligonucleotide
acacccgcgcctcgtgtttctggcggcttctctgtacacctttccgccgt

SEQ ID NO: 286629 - DNA, 50 bp, Artificial
  Synthetic oligonucleotide
acaccccgagttgtccgcgcgagggcgcttcgtctcacctgagcggtcag

SEQ ID NO: 286630 - DNA, 50 bp, Artificial
  Synthetic oligonucleotide
gtccaccaaaggattagggtgacttgggttcgtgggtgcgtgtgcgccca

SEQ ID NO: 286631 - DNA, 50 bp, Artificial
  Synthetic oligonucleotide
acaccccgactgccggtagcgtcgacttgccgtgggttcgaagcgaacga

SEQ ID NO: 286632 - DNA, 50 bp, Artificial
  Synthetic oligonucleotide
acaccccctgcattttggcgggattagctccaccgctcgccagagtgcct

SEQ ID NO: 286633 - DNA, 50 bp, Artificial
  Synthetic oligonucleotide
caacggacctgagagaggtgcacagcagtgtgtgcgaccaccgcgcagcg

SEQ ID NO: 286634 - DNA, 50 bp, Artificial
  Synthetic oligonucleotide
acaccagtagatagcgagggccgggtgagatgtgttcgccacggtggcac

SEQ ID NO: 286635 - DNA, 50 bp, Artificial
  Synthetic oligonucleotide
acaccagcttcccgaacttgccacaaaagctcactgcggcctcgggtggt

SEQ ID NO: 286636 - DNA, 50 bp, Artificial
  Synthetic oligonucleotide
acaccactcgcacacgcccctcacgaggcagcgcctgctcacattcgctt

SEQ ID NO: 286637 - DNA, 50 bp, Artificial
  Synthetic oligonucleotide
caacggaggggtcgtagtcacagaaggcgtcggggtcatcgcattcaggg

SEQ ID NO: 286638 - DNA, 54 bp, Artificial
  Synthetic oligonucleotide
gtcaaagtaagacctgagttagttaatgtaagacctaggttagtaaacttgtga

SEQ ID NO: 286639 - DNA, 50 bp, Artificial
  Synthetic oligonucleotide
gacagtccacgggcgaaagcgactttctactataaactgacactatagcg

SEQ ID NO: 286640 - DNA, 50 bp, Artificial
  Synthetic oligonucleotide
acagggtgagtcccccgctctgctacaacggtggggtgcgcagacggaac

SEQ ID NO: 286641 - DNA, 50 bp, Artificial
  Synthetic oligonucleotide
acaggggtggcttactggttgcggtccgaagacgaagggtacccggtgag

SEQ ID NO: 286642 - DNA, 50 bp, Artificial
  Synthetic oligonucleotide
acaggggcgtctcaggcaaggttgcgccggccaacacacctttcactggt

SEQ ID NO: 286643 - DNA, 50 bp, Artificial
  Synthetic oligonucleotide
acaggggcaggcataagagctgcgtggacgcggtcaggctgttacacccg

SEQ ID NO: 286644 - DNA, 50 bp, Artificial
  Synthetic oligonucleotide
attgagaggccgagtggagcggagttcgacctatgcggagtggcagcgta

SEQ ID NO: 286645 - DNA, 50 bp, Artificial
  Synthetic oligonucleotide
attgagggggacacatttcgccgcgccttcgctacgctcgtggccctcgt

SEQ ID NO: 286646 - DNA, 50 bp, Artificial
  Synthetic oligonucleotide
cctgtgcgcacatcgagcgataccagcccgaaaggaagtgcagcacgctg

SEQ ID NO: 286647 - DNA, 50 bp, Artificial
  Synthetic oligonucleotide
attgcgctatcgtggaggtcccatgcggtgacgagtgcagcgtaatcggg

SEQ ID NO: 286648 - DNA, 50 bp, Artificial
  Synthetic oligonucleotide
acaggcccgctccctctgtcgggctctctccctgtcaagccagtgcttgc

SEQ ID NO: 286649 - DNA, 56 bp, Artificial
  Synthetic oligonucleotide
ccgcgggaagataaggcccgtgtgcgcaaactgtcccggagaggcttagatcggcg

SEQ ID NO: 286650 - DNA, 50 bp, Artificial
  Synthetic oligonucleotide
gacagcaggagtgtggcgtcaagtttcaggcgagaaaatgtgaaccgaga

SEQ ID NO: 286651 - DNA, 50 bp, Artificial
  Synthetic oligonucleotide
acaggaaacgcacacacacagggactgcatgcgcctcgttagccggccag

SEQ ID NO: 286652 - DNA, 50 bp, Artificial
  Synthetic oligonucleotide
gacacttcccgtacagcatccagcgcaattcgaggcaaagtggcaaggaa

SEQ ID NO: 286653 - DNA, 50 bp, Artificial
  Synthetic oligonucleotide
acagcttaccatgcagctacgcgacacctaccggcagaacgtagccccgg

SEQ ID NO: 286654 - DNA, 50 bp, Artificial
  Synthetic oligonucleotide
acagctgcgggaaccccttcgaggactcctctgtgtgggattctggccgg

SEQ ID NO: 286655 - DNA, 50 bp, Artificial
  Synthetic oligonucleotide
acagcggtcctgggctgtcccttttgtcgtgcgtccttccactcctaccc

SEQ ID NO: 286656 - DNA, 50 bp, Artificial
  Synthetic oligonucleotide
gtacaggcgccctcttcacgcgggttgccttcactacccctgctgtactg

SEQ ID NO: 286657 - DNA, 50 bp, Artificial
  Synthetic oligonucleotide
gacacgtgctgataccacggcagtcggctcggctcactgctgcccggtgg

SEQ ID NO: 286658 - DNA, 50 bp, Artificial
  Synthetic oligonucleotide
acagcgggttaccagtagcgttgggggcgaataggttgctccgccggtcc

SEQ ID NO: 286659 - DNA, 50 bp, Artificial
  Synthetic oligonucleotide
attggcgggatgcgagcaaaatagcagctggcgcgagagccccttcattg

SEQ ID NO: 286660 - DNA, 56 bp, Artificial
  Synthetic oligonucleotide
accctctaatgggagccagaacccgcctctaatgggagctttgagcggggcaccgc

SEQ ID NO: 286661 - DNA, 50 bp, Artificial
  Synthetic oligonucleotide
cgcgaagcagtgctaggcacacacgcgctgtagaagtacgccagtcccag

SEQ ID NO: 286662 - DNA, 50 bp, Artificial
  Synthetic oligonucleotide
cctgtgacagacccggtagagtggagcctagcgcacgttataccgcgcgg

SEQ ID NO: 286663 - DNA, 50 bp, Artificial
  Synthetic oligonucleotide
atttagcgttaagatggatcacaaaatacgctcgcgaacgtgcaggtaag

SEQ ID NO: 286664 - DNA, 50 bp, Artificial
  Synthetic oligonucleotide
acatatcggagggcccttggggcgtttcccgtcgcttccgcctccacttg

SEQ ID NO: 286665 - DNA, 50 bp, Artificial
  Synthetic oligonucleotide
acatagcgagcaagcacgccgcttctgagtagcccgactcccggcacgtg

SEQ ID NO: 286666 - DNA, 50 bp, Artificial
  Synthetic oligonucleotide
acatacgcgcgccaaccaagcaagtcgggaaggagaagccgacctgaggg

SEQ ID NO: 286667 - DNA, 50 bp, Artificial
  Synthetic oligonucleotide
acatacgccccaccgttccccacggaagggagaagcgaggacgctcgagt

SEQ ID NO: 286668 - DNA, 50 bp, Artificial
  Synthetic oligonucleotide
ggttcttacctcagaaatgggttggccatatacaggctttgcccggggaa

SEQ ID NO: 286669 - DNA, 50 bp, Artificial
  Synthetic oligonucleotide
acatacgaagtgctcgccacctcgggtccacgcgttcccacggataggaa

SEQ ID NO: 286670 - DNA, 50 bp, Artificial
  Synthetic oligonucleotide
attcgcacgtctcgttggcacagcgccagagcaaactagtccgccggcac

SEQ ID NO: 286671 - DNA, 56 bp, Artificial
  Synthetic oligonucleotide
ctgtaaggctgcgcccttcctcagcgccagcattgtgatttctcgggactgctccg

SEQ ID NO: 286672 - DNA, 50 bp, Artificial
  Synthetic oligonucleotide
gacatgtaggtttatacgcgtgcctgactgttacgcattgcaccaacccc

SEQ ID NO: 286673 - DNA, 50 bp, Artificial
  Synthetic oligonucleotide
ccgcagcacaaaagcgagtgtgggcggacctgtgcgagagcactgcgagt

SEQ ID NO: 286674 - DNA, 50 bp, Artificial
  Synthetic oligonucleotide
acagttgtcctggatcggagggcgtcgggagaattgcgccgcgtctagcg

SEQ ID NO: 286675 - DNA, 50 bp, Artificial
  Synthetic oligonucleotide
acagttgcctaccgccccttcggcccagtttgccatcccaattgacgcgg

SEQ ID NO: 286676 - DNA, 50 bp, Artificial
  Synthetic oligonucleotide
acagtgtcaggaagcggcttcgcggcccgtagcaaccccgcccttctgtg

SEQ ID NO: 286677 - DNA, 50 bp, Artificial
  Synthetic oligonucleotide
acagtggcccacggcgcagtacacacagcgagtcgaccaggtcaacggag

SEQ ID NO: 286678 - DNA, 50 bp, Artificial
  Synthetic oligonucleotide
cctgttagcacgaataccgcctcggcaggccccgggaagcactcgtctgt

SEQ ID NO: 286679 - DNA, 50 bp, Artificial
  Synthetic oligonucleotide
ggttgtcgccgtgtcggcagtgggggcctgctaacccgttaatcaactcg

SEQ ID NO: 286680 - DNA, 50 bp, Artificial
  Synthetic oligonucleotide
acagtgacgaaggggatggatgcaacgcctcctgcacactcggggagacg

SEQ ID NO: 286681 - DNA, 50 bp, Artificial
  Synthetic oligonucleotide
acagtctgcgcccgacatatccgcctcaaggtcgtctagatcgccagggc

SEQ ID NO: 286682 - DNA, 56 bp, Artificial
  Synthetic oligonucleotide
ccgacaggataccccggaacggcacaagcgaagccgttggttagtcactgcaacag

SEQ ID NO: 286683 - DNA, 50 bp, Artificial
  Synthetic oligonucleotide
cccatacgagtgaagcggccaacctatacgagtgagccgcgccccaggaa

SEQ ID NO: 286684 - DNA, 50 bp, Artificial
  Synthetic oligonucleotide
acagtctgccactccgtgttcgggaaggcacgcgggaggccggggtacat

SEQ ID NO: 286685 - DNA, 50 bp, Artificial
  Synthetic oligonucleotide
cccatacctccgtctcccgcctaaccactccgaggcagttacggccctgt

SEQ ID NO: 286686 - DNA, 50 bp, Artificial
  Synthetic oligonucleotide
acagtcaacgcctcgcttgctcggtgttcgacccaacatcggctgcgggt

SEQ ID NO: 286687 - DNA, 50 bp, Artificial
  Synthetic oligonucleotide
attctgtgttcctcggggctgcgtttaagggctgacacgggggcgagtgc

SEQ ID NO: 286688 - DNA, 50 bp, Artificial
  Synthetic oligonucleotide
ggtttgttcccttgcacagtcttcagtactgcctgcacaagcggtacgaa

SEQ ID NO: 286689 - DNA, 50 bp, Artificial
  Synthetic oligonucleotide
acaggtcgcaccaggcatcacctgcgagcaacgcgtcatggttgggttcg

SEQ ID NO: 286690 - DNA, 50 bp, Artificial
  Synthetic oligonucleotide
cgcctttcgcgagggacaccttcccaaaacctgggggaacgtattcccga

SEQ ID NO: 286691 - DNA, 50 bp, Artificial
  Synthetic oligonucleotide
acagagagtggccatagcttccagtggacacacgcggcgttagcggggaa

SEQ ID NO: 286692 - DNA, 50 bp, Artificial
  Synthetic oligonucleotide
acagactgggtaacgagggggctaacgcgctgatgggctgctaggcggac

SEQ ID NO: 286693 - DNA, 56 bp, Artificial
  Synthetic oligonucleotide
cagcagctctccgtgtcacagatggtgctttggttgtagtagattgcatagaaggc

SEQ ID NO: 286694 - DNA, 50 bp, Artificial
  Synthetic oligonucleotide
acagactggcgggcacagacatgtgtcgcatcggcatgtgagcgctctgt

SEQ ID NO: 286695 - DNA, 50 bp, Artificial
  Synthetic oligonucleotide
acagacgcgtcttggtgccagctttgtccgccgggtcacttttgcgacac

SEQ ID NO: 286696 - DNA, 50 bp, Artificial
  Synthetic oligonucleotide
gtagcaacccttttgttaaaatagcgataccgtgggctgagaggaatgac

SEQ ID NO: 286697 - DNA, 50 bp, Artificial
  Synthetic oligonucleotide
gaatgtacgtgtgcaccgcgtttcgcagcgcccggactgctagccaaata

SEQ ID NO: 286698 - DNA, 50 bp, Artificial
  Synthetic oligonucleotide
acagacatatgggtttgtcggggcagacttggctcaattatgcgtagaag

SEQ ID NO: 286699 - DNA, 50 bp, Artificial
  Synthetic oligonucleotide
gaatggtggtcgctccgattggcggttaccagactagcgacttccgcgct

SEQ ID NO: 286700 - DNA, 50 bp, Artificial
  Synthetic oligonucleotide
acagacagttggaggcccaaggggcgtctctttccgagaacgcgttcccg

SEQ ID NO: 286701 - DNA, 50 bp, Artificial
  Synthetic oligonucleotide
caaaacgcctgtgttcgggtaccaacgaatgccttcgcctgtccgcgggg

SEQ ID NO: 286702 - DNA, 50 bp, Artificial
  Synthetic oligonucleotide
acagaagagccgccacgagggagcacaaagtcgctgttgaacgccccagt

SEQ ID NO: 286703 - DNA, 50 bp, Artificial
  Synthetic oligonucleotide
cgcgagggaatctgcaaacaccgcctgtggattgggagccccaacgccta

SEQ ID NO: 286704 - DNA, 56 bp, Artificial
  Synthetic oligonucleotide
cccattttgagggccacgagtgctgaaggaaatacgcacgacagtggggtgacgcc

SEQ ID NO: 286705 - DNA, 50 bp, Artificial
  Synthetic oligonucleotide
ccgccaatatggttcgcgcagatcggaaccgcccgttaccgactacggcg

SEQ ID NO: 286706 - DNA, 50 bp, Artificial
  Synthetic oligonucleotide
acagaacccgtcgcgggtggatcagactgagcagcggggccgtttgaaag

SEQ ID NO: 286707 - DNA, 50 bp, Artificial
  Synthetic oligonucleotide
caaaccaacgctgctgtgggcacccgtgtgacaggacggcacaccatgaa

SEQ ID NO: 286708 - DNA, 50 bp, Artificial
  Synthetic oligonucleotide
acactggtcccccgagtcccactatgcgcgtatggtatcccagctgggct

SEQ ID NO: 286709 - DNA, 50 bp, Artificial
  Synthetic oligonucleotide
acactgggggctacgagatcagctacaggcagctcgcctctttgggcccc

SEQ ID NO: 286710 - DNA, 50 bp, Artificial
  Synthetic oligonucleotide
caaacccgactgaccagtcaccccgtttgcgcaagttcgcacggcggaga

SEQ ID NO: 286711 - DNA, 50 bp, Artificial
  Synthetic oligonucleotide
acactgctggcagttcgagcgttgaccctgtgtcctgcgtccaccgacat

SEQ ID NO: 286712 - DNA, 50 bp, Artificial
  Synthetic oligonucleotide
cgcgatacggggaagcagcccaccaacgtccgccaatgaagcgcaccacg

SEQ ID NO: 286713 - DNA, 50 bp, Artificial
  Synthetic oligonucleotide
acactgctcgcctagggcgaaccgtccctaccgtcgacaatcaggggcca

SEQ ID NO: 286714 - DNA, 50 bp, Artificial
  Synthetic oligonucleotide
gtagggggtgcgccctttccataacagtccacgggggctacctggacaaa

SEQ ID NO: 286715 - DNA, 53 bp, Artificial
  Synthetic oligonucleotide
gctttttatttgtatcgtttcccttcttaaaacgatcgaaatgagttctccta

SEQ ID NO: 286716 - DNA, 56 bp, Artificial
  Synthetic oligonucleotide
ccagattacactattacgaatggggatataacatatcagcacacgtctattctaga

SEQ ID NO: 286717 - DNA, 50 bp, Artificial
  Synthetic oligonucleotide
gaatccagaggatgaacgtatctggggtacttacagatggcctgtacatc

SEQ ID NO: 286718 - DNA, 50 bp, Artificial
  Synthetic oligonucleotide
acactgagaggagttggcgcgaggtctctgtacccacggctgccggctca

SEQ ID NO: 286719 - DNA, 50 bp, Artificial
  Synthetic oligonucleotide
acagcgcggtgtggttatgctggggttcccccaaggattgttcttcgccc

SEQ ID NO: 286720 - DNA, 50 bp, Artificial
  Synthetic oligonucleotide
atttaggcacatgggtaaccattcgcatgccccgctgtgtcgccacgcat

SEQ ID NO: 286721 - DNA, 50 bp, Artificial
  Synthetic oligonucleotide
acagcgcctgcgtgcatctctaaacggaggaaagctccccacacgcctgt

SEQ ID NO: 286722 - DNA, 50 bp, Artificial
  Synthetic oligonucleotide
acagcgacggggtctgtgcacgaggcgtagagggacggtatgggagagga

SEQ ID NO: 286723 - DNA, 50 bp, Artificial
  Synthetic oligonucleotide
acagccttgcgagagcgcacgggactgcgctgtggaatgagcaggacgtc

SEQ ID NO: 286724 - DNA, 50 bp, Artificial
  Synthetic oligonucleotide
acagccgcggcggaattctggctagccccgagcatgagggacgaagcgag

SEQ ID NO: 286725 - DNA, 50 bp, Artificial
  Synthetic oligonucleotide
acagcccggagaactttaggcacagccccagctcgcgagagccaaactga

SEQ ID NO: 286726 - DNA, 50 bp, Artificial
  Synthetic oligonucleotide
acagcatgcctgggttaccccagccgccgtcacagtcaagcgagtatccg

SEQ ID NO: 286727 - DNA, 56 bp, Artificial
  Synthetic oligonucleotide
agctctggcttagttgagagctgcgagagaaggcggtgacaagagaactgactagt

SEQ ID NO: 286728 - DNA, 50 bp, Artificial
  Synthetic oligonucleotide
acagcagtgcgcatcccacactagtgcaccagccgagcactccatcgctt

SEQ ID NO: 286729 - DNA, 50 bp, Artificial
  Synthetic oligonucleotide
acagcactcgactcaccgctccatttccgcgtcaggggagaagccacgcg

SEQ ID NO: 286730 - DNA, 50 bp, Artificial
  Synthetic oligonucleotide
cctgtagtgcacaacgcctactgctgcgactacgctcctgcctgtcccac

SEQ ID NO: 286731 - DNA, 50 bp, Artificial
  Synthetic oligonucleotide
atttggacggagcacccagggggagagtgagaacgcgaccgattgctcgt

SEQ ID NO: 286732 - DNA, 50 bp, Artificial
  Synthetic oligonucleotide
attttaatgtggacagaggcaagtattagtgcatgtggatatatcccggt

SEQ ID NO: 286733 - DNA, 50 bp, Artificial
  Synthetic oligonucleotide
acagcacacagccgagacggtccccctagtctaccgcacactggcagagc

SEQ ID NO: 286734 - DNA, 50 bp, Artificial
  Synthetic oligonucleotide
attttcggcccctccgcgcacacaagactccgcctccctaacctccgctt

SEQ ID NO: 286735 - DNA, 50 bp, Artificial
  Synthetic oligonucleotide
acagatcgaacacgcgagagggtccggctaggggcgtcgctgtgagtgcg

SEQ ID NO: 286736 - DNA, 50 bp, Artificial
  Synthetic oligonucleotide
ccgcatggttgagacgcgtgcggcggacactgagaagttgacggctctcg

SEQ ID NO: 286737 - DNA, 50 bp, Artificial
  Synthetic oligonucleotide
gtactgttatcactaatataactgattgttatactactaattactacttc

SEQ ID NO: 286738 - DNA, 56 bp, Artificial
  Synthetic oligonucleotide
attctagctattatcgttgtcgtacccaattttattgagtcgaccttaaatatcac

SEQ ID NO: 286739 - DNA, 50 bp, Artificial
  Synthetic oligonucleotide
acagagtggcatactgcacgggctctttgctagttcgcgccgccgaatga

SEQ ID NO: 286740 - DNA, 50 bp, Artificial
  Synthetic oligonucleotide
gaattagcacgatttgaacaattttctagtaatgctgatgctgttactac

SEQ ID NO: 286741 - DNA, 50 bp, Artificial
  Synthetic oligonucleotide
acagaggtgcgtcgctcacagaacgttccccagatccgctagccctccct

SEQ ID NO: 286742 - DNA, 50 bp, Artificial
  Synthetic oligonucleotide
acagagggggtgaaacgactcgaagtgcggagggcgggggaacccaaaga

SEQ ID NO: 286743 - DNA, 50 bp, Artificial
  Synthetic oligonucleotide
acagaggctctgggggcgacacagagtgaactgcagacggtgcaacggca

SEQ ID NO: 286744 - DNA, 50 bp, Artificial
  Synthetic oligonucleotide
attttgggtcgccccttctgcgtgcatttgctccgtagggagaagcgcct

SEQ ID NO: 286745 - DNA, 50 bp, Artificial
  Synthetic oligonucleotide
cttggcgcttggttgagaagctattggcgcggagctaccatctgtttgga

SEQ ID NO: 286746 - DNA, 50 bp, Artificial
  Synthetic oligonucleotide
aatctcgcgagtgacgagtggggccttttccgcagtctacaccgggcaca

SEQ ID NO: 286747 - DNA, 50 bp, Artificial
  Synthetic oligonucleotide
gtgccgtggatgcgttccccacagcccactgccgctggtagccttgcatc

SEQ ID NO: 286748 - DNA, 50 bp, Artificial
  Synthetic oligonucleotide
aatctcctcgtccaccggacgttataggcggtcggcggccagtgagtgtt

SEQ ID NO: 286749 - DNA, 56 bp, Artificial
  Synthetic oligonucleotide
tagggactgagccaaaggcaagattcggggagacgtcctcctgacggttcaagaga

SEQ ID NO: 286750 - DNA, 50 bp, Artificial
  Synthetic oligonucleotide
caagtgcagcggtgctcatgactctgatgtggggtcggggccatcagcgg

SEQ ID NO: 286751 - DNA, 50 bp, Artificial
  Synthetic oligonucleotide
aatcgttccaacgacgatcgaacgcagcggccctcccctttgcgacccag

SEQ ID NO: 286752 - DNA, 50 bp, Artificial
  Synthetic oligonucleotide
aatcgtcaacagcgtaccgagagggggtgacgtagcgccgcgcatgaccg

SEQ ID NO: 286753 - DNA, 50 bp, Artificial
  Synthetic oligonucleotide
aatcgggcgagcgtagttgtgcctgcgtccccattgccacggggtgcatc

SEQ ID NO: 286754 - DNA, 50 bp, Artificial
  Synthetic oligonucleotide
cgcgtggatgagcgttggcgtcaagcccatggcaggcgagtacctgtcag

SEQ ID NO: 286755 - DNA, 50 bp, Artificial
  Synthetic oligonucleotide
aatcgggacgcacctccgtttcactcccggttgtacgtgccaacacacct

SEQ ID NO: 286756 - DNA, 50 bp, Artificial
  Synthetic oligonucleotide
aatcggctgccgttctcggtttcgttgacgggtggagagccgtcgatagc

SEQ ID NO: 286757 - DNA, 50 bp, Artificial
  Synthetic oligonucleotide
aatcgcttcaccccacaagccaccgggtacacggtaaggtcgctccaagg

SEQ ID NO: 286758 - DNA, 50 bp, Artificial
  Synthetic oligonucleotide
caagtgtgtgcgtacgactcatcggggtgacacgaggggaagcgcgtctg

SEQ ID NO: 286759 - DNA, 50 bp, Artificial
  Synthetic oligonucleotide
aatcgcgtgtcgggcgcaagaccccaccgtcaagaaaggaggatgcgcga

SEQ ID NO: 286760 - DNA, 56 bp, Artificial
  Synthetic oligonucleotide
gatgattgtgaccataagaaatcacgtaaccaaccattaattgtattagccgactg

SEQ ID NO: 286761 - DNA, 50 bp, Artificial
  Synthetic oligonucleotide
ccatgtccccatccgatggctccaccactgacgtgcctgcagcccacaac

SEQ ID NO: 286762 - DNA, 50 bp, Artificial
  Synthetic oligonucleotide
aatcgcgaagggggagaacggtcagagggaacacagaggcggttgcgaac

SEQ ID NO: 286763 - DNA, 50 bp, Artificial
  Synthetic oligonucleotide
aatcgcaggcgtgggcgtgtggcctgacttcgcaggctaaagggtgacgt

SEQ ID NO: 286764 - DNA, 50 bp, Artificial
  Synthetic oligonucleotide
aatcgactgagccatgacgttgcgctgtttccgcagacgacgcccctgca

SEQ ID NO: 286765 - DNA, 50 bp, Artificial
  Synthetic oligonucleotide
caataatagagcctacgtcctgtgaagacgagctcacacgtgtaacatca

SEQ ID NO: 286766 - DNA, 50 bp, Artificial
  Synthetic oligonucleotide
aatccgctgtgacgggattgtccgggtgaccgcaggcaggccacgagacg

SEQ ID NO: 286767 - DNA, 50 bp, Artificial
  Synthetic oligonucleotide
aatccgcgacagtggaagtgccctcgggggaatgaccccttcgaccctcg

SEQ ID NO: 286768 - DNA, 50 bp, Artificial
  Synthetic oligonucleotide
aatccgacctactcccatagacccacccgtcgggccacacacgtgaccga

SEQ ID NO: 286769 - DNA, 50 bp, Artificial
  Synthetic oligonucleotide
caaggtaacgcaggccgctcaacaaagactccgcgcaacctaaggcgcgt

SEQ ID NO: 286770 - DNA, 50 bp, Artificial
  Synthetic oligonucleotide
aatgcgctggccttaccgacgcttgcacaactagtcgcttcccccggagc

SEQ ID NO: 286771 - DNA, 54 bp, Artificial
  Synthetic oligonucleotide
ctcacctaggcaaagtaagacttaagttagtaatagtaggacgacagttagtta

SEQ ID NO: 286772 - DNA, 50 bp, Artificial
  Synthetic oligonucleotide
caaggttgtagcagcgggctcatcaacactgtcctccagccgaacccgca

SEQ ID NO: 286773 - DNA, 50 bp, Artificial
  Synthetic oligonucleotide
aatgcgcccggggtagggagttcgttcgctccttatggaagggcacacgt

SEQ ID NO: 286774 - DNA, 50 bp, Artificial
  Synthetic oligonucleotide
aatgcgccacgtgaggcggctttcgctaccagcaagcctcaacagccctc

SEQ ID NO: 286775 - DNA, 50 bp, Artificial
  Synthetic oligonucleotide
aatgccgtgaggcctccatccgccggctagcggtcgtgcgtcccgatttg

SEQ ID NO: 286776 - DNA, 50 bp, Artificial
  Synthetic oligonucleotide
aatgccgtcgtgcttcccgagtgcacgcagtcacgctcaagcactaagca

SEQ ID NO: 286777 - DNA, 50 bp, Artificial
  Synthetic oligonucleotide
cttgttgagcctatcgtctaatggataggacagaaaccttctaagtttct

SEQ ID NO: 286778 - DNA, 50 bp, Artificial
  Synthetic oligonucleotide
cgcgtcctgccgcctagagggaggggtaatagcagccgcaacgtctcaca

SEQ ID NO: 286779 - DNA, 50 bp, Artificial
  Synthetic oligonucleotide
ccgcgtcttgtgcggctgtgcgtgaagtcataccattaccggcgcagcgt

SEQ ID NO: 286780 - DNA, 50 bp, Artificial
  Synthetic oligonucleotide
aatgccccgaattcgaagtccatcccccaagctgtggcgcgagagtcagc

SEQ ID NO: 286781 - DNA, 50 bp, Artificial
  Synthetic oligonucleotide
aatgccccacgatggtaacagccacactgtacaccacgcgctgtgccccg

SEQ ID NO: 286782 - DNA, 56 bp, Artificial
  Synthetic oligonucleotide
gcgcacccacgtatacgcacacgcgcaaacggtgtccctgctacccttgcattgcc

SEQ ID NO: 286783 - DNA, 50 bp, Artificial
  Synthetic oligonucleotide
aatgccatcgtccaacgcatcagacccgcctatgccagacggtaggctcc

SEQ ID NO: 286784 - DNA, 50 bp, Artificial
  Synthetic oligonucleotide
aatgccaccccttatgccgtgccgcacacccatctgtgctgagctcgtaa

SEQ ID NO: 286785 - DNA, 50 bp, Artificial
  Synthetic oligonucleotide
aatgccaatcggagtagcaccaacgcggggatgttcctttcgccagccga

SEQ ID NO: 286786 - DNA, 50 bp, Artificial
  Synthetic oligonucleotide
aatgcacgcacgagacgcccctccgtgtagccgcagtcgcaggctcgggc

SEQ ID NO: 286787 - DNA, 50 bp, Artificial
  Synthetic oligonucleotide
ccgcgtgatatgcacacatccgcatgagctgtggcgctgacaagcttcga

SEQ ID NO: 286788 - DNA, 50 bp, Artificial
  Synthetic oligonucleotide
aatgagggtgcgtctgctaatcacgcaggccgtgtagtcactgcgcttat

SEQ ID NO: 286789 - DNA, 50 bp, Artificial
  Synthetic oligonucleotide
ccgcgtgggtctcctccgcgttcaacattaccgccgccgttgtgggcacc

SEQ ID NO: 286790 - DNA, 50 bp, Artificial
  Synthetic oligonucleotide
aatgaggacggccaattgaagccgcatgcacggaaagtgacgcggtgaga

SEQ ID NO: 286791 - DNA, 50 bp, Artificial
  Synthetic oligonucleotide
aatgagcggcgtctggtcaaaggggcactctaacgtgggcactacacccg

SEQ ID NO: 286792 - DNA, 50 bp, Artificial
  Synthetic oligonucleotide
caagtctcgtcctgagaactcactcgtcgacgcccgcactgcccaaacga

SEQ ID NO: 286793 - DNA, 56 bp, Artificial
  Synthetic oligonucleotide
tagggcggttgggctagaccctccgagagctttcgagctgagcttatgcaagtgta

SEQ ID NO: 286794 - DNA, 50 bp, Artificial
  Synthetic oligonucleotide
cgcgtctggtttgcgaccgaaacccttagcggcatagcgcaaaacccgcc

SEQ ID NO: 286795 - DNA, 50 bp, Artificial
  Synthetic oligonucleotide
aatctgcgcagacggcaaaatgtcgactcccttgaggcgctgctgtgtgg

SEQ ID NO: 286796 - DNA, 50 bp, Artificial
  Synthetic oligonucleotide
gtgggccgataaggaaacgggaagagagacgcgggcacgatgttgggaga

SEQ ID NO: 286797 - DNA, 50 bp, Artificial
  Synthetic oligonucleotide
aataagcaaccgagcaaccgcccccagtgccgcatctagtgtcgttcgct

SEQ ID NO: 286798 - DNA, 50 bp, Artificial
  Synthetic oligonucleotide
caatgcgcgagcgaaccaactacggatcactggctagtcgccgtcagcgg

SEQ ID NO: 286799 - DNA, 50 bp, Artificial
  Synthetic oligonucleotide
aataaaccaagacgacggatgactttaacacgtgaacctctataacgagc

SEQ ID NO: 286800 - DNA, 50 bp, Artificial
  Synthetic oligonucleotide
caatgggaacggctgtgaggcgacctgtagagccggagggtggatcgtgt

SEQ ID NO: 286801 - DNA, 50 bp, Artificial
  Synthetic oligonucleotide
ccatctcgaaggggcgtgcagcagtgctggcgggaagttacgaaggtagg

SEQ ID NO: 286802 - DNA, 50 bp, Artificial
  Synthetic oligonucleotide
aagttgagctcccgagagacaacccctccccgccaaaagtgccgacgaga

SEQ ID NO: 286803 - DNA, 50 bp, Artificial
  Synthetic oligonucleotide
ccgctgacggcgactagccagtgatccgtagttggttcgctcgcgcattg

SEQ ID NO: 286804 - DNA, 55 bp, Artificial
  Synthetic oligonucleotide
tacttgaccgtctggaagtttataaggatagcccgaagctactctattaccggaa

SEQ ID NO: 286805 - DNA, 50 bp, Artificial
  Synthetic oligonucleotide
caattcagactacgccctacagaagtgggacgcggaccggagggcagccc

SEQ ID NO: 286806 - DNA, 50 bp, Artificial
  Synthetic oligonucleotide
aagttccgcagaagacgagagaccacccaggcgagaagcggtcccacacg

SEQ ID NO: 286807 - DNA, 50 bp, Artificial
  Synthetic oligonucleotide
gtggtgcgtgctccctcttcttacctcgtacttcttctcgcacacaacga

SEQ ID NO: 286808 - DNA, 50 bp, Artificial
  Synthetic oligonucleotide
aagttactcgtccccgatcggtcagggtgggttgccttcgcgttgcttcg

SEQ ID NO: 286809 - DNA, 50 bp, Artificial
  Synthetic oligonucleotide
cgctacatccacgcagagtcttgcagtcaacgcggaggtccgtcactccg

SEQ ID NO: 286810 - DNA, 50 bp, Artificial
  Synthetic oligonucleotide
aagttaaccttgaacgggaagtttgtgccgcgagattcggccgcgggtgc

SEQ ID NO: 286811 - DNA, 50 bp, Artificial
  Synthetic oligonucleotide
cttccgcacaccttagcgagttccggtgtatctgattccgtactgcgtca

SEQ ID NO: 286812 - DNA, 50 bp, Artificial
  Synthetic oligonucleotide
aagttaaacctcgccaagaagcaccccaggagggagggcagacactgccg

SEQ ID NO: 286813 - DNA, 50 bp, Artificial
  Synthetic oligonucleotide
aagtgtggtgggtgtagcagcagtggggcactcccaggtgactgccccga

SEQ ID NO: 286814 - DNA, 50 bp, Artificial
  Synthetic oligonucleotide
aagtgtggccgacaagccgtcgagtgtaaatgggtgccgcgctaggtcac

SEQ ID NO: 286815 - DNA, 56 bp, Artificial
  Synthetic oligonucleotide
gccagtcatgtaagagccaggaagagcagtcccagtcccacaccccaacttggtct

SEQ ID NO: 286816 - DNA, 50 bp, Artificial
  Synthetic oligonucleotide
ccatcgtcagggcatgctgtgaaggcctcgattccattgcagcgcgtctc

SEQ ID NO: 286817 - DNA, 50 bp, Artificial
  Synthetic oligonucleotide
aagtgtgcacttcgccgtgtgcgctgcatttctggctagccgtccagccc

SEQ ID NO: 286818 - DNA, 50 bp, Artificial
  Synthetic oligonucleotide
aagtggggaaggtggccgtacacccgtaacagcagccaacgcgacctact

SEQ ID NO: 286819 - DNA, 50 bp, Artificial
  Synthetic oligonucleotide
aagtgggacggtgcgtgtgcaatcgagagagagcagccatgggtacgcgc

SEQ ID NO: 286820 - DNA, 50 bp, Artificial
  Synthetic oligonucleotide
aagtggccgacagaaccagtcccaacgcttccctcggttcctggacgagt

SEQ ID NO: 286821 - DNA, 50 bp, Artificial
  Synthetic oligonucleotide
gtgtagttttgattaaactcaatggtaccagtaatttgaccatgtgtgct

SEQ ID NO: 286822 - DNA, 50 bp, Artificial
  Synthetic oligonucleotide
gtgtatggagttcacatggctcgcggaatctgttatacccacgagaattc

SEQ ID NO: 286823 - DNA, 50 bp, Artificial
  Synthetic oligonucleotide
aatcccgggtgcgcatgcaacggaacttaccagcggcagaacttcccgcg

SEQ ID NO: 286824 - DNA, 50 bp, Artificial
  Synthetic oligonucleotide
ccatgcgtgggttgctgggggtggacagctagcgatggactcctctgcct

SEQ ID NO: 286825 - DNA, 50 bp, Artificial
  Synthetic oligonucleotide
gtgctggatcggatgccaactcggtgttctaccttgtctgcgaattcaag

SEQ ID NO: 286826 - DNA, 58 bp, Artificial
  Synthetic oligonucleotide
gtttactatcgaatgaaacaatgtgttccaccgctagtgtttgcttctaacattccat

SEQ ID NO: 286827 - DNA, 56 bp, Artificial
  Synthetic oligonucleotide
tactgcccgattttctcctactatgtcgcgttatggtgcatacttaaatcgtatta

SEQ ID NO: 286828 - DNA, 50 bp, Artificial
  Synthetic oligonucleotide
aatccacgaacatacacgaagggtgctgcacgcgcacacaggcgcctaca

SEQ ID NO: 286829 - DNA, 50 bp, Artificial
  Synthetic oligonucleotide
gtggaatcccctaggacactgtcgcgccgaaggcgcccctatctccctag

SEQ ID NO: 286830 - DNA, 50 bp, Artificial
  Synthetic oligonucleotide
gtggacggtttcctaattcagggctagaagctaataccattgcatttcgg

SEQ ID NO: 286831 - DNA, 50 bp, Artificial
  Synthetic oligonucleotide
caatccggagcctgtgggatggtctgcgccgcaaatcgacacagaagccc

SEQ ID NO: 286832 - DNA, 50 bp, Artificial
  Synthetic oligonucleotide
aatccaatgagccacgcactagctcgcgctgcccctacctcgcaatctcg

SEQ ID NO: 286833 - DNA, 50 bp, Artificial
  Synthetic oligonucleotide
ccgctaatggaggcccgagggtccctgccggccactcgcacagtgtgctg

SEQ ID NO: 286834 - DNA, 50 bp, Artificial
  Synthetic oligonucleotide
aatcattaaacacctcctagagacgagaccaagtggcggatcgattgaca

SEQ ID NO: 286835 - DNA, 50 bp, Artificial
  Synthetic oligonucleotide
aatcactggcggctgtagcgtcagtcatccgtgtctcgcacgtgcttgct

SEQ ID NO: 286836 - DNA, 50 bp, Artificial
  Synthetic oligonucleotide
aatcaagcgctgcagttcgtgtgcctggggcattcgttcgcacacaaccg

SEQ ID NO: 286837 - DNA, 50 bp, Artificial
  Synthetic oligonucleotide
cttctgagcgccccacgtgtatcgtcgcactccctgccggtacacacagc

SEQ ID NO: 286838 - DNA, 56 bp, Artificial
  Synthetic oligonucleotide
gtccgtgtgggtcagacattaaacctcgcattcctacaagttgtctaacttgcgac

SEQ ID NO: 286839 - DNA, 50 bp, Artificial
  Synthetic oligonucleotide
aatcaaatagccgccgctggacaaccttggagcttgtccgcatgcgtccc

SEQ ID NO: 286840 - DNA, 50 bp, Artificial
  Synthetic oligonucleotide
aatatgagacgggacgtcgggtacctgcactttgcctggccagatcgact

SEQ ID NO: 286841 - DNA, 50 bp, Artificial
  Synthetic oligonucleotide
caatcgtgccaacgtcgcacctgacacggcttcgggtgggcatggtagac

SEQ ID NO: 286842 - DNA, 50 bp, Artificial
  Synthetic oligonucleotide
aataggggcgagagcccgagtttcttgtttcgtcacgttccccaggcgct

SEQ ID NO: 286843 - DNA, 50 bp, Artificial
  Synthetic oligonucleotide
gtggcccatcccacatggtccgcctagcgttgccaacattgcatcgccag

SEQ ID NO: 286844 - DNA, 50 bp, Artificial
  Synthetic oligonucleotide
cttctattctagtttaagccctattatagaaatcggatcagtatggccac

SEQ ID NO: 286845 - DNA, 50 bp, Artificial
  Synthetic oligonucleotide
aatagggcgcagctcgcagcatcgaccctcgccagagtgccacaccaccg

SEQ ID NO: 286846 - DNA, 50 bp, Artificial
  Synthetic oligonucleotide
aatagcgcccttggcaagacggagactgtccgggggaactagctaccccg

SEQ ID NO: 286847 - DNA, 50 bp, Artificial
  Synthetic oligonucleotide
aatacgcgacagcagtgcacccgctccagtgacggagcgcattacctagc

SEQ ID NO: 286848 - DNA, 50 bp, Artificial
  Synthetic oligonucleotide
acaacgcagaatgccttaccggccatcgccccagctcgcagcgccacccc

SEQ ID NO: 286849 - DNA, 56 bp, Artificial
  Synthetic oligonucleotide
caggccactcaattagtaggtcaaaagaaccattagacttattcttgaatttagcg

SEQ ID NO: 286850 - DNA, 50 bp, Artificial
  Synthetic oligonucleotide
acaacgcaagccttgcacacagcctcttgtagtgcgcatcggctaggggg

SEQ ID NO: 286851 - DNA, 50 bp, Artificial
  Synthetic oligonucleotide
acaaccgcttctcgtggtgacagggccaggcgcctacgacgctggggagt

SEQ ID NO: 286852 - DNA, 50 bp, Artificial
  Synthetic oligonucleotide
acaaccgcgaaatcccgtttggctacttccccggtgagtggtcgccggtc

SEQ ID NO: 286853 - DNA, 50 bp, Artificial
  Synthetic oligonucleotide
acaaccgcctgtattcgccccggatgccctgtaaaggggaccgtcagcca

SEQ ID NO: 286854 - DNA, 50 bp, Artificial
  Synthetic oligonucleotide
acaacccgtcgttgggacaagtgcacggcatggtcgcccgatttggtctg

SEQ ID NO: 286855 - DNA, 50 bp, Artificial
  Synthetic oligonucleotide
acaaccccaaccgcgaacaagtcgtacatcccgctcagctgcggttcgca

SEQ ID NO: 286856 - DNA, 50 bp, Artificial
  Synthetic oligonucleotide
acaaccagttccgcacacagtgacaccgggaagatgcaacgccacgggag

SEQ ID NO: 286857 - DNA, 50 bp, Artificial
  Synthetic oligonucleotide
acaacagtgcgtgccttcatggcggggcgtgtgttagtgccgcgtttgtt

SEQ ID NO: 286858 - DNA, 50 bp, Artificial
  Synthetic oligonucleotide
acaacaggtgtgcgtgtcgagtggccaccaccccggagtagaccccatat

SEQ ID NO: 286859 - DNA, 50 bp, Artificial
  Synthetic oligonucleotide
gaaactgctgctccgttacttcgtctagcttcccctcccgcagctgggct

SEQ ID NO: 286860 - DNA, 52 bp, Artificial
  Synthetic oligonucleotide
agcgacccacaggaaactagcctctccccaccgctagggtagggtccggtat

SEQ ID NO: 286861 - DNA, 50 bp, Artificial
  Synthetic oligonucleotide
acaacagccgcacgcgccttggggtatgcagtcgtgctcccctcaagaca

SEQ ID NO: 286862 - DNA, 50 bp, Artificial
  Synthetic oligonucleotide
gtcgttggccgactatacgggagaggggcgaacatgcactgttcgtgcgc

SEQ ID NO: 286863 - DNA, 50 bp, Artificial
  Synthetic oligonucleotide
acaaatgccgcacgcacacacgcgagttgctgagacgcgttcccccacgg

SEQ ID NO: 286864 - DNA, 50 bp, Artificial
  Synthetic oligonucleotide
caagacgacaaggcaaccgcggcaagtatagcgcgcaaggtgccacatgg

SEQ ID NO: 286865 - DNA, 50 bp, Artificial
  Synthetic oligonucleotide
caagatgacaatcgtgccaacgtcgcacctgacacggcttcgggtgggca

SEQ ID NO: 286866 - DNA, 50 bp, Artificial
  Synthetic oligonucleotide
acaaaccaatggaaatgcaaccatttcttgatctttttttaagaattctc

SEQ ID NO: 286867 - DNA, 50 bp, Artificial
  Synthetic oligonucleotide
acaaaaacagcggttgtgcgtagacccgcagcacaccagtggcgagcgca

SEQ ID NO: 286868 - DNA, 50 bp, Artificial
  Synthetic oligonucleotide
aattttgtggagcatgtctgtgcaggtactggggtgctgcgcgcatggga

SEQ ID NO: 286869 - DNA, 50 bp, Artificial
  Synthetic oligonucleotide
aatttgtctcctccgatggccgcccctgaactggggaagcattggctgta

SEQ ID NO: 286870 - DNA, 50 bp, Artificial
  Synthetic oligonucleotide
ccgcggtctcttcgcacagccaatgcaacgaacgcgtggcatgcaaaata

SEQ ID NO: 286871 - DNA, 54 bp, Artificial
  Synthetic oligonucleotide
agggagcccctttcagggaggatacgggtggccgtgtgagcaagcaccgtaacg

SEQ ID NO: 286872 - DNA, 50 bp, Artificial
  Synthetic oligonucleotide
aattgttgctacccctttaagcggtgccattggggccctctcccctgcac

SEQ ID NO: 286873 - DNA, 50 bp, Artificial
  Synthetic oligonucleotide
caagcacgacaggagtgcacagctcgggaggcaaatgtgcgcgcgactgc

SEQ ID NO: 286874 - DNA, 50 bp, Artificial
  Synthetic oligonucleotide
cctgattacgctgactatataacttatctgaacacaatgtgttctattgg

SEQ ID NO: 286875 - DNA, 50 bp, Artificial
  Synthetic oligonucleotide
aattggaagagcctcatgtcaccccactcggtgcattggccggcgtctga

SEQ ID NO: 286876 - DNA, 50 bp, Artificial
  Synthetic oligonucleotide
cccaagtacccggcttggaagtacgcttcatgggaccgccaccagggtag

SEQ ID NO: 286877 - DNA, 50 bp, Artificial
  Synthetic oligonucleotide
acaatggccgcaactgccaccatcgcaagaacgcgtgggccgttagtccg

SEQ ID NO: 286878 - DNA, 50 bp, Artificial
  Synthetic oligonucleotide
acaatctaaacctgtagagatgcatgcattgttaacatggtggtagcacc

SEQ ID NO: 286879 - DNA, 50 bp, Artificial
  Synthetic oligonucleotide
gaaatccaccgtggcagagcgaccgcacgagcataaggaggcgcctacgc

SEQ ID NO: 286880 - DNA, 50 bp, Artificial
  Synthetic oligonucleotide
gtcgaatcgcttcataggaggataagcttctggattctgtgacagtctcg

SEQ ID NO: 286881 - DNA, 50 bp, Artificial
  Synthetic oligonucleotide
gtcgacatggaacgagtcgcttgggtcgcttctgcggtgtaccgccttcg

SEQ ID NO: 286882 - DNA, 56 bp, Artificial
  Synthetic oligonucleotide
ctggcgtagcgcgttacagcgtttattcacctgagcgccttaggtcgctttgctgg

SEQ ID NO: 286883 - DNA, 50 bp, Artificial
  Synthetic oligonucleotide
ccgcggagtaggcttacccgctgttgccctcatagggagcggcctcatgg

SEQ ID NO: 286884 - DNA, 50 bp, Artificial
  Synthetic oligonucleotide
acaagtgaggacgacccctaaggaaaagagtgcgcatcttggatctactc

SEQ ID NO: 286885 - DNA, 50 bp, Artificial
  Synthetic oligonucleotide
acaagtatgcagcgaggtgggaccctgccgtaagcgcccgcaacatccaa

SEQ ID NO: 286886 - DNA, 50 bp, Artificial
  Synthetic oligonucleotide
cctgcatccgtacgaagtgagccggcaccgctccaactttcacgtcagcg

SEQ ID NO: 286887 - DNA, 50 bp, Artificial
  Synthetic oligonucleotide
acaaggtgcttgcctcgtgccaggaagcgtgtgtgttgcctcaccgcgac

SEQ ID NO: 286888 - DNA, 50 bp, Artificial
  Synthetic oligonucleotide
acaaggggaaagggatagaccatgttgcgtcctttgcgccgggtagggcg

SEQ ID NO: 286889 - DNA, 50 bp, Artificial
  Synthetic oligonucleotide
cccaagcgcgtgtacgccgtcaggatctagggggactgggccaagtgagg

SEQ ID NO: 286890 - DNA, 50 bp, Artificial
  Synthetic oligonucleotide
acaagccgcgacactccgagagacgagcttgggcggtggagcacctgcga

SEQ ID NO: 286891 - DNA, 50 bp, Artificial
  Synthetic oligonucleotide
acaagccaccggtttcgctcacacatacccacgtacaatggcggcgagga

SEQ ID NO: 286892 - DNA, 50 bp, Artificial
  Synthetic oligonucleotide
acaagacaggctgtagacggctggtaatcccgcagccccgtcgtcttccg

SEQ ID NO: 286893 - DNA, 56 bp, Artificial
  Synthetic oligonucleotide
gaaactgggtaagaatacattcattatttatcaaggccatcaaggtaaagcgtctc

SEQ ID NO: 286894 - DNA, 50 bp, Artificial
  Synthetic oligonucleotide
acaactcttaatctggagggtactcaggtctccggcacactgcccccggg

SEQ ID NO: 286895 - DNA, 50 bp, Artificial
  Synthetic oligonucleotide
acaacgtatgggcaccctcagacggtctgccaaccacccaagtcacgccc

SEQ ID NO: 286896 - DNA, 50 bp, Artificial
  Synthetic oligonucleotide
acaacgggtcctcagctgcccccgagcaacgttagccttcacggctacgt

SEQ ID NO: 286897 - DNA, 50 bp, Artificial
  Synthetic oligonucleotide
acaacgctgtcggattccactccgcgaacccgcgcccactgtctatgcgc

SEQ ID NO: 286898 - DNA, 50 bp, Artificial
  Synthetic oligonucleotide
acaacgcaggcgaaactccgctctgccccggctcagtcatcggagcacgg

SEQ ID NO: 286899 - DNA, 50 bp, Artificial
  Synthetic oligonucleotide
gtcggcacgcgagcacagacacgtacttacgcgcgttgcagcccactctg

SEQ ID NO: 286900 - DNA, 50 bp, Artificial
  Synthetic oligonucleotide
gaaagaataggccacccagtcgacagcggatactccacaccgacgcaaaa

SEQ ID NO: 286901 - DNA, 50 bp, Artificial
  Synthetic oligonucleotide
caagcgtcgggagggagagtaagggccgaggggcggtgccatgccgtagt

SEQ ID NO: 286902 - DNA, 50 bp, Artificial
  Synthetic oligonucleotide
aatggtctcagccagtgtggggcacccgctgtcgagatgaatctccccac

SEQ ID NO: 286903 - DNA, 50 bp, Artificial
  Synthetic oligonucleotide
caaggcacctcacctcagcccgtttaggcgctgcttcgcgagtggtcagg

SEQ ID NO: 286904 - DNA, 56 bp, Artificial
  Synthetic oligonucleotide
ccccactgtcgtgcgtatttccttcagcactcgtggccctcaaaatggggagcgtt

SEQ ID NO: 286905 - DNA, 50 bp, Artificial
  Synthetic oligonucleotide
aatggggcaccacaggggagcaacatccactccgtcacctgttcgtgacc

SEQ ID NO: 286906 - DNA, 50 bp, Artificial
  Synthetic oligonucleotide
aatgggcggaggtgtgcaagtaggataggaaagctcgcgcactccggacg

SEQ ID NO: 286907 - DNA, 50 bp, Artificial
  Synthetic oligonucleotide
caaggcccaacgtagccagcggtcgccaaccgagccatctgcactgagct

SEQ ID NO: 286908 - DNA, 50 bp, Artificial
  Synthetic oligonucleotide
caaggccgcttctctgctgggctgttgcgcgtacgccacatcaacgtcgc

SEQ ID NO: 286909 - DNA, 50 bp, Artificial
  Synthetic oligonucleotide
aatggcttgcttcgtcacccctccgcacaacggaggtactccacggctcc

SEQ ID NO: 286910 - DNA, 50 bp, Artificial
  Synthetic oligonucleotide
caagggacgtgctccagtttctggacccgttccccacttgagcgcgagtt

SEQ ID NO: 286911 - DNA, 50 bp, Artificial
  Synthetic oligonucleotide
aatggcggtacgcactgcaaagcggtgtatcagtgcatgtgcacacgggg

SEQ ID NO: 286912 - DNA, 50 bp, Artificial
  Synthetic oligonucleotide
aatggcgcgaacgtcttgaaaaggagagcggcggtgggaagggtgggcac

SEQ ID NO: 286913 - DNA, 50 bp, Artificial
  Synthetic oligonucleotide
aatggcgagaccctccctcggtcctgaggatcctcgcgtgtgcgtctacg

SEQ ID NO: 286914 - DNA, 50 bp, Artificial
  Synthetic oligonucleotide
caaggggatgctcaactggccacacgatggggtgcccaacttgacaccca

SEQ ID NO: 286915 - DNA, 56 bp, Artificial
  Synthetic oligonucleotide
agcttgatctacagtagttgaattaatttgacctactcatttctttaacagaagac

SEQ ID NO: 286916 - DNA, 50 bp, Artificial
  Synthetic oligonucleotide
aatggccgttgccaccctaatagacccctcccccgttatgtgcgttgggg

SEQ ID NO: 286917 - DNA, 50 bp, Artificial
  Synthetic oligonucleotide
aatggccatcggcccgtaacaccgatccccctcctaccacgttcaggcct

SEQ ID NO: 286918 - DNA, 50 bp, Artificial
  Synthetic oligonucleotide
cctgaggagatagtacgtgcggtgccccgacagttgctgggttggccaaa

SEQ ID NO: 286919 - DNA, 50 bp, Artificial
  Synthetic oligonucleotide
gtgagaattagtttccaacgcatagtcatatcccgcatggctatatgaat

SEQ ID NO: 286920 - DNA, 50 bp, Artificial
  Synthetic oligonucleotide
aatggcaagggatgtcaggcacccagttagccgccctacctatcgtcgga

SEQ ID NO: 286921 - DNA, 50 bp, Artificial
  Synthetic oligonucleotide
aatggagccccaaggcagcaaccgattccctgcaactcggtaggtggaga

SEQ ID NO: 286922 - DNA, 50 bp, Artificial
  Synthetic oligonucleotide
aatggacgggcgggatgaacacgctctctacatgcgggcgcactgagtat

SEQ ID NO: 286923 - DNA, 50 bp, Artificial
  Synthetic oligonucleotide
aatggacactgactctgccccttgacgaaacagtggctcggacggaccgg

SEQ ID NO: 286924 - DNA, 50 bp, Artificial
  Synthetic oligonucleotide
aatgctgaatgggggcaggctccaggggccttagaacgacggacttgtct

SEQ ID NO: 286925 - DNA, 50 bp, Artificial
  Synthetic oligonucleotide
aatgctgaagcctgacgactgcgcctctctctcagtgcatggggcatgca

SEQ ID NO: 286926 - DNA, 56 bp, Artificial
  Synthetic oligonucleotide
gctccatgtgaaacatcaaggtagattccaaatccattcgtacaaattatacgatg

SEQ ID NO: 286927 - DNA, 50 bp, Artificial
  Synthetic oligonucleotide
aatgctccgctcagtgcaccgcaccgcgccgttagctgtgacgggtacga

SEQ ID NO: 286928 - DNA, 50 bp, Artificial
  Synthetic oligonucleotide
aatgcggttgcgagaggagtgtcgtggcgtcgccgttgtgaccacagcga

SEQ ID NO: 286929 - DNA, 50 bp, Artificial
  Synthetic oligonucleotide
gtctatttgtgtagcttgctagttgcgagtacaaagcgttcccagaccga

SEQ ID NO: 286930 - DNA, 50 bp, Artificial
  Synthetic oligonucleotide
aattgcgttccttggcacttgggcgcattccctgtggcgctgcttgttta

SEQ ID NO: 286931 - DNA, 50 bp, Artificial
  Synthetic oligonucleotide
aattgcggttgtgcgagtgggcgctagagtgcacccaacagtgcagacct

SEQ ID NO: 286932 - DNA, 50 bp, Artificial
  Synthetic oligonucleotide
cgcggtcactgacgcttcggtcgtcggtgctgagacaacccgtgatgcgt

SEQ ID NO: 286933 - DNA, 50 bp, Artificial
  Synthetic oligonucleotide
aattgagaggacgtgggttcccgcccccggacaaccactggtactgtgcg

SEQ ID NO: 286934 - DNA, 50 bp, Artificial
  Synthetic oligonucleotide
aattcggggtgttcgcccctgttcagcgcagcgttcgtgcttagcctctc

SEQ ID NO: 286935 - DNA, 50 bp, Artificial
  Synthetic oligonucleotide
aattcccgtgctctgctttgctcgtgtgcaccgcttggaggcgcttcaaa

SEQ ID NO: 286936 - DNA, 50 bp, Artificial
  Synthetic oligonucleotide
cctgatgtctaacgaaagctctgagtagcacaacgaagggctaagcatta

SEQ ID NO: 286937 - DNA, 59 bp, Artificial
  Synthetic oligonucleotide
ccaacggtgagtgaaaaaagacacaccccggagacactaatcgcatcctcaatcagaga

SEQ ID NO: 286938 - DNA, 55 bp, Artificial
  Synthetic oligonucleotide
acgtaacttaggcttagacaccagtgttccttcgttgcatatgtgtttcacgggg

SEQ ID NO: 286939 - DNA, 50 bp, Artificial
  Synthetic oligonucleotide
aattccccagcgtggctttgtgatgcagaggcggaagtgccgcccatatt

SEQ ID NO: 286940 - DNA, 50 bp, Artificial
  Synthetic oligonucleotide
gtctgggaactggcggtttgccacacttggcggagtgttggtcacatgcg

SEQ ID NO: 286941 - DNA, 50 bp, Artificial
  Synthetic oligonucleotide
cctgatgacgggagggggagggcacggcagtacgtgatatcccagtgccc

SEQ ID NO: 286942 - DNA, 50 bp, Artificial
  Synthetic oligonucleotide
aattacctcgacgcccaacacctccgtaggccgcaccccacgtagcacga

SEQ ID NO: 286943 - DNA, 50 bp, Artificial
  Synthetic oligonucleotide
caagcgaacatgtggacggcaatagcacctcctgggtcgacgcagccctt

SEQ ID NO: 286944 - DNA, 50 bp, Artificial
  Synthetic oligonucleotide
aatgtttgcctggcacaaaccgcccggctttccagcatctcattcgggga

SEQ ID NO: 286945 - DNA, 50 bp, Artificial
  Synthetic oligonucleotide
cgcggtgtgcggagtaagggcggtgcgttcgctagccaaagcttaactgt

SEQ ID NO: 286946 - DNA, 50 bp, Artificial
  Synthetic oligonucleotide
caagcgccaacgtgtaagggagcgtactgccagttagcgggctcggcagg

SEQ ID NO: 286947 - DNA, 50 bp, Artificial
  Synthetic oligonucleotide
aatgtggggcgcgctcacgtacagaagcacagtcgaggcacggacccact

SEQ ID NO: 286948 - DNA, 50 bp, Artificial
  Synthetic oligonucleotide
aatgtggggagttccggccggcgcatgatttgaagtcggaggcagacgcc

SEQ ID NO: 286949 - DNA, 56 bp, Artificial
  Synthetic oligonucleotide
gtggcagccgacaagagttgtgtccgcgtcactgatgccgataatgagcgagcgca

SEQ ID NO: 286950 - DNA, 50 bp, Artificial
  Synthetic oligonucleotide
cgcggtttgtgtgcgtgtggaaggagggcacctctgcattctccctcgcg

SEQ ID NO: 286951 - DNA, 50 bp, Artificial
  Synthetic oligonucleotide
aatgtggagagcgcaccccgccacccgtctgtccgttcacctcgccacgt

SEQ ID NO: 286952 - DNA, 50 bp, Artificial
  Synthetic oligonucleotide
caagcgcgcaggacagtccaacaaggttcggagggcagagcgcctctaca

SEQ ID NO: 286953 - DNA, 50 bp, Artificial
  Synthetic oligonucleotide
aatgtcttccgtccgtgacatgtggtctccagggagcggccccacgagag

SEQ ID NO: 286954 - DNA, 50 bp, Artificial
  Synthetic oligonucleotide
aatgtcgacccgcggcacttgtcgctcatcgccgatacgtctacccaccg

SEQ ID NO: 286955 - DNA, 50 bp, Artificial
  Synthetic oligonucleotide
aatgtaccgaacgatccctgacgccgcacaccgcagaactggttcaccgg

SEQ ID NO: 286956 - DNA, 50 bp, Artificial
  Synthetic oligonucleotide
cctgatctgggtactacaggaaggggttcgagaatggaggttggtactta

SEQ ID NO: 286957 - DNA, 50 bp, Artificial
  Synthetic oligonucleotide
acgagagaaggtgcggcgggctgacttctgtggggtgatagaccgggaga

SEQ ID NO: 286958 - DNA, 50 bp, Artificial
  Synthetic oligonucleotide
gggccgagttgaatgcagccgaggcccctagcgctggcgtgccaataggc

SEQ ID NO: 286959 - DNA, 50 bp, Artificial
  Synthetic oligonucleotide
gagacgcgcttcgttgacatggggctgtacacgtacgacatgaattcctc

SEQ ID NO: 286960 - DNA, 54 bp, Artificial
  Synthetic oligonucleotide
ttgttgtgtacggctgtgtgttggtttaacgtctccaaccctcacccgtcccga

SEQ ID NO: 286961 - DNA, 50 bp, Artificial
  Synthetic oligonucleotide
atgcgttgtggtccgctgtgatggcacgcctcaggatgggtgacggacta

SEQ ID NO: 286962 - DNA, 50 bp, Artificial
  Synthetic oligonucleotide
gggccgtataacaatctacgggcgcggcactcacccccatcacgcaatcg

SEQ ID NO: 286963 - DNA, 50 bp, Artificial
  Synthetic oligonucleotide
acgacggcggcagcgagtcacttcaccgtgccgagtttgtgcgtctttgc

SEQ ID NO: 286964 - DNA, 50 bp, Artificial
  Synthetic oligonucleotide
acgacgcccatttcgggacccacgtgaggatgttcagctgccccgttttg

SEQ ID NO: 286965 - DNA, 50 bp, Artificial
  Synthetic oligonucleotide
atgctaccagagtggaagccaccccaatggacgtaccgacagcgctccac

SEQ ID NO: 286966 - DNA, 50 bp, Artificial
  Synthetic oligonucleotide
acgacgcaccgccaagtgcaccgttattcgcccgcgagagcctccaaacg

SEQ ID NO: 286967 - DNA, 50 bp, Artificial
  Synthetic oligonucleotide
atgctcgactatcctcgtgaggcgagccccttgtcgcacgggtcgatgtg

SEQ ID NO: 286968 - DNA, 50 bp, Artificial
  Synthetic oligonucleotide
acgaccacccgaggcagcgatcacaaactgagggcggaactggacaatgc

SEQ ID NO: 286969 - DNA, 50 bp, Artificial
  Synthetic oligonucleotide
acgacatggtcggcaagctacgtgaagtccctcgtccccacccaacgtgc

SEQ ID NO: 286970 - DNA, 50 bp, Artificial
  Synthetic oligonucleotide
acgacagcgaacgttgcggcttccgccttcattgaatttggcgcccctta

SEQ ID NO: 286971 - DNA, 56 bp, Artificial
  Synthetic oligonucleotide
ccaagaggaattactgttccacacatatgattatcgtaattaattgaatccgttgg

SEQ ID NO: 286972 - DNA, 50 bp, Artificial
  Synthetic oligonucleotide
gggcgtgtcgataggcaacggcatgtgtagaggggagttcgatggcgggg

SEQ ID NO: 286973 - DNA, 50 bp, Artificial
  Synthetic oligonucleotide
acgacactgcttgctgcaacccgtgctcctcctgccaaccacggacgcac

SEQ ID NO: 286974 - DNA, 50 bp, Artificial
  Synthetic oligonucleotide
acgacacgctgccaacacacgcctcgcacgtctttgcccgcatagttagc

SEQ ID NO: 286975 - DNA, 50 bp, Artificial
  Synthetic oligonucleotide
acgaatagcgcgacccacacccctcggctgaactgtcgcctcgccgccgt

SEQ ID NO: 286976 - DNA, 50 bp, Artificial
  Synthetic oligonucleotide
acgaataccgcctcggcaggccccgggaagcactcgtctgtggacgtgtc

SEQ ID NO: 286977 - DNA, 50 bp, Artificial
  Synthetic oligonucleotide
acgaaggggcggcgaagggtacacattcacgcacgagtaggaaggcgctc

SEQ ID NO: 286978 - DNA, 50 bp, Artificial
  Synthetic oligonucleotide
acgaacgaggcgttctcccaacggactgcccccttctgagcgaagagcca

SEQ ID NO: 286979 - DNA, 50 bp, Artificial
  Synthetic oligonucleotide
cgaaactttacaggggcgctgtgacctgccgtgtgatacttgcgccacgg

SEQ ID NO: 286980 - DNA, 50 bp, Artificial
  Synthetic oligonucleotide
atgctgaggtgtcacccttcaccaggcctcccgctgagatgcgaaggaag

SEQ ID NO: 286981 - DNA, 50 bp, Artificial
  Synthetic oligonucleotide
atgctgcgagactgacagcgggctgttcggagtcaccggactggagacga

SEQ ID NO: 286982 - DNA, 52 bp, Artificial
  Synthetic oligonucleotide
ggtccttcttttactaacataggtcttactttcactaacacaggtcttacct

SEQ ID NO: 286983 - DNA, 50 bp, Artificial
  Synthetic oligonucleotide
acgaaacgccacaaggggaaagctcctcggtttagcggctcacctccgcg

SEQ ID NO: 286984 - DNA, 50 bp, Artificial
  Synthetic oligonucleotide
acgcacacacgcgtgcatctgtaccctccccgcgaaaaggcgcgtctgtt

SEQ ID NO: 286985 - DNA, 50 bp, Artificial
  Synthetic oligonucleotide
acgcacaaccacataaccgggcgagcgacgaaggggaaaacaacgcgtcc

SEQ ID NO: 286986 - DNA, 50 bp, Artificial
  Synthetic oligonucleotide
acgcaagcctctacgcgtgagcagagcacgagggacgcacggaagaggcg

SEQ ID NO: 286987 - DNA, 50 bp, Artificial
  Synthetic oligonucleotide
acgcaaaagaggctgcgtcgcctggtggtctatcgagcccgtgcacacac

SEQ ID NO: 286988 - DNA, 50 bp, Artificial
  Synthetic oligonucleotide
acgattgcggggcatgcacacacactggcgactgccatgcctatctggtc

SEQ ID NO: 286989 - DNA, 50 bp, Artificial
  Synthetic oligonucleotide
acgattgccattaccggctgctcgtgactgtggctgcccaagtggtgctg

SEQ ID NO: 286990 - DNA, 50 bp, Artificial
  Synthetic oligonucleotide
acgatgttagatatttatcagtagcccctcattgatattttagaccattt

SEQ ID NO: 286991 - DNA, 50 bp, Artificial
  Synthetic oligonucleotide
acgatgtgaagtacggcgggagagtgcacgtgaggaggagggctgtcgta

SEQ ID NO: 286992 - DNA, 50 bp, Artificial
  Synthetic oligonucleotide
acgatggaccgcaactcgagcgtcagcccacgaagccccgtgccacacac

SEQ ID NO: 286993 - DNA, 56 bp, Artificial
  Synthetic oligonucleotide
agcggcatcgtgtgaggtgagccgctggatatgctcttggtgcattgtgcgggtag

SEQ ID NO: 286994 - DNA, 50 bp, Artificial
  Synthetic oligonucleotide
gagagcctcgcagatcagatgagggacaaccttcgctccccacgcagcgg

SEQ ID NO: 286995 - DNA, 50 bp, Artificial
  Synthetic oligonucleotide
acgatgcaggtgcctcacagtccgccgtcagaggtgcgtagcatccgtgt

SEQ ID NO: 286996 - DNA, 50 bp, Artificial
  Synthetic oligonucleotide
acgatctcaaccttcgatcgcctgtctccgcaggcccaacctcaccgcaa

SEQ ID NO: 286997 - DNA, 50 bp, Artificial
  Synthetic oligonucleotide
gggatgtaggacatggtgggaatgcccctaacgcaccgcgaccctctcat

SEQ ID NO: 286998 - DNA, 50 bp, Artificial
  Synthetic oligonucleotide
gagagccgcttgcccagctgtgaaggtgtcaaactcagtatctagcaaca

SEQ ID NO: 286999 - DNA, 50 bp, Artificial
  Synthetic oligonucleotide
atgcgcagcgcatctaagccattgcccgtgatacggaccgcgatacgcac

SEQ ID NO: 287000 - DNA, 50 bp, Artificial
  Synthetic oligonucleotide
acgatacagccgggcgcatacagtcctagcgtcgccacgatacagccggg

SEQ ID NO: 287001 - DNA, 50 bp, Artificial
  Synthetic oligonucleotide
acgaggtagcagccgagcttcgcaattcgcgcgtctattccggaaaccgc

SEQ ID NO: 287002 - DNA, 50 bp, Artificial
  Synthetic oligonucleotide
acgagggatattgcccgcaggagcactcgcatcagtcccaacgctgccaa

SEQ ID NO: 287003 - DNA, 50 bp, Artificial
  Synthetic oligonucleotide
ccgacactctccgccgccgtttgactgccgcctctcgcgtagcaacagcg

SEQ ID NO: 287004 - DNA, 56 bp, Artificial
  Synthetic oligonucleotide
gaccctggaagattaattgctgtgcatttaatgcatacttctttagtttctggttg

SEQ ID NO: 287005 - DNA, 50 bp, Artificial
  Synthetic oligonucleotide
acgaggagtatccccgggttgaggacgcacccacgtggtccgctcggacg

SEQ ID NO: 287006 - DNA, 50 bp, Artificial
  Synthetic oligonucleotide
atgcgtccagttggctagaatcccgtccttgcttccactcaccaagtaac

SEQ ID NO: 287007 - DNA, 50 bp, Artificial
  Synthetic oligonucleotide
ccgacagaaagaagacttgcccgtggccaaaggatggctgggccgacttg

SEQ ID NO: 287008 - DNA, 49 bp, Artificial
  Synthetic oligonucleotide
cgaaaggcgtgtcgggtttttcccctgccgtccggttggtccgtgtagt

SEQ ID NO: 287009 - DNA, 50 bp, Artificial
  Synthetic oligonucleotide
ggggcagtaaacccaccgggccaaatgtaagtagtatatgtccttgggtc

SEQ ID NO: 287010 - DNA, 50 bp, Artificial
  Synthetic oligonucleotide
atggcacaacgatagcacgcttgcatcccccgcgtatgcccgacgaaaca

SEQ ID NO: 287011 - DNA, 50 bp, Artificial
  Synthetic oligonucleotide
acctccgacgcaggggtcagatgcgctgacgaggtgcccagtaaccaatc

SEQ ID NO: 287012 - DNA, 50 bp, Artificial
  Synthetic oligonucleotide
acctccccggggcgcgtgcaaaattgttaaacagtcctccccactgtgga

SEQ ID NO: 287013 - DNA, 50 bp, Artificial
  Synthetic oligonucleotide
cgccgcagcgctcgtgggttctaccgtggctcaaagcataatggtgacgt

SEQ ID NO: 287014 - DNA, 50 bp, Artificial
  Synthetic oligonucleotide
acctcagtgcctgttcccttgcggtcatttccgccgcagaccgttgctga

SEQ ID NO: 287015 - DNA, 56 bp, Artificial
  Synthetic oligonucleotide
ttggcgcacgggaactggcgtagatgtcacggctgaatctgatttcccatgctgcc

SEQ ID NO: 287016 - DNA, 50 bp, Artificial
  Synthetic oligonucleotide
acctcagcgcgtgggatcgcagaatccactacccccgcctacccacccgt

SEQ ID NO: 287017 - DNA, 50 bp, Artificial
  Synthetic oligonucleotide
acctcagaatggattccggtgcctcgggagaactcctgtccgcaagccgc

SEQ ID NO: 287018 - DNA, 50 bp, Artificial
  Synthetic oligonucleotide
atggcagtgtcgtgccaacgctttggctgctctcatgcggacatcgatcc

SEQ ID NO: 287019 - DNA, 50 bp, Artificial
  Synthetic oligonucleotide
ggggctgtgcgtatgcgtcctctccggatatcctttcgtatctaacgagt

SEQ ID NO: 287020 - DNA, 50 bp, Artificial
  Synthetic oligonucleotide
atggccaagcgtgctgtcactcgctagcgttgcccccgtgtgtcacggat

SEQ ID NO: 287021 - DNA, 50 bp, Artificial
  Synthetic oligonucleotide
ggggtaccactcccccgagtttccctcccgatgtaggcaaaacaggcgag

SEQ ID NO: 287022 - DNA, 50 bp, Artificial
  Synthetic oligonucleotide
cgccgccgtcaacgtaatttcctaaagcgtacgcaattatctgccatttt

SEQ ID NO: 287023 - DNA, 50 bp, Artificial
  Synthetic oligonucleotide
acctacacgcaggggcacacacgcttaaggggcgcgaaaactgtgcacgc

SEQ ID NO: 287024 - DNA, 50 bp, Artificial
  Synthetic oligonucleotide
ggggtcgtaaagttgacgtattacaggagttgaaatctgaattcttgagg

SEQ ID NO: 287025 - DNA, 50 bp, Artificial
  Synthetic oligonucleotide
atggcgcaggtgtgaccgttcatgcagggagtacccctcagcaggagcat

SEQ ID NO: 287026 - DNA, 54 bp, Artificial
  Synthetic oligonucleotide
gataagcagcccgaacccaaataaacgcaaatgtaacaaaagtcgcttttatac

SEQ ID NO: 287027 - DNA, 50 bp, Artificial
  Synthetic oligonucleotide
accgttggtgcagggaaagacgcacaggaatccaccgttgccactgcgtg

SEQ ID NO: 287028 - DNA, 50 bp, Artificial
  Synthetic oligonucleotide
ggggtgtgcagaagcccgttggatacgccgcatagcgaagagggggttga

SEQ ID NO: 287029 - DNA, 50 bp, Artificial
  Synthetic oligonucleotide
accgtgtagggtgtgctttcccccggtggtgtccctctttgggcgctaat

SEQ ID NO: 287030 - DNA, 50 bp, Artificial
  Synthetic oligonucleotide
accgtggagctgtctccaagggcggtatgccacacggtccacttgggcac

SEQ ID NO: 287031 - DNA, 50 bp, Artificial
  Synthetic oligonucleotide
accgtgcttgggtgctctcgcccttccgacgccgtcgttttgcacacgtc

SEQ ID NO: 287032 - DNA, 50 bp, Artificial
  Synthetic oligonucleotide
ggggaaagaggcgaatgcgtatggatgcccacgaacaattgccgaggcga

SEQ ID NO: 287033 - DNA, 50 bp, Artificial
  Synthetic oligonucleotide
acctttttctacgccgatgtggcggggacggcaatgtagctaccgtggcc

SEQ ID NO: 287034 - DNA, 50 bp, Artificial
  Synthetic oligonucleotide
acctttgcagggatgcgcacccgtttccgcgttcagcagcggtgacggca

SEQ ID NO: 287035 - DNA, 50 bp, Artificial
  Synthetic oligonucleotide
atgctgcgtgcgcggtatcgcattttcgcgtggacgtcgatggacctact

SEQ ID NO: 287036 - DNA, 50 bp, Artificial
  Synthetic oligonucleotide
accttcgtgagccgctaaggcagaaagtgggtgcaacgcaggagggcgtc

SEQ ID NO: 287037 - DNA, 56 bp, Artificial
  Synthetic oligonucleotide
aagcttgacgcgaagctcgccattctacaatcgcatggggtggccatccgccttta

SEQ ID NO: 287038 - DNA, 50 bp, Artificial
  Synthetic oligonucleotide
atgcttccgcgcccactgtcgcacgccacgcacatcgttggggaatagca

SEQ ID NO: 287039 - DNA, 50 bp, Artificial
  Synthetic oligonucleotide
atgcttcgcgcgtatgggatgcccacaatctttgtgcaaccactccggcg

SEQ ID NO: 287040 - DNA, 50 bp, Artificial
  Synthetic oligonucleotide
atggaaagaacggagtgcgtgtgcacccccagtgagtacatgggcgcagc

SEQ ID NO: 287041 - DNA, 50 bp, Artificial
  Synthetic oligonucleotide
acctgtacgagtgggcaggtctatgtgtgcgcgtctggcgccccttaccc

SEQ ID NO: 287042 - DNA, 50 bp, Artificial
  Synthetic oligonucleotide
acctggcattcagtacggctcagcggtcgcctgtcttgctcgactccggg

SEQ ID NO: 287043 - DNA, 50 bp, Artificial
  Synthetic oligonucleotide
acctgcttggcgcttccaccgcagacccaaaacatccttctccacgacgc

SEQ ID NO: 287044 - DNA, 50 bp, Artificial
  Synthetic oligonucleotide
acctgcgtgcactatgacataaggtaggtcggccgaacggtggggccgtc

SEQ ID NO: 287045 - DNA, 50 bp, Artificial
  Synthetic oligonucleotide
acctgcgaaccgcgtggcaatcgggcgagcgtagttgtgcctgcgtcccc

SEQ ID NO: 287046 - DNA, 50 bp, Artificial
  Synthetic oligonucleotide
ccgaccgcctccatttcccctacaagtgcacgtagcgcgtgagttgctga

SEQ ID NO: 287047 - DNA, 50 bp, Artificial
  Synthetic oligonucleotide
atggagagcctacccaccagtggagcctccaaccggaataaggagggcca

SEQ ID NO: 287048 - DNA, 57 bp, Artificial
  Synthetic oligonucleotide
gttgtgtgctctcctcgagggcaatttccaacctactggtactctcctcctgggtaa

SEQ ID NO: 287049 - DNA, 53 bp, Artificial
  Synthetic oligonucleotide
ggtcctatttggactttgaaaatttctagcaacggaaattttctagcttctgg

SEQ ID NO: 287050 - DNA, 50 bp, Artificial
  Synthetic oligonucleotide
ggggaggctttcgagcttaccccctcaacctgccagcgaacaacgaggca

SEQ ID NO: 287051 - DNA, 50 bp, Artificial
  Synthetic oligonucleotide
atggagtgcgggcatacgcccaacgggtattctctccaccgctgtctgca

SEQ ID NO: 287052 - DNA, 50 bp, Artificial
  Synthetic oligonucleotide
acctctgcacagcgtcgactagctcagggggcgagagcccactttccttg

SEQ ID NO: 287053 - DNA, 50 bp, Artificial
  Synthetic oligonucleotide
atggagttggcccgcggggagttagcttgcccgtacgcacacgcgtatgc

SEQ ID NO: 287054 - DNA, 50 bp, Artificial
  Synthetic oligonucleotide
acctcctttggttggccctctgcgttgcccctcgcctgggcatgtaaccg

SEQ ID NO: 287055 - DNA, 50 bp, Artificial
  Synthetic oligonucleotide
acctccgttgcctcccgcgccgctgctaattcggccaatttgcgttttcc

SEQ ID NO: 287056 - DNA, 50 bp, Artificial
  Synthetic oligonucleotide
ccttttgttatgcgactatatggagttacagaaggtcttcctccattagt

SEQ ID NO: 287057 - DNA, 50 bp, Artificial
  Synthetic oligonucleotide
acctccgcctggtttgtgcccctgcgtagggaccgtattgtgtcgtccac

SEQ ID NO: 287058 - DNA, 50 bp, Artificial
  Synthetic oligonucleotide
cccatttaccccataccgtgggcggttcgtggtggcctaaggagcagccc

SEQ ID NO: 287059 - DNA, 50 bp, Artificial
  Synthetic oligonucleotide
atgatccaacgacccaccaaccccctccttgcctgcatgacctcttgggg

SEQ ID NO: 287060 - DNA, 56 bp, Artificial
  Synthetic oligonucleotide
ggtcaaatacacgagatatggctactcgtggttttagatatcatggaattcaatac

SEQ ID NO: 287061 - DNA, 50 bp, Artificial
  Synthetic oligonucleotide
acgctacgacctcgcattcggagaggcggaaggacgggcacagcttctcg

SEQ ID NO: 287062 - DNA, 50 bp, Artificial
  Synthetic oligonucleotide
acgctaccatctgtgactgcactcatgggggcgctttgcctcccctctgc

SEQ ID NO: 287063 - DNA, 50 bp, Artificial
  Synthetic oligonucleotide
acgctaagccggtggccgcagaggcgatgctagacatggcgcagagcagg

SEQ ID NO: 287064 - DNA, 50 bp, Artificial
  Synthetic oligonucleotide
acgcgttgcagactggggcatctgttggtacacgtgggaaagcgtcgagc

SEQ ID NO: 287065 - DNA, 50 bp, Artificial
  Synthetic oligonucleotide
acgcgttacaccaatgcgccgacccactcatctcagcagcggcacacgcc

SEQ ID NO: 287066 - DNA, 50 bp, Artificial
  Synthetic oligonucleotide
cgaagtataccttcatcgctagccgcccacgctttcctcccccaagcggc

SEQ ID NO: 287067 - DNA, 50 bp, Artificial
  Synthetic oligonucleotide
atgattgccgctcgtttcgtgcctgtgttgctctcccacgctgcactgtt

SEQ ID NO: 287068 - DNA, 50 bp, Artificial
  Synthetic oligonucleotide
acgcgtgcagggggtgtacgcacgtggcatcatatgagcattcgttcggg

SEQ ID NO: 287069 - DNA, 50 bp, Artificial
  Synthetic oligonucleotide
acgcgtgactcgagcgtgtctcacccggtcctcgctgactagtggtgtgg

SEQ ID NO: 287070 - DNA, 50 bp, Artificial
  Synthetic oligonucleotide
acgcgtcttaacctttgcgggcgcccttttgctaccaccgagggaggggt

SEQ ID NO: 287071 - DNA, 56 bp, Artificial
  Synthetic oligonucleotide
tggcgaatgatcggcgtaccccgacctgatggaggggcatgctagggagagtgcgc

SEQ ID NO: 287072 - DNA, 50 bp, Artificial
  Synthetic oligonucleotide
acgcgtagtggcggtaaacgggggagtacaccggtcgatgctgtcagaga

SEQ ID NO: 287073 - DNA, 50 bp, Artificial
  Synthetic oligonucleotide
ggcgttcacagacctaggacgacggaatagatacttgaacggcgataggg

SEQ ID NO: 287074 - DNA, 50 bp, Artificial
  Synthetic oligonucleotide
acgcgtacacgaggcgcaagtgcgaggcaagctgggtaccgtgagagagt

SEQ ID NO: 287075 - DNA, 50 bp, Artificial
  Synthetic oligonucleotide
acgcggttggggagccgaatagggggaggggcaccctgtttgtacgcccc

SEQ ID NO: 287076 - DNA, 50 bp, Artificial
  Synthetic oligonucleotide
acgcgggcacatccgaaaggtgtgacgatggatcgcaaggctgctcagct

SEQ ID NO: 287077 - DNA, 50 bp, Artificial
  Synthetic oligonucleotide
acgcggccgctctgggctgacgctgcttaggtacgctcttcctctgagtc

SEQ ID NO: 287078 - DNA, 50 bp, Artificial
  Synthetic oligonucleotide
acgcgcgtagcaaaacgtcacacagttggtgcgggtggcaacgagggaga

SEQ ID NO: 287079 - DNA, 50 bp, Artificial
  Synthetic oligonucleotide
gagcagaaatccccggaggcgtgaaggtgagctgtgggctccagtagtgc

SEQ ID NO: 287080 - DNA, 50 bp, Artificial
  Synthetic oligonucleotide
acgcgcgaaagggaatccgcctttgaggcagtccccacaagggtccaccc

SEQ ID NO: 287081 - DNA, 50 bp, Artificial
  Synthetic oligonucleotide
acgcgccgccactgaagataggctcctgcgtccatcgcgtgcggaagcag

SEQ ID NO: 287082 - DNA, 56 bp, Artificial
  Synthetic oligonucleotide
atgtattggtattattcttagcccaaagcttgtttggaattttaacattatctcat

SEQ ID NO: 287083 - DNA, 50 bp, Artificial
  Synthetic oligonucleotide
acggacccgcccctcgctgcctctatctaactccacccgagagcctttgc

SEQ ID NO: 287084 - DNA, 50 bp, Artificial
  Synthetic oligonucleotide
acggaaagagagccaacgtcatgtccgcaaacgcgaccaacgctggaggc

SEQ ID NO: 287085 - DNA, 50 bp, Artificial
  Synthetic oligonucleotide
acgcttgcttcccgcgcaaggaactcccacttgcgttgctcagatggggg

SEQ ID NO: 287086 - DNA, 50 bp, Artificial
  Synthetic oligonucleotide
acgcttcggtcgtcggtgctgagacaacccgtgatgcgtcggcttgttgc

SEQ ID NO: 287087 - DNA, 50 bp, Artificial
  Synthetic oligonucleotide
acgctgttctggtcctctgcgcgctgcgtctctcactgtagcgacaaccg

SEQ ID NO: 287088 - DNA, 50 bp, Artificial
  Synthetic oligonucleotide
acgctgtcgccgagggcacagcatcgcctgcagagctaccgacgctggta

SEQ ID NO: 287089 - DNA, 50 bp, Artificial
  Synthetic oligonucleotide
acgctggatagccccactcacaacggctcgcgtacgcttgcgtagcagca

SEQ ID NO: 287090 - DNA, 50 bp, Artificial
  Synthetic oligonucleotide
acgctgctggagccgtgtacccgactatcacgtgctggcccaaaggagat

SEQ ID NO: 287091 - DNA, 50 bp, Artificial
  Synthetic oligonucleotide
acgctgcctcggagccaagtagcgtgcgcaccggagggaagacacatccc

SEQ ID NO: 287092 - DNA, 50 bp, Artificial
  Synthetic oligonucleotide
acgctgccgagtgaagtccccacacgccagttccaccggtgcctcttgta

SEQ ID NO: 287093 - DNA, 56 bp, Artificial
  Synthetic oligonucleotide
ccgcagaggtggcgacagtgttgaacacggagagtgcttgggttgcaaacgtcgca

SEQ ID NO: 287094 - DNA, 50 bp, Artificial
  Synthetic oligonucleotide
acgctgaggccactctcacaggggctactctgcggtagcgcttaccacac

SEQ ID NO: 287095 - DNA, 50 bp, Artificial
  Synthetic oligonucleotide
atgagcgtctaccctccgcaagtgctgacctgcccatacgcctcctctct

SEQ ID NO: 287096 - DNA, 50 bp, Artificial
  Synthetic oligonucleotide
ggcgcgctgtgaagtgtcgtgagaaggagagcggtaatatcgacttacat

SEQ ID NO: 287097 - DNA, 50 bp, Artificial
  Synthetic oligonucleotide
atgagctctacgtgtgtggcagtgcgaacggtgggaagttgggcctcacc

SEQ ID NO: 287098 - DNA, 50 bp, Artificial
  Synthetic oligonucleotide
acgctcgtttgcctacacggatgtgtgcggcccacttacccatacgcacg

SEQ ID NO: 287099 - DNA, 50 bp, Artificial
  Synthetic oligonucleotide
gagcccaccactccgcttacgcgccgctttttcgttcgtggtcgtgattc

SEQ ID NO: 287100 - DNA, 50 bp, Artificial
  Synthetic oligonucleotide
acgctccccctatcgtgcgccaccgtcacacacccacacgtcgatctaaa

SEQ ID NO: 287101 - DNA, 50 bp, Artificial
  Synthetic oligonucleotide
ccccacccgcacactgtatggccaccgtagacaccgtcaaggggcgttac

SEQ ID NO: 287102 - DNA, 50 bp, Artificial
  Synthetic oligonucleotide
atgagtggcttattcgggggttggtcgagcgggcgacggcctcactggct

SEQ ID NO: 287103 - DNA, 50 bp, Artificial
  Synthetic oligonucleotide
acgctagctccttaggcgtgctcactgcctagccatgcgcagccacagtg

SEQ ID NO: 287104 - DNA, 56 bp, Artificial
  Synthetic oligonucleotide
ggtcattactcttcataaaagatttcacagagaacaatctataattgttcaattgg

SEQ ID NO: 287105 - DNA, 50 bp, Artificial
  Synthetic oligonucleotide
acgctacgccgaagctgtgccgagagtgcggaaaccctacggtaaccctc

SEQ ID NO: 287106 - DNA, 50 bp, Artificial
  Synthetic oligonucleotide
acgccccctcgcgaacgagctccagtaccgaaacgtctcagcggggccgc

SEQ ID NO: 287107 - DNA, 50 bp, Artificial
  Synthetic oligonucleotide
acgcccagtgtactgccgtgcctcttccccatactccgcgcatgtgcata

SEQ ID NO: 287108 - DNA, 50 bp, Artificial
  Synthetic oligonucleotide
gagatgcacagcgctatggagtctacgcgtttgcgcttacaggtgtgtac

SEQ ID NO: 287109 - DNA, 50 bp, Artificial
  Synthetic oligonucleotide
acgccatgtggggacaaaccgcatagccgcttcgccactcggctgcccta

SEQ ID NO: 287110 - DNA, 50 bp, Artificial
  Synthetic oligonucleotide
gggaacgcaccagacgaaggagtgcgtgcgtcaaaaggggcccgcgacgt

SEQ ID NO: 287111 - DNA, 50 bp, Artificial
  Synthetic oligonucleotide
atgcagtgcggcgtgagtctcaccacagcatgcgcttcaccgacagatgc

SEQ ID NO: 287112 - DNA, 50 bp, Artificial
  Synthetic oligonucleotide
acgccactgggtctctggggtagctgtgcgccgtcagattcagcggaggc

SEQ ID NO: 287113 - DNA, 50 bp, Artificial
  Synthetic oligonucleotide
atgccaaatagggcatgccggtccgggagagagtgtgcctgtccctgcgt

SEQ ID NO: 287114 - DNA, 50 bp, Artificial
  Synthetic oligonucleotide
acgccacgcacatcgttggggaatagcacgaggaggcccgtagtgcgcac

SEQ ID NO: 287115 - DNA, 56 bp, Artificial
  Synthetic oligonucleotide
gcgggtgtctccttttgcctgcccagactcttttgatgtctcgcacaggttcccgc

SEQ ID NO: 287116 - DNA, 50 bp, Artificial
  Synthetic oligonucleotide
acgccacgacacggtacgcacactttgtgctcccccgaggcacgatacag

SEQ ID NO: 287117 - DNA, 50 bp, Artificial
  Synthetic oligonucleotide
acgcagggaaccacgtaagccccacccgccgtctcagtcgggttgctccc

SEQ ID NO: 287118 - DNA, 50 bp, Artificial
  Synthetic oligonucleotide
acgcaggcagagtggtcttcgcactcgtcgctgtgcttcacagtgccgac

SEQ ID NO: 287119 - DNA, 50 bp, Artificial
  Synthetic oligonucleotide
acgcaggatgcaccgatgaagcgacacaaccgctgggctttcctccatcc

SEQ ID NO: 287120 - DNA, 50 bp, Artificial
  Synthetic oligonucleotide
cgcccgaagttttggccgataatgacggcggcaacaggcacccggatgct

SEQ ID NO: 287121 - DNA, 50 bp, Artificial
  Synthetic oligonucleotide
atgccttgccgcgttggctgtggattgtctgtgtgcggtggccgctacag

SEQ ID NO: 287122 - DNA, 50 bp, Artificial
  Synthetic oligonucleotide
acgcagcgaaggagttgctgagtgagacggagcagcggtcgcacgaggct

SEQ ID NO: 287123 - DNA, 50 bp, Artificial
  Synthetic oligonucleotide
acgcagcagaaccgagcgaggacccgagaatggctgttgcgccaacttga

SEQ ID NO: 287124 - DNA, 50 bp, Artificial
  Synthetic oligonucleotide
acgcagagtgcggcttcctccagtgtggcgcccttttcagttccccttgg

SEQ ID NO: 287125 - DNA, 50 bp, Artificial
  Synthetic oligonucleotide
acgcacgaccccctcgctggtacatctccgtaagctctgacgctacggcg

SEQ ID NO: 287126 - DNA, 56 bp, Artificial
  Synthetic oligonucleotide
gaagtcattcacatcctcttatagaattaaacagatctactggcatatccaaaggg

SEQ ID NO: 287127 - DNA, 50 bp, Artificial
  Synthetic oligonucleotide
acgcacctgttgatggagttgccgctcttcgctgcacactgcatgacccc

SEQ ID NO: 287128 - DNA, 50 bp, Artificial
  Synthetic oligonucleotide
acgcaccactgacacgccctggtttgccgcagttttccgcgttatttggc

SEQ ID NO: 287129 - DNA, 50 bp, Artificial
  Synthetic oligonucleotide
acgcacatctcactcgcgctgcatggacttcccccgttgggtgtgtgtgt

SEQ ID NO: 287130 - DNA, 50 bp, Artificial
  Synthetic oligonucleotide
atgcgaattacctattcttaggtacgtgcacgcccatgccaggcattctg

SEQ ID NO: 287131 - DNA, 50 bp, Artificial
  Synthetic oligonucleotide
acgcacacagcttcgcgcgacaagtgggggcataggctcaccggggcatc

SEQ ID NO: 287132 - DNA, 50 bp, Artificial
  Synthetic oligonucleotide
acgcgccgaatcagccaaatgaatcctgttccggacctcgaggcacggcc

SEQ ID NO: 287133 - DNA, 50 bp, Artificial
  Synthetic oligonucleotide
acgcgccacatctgccgttctcggtaaatacgggccgtacgtgcacaggt

SEQ ID NO: 287134 - DNA, 50 bp, Artificial
  Synthetic oligonucleotide
acgcgcactcacgaaccgatctactgggggtacctgcgcctctctcggcc

SEQ ID NO: 287135 - DNA, 50 bp, Artificial
  Synthetic oligonucleotide
acgcgagccccggaggcgcagcatccgagaggatggaaggtcacatgtat

SEQ ID NO: 287136 - DNA, 50 bp, Artificial
  Synthetic oligonucleotide
acgcgactgttgcccttagcgcggctgttacccctaacaaggcttacgcc

SEQ ID NO: 287137 - DNA, 56 bp, Artificial
  Synthetic oligonucleotide
tccgtgcacagaagttgtgatttagtggggccacggctgtgctttgtgctagcagc

SEQ ID NO: 287138 - DNA, 50 bp, Artificial
  Synthetic oligonucleotide
acgcgacgttggctaccacgtcggggcgtatgtgactcccagtccgcctt

SEQ ID NO: 287139 - DNA, 50 bp, Artificial
  Synthetic oligonucleotide
acgcgaaggatagcagtgccccctcaggtccgacgtggttcacggcgcac

SEQ ID NO: 287140 - DNA, 50 bp, Artificial
  Synthetic oligonucleotide
gagattgacgacggcgtttgcaagagggccccgtatgggtgagaaggcgg

SEQ ID NO: 287141 - DNA, 50 bp, Artificial
  Synthetic oligonucleotide
atgcactcgcgctcttggccccagacacggggttgtaggtcctgcatgca

SEQ ID NO: 287142 - DNA, 50 bp, Artificial
  Synthetic oligonucleotide
acgcgaaagggcgaggcctgcggttcttttggattgcgagcggaaggcat

SEQ ID NO: 287143 - DNA, 50 bp, Artificial
  Synthetic oligonucleotide
atgcactgcgggggctcactcgtatggatctcgtcgcacctcttccgtcc

SEQ ID NO: 287144 - DNA, 50 bp, Artificial
  Synthetic oligonucleotide
acgcctgcacgcatactcgcaacaacgtgcacgcctcacatgtcaccggg

SEQ ID NO: 287145 - DNA, 50 bp, Artificial
  Synthetic oligonucleotide
acgcctctgtgctcgatccccatgcacttgtcgtgcgactggcttccaca

SEQ ID NO: 287146 - DNA, 50 bp, Artificial
  Synthetic oligonucleotide
acgcctcgctgcccttcaagtacagacacctgcgcacacccgttcgctcc

SEQ ID NO: 287147 - DNA, 50 bp, Artificial
  Synthetic oligonucleotide
acgcctcctttttgtagtacgataaagtacggtcagactactaattttgt

SEQ ID NO: 287148 - DNA, 56 bp, Artificial
  Synthetic oligonucleotide
gacccactggtccccgaaatcgcaagagtcttcaaagaaaaccgatcgcgctacga

SEQ ID NO: 287149 - DNA, 50 bp, Artificial
  Synthetic oligonucleotide
acgccgtcaggatctagggggactgggccaagtgagagagcgatggttgc

SEQ ID NO: 287150 - DNA, 50 bp, Artificial
  Synthetic oligonucleotide
cgaagcggccagcgcccatcctgcgtgcgcccctccacaaccctccgcga

SEQ ID NO: 287151 - DNA, 50 bp, Artificial
  Synthetic oligonucleotide
acgccggacggcccaacgcggagctacgatatgtacctacgtggggagga

SEQ ID NO: 287152 - DNA, 50 bp, Artificial
  Synthetic oligonucleotide
acgccctccacacccctaaaggtagcctcccgagtgggaaggtccttcga

SEQ ID NO: 287153 - DNA, 50 bp, Artificial
  Synthetic oligonucleotide
acgcccggactggcgttatattcgacgcggggacatcggacgtcagcggt

SEQ ID NO: 287154 - DNA, 50 bp, Artificial
  Synthetic oligonucleotide
acgcccgcgatacagcctaagcgcatgccctcaccctgatacgcgcagct

SEQ ID NO: 287155 - DNA, 50 bp, Artificial
  Synthetic oligonucleotide
acgcccctgtcgtgcgcatctcgttctctgtagcccacctgcttgacgta

SEQ ID NO: 287156 - DNA, 50 bp, Artificial
  Synthetic oligonucleotide
acgcccctccttttggcaaatgaacgcacccccgttcgctgctcccgcaa

SEQ ID NO: 287157 - DNA, 50 bp, Artificial
  Synthetic oligonucleotide
acgcccctacttactgggtcgtttgaaccatttggtgcccgcccaaccga

SEQ ID NO: 287158 - DNA, 50 bp, Artificial
  Synthetic oligonucleotide
ccccacaggtccgacatgcctgagatgcggacggtcgttgcacaacttta

SEQ ID NO: 287159 - DNA, 55 bp, Artificial
  Synthetic oligonucleotide
gactcccctcctcgtctttcgatccacggattcctgactggttaagtaggttaca

SEQ ID NO: 287160 - DNA, 55 bp, Artificial
  Synthetic oligonucleotide
gcgtaaggtttgtttgcgaaacgaatttcctgaacacagtagtaagtccatagtg

SEQ ID NO: 287161 - DNA, 50 bp, Artificial
  Synthetic oligonucleotide
acccaaggtatgccgcggtaggaagtcgccctacgtagaaacgaccgggc

SEQ ID NO: 287162 - DNA, 50 bp, Artificial
  Synthetic oligonucleotide
ccgagtacccgcagtgtgacggtttctgccacgcctttttgggaaccgtg

SEQ ID NO: 287163 - DNA, 50 bp, Artificial
  Synthetic oligonucleotide
gacgccgtccaacactgtgagcgacacgcaggtgattgacatcccgcgta

SEQ ID NO: 287164 - DNA, 50 bp, Artificial
  Synthetic oligonucleotide
gacgcaatcaaggacagcacagatgacatcacgtgtgcgagcatgtatgt

SEQ ID NO: 287165 - DNA, 50 bp, Artificial
  Synthetic oligonucleotide
accatggctgagcgcgacacatgggggctgttaagggctaaggtgggggt

SEQ ID NO: 287166 - DNA, 50 bp, Artificial
  Synthetic oligonucleotide
accatgcgctctcctccgttcccctagtcgggcatgagccccttgcgttc

SEQ ID NO: 287167 - DNA, 50 bp, Artificial
  Synthetic oligonucleotide
accatgcgatgcgattttccttcgcgccaagcctgggggtattgccttgc

SEQ ID NO: 287168 - DNA, 50 bp, Artificial
  Synthetic oligonucleotide
cccatgcaccgacacgatggaccgcaactcgagcgtcagcccacgaagcc

SEQ ID NO: 287169 - DNA, 50 bp, Artificial
  Synthetic oligonucleotide
accatcgcacctactccgccttttgggttgtgcgactcgggtcggaaggg

SEQ ID NO: 287170 - DNA, 50 bp, Artificial
  Synthetic oligonucleotide
accatatcggccctaccccgtcgtgccgcgataatcaagggcgtctccag

SEQ ID NO: 287171 - DNA, 56 bp, Artificial
  Synthetic oligonucleotide
gttcgtgcatcttcgggtctcccactgctgtggttgcacacgggtaccttccggag

SEQ ID NO: 287172 - DNA, 50 bp, Artificial
  Synthetic oligonucleotide
accagtggggcggtgactcggaaggtggcccaacgaaccgcacgagaacc

SEQ ID NO: 287173 - DNA, 50 bp, Artificial
  Synthetic oligonucleotide
accagggggaggaaaacctgagcgaggcaatgcaacgggcggagaggtac

SEQ ID NO: 287174 - DNA, 50 bp, Artificial
  Synthetic oligonucleotide
accaggaaacgcaaaccctcgacgcagcgcacaaggatacccagtcgcag

SEQ ID NO: 287175 - DNA, 50 bp, Artificial
  Synthetic oligonucleotide
accagcctctgtgcgccgcggtgaatagacaaacttgccgcccctgcaac

SEQ ID NO: 287176 - DNA, 50 bp, Artificial
  Synthetic oligonucleotide
accagcacagcacgtgtgctacgccttaccaacgcccgcccggctgtact

SEQ ID NO: 287177 - DNA, 50 bp, Artificial
  Synthetic oligonucleotide
accactttgtgcgaaaaggctacaaggggacccgcgagagctgggctccc

SEQ ID NO: 287178 - DNA, 50 bp, Artificial
  Synthetic oligonucleotide
accactgttacccacgtgcgtgcctgcacccgctctccaccgtatgctct

SEQ ID NO: 287179 - DNA, 50 bp, Artificial
  Synthetic oligonucleotide
gacctggtaaggggtttctgccctgagcaaggactagtagcgagtacgtt

SEQ ID NO: 287180 - DNA, 50 bp, Artificial
  Synthetic oligonucleotide
ccttcttgagaagacgtcacccacagctcatgagggcggagtgcggcaga

SEQ ID NO: 287181 - DNA, 50 bp, Artificial
  Synthetic oligonucleotide
attacgcagcagaggcactaaacgggccgaagaagatcctggcaaaccct

SEQ ID NO: 287182 - DNA, 56 bp, Artificial
  Synthetic oligonucleotide
gcaattcactttcgagtttgggaaccacaaacattattgaaatagatgaaacgagg

SEQ ID NO: 287183 - DNA, 50 bp, Artificial
  Synthetic oligonucleotide
accacgtcggacgtctctctgtgtcctgcgtaggcgcgcgtgagtgaagg

SEQ ID NO: 287184 - DNA, 50 bp, Artificial
  Synthetic oligonucleotide
accacgtcccgggtcattcgcctgttcgggggccgcttcgctgcgagggg

SEQ ID NO: 287185 - DNA, 50 bp, Artificial
  Synthetic oligonucleotide
accacgtcatcctgttgatgcatcccccgcagcttgccaacgcgaggcta

SEQ ID NO: 287186 - DNA, 50 bp, Artificial
  Synthetic oligonucleotide
ggtgcccatcgggtgtgcgagatagcctgcgacgctgccagaaccaggca

SEQ ID NO: 287187 - DNA, 50 bp, Artificial
  Synthetic oligonucleotide
accccgctgtggagtggacatacgccccaccgttccccacggaagggaga

SEQ ID NO: 287188 - DNA, 50 bp, Artificial
  Synthetic oligonucleotide
accccctggagcggaaggacgaaaccaacgcggaagacccaatccgcaga

SEQ ID NO: 287189 - DNA, 50 bp, Artificial
  Synthetic oligonucleotide
acccccaggggaacacacgccgggttggtaagcggtacgtggcattactg

SEQ ID NO: 287190 - DNA, 50 bp, Artificial
  Synthetic oligonucleotide
acccccacagtgcaggtcgggatgccatctcccccagaggatgggcccat

SEQ ID NO: 287191 - DNA, 50 bp, Artificial
  Synthetic oligonucleotide
accccattgtagcgaggcacatgcgcacgcgttggttggcgcccatctct

SEQ ID NO: 287192 - DNA, 50 bp, Artificial
  Synthetic oligonucleotide
accccagtaggtgacgagggccgggtgagatgcactcgactgacgctgac

SEQ ID NO: 287193 - DNA, 56 bp, Artificial
  Synthetic oligonucleotide
gtagtttttatgggttgacatagtatgtctactgcaggtcactttattacattggt

SEQ ID NO: 287194 - DNA, 50 bp, Artificial
  Synthetic oligonucleotide
gacgggtggctgtgcatgtgttcgcctccgctggcagtatggttaggagg

SEQ ID NO: 287195 - DNA, 50 bp, Artificial
  Synthetic oligonucleotide
accccacgtggcactgcgtcgttggtcggaacttcggctcctacgtgacg

SEQ ID NO: 287196 - DNA, 50 bp, Artificial
  Synthetic oligonucleotide
ccttggcgtgatgtgtgcacgtgctacttggcggaaaggtggaacacggc

SEQ ID NO: 287197 - DNA, 50 bp, Artificial
  Synthetic oligonucleotide
accccaccgttgaatcaggcagcacgccttaccgcgacccccttacaatc

SEQ ID NO: 287198 - DNA, 50 bp, Artificial
  Synthetic oligonucleotide
atgtgcgagtgcgcgagcctttgtcttaggaccagtgttctctcgcggga

SEQ ID NO: 287199 - DNA, 50 bp, Artificial
  Synthetic oligonucleotide
atgtgcggaaaggtgcgccgagtggagctgctgacaaattgggtccggtg

SEQ ID NO: 287200 - DNA, 50 bp, Artificial
  Synthetic oligonucleotide
accccaccattgggtgtagcagaaccagacgggggccccaaacgcaccgc

SEQ ID NO: 287201 - DNA, 50 bp, Artificial
  Synthetic oligonucleotide
accccacatgacggtcgcggcaaccccgttgtaggcgcccccaactcgct

SEQ ID NO: 287202 - DNA, 50 bp, Artificial
  Synthetic oligonucleotide
accccacaccacgggtcgcctcccccgctcatctgaccgctacatctcac

SEQ ID NO: 287203 - DNA, 50 bp, Artificial
  Synthetic oligonucleotide
accccaagtggcaatccgagcttcaccccaagtggcaatccgagcttcac

SEQ ID NO: 287204 - DNA, 56 bp, Artificial
  Synthetic oligonucleotide
cgggagggaatgttccacagaacagcacgcgactgtcagcatgcacaactggacca

SEQ ID NO: 287205 - DNA, 50 bp, Artificial
  Synthetic oligonucleotide
atgtgcgtcaggctacccacgtctgacaacgcaccaccaccgcacatcac

SEQ ID NO: 287206 - DNA, 50 bp, Artificial
  Synthetic oligonucleotide
ggtcggagcagaggccccaggagcgcgagtatccatcaccggacaggtgt

SEQ ID NO: 287207 - DNA, 50 bp, Artificial
  Synthetic oligonucleotide
acccatcgctgcttcgattggaggtgcttcgtcctgtgtgtgctccgcca

SEQ ID NO: 287208 - DNA, 50 bp, Artificial
  Synthetic oligonucleotide
acccatcctctgtggggctcgggacctctgtacatccgcctgcgctcctc

SEQ ID NO: 287209 - DNA, 50 bp, Artificial
  Synthetic oligonucleotide
acccacgcagaacccattcgaaccttcacttgcgcaccccggtttgccag

SEQ ID NO: 287210 - DNA, 50 bp, Artificial
  Synthetic oligonucleotide
gacgcgcaacacgaaagggacaagcgggggcgcttagccatagtcgaggg

SEQ ID NO: 287211 - DNA, 50 bp, Artificial
  Synthetic oligonucleotide
acccacaactgtgccgctcattcttcccacattgcgggccttcccaccac

SEQ ID NO: 287212 - DNA, 50 bp, Artificial
  Synthetic oligonucleotide
acccaatccgcagacgccccctcgcgaacgagctccagtaccgaaacgtc

SEQ ID NO: 287213 - DNA, 50 bp, Artificial
  Synthetic oligonucleotide
acattcattacggtcagagggcggcatgccaaacggacatgcggggagtc

SEQ ID NO: 287214 - DNA, 50 bp, Artificial
  Synthetic oligonucleotide
ccttccccaacgccgggttacagcgtgaagtgcatgatttggcgcggtaa

SEQ ID NO: 287215 - DNA, 56 bp, Artificial
  Synthetic oligonucleotide
taacacggagtgttatctttttaaatacgagtggttagtcgttatgattacagctc

SEQ ID NO: 287216 - DNA, 50 bp, Artificial
  Synthetic oligonucleotide
acattaccccctgcgcccgttgccacgtacccgcaacatttcccttccgt

SEQ ID NO: 287217 - DNA, 50 bp, Artificial
  Synthetic oligonucleotide
gaccgcgcaaattgtgaggagttactgcaccctccggtcgcctttccccc

SEQ ID NO: 287218 - DNA, 50 bp, Artificial
  Synthetic oligonucleotide
acatgttcgtgttttagtaacggctgcagatgttttacatagttgggcga

SEQ ID NO: 287219 - DNA, 50 bp, Artificial
  Synthetic oligonucleotide
acatgtgtgcccgccgtgatctgcactgccctcggaaccagaagttggcc

SEQ ID NO: 287220 - DNA, 50 bp, Artificial
  Synthetic oligonucleotide
acatgtgggcgtacctcccgtgcaacggactggcacaacattcaggcgat

SEQ ID NO: 287221 - DNA, 50 bp, Artificial
  Synthetic oligonucleotide
attcagcggacatgcgtacaaccccatgtcccatgtcgccgcgtctctgg

SEQ ID NO: 287222 - DNA, 50 bp, Artificial
  Synthetic oligonucleotide
attcagtgctgagctaccccacctacactcccctctccgtggcgcctgtt

SEQ ID NO: 287223 - DNA, 50 bp, Artificial
  Synthetic oligonucleotide
attcatgtcgagtgggggcgtgcctttggaccgtgtaggctggcagctaa

SEQ ID NO: 287224 - DNA, 50 bp, Artificial
  Synthetic oligonucleotide
ccgatgtgctgtgagtacacgggcgccaacaaacacccctgcgtacctcc

SEQ ID NO: 287225 - DNA, 50 bp, Artificial
  Synthetic oligonucleotide
acatggggtaggctcatcccgcttcccccattgttactcgcgaaggggct

SEQ ID NO: 287226 - DNA, 55 bp, Artificial
  Synthetic oligonucleotide
gcagcaaaagagtgagcccgagcgaagatgccctgctttgatgattgtacagtcc

SEQ ID NO: 287227 - DNA, 50 bp, Artificial
  Synthetic oligonucleotide
acatggctcatcccttgctcgcgcgtccccttccactcacaccgcatgca

SEQ ID NO: 287228 - DNA, 50 bp, Artificial
  Synthetic oligonucleotide
cgcctggtccaaactcgcgaggggttcccacttcatttgcacatagcccc

SEQ ID NO: 287229 - DNA, 50 bp, Artificial
  Synthetic oligonucleotide
acatgcgagtgttggcaggtgctccgaaaggggcaacgacaaccccctcc

SEQ ID NO: 287230 - DNA, 50 bp, Artificial
  Synthetic oligonucleotide
ggttcatggcgtgcgcacaagacggtgagagacaggttggacgccggtgt

SEQ ID NO: 287231 - DNA, 50 bp, Artificial
  Synthetic oligonucleotide
attcccctgtcggtttgggtccccatggcgattgcgctcaccactatgct

SEQ ID NO: 287232 - DNA, 50 bp, Artificial
  Synthetic oligonucleotide
ccgcacagagcaccgcagaggcggccctgcatcttttcggtccagccagc

SEQ ID NO: 287233 - DNA, 50 bp, Artificial
  Synthetic oligonucleotide
gaccagtgcgaaaggaactactctctccagtgccccgaacagtgggcgcc

SEQ ID NO: 287234 - DNA, 50 bp, Artificial
  Synthetic oligonucleotide
acatctccgtcgggatgaaggggcgatgggggacgcctcagtgcgccgta

SEQ ID NO: 287235 - DNA, 50 bp, Artificial
  Synthetic oligonucleotide
acatccgatggtggaacaatcgcgcgggctcgcccccaatgggacgcccc

SEQ ID NO: 287236 - DNA, 50 bp, Artificial
  Synthetic oligonucleotide
attcctcggggcgaaccgtccgagtgttgcgcgtagatacgaccgatcca

SEQ ID NO: 287237 - DNA, 55 bp, Artificial
  Synthetic oligonucleotide
ctttctcacttgcggctggcgcgtgtccctcccgccagtgttcgcactaccacat

SEQ ID NO: 287238 - DNA, 50 bp, Artificial
  Synthetic oligonucleotide
acatatcgtgtgccgtgctgccataccttgggtcggcgattcccccgcgg

SEQ ID NO: 287239 - DNA, 50 bp, Artificial
  Synthetic oligonucleotide
accacggagggttgttagggcacgagcgagtcactcacggaggcagacgg

SEQ ID NO: 287240 - DNA, 50 bp, Artificial
  Synthetic oligonucleotide
accacgctagcacgcctagagggagggagcggacagggtgctgaaaagct

SEQ ID NO: 287241 - DNA, 50 bp, Artificial
  Synthetic oligonucleotide
accacgcaaaagggggacacgcagggtggatttacacaaatgcgtgcgcg

SEQ ID NO: 287242 - DNA, 50 bp, Artificial
  Synthetic oligonucleotide
accacgatgcgccccgtagcccaaagtctgccggtgataatgcctcctgt

SEQ ID NO: 287243 - DNA, 50 bp, Artificial
  Synthetic oligonucleotide
ggtgcgtgtgccaactccttgcttcccacacagacccagcacggctcggg

SEQ ID NO: 287244 - DNA, 50 bp, Artificial
  Synthetic oligonucleotide
accacgaggggtcattaaggggcgtacccgagcatacatgggcgcacacg

SEQ ID NO: 287245 - DNA, 50 bp, Artificial
  Synthetic oligonucleotide
attagcctgatcctgtagtgcctccctctccgagccacctgacggggagc

SEQ ID NO: 287246 - DNA, 50 bp, Artificial
  Synthetic oligonucleotide
accaccgtggttactaaggggtcccgcgctgtcgtttaagcggcggttga

SEQ ID NO: 287247 - DNA, 50 bp, Artificial
  Synthetic oligonucleotide
accaccgctaagatcatacttcgcggcgtctacacccctttcaccactac

SEQ ID NO: 287248 - DNA, 55 bp, Artificial
  Synthetic oligonucleotide
ctttctcataggatcggtggctccccaagtgtaaactacgtgatcttcattagac

SEQ ID NO: 287249 - DNA, 50 bp, Artificial
  Synthetic oligonucleotide
accaccgatcagttcacgtcgaagcgtctgtcgcgccccggttaggcaaa

SEQ ID NO: 287250 - DNA, 50 bp, Artificial
  Synthetic oligonucleotide
accacagccgcgccctgtcgagagctcgacccccatgtgcaccgagggac

SEQ ID NO: 287251 - DNA, 50 bp, Artificial
  Synthetic oligonucleotide
accaagtcgggtacctgagagcgcgagcacgcacgtgaagggatgcatta

SEQ ID NO: 287252 - DNA, 50 bp, Artificial
  Synthetic oligonucleotide
accaagcataaactcaccaatggccctgcactcgttgcgcgtgggtagac

SEQ ID NO: 287253 - DNA, 50 bp, Artificial
  Synthetic oligonucleotide
ggtgggggtagcccaaaacaataggcccgggcgttatcgcttcacctcga

SEQ ID NO: 287254 - DNA, 50 bp, Artificial
  Synthetic oligonucleotide
ccgatccccacgctctgccgggggtcctctgttatgtctgggagtcgaaa

SEQ ID NO: 287255 - DNA, 50 bp, Artificial
  Synthetic oligonucleotide
accaacaggcgacatcagtcacgtcgcttgagtgtggcagcggtggagca

SEQ ID NO: 287256 - DNA, 50 bp, Artificial
  Synthetic oligonucleotide
attatggaaacggcgagggagaggtgccccttacccacccgcgtgctgag

SEQ ID NO: 287257 - DNA, 50 bp, Artificial
  Synthetic oligonucleotide
acatttccagggacggaggtgttcagcccaaaagcgggccccaaactccc

SEQ ID NO: 287258 - DNA, 50 bp, Artificial
  Synthetic oligonucleotide
acattgtccgtggcgaagccaccgcgtgcaaagggtcgttcatcaggaga

SEQ ID NO: 287259 - DNA, 47 bp, Artificial
  Synthetic oligonucleotide
gagtagggttccgggtttaggagtagggttccgggtttaggagtagg

SEQ ID NO: 287260 - DNA, 50 bp, Artificial
  Synthetic oligonucleotide
ggtgtccttcggttgggaatttagattcctacacgctactggagcatctt

SEQ ID NO: 287261 - DNA, 50 bp, Artificial
  Synthetic oligonucleotide
attcaagagtttgtcgcccctccttgcttcgccccaccccagctacgcaa

SEQ ID NO: 287262 - DNA, 50 bp, Artificial
  Synthetic oligonucleotide
ccgatgagatgtggcgtatcgccccgcataaaagcgagtggcgttcccgg

SEQ ID NO: 287263 - DNA, 50 bp, Artificial
  Synthetic oligonucleotide
accgctccattcggcgcacatcgcatggtgaggggtttccctctgcgtgt

SEQ ID NO: 287264 - DNA, 50 bp, Artificial
  Synthetic oligonucleotide
accgctacaatgtcgacccgcggcacttgtcgctcatcgccgatacgtct

SEQ ID NO: 287265 - DNA, 50 bp, Artificial
  Synthetic oligonucleotide
atgggtgtgctggcataagctgtgcagcgctcaccaagaagtcagtacac

SEQ ID NO: 287266 - DNA, 50 bp, Artificial
  Synthetic oligonucleotide
accgcgtgtcttggcttccctccatccgggtccaactcgacgcccaagta

SEQ ID NO: 287267 - DNA, 50 bp, Artificial
  Synthetic oligonucleotide
gggtgcctatttctaaaggtagtcgaaaggacaaacgaatcggtggggtt

SEQ ID NO: 287268 - DNA, 50 bp, Artificial
  Synthetic oligonucleotide
accgcgtgggggctggtacagaggtaaagccgcttccttgcgatgggtcg

SEQ ID NO: 287269 - DNA, 50 bp, Artificial
  Synthetic oligonucleotide
accgcgtacctaaccgcgtaggcgagcgcccctgtgtatatctccctcct

SEQ ID NO: 287270 - DNA, 56 bp, Artificial
  Synthetic oligonucleotide
ggaaattagacaggcccgaataagtcattaactggaaacaatagaagtaactcaca

SEQ ID NO: 287271 - DNA, 55 bp, Artificial
  Synthetic oligonucleotide
ctttccctctcgtagaaatcttttcacactggtcatctgttggcatgtcatgtgt

SEQ ID NO: 287272 - DNA, 50 bp, Artificial
  Synthetic oligonucleotide
accgcggtcgcagcgtactgagtcctccgctacggtgcctaggaatgacc

SEQ ID NO: 287273 - DNA, 50 bp, Artificial
  Synthetic oligonucleotide
gggtgtcgtgtatgtcccgtgcgcccttcatggaactggccttaggcacg

SEQ ID NO: 287274 - DNA, 50 bp, Artificial
  Synthetic oligonucleotide
accgcggacccactctccacggtactcgctcccatccgcaaagtggtaag

SEQ ID NO: 287275 - DNA, 50 bp, Artificial
  Synthetic oligonucleotide
atgtacaccacatgcgccgcaagccacacagctatggcccgcataactcg

SEQ ID NO: 287276 - DNA, 50 bp, Artificial
  Synthetic oligonucleotide
atgtacccactcagccgtcggggcacggtctctgtcgcaaacctgggcca

SEQ ID NO: 287277 - DNA, 50 bp, Artificial
  Synthetic oligonucleotide
accgcctcgcagcttagccgcttcccagttaaccgctcccccgcgaatcg

SEQ ID NO: 287278 - DNA, 50 bp, Artificial
  Synthetic oligonucleotide
accgccaagtcagcactgcggagagaagcgactgctgcatacccctgcac

SEQ ID NO: 287279 - DNA, 50 bp, Artificial
  Synthetic oligonucleotide
accgcatgtgcgcgtgtctagggtggcggtctccatttgacgccagttcg

SEQ ID NO: 287280 - DNA, 50 bp, Artificial
  Synthetic oligonucleotide
accgcatcgcagatgcgcgggaccccacgccagaacacgccgcgacttcg

SEQ ID NO: 287281 - DNA, 50 bp, Artificial
  Synthetic oligonucleotide
atgtagatctaatttcaacgtataaagcagatccactcgaagatgatcgg

SEQ ID NO: 287282 - DNA, 55 bp, Artificial
  Synthetic oligonucleotide
gcagatgaatctctcccctcaactttattctcatcgctgtgcttggagggatccc

SEQ ID NO: 287283 - DNA, 50 bp, Artificial
  Synthetic oligonucleotide
accgcagaggcggccctgcatcttttcggtccagccagcaacgctggccc

SEQ ID NO: 287284 - DNA, 50 bp, Artificial
  Synthetic oligonucleotide
atgtcaaacgccagtcccgctcaacgaatttgtgaacgcgccaaattagt

SEQ ID NO: 287285 - DNA, 50 bp, Artificial
  Synthetic oligonucleotide
accgcacaccatcccccatacgcgacaccccgttcacctgcccacaagtg

SEQ ID NO: 287286 - DNA, 50 bp, Artificial
  Synthetic oligonucleotide
accgatgacttgacgagtagcattgcgcggttggcagctccttccacgcg

SEQ ID NO: 287287 - DNA, 50 bp, Artificial
  Synthetic oligonucleotide
accgaggcgtctttaaccgccgtgacgtgattctccacagccgcactggg

SEQ ID NO: 287288 - DNA, 50 bp, Artificial
  Synthetic oligonucleotide
accgaggcgaccactttgtgcgaaaaggctacaaggggacccgcgagagc

SEQ ID NO: 287289 - DNA, 50 bp, Artificial
  Synthetic oligonucleotide
accgagcactcgcactgcgtactggtgttgggagcctaggccacctggag

SEQ ID NO: 287290 - DNA, 50 bp, Artificial
  Synthetic oligonucleotide
accgacaagtgctgagccgtgggtgcgtctcgtgcaccttgtcctagctc

SEQ ID NO: 287291 - DNA, 50 bp, Artificial
  Synthetic oligonucleotide
atgggaccatcccacgagcaggagcatcgcaatcagcacccacgacagta

SEQ ID NO: 287292 - DNA, 50 bp, Artificial
  Synthetic oligonucleotide
accgtcggtgggaaatctcgccgctctctaggcgacttggacgggacaca

SEQ ID NO: 287293 - DNA, 55 bp, Artificial
  Synthetic oligonucleotide
gagtccagtgcaccgccccactgcgtcatacacatccaagacgttcccggagtgt

SEQ ID NO: 287294 - DNA, 50 bp, Artificial
  Synthetic oligonucleotide
cctttggttgggcgagcgcataggcatcacgtggtagctttgggcctcat

SEQ ID NO: 287295 - DNA, 50 bp, Artificial
  Synthetic oligonucleotide
accgtagcctccccgaaggaatcgtagggaagcgactgggggcgtgcgag

SEQ ID NO: 287296 - DNA, 50 bp, Artificial
  Synthetic oligonucleotide
accgtacatacatgcgtagcggcaacgtaacgggggagggacgccacgtg

SEQ ID NO: 287297 - DNA, 50 bp, Artificial
  Synthetic oligonucleotide
accgtaatatcgtgggacaccccagagccgtgtgagggtcgagcgcccac

SEQ ID NO: 287298 - DNA, 50 bp, Artificial
  Synthetic oligonucleotide
accggtcgtgtgaccaatttggggagcggcccccgtggaggaatggtaaa

SEQ ID NO: 287299 - DNA, 50 bp, Artificial
  Synthetic oligonucleotide
accggtcgcgttgggtcgtacacgctcaggaactgccgtttaccttcgca

SEQ ID NO: 287300 - DNA, 50 bp, Artificial
  Synthetic oligonucleotide
accggtagcaccgcaagaggagcgagcatggcctttctgtgcgttccatt

SEQ ID NO: 287301 - DNA, 50 bp, Artificial
  Synthetic oligonucleotide
accgggtgtatcgccgaggcttcctgagggggccagttgaatctcctcat

SEQ ID NO: 287302 - DNA, 50 bp, Artificial
  Synthetic oligonucleotide
atgggcaaagacgcgtgatgaatgtgctcctgacagagcagtcggcggct

SEQ ID NO: 287303 - DNA, 50 bp, Artificial
  Synthetic oligonucleotide
accggccacttgacgcactgcaggcgctacacgaagtctttgagcggacg

SEQ ID NO: 287304 - DNA, 55 bp, Artificial
  Synthetic oligonucleotide
gcagcatggctagaaggcgggaggacgtttacgcgtctgacggactgcgtcgatg

SEQ ID NO: 287305 - DNA, 50 bp, Artificial
  Synthetic oligonucleotide
gggtattggccttttcgtccaggggtctaagacaactccttttcacggag

SEQ ID NO: 287306 - DNA, 50 bp, Artificial
  Synthetic oligonucleotide
accggcagtggggagaacagggagctgctaaaggtgcgaggcgcgagccc

SEQ ID NO: 287307 - DNA, 50 bp, Artificial
  Synthetic oligonucleotide
accggcacaccactgccgtgtgtgacctcatcggctctctcctcccctct

SEQ ID NO: 287308 - DNA, 50 bp, Artificial
  Synthetic oligonucleotide
accggagtgcgcagtaggcgcaggtagccaactagggcaagcggcacaag

SEQ ID NO: 287309 - DNA, 50 bp, Artificial
  Synthetic oligonucleotide
accggaggccacttgaatatgggcggcgctgtaacgagcggcttgcatca

SEQ ID NO: 287310 - DNA, 50 bp, Artificial
  Synthetic oligonucleotide
accggagccaccagtgtcaagcggtcgccaaagcacagcgcagtgccgtt

SEQ ID NO: 287311 - DNA, 50 bp, Artificial
  Synthetic oligonucleotide
accgctttcttgaggggagaaggcccgttggggttggacggacgcgtgtc

SEQ ID NO: 287312 - DNA, 50 bp, Artificial
  Synthetic oligonucleotide
atgggcgaaaggatcctatgaagggcgcacacacgccactactgcgtcga

SEQ ID NO: 287313 - DNA, 50 bp, Artificial
  Synthetic oligonucleotide
atggggcatgcaaagagacttgcacagggcggaaacgaagcagcgctgtt

SEQ ID NO: 287314 - DNA, 50 bp, Artificial
  Synthetic oligonucleotide
accgctgccatcggaggcacgccgacaaacgcagaatcagctcacgattc

SEQ ID NO: 287315 - DNA, 55 bp, Artificial
  Synthetic oligonucleotide
gcagcaggtacgattccattccataaactcacgtcgaatgccttaagggcgagga

SEQ ID NO: 287316 - DNA, 50 bp, Artificial
  Synthetic oligonucleotide
accgctgccagataacgtcgcgcgccgctgtcaacagtctccgccgttac

SEQ ID NO: 287317 - DNA, 50 bp, Artificial
  Synthetic oligonucleotide
accgctgagagaagcgcggacaggagcgcggactcgaatgctgcctcgaa

SEQ ID NO: 287318 - DNA, 50 bp, Artificial
  Synthetic oligonucleotide
atgggtccgcaagggaatgttacggtggggcggatgaaaggggttccgac

SEQ ID NO: 287319 - DNA, 50 bp, Artificial
  Synthetic oligonucleotide
acccgtctggtcctttgtgctccggcgtccgtgcatcacccggactctcg

SEQ ID NO: 287320 - DNA, 50 bp, Artificial
  Synthetic oligonucleotide
acccgtcgtgcgataccgccagccaacgacctacgcgacaccacggccac

SEQ ID NO: 287321 - DNA, 50 bp, Artificial
  Synthetic oligonucleotide
acccgtatgacacgtcgcctccctcgtctgtgcgtgtgcgcctcgggcac

SEQ ID NO: 287322 - DNA, 50 bp, Artificial
  Synthetic oligonucleotide
gacggtgtgcgtacgagatcgaaagcacgacatggctgtgtgcggcggca

SEQ ID NO: 287323 - DNA, 50 bp, Artificial
  Synthetic oligonucleotide
acccggaccgtgagcaagattcgccaagcgcggttcaactcctccgttgt

SEQ ID NO: 287324 - DNA, 50 bp, Artificial
  Synthetic oligonucleotide
ggtatgagggacggcgggcacggttgtcaggcacaatcgtgaagaaggcg

SEQ ID NO: 287325 - DNA, 50 bp, Artificial
  Synthetic oligonucleotide
acccgctaatccgctcacccacgcatgctgcccctccgagggcactcaac

SEQ ID NO: 287326 - DNA, 53 bp, Artificial
  Synthetic oligonucleotide
ctttccgtactctaaagaatttccgcctagagtagtagatcctcccgaagatt

SEQ ID NO: 287327 - DNA, 50 bp, Artificial
  Synthetic oligonucleotide
ggtatgttccgccgaaagtggcactcactgcagtataaagctcaccggtt

SEQ ID NO: 287328 - DNA, 50 bp, Artificial
  Synthetic oligonucleotide
acccgcgtggtacgttacatcgtgtacaccgcgccgctacaaatggctgc

SEQ ID NO: 287329 - DNA, 50 bp, Artificial
  Synthetic oligonucleotide
ccttgtcatttcggagagtcaatctcatgatgattccacttgcaccctct

SEQ ID NO: 287330 - DNA, 50 bp, Artificial
  Synthetic oligonucleotide
acccgccgtgttttcgcggacggctgtctttttgaagttgcgcccgcttt

SEQ ID NO: 287331 - DNA, 50 bp, Artificial
  Synthetic oligonucleotide
acccgccgcacaaggggaccgtaacaccgcagtacatcgtcctttgcaac

SEQ ID NO: 287332 - DNA, 50 bp, Artificial
  Synthetic oligonucleotide
acccgagttctaccgcggagccctccagaccctcatgtggagagtcgcca

SEQ ID NO: 287333 - DNA, 50 bp, Artificial
  Synthetic oligonucleotide
acccgacggccacacagcgtgactatgccccacacaagtatgcagcgagg

SEQ ID NO: 287334 - DNA, 50 bp, Artificial
  Synthetic oligonucleotide
acccgacatggagacgccaatcccaacgccagtgatccactcacgcccgc

SEQ ID NO: 287335 - DNA, 50 bp, Artificial
  Synthetic oligonucleotide
acccctttacgttgatgccaaacggagtccctcccatccgtgggtcgccc

SEQ ID NO: 287336 - DNA, 50 bp, Artificial
  Synthetic oligonucleotide
accccttgtgactcaacttaggcccctgcttgcctctcggttgggtggca

SEQ ID NO: 287337 - DNA, 55 bp, Artificial
  Synthetic oligonucleotide
ctttctcagatatgtattcatgggtagttggggcgtctatcacgaaaaggtctgt

SEQ ID NO: 287338 - DNA, 50 bp, Artificial
  Synthetic oligonucleotide
accccttgccgctgcaacccactttccgtagcgacgccctcctccaaact

SEQ ID NO: 287339 - DNA, 50 bp, Artificial
  Synthetic oligonucleotide
acccctgttggcggtcttcccagatggagcatccccctcgtgccttacgt

SEQ ID NO: 287340 - DNA, 50 bp, Artificial
  Synthetic oligonucleotide
acccctcttccgcttagcatgccgggctgcctctcaggtgtaattgcggt

SEQ ID NO: 287341 - DNA, 50 bp, Artificial
  Synthetic oligonucleotide
accccggctcctggcgaccctgacatggacttccacacggtgcgcgtgta

SEQ ID NO: 287342 - DNA, 50 bp, Artificial
  Synthetic oligonucleotide
accccggcagtcgttttgcgtgtaacgcccatgcagacggagttgcaaga

SEQ ID NO: 287343 - DNA, 50 bp, Artificial
  Synthetic oligonucleotide
atgtgcctgtatgcgcattgactgccactgcgactccgcaggtggtagcg

SEQ ID NO: 287344 - DNA, 50 bp, Artificial
  Synthetic oligonucleotide
accgacaaccctgaaaagggccacattcacgcaaggcgccgacttgcccg

SEQ ID NO: 287345 - DNA, 50 bp, Artificial
  Synthetic oligonucleotide
accgaagcggagtgtagcacgggccgggtttcgtggggtttcgaggacga

SEQ ID NO: 287346 - DNA, 50 bp, Artificial
  Synthetic oligonucleotide
atgtcaccgggcagatgggtccaccgggtagtgtttcccgtaacccttcc

SEQ ID NO: 287347 - DNA, 50 bp, Artificial
  Synthetic oligonucleotide
accgaaccgactacgcaagtctccccctgcactacgtgctcggtgttccg

SEQ ID NO: 287348 - DNA, 55 bp, Artificial
  Synthetic oligonucleotide
gagtattatccatacatacctggcgtaaaacgcgttcatccatctactaagcagg

SEQ ID NO: 287349 - DNA, 50 bp, Artificial
  Synthetic oligonucleotide
accgaaagcgagaagttgagctgaggacgtggcgccgcagtggtctccac

SEQ ID NO: 287350 - DNA, 50 bp, Artificial
  Synthetic oligonucleotide
acccttcggcagtaaggctcaccgcgccactaccccctgtctcactcgct

SEQ ID NO: 287351 - DNA, 50 bp, Artificial
  Synthetic oligonucleotide
accctgtcgccatgagagcggacgaggcccctaaactggaaggcgagtcg

SEQ ID NO: 287352 - DNA, 50 bp, Artificial
  Synthetic oligonucleotide
accctggttgtggccactgtccaccgctacattgccctcgtcctcacact

SEQ ID NO: 287353 - DNA, 50 bp, Artificial
  Synthetic oligonucleotide
accctgggaatgcgcgccctttgtggtgtgtttggcttctcgcttgccgg

SEQ ID NO: 287354 - DNA, 50 bp, Artificial
  Synthetic oligonucleotide
ggtactgggcagtgtttgggtggtttgccgaagtgtccaagtgtccccgc

SEQ ID NO: 287355 - DNA, 50 bp, Artificial
  Synthetic oligonucleotide
atgtccggtctgagtacgcccctgcgtgttggagcgccgtgctgctgtag

SEQ ID NO: 287356 - DNA, 50 bp, Artificial
  Synthetic oligonucleotide
ccgagctcttgtcagtgccgcagtccgaacaccccatcgagccgctgggg

SEQ ID NO: 287357 - DNA, 50 bp, Artificial
  Synthetic oligonucleotide
accctctgcgcagcgttgagcgtacaggtccacacactcctcccgaccac

SEQ ID NO: 287358 - DNA, 50 bp, Artificial
  Synthetic oligonucleotide
accctcgtgcgaggtcccccaaacgcggacgtgacttcttctcaggcgtt

SEQ ID NO: 287359 - DNA, 55 bp, Artificial
  Synthetic oligonucleotide
ctttcgttaccactgttagtagggtccacattggaactcacgttggcattggact

SEQ ID NO: 287360 - DNA, 50 bp, Artificial
  Synthetic oligonucleotide
accctcgctgaggactcggcataccggttgagctccgccccactgcatgc

SEQ ID NO: 287361 - DNA, 50 bp, Artificial
  Synthetic oligonucleotide
accctcctgcacctcatggacaatcgggctcccctcagtgcatccgcgat

SEQ ID NO: 287362 - DNA, 50 bp, Artificial
  Synthetic oligonucleotide
accctccgtcggcataccgtccgccgtgaaaatccttcacctacgtggga

SEQ ID NO: 287363 - DNA, 50 bp, Artificial
  Synthetic oligonucleotide
accctccgatgctgcaacactcgccgcttcagtcgtgccgcagctgtcat

SEQ ID NO: 287364 - DNA, 50 bp, Artificial
  Synthetic oligonucleotide
accctccctcgatgcattcaccaggcatcgctctgcaggtgggaccctcc

SEQ ID NO: 287365 - DNA, 50 bp, Artificial
  Synthetic oligonucleotide
cgccggatccgctgctaacgaaaccgctcgcatcctttgaccgtcgcgcg

SEQ ID NO: 287366 - DNA, 50 bp, Artificial
  Synthetic oligonucleotide
accctaccaaaccgcgttcctttgggggagatttcccgaagccccgcata

SEQ ID NO: 287367 - DNA, 48 bp, Artificial
  Synthetic oligonucleotide
accctacaaccctaaacactgaaccttaaaccataaacccggaaacta

SEQ ID NO: 287368 - DNA, 50 bp, Artificial
  Synthetic oligonucleotide
acccgtggcgggaaaaactgccaagtggatgagcagcacactgaaggggc

SEQ ID NO: 287369 - DNA, 50 bp, Artificial
  Synthetic oligonucleotide
ccgaggaggggcctgcgccaaacttgatggaacctccccaggggaaggac

SEQ ID NO: 287370 - DNA, 55 bp, Artificial
  Synthetic oligonucleotide
gaggttgtatgcctgtgagtcacccacgcgcacaagtgtctatggtgacgtcctt

SEQ ID NO: 287371 - DNA, 50 bp, Artificial
  Synthetic oligonucleotide
atgtgaccagggtacgtctacccctgacaagcgccagcgctaacggcggc

SEQ ID NO: 287372 - DNA, 60 bp, Artificial
  Synthetic oligonucleotide
gttgctattcgtcaaactgatttaaaacgtattgttgcttatgcttctattgcacatatg

SEQ ID NO: 287373 - DNA, 55 bp, Artificial
  Synthetic oligonucleotide
ctttcgagtgctctacacgtcggatgcgcacagcatgggcgaactccgttctggg

SEQ ID NO: 287374 - DNA, 55 bp, Artificial
  Synthetic oligonucleotide
ctttcctccggctgtgatctacatcccgttcgccaacgttcttctcctccagtga

SEQ ID NO: 287375 - DNA, 55 bp, Artificial
  Synthetic oligonucleotide
gcagcacgtgtgaggtaatctcatgtacattgaggaaacactaggttgagtcacc

SEQ ID NO: 287376 - DNA, 55 bp, Artificial
  Synthetic oligonucleotide
gaacatgaacccgtttgcctattcctccgtactgtgtgcctcagccctcgacagc

SEQ ID NO: 287377 - DNA, 55 bp, Artificial
  Synthetic oligonucleotide
gaacagagctgggctagcgtcggtctacgtaactgactcaggcttaacatcgtcc

SEQ ID NO: 287378 - DNA, 55 bp, Artificial
  Synthetic oligonucleotide
gaacaccgacagataggtgcttggaacggcgaaattggaacctttcataaggacg

SEQ ID NO: 287379 - DNA, 55 bp, Artificial
  Synthetic oligonucleotide
gcactagcatccttactctctccctagtgaagtgtgcgtgcagaagctgttggtg

SEQ ID NO: 287380 - DNA, 55 bp, Artificial
  Synthetic oligonucleotide
gaacacccagcgttggtcctcttcagtccatactgcccgattttctcctactatg

SEQ ID NO: 287381 - DNA, 55 bp, Artificial
  Synthetic oligonucleotide
gaacaagacacaggcttggcctcccaagcgtgaccgcgtatgggaagtatgcgtc

SEQ ID NO: 287382 - DNA, 55 bp, Artificial
  Synthetic oligonucleotide
gatagatgtcaaagcaacgttgcgcggtgtgggtccgacacccagagagcgacag

SEQ ID NO: 287383 - DNA, 60 bp, Artificial
  Synthetic oligonucleotide
gttgcggttgcagaatgcatttagcgtttatgtgtttattaggtctattagatgattttg

SEQ ID NO: 287384 - DNA, 55 bp, Artificial
  Synthetic oligonucleotide
gaggtatgactgctacgaggtgaaaactgttggtgatttgttcacaatagcgagc

SEQ ID NO: 287385 - DNA, 55 bp, Artificial
  Synthetic oligonucleotide
gaaatgtgtccgcctcaggctcgtagacgttgtggcgaaagcgcgaatcgcgaat

SEQ ID NO: 287386 - DNA, 55 bp, Artificial
  Synthetic oligonucleotide
gcactctacgactcgtacagctaccagatactgtgtactcttctccagactgcac

SEQ ID NO: 287387 - DNA, 55 bp, Artificial
  Synthetic oligonucleotide
gaggtatgccccgctcctctcctctaagcttgggatgggcactaaaacgacggag

SEQ ID NO: 287388 - DNA, 55 bp, Artificial
  Synthetic oligonucleotide
gcactgagggcagcatgcattcgtggaagaggtagaagcccatccactctgacac

SEQ ID NO: 287389 - DNA, 55 bp, Artificial
  Synthetic oligonucleotide
gaaatgctcaacgtctttcacgctcaggacccggctgtaggcgaaacaaccggca

SEQ ID NO: 287390 - DNA, 55 bp, Artificial
  Synthetic oligonucleotide
gcactgcagggagtgtcaggggtggagcccctaccattgtgggtcatgtgagcct

SEQ ID NO: 287391 - DNA, 55 bp, Artificial
  Synthetic oligonucleotide
gaaatgatatatcggttttgatcaaagagccccgtcacgtacgcccttcgatccg

SEQ ID NO: 287392 - DNA, 55 bp, Artificial
  Synthetic oligonucleotide
gaaagtaggagggtaagcgcgcgaatagatgatgtgtcctggctacgcacacccc

SEQ ID NO: 287393 - DNA, 55 bp, Artificial
  Synthetic oligonucleotide
gaaaggggagggtgttgcgagcgatagtgatgacgtcaggacgcccattacgggg

SEQ ID NO: 287394 - DNA, 56 bp, Artificial
  Synthetic oligonucleotide
gttgcatttagagaggggatcacaaatttatagtctttaacaaatttacaccagtc

SEQ ID NO: 287395 - DNA, 55 bp, Artificial
  Synthetic oligonucleotide
gaggtccattgtatgctctgtcccttacgattctggagagtcgcccgttacgcgc

SEQ ID NO: 287396 - DNA, 55 bp, Artificial
  Synthetic oligonucleotide
gcacgtacgcaggtgatggatttggctccacaacggccagaatcacgttcagtcc

SEQ ID NO: 287397 - DNA, 55 bp, Artificial
  Synthetic oligonucleotide
gaacgcagaaatgatagcgacagctcctacagccaagtatgccttcatcccggac

SEQ ID NO: 287398 - DNA, 55 bp, Artificial
  Synthetic oligonucleotide
gaacgcactccaggcgcgcctgtggttgtatgaggcgccgtatagtgcgctagac

SEQ ID NO: 287399 - DNA, 55 bp, Artificial
  Synthetic oligonucleotide
gaacgcacgcgccccacatttacgcttacgtatacgtaggaaaggagccgtgcac

SEQ ID NO: 287400 - DNA, 55 bp, Artificial
  Synthetic oligonucleotide
gaacctctgaaccttcgattcggcgttgtgttaagtcgcttgattgaatttcggc

SEQ ID NO: 287401 - DNA, 55 bp, Artificial
  Synthetic oligonucleotide
gaaccgtttgacggacacggcgttctctgccctttctgccgcataactcgtgcag

SEQ ID NO: 287402 - DNA, 55 bp, Artificial
  Synthetic oligonucleotide
gaaccgccgccccaaatttgtggtatttaacgagctagtcctcacgagcaacacg

SEQ ID NO: 287403 - DNA, 55 bp, Artificial
  Synthetic oligonucleotide
gaaccgcaatttggcctccgccttctctgtggagcgcgcgaaacttccgatcacg

SEQ ID NO: 287404 - DNA, 55 bp, Artificial
  Synthetic oligonucleotide
gaaccgatattcataatgtagagttatatcctggttgtggtggtaaattagcgcg

SEQ ID NO: 287405 - DNA, 55 bp, Artificial
  Synthetic oligonucleotide
taagtaatataggtcctcaatacagtaacgtatgtcttaaggtaaccaatatagg

SEQ ID NO: 287406 - DNA, 57 bp, Artificial
  Synthetic oligonucleotide
atgtaaagttagatcgcctgcacttcatcatttacaagtattaccaaaaataggtaa

SEQ ID NO: 287407 - DNA, 55 bp, Artificial
  Synthetic oligonucleotide
gaacccgtctgatgcgcaggagagtttgtgtcgtcagcacatggtgaatactgtc

SEQ ID NO: 287408 - DNA, 55 bp, Artificial
  Synthetic oligonucleotide
gaacccggtatcattccacaccctggcgacatgtctgcgcacctatgactgcctg

SEQ ID NO: 287409 - DNA, 55 bp, Artificial
  Synthetic oligonucleotide
gaacccagatcccgtcttgaagtcgcggcacttgaaggggcccacaggaataccg

SEQ ID NO: 287410 - DNA, 55 bp, Artificial
  Synthetic oligonucleotide
gcacgtgaaatagtgcttctttacatatgagggatagctaaagatttcctacgag

SEQ ID NO: 287411 - DNA, 49 bp, Artificial
  Synthetic oligonucleotide
gaacccaccttacccctgaacccggaacctacctatacttaacgcggaa

SEQ ID NO: 287412 - DNA, 55 bp, Artificial
  Synthetic oligonucleotide
gcactacaccgtgaagtctgctgaccaggcgaaggagagacgagcgccatccttc

SEQ ID NO: 287413 - DNA, 55 bp, Artificial
  Synthetic oligonucleotide
gaaccaagtgaaaagcgcacggtcacacacgcactaacgcacgaataaggagtga

SEQ ID NO: 287414 - DNA, 55 bp, Artificial
  Synthetic oligonucleotide
gcactacccaaagcagatgccgtgcgttatcgtgctccgctacaagactactgag

SEQ ID NO: 287415 - DNA, 55 bp, Artificial
  Synthetic oligonucleotide
gaaaccctcattactgatggatcccacaagtgactacgagctcggttagggcggt

SEQ ID NO: 287416 - DNA, 53 bp, Artificial
  Synthetic oligonucleotide
gaggtgtaggattccggggcaattaccggggaaatggcggaggtaatcggcac

SEQ ID NO: 287417 - DNA, 55 bp, Artificial
  Synthetic oligonucleotide
ccaaatgcgattggtaacatacatccacctaaaacaagagttttaaccgctgtta

SEQ ID NO: 287418 - DNA, 55 bp, Artificial
  Synthetic oligonucleotide
gcagagagaaacaacagccttgcatacgtacagagtgaacgaaggatgacggcgc

SEQ ID NO: 287419 - DNA, 55 bp, Artificial
  Synthetic oligonucleotide
gaaaagcggatgcggatgtgtgggcgccagtgcacatgcgtaatgtcgggcgggt

SEQ ID NO: 287420 - DNA, 55 bp, Artificial
  Synthetic oligonucleotide
gcagagcttacaagatagcatttcagaggacagcttagatggattagtgtccagc

SEQ ID NO: 287421 - DNA, 55 bp, Artificial
  Synthetic oligonucleotide
gcagataccaccgtgccactacccgaggacgtctgctgtggcagctctgtgcaag

SEQ ID NO: 287422 - DNA, 53 bp, Artificial
  Synthetic oligonucleotide
gaggttaaccatctgtaagtctttagtcccagtcgtggtgttaattacctttg

SEQ ID NO: 287423 - DNA, 55 bp, Artificial
  Synthetic oligonucleotide
cttttctgtatcctggaagcgcgctttagcgcgactgatacttgtgacttgtggc

SEQ ID NO: 287424 - DNA, 55 bp, Artificial
  Synthetic oligonucleotide
ctttgggaccagattatgttcgccttgggcggggagtacgcagcactcgtggggt

SEQ ID NO: 287425 - DNA, 55 bp, Artificial
  Synthetic oligonucleotide
ctttggccactggtaggcgtccatgggctggtttcgggcacggcttgtaggacgt

SEQ ID NO: 287426 - DNA, 55 bp, Artificial
  Synthetic oligonucleotide
ctttgatcgctgcccttgatgtgctgtggcctgcgcgcgagtatcacgccatgcg

SEQ ID NO: 287427 - DNA, 55 bp, Artificial
  Synthetic oligonucleotide
ctttgacgaaatacgatcccttatgagtcgttcatcacaacttcggcagtctatg

SEQ ID NO: 287428 - DNA, 58 bp, Artificial
  Synthetic oligonucleotide
ggacaaagcataacacaagtatctgaggatttaggaatagaacgcaaaagatgttatt

SEQ ID NO: 287429 - DNA, 55 bp, Artificial
  Synthetic oligonucleotide
gaggttgctgtgggatgtatccgatgtgccgtgatgggtacgtgcgcgcatgcgt

SEQ ID NO: 287430 - DNA, 55 bp, Artificial
  Synthetic oligonucleotide
ctttgaagtgcctgctgcagctctcttcgcgtatttgcgcgactccgcggttaac

SEQ ID NO: 287431 - DNA, 55 bp, Artificial
  Synthetic oligonucleotide
ctttctttggccaagttgcagaccaatagagtacttgtctatctggacgaattga

SEQ ID NO: 287432 - DNA, 55 bp, Artificial
  Synthetic oligonucleotide
ctttcttattcgcacggatgcctcccatcgtttaacttcgcctctgccccaaagc

SEQ ID NO: 287433 - DNA, 55 bp, Artificial
  Synthetic oligonucleotide
gcagatcagtcgagcactcaccacggtgtgtttggtagcggggcgagcactcacc

SEQ ID NO: 287434 - DNA, 55 bp, Artificial
  Synthetic oligonucleotide
gcacttactgcaatattatgacagagttgtgttttccccgttctgtattctccga

SEQ ID NO: 287435 - DNA, 55 bp, Artificial
  Synthetic oligonucleotide
gaaagcaactgacttgtgcagttcgttcggatcgatagacaggtggaaatcgccg

SEQ ID NO: 287436 - DNA, 55 bp, Artificial
  Synthetic oligonucleotide
gcacttcatcgactgttcgcaatgcaggagacgctctttccgactaccatctcga

SEQ ID NO: 287437 - DNA, 55 bp, Artificial
  Synthetic oligonucleotide
gaaagacggagcggcatccccggtcgattcgcaagggctcaacgcacagactgca

SEQ ID NO: 287438 - DNA, 55 bp, Artificial
  Synthetic oligonucleotide
gcacttgcgaccgacttgcgggtgtgacttttgaaccccgtgacgctcatcttgg

SEQ ID NO: 287439 - DNA, 60 bp, Artificial
  Synthetic oligonucleotide
gttatagttcgtggtgcatatgtaagattccgttatgatcaattaatgagaataggttgg

SEQ ID NO: 287440 - DNA, 55 bp, Artificial
  Synthetic oligonucleotide
gaggtctctctctcgcacttgctgtatgctgttaccgcactgactgctatgacag

SEQ ID NO: 287441 - DNA, 55 bp, Artificial
  Synthetic oligonucleotide
gcacttgctgtcccaccagggcacctgctgtaggtgtgtagccggacctgaggtt

SEQ ID NO: 287442 - DNA, 55 bp, Artificial
  Synthetic oligonucleotide
gaaacgttcgccactcttgtaggaatgtgtagcagagactaaagcggcgttcgtt

SEQ ID NO: 287443 - DNA, 55 bp, Artificial
  Synthetic oligonucleotide
gaggtctgtataactgcttgacacagcctgccgtgatctcttgcgtgtggtggac

SEQ ID NO: 287444 - DNA, 55 bp, Artificial
  Synthetic oligonucleotide
gaggtgaggtacattgaaaacaagagtggtgtgagaagtgtggaacttgagattt

SEQ ID NO: 287445 - DNA, 55 bp, Artificial
  Synthetic oligonucleotide
gaggtgggcggttcctattttcacttcagcgtggctacgtagttaccggtcagtc

SEQ ID NO: 287446 - DNA, 55 bp, Artificial
  Synthetic oligonucleotide
gcagacccgtgtgaacactgaaatggtagtccgaatgggagtgtgtcacgacgtg

SEQ ID NO: 287447 - DNA, 55 bp, Artificial
  Synthetic oligonucleotide
gcagactgctctgtacgacagcactgccagtcgatagcccggcgttgccacagtc

SEQ ID NO: 287448 - DNA, 55 bp, Artificial
  Synthetic oligonucleotide
gaaacgcgcagcgttggaaaaggaatgcgcaccatactagtcaggtacggtgtgt

SEQ ID NO: 287449 - DNA, 55 bp, Artificial
  Synthetic oligonucleotide
gaggtggtggccacaaagtacacaaacggcggcacatgcgtgagggttccatcct

SEQ ID NO: 287450 - DNA, 60 bp, Artificial
  Synthetic oligonucleotide
atgtcctataaattcaccagttgtataagcaaatgttccagatgagacatatttatagtc

SEQ ID NO: 287451 - DNA, 55 bp, Artificial
  Synthetic oligonucleotide
gaaacgaggcgaggcgtgagtgcacaccaacacgtatgggaggtccggcaagctg

SEQ ID NO: 287452 - DNA, 55 bp, Artificial
  Synthetic oligonucleotide
gcagacttcctccagccacaacgtgactgacaaggtgcatcgcggagtcaagtac

SEQ ID NO: 287453 - DNA, 55 bp, Artificial
  Synthetic oligonucleotide
ctgtcaaacgggctggtgcatttgcgtgcagcgcctctcattcgatgggacgtgt

SEQ ID NO: 287454 - DNA, 55 bp, Artificial
  Synthetic oligonucleotide
gcagttgcatgtgcaagagactgttagacgggcgcagcccactcttttggtcgcg

SEQ ID NO: 287455 - DNA, 55 bp, Artificial
  Synthetic oligonucleotide
gcagttttgcaagttagcgtgtcggcgcgtatgccacgctggcttctctgttatg

SEQ ID NO: 287456 - DNA, 55 bp, Artificial
  Synthetic oligonucleotide
ctgtatggacgtaacctccaggcaaagaataatgaccggtcaaaacggaatcagt

SEQ ID NO: 287457 - DNA, 55 bp, Artificial
  Synthetic oligonucleotide
ctgtatgcttcttggcggttagtagtccacttggagaatcaagcgtctgtgcagc

SEQ ID NO: 287458 - DNA, 55 bp, Artificial
  Synthetic oligonucleotide
gataaaactgacgtatcacatgataaaacggacgtatcacatgataaaacggacg

SEQ ID NO: 287459 - DNA, 55 bp, Artificial
  Synthetic oligonucleotide
ctgtagtagtccagtatgatatatgacgcgagacctttgtgcgttctggtgcctc

SEQ ID NO: 287460 - DNA, 55 bp, Artificial
  Synthetic oligonucleotide
gagtggttctggtgaggcggggagagagacggtcggatgtgcgcacctcttctct

SEQ ID NO: 287461 - DNA, 53 bp, Artificial
  Synthetic oligonucleotide
gttatgaagatgtttttactacttctaagggacaaacgagaacttttggcaac

SEQ ID NO: 287462 - DNA, 53 bp, Artificial
  Synthetic oligonucleotide
gcataaggtaggttccgggttaagcataagataggttccgggttaagcataag

SEQ ID NO: 287463 - DNA, 55 bp, Artificial
  Synthetic oligonucleotide
ctgtaggcggtgatctgtgcatgttgtctatttcgcgggaaactgggtatcgcga

SEQ ID NO: 287464 - DNA, 55 bp, Artificial
  Synthetic oligonucleotide
ctgtaggagctgcagtagtggtacaactgcgtgtatcagtggtctatcggtgtgc

SEQ ID NO: 287465 - DNA, 55 bp, Artificial
  Synthetic oligonucleotide
ctgtactagggccctatgcgaatcctgaagcgaaggtgggccagagtatccactg

SEQ ID NO: 287466 - DNA, 55 bp, Artificial
  Synthetic oligonucleotide
gagtttgcgtccgtgtcatctcttcggggaaagacaggtgactgcctcgtgtagc

SEQ ID NO: 287467 - DNA, 55 bp, Artificial
  Synthetic oligonucleotide
ctgtacgttggcatgttcgaccgactggtcgagtttgtgaacgccgccattcagc

SEQ ID NO: 287468 - DNA, 55 bp, Artificial
  Synthetic oligonucleotide
ctgtacaaacacgaagggacgacagaaaagcgagaaataaacgtatgcctgcacg

SEQ ID NO: 287469 - DNA, 55 bp, Artificial
  Synthetic oligonucleotide
gcatagcgtgaatgagagacagcgcacctgcagagagggctacaggttcgtcgag

SEQ ID NO: 287470 - DNA, 55 bp, Artificial
  Synthetic oligonucleotide
ctggtgcactctcgccagaggtcgcaggaccgcgatatgcactctatgttcacgc

SEQ ID NO: 287471 - DNA, 55 bp, Artificial
  Synthetic oligonucleotide
gcataggagtcggtctggcaacttgatagagagtcgaagcttcgggcggaggaat

SEQ ID NO: 287472 - DNA, 60 bp, Artificial
  Synthetic oligonucleotide
atgtcagtaacttgaactcttcatcggagttatcagtgacttgtgttgtaaccttacaga

SEQ ID NO: 287473 - DNA, 55 bp, Artificial
  Synthetic oligonucleotide
gagtgtgcagtatgcgatgctgtttccacgtacaccctggccaactgcagtgcct

SEQ ID NO: 287474 - DNA, 55 bp, Artificial
  Synthetic oligonucleotide
ctggtagatgcgaggagtacgataacggtggtcggtgggtcttctctgggtgtaa

SEQ ID NO: 287475 - DNA, 55 bp, Artificial
  Synthetic oligonucleotide
gcagtgaattctgtccctatgaaagttgcatacccttcgtggtatacgacttgtt

SEQ ID NO: 287476 - DNA, 54 bp, Artificial
  Synthetic oligonucleotide
cttacgacaatctgctcccgtttccggagtagactttccgcccgcttgtcaggg

SEQ ID NO: 287477 - DNA, 55 bp, Artificial
  Synthetic oligonucleotide
gcagtggggtgtgtgaagcgtccgtatagaagacttgacgctgtcgttggtccgt

SEQ ID NO: 287478 - DNA, 55 bp, Artificial
  Synthetic oligonucleotide
ctgttgtgaccattccctctgtacgcgatggactttgcacgcaacgtaccgcgcc

SEQ ID NO: 287479 - DNA, 55 bp, Artificial
  Synthetic oligonucleotide
ctgttcgagtgtgaggggtgacagagttttcgctgccttttcattggcatgcgtc

SEQ ID NO: 287480 - DNA, 55 bp, Artificial
  Synthetic oligonucleotide
ctgttcacatttgagaagtgcctcgagtagtcaacattgtgcgagttgtcaactc

SEQ ID NO: 287481 - DNA, 55 bp, Artificial
  Synthetic oligonucleotide
ctgttaatacacatattcgtgtcttaataactgcgggtgacgttcttcattcatg

SEQ ID NO: 287482 - DNA, 55 bp, Artificial
  Synthetic oligonucleotide
ctgtgtcgtaaaatggacgcacgtaatggcagccgaaacgatgtgaggagagtag

SEQ ID NO: 287483 - DNA, 60 bp, Artificial
  Synthetic oligonucleotide
cattgtagtccgtagccacatactcttccaactgagctattgactcgtaactatataagt

SEQ ID NO: 287484 - DNA, 55 bp, Artificial
  Synthetic oligonucleotide
ctgtgggacagctacgagattctccatcgattttcgtagctagagaattggacag

SEQ ID NO: 287485 - DNA, 55 bp, Artificial
  Synthetic oligonucleotide
ctgtggccttacggcgcacgtgtttggtgatgtgtagttggtgcaagaggagtgc

SEQ ID NO: 287486 - DNA, 55 bp, Artificial
  Synthetic oligonucleotide
gcagtgtactccaatttggtcagcttgcgtaacttcgtccccaattcgagatatg

SEQ ID NO: 287487 - DNA, 55 bp, Artificial
  Synthetic oligonucleotide
ctgtggatagctatcttactaacgattgtttcgtgcaacgaccacaggtggagga

SEQ ID NO: 287488 - DNA, 55 bp, Artificial
  Synthetic oligonucleotide
ctgtgcacatgtcgcaagtactcccgttggccgtggcctacgcagtaagcgtccg

SEQ ID NO: 287489 - DNA, 55 bp, Artificial
  Synthetic oligonucleotide
ctgtgatggccacgcagagaccccgagagggaatgacgcgtccaacgtaacgctc

SEQ ID NO: 287490 - DNA, 55 bp, Artificial
  Synthetic oligonucleotide
gagtggtactcgactgtctcacagcgtagatcctgaagtttccccgagacgtttc

SEQ ID NO: 287491 - DNA, 55 bp, Artificial
  Synthetic oligonucleotide
ctgtgatcattctccaaccaaactgtggcatttgaacactacaccgccgtaggag

SEQ ID NO: 287492 - DNA, 55 bp, Artificial
  Synthetic oligonucleotide
ctgtcgttatccatagtggagtatgtcctgtatcccacggcgcccacctatgtgc

SEQ ID NO: 287493 - DNA, 55 bp, Artificial
  Synthetic oligonucleotide
ctgtcgtgttctcgccaggattgttcgcacagcgtacgaagcgccacacaacccc

SEQ ID NO: 287494 - DNA, 53 bp, Artificial
  Synthetic oligonucleotide
gttccaacattctaggttttttcgcgttttttcaggagaaatccgtatatcga

SEQ ID NO: 287495 - DNA, 55 bp, Artificial
  Synthetic oligonucleotide
ctgtcagctactgatagagttgaagcgcttctttcggagaacaaaggcctcggtg

SEQ ID NO: 287496 - DNA, 55 bp, Artificial
  Synthetic oligonucleotide
ctgtcacggacagcggcacataccgcaatgacgtaacgcagaccatcacgcctgc

SEQ ID NO: 287497 - DNA, 55 bp, Artificial
  Synthetic oligonucleotide
ctgtcaatagtgccagcacgtgttctgccttctgaccacggactgctttaggagc

SEQ ID NO: 287498 - DNA, 55 bp, Artificial
  Synthetic oligonucleotide
gagttcactggacccacaaatggttcgacgcctgtatgatacgtgtgttagcctg

SEQ ID NO: 287499 - DNA, 55 bp, Artificial
  Synthetic oligonucleotide
ctggagaagctgccatcgctagaattgatagacttagacatcatgaaggatcata

SEQ ID NO: 287500 - DNA, 55 bp, Artificial
  Synthetic oligonucleotide
gcatcactgtcataagagtattcgtatagttttgtcgacttatcccacctttcta

SEQ ID NO: 287501 - DNA, 55 bp, Artificial
  Synthetic oligonucleotide
ctggacagctacgcatacatgactttctcgttgatcctgcgatcctccacgacta

SEQ ID NO: 287502 - DNA, 55 bp, Artificial
  Synthetic oligonucleotide
ctggaatttgagccggagccggtattgcatgagtaaatccttgtgggattgtgat

SEQ ID NO: 287503 - DNA, 55 bp, Artificial
  Synthetic oligonucleotide
ctgcttccatcgcgttctcctgcctgagatgcattttggcccgctggagctgtgc

SEQ ID NO: 287504 - DNA, 55 bp, Artificial
  Synthetic oligonucleotide
ctgctgggacactcgagaggtgctacatcttctggagaccgttacggtgacacgc

SEQ ID NO: 287505 - DNA, 56 bp, Artificial
  Synthetic oligonucleotide
ggaagtaaaacttataatacagcgattaaatgcagttacattataaggctttccta

SEQ ID NO: 287506 - DNA, 55 bp, Artificial
  Synthetic oligonucleotide
ctgctgcactgtcgcacttacaagctcgagaacgatgatacacgtgggcaactgc

SEQ ID NO: 287507 - DNA, 55 bp, Artificial
  Synthetic oligonucleotide
gcatcaggatcactccaaggatactcgcgtcctcataggaatccgggtaagctcc

SEQ ID NO: 287508 - DNA, 55 bp, Artificial
  Synthetic oligonucleotide
ctgctgagcacacgccccgtcaagtgcctgccagttgtagttgcgtacagcgcac

SEQ ID NO: 287509 - DNA, 55 bp, Artificial
  Synthetic oligonucleotide
ctgctacttattctatgcgtaaggcctgtgcctcaaggctttactcgctgactcg

SEQ ID NO: 287510 - DNA, 55 bp, Artificial
  Synthetic oligonucleotide
ctgctacgcttgctggaccttcagtgacagagacacacaagtagtccaagaggac

SEQ ID NO: 287511 - DNA, 55 bp, Artificial
  Synthetic oligonucleotide
ctgctacgcatttgaaattttcgccccgctgatctcgagccatagccatacctag

SEQ ID NO: 287512 - DNA, 55 bp, Artificial
  Synthetic oligonucleotide
gcatccagcaattggacacacgtccaccgcctgactgagacaggcacaagcgctg

SEQ ID NO: 287513 - DNA, 55 bp, Artificial
  Synthetic oligonucleotide
gagttcatctgggacggtacacgtgactacggcacctacctatcgattcccgcga

SEQ ID NO: 287514 - DNA, 55 bp, Artificial
  Synthetic oligonucleotide
ctgcgttggtttgtggtaacataaaccgtagcattaacttatatcggtgaagccc

SEQ ID NO: 287515 - DNA, 55 bp, Artificial
  Synthetic oligonucleotide
ctgcgttctgtggttccggcagccaatataatttagcattccattacgctctcgc

SEQ ID NO: 287516 - DNA, 60 bp, Artificial
  Synthetic oligonucleotide
taagtaagagcatgctcgactctaggtaaaagcggagggagtggtgtgcgagcttgtaac

SEQ ID NO: 287517 - DNA, 60 bp, Artificial
  Synthetic oligonucleotide
catttatccttccacaaattgagatacatggcaacgcataacagttttgctcaaaatagt

SEQ ID NO: 287518 - DNA, 55 bp, Artificial
  Synthetic oligonucleotide
ctgcgtgaatgccggcacagtgtctcacaacactattccgcggacacagcagcgg

SEQ ID NO: 287519 - DNA, 55 bp, Artificial
  Synthetic oligonucleotide
ctgcggaaggtcgagtaacatcatcgaaccttgatgcgagacggagggccgctgc

SEQ ID NO: 287520 - DNA, 55 bp, Artificial
  Synthetic oligonucleotide
ctgcgcttttgatgcaactcgggcagcgaggctcttcgaaagctctactaagcgg

SEQ ID NO: 287521 - DNA, 55 bp, Artificial
  Synthetic oligonucleotide
gagttggaggaggataacattcgtaacatcttgagactctgggaattattggatg

SEQ ID NO: 287522 - DNA, 55 bp, Artificial
  Synthetic oligonucleotide
ctggggtgtaccattgaagcctctacaattaaatgaactcgctgcagctttcgat

SEQ ID NO: 287523 - DNA, 55 bp, Artificial
  Synthetic oligonucleotide
gagtgtggactacatcccgcatagcagattgagcacgttggaaacggagcacttc

SEQ ID NO: 287524 - DNA, 55 bp, Artificial
  Synthetic oligonucleotide
gagtgtgtgcgcgtgggtggcgcacatgcgagaagcatcaccggatgtagcagag

SEQ ID NO: 287525 - DNA, 55 bp, Artificial
  Synthetic oligonucleotide
gcatataagcgtcggtcgtggctgcacatgcgcgtcgttgcctagcgcggttctc

SEQ ID NO: 287526 - DNA, 55 bp, Artificial
  Synthetic oligonucleotide
ctggggctccgtatcctctccctacctcggttgtgggcgcggctgcctggctaat

SEQ ID NO: 287527 - DNA, 55 bp, Artificial
  Synthetic oligonucleotide
gcatatctttgtgtccattcttgtgcagttgcctcatatcgtgatcgattttctt

SEQ ID NO: 287528 - DNA, 51 bp, Artificial
  Synthetic oligonucleotide
catttcccttctcgccatttattttggatagcggttaacctttccttttcc

SEQ ID NO: 287529 - DNA, 55 bp, Artificial
  Synthetic oligonucleotide
gcatatgttaatccgctcaccctggcccattatttggtgtgaaacctacgaccgc

SEQ ID NO: 287530 - DNA, 55 bp, Artificial
  Synthetic oligonucleotide
ctggggagtttgtcttactcccgcactgttacatagatcgccaggagcagaaacg

SEQ ID NO: 287531 - DNA, 55 bp, Artificial
  Synthetic oligonucleotide
ctgggcgagcgaagtaccatcggggagcatctcgttagatacaccccgttcagcg

SEQ ID NO: 287532 - DNA, 55 bp, Artificial
  Synthetic oligonucleotide
gagttagtagctttgttccaaaagcacatactccatttcaatggcaaggtgtgcg

SEQ ID NO: 287533 - DNA, 55 bp, Artificial
  Synthetic oligonucleotide
ctgggagtcgaaacctccgtcctttcaacttcactcgcggcgtggcccaacactc

SEQ ID NO: 287534 - DNA, 55 bp, Artificial
  Synthetic oligonucleotide
ctgggagctcgtctggcacacgttccagcagctaaattgtgagaatccgcactgg

SEQ ID NO: 287535 - DNA, 55 bp, Artificial
  Synthetic oligonucleotide
gcatattcccggtcatatgtctatgccctattaccctaaaatttgatattctcga

SEQ ID NO: 287536 - DNA, 55 bp, Artificial
  Synthetic oligonucleotide
ctggcttatcggtccctcacagcgcaggcgcgcaatagcagtgatacagcgagga

SEQ ID NO: 287537 - DNA, 55 bp, Artificial
  Synthetic oligonucleotide
ctggcggctcatgggatgagctggtgtgttcatgccgtggcgaagaggtgacgca

SEQ ID NO: 287538 - DNA, 55 bp, Artificial
  Synthetic oligonucleotide
ctggcctagcttcctatcggagccaacgtacaactacatcactatcccacatcgc

SEQ ID NO: 287539 - DNA, 60 bp, Artificial
  Synthetic oligonucleotide
gttccttcgatgttgaatcatcgttactatgtgaactatccgtaagagagtatgagtatc

SEQ ID NO: 287540 - DNA, 54 bp, Artificial
  Synthetic oligonucleotide
ctggcacccctaagaccctattctgacacccctaagaccctattctgacacccc

SEQ ID NO: 287541 - DNA, 55 bp, Artificial
  Synthetic oligonucleotide
gcatcaagtgctccgtagctacacatatcgctcatcagcatcctttgtctcctcg

SEQ ID NO: 287542 - DNA, 55 bp, Artificial
  Synthetic oligonucleotide
ctggagtcctggtcgtccgaaaagagctacgtagacaacatccgagctgtgaagg

SEQ ID NO: 287543 - DNA, 55 bp, Artificial
  Synthetic oligonucleotide
ctggaggcatagacaccgatacacttgcagatgactgaggtccaggtgcagttgc

SEQ ID NO: 287544 - DNA, 55 bp, Artificial
  Synthetic oligonucleotide
ctggagctgttaaacttcaatatcaagtatcatgcgcaacagacccacttggtga

SEQ ID NO: 287545 - DNA, 55 bp, Artificial
  Synthetic oligonucleotide
gcatcacctacggaacgccccgcctgctgctaaaggagggaccgcgtctactggc

SEQ ID NO: 287546 - DNA, 55 bp, Artificial
  Synthetic oligonucleotide
gcagcggttgagactgaaggtgacggactctcagctcagtgggacagttaagggt

SEQ ID NO: 287547 - DNA, 55 bp, Artificial
  Synthetic oligonucleotide
gcagcgtgcacatcaggagctcgtagagaaacaactcgtggccgtagagttttcg

SEQ ID NO: 287548 - DNA, 55 bp, Artificial
  Synthetic oligonucleotide
gataatgttggcgccactgctttgagcattcctctttgcaataacccatcgtggt

SEQ ID NO: 287549 - DNA, 55 bp, Artificial
  Synthetic oligonucleotide
cttgtcgtacggtttccattcgatttcctgttaacctcccatcaagcacacgcac

SEQ ID NO: 287550 - DNA, 51 bp, Artificial
  Synthetic oligonucleotide
ggaagggaatgggaactaagaccaaacacggaggtcgtgggggtaccacaa

SEQ ID NO: 287551 - DNA, 55 bp, Artificial
  Synthetic oligonucleotide
gcagcgtgtgcttaacgaggagggtcgcacccgacagctacgggcgcaactgaat

SEQ ID NO: 287552 - DNA, 55 bp, Artificial
  Synthetic oligonucleotide
cttgggcctctcgcgcggttttgtgcgcgtcttcaagagcgagtctttcccgcca

SEQ ID NO: 287553 - DNA, 55 bp, Artificial
  Synthetic oligonucleotide
gcagctcttaaatcgaaacagaatgagtgttcgcgcggtccgtttcacgctacac

SEQ ID NO: 287554 - DNA, 55 bp, Artificial
  Synthetic oligonucleotide
cttggcttaagtcctgcttacttctacgtagagattctgccttgggtaccttctt

SEQ ID NO: 287555 - DNA, 55 bp, Artificial
  Synthetic oligonucleotide
cttggagtaattggagtataagtggagattctgttgttaaccctggaatttggag

SEQ ID NO: 287556 - DNA, 55 bp, Artificial
  Synthetic oligonucleotide
cttggagcgctcgaagcacattgcctcacggcagtagtagttcaggcggtcattg

SEQ ID NO: 287557 - DNA, 55 bp, Artificial
  Synthetic oligonucleotide
gagtgcaccataaccagagacagccaacggccccgatgtcagccctggtgtctcg

SEQ ID NO: 287558 - DNA, 55 bp, Artificial
  Synthetic oligonucleotide
cttgcgcatgagaacttaagtctcacccctttgaccaactcgggaaccccagcgc

SEQ ID NO: 287559 - DNA, 55 bp, Artificial
  Synthetic oligonucleotide
gcaggctactgcaacattgctcgcttctgtaccgtgaaatacgctctgctggggc

SEQ ID NO: 287560 - DNA, 55 bp, Artificial
  Synthetic oligonucleotide
cttgcgatgaagaagtttggcacgcgagtaagagcacggttctgtggctgcacgg

SEQ ID NO: 287561 - DNA, 55 bp, Artificial
  Synthetic oligonucleotide
gttcgcggagggggctgcagggaccttcccggtgtaaggcatacttgcattcggg

SEQ ID NO: 287562 - DNA, 55 bp, Artificial
  Synthetic oligonucleotide
gcaggctccttcatgtatctcgctaggtcggagctctggattagcagcgaaattc

SEQ ID NO: 287563 - DNA, 55 bp, Artificial
  Synthetic oligonucleotide
cttgccaggcgcctgtggcaatgtctgccgtcgcagcacgtccctaggactgtca

SEQ ID NO: 287564 - DNA, 55 bp, Artificial
  Synthetic oligonucleotide
cttgcagaaataggacacgtaaggcatgaaagctttgagaatactcttcgggtcg

SEQ ID NO: 287565 - DNA, 55 bp, Artificial
  Synthetic oligonucleotide
cttgatcaaccacagcaccgtagtcgtccttccaccagtcgttagctgctgacga

SEQ ID NO: 287566 - DNA, 55 bp, Artificial
  Synthetic oligonucleotide
cttgacccgctcagcgggaaaatagctcgacatctgtcctccgtgtttctgcgag

SEQ ID NO: 287567 - DNA, 55 bp, Artificial
  Synthetic oligonucleotide
gagtcgaagcagtgcagcgatggcacacgggtactctccgccgcgctactgctca

SEQ ID NO: 287568 - DNA, 55 bp, Artificial
  Synthetic oligonucleotide
ctttatatacacaaccctaatcctcacaagcagctacaaagtatatgggatagcg

SEQ ID NO: 287569 - DNA, 55 bp, Artificial
  Synthetic oligonucleotide
gcagcctctagccggtggagttgcgagaactgcggtaaaaggcacaacgtcgtcc

SEQ ID NO: 287570 - DNA, 55 bp, Artificial
  Synthetic oligonucleotide
gagtcgcgatttaggacaggactgccgtatacttcctgacgtgtttgtctcaccg

SEQ ID NO: 287571 - DNA, 55 bp, Artificial
  Synthetic oligonucleotide
gatacaagagcatacgtgacatccctttatttaccaggatattacaacggtaagg

SEQ ID NO: 287572 - DNA, 55 bp, Artificial
  Synthetic oligonucleotide
gttctaacgaaggtgatagtgacccgtttatattgaatggaaaagtaaacgatca

SEQ ID NO: 287573 - DNA, 55 bp, Artificial
  Synthetic oligonucleotide
gcagcgaatccaagtattgttagtccaacactcgtaatagctaagcctgcattat

SEQ ID NO: 287574 - DNA, 55 bp, Artificial
  Synthetic oligonucleotide
ctttagtgtgtgctagtgattgctgcctaactaaataagaacgctctatggctcc

SEQ ID NO: 287575 - DNA, 55 bp, Artificial
  Synthetic oligonucleotide
gagtcgcgctgcaagggaccttggctgcggtgtgcggttcaagcttacccgttca

SEQ ID NO: 287576 - DNA, 55 bp, Artificial
  Synthetic oligonucleotide
gcagcgcacgatgctacttgctccacctctccaactgcgcatcggacgtgtgtgc

SEQ ID NO: 287577 - DNA, 55 bp, Artificial
  Synthetic oligonucleotide
gagtcgcgtctgtttcgcccacgctactcagttcttgcgccgtgtcacatggtcg

SEQ ID NO: 287578 - DNA, 55 bp, Artificial
  Synthetic oligonucleotide
gatacaactctgttcagtcctactgaaggtcttgtaagtatatcaagtagaggtc

SEQ ID NO: 287579 - DNA, 55 bp, Artificial
  Synthetic oligonucleotide
gcagcgcgggttgtacgtgtggtgatggtcatgagcttccgtgtgtacgaccgag

SEQ ID NO: 287580 - DNA, 55 bp, Artificial
  Synthetic oligonucleotide
ctttacgtatcatcttccatacaaagatataacggtagatagggaacaaactgcc

SEQ ID NO: 287581 - DNA, 55 bp, Artificial
  Synthetic oligonucleotide
cttgttttgtaggtagacggcatcgtactggagccagtaagacggtcgcattgcg

SEQ ID NO: 287582 - DNA, 55 bp, Artificial
  Synthetic oligonucleotide
cttgtggtcaaaatcgttctcacgtgtttcttaagctcatgtatgctctcgaatt

SEQ ID NO: 287583 - DNA, 59 bp, Artificial
  Synthetic oligonucleotide
ccaaaatagctcaatatggttagagttatggtgtgaaggaccataggtaatcagttcga

SEQ ID NO: 287584 - DNA, 55 bp, Artificial
  Synthetic oligonucleotide
gagtctgaccatgaatgatggtacatcgactatttgacgtccaacacggatgtgg

SEQ ID NO: 287585 - DNA, 55 bp, Artificial
  Synthetic oligonucleotide
gcagcgggactctgcatagcgaacgaaaccgcagctcataggccgtcggacatag

SEQ ID NO: 287586 - DNA, 55 bp, Artificial
  Synthetic oligonucleotide
gagtgaagtcgctcaagagtctcctcacagcggggacaaagtagccgtaactgga

SEQ ID NO: 287587 - DNA, 55 bp, Artificial
  Synthetic oligonucleotide
gagtgagcccgagcgaagatgccctgctttgatgattgtacagtccccatgcgat

SEQ ID NO: 287588 - DNA, 55 bp, Artificial
  Synthetic oligonucleotide
cttgtgcaacagcctagccgcatcaatgaggtgagtgcgtccagtacggctgcgc

SEQ ID NO: 287589 - DNA, 55 bp, Artificial
  Synthetic oligonucleotide
cttgtgaagcgtgcgccacccctttcatccccgctcggatctctgtcacaggagg

SEQ ID NO: 287590 - DNA, 55 bp, Artificial
  Synthetic oligonucleotide
cttccggaatgggtgtgccgttgcactaaatgccgcagcgagataaaggccgtac

SEQ ID NO: 287591 - DNA, 55 bp, Artificial
  Synthetic oligonucleotide
cttccgcacgaagatactaacgacagtaagaatcggcgagatacatgagcacggg

SEQ ID NO: 287592 - DNA, 55 bp, Artificial
  Synthetic oligonucleotide
gcaggtggtggcgaggtatgttagcaatgcgactgagaacgcacgccttgtagcg

SEQ ID NO: 287593 - DNA, 55 bp, Artificial
  Synthetic oligonucleotide
gataaggactcgcatgtgccgccttcctcgtctacagagacaaaggctccctcct

SEQ ID NO: 287594 - DNA, 60 bp, Artificial
  Synthetic oligonucleotide
ggaagaacggataatactgtcaaaaactatttctatgcaacagtcagaagacatcttcga

SEQ ID NO: 287595 - DNA, 55 bp, Artificial
  Synthetic oligonucleotide
cttcattacaactacccctccctttggacgcaatcgaagcacttcaacactcgac

SEQ ID NO: 287596 - DNA, 55 bp, Artificial
  Synthetic oligonucleotide
cttcatccctctttgtaggcagttatgctgtaagcccacatgtggacgtcaccag

SEQ ID NO: 287597 - DNA, 55 bp, Artificial
  Synthetic oligonucleotide
cttcatactgtgagccactttagctattccactgggtggcatcatacctgtccac

SEQ ID NO: 287598 - DNA, 55 bp, Artificial
  Synthetic oligonucleotide
cttcataatggcatggaggtaaggtggtcgtcctcgtggtagagtatgtcacctg

SEQ ID NO: 287599 - DNA, 55 bp, Artificial
  Synthetic oligonucleotide
gcagtcatacattaccagttggttgccctactgttcaagtgacgctttccgccgc

SEQ ID NO: 287600 - DNA, 55 bp, Artificial
  Synthetic oligonucleotide
cttcaccaaggcgaaagagcatgatgtcaccagggtgcacttcgcagctacgaac

SEQ ID NO: 287601 - DNA, 55 bp, Artificial
  Synthetic oligonucleotide
gagtgcgcccctctgaccattttagcagaacatgaaaagccacgtgtcagtgcgc

SEQ ID NO: 287602 - DNA, 55 bp, Artificial
  Synthetic oligonucleotide
gcagtcgaaagcgtgcgtaccagtactgtcctacgagcacagtcgccgctacccc

SEQ ID NO: 287603 - DNA, 55 bp, Artificial
  Synthetic oligonucleotide
cttcacatagcacaggtccatcggtaagtagctcatcaccatctcgagatatgca

SEQ ID NO: 287604 - DNA, 55 bp, Artificial
  Synthetic oligonucleotide
cttcacacggatagaggcggattggcttcgctacgcacagagaacgggatactcg

SEQ ID NO: 287605 - DNA, 57 bp, Artificial
  Synthetic oligonucleotide
gacgtttggaacgtgagggaccggcactttcactctcactaccacgtgtgttgtcgc

SEQ ID NO: 287606 - DNA, 55 bp, Artificial
  Synthetic oligonucleotide
gcagtctgcaaaggcatctctaccttaactcacaaggccgtctgcccttgaaccg

SEQ ID NO: 287607 - DNA, 55 bp, Artificial
  Synthetic oligonucleotide
cttatttctattgctgaagttgacgtaccaggttctatagtgtcgctgatttcct

SEQ ID NO: 287608 - DNA, 55 bp, Artificial
  Synthetic oligonucleotide
cttatgagacgctgcagcgaatgcggctcacatgggaagcactcgactcgctggc

SEQ ID NO: 287609 - DNA, 55 bp, Artificial
  Synthetic oligonucleotide
gagtggaaaccatctatagtgccggagaaccatctagaaaatgcgcctgtaaacg

SEQ ID NO: 287610 - DNA, 55 bp, Artificial
  Synthetic oligonucleotide
cttagtgaacgaggcggagggcactctcaactaccgtcaattctgcgagtggctc

SEQ ID NO: 287611 - DNA, 55 bp, Artificial
  Synthetic oligonucleotide
gcagtgaagagattactcgcattcatactgaaatcctaccgctattgacaggctg

SEQ ID NO: 287612 - DNA, 55 bp, Artificial
  Synthetic oligonucleotide
cttgacatgctgcttgacgtacttcgtagattgtgtcccgtactccattatctgt

SEQ ID NO: 287613 - DNA, 55 bp, Artificial
  Synthetic oligonucleotide
cttgaatggtagtttaaggtggtatgactgaagtctgtaaccatgcaatatgggt

SEQ ID NO: 287614 - DNA, 55 bp, Artificial
  Synthetic oligonucleotide
cttgaacaaggtcaattacgacttttggaagtcgacaatcctgtggtgttacctg

SEQ ID NO: 287615 - DNA, 54 bp, Artificial
  Synthetic oligonucleotide
gcagggatggaacgttttcgaggagtaaaggtgggcgtatgtaaatgcgtaacg

SEQ ID NO: 287616 - DNA, 52 bp, Artificial
  Synthetic oligonucleotide
cccagtaacccattttagcgtaagggattacaccagattcgtaacggtcact

SEQ ID NO: 287617 - DNA, 55 bp, Artificial
  Synthetic oligonucleotide
cttctggttctttgcgatcgcaccgtggattcatctgccacaagacactcgacgc

SEQ ID NO: 287618 - DNA, 55 bp, Artificial
  Synthetic oligonucleotide
gagtgcgacaggcttcgctgccatgtcttcccctgatgcgccttgtgccacacct

SEQ ID NO: 287619 - DNA, 55 bp, Artificial
  Synthetic oligonucleotide
cttctcctcgacacgctaagcacatggagaacttgacacgagtatcaggagcccc

SEQ ID NO: 287620 - DNA, 55 bp, Artificial
  Synthetic oligonucleotide
gcagggtgtcataagcgacacaccgctcagcgcccaatcccgtgtgccgatacag

SEQ ID NO: 287621 - DNA, 55 bp, Artificial
  Synthetic oligonucleotide
cttctactccgtcatgcaccgctccgtgcactcgacggcgctattctcgtgcgct

SEQ ID NO: 287622 - DNA, 55 bp, Artificial
  Synthetic oligonucleotide
cttcgtgggtttcattattggccgtcaaagaattacgcgaagcaggcctgatcca

SEQ ID NO: 287623 - DNA, 55 bp, Artificial
  Synthetic oligonucleotide
cttcggtgctccctgaggccgcagtcgcctttcgtgagaggattcgctgtgacga

SEQ ID NO: 287624 - DNA, 55 bp, Artificial
  Synthetic oligonucleotide
cttcggcgaccttcatatatccctactcgcggagtagctacatgaccgatcggac

SEQ ID NO: 287625 - DNA, 55 bp, Artificial
  Synthetic oligonucleotide
cttcggacctccccgtacagctgtcctcctacctgtttgttaagaagcttctcaa

SEQ ID NO: 287626 - DNA, 55 bp, Artificial
  Synthetic oligonucleotide
cttcgcgaaggggcgatatgtaaggagtcaccttcggctcatcacaccggtgcgc

SEQ ID NO: 287627 - DNA, 53 bp, Artificial
  Synthetic oligonucleotide
taagggagattccaacttaaaggacatacgtgaattagatttaaaatacgtat

SEQ ID NO: 287628 - DNA, 59 bp, Artificial
  Synthetic oligonucleotide
atccaccattaagtacatctttaatgtctttatctcctgttgctgtagacgttattata

SEQ ID NO: 287629 - DNA, 55 bp, Artificial
  Synthetic oligonucleotide
cttcgcaccgactgtttcttttacctcacgagtcgattatcaaaatttgatcttt

SEQ ID NO: 287630 - DNA, 55 bp, Artificial
  Synthetic oligonucleotide
cttcgcaacgacgtagccgatcttacgcagcttcgacacagatcctacgtggccc

SEQ ID NO: 287631 - DNA, 55 bp, Artificial
  Synthetic oligonucleotide
cttcgaggggtagataggatccattgatgtgggttcattcgtagactctacatct

SEQ ID NO: 287632 - DNA, 55 bp, Artificial
  Synthetic oligonucleotide
cttcgaatatcctacagagcagtattatataagtgaggaagacgccggacaattc

SEQ ID NO: 287633 - DNA, 55 bp, Artificial
  Synthetic oligonucleotide
cttcgaagacgctccgcagagactggatgggatggcagtcaaacagaaagcgcga

SEQ ID NO: 287634 - DNA, 55 bp, Artificial
  Synthetic oligonucleotide
cttcctaatatgaacaaagcaggtatcataggtagagtgatagatgtccacgatc

SEQ ID NO: 287635 - DNA, 55 bp, Artificial
  Synthetic oligonucleotide
gagtgcgcacacgggattaaagcaggaaagtgcgatccagagccgaaacatttcg

SEQ ID NO: 287636 - DNA, 49 bp, Artificial
  Synthetic oligonucleotide
cttccggtggaaggccttctgtaaccccttacggagttataactaaagg

SEQ ID NO: 287637 - DNA, 55 bp, Artificial
  Synthetic oligonucleotide
gatccgagtgggtgtagccgacgtacgatgagacgcatacgtgttcggagcgggg

SEQ ID NO: 287638 - DNA, 55 bp, Artificial
  Synthetic oligonucleotide
gactgactagtcccagtacggtggcccggatcattctaacatttgacgagtcgtc

SEQ ID NO: 287639 - DNA, 54 bp, Artificial
  Synthetic oligonucleotide
cgcgaaagctatggctagtaatctttggctgacccggtagtattttagaaacct

SEQ ID NO: 287640 - DNA, 55 bp, Artificial
  Synthetic oligonucleotide
gcaaacccaacgagcacgcagaagggtcagtgcaaagcaacgtcagggtctcgag

SEQ ID NO: 287641 - DNA, 55 bp, Artificial
  Synthetic oligonucleotide
gactctttgtgtgtgggcgccccgttttgctctgatgtactctcgtatgatgagc

SEQ ID NO: 287642 - DNA, 55 bp, Artificial
  Synthetic oligonucleotide
gactctcgtctacaaactgaaaatctgatgtcttaccactagacgaaagggctac

SEQ ID NO: 287643 - DNA, 55 bp, Artificial
  Synthetic oligonucleotide
gactctcctccagtacgttcaattgcacaggattccctaactagttccttagcac

SEQ ID NO: 287644 - DNA, 55 bp, Artificial
  Synthetic oligonucleotide
gatccagcgaattggatcacggggctagtacacgaatgcgggtttgcaatcggca

SEQ ID NO: 287645 - DNA, 55 bp, Artificial
  Synthetic oligonucleotide
gagctccccaataaaactggcggtcactaggtcgcgtagcagagacggcgtgtgg

SEQ ID NO: 287646 - DNA, 55 bp, Artificial
  Synthetic oligonucleotide
gactcgtcatactcagacgagctctcacacaacgtggatgcaagttactacgaag

SEQ ID NO: 287647 - DNA, 55 bp, Artificial
  Synthetic oligonucleotide
gactcggggaagaaaatgtgcgcgctgctccccttatgcatgttcacctgttcgg

SEQ ID NO: 287648 - DNA, 55 bp, Artificial
  Synthetic oligonucleotide
gactccttccatcggctctcatgtaccgcggcatgcggcgaggcagcagtcatgt

SEQ ID NO: 287649 - DNA, 55 bp, Artificial
  Synthetic oligonucleotide
gactcacaatggaaacgtacgcattcaggtaaccgcgctcgagtacatcgcacag

SEQ ID NO: 287650 - DNA, 57 bp, Artificial
  Synthetic oligonucleotide
gaggtagtttacaatataatgtaaatacccaaattcgaacatataattcttctagca

SEQ ID NO: 287651 - DNA, 55 bp, Artificial
  Synthetic oligonucleotide
gagctcctgtccggcctagtgagtgacacaaggaaaagctagcgttggaatgggg

SEQ ID NO: 287652 - DNA, 54 bp, Artificial
  Synthetic oligonucleotide
gactatgtatatcttatacccaaaaccgaaaacccctctagtggtgttgttgtg

SEQ ID NO: 287653 - DNA, 55 bp, Artificial
  Synthetic oligonucleotide
gagctcgagtgacgctgagttctccggtgctatttcgtagcctcgagtaacaacg

SEQ ID NO: 287654 - DNA, 55 bp, Artificial
  Synthetic oligonucleotide
gactacgaacagtccgtggaactggtacttccgggtatgttcaaatgagtaagtc

SEQ ID NO: 287655 - DNA, 55 bp, Artificial
  Synthetic oligonucleotide
gactaagcagcacgtctacttatcgctgtgtttacgcggcgcacagtgtacccgc

SEQ ID NO: 287656 - DNA, 55 bp, Artificial
  Synthetic oligonucleotide
gcaaagcaatacaccagcgaggataagggcgcatcaggggtacacagggagagag

SEQ ID NO: 287657 - DNA, 55 bp, Artificial
  Synthetic oligonucleotide
gactaacgaagtttaacatcctaaagagcgcctcggttcgtgtctgtgtccctgt

SEQ ID NO: 287658 - DNA, 55 bp, Artificial
  Synthetic oligonucleotide
gagctctcgtatgttgccgtgccgtgctgcccacattctacagttacgggttcac

SEQ ID NO: 287659 - DNA, 55 bp, Artificial
  Synthetic oligonucleotide
gacgttggaggacaccaagagaagagcggaacaaagcacactgcgaattacgctc

SEQ ID NO: 287660 - DNA, 55 bp, Artificial
  Synthetic oligonucleotide
gacgttactgaatcttctacggcacgtgcttgctaatattaacacactacacatg

SEQ ID NO: 287661 - DNA, 54 bp, Artificial
  Synthetic oligonucleotide
gagggttagggtctacctaaaggagatgagtcggtacaagaagacgttgaggcc

SEQ ID NO: 287662 - DNA, 55 bp, Artificial
  Synthetic oligonucleotide
gacgtggcgttgcgtcgttattacaacacagtagctgccagcggtagtgggccgt

SEQ ID NO: 287663 - DNA, 55 bp, Artificial
  Synthetic oligonucleotide
gagcgtcgataatagaagcgcaaagtgtgatagtgaaaggggcaccccggcgaaa

SEQ ID NO: 287664 - DNA, 53 bp, Artificial
  Synthetic oligonucleotide
gatttcaaaatctatacttagtaaaccccgttcaggagcaaagtttagcggaa

SEQ ID NO: 287665 - DNA, 55 bp, Artificial
  Synthetic oligonucleotide
gacttgtatctctcgtttagtttggatagttcatcttaagtagcagctcctactg

SEQ ID NO: 287666 - DNA, 55 bp, Artificial
  Synthetic oligonucleotide
gagcgtgatacggcagagagggcaaaggtggcaccaattaatgttcacattgatg

SEQ ID NO: 287667 - DNA, 55 bp, Artificial
  Synthetic oligonucleotide
gacttgccacgaataactctacctacacattgagaggcagttctcattgcatcga

SEQ ID NO: 287668 - DNA, 55 bp, Artificial
  Synthetic oligonucleotide
gatttcggttgctcatgaggtcccagttgtagcttccgatcgagctccacacgct

SEQ ID NO: 287669 - DNA, 55 bp, Artificial
  Synthetic oligonucleotide
gatttctagttaaaatggctgaatgccttgagcgtatgtctacctcaactactct

SEQ ID NO: 287670 - DNA, 55 bp, Artificial
  Synthetic oligonucleotide
gatttcttgggtcggggtattgctgatctctatagttgggattacttgggtcggg

SEQ ID NO: 287671 - DNA, 55 bp, Artificial
  Synthetic oligonucleotide
gagctaagtctctgtcactgcatgtcgttactgtacatcagctgcgtcgcgcacc

SEQ ID NO: 287672 - DNA, 58 bp, Artificial
  Synthetic oligonucleotide
cgcgactcgaagctgacgttcatcctgaaggactcgcttggcgggaactcgaagacgt

SEQ ID NO: 287673 - DNA, 55 bp, Artificial
  Synthetic oligonucleotide
gacttcgcaggcgacagcacaattagcttccgttctcgcactactcagacgccat

SEQ ID NO: 287674 - DNA, 53 bp, Artificial
  Synthetic oligonucleotide
gatttgggcaattgaacggctcacttttacggttacgcttcaagccccgtaac

SEQ ID NO: 287675 - DNA, 55 bp, Artificial
  Synthetic oligonucleotide
gacttccattgagggaattcgtgccagtctttaagcagatatacactgggccagt

SEQ ID NO: 287676 - DNA, 55 bp, Artificial
  Synthetic oligonucleotide
gattttggttttgctcgtattgtcaacgatctagaccaagctgtcagaatgacct

SEQ ID NO: 287677 - DNA, 55 bp, Artificial
  Synthetic oligonucleotide
gacttagatctgaaggaaaagctacgcatatatgtgatttggtaaagccgagcct

SEQ ID NO: 287678 - DNA, 55 bp, Artificial
  Synthetic oligonucleotide
gacttactgagccttcgacattctcagtcattgggttcactaaagcaggtttaca

SEQ ID NO: 287679 - DNA, 55 bp, Artificial
  Synthetic oligonucleotide
gacttaagtacaggaaagctatacgaaaatgagggaacggggcaatccagccaga

SEQ ID NO: 287680 - DNA, 55 bp, Artificial
  Synthetic oligonucleotide
gactgtgtacgtggtatcttgtcatctctctatcgtctgagtgatgcttgggtct

SEQ ID NO: 287681 - DNA, 55 bp, Artificial
  Synthetic oligonucleotide
gactgtgcgtgttttccgctacgagatacgcgacgtgagccacatatacgacatg

SEQ ID NO: 287682 - DNA, 55 bp, Artificial
  Synthetic oligonucleotide
gagctacaagccacgtttgccctgtgtacgcatgctgtgtagaggttgtgccacc

SEQ ID NO: 287683 - DNA, 60 bp, Artificial
  Synthetic oligonucleotide
agatatgctaggacaagctagaagaatcactgttacaaaagaagggacgactattatagc

SEQ ID NO: 287684 - DNA, 55 bp, Artificial
  Synthetic oligonucleotide
gactgtacttgtacaggatctttattaggagtttatgctctcgtgcttgcaaaat

SEQ ID NO: 287685 - DNA, 55 bp, Artificial
  Synthetic oligonucleotide
gactgcgcctcagggagcacgtgcactccaagacgctctaaaagagggtcgtccg

SEQ ID NO: 287686 - DNA, 55 bp, Artificial
  Synthetic oligonucleotide
gactgcacgccttgattcgggtgggcggcgtctatcggagggaaagtagagggtc

SEQ ID NO: 287687 - DNA, 55 bp, Artificial
  Synthetic oligonucleotide
gagctacagtacgctggcgttgtgcacatgcgtcctctatgcccctcacgccgtc

SEQ ID NO: 287688 - DNA, 55 bp, Artificial
  Synthetic oligonucleotide
gactgagtagaccttgcagccaatgtgtatacgtgaaacatagggtagcgtacat

SEQ ID NO: 287689 - DNA, 55 bp, Artificial
  Synthetic oligonucleotide
gcaacatgtgtggattaccagagacgagtgcggatcgcacaagaggaccagtgcg

SEQ ID NO: 287690 - DNA, 55 bp, Artificial
  Synthetic oligonucleotide
gcaacccaaaggcgagttgtccctcttggtgctagccagtcgctgcactgtggcc

SEQ ID NO: 287691 - DNA, 52 bp, Artificial
  Synthetic oligonucleotide
gcaaccccagtaacgacaaacccaacgtattgccacccggaaggtaattcaa

SEQ ID NO: 287692 - DNA, 55 bp, Artificial
  Synthetic oligonucleotide
gacgggtgatacgaattgcctgtccgtcgtgtgagcctctcgcctcttctcccgt

SEQ ID NO: 287693 - DNA, 55 bp, Artificial
  Synthetic oligonucleotide
gaggacacgaacagacgctcgtaatgcaacgaggctcacccgcgtcacttgtcgg

SEQ ID NO: 287694 - DNA, 57 bp, Artificial
  Synthetic oligonucleotide
agatagtttctaactcgtcagtttgggtttgcacgcataacactaacatgttcgtta

SEQ ID NO: 287695 - DNA, 55 bp, Artificial
  Synthetic oligonucleotide
gacggggttccctccggagacgcatctcgcaagttgcttatccctcccactgtgg

SEQ ID NO: 287696 - DNA, 55 bp, Artificial
  Synthetic oligonucleotide
gcaacccgcagcagatcggaatagaacaacacatgtatgcctctgtcttttcgtc

SEQ ID NO: 287697 - DNA, 55 bp, Artificial
  Synthetic oligonucleotide
gacggcaacgtagaaaatccgtcatcctcgcaagcttgcataccaaggtacgcct

SEQ ID NO: 287698 - DNA, 55 bp, Artificial
  Synthetic oligonucleotide
gcaaccgcgtttgcgatgcagtcgcacttctcccgtttgtgtgtggactggtctc

SEQ ID NO: 287699 - DNA, 55 bp, Artificial
  Synthetic oligonucleotide
gacggaattttacctttgtcagcggatacacttgcattgcaaggagagatagcag

SEQ ID NO: 287700 - DNA, 54 bp, Artificial
  Synthetic oligonucleotide
gacgcttccagaatctaacttcttataaatggtagcgccggtttcccgggtatc

SEQ ID NO: 287701 - DNA, 55 bp, Artificial
  Synthetic oligonucleotide
gcaacgagagaccgtgttcgttctgtagtaatgggtttcaggtcgcgcttgtaaa

SEQ ID NO: 287702 - DNA, 55 bp, Artificial
  Synthetic oligonucleotide
gacgctgctattagttagaaaacatcttggtcaatagtgaataccgctgaccatt

SEQ ID NO: 287703 - DNA, 55 bp, Artificial
  Synthetic oligonucleotide
gcaacggtccctccgcagtatattcgtcacaacccggagtggcacagaccacctt

SEQ ID NO: 287704 - DNA, 55 bp, Artificial
  Synthetic oligonucleotide
gaggacctcgtatcagtgagctgcacccatcgggtcgtcagtacagcctcggtca

SEQ ID NO: 287705 - DNA, 55 bp, Artificial
  Synthetic oligonucleotide
agatagactcccccataaatacggacctaaagcagaatgccccggtaatattgag

SEQ ID NO: 287706 - DNA, 55 bp, Artificial
  Synthetic oligonucleotide
gcaacgtaccgccctaccaacttccaaatgagtctgtgagcccgattagaagcgc

SEQ ID NO: 287707 - DNA, 55 bp, Artificial
  Synthetic oligonucleotide
gacgctgcgctgtgtgaggcgatgctagacgaccgacagctcttgcgggctgacg

SEQ ID NO: 287708 - DNA, 55 bp, Artificial
  Synthetic oligonucleotide
gacgctctcgatcagagaccaagcggcgtcgtacccagtcctcgcgtggttggaa

SEQ ID NO: 287709 - DNA, 55 bp, Artificial
  Synthetic oligonucleotide
gacgcggacgatcctaatgtctctcctcgccccacgagggagtccaacgcgagat

SEQ ID NO: 287710 - DNA, 54 bp, Artificial
  Synthetic oligonucleotide
gacgcctcgggtaggttagccttcgtccaggtacgtcgttggacagtatccgcg

SEQ ID NO: 287711 - DNA, 55 bp, Artificial
  Synthetic oligonucleotide
gacgcattagcgatgagccgggatggggcgagagggtattgcaatcaccgcaccg

SEQ ID NO: 287712 - DNA, 55 bp, Artificial
  Synthetic oligonucleotide
gcaactcacgttgtccgtaataaataaggtgtcactttagccttcagtactccct

SEQ ID NO: 287713 - DNA, 55 bp, Artificial
  Synthetic oligonucleotide
gcaaagcagcgggttgtgaagggagcagcgcagtattttctagtagacgcggcgc

SEQ ID NO: 287714 - DNA, 55 bp, Artificial
  Synthetic oligonucleotide
gagctgaggatacacaacaaggcgacacgcctccaatatatactcgcagacagcg

SEQ ID NO: 287715 - DNA, 55 bp, Artificial
  Synthetic oligonucleotide
gacgtgctagggaagccaacgacagtgtggtgtgccccgaattccggattcgcgg

SEQ ID NO: 287716 - DNA, 56 bp, Artificial
  Synthetic oligonucleotide
tccgtatatcgatgtctttaaaaactacgctattggattcaacgtccaggacttcc

SEQ ID NO: 287717 - DNA, 55 bp, Artificial
  Synthetic oligonucleotide
gacgtcttaaagaacgtattcgattatttgcactaccttgacgtgccaaccatcc

SEQ ID NO: 287718 - DNA, 55 bp, Artificial
  Synthetic oligonucleotide
gcaaaggaggaaagacgatcaagaaactaaaagcgtatgctggcacgcaccagaa

SEQ ID NO: 287719 - DNA, 55 bp, Artificial
  Synthetic oligonucleotide
gacgtcgtccactcttccagcgaaggactccatcatgtggacccttgccacgaac

SEQ ID NO: 287720 - DNA, 55 bp, Artificial
  Synthetic oligonucleotide
gagctgagttacagataacatagtacctactgagctaaggtcatctaacgtcatt

SEQ ID NO: 287721 - DNA, 55 bp, Artificial
  Synthetic oligonucleotide
gcaaaggcgagcccggacccctctgactgcacttgttcgctcacggtagagtctg

SEQ ID NO: 287722 - DNA, 55 bp, Artificial
  Synthetic oligonucleotide
gaggaaactcctacgcgctgttgaggcaaccaggcgcatatattcccgcactgct

SEQ ID NO: 287723 - DNA, 55 bp, Artificial
  Synthetic oligonucleotide
gatcattaatagacagactacgtgccgaccgattagtgtcctggagtccaaacag

SEQ ID NO: 287724 - DNA, 55 bp, Artificial
  Synthetic oligonucleotide
gacgtcggagaggctcacaggcacacggggagagacgtgtaaggaggttctagtg

SEQ ID NO: 287725 - DNA, 55 bp, Artificial
  Synthetic oligonucleotide
gcaaagtgtgttggctctctctgatgctatttgttagatcggcctctcctccctc

SEQ ID NO: 287726 - DNA, 55 bp, Artificial
  Synthetic oligonucleotide
gatcaatcaagtgcctatttaggtagtgccaatttagactggcgttcattagccc

SEQ ID NO: 287727 - DNA, 55 bp, Artificial
  Synthetic oligonucleotide
atccttaaaaacattttgtctgtatttacctctaaaaagttctcacctgccatca

SEQ ID NO: 287728 - DNA, 54 bp, Artificial
  Synthetic oligonucleotide
gaggaaaggttaacacaaaacacccggcgactccgctcgtgatgtttcatccgg

SEQ ID NO: 287729 - DNA, 55 bp, Artificial
  Synthetic oligonucleotide
gcaacaacgtgtccatgggcgtcattcctggtatcgaggactgcaccaccgtccc

SEQ ID NO: 287730 - DNA, 55 bp, Artificial
  Synthetic oligonucleotide
gcaacacagccctactgcgactttggcagtcgagtaacggaacggcaggtaagac

SEQ ID NO: 287731 - DNA, 55 bp, Artificial
  Synthetic oligonucleotide
gacgtacctgcctagcctcatggggttgagtgagaatagggatttgaacgtcaat

SEQ ID NO: 287732 - DNA, 55 bp, Artificial
  Synthetic oligonucleotide
gcaacacatcagtgctatctgaaggtgacacgccccgtggctgcaggtcgcacgc

SEQ ID NO: 287733 - DNA, 55 bp, Artificial
  Synthetic oligonucleotide
gacgtaatggttcaagatggacaacatacggaatgaacacaggaaacgaactcag

SEQ ID NO: 287734 - DNA, 55 bp, Artificial
  Synthetic oligonucleotide
gacggttgggatatatgtccatgccagtcgtaaccttgatagtatgttcccttcc

SEQ ID NO: 287735 - DNA, 55 bp, Artificial
  Synthetic oligonucleotide
gaggaaatcatactttcggttcaactggatgagtttgtaggcagaacgggcgcgg

SEQ ID NO: 287736 - DNA, 55 bp, Artificial
  Synthetic oligonucleotide
gacggtggcccgttttaccaatacatccagtcccgctactatcgtgcaccggagg

SEQ ID NO: 287737 - DNA, 55 bp, Artificial
  Synthetic oligonucleotide
gaggaagctgcgttacagcagcgcatcttgagacggctgttgggtccatctgctc

SEQ ID NO: 287738 - DNA, 60 bp, Artificial
  Synthetic oligonucleotide
taaggctcgctgcaccgaagactccgcgtaggaggcggcttggcccattgcaagtgtggg

SEQ ID NO: 287739 - DNA, 60 bp, Artificial
  Synthetic oligonucleotide
tcccggttaacctcctgcgcgcacccattcatagcatcccggtggggatagcatagcttc

SEQ ID NO: 287740 - DNA, 55 bp, Artificial
  Synthetic oligonucleotide
gatgcctcctcgtggctacacgcaaaggcgtcgtgaccgtcctccataaacccgc

SEQ ID NO: 287741 - DNA, 55 bp, Artificial
  Synthetic oligonucleotide
gagaggcgacaatgtagtctcgcaggatcaggaagaatgtgtcgagctgctccac

SEQ ID NO: 287742 - DNA, 55 bp, Artificial
  Synthetic oligonucleotide
gatgcgctcacacatccggtagcttcagaacggaacatcgcacccgcctcaggcc

SEQ ID NO: 287743 - DNA, 55 bp, Artificial
  Synthetic oligonucleotide
gagaggagcgggtgcgagaggaggggaaagcaaggatgcgcacaaagtccgcatc

SEQ ID NO: 287744 - DNA, 55 bp, Artificial
  Synthetic oligonucleotide
gatctgtggcagtgcgcagagtcgcatgagcacctgtgcgtacaaacacgcgtcg

SEQ ID NO: 287745 - DNA, 55 bp, Artificial
  Synthetic oligonucleotide
gagcatgtcaatgcaggcaagcgaccccgctgcacgagcctacgatagcaacttg

SEQ ID NO: 287746 - DNA, 55 bp, Artificial
  Synthetic oligonucleotide
gagagctgcgcaggtgcaacggacgcacaggcagcaggcgtgtcttagccaagaa

SEQ ID NO: 287747 - DNA, 55 bp, Artificial
  Synthetic oligonucleotide
gagcattagcccattggattatggatgatggcgggtatactggagcaggtattag

SEQ ID NO: 287748 - DNA, 55 bp, Artificial
  Synthetic oligonucleotide
gagccacacccgtatctcaagcagcgcctacatccaccgcttccctgtcatcccg

SEQ ID NO: 287749 - DNA, 55 bp, Artificial
  Synthetic oligonucleotide
gatggaattgaccgtagggaataggcaagtgctactgactgcacacaaaacgtac

SEQ ID NO: 287750 - DNA, 56 bp, Artificial
  Synthetic oligonucleotide
tcccgccatatggaaggtacctgactggggtatctagggtggtgcgtataccaccg

SEQ ID NO: 287751 - DNA, 55 bp, Artificial
  Synthetic oligonucleotide
gagagctcaaatcaactcgcaatcggtgacgtgaccttacactgatctgcgaccc

SEQ ID NO: 287752 - DNA, 55 bp, Artificial
  Synthetic oligonucleotide
gagagcactgtctgctggttattgcctactcaagtgggcggttcggaatttacag

SEQ ID NO: 287753 - DNA, 55 bp, Artificial
  Synthetic oligonucleotide
gagccacatttgccgtgaattcttgccaaggcaccgtcgtggttgtttgctgccg

SEQ ID NO: 287754 - DNA, 55 bp, Artificial
  Synthetic oligonucleotide
gatggatcacttctacaccgatgtgcggtccaacattcacagcgtacgctcgccg

SEQ ID NO: 287755 - DNA, 55 bp, Artificial
  Synthetic oligonucleotide
gagagattacggatcaccagagcgtcacgggacgagttgcttgcctctatggcac

SEQ ID NO: 287756 - DNA, 55 bp, Artificial
  Synthetic oligonucleotide
gatctgtctctatgaaccaatgcttccaagtgaaccatttcactatgcagttgcg

SEQ ID NO: 287757 - DNA, 55 bp, Artificial
  Synthetic oligonucleotide
gatggatgacggcacaggggcggggccaaggctgcaactgagatggcgcggagtt

SEQ ID NO: 287758 - DNA, 55 bp, Artificial
  Synthetic oligonucleotide
gagagatggaccgcagggctggatagcgggcaagttgcaggacgtaggacacagg

SEQ ID NO: 287759 - DNA, 55 bp, Artificial
  Synthetic oligonucleotide
gagagatcccaaaacgcaagcccttttcgtcaggtacacgcttaaaactcaggcc

SEQ ID NO: 287760 - DNA, 55 bp, Artificial
  Synthetic oligonucleotide
gagagagtgaggatgtacgcaattcgcataacatattcgacgcatgcctaagggc

SEQ ID NO: 287761 - DNA, 59 bp, Artificial
  Synthetic oligonucleotide
tcccctcccccttcacgccctctgttctttccgtcttcgcacaggccacacatgcgcgc

SEQ ID NO: 287762 - DNA, 55 bp, Artificial
  Synthetic oligonucleotide
gagcccgacagtcccgttagtgcagagaacctctgtttcgttgttcacaggtatg

SEQ ID NO: 287763 - DNA, 55 bp, Artificial
  Synthetic oligonucleotide
gagccgacggtgagcagatggcatgaaacaagtagacgtcgtccagggaactccc

SEQ ID NO: 287764 - DNA, 55 bp, Artificial
  Synthetic oligonucleotide
gatctgaagtcaagtttccatcctttggaatcggagcaggggatgaagttccgct

SEQ ID NO: 287765 - DNA, 55 bp, Artificial
  Synthetic oligonucleotide
gagcaggccgctcatggtaaggataaatgtccatatttgacggccgcctatatac

SEQ ID NO: 287766 - DNA, 55 bp, Artificial
  Synthetic oligonucleotide
gatctgtgtatctgccaccaaccgctcaagcagacaccaccactgttaggtcgac

SEQ ID NO: 287767 - DNA, 55 bp, Artificial
  Synthetic oligonucleotide
gagcagcactccgagatatcgttgggaccaattaatgacattagctggagagcct

SEQ ID NO: 287768 - DNA, 55 bp, Artificial
  Synthetic oligonucleotide
gagcataaccgccagtctaccggacattatcagaactccgtagaaaatccgtcgc

SEQ ID NO: 287769 - DNA, 55 bp, Artificial
  Synthetic oligonucleotide
gatgacttcccgccttggaagtgcatcagtgaggtgatccctggtctctacctta

SEQ ID NO: 287770 - DNA, 55 bp, Artificial
  Synthetic oligonucleotide
gatgaggtatcaccggtaggcacaggcttaaacaagacggcgctaataactctgt

SEQ ID NO: 287771 - DNA, 55 bp, Artificial
  Synthetic oligonucleotide
gatgagtatccatccagggcagtagaggtgatttgacgccgggtacggatccttc

SEQ ID NO: 287772 - DNA, 58 bp, Artificial
  Synthetic oligonucleotide
tcccccagaggacctcgatttggccgcagcgcagcagaggtgtaggcgggccgtgttt

SEQ ID NO: 287773 - DNA, 55 bp, Artificial
  Synthetic oligonucleotide
gatgatcaaaacagcactagtcaatgtgatcataccgcaggggattctttagtcc

SEQ ID NO: 287774 - DNA, 55 bp, Artificial
  Synthetic oligonucleotide
gagcacaatgtgtctccacatacgaacgtttatacagacatccgcgtatacatgc

SEQ ID NO: 287775 - DNA, 55 bp, Artificial
  Synthetic oligonucleotide
gagcaacccttatccatacgcaccttacctgttctactaatgtttgttcgcaatc

SEQ ID NO: 287776 - DNA, 55 bp, Artificial
  Synthetic oligonucleotide
gagattccatctgaccacgagaccgttgagcctatagtctctgaccacgagagtg

SEQ ID NO: 287777 - DNA, 55 bp, Artificial
  Synthetic oligonucleotide
gagcatagaggcaggatagaggctccacctcacacaaaggcggggcacgaatgcg

SEQ ID NO: 287778 - DNA, 55 bp, Artificial
  Synthetic oligonucleotide
gatgatccctcagtttcacattctttcccgtagtgagctgaagccacacgcccaa

SEQ ID NO: 287779 - DNA, 55 bp, Artificial
  Synthetic oligonucleotide
gagatgaacttcctctgcgagaaggtgcggattggtaggcgtggtcacgggcgag

SEQ ID NO: 287780 - DNA, 55 bp, Artificial
  Synthetic oligonucleotide
gatgcaatggatgtttctccaacgcaggcaggacgctctcgatccagtaaggctg

SEQ ID NO: 287781 - DNA, 55 bp, Artificial
  Synthetic oligonucleotide
gagatctcgcagccctttgcgtagttttcatttatcgagggtttcctttagggcg

SEQ ID NO: 287782 - DNA, 55 bp, Artificial
  Synthetic oligonucleotide
gagatcgtggaggagtgtgtggcggacgtcgtaccgggtattcgctagctgtggg

SEQ ID NO: 287783 - DNA, 58 bp, Artificial
  Synthetic oligonucleotide
atcgcaagttacgaagtaaatgacaactcccgaacggctgcgattcagacgattccga

SEQ ID NO: 287784 - DNA, 55 bp, Artificial
  Synthetic oligonucleotide
gagcatctgattgcagcacgtacgctctgcgcggtcctggagaggccgagtgact

SEQ ID NO: 287785 - DNA, 55 bp, Artificial
  Synthetic oligonucleotide
gagatcatagatgaggcaccaggacctccagctaaccagaaagctataggatcct

SEQ ID NO: 287786 - DNA, 55 bp, Artificial
  Synthetic oligonucleotide
gatgcactcgactgacgctgacactctgccgatcctatgggtgggacaagcgtgc

SEQ ID NO: 287787 - DNA, 55 bp, Artificial
  Synthetic oligonucleotide
gagatacaccaaaatcacgataatttccacgtgggcgacctgttaaccaacaacg

SEQ ID NO: 287788 - DNA, 55 bp, Artificial
  Synthetic oligonucleotide
gatgcccatccaaagaatacctcctctgttagatgtcactactactcggatggcc

SEQ ID NO: 287789 - DNA, 55 bp, Artificial
  Synthetic oligonucleotide
gagagtgggactcacccgctccgtgcatgcgtgcgtcttttgccatttaaggccc

SEQ ID NO: 287790 - DNA, 55 bp, Artificial
  Synthetic oligonucleotide
gagaggcgtagtactccttagcaaaccgcgcatcaaagtcgcgcagggtcatgcg

SEQ ID NO: 287791 - DNA, 55 bp, Artificial
  Synthetic oligonucleotide
gatctacgtattcatgggcagtcatacatatatgtccaccgcgccggaaacgact

SEQ ID NO: 287792 - DNA, 55 bp, Artificial
  Synthetic oligonucleotide
gattactaaattgtcagactggccataccatgttaccgtaactaaaggtgaaggg

SEQ ID NO: 287793 - DNA, 55 bp, Artificial
  Synthetic oligonucleotide
gatcggattcttgcgctccacactgactaacttcacggaacggggtataaatcgg

SEQ ID NO: 287794 - DNA, 60 bp, Artificial
  Synthetic oligonucleotide
tcccactgctccatgagggcgggtatggcgtcgagtacgagctgcaacttatgcgttgtc

SEQ ID NO: 287795 - DNA, 55 bp, Artificial
  Synthetic oligonucleotide
gatcgcctaccctgcacgcaagtaaacggtacagatatgtcggttcccgtcgtgg

SEQ ID NO: 287796 - DNA, 55 bp, Artificial
  Synthetic oligonucleotide
gattcaacgcctcctgcgatgtcccgtgctcatgggaaacacggacactgctctt

SEQ ID NO: 287797 - DNA, 55 bp, Artificial
  Synthetic oligonucleotide
gatcgcacgtcggcagtgagacgtacgttgggtcattctccgttcatgttcaacc

SEQ ID NO: 287798 - DNA, 55 bp, Artificial
  Synthetic oligonucleotide
gagcgcgggctgatgcatgcgagccgtgcggagtccacattgtacatacacccct

SEQ ID NO: 287799 - DNA, 55 bp, Artificial
  Synthetic oligonucleotide
gattcaattgcatcacgcagtactcggggacgatggcatcctcattctgtgcgaa

SEQ ID NO: 287800 - DNA, 55 bp, Artificial
  Synthetic oligonucleotide
gattccatcttcaggacctattctgtatctcacgtttgccctcagagtgtggact

SEQ ID NO: 287801 - DNA, 55 bp, Artificial
  Synthetic oligonucleotide
gagaagacactaatcgtttgtattatgtgggtggatgtgaacgagcttttcccac

SEQ ID NO: 287802 - DNA, 55 bp, Artificial
  Synthetic oligonucleotide
gatcgatttaaagtcatagcatcttctatgtcgtgtcctcggtaagacatgacgc

SEQ ID NO: 287803 - DNA, 55 bp, Artificial
  Synthetic oligonucleotide
gattccgccttaaagaggagagactcagcgtgcgcacgcccacaagcggcggtgt

SEQ ID NO: 287804 - DNA, 55 bp, Artificial
  Synthetic oligonucleotide
gagcgcgtaatatcacggacgggtctcgatatgtcctctgcagacgtataccggt

SEQ ID NO: 287805 - DNA, 58 bp, Artificial
  Synthetic oligonucleotide
agagggcgttggacaacgcgactgagattccgaacataccctacgcacctgcacacgg

SEQ ID NO: 287806 - DNA, 55 bp, Artificial
  Synthetic oligonucleotide
gagaaccgcgaagcgcacgtctcatcttttatctcgccggcttcttacgtaactt

SEQ ID NO: 287807 - DNA, 55 bp, Artificial
  Synthetic oligonucleotide
gattgaaggcatagtaacggtcatataaaggtcttgaccatcattgcaagcttcc

SEQ ID NO: 287808 - DNA, 55 bp, Artificial
  Synthetic oligonucleotide
gattgacatagaacccgcctacataatcccggttacggaatgcatggttcggaag

SEQ ID NO: 287809 - DNA, 55 bp, Artificial
  Synthetic oligonucleotide
gattgcgagaattcgaccgacaagactgcattgtctgatcgtgtgatcaggacac

SEQ ID NO: 287810 - DNA, 55 bp, Artificial
  Synthetic oligonucleotide
gagaaaacgcatgattttcgcttaaacaggggatttgcgaagagaaaacgcgtga

SEQ ID NO: 287811 - DNA, 55 bp, Artificial
  Synthetic oligonucleotide
gagcgtaaatttcgtacgtgggcgtcaacttgtccgtctctaccatctcgtcgaa

SEQ ID NO: 287812 - DNA, 55 bp, Artificial
  Synthetic oligonucleotide
gatcctcactgaaatgcgaatctgatcccaaatgccccgaaggatttactttgaa

SEQ ID NO: 287813 - DNA, 55 bp, Artificial
  Synthetic oligonucleotide
gagcgtcagccacgtggagaaggttgagattcgtataagcaccccagcgctgtac

SEQ ID NO: 287814 - DNA, 55 bp, Artificial
  Synthetic oligonucleotide
gattgtggacgaaggcgtcagtaccgttgcctacgccttggatgagtcgctcatt

SEQ ID NO: 287815 - DNA, 55 bp, Artificial
  Synthetic oligonucleotide
gactttgcataactcgctttcttctctgcgggtcgagtctgtcgtcatcagcccc

SEQ ID NO: 287816 - DNA, 60 bp, Artificial
  Synthetic oligonucleotide
cccaaattcgaacatataattcttctagcattatggtattacctatgttagagtcataca

SEQ ID NO: 287817 - DNA, 55 bp, Artificial
  Synthetic oligonucleotide
gagagagacgagataagcgtgtagtgctgccaaggcgaacacatacgtgtaaggg

SEQ ID NO: 287818 - DNA, 55 bp, Artificial
  Synthetic oligonucleotide
gagagaacgtcggagaggctcacaggcacacggggagagacgtgtaaggaggttc

SEQ ID NO: 287819 - DNA, 55 bp, Artificial
  Synthetic oligonucleotide
gagccgtcgcatggaccacgttagcagcgctctcactgagttggaggccacactg

SEQ ID NO: 287820 - DNA, 55 bp, Artificial
  Synthetic oligonucleotide
gagacttagccttacggagaagtagtcatccacgtcttttacattcgcactgctc

SEQ ID NO: 287821 - DNA, 55 bp, Artificial
  Synthetic oligonucleotide
gatggccgcgtgtaagacctagggaggagctccgccgtggcgccctttctcctac

SEQ ID NO: 287822 - DNA, 55 bp, Artificial
  Synthetic oligonucleotide
gagcgaaactcagcatagcaatgataaactaagcggaaacccgagtgacactact

SEQ ID NO: 287823 - DNA, 55 bp, Artificial
  Synthetic oligonucleotide
gatgtaatttcggttggacctattcctatcaaaattcacgggacaaattctggta

SEQ ID NO: 287824 - DNA, 55 bp, Artificial
  Synthetic oligonucleotide
gatgtcacattacacgggagagttttcaattacatataaacccgtaaaacacgga

SEQ ID NO: 287825 - DNA, 55 bp, Artificial
  Synthetic oligonucleotide
gagcgacgtgctcatgcatggcgagaagaaacttagggtgtggcgtcaacgcaag

SEQ ID NO: 287826 - DNA, 55 bp, Artificial
  Synthetic oligonucleotide
gagcgactcggaggaccacagcatttcgtcgctgataaacacgtcgcacgtcccc

SEQ ID NO: 287827 - DNA, 55 bp, Artificial
  Synthetic oligonucleotide
tccaggcctcctaaaaaaaatacgaaattgtttatatgacacaacaggtccataa

SEQ ID NO: 287828 - DNA, 55 bp, Artificial
  Synthetic oligonucleotide
gatctcgaccagctgtagagaatccgctgagaatccggttgacagccctcgttgg

SEQ ID NO: 287829 - DNA, 55 bp, Artificial
  Synthetic oligonucleotide
gagacatgtcttttgaagcggaggcagcggaacatctggggacatacacgtcttc

SEQ ID NO: 287830 - DNA, 55 bp, Artificial
  Synthetic oligonucleotide
gagcgatgcttcttcatggactgttgtcaacgtttcaccagcatttactacatgg

SEQ ID NO: 287831 - DNA, 55 bp, Artificial
  Synthetic oligonucleotide
gagacatatttggagaagtactgttactttacaacgccttctgtactagaccagc

SEQ ID NO: 287832 - DNA, 55 bp, Artificial
  Synthetic oligonucleotide
gagacacattagcacagagttaccgagctgcggaaaggacggagggtacgggagg

SEQ ID NO: 287833 - DNA, 55 bp, Artificial
  Synthetic oligonucleotide
gagcgcacctgtatgaggcatctacgcaccaggacacggctcacgcgtctccatg

SEQ ID NO: 287834 - DNA, 55 bp, Artificial
  Synthetic oligonucleotide
gatgtggtgcctcggttcggcgttactctggttttctctcttcgaccggccagtg

SEQ ID NO: 287835 - DNA, 55 bp, Artificial
  Synthetic oligonucleotide
gagaataaattggcaaagcatgtagacgatatccctcactcctaatcatacagcg

SEQ ID NO: 287836 - DNA, 55 bp, Artificial
  Synthetic oligonucleotide
gagaagtagttcgtacatcggaatcgtctgaatcgcagccgttcgggagttgtca

SEQ ID NO: 287837 - DNA, 55 bp, Artificial
  Synthetic oligonucleotide
gatctcaattctggagggaccacagttggtgtctagtgcagttcctgccggagat

SEQ ID NO: 287838 - DNA, 58 bp, Artificial
  Synthetic oligonucleotide
atcgcgaaaactctcttagacctctttgtaaacgctgcctctgagactcgaaacgtga

SEQ ID NO: 287839 - DNA, 55 bp, Artificial
  Synthetic oligonucleotide
gattaaagttattaattggtgctgggacagcgtctatgacaccaccattaggacc

SEQ ID NO: 287840 - DNA, 53 bp, Artificial
  Synthetic oligonucleotide
gattaaccacgtggtaaagttttccggtggtcctgctgcgttctgtggttccg

SEQ ID NO: 287841 - DNA, 55 bp, Artificial
  Synthetic oligonucleotide
gagaagctctttcatgcggagattcggattcgtggcccacatttccatcccaccg

SEQ ID NO: 287842 - DNA, 55 bp, Artificial
  Synthetic oligonucleotide
gagaagctagaatctgcactcagtgaccttaacaggatggtcgaatgttctctag

SEQ ID NO: 287843 - DNA, 53 bp, Artificial
  Synthetic oligonucleotide
gcaccccttgtgaaagctgacgccctttagaaagtccaagttaccttcgaacg

SEQ ID NO: 287844 - DNA, 55 bp, Artificial
  Synthetic oligonucleotide
gaatagcatcagtcccattggtttgtcggtcatccaactccgtactcggtcgtga

SEQ ID NO: 287845 - DNA, 55 bp, Artificial
  Synthetic oligonucleotide
gaatagaaccttcaagaatgtccaataaagtgaagaggttactggtggctgttaa

SEQ ID NO: 287846 - DNA, 55 bp, Artificial
  Synthetic oligonucleotide
gaggctgaacagcctagatcttagacgtcggcaccgcgtgaggtttgtcctccag

SEQ ID NO: 287847 - DNA, 55 bp, Artificial
  Synthetic oligonucleotide
gaatagaaacggaaagaggttcaccgccttggaggtggcgttgacgagtatgacc

SEQ ID NO: 287848 - DNA, 55 bp, Artificial
  Synthetic oligonucleotide
gaataagtcggcttgtcctgctgagatgcgctagcacagaactgcatgcgctcct

SEQ ID NO: 287849 - DNA, 52 bp, Artificial
  Synthetic oligonucleotide
gcttcctaggtctcgaaacgcccaacggggctcgaaggaactctttccctcg

SEQ ID NO: 287850 - DNA, 60 bp, Artificial
  Synthetic oligonucleotide
tccaatacgctaccgacgatctcgcacaaccatgcgggcaacgcacaaggtcctcgtggg

SEQ ID NO: 287851 - DNA, 55 bp, Artificial
  Synthetic oligonucleotide
gaagttcctaatgatgcagcggaaaatcttagtccgttctggaataaggccatag

SEQ ID NO: 287852 - DNA, 55 bp, Artificial
  Synthetic oligonucleotide
gaggctgcataacggcaaagttgggaggcggcgatgtaagtcccagtggtcggta

SEQ ID NO: 287853 - DNA, 54 bp, Artificial
  Synthetic oligonucleotide
gaagttaggaaagcagaagggatcagaaagggtttggttgctttcccaaagctc

SEQ ID NO: 287854 - DNA, 55 bp, Artificial
  Synthetic oligonucleotide
gaggctgtttagcttcatgtgtatgcttcggaccttcagagacaggcaccagttt

SEQ ID NO: 287855 - DNA, 55 bp, Artificial
  Synthetic oligonucleotide
gaagtgtccaatgtctgcggtacacgtggcgggaagcgtaggtatgttattgcga

SEQ ID NO: 287856 - DNA, 55 bp, Artificial
  Synthetic oligonucleotide
gagggaagatagcttaaaagtgtaacgacatggggttcatgccatactcaaatga

SEQ ID NO: 287857 - DNA, 55 bp, Artificial
  Synthetic oligonucleotide
gagggagaggttctgggtgcgtgcgaataggcagccgactgtcagccacgcacat

SEQ ID NO: 287858 - DNA, 55 bp, Artificial
  Synthetic oligonucleotide
gaagtccattgctcccaacgcgcctcttgtcctcacctagtcgagctgaacacag

SEQ ID NO: 287859 - DNA, 55 bp, Artificial
  Synthetic oligonucleotide
gcaccgatacaaaagaatacagacatctcgatacatggcgtgtactgatgcaaaa

SEQ ID NO: 287860 - DNA, 55 bp, Artificial
  Synthetic oligonucleotide
gaagtcacattccaaaatacctacctcactctctcgactggaattctggccaagg

SEQ ID NO: 287861 - DNA, 60 bp, Artificial
  Synthetic oligonucleotide
tccaaattgtaacaggattattactagcatctagatatactagcgaaatgtcacatgcct

SEQ ID NO: 287862 - DNA, 55 bp, Artificial
  Synthetic oligonucleotide
gagggcccagggagcacttgtgtcgtgttgtggcacgaatgggcagtggaagcga

SEQ ID NO: 287863 - DNA, 55 bp, Artificial
  Synthetic oligonucleotide
gaagtaatatgttccaccgctagtgtttgcttctaacattccatttgcttaaagc

SEQ ID NO: 287864 - DNA, 55 bp, Artificial
  Synthetic oligonucleotide
gatatatgtaaatctggaccaggcactataacagatctacctgaacaatcaactc

SEQ ID NO: 287865 - DNA, 54 bp, Artificial
  Synthetic oligonucleotide
gaagggtgtaacaattggaagcctcgctcgagggactccccactcgttcttccc

SEQ ID NO: 287866 - DNA, 55 bp, Artificial
  Synthetic oligonucleotide
gagggcccatctgctaggtgaaaatgagacgcgcctccattggtctccctgcctg

SEQ ID NO: 287867 - DNA, 55 bp, Artificial
  Synthetic oligonucleotide
gcaccgatgagtatcgccacttaagagcggagtggcaagtgtgttgcgacgtcta

SEQ ID NO: 287868 - DNA, 55 bp, Artificial
  Synthetic oligonucleotide
gaggcccaaccaagaaacggcagtcgcgggctactgattccatgaccgcgtttcc

SEQ ID NO: 287869 - DNA, 55 bp, Artificial
  Synthetic oligonucleotide
gcacccacacaaaacgcttctgtgcgcgcctagcaagaccacagcttccgttgac

SEQ ID NO: 287870 - DNA, 55 bp, Artificial
  Synthetic oligonucleotide
gaatttaagaagatctcccttgttaagcggtattccaggtgaggacttgggagcc

SEQ ID NO: 287871 - DNA, 55 bp, Artificial
  Synthetic oligonucleotide
gaattcggtattttggcggtaagagcctagttatttgagcagattactccggacg

SEQ ID NO: 287872 - DNA, 59 bp, Artificial
  Synthetic oligonucleotide
tcatgcgctcgtgggtcgttcagcgacccacaggaaactagcctctccccaccgctagg

SEQ ID NO: 287873 - DNA, 55 bp, Artificial
  Synthetic oligonucleotide
gaattcattccccaaagctcggcacaaatctccaataatcccaattgctaacgag

SEQ ID NO: 287874 - DNA, 55 bp, Artificial
  Synthetic oligonucleotide
gaattcagaagaactaggattagttagcgaggcttctttaatacctgatgagaac

SEQ ID NO: 287875 - DNA, 55 bp, Artificial
  Synthetic oligonucleotide
gaattagctgctccgggttctcaaatattgagtggtaatagccaactttacaacg

SEQ ID NO: 287876 - DNA, 55 bp, Artificial
  Synthetic oligonucleotide
gaattaagtgatctttcacaatggaaatgtaatggaccataagcagctcctggga

SEQ ID NO: 287877 - DNA, 55 bp, Artificial
  Synthetic oligonucleotide
gaattaacatggcttgggcctgcgaagtttggattagcattacttgggcctacta

SEQ ID NO: 287878 - DNA, 55 bp, Artificial
  Synthetic oligonucleotide
gcacccacacgttgatgtgcctaacataatgaatcacttaacgcataagcagcag

SEQ ID NO: 287879 - DNA, 55 bp, Artificial
  Synthetic oligonucleotide
gaatggtgccgtccttggacgcagcgaagtagctggtgcctgtgcggttcatgac

SEQ ID NO: 287880 - DNA, 55 bp, Artificial
  Synthetic oligonucleotide
gaatggtatcgttgcgtcgcagaagttccgccagtgtaattgcgcccgcgtcacc

SEQ ID NO: 287881 - DNA, 55 bp, Artificial
  Synthetic oligonucleotide
gaggcgatgctagacgaccgacagctcttgcgggctgacgtggagaacatggtgg

SEQ ID NO: 287882 - DNA, 55 bp, Artificial
  Synthetic oligonucleotide
gaatgctgaatacaacccgcgaagatttgcagccgttataatgagaattcgggac

SEQ ID NO: 287883 - DNA, 57 bp, Artificial
  Synthetic oligonucleotide
gctaaggaagaaaatcctcggaaatcagaattccttagaaggttaccagcatcgcag

SEQ ID NO: 287884 - DNA, 55 bp, Artificial
  Synthetic oligonucleotide
gaatgctcggatacgactgatcttctgcaccttaccgtaatactgctgagggcag

SEQ ID NO: 287885 - DNA, 55 bp, Artificial
  Synthetic oligonucleotide
gcaccccatattgcaggaggcggctgttcgactcgacgaaaggccagtcgaaggc

SEQ ID NO: 287886 - DNA, 55 bp, Artificial
  Synthetic oligonucleotide
gaggcgcactaaacggagttcgcgttgtgtcacttgttcatcgcacgcgccttgc

SEQ ID NO: 287887 - DNA, 55 bp, Artificial
  Synthetic oligonucleotide
gaatgctcctctccacataagggtaatggcacactcgcgtattaacccgtgcgac

SEQ ID NO: 287888 - DNA, 55 bp, Artificial
  Synthetic oligonucleotide
gaatgctattgtgacttgtagcggtgctctcggtagccgaggttacttctcatgc

SEQ ID NO: 287889 - DNA, 55 bp, Artificial
  Synthetic oligonucleotide
gaggcgcatacgtagaataccaggcgtcccaataatgtatgttaccaaccataaa

SEQ ID NO: 287890 - DNA, 55 bp, Artificial
  Synthetic oligonucleotide
gaatgctagcaacttacttgatacatgtagtcgaacgcttatatgagcgtggcgt

SEQ ID NO: 287891 - DNA, 55 bp, Artificial
  Synthetic oligonucleotide
gaatgcatgcagcatatattagacctggtggagtagcatttgatttaccaatgaa

SEQ ID NO: 287892 - DNA, 55 bp, Artificial
  Synthetic oligonucleotide
gaatgacggtgtggctcatcatccgacttagaacggcaacgtagaacatcgaccg

SEQ ID NO: 287893 - DNA, 55 bp, Artificial
  Synthetic oligonucleotide
gaatatcgacacatgtaatgctgtctcacactgtatttaccgtcacaacaagtgg

SEQ ID NO: 287894 - DNA, 60 bp, Artificial
  Synthetic oligonucleotide
ccatgccataatcaatacagttttcacatgacccaataactaatttataattgaaattca

SEQ ID NO: 287895 - DNA, 55 bp, Artificial
  Synthetic oligonucleotide
gaagaaaagccgacaagagacctggaatatgccgtgaatgcgtgagtcgatacgt

SEQ ID NO: 287896 - DNA, 55 bp, Artificial
  Synthetic oligonucleotide
gatagccagggtcttcccttgacccaaacggcccagtgatgaactgccccatgtc

SEQ ID NO: 287897 - DNA, 55 bp, Artificial
  Synthetic oligonucleotide
gaactgccaattcgtagtcgatcacaactgacatgcctttgaacccgactgcttc

SEQ ID NO: 287898 - DNA, 55 bp, Artificial
  Synthetic oligonucleotide
gaactgacctccagactgatctctacaatccgtagagtttctgggtactgtgaac

SEQ ID NO: 287899 - DNA, 55 bp, Artificial
  Synthetic oligonucleotide
gcacgcctaccgtcgttcctgcagagctgctttaccaccagtcgcgttgtctttc

SEQ ID NO: 287900 - DNA, 55 bp, Artificial
  Synthetic oligonucleotide
gcacgcgaaggggatatattgaaacgtggatcgactgtaaactccaatgcacttc

SEQ ID NO: 287901 - DNA, 54 bp, Artificial
  Synthetic oligonucleotide
gcacgcgcccttggaggtaaagcaccgttgtttccgaagtccctctcggacctc

SEQ ID NO: 287902 - DNA, 55 bp, Artificial
  Synthetic oligonucleotide
gaactcgcgtttggtctactagtgcctctacgacacctggacggagctacactcc

SEQ ID NO: 287903 - DNA, 55 bp, Artificial
  Synthetic oligonucleotide
gcacgcgcgaattcgttccaagtgctcgtcatgttcaatgacgaggcggtacgag

SEQ ID NO: 287904 - DNA, 55 bp, Artificial
  Synthetic oligonucleotide
gaactcgactggcctacactataagaacgaacgcttttaacacctgacatggatg

SEQ ID NO: 287905 - DNA, 54 bp, Artificial
  Synthetic oligonucleotide
cgcgttttttcaggagaaatccgtatatcgatgtcttttaaaactacgctattg

SEQ ID NO: 287906 - DNA, 55 bp, Artificial
  Synthetic oligonucleotide
gaactcacagccatctggtagtaatgttgttacatctgttgatctgttatctctc

SEQ ID NO: 287907 - DNA, 55 bp, Artificial
  Synthetic oligonucleotide
gcacgcggtatgagtttgcgctattgggctaagcagcagcttcagtacaattact

SEQ ID NO: 287908 - DNA, 55 bp, Artificial
  Synthetic oligonucleotide
gaactacttctcaacagttccgaaaatagacaaccatgaagtcagagacccgaag

SEQ ID NO: 287909 - DNA, 55 bp, Artificial
  Synthetic oligonucleotide
gaggggttgcgtaattcgatagagttaaagcattggtgatcagtagctagagtac

SEQ ID NO: 287910 - DNA, 55 bp, Artificial
  Synthetic oligonucleotide
gagggtccggcaggcgtgaagagtgctctgaaatgtgagtggcgtttgagtcctc

SEQ ID NO: 287911 - DNA, 55 bp, Artificial
  Synthetic oligonucleotide
gcacgctgctatccctacagattagccgtcacggtgtcagtgacgtgtgcttacg

SEQ ID NO: 287912 - DNA, 55 bp, Artificial
  Synthetic oligonucleotide
gatagcacctaacgatatgtttcaacaaacgtgaggacatatgatctggtatcat

SEQ ID NO: 287913 - DNA, 55 bp, Artificial
  Synthetic oligonucleotide
gaactaaagcaaccagacaacgcaatacgtttagataatgcgtggatctctggat

SEQ ID NO: 287914 - DNA, 55 bp, Artificial
  Synthetic oligonucleotide
gagggttgtggggaagcgtgtttgttctcgttcgtagctattacaccatatcccc

SEQ ID NO: 287915 - DNA, 55 bp, Artificial
  Synthetic oligonucleotide
gaacgttatggaagcttgttatcgctaaaataaagtcgcattctttagtccacct

SEQ ID NO: 287916 - DNA, 60 bp, Artificial
  Synthetic oligonucleotide
gaggactccgttgatggtgcctctaaaggctcagaagaccgttgagagtcaagcacgaag

SEQ ID NO: 287917 - DNA, 55 bp, Artificial
  Synthetic oligonucleotide
gaacggagatcggtagtcctttgccgtagtcgctgcaagaccgactctgtcacac

SEQ ID NO: 287918 - DNA, 55 bp, Artificial
  Synthetic oligonucleotide
gaacggaattcgttcttcgcggataatctcacatcgaaacagttatcaggcttag

SEQ ID NO: 287919 - DNA, 55 bp, Artificial
  Synthetic oligonucleotide
gaacgccactaagaggcgcaagtgcgcattcacgcatcgccactataatcaatgc

SEQ ID NO: 287920 - DNA, 55 bp, Artificial
  Synthetic oligonucleotide
gcaccgtcactggaactccgtggtacgctccggtaacgaccttgatttcacggtg

SEQ ID NO: 287921 - DNA, 55 bp, Artificial
  Synthetic oligonucleotide
gcaccgttacggaaggaaattctactatccaaattgctgctcctaaagtaggtac

SEQ ID NO: 287922 - DNA, 55 bp, Artificial
  Synthetic oligonucleotide
gataggtacagtacccatgagaggtatgttccgccgaaggtggcactcactgcgg

SEQ ID NO: 287923 - DNA, 55 bp, Artificial
  Synthetic oligonucleotide
gatagcgcacttaagtggccttcgggcagtaaagtcacgtgaccgcaccgtcttc

SEQ ID NO: 287924 - DNA, 55 bp, Artificial
  Synthetic oligonucleotide
gcaccttcatacattcgtcacggtagttctttacacagtagaaccgaagagaggc

SEQ ID NO: 287925 - DNA, 55 bp, Artificial
  Synthetic oligonucleotide
gaaggcagctacgcaagcatggctactcaccactgcgcttgtgcggagcatcgtg

SEQ ID NO: 287926 - DNA, 55 bp, Artificial
  Synthetic oligonucleotide
gaaggaatgccaaaggcgaaagcaataatcactactttactgacgttgacacacg

SEQ ID NO: 287927 - DNA, 59 bp, Artificial
  Synthetic oligonucleotide
atcgtgaaaagcgacctcgtaatgtgcaggggcaacatacacacagtgaggccccgtac

SEQ ID NO: 287928 - DNA, 55 bp, Artificial
  Synthetic oligonucleotide
gcacgacccgtagtactcgagaatgtagttgtacaccatgacaggaacctcgcac

SEQ ID NO: 287929 - DNA, 55 bp, Artificial
  Synthetic oligonucleotide
gaaggaaaagccaatgggatgcagacagcgactctcgcgttttgcgaagctccgt

SEQ ID NO: 287930 - DNA, 54 bp, Artificial
  Synthetic oligonucleotide
gaagcgtcaaaagacgcgtacagaggaatcaagtcggtttgttggtttcctacg

SEQ ID NO: 287931 - DNA, 55 bp, Artificial
  Synthetic oligonucleotide
gaagcgtagtctcgtttcaacagagattctgcctgcgatttgttgtcgattggtt

SEQ ID NO: 287932 - DNA, 55 bp, Artificial
  Synthetic oligonucleotide
gaagcgtaaaggaggggacgccactgcggtttcgaagggtgcgacgtgcgtgatg

SEQ ID NO: 287933 - DNA, 55 bp, Artificial
  Synthetic oligonucleotide
gaagcagagacccggcttcaagatgcgtggatttacgtcacacgtagaagcaccg

SEQ ID NO: 287934 - DNA, 55 bp, Artificial
  Synthetic oligonucleotide
gcacgaggagcaatagcaggtgctacctttaatttattatgtgcccaaacaatag

SEQ ID NO: 287935 - DNA, 55 bp, Artificial
  Synthetic oligonucleotide
gaagatgcgcgcaacggcttatgtggcctgtgcgtgtgtctatggagaagggtgc

SEQ ID NO: 287936 - DNA, 55 bp, Artificial
  Synthetic oligonucleotide
gcacgatcgtgcctctccgtcagatcagtacgacatcacggctgacctcctgcgc

SEQ ID NO: 287937 - DNA, 55 bp, Artificial
  Synthetic oligonucleotide
gaagagggcaacgtaagcccagtgcactgcgcacgtgtgcgttgtccatcggaag

SEQ ID NO: 287938 - DNA, 60 bp, Artificial
  Synthetic oligonucleotide
agagcattcagggtgtgcctacgtgacattcccaaacatcgaaaccgcagcattggcagc

SEQ ID NO: 287939 - DNA, 55 bp, Artificial
  Synthetic oligonucleotide
gagggcgagagagcctcgcctgtctggcaaagcaaggcggtatgttcaataccgg

SEQ ID NO: 287940 - DNA, 55 bp, Artificial
  Synthetic oligonucleotide
gaagagatgcggtcaagcagccttatggcacgtgaatgcgcattcccctcagccg

SEQ ID NO: 287941 - DNA, 55 bp, Artificial
  Synthetic oligonucleotide
gaagagataagacaccgtttcgcgcgtgtagtcgatcgaaagttttgagcggctc

SEQ ID NO: 287942 - DNA, 55 bp, Artificial
  Synthetic oligonucleotide
gcacgcatacccgccggagtctgctgtagtgttgtactacgactgaatgcttgcc

SEQ ID NO: 287943 - DNA, 55 bp, Artificial
  Synthetic oligonucleotide
gaggggtgagaacggattgatcatctctgacagagtgcgccgtcgttgcaaagag

SEQ ID NO: 287944 - DNA, 55 bp, Artificial
  Synthetic oligonucleotide
gaagaagtaaacgagaacgactatttcagaaatcgagtacgcaggcaaccgtctt

SEQ ID NO: 287945 - DNA, 55 bp, Artificial
  Synthetic oligonucleotide
gcaatacgacaactgatggttcgaacacgtaggcctctacaaggggaaataatgg

SEQ ID NO: 287946 - DNA, 55 bp, Artificial
  Synthetic oligonucleotide
gaccggtgatccccgactgtgttgtcctcatctacggttcacaatcaaccacgtt

SEQ ID NO: 287947 - DNA, 55 bp, Artificial
  Synthetic oligonucleotide
gaccgctcagcataccaggaccatcctaacaaacgtacagaaaattcacacgcga

SEQ ID NO: 287948 - DNA, 55 bp, Artificial
  Synthetic oligonucleotide
gaggatccacttacgacggtcttatgacacaacacatcccgaccatggattgaag

SEQ ID NO: 287949 - DNA, 57 bp, Artificial
  Synthetic oligonucleotide
aacgtcaatggttaacgtctttgtcttgggcacaaatgtagtatgttcgactcatac

SEQ ID NO: 287950 - DNA, 55 bp, Artificial
  Synthetic oligonucleotide
gaggatgacacttaacaacttacagcttccaaacgcacgctcagagatatccacg

SEQ ID NO: 287951 - DNA, 55 bp, Artificial
  Synthetic oligonucleotide
gaccgcgctgtatgtttgttcgtgcatgccttcgtgtacgcatgtggatcgcgag

SEQ ID NO: 287952 - DNA, 55 bp, Artificial
  Synthetic oligonucleotide
gatcaaatcatgactaaggtgaacagactccaatcggcgaaatatgtcgaacggc

SEQ ID NO: 287953 - DNA, 55 bp, Artificial
  Synthetic oligonucleotide
gacccgtcccgtatatgtgtaccggctcatgtgctacccgacgctggagtacagc

SEQ ID NO: 287954 - DNA, 55 bp, Artificial
  Synthetic oligonucleotide
gaggatgatcttataaaagcctcgccacatatgatagcagcttatgatcctacta

SEQ ID NO: 287955 - DNA, 55 bp, Artificial
  Synthetic oligonucleotide
gacccctccaattactgttcaataagaactggatccgaggggataatatgtgaca

SEQ ID NO: 287956 - DNA, 55 bp, Artificial
  Synthetic oligonucleotide
gaggcaacccgccgctcgaacgaccacgtcggggtctgtagggtcttcattctgg

SEQ ID NO: 287957 - DNA, 55 bp, Artificial
  Synthetic oligonucleotide
gcacaaagaccgagtcgaaacccagtgtctttgctgcgcccagctctgaaggtga

SEQ ID NO: 287958 - DNA, 55 bp, Artificial
  Synthetic oligonucleotide
gatatgtctctaggtaacaacttcgtatcaattcggtacaactagaaataagtat

SEQ ID NO: 287959 - DNA, 55 bp, Artificial
  Synthetic oligonucleotide
gaccatggacttcttgcaagattaccaggggcgaatattcctgcgatcaatccac

SEQ ID NO: 287960 - DNA, 54 bp, Artificial
  Synthetic oligonucleotide
acttgtcggtgtacacggcccagttacctccttcgcgggagtagtggtccatcg

SEQ ID NO: 287961 - DNA, 60 bp, Artificial
  Synthetic oligonucleotide
gcggcggttcgcaatggactgagcatggtaaatgttgccgagcttcgacgcactgtagca

SEQ ID NO: 287962 - DNA, 55 bp, Artificial
  Synthetic oligonucleotide
gaccatgcatcaacgactgcgcaggattgtacctgtgtgcaggcgtctgcgaggc

SEQ ID NO: 287963 - DNA, 55 bp, Artificial
  Synthetic oligonucleotide
gaccagtgctgcgtccaatcgtagttgggaatggacgagatgtagccgagatagc

SEQ ID NO: 287964 - DNA, 55 bp, Artificial
  Synthetic oligonucleotide
gcacaaccacgcgacatatatcggaagcagtgtagaaaagaacacgaaaacggat

SEQ ID NO: 287965 - DNA, 55 bp, Artificial
  Synthetic oligonucleotide
gcacaacgccttcacgaagcatgagtgttgcaagtgcagtgtaggccctggcgcc

SEQ ID NO: 287966 - DNA, 55 bp, Artificial
  Synthetic oligonucleotide
gcacaagcgggcacgtgcgttggtcgttgaaagcagaactggcgggccagtagac

SEQ ID NO: 287967 - DNA, 55 bp, Artificial
  Synthetic oligonucleotide
gaggcaagagcggaggggatcctcctcgcacatcatccgtggcagagaaccgaga

SEQ ID NO: 287968 - DNA, 55 bp, Artificial
  Synthetic oligonucleotide
gaccactatgactgggagcggctgtgacgcaaactgcgaggcgggtacgcgtagc

SEQ ID NO: 287969 - DNA, 55 bp, Artificial
  Synthetic oligonucleotide
gaggcaatgctagagtcattaagtaacccgttaatttgagtggcattgggacccc

SEQ ID NO: 287970 - DNA, 55 bp, Artificial
  Synthetic oligonucleotide
gaggcacaactcacgctcagctacagccgtctcactgatgtgatacgcgtcttag

SEQ ID NO: 287971 - DNA, 55 bp, Artificial
  Synthetic oligonucleotide
gacgcagctacggaagcattagaatgacgctcagaatttgtctccatcattcgtt

SEQ ID NO: 287972 - DNA, 60 bp, Artificial
  Synthetic oligonucleotide
agcaggtgaagtcgccaattccgcattgggacatcgaacacatatggatggttgctgcgg

SEQ ID NO: 287973 - DNA, 51 bp, Artificial
  Synthetic oligonucleotide
gaggacgcggtcagaggttttaagaaccgttgcctcgtacccctccttaac

SEQ ID NO: 287974 - DNA, 55 bp, Artificial
  Synthetic oligonucleotide
gcaagaagggaagtacttggggcacccggtactgtgcgcacctattcggcagagg

SEQ ID NO: 287975 - DNA, 55 bp, Artificial
  Synthetic oligonucleotide
gcaagaggttccatggtacaaatgagacagctttgtggtatacgtggtttaatga

SEQ ID NO: 287976 - DNA, 55 bp, Artificial
  Synthetic oligonucleotide
gcaagagttcatttagcttacttagaagtgaacgtgggtcttctaatatccccgc

SEQ ID NO: 287977 - DNA, 55 bp, Artificial
  Synthetic oligonucleotide
gacgactattaatagcaccgagaaaacgcctgtgctgtagtggggctcacaacac

SEQ ID NO: 287978 - DNA, 55 bp, Artificial
  Synthetic oligonucleotide
gcaagatagagtagtggaccactcattgggctcataatccaaccacggttgttcg

SEQ ID NO: 287979 - DNA, 55 bp, Artificial
  Synthetic oligonucleotide
gacgacagaccccatgggagccgaagcgaaactataaggggtgtgagagagggcg

SEQ ID NO: 287980 - DNA, 55 bp, Artificial
  Synthetic oligonucleotide
gatcaactatacatactacgtggtaccacatggttactacatcacacgcgtggtg

SEQ ID NO: 287981 - DNA, 55 bp, Artificial
  Synthetic oligonucleotide
gcaaggcatttagaaggccagaaggcacttttatctacttcgaggataatgcagg

SEQ ID NO: 287982 - DNA, 55 bp, Artificial
  Synthetic oligonucleotide
gaggacggcttagccaccagtgcgagtacatccaactgcctccaggataatcgcc

SEQ ID NO: 287983 - DNA, 55 bp, Artificial
  Synthetic oligonucleotide
tctcgtaaccatgccaacacataagaactttttagggaagttaaggtgctcaggg

SEQ ID NO: 287984 - DNA, 55 bp, Artificial
  Synthetic oligonucleotide
gcaaggccgtaacggctctcggtctttctgacatactcgcactccgtcatgcacc

SEQ ID NO: 287985 - DNA, 55 bp, Artificial
  Synthetic oligonucleotide
gcaagggtacgcaaagcgttgaaggaatgtcccgtatagtgatcccgtttcggag

SEQ ID NO: 287986 - DNA, 55 bp, Artificial
  Synthetic oligonucleotide
gaggagcacgacacgatactctgggctacatcaagcgcagacatgtgcgtcaacg

SEQ ID NO: 287987 - DNA, 55 bp, Artificial
  Synthetic oligonucleotide
gcaagtgctatcatatgtggaggggtatatcatatgtttgttcgcatcgggagtg

SEQ ID NO: 287988 - DNA, 55 bp, Artificial
  Synthetic oligonucleotide
gcaagtttagaacaataaaccagtcgtgtcagagttgggtgtagacctggcacac

SEQ ID NO: 287989 - DNA, 55 bp, Artificial
  Synthetic oligonucleotide
gaggagcccacaggacatgaaaactctgctcctcacagaggtgcgtgcttgcgtt

SEQ ID NO: 287990 - DNA, 55 bp, Artificial
  Synthetic oligonucleotide
gcaagtttgcgaaacttcaagattagcatgtcaaatcaaagtcgacgaaagactg

SEQ ID NO: 287991 - DNA, 55 bp, Artificial
  Synthetic oligonucleotide
gaggagcgctgtgcattctacagtgtgcttcaagtgctctctccacgacgctccg

SEQ ID NO: 287992 - DNA, 55 bp, Artificial
  Synthetic oligonucleotide
gaggagcgtagcttacatcggactgagctcacaaacggatgcactcagaggcgga

SEQ ID NO: 287993 - DNA, 55 bp, Artificial
  Synthetic oligonucleotide
gaggagtctctcccgggcttcccttacttactcggccgtcaccgggcatgtgagt

SEQ ID NO: 287994 - DNA, 60 bp, Artificial
  Synthetic oligonucleotide
gagttcatatcgatgttgtagtttgtgacctcgatgttggattgccatatcctgagggtt

SEQ ID NO: 287995 - DNA, 55 bp, Artificial
  Synthetic oligonucleotide
gaggagtgggtgctagacgcttgtattgcactgaggtgcgtctcgtcaccaggga

SEQ ID NO: 287996 - DNA, 55 bp, Artificial
  Synthetic oligonucleotide
gaggataagtagctgaaatgaaagtttgatcagccacactgaaattgagatacgg

SEQ ID NO: 287997 - DNA, 55 bp, Artificial
  Synthetic oligonucleotide
gaccgtctcttcgtgttgcctctcgttggaccttcttctctgcagagccgcgttc

SEQ ID NO: 287998 - DNA, 55 bp, Artificial
  Synthetic oligonucleotide
gacaggcgtgcatacttctcagctgtgaacgttacgattgctagtcctaaacccc

SEQ ID NO: 287999 - DNA, 55 bp, Artificial
  Synthetic oligonucleotide
gacaggacttgctgtcgttactttcctctagaaggcggacgaggcaacaaagcag

SEQ ID NO: 288000 - DNA, 55 bp, Artificial
  Synthetic oligonucleotide
gatatcccacgtcatcaggtgcgttgacagtaaagcgagccagttgcgggcaccc

SEQ ID NO: 288001 - DNA, 55 bp, Artificial
  Synthetic oligonucleotide
gcacatgtgggcagcagtagggatggccagtctctaaaccgtcggcaggggacag

SEQ ID NO: 288002 - DNA, 55 bp, Artificial
  Synthetic oligonucleotide
gacacgtgtcagagcagaggagcataactcgtggtccgctggatgtggcatgagg

SEQ ID NO: 288003 - DNA, 55 bp, Artificial
  Synthetic oligonucleotide
gaggcaggatcacccgttgttgaaggaggtttgcgagagcgtaatggaatgctaa

SEQ ID NO: 288004 - DNA, 55 bp, Artificial
  Synthetic oligonucleotide
gacacgattggaaggtttgtgccaaacttgggtatcaacctgcgtccacgttacc

SEQ ID NO: 288005 - DNA, 60 bp, Artificial
  Synthetic oligonucleotide
atagttcataaataattaccatatatataatgtacacctctcgatcattttatagttata

SEQ ID NO: 288006 - DNA, 55 bp, Artificial
  Synthetic oligonucleotide
gacacccgatcgctgtgtctaacgtgggtctgttgtaatggtgagtaagctgtgg

SEQ ID NO: 288007 - DNA, 54 bp, Artificial
  Synthetic oligonucleotide
gacacccctatttgacatgaatggacctaaccttcggtcgtttcagttagacct

SEQ ID NO: 288008 - DNA, 55 bp, Artificial
  Synthetic oligonucleotide
gacaccagagacgatccccgtggagacaagtccgcaccactcgagagattgccgt

SEQ ID NO: 288009 - DNA, 55 bp, Artificial
  Synthetic oligonucleotide
gacacagcgaaaccatatagatgtagaatcaaagcaccaggtttcttacatttac

SEQ ID NO: 288010 - DNA, 55 bp, Artificial
  Synthetic oligonucleotide
gaggcatcggagatagacagcgagcgtgactcggtcgcccacagtgacccatcac

SEQ ID NO: 288011 - DNA, 55 bp, Artificial
  Synthetic oligonucleotide
gcaccaacgcaggaggttttgtcccgactgtcgcttaccaatctcgaatgggagt

SEQ ID NO: 288012 - DNA, 55 bp, Artificial
  Synthetic oligonucleotide
gacacaaaggcttaatcctaaagtggctccgtatttcaaaatagaatctttggga

SEQ ID NO: 288013 - DNA, 55 bp, Artificial
  Synthetic oligonucleotide
gacaagtcgctttatgctggttcggactaaatgtgcaaagtgggtaacacttgac

SEQ ID NO: 288014 - DNA, 55 bp, Artificial
  Synthetic oligonucleotide
gacaagcaagttggcctaaaggacaccttctagtttgccctgagagacaggaccc

SEQ ID NO: 288015 - DNA, 55 bp, Artificial
  Synthetic oligonucleotide
gcaccactcgcattcacgcaagcgcagacaactagacaaggtgccccgtgcgtgc

SEQ ID NO: 288016 - DNA, 56 bp, Artificial
  Synthetic oligonucleotide
tctagcctagacctcccgtccagccgtagcggtgtgctgtgtaaaacgtcccttgg

SEQ ID NO: 288017 - DNA, 55 bp, Artificial
  Synthetic oligonucleotide
gatatcaccaccggcttatatcggcgtcaaagcaccacggctctgataggctctc

SEQ ID NO: 288018 - DNA, 55 bp, Artificial
  Synthetic oligonucleotide
gaggcatgcgggcactactgctacacgggttagggtcgttcatgcacagagaccc

SEQ ID NO: 288019 - DNA, 55 bp, Artificial
  Synthetic oligonucleotide
gcaccagactctgaatgcgctttaactttgcgtcgataatcacgtccctctgtgc

SEQ ID NO: 288020 - DNA, 55 bp, Artificial
  Synthetic oligonucleotide
gcaccatcgatggatcgtgcatgtacagatgcgattcaggagtgctttgtgtttg

SEQ ID NO: 288021 - DNA, 55 bp, Artificial
  Synthetic oligonucleotide
gaggccagtcgtgtgcacaatgacagagcgccatagaatgagaagtgggcgttgc

SEQ ID NO: 288022 - DNA, 55 bp, Artificial
  Synthetic oligonucleotide
gcacccaaagagattgtgcgaaacgtgagacgctacactactaatagtatttcga

SEQ ID NO: 288023 - DNA, 55 bp, Artificial
  Synthetic oligonucleotide
gaccaagtacatcacttctcgcaacccaaatgagaagtacctgcgcaccggtcac

SEQ ID NO: 288024 - DNA, 55 bp, Artificial
  Synthetic oligonucleotide
gaccaaatatgccaggtggatcaaatatgccaggtggaccaaatatgccaggtgg

SEQ ID NO: 288025 - DNA, 55 bp, Artificial
  Synthetic oligonucleotide
gcacaattagtattcgacagctcgaggaatggcaaaggtttaagtagtctcgcca

SEQ ID NO: 288026 - DNA, 55 bp, Artificial
  Synthetic oligonucleotide
gacatttcccacgtacagcgacagacagtgcgacataagtttggatgtcgtaccg

SEQ ID NO: 288027 - DNA, 60 bp, Artificial
  Synthetic oligonucleotide
tctagcattatggtattacctatgttagaatcatacactctagtatactggcattttgta

SEQ ID NO: 288028 - DNA, 55 bp, Artificial
  Synthetic oligonucleotide
gacatgtctaaggaaatacgacataaggctgaaactcttcctacacccagagata

SEQ ID NO: 288029 - DNA, 55 bp, Artificial
  Synthetic oligonucleotide
gaggcacacagtgaggtatggcgattcgtttgtgcgagacacctcgagcacacgc

SEQ ID NO: 288030 - DNA, 55 bp, Artificial
  Synthetic oligonucleotide
gcacacactatatacacacccataacgcagactactcctctcgcgctagagcggg

SEQ ID NO: 288031 - DNA, 55 bp, Artificial
  Synthetic oligonucleotide
gcacacgcagaggatcccatcccgaattccttccttaagcgcctgtaggcctagg

SEQ ID NO: 288032 - DNA, 55 bp, Artificial
  Synthetic oligonucleotide
gcacacgcttctactagcgtgttttccttcgaagcatcacttctttccgccgtct

SEQ ID NO: 288033 - DNA, 55 bp, Artificial
  Synthetic oligonucleotide
gaggcagcgctgacaacctgatacccctcgcctcatgtctgtcgcggcacaagca

SEQ ID NO: 288034 - DNA, 55 bp, Artificial
  Synthetic oligonucleotide
gatatgtcgtccatgtgtcgtagagcctgcctgtgctgttcaactgccgtcgcta

SEQ ID NO: 288035 - DNA, 55 bp, Artificial
  Synthetic oligonucleotide
gacatggatagcactcccctttgtccatataatacccagtgttacatcttaggca

SEQ ID NO: 288036 - DNA, 55 bp, Artificial
  Synthetic oligonucleotide
gatatggcactaaacagctttggattgaccgctcaacatgccaaattacagagtc

SEQ ID NO: 288037 - DNA, 55 bp, Artificial
  Synthetic oligonucleotide
gacatctaccatcatcggcagcacatctcttatcgaatgtaatacatccaaactg

SEQ ID NO: 288038 - DNA, 60 bp, Artificial
  Synthetic oligonucleotide
agcagccatttggttcagctactagttcactgtcaactaccatgttacgacttcgcatcg

SEQ ID NO: 288039 - DNA, 55 bp, Artificial
  Synthetic oligonucleotide
gacatcagccctcagtgggtccgctgtgttcaaccctcttcattgcacaacttct

SEQ ID NO: 288040 - DNA, 55 bp, Artificial
  Synthetic oligonucleotide
gacatagcgctcgttctaatgatgccttaaatacagtctattgcctaatctgccc

SEQ ID NO: 288041 - DNA, 55 bp, Artificial
  Synthetic oligonucleotide
gacagtgagagtggtcagagggagttttctggcgctgcctacgctttgctaacac

SEQ ID NO: 288042 - DNA, 55 bp, Artificial
  Synthetic oligonucleotide
gcacactggcatgtccacgcgactgtgatctgtcagctgagccgtccacagctcc

SEQ ID NO: 288043 - DNA, 55 bp, Artificial
  Synthetic oligonucleotide
gcacagaagtgcgcctgtgtctgtacacctacgggatgttccgcatccgaggacg

SEQ ID NO: 288044 - DNA, 55 bp, Artificial
  Synthetic oligonucleotide
gacagtcgtgaaaggcggtacattcgcaagcaggcccggctactgctgtgcctca

SEQ ID NO: 288045 - DNA, 55 bp, Artificial
  Synthetic oligonucleotide
gacagggcccgacaacatgaaggacatccgctgtgtggagctagcgaatggcagc

SEQ ID NO: 288046 - DNA, 55 bp, Artificial
  Synthetic oligonucleotide
gaggcagctagcagagatgtgagacggcggcaagtcgattggtccacaaacgact

SEQ ID NO: 288047 - DNA, 55 bp, Artificial
  Synthetic oligonucleotide
gcacagcgcagcaatgaagctacagtaccacctgttgttattcacgttcctcctg

SEQ ID NO: 288048 - DNA, 55 bp, Artificial
  Synthetic oligonucleotide
gcacatgatttaggagctgacccggattcctatgaggacgcgagtatccttggag

SEQ ID NO: 288049 - DNA, 60 bp, Artificial
  Synthetic oligonucleotide
ccccagtaacagaccccaatgtgcgtcccttggaggtgtacatgtgcagcgtagtcaaga

SEQ ID NO: 288050 - DNA, 55 bp, Artificial
  Synthetic oligonucleotide
cgccccgccggatagacgtcttcgtggagagacgagtgaagtgtgtgcatgtttg

SEQ ID NO: 288051 - DNA, 55 bp, Artificial
  Synthetic oligonucleotide
cgccccgatgcggtcgactgctatgtcgctcctaccgccggtagtggccctgtga

SEQ ID NO: 288052 - DNA, 54 bp, Artificial
  Synthetic oligonucleotide
cgccccgaagattgtagaaacaggcaaccataccgttaggagagttgctaccgg

SEQ ID NO: 288053 - DNA, 55 bp, Artificial
  Synthetic oligonucleotide
cgccccgaacgaggcgcatgcggagcggtgtaaggtgtgctacgcctaccgtagt

SEQ ID NO: 288054 - DNA, 55 bp, Artificial
  Synthetic oligonucleotide
cgccccactcgcgctgtaaaccaagaatgtgcacgccatctacctccgcaagcgc

SEQ ID NO: 288055 - DNA, 55 bp, Artificial
  Synthetic oligonucleotide
cgcccatgagctaagttccacccataacaatattgacaaacagaacgagttgctt

SEQ ID NO: 288056 - DNA, 55 bp, Artificial
  Synthetic oligonucleotide
cgcccatcgtctgtaattcaggcaacaaatttaaaccccactaatgggcctatta

SEQ ID NO: 288057 - DNA, 55 bp, Artificial
  Synthetic oligonucleotide
cgcccagctcgcatgagcggcacacgttagcctgaagcacacctcctttacggga

SEQ ID NO: 288058 - DNA, 54 bp, Artificial
  Synthetic oligonucleotide
cgcccacagtcgcaaaccgtacaaacctacattcctctgcgttccctctttccc

SEQ ID NO: 288059 - DNA, 54 bp, Artificial
  Synthetic oligonucleotide
cgcccacaaccgaggtagggagaggatacggagccccagacggaaagcacgacc

SEQ ID NO: 288060 - DNA, 60 bp, Artificial
  Synthetic oligonucleotide
gagtggagcgctctgttgagtctcctcagcgacctttggcaccaacgtggcattcgagtg

SEQ ID NO: 288061 - DNA, 55 bp, Artificial
  Synthetic oligonucleotide
cgccatggttacatggtttccgttactccttcttagccttatgtgtagtgtaatt

SEQ ID NO: 288062 - DNA, 55 bp, Artificial
  Synthetic oligonucleotide
cgccatggcggttgtgcgtgatgtgctgttcactgcctcggaagacagcaccgta

SEQ ID NO: 288063 - DNA, 55 bp, Artificial
  Synthetic oligonucleotide
cgccatgcatgctgtgtgccctgcggcgaatgtcttgtttgccctgttgctgtgg

SEQ ID NO: 288064 - DNA, 55 bp, Artificial
  Synthetic oligonucleotide
cgccatgagccctggacgactgtggatcgtgtacacccctcctatcagcggtagc

SEQ ID NO: 288065 - DNA, 55 bp, Artificial
  Synthetic oligonucleotide
cgccatattatggatgaacattgagggacgtctataaattgccatgcacatggtg

SEQ ID NO: 288066 - DNA, 55 bp, Artificial
  Synthetic oligonucleotide
cgccatatgcccatattcagataagtacatagtaccagaggtggatgatatctag

SEQ ID NO: 288067 - DNA, 55 bp, Artificial
  Synthetic oligonucleotide
cgccatagcaggaatcatggcaatgtgcaggcagctatgatactggagaaaggag

SEQ ID NO: 288068 - DNA, 55 bp, Artificial
  Synthetic oligonucleotide
cgccagtgcgtctctcgttcgcatagagtaagaggttcagcacgcgtacacagag

SEQ ID NO: 288069 - DNA, 55 bp, Artificial
  Synthetic oligonucleotide
cgccagcgaatgtagtttatctgaccggatggtcccggcaacagatagttttcgg

SEQ ID NO: 288070 - DNA, 55 bp, Artificial
  Synthetic oligonucleotide
cgccactgcttggacagccggtgcaccctctggcggccatcatgacttctttacc

SEQ ID NO: 288071 - DNA, 59 bp, Artificial
  Synthetic oligonucleotide
taaggatacatgctttgtatccaaggggccctggaccaaggaggaagatgagattctcc

SEQ ID NO: 288072 - DNA, 59 bp, Artificial
  Synthetic oligonucleotide
tctaacattccatttgcttaaagctatatggacataacctccaggcaaagaaaatgacc

SEQ ID NO: 288073 - DNA, 55 bp, Artificial
  Synthetic oligonucleotide
cgccacccctgcatgctactcgcaccggcgcgtattttatcatcctccatcagaa

SEQ ID NO: 288074 - DNA, 54 bp, Artificial
  Synthetic oligonucleotide
cgccacccctcccgttcttgggtttcgtgtaaaaccataaccgcacatgtgtgc

SEQ ID NO: 288075 - DNA, 55 bp, Artificial
  Synthetic oligonucleotide
cgccaccacgctgtagggtctctacactcgtgtgtattgcatacctctgcacccg

SEQ ID NO: 288076 - DNA, 55 bp, Artificial
  Synthetic oligonucleotide
cgcatttgtgacgctcttctgcacgactctccgctgcatcctacgcgcagcaccg

SEQ ID NO: 288077 - DNA, 55 bp, Artificial
  Synthetic oligonucleotide
cgcattacaagctacgaccccgttacgcagctctcccctgagcgccgtgactaca

SEQ ID NO: 288078 - DNA, 55 bp, Artificial
  Synthetic oligonucleotide
cgcatgtttaatctcgaaatgatgtctaaatatgcactccaaaggggcatagcca

SEQ ID NO: 288079 - DNA, 55 bp, Artificial
  Synthetic oligonucleotide
cgcatgtgcacggacatgcatcgctcgctactgcgacagcaagtaaaacagagcg

SEQ ID NO: 288080 - DNA, 55 bp, Artificial
  Synthetic oligonucleotide
cgcatgtcatttgcggacgctgcagacagtttcgcgcgaggcacatacacggttc

SEQ ID NO: 288081 - DNA, 55 bp, Artificial
  Synthetic oligonucleotide
cgcatgggattcagattgtactcttcgtaacgcaatgtccctcacggactccatc

SEQ ID NO: 288082 - DNA, 55 bp, Artificial
  Synthetic oligonucleotide
cgcgaacagccgtgatacaacatgccattagtggtgccctcgagtcggaagtgtt

SEQ ID NO: 288083 - DNA, 53 bp, Artificial
  Synthetic oligonucleotide
tctaaaatccaatagcgcgggctccacgtttttctgccctttacttaacgcct

SEQ ID NO: 288084 - DNA, 55 bp, Artificial
  Synthetic oligonucleotide
cgcgaaatcatactcctatgcgaagagcacaataccagctcttgcactaacaccg

SEQ ID NO: 288085 - DNA, 55 bp, Artificial
  Synthetic oligonucleotide
cgcctttctcttcgtctctctagcagtcagcgactcgggacatgccgtctgtggc

SEQ ID NO: 288086 - DNA, 55 bp, Artificial
  Synthetic oligonucleotide
cgcctttattttgggtgagattcccatgtatatgacatccaatatgtccaagagg

SEQ ID NO: 288087 - DNA, 55 bp, Artificial
  Synthetic oligonucleotide
cgcctttacaaagtgcggcatcgtctctgggtttagccgacgcatgttgccctcc

SEQ ID NO: 288088 - DNA, 55 bp, Artificial
  Synthetic oligonucleotide
cgccttggtgacgttgctaaatgcactcattagcagctccctggggtacttcata

SEQ ID NO: 288089 - DNA, 55 bp, Artificial
  Synthetic oligonucleotide
cgccttgggcttacgcgcatggtgccagtgctcgagtggagcgggtgattttaac

SEQ ID NO: 288090 - DNA, 55 bp, Artificial
  Synthetic oligonucleotide
cgcctgtcagaatatgctacatcttacccgagaattttagtagcaaatgcggacc

SEQ ID NO: 288091 - DNA, 55 bp, Artificial
  Synthetic oligonucleotide
cgcctgtaggcctaggtagtactggggtgagggatcacccgggaactctaggtgc

SEQ ID NO: 288092 - DNA, 55 bp, Artificial
  Synthetic oligonucleotide
cgcctgtaagcatagcttctgtcggagcacaattaccccatgaagattcaagttg

SEQ ID NO: 288093 - DNA, 55 bp, Artificial
  Synthetic oligonucleotide
cgcctgcggcatggcatagccacttgatcggatatgcgagggacgggacgatacc

SEQ ID NO: 288094 - DNA, 58 bp, Artificial
  Synthetic oligonucleotide
tcgtttcttggataggccacttaaaaaatgtacgatctctgaatgggataataataca

SEQ ID NO: 288095 - DNA, 55 bp, Artificial
  Synthetic oligonucleotide
cgcctgaacctgcaggaaacacgatgtgcgggagggctcagttccgagaggaacg

SEQ ID NO: 288096 - DNA, 55 bp, Artificial
  Synthetic oligonucleotide
cgcctcgtttcctctctgtattccctacgcgaaagccaccctgtgctgtgccggc

SEQ ID NO: 288097 - DNA, 55 bp, Artificial
  Synthetic oligonucleotide
cgcctcgtgcgggtacccttttccgcatatcttgtcttccgctgggagccttgcc

SEQ ID NO: 288098 - DNA, 55 bp, Artificial
  Synthetic oligonucleotide
cgcctcacactcaactacgaaggtatgtggtgtgtaaattgactctatagtacgg

SEQ ID NO: 288099 - DNA, 55 bp, Artificial
  Synthetic oligonucleotide
cgcctaccaaggatgtctccgggtaaggagaaccacctagctcacacgggatcgt

SEQ ID NO: 288100 - DNA, 55 bp, Artificial
  Synthetic oligonucleotide
cgccgtcattggtgttgtgtcggactagacgtcagccctgtcccctcacctccac

SEQ ID NO: 288101 - DNA, 55 bp, Artificial
  Synthetic oligonucleotide
cgccggtctctacgactttaggcatcaggtagtcgaggcggtagatatccaagcc

SEQ ID NO: 288102 - DNA, 55 bp, Artificial
  Synthetic oligonucleotide
cgccgctcgtgagaggtagcactcgtccataatgtcggagcacgtagcactttcc

SEQ ID NO: 288103 - DNA, 55 bp, Artificial
  Synthetic oligonucleotide
cgccgctaccacatcaagaccgcttttgtggacggacgcctcgagcgcttgaagg

SEQ ID NO: 288104 - DNA, 55 bp, Artificial
  Synthetic oligonucleotide
cgccgcgccttccaagcacaagcggttcacagctcatcgcaactattatgcgtgg

SEQ ID NO: 288105 - DNA, 55 bp, Artificial
  Synthetic oligonucleotide
agcacttcctttggcaggagaactacaaaaactttggcctggataaaaggttgca

SEQ ID NO: 288106 - DNA, 55 bp, Artificial
  Synthetic oligonucleotide
cgccgcacagacgacttatcgtccttcggaatgttctggcaactcgggtaggcgc

SEQ ID NO: 288107 - DNA, 55 bp, Artificial
  Synthetic oligonucleotide
cgccgaggggtttgtgcagtttagcgagtggaacgcgctggtcaatgaattcgcg

SEQ ID NO: 288108 - DNA, 55 bp, Artificial
  Synthetic oligonucleotide
cgccgaggaaagttcactcagaacaaacgagacgaacgctttgtctggaagagac

SEQ ID NO: 288109 - DNA, 55 bp, Artificial
  Synthetic oligonucleotide
cgcccttgtactacacgttatgtgtgtactgccttctctctccgcgcgtgtgtgt

SEQ ID NO: 288110 - DNA, 55 bp, Artificial
  Synthetic oligonucleotide
cgccctgtcgtccccttttcccctgcctccgcgacgctcatacagctgaaacact

SEQ ID NO: 288111 - DNA, 55 bp, Artificial
  Synthetic oligonucleotide
cgccctgctcacgaaaacacgccacaaggcatcctttcatagatgcacgagcccc

SEQ ID NO: 288112 - DNA, 55 bp, Artificial
  Synthetic oligonucleotide
cgcccggggacattggtgcgatttagaatgaacacgtacgtagtagatggcgtgg

SEQ ID NO: 288113 - DNA, 55 bp, Artificial
  Synthetic oligonucleotide
cgcccggccgaattaatgtgattctcgccctggctgataaacccaacttgtcgcc

SEQ ID NO: 288114 - DNA, 55 bp, Artificial
  Synthetic oligonucleotide
cgccccttggaacgccatctgtgcgttactgtgtttcctgggtctcgagagtgcg

SEQ ID NO: 288115 - DNA, 55 bp, Artificial
  Synthetic oligonucleotide
cgcccctctgcagtggtcgagcacctttatcgagtacaccccacgtgtcctgcag

SEQ ID NO: 288116 - DNA, 58 bp, Artificial
  Synthetic oligonucleotide
cgcccataatttttggcgtttagagcatcctcatacagataggttctttctgaaacaa

SEQ ID NO: 288117 - DNA, 55 bp, Artificial
  Synthetic oligonucleotide
cgccccgtattcaacgatacacgcgacaagctaaccgtaaacaggagatttcgcg

SEQ ID NO: 288118 - DNA, 55 bp, Artificial
  Synthetic oligonucleotide
cgcaccctcatctttgaccgctacgacacacaagcggaagagagcgaccaccgtg

SEQ ID NO: 288119 - DNA, 55 bp, Artificial
  Synthetic oligonucleotide
cgcaccctagcgcttgtacgaaggcatacgcacgcaccaaacatgcacgcgaaca

SEQ ID NO: 288120 - DNA, 55 bp, Artificial
  Synthetic oligonucleotide
cgcacatcctagaacaggcatccgctctccgtcaaccccacacaagcgcggtctc

SEQ ID NO: 288121 - DNA, 55 bp, Artificial
  Synthetic oligonucleotide
cgcacatagacaacgtagggaaaggacccttcaacactggtagcgctcgctacac

SEQ ID NO: 288122 - DNA, 55 bp, Artificial
  Synthetic oligonucleotide
cgcacagtggcgttatgccatctaagtgtctgctgacgagtgactgagaatgatg

SEQ ID NO: 288123 - DNA, 55 bp, Artificial
  Synthetic oligonucleotide
cgcacagacactgctgcaagcgggtctcgttgcacaagatgcaacggcggagacg

SEQ ID NO: 288124 - DNA, 55 bp, Artificial
  Synthetic oligonucleotide
cgcacactcacgaacgcgcgcagccgagtccatatttgcagtcactggagcccgt

SEQ ID NO: 288125 - DNA, 55 bp, Artificial
  Synthetic oligonucleotide
cgcacacctggacatgcactactgctggcgtgccaacatctggccacacccaagt

SEQ ID NO: 288126 - DNA, 55 bp, Artificial
  Synthetic oligonucleotide
cgcacacctcatgaacgctggtgtccgtgcctaatgagttcaagaagtggataac

SEQ ID NO: 288127 - DNA, 59 bp, Artificial
  Synthetic oligonucleotide
atatgggtacttcaagatattatctatgatagttaacgcaaagtatcctacttggagag

SEQ ID NO: 288128 - DNA, 55 bp, Artificial
  Synthetic oligonucleotide
cgcacaccgtttccctcgacatcggatgaggcatcactgcgtgtgttatgtcgct

SEQ ID NO: 288129 - DNA, 55 bp, Artificial
  Synthetic oligonucleotide
cgcacaccgtaggtagtgatgccattttcgttgacatgcacctgcgttgccgtcg

SEQ ID NO: 288130 - DNA, 55 bp, Artificial
  Synthetic oligonucleotide
cgcacaagtgtaccaatctatgacttcctcacttacagagagacaggcatacacc

SEQ ID NO: 288131 - DNA, 55 bp, Artificial
  Synthetic oligonucleotide
cgcacaagcactcgtgcagcatcttctcccgagaattcacgtgcagccgacgaat

SEQ ID NO: 288132 - DNA, 55 bp, Artificial
  Synthetic oligonucleotide
cgcacaactaccttcgcactatcacggtggccataacgcaactgtgtgcgcgtgc

SEQ ID NO: 288133 - DNA, 55 bp, Artificial
  Synthetic oligonucleotide
cgcacaaatgaggcctcttaactcagccgcgtaggtagagttgctccttcgggga

SEQ ID NO: 288134 - DNA, 55 bp, Artificial
  Synthetic oligonucleotide
cgcaataggtgctcatcacgcttcgtgattcgtctacgctgtacctcgccactcc

SEQ ID NO: 288135 - DNA, 55 bp, Artificial
  Synthetic oligonucleotide
cgcaaggatctgtcatgtttaaatacggaaaatgtgggataaaagtatggttagc

SEQ ID NO: 288136 - DNA, 55 bp, Artificial
  Synthetic oligonucleotide
cgcaagcaggcgagttggtcaagtgaagcggagcgcaatggtggcgtgtctggac

SEQ ID NO: 288137 - DNA, 55 bp, Artificial
  Synthetic oligonucleotide
cgcaagagaatcccgttcgtttcccatatgtgttgaggctcttttgggagacgga

SEQ ID NO: 288138 - DNA, 60 bp, Artificial
  Synthetic oligonucleotide
agattctccgataaatggtagagactcatggaccccgtaattggagcactatcgctgctg

SEQ ID NO: 288139 - DNA, 55 bp, Artificial
  Synthetic oligonucleotide
cgcaactctctctctaactctcgccggtaaggcgtctgtctacccttctcatgca

SEQ ID NO: 288140 - DNA, 55 bp, Artificial
  Synthetic oligonucleotide
cgcaaccaacgcggcactacatggctcccactttagcagcgcctctgcgcgatca

SEQ ID NO: 288141 - DNA, 55 bp, Artificial
  Synthetic oligonucleotide
cgatttgtgtcacttataagacacgcgtacgcaccgtccgttgttgtgttcgccg

SEQ ID NO: 288142 - DNA, 55 bp, Artificial
  Synthetic oligonucleotide
cgattcgtcgtgagcactttgaatagcttcataactgtgtacgctgtagctacac

SEQ ID NO: 288143 - DNA, 55 bp, Artificial
  Synthetic oligonucleotide
cgatggttcgatacttggtgtacatacttaagaggactccacacatctcagacgc

SEQ ID NO: 288144 - DNA, 55 bp, Artificial
  Synthetic oligonucleotide
cgatggtgatagtggtagtagtttgcagtctggtaccgtttagtggcctaattcg

SEQ ID NO: 288145 - DNA, 55 bp, Artificial
  Synthetic oligonucleotide
cgatggtagagtgccccaacgctgcttctagcttggtagctggccggtgctgcct

SEQ ID NO: 288146 - DNA, 55 bp, Artificial
  Synthetic oligonucleotide
cgatggacattatatcagcagatgcaaatccctcgtcacactcaaccttgaatcg

SEQ ID NO: 288147 - DNA, 55 bp, Artificial
  Synthetic oligonucleotide
cgatgctgcctggctagaatgagaagtgaagacgaaagacatgtgacgctcgaac

SEQ ID NO: 288148 - DNA, 55 bp, Artificial
  Synthetic oligonucleotide
cgatgcgaacacttctggtgtatagaaaacagcctcgcatgccacttccgcatgt

SEQ ID NO: 288149 - DNA, 56 bp, Artificial
  Synthetic oligonucleotide
cccatcgaaggtttggtaataaatgggcagaaataacaacgatgcttcctggaaga

SEQ ID NO: 288150 - DNA, 55 bp, Artificial
  Synthetic oligonucleotide
cgatgccgtctcaggttgctcatttgcgccacttagcacccacgtgcgcttgcga

SEQ ID NO: 288151 - DNA, 55 bp, Artificial
  Synthetic oligonucleotide
cgatgataggagcacgctctccgacaccaatgtggcactagacgtgcgcaccgcg

SEQ ID NO: 288152 - DNA, 55 bp, Artificial
  Synthetic oligonucleotide
cgcatgatggactgatgtgaacattgtaacaggcgctgcgtggaatgagtgagct

SEQ ID NO: 288153 - DNA, 55 bp, Artificial
  Synthetic oligonucleotide
cgcatgaaaacgatcaaacagagcggtagacgatgtagtctaatcagcagtgaac

SEQ ID NO: 288154 - DNA, 55 bp, Artificial
  Synthetic oligonucleotide
cgcatctcgagggactcttctgacagagacaaacgtcttctaacgtttcgcttgg

SEQ ID NO: 288155 - DNA, 55 bp, Artificial
  Synthetic oligonucleotide
cgcatctaaccgcgcactcccttgccgtccagtccaactcttgatagagctcccc

SEQ ID NO: 288156 - DNA, 55 bp, Artificial
  Synthetic oligonucleotide
cgcatagcagtgaaccgcaaaaggggacgcctttatagcgtagacggggacgcag

SEQ ID NO: 288157 - DNA, 55 bp, Artificial
  Synthetic oligonucleotide
cgcataaagcatcaagcgacatgctcagcgcatctttccagccgcctagcgtcgc

SEQ ID NO: 288158 - DNA, 48 bp, Artificial
  Synthetic oligonucleotide
cgcataaaagtgggttacgggttacggataaaagtgggttcccggtta

SEQ ID NO: 288159 - DNA, 55 bp, Artificial
  Synthetic oligonucleotide
cgcagtgcgccacacctaatgacagtaacacaatggcatcaagggcagtacacgg

SEQ ID NO: 288160 - DNA, 58 bp, Artificial
  Synthetic oligonucleotide
gaggtgctattgttaaaacagtaatgaatcgttgtattaattgtacaagatgtactcg

SEQ ID NO: 288161 - DNA, 55 bp, Artificial
  Synthetic oligonucleotide
cgcagtgcaactagtgcagttatgcagtgggcgcccctctttatgctctaccacg

SEQ ID NO: 288162 - DNA, 55 bp, Artificial
  Synthetic oligonucleotide
cgcagtcgtcttggtcgcgcctttcagctggcttgcaaggtcatccatgtcgcag

SEQ ID NO: 288163 - DNA, 55 bp, Artificial
  Synthetic oligonucleotide
cgcagtcactcccctctatggctgccgaaacatcagagtaggacgtaatatcccc

SEQ ID NO: 288164 - DNA, 55 bp, Artificial
  Synthetic oligonucleotide
cgcagtacaggagtgttggtagcggctgcattcgaatgagctgaagtcgcactag

SEQ ID NO: 288165 - DNA, 55 bp, Artificial
  Synthetic oligonucleotide
cgcagggtacaggttgtgtgtacccgatagaaagtcgctgcaagaaacgcatgtg

SEQ ID NO: 288166 - DNA, 55 bp, Artificial
  Synthetic oligonucleotide
cgcaggaccggagtgagctctctgtcgtctagtacgcctgcatcccgtgtggtgt

SEQ ID NO: 288167 - DNA, 55 bp, Artificial
  Synthetic oligonucleotide
cgcaggaaagatgtgctggcgagtataaaaggccagcggaagaatcgaagcgctg

SEQ ID NO: 288168 - DNA, 55 bp, Artificial
  Synthetic oligonucleotide
cgcagctcgtcagccatgtacttgctaatattctcgcctctcctcgacaccacag

SEQ ID NO: 288169 - DNA, 55 bp, Artificial
  Synthetic oligonucleotide
cgcagctccaacggcgtatgttacgcgccgtgcagctactggatgccgccttaca

SEQ ID NO: 288170 - DNA, 55 bp, Artificial
  Synthetic oligonucleotide
cgcagagtatacgtgcaggcatggacttgtggacgcctgttcctttgtgaatgcg

SEQ ID NO: 288171 - DNA, 55 bp, Artificial
  Synthetic oligonucleotide
tcgcactactgaaccaccacgacccgtcattcaagttcctgtttaacccggcgta

SEQ ID NO: 288172 - DNA, 55 bp, Artificial
  Synthetic oligonucleotide
cgcagaggacggagttaaactgcatctcgtagcacgtgatcagagtggagacttg

SEQ ID NO: 288173 - DNA, 55 bp, Artificial
  Synthetic oligonucleotide
cgcagagaagcggacacgttggcgaaagggaataaagcaggttgctgtgtgcagc

SEQ ID NO: 288174 - DNA, 55 bp, Artificial
  Synthetic oligonucleotide
cgcagaattgacggtagttgagagtgccctccgcctcgttcactaaggagagggt

SEQ ID NO: 288175 - DNA, 55 bp, Artificial
  Synthetic oligonucleotide
cgcagaagaagccttaaactatggatttacaggaccattattaagaggagcaggg

SEQ ID NO: 288176 - DNA, 55 bp, Artificial
  Synthetic oligonucleotide
cgcagaaagaccgcctttcttccacgtccttgcttcgctctcctaagcgaacaga

SEQ ID NO: 288177 - DNA, 55 bp, Artificial
  Synthetic oligonucleotide
cgcactgtccatagtgctaccggaatgtctgcgccattccgcacaccttcaagag

SEQ ID NO: 288178 - DNA, 55 bp, Artificial
  Synthetic oligonucleotide
cgcactggcatttctccctcccctcgcttcttctcttgtgtgtcaccatgggtgc

SEQ ID NO: 288179 - DNA, 55 bp, Artificial
  Synthetic oligonucleotide
cgcactgaacagcacatatatcacaccgcgagctgttttgaaatgacggcaatgc

SEQ ID NO: 288180 - DNA, 55 bp, Artificial
  Synthetic oligonucleotide
cgcacgtcgtcctgagacgacatctaccagaatagaacgcacaaagggcctgccg

SEQ ID NO: 288181 - DNA, 55 bp, Artificial
  Synthetic oligonucleotide
cgcacgcaaggtcgtaacagaaagaaagtgattggcggaggagaacagttcgggg

SEQ ID NO: 288182 - DNA, 56 bp, Artificial
  Synthetic oligonucleotide
atgcttttggtatctcgtagtgtagaacaataatgggttgaccgtcaaatccttta

SEQ ID NO: 288183 - DNA, 60 bp, Artificial
  Synthetic oligonucleotide
gagtcatacactctagtatactggcattttgtagaagctatctggctagtaattcacttt

SEQ ID NO: 288184 - DNA, 55 bp, Artificial
  Synthetic oligonucleotide
cgcacgactgtgtgttgacgggtgtagcatcgcaactgttgtggataccctctag

SEQ ID NO: 288185 - DNA, 55 bp, Artificial
  Synthetic oligonucleotide
cgcacgaagagggtaactatgtgtacttctacgttggtcaaaccggtgttctgct

SEQ ID NO: 288186 - DNA, 55 bp, Artificial
  Synthetic oligonucleotide
cgcacctcagcgcgtcatgtaacgtgtgtccgtctcccactctgtctgggtgtgt

SEQ ID NO: 288187 - DNA, 55 bp, Artificial
  Synthetic oligonucleotide
cgcacctcagcacttggcggttgcgggtcccactcactcttacgcctttgctgtg

SEQ ID NO: 288188 - DNA, 55 bp, Artificial
  Synthetic oligonucleotide
cgctgtggcgggtgtaaggctgtctcgtactgctgcaagcggcatcaggcactag

SEQ ID NO: 288189 - DNA, 55 bp, Artificial
  Synthetic oligonucleotide
cgctgggtgcctccatatagagtttcgtttctctctccaacgtgcccattcgacc

SEQ ID NO: 288190 - DNA, 55 bp, Artificial
  Synthetic oligonucleotide
cgctggggaccaagtcaacgttggtctcttcgttggcgtctatgcgagtgcgttg

SEQ ID NO: 288191 - DNA, 55 bp, Artificial
  Synthetic oligonucleotide
cgctggcgtgtttctcattccctcagcacgattgtgagtgagggcaggcaggtag

SEQ ID NO: 288192 - DNA, 55 bp, Artificial
  Synthetic oligonucleotide
cgctgctccgagatgttcctggcacatttgcttgtcgtcggggtctttcgtcacc

SEQ ID NO: 288193 - DNA, 55 bp, Artificial
  Synthetic oligonucleotide
cgctgctacccagatcgtcaggtcgttagcgtattatgctacgttcccgcagagt

SEQ ID NO: 288194 - DNA, 60 bp, Artificial
  Synthetic oligonucleotide
tcgcggctcgtgtgcgattcgagtctgtatgggtgttcgagtaatccgactcttctggcc

SEQ ID NO: 288195 - DNA, 55 bp, Artificial
  Synthetic oligonucleotide
cgctgcgtgtatcgatgctcttatcagcagtgccactggtcaccacgtttgcctg

SEQ ID NO: 288196 - DNA, 55 bp, Artificial
  Synthetic oligonucleotide
cgctgcggagctgcaagcactttaagagctgcaatagacctcgtttctcccgctg

SEQ ID NO: 288197 - DNA, 55 bp, Artificial
  Synthetic oligonucleotide
cgctgcgacaaccgtttaacatggcgtgcaccatcgcctatacacgcctgcggct

SEQ ID NO: 288198 - DNA, 55 bp, Artificial
  Synthetic oligonucleotide
cgctgcactttgacttgtctgggtcgcacaggtcactaagcttgttcaggaacgc

SEQ ID NO: 288199 - DNA, 55 bp, Artificial
  Synthetic oligonucleotide
cgctgcaaactcttgaggctgtctttcccgcgctaatggcattcccaccgtgtga

SEQ ID NO: 288200 - DNA, 55 bp, Artificial
  Synthetic oligonucleotide
cgctgagagtgaggcaggcacgctgcatgcaaagtacccaggaaagcgagcgggt

SEQ ID NO: 288201 - DNA, 55 bp, Artificial
  Synthetic oligonucleotide
cgctgagaaatagaggagtaagcgccacaggtgcatgagaccggagaagcgtgag

SEQ ID NO: 288202 - DNA, 55 bp, Artificial
  Synthetic oligonucleotide
cgctgacagcgaaaagtgctcaggggagagatacacatccgcgttgcacaccatc

SEQ ID NO: 288203 - DNA, 55 bp, Artificial
  Synthetic oligonucleotide
cgctgaagccccagctggcggaaaagttcgcaagaggattgtgtgtggccctgcg

SEQ ID NO: 288204 - DNA, 55 bp, Artificial
  Synthetic oligonucleotide
cgctctttggcttccggtcccacacagtcgtctttggcagccccggttggctttc

SEQ ID NO: 288205 - DNA, 60 bp, Artificial
  Synthetic oligonucleotide
tcgctctcgctgttacatcacaagtgtataatggtggatgccagcagtgaattattttcg

SEQ ID NO: 288206 - DNA, 55 bp, Artificial
  Synthetic oligonucleotide
cgctcttctttggccactggtaggcgtccatgggctggtttcgggcacggcttgt

SEQ ID NO: 288207 - DNA, 55 bp, Artificial
  Synthetic oligonucleotide
cgctcttccaccaggagtgcattgcgccggtgcagcggaactttatggggcagac

SEQ ID NO: 288208 - DNA, 55 bp, Artificial
  Synthetic oligonucleotide
cgctcttaagtgtgaacctataagcgaaatcgactaggctaactgtgtaatctgg

SEQ ID NO: 288209 - DNA, 55 bp, Artificial
  Synthetic oligonucleotide
cgctctgttgtgatacatcttatctgcttactagacatgcgcgcacgcatatgcc

SEQ ID NO: 288210 - DNA, 55 bp, Artificial
  Synthetic oligonucleotide
cgctctgtcgagttccttgtctcagcgatgccactttcgcgtgaggcagacgcac

SEQ ID NO: 288211 - DNA, 55 bp, Artificial
  Synthetic oligonucleotide
cgctcggtcacaaactattcctgcctaagctttgaaagttggatcgtggtgcgca

SEQ ID NO: 288212 - DNA, 55 bp, Artificial
  Synthetic oligonucleotide
cgctccccgtcacaacgtgatgcaaaataggagactacacacatagtagagaatg

SEQ ID NO: 288213 - DNA, 55 bp, Artificial
  Synthetic oligonucleotide
cgctccacccttcatcagtgacgtgcgcacagacgcacatttacacgcacttgcc

SEQ ID NO: 288214 - DNA, 55 bp, Artificial
  Synthetic oligonucleotide
cgctcatccaaggcgttgttcgatcgtacctcgtgcgctgtggccgagtgcctca

SEQ ID NO: 288215 - DNA, 55 bp, Artificial
  Synthetic oligonucleotide
cgctcataagcgagagcgtcacggtgaaagcgagggctgcattagctacagcgac

SEQ ID NO: 288216 - DNA, 60 bp, Artificial
  Synthetic oligonucleotide
atcacaacgcacttcttgcataccgtgcgcgtgtgaagaagagtgaccaactaggtgcgg

SEQ ID NO: 288217 - DNA, 55 bp, Artificial
  Synthetic oligonucleotide
cgctcagtgtccggttgcccactacgttactggcaggggcatcaccagttcccgt

SEQ ID NO: 288218 - DNA, 55 bp, Artificial
  Synthetic oligonucleotide
cgctcacgtcacttgcttctcgacgaaacgttgtcacagtccagcttggggtcac

SEQ ID NO: 288219 - DNA, 55 bp, Artificial
  Synthetic oligonucleotide
cgctcacgctactcagttcttgcgccgtgtcacatggtcgtagatgacagcttgc

SEQ ID NO: 288220 - DNA, 55 bp, Artificial
  Synthetic oligonucleotide
cggagcttgaggggcgtcgctgtcttgcatctcgtcggaagagtactgattgctc

SEQ ID NO: 288221 - DNA, 55 bp, Artificial
  Synthetic oligonucleotide
cggagcttcccttcgtcgaagcaaattcgtgttctgtgaggagtgtcaccagagc

SEQ ID NO: 288222 - DNA, 55 bp, Artificial
  Synthetic oligonucleotide
cggagcgaaaggccggaggggcgtggtcccaacattgcaggactaatcgtactct

SEQ ID NO: 288223 - DNA, 55 bp, Artificial
  Synthetic oligonucleotide
cggagcgaaagattgagttcacggatgtctcggcacgcatcgttttcgtcacgcc

SEQ ID NO: 288224 - DNA, 55 bp, Artificial
  Synthetic oligonucleotide
cggagcacagcattgcatttccaaccaccagccttgagacgcgcagaggcgagca

SEQ ID NO: 288225 - DNA, 55 bp, Artificial
  Synthetic oligonucleotide
cggagattacatatgccagaatggtgtaggagggctttcggtgattcaacgcctt

SEQ ID NO: 288226 - DNA, 55 bp, Artificial
  Synthetic oligonucleotide
cggagataactttgtggtgattgcggggctgagtgttcaagcgggaacagggatc

SEQ ID NO: 288227 - DNA, 59 bp, Artificial
  Synthetic oligonucleotide
atcaagtagaggacttattgtaactattacattcttactatctagtgctagtgttattc

SEQ ID NO: 288228 - DNA, 55 bp, Artificial
  Synthetic oligonucleotide
cggagagagacgcatgtatgtgcggggtgtgtttgaggagagtagccctgccctt

SEQ ID NO: 288229 - DNA, 55 bp, Artificial
  Synthetic oligonucleotide
cggactattctttaaagagcgcgcgcataacataccataagcatacgcgtgcatc

SEQ ID NO: 288230 - DNA, 55 bp, Artificial
  Synthetic oligonucleotide
cggacgtgattggaatccctgatagacctccgctcccggtgccctgtacgtcagg

SEQ ID NO: 288231 - DNA, 55 bp, Artificial
  Synthetic oligonucleotide
cggacgctagcttggagcggtacgggttccatacgcggaactcgtgcgactcaga

SEQ ID NO: 288232 - DNA, 55 bp, Artificial
  Synthetic oligonucleotide
cggaccgacatagcaattactcctgcaactccgtaacactttgtcccacatcccc

SEQ ID NO: 288233 - DNA, 55 bp, Artificial
  Synthetic oligonucleotide
cggacagccgcgagagagccagatagatcgaatgcagctgaggttcccagcgagg

SEQ ID NO: 288234 - DNA, 55 bp, Artificial
  Synthetic oligonucleotide
cggaatgttgcaaccctcgtgtggaacacgcccttctaatggcatcgacgataca

SEQ ID NO: 288235 - DNA, 55 bp, Artificial
  Synthetic oligonucleotide
cggaatgctctctaatgactcggtcctcccaattacacatcttatgaatcttctt

SEQ ID NO: 288236 - DNA, 55 bp, Artificial
  Synthetic oligonucleotide
cggaatcaaagcagacggattccgatcaacgctgcgttcgttgcatgctctctcc

SEQ ID NO: 288237 - DNA, 55 bp, Artificial
  Synthetic oligonucleotide
cggaagtgctcggacttctgagctcgctccttatgttcttactggtgccacgcgt

SEQ ID NO: 288238 - DNA, 60 bp, Artificial
  Synthetic oligonucleotide
tcggatgcctgctcagtggtctatcggttaagtgctctggcgcgagactggtaagtcctg

SEQ ID NO: 288239 - DNA, 55 bp, Artificial
  Synthetic oligonucleotide
cggaagggcaccgtcgagtgtgaagcggtgtgcatcacgcttcgagccctctgta

SEQ ID NO: 288240 - DNA, 55 bp, Artificial
  Synthetic oligonucleotide
cggaaggaggccgagacactgaaggggacgacagtagacggccggagttgtgaag

SEQ ID NO: 288241 - DNA, 55 bp, Artificial
  Synthetic oligonucleotide
cggaactgtttgacattactatgaattgtcacatgcgtgaacatttcgatcgtgc

SEQ ID NO: 288242 - DNA, 55 bp, Artificial
  Synthetic oligonucleotide
cggaacgaattttaaagaccccactgaacattgcagcttcgtatataaccacgca

SEQ ID NO: 288243 - DNA, 55 bp, Artificial
  Synthetic oligonucleotide
cggaaatggtggtgtatgatccacatggggcgtggtcatcacttcttgtagatga

SEQ ID NO: 288244 - DNA, 55 bp, Artificial
  Synthetic oligonucleotide
cggaaagagtggtgcgatggtatctgtgagatgagcgctgaagttctcgtacgag

SEQ ID NO: 288245 - DNA, 55 bp, Artificial
  Synthetic oligonucleotide
cggaaacggttctagctagaggggcgtcattgcattccgtcgtagtgcgtcgaaa

SEQ ID NO: 288246 - DNA, 55 bp, Artificial
  Synthetic oligonucleotide
cgctttctcgttgtgagcacgcgcgtgtacgtgaatgcgtgccagcgcgtttgtg

SEQ ID NO: 288247 - DNA, 53 bp, Artificial
  Synthetic oligonucleotide
cgctttcccgtgacccgcagatgataagtagtgacccttcgggttccgttttc

SEQ ID NO: 288248 - DNA, 55 bp, Artificial
  Synthetic oligonucleotide
cgcttggcgaacgcaacctccctgctcatgtcagcgcatgcctatctagagtcgc

SEQ ID NO: 288249 - DNA, 52 bp, Artificial
  Synthetic oligonucleotide
tcgggggggcccaggtcccgataatattaataaaccctaggatcctctagta

SEQ ID NO: 288250 - DNA, 55 bp, Artificial
  Synthetic oligonucleotide
cgcttgctctgatgtgcaccggctcccctgagttgcctgcgatgcagtctcacca

SEQ ID NO: 288251 - DNA, 55 bp, Artificial
  Synthetic oligonucleotide
cgcttgcctcttgcagtccattcactcagactaaacggtaccctgaactgtcctc

SEQ ID NO: 288252 - DNA, 55 bp, Artificial
  Synthetic oligonucleotide
cgcttccagatgattaacttcttataaatgataacgctggttttctgggtatcca

SEQ ID NO: 288253 - DNA, 55 bp, Artificial
  Synthetic oligonucleotide
cgcttaaggaaggaattcgggatgggatcctctgcgtgtgccatgaggatggccg

SEQ ID NO: 288254 - DNA, 55 bp, Artificial
  Synthetic oligonucleotide
cgctgttcccctttcgtctccgctccacaacgaacacgctaactaaggcacgcac

SEQ ID NO: 288255 - DNA, 55 bp, Artificial
  Synthetic oligonucleotide
cgcgtaaacctctcactcgcagttgtgcggctgtgtacccgtgtggcttgccact

SEQ ID NO: 288256 - DNA, 55 bp, Artificial
  Synthetic oligonucleotide
cgcggtgtacactggccagtaaccctagcccagcctccacgcttactggcaggta

SEQ ID NO: 288257 - DNA, 55 bp, Artificial
  Synthetic oligonucleotide
cgcggtagcaacaacgacgcccgttcgccccgtacttatcgagcgcctaccattc

SEQ ID NO: 288258 - DNA, 55 bp, Artificial
  Synthetic oligonucleotide
cgcgggttgctgatatcgtgacggtagttgggaagctgcgtattgtgaccgtagc

SEQ ID NO: 288259 - DNA, 55 bp, Artificial
  Synthetic oligonucleotide
cgcggggaaagttagagatatccagtgtgtaagagatctcagaagtgggcgctcc

SEQ ID NO: 288260 - DNA, 59 bp, Artificial
  Synthetic oligonucleotide
tcggggtgtttcggacttcttaggtgtgcgagacaagactaagcgcaggtccatctatg

SEQ ID NO: 288261 - DNA, 55 bp, Artificial
  Synthetic oligonucleotide
cgcgggcacgcatggaggagtcgtcgttgggttttggctgccgagccaagtatac

SEQ ID NO: 288262 - DNA, 55 bp, Artificial
  Synthetic oligonucleotide
cgcggcttgcagaggggaggtgcacgctggatcgtgtatgtttccgttacagcac

SEQ ID NO: 288263 - DNA, 55 bp, Artificial
  Synthetic oligonucleotide
cgcggaacagacatgcatgcactggcacaggaggtaccgtgggatgactatctgc

SEQ ID NO: 288264 - DNA, 55 bp, Artificial
  Synthetic oligonucleotide
cgcgctttgccattcaccaatccactcctgtgcattcagcgcgcctcacatcaca

SEQ ID NO: 288265 - DNA, 55 bp, Artificial
  Synthetic oligonucleotide
cgcgctgggtgattgtttgccttgacattgggcgcttttgagaagtggcttcaca

SEQ ID NO: 288266 - DNA, 55 bp, Artificial
  Synthetic oligonucleotide
cgcgctgaccgctgcatgatgcgaaaatcgaggcatttgtatgagcccgcaactg

SEQ ID NO: 288267 - DNA, 55 bp, Artificial
  Synthetic oligonucleotide
cgcgctcgctcttccgctcgtgcacaagaagcaccacggtcagaccaaattaagg

SEQ ID NO: 288268 - DNA, 55 bp, Artificial
  Synthetic oligonucleotide
cgcgcggtgtactaatctgtctctagcgctcatacccacgcatacatgcggacag

SEQ ID NO: 288269 - DNA, 55 bp, Artificial
  Synthetic oligonucleotide
cgcgcggataaaacagatcgtgcaaatgaattgagtatacgcaccgctcagaggc

SEQ ID NO: 288270 - DNA, 55 bp, Artificial
  Synthetic oligonucleotide
cgcgccttgagccaagttaccgtttccccgcggtggcagtttgcgttgtcttcta

SEQ ID NO: 288271 - DNA, 60 bp, Artificial
  Synthetic oligonucleotide
tcgggttcatgtcctagctctacttcatcctgacttggatgcatatctacttgcaacttt

SEQ ID NO: 288272 - DNA, 55 bp, Artificial
  Synthetic oligonucleotide
cgcgccgagttacggtcgcagcattgagtaggcgacgtccatcacatctgcctcg

SEQ ID NO: 288273 - DNA, 55 bp, Artificial
  Synthetic oligonucleotide
cgcgcccctaccttgcggttcgtttctcttacacacgtgtgggatggcccatacg

SEQ ID NO: 288274 - DNA, 55 bp, Artificial
  Synthetic oligonucleotide
cgcgccccagcgtagtttattcgtatgccggtgaggtgtggctaggccgaaacgc

SEQ ID NO: 288275 - DNA, 55 bp, Artificial
  Synthetic oligonucleotide
cgcgcatgcaaaagacacgcccactttggtgcatccgagtcacgtgtaccgaccc

SEQ ID NO: 288276 - DNA, 55 bp, Artificial
  Synthetic oligonucleotide
cgcgcatccagtcgggtgggaccaccacactccgtctcatacatgtccagaaagg

SEQ ID NO: 288277 - DNA, 55 bp, Artificial
  Synthetic oligonucleotide
cgcgcactcgctcgcgtctcagtgcattcgtttgcggctgtgtttccgcaggtag

SEQ ID NO: 288278 - DNA, 55 bp, Artificial
  Synthetic oligonucleotide
cgcgatttgatctctcacagtacaggcggctcctgcgagttgagaaagaccccga

SEQ ID NO: 288279 - DNA, 55 bp, Artificial
  Synthetic oligonucleotide
cgcgattagaatcagatgcgaaactgtgaacagaatcgataagtccagaacgtac

SEQ ID NO: 288280 - DNA, 55 bp, Artificial
  Synthetic oligonucleotide
cgcgatgagtggcgtacttctctctaagcgactgaatctcgctcctcggacgaac

SEQ ID NO: 288281 - DNA, 55 bp, Artificial
  Synthetic oligonucleotide
cgcgagtcacggcgcagtgcgcctccgagtttctgagcgttacacacgcaaactg

SEQ ID NO: 288282 - DNA, 57 bp, Artificial
  Synthetic oligonucleotide
tcgtaggaaattttggggcttgtaaggtgattatgcgtccatcgattgaaggttcag

SEQ ID NO: 288283 - DNA, 55 bp, Artificial
  Synthetic oligonucleotide
cgcgaggggaatcccaagcactgcgggtgggatgcacgtgatcgcatcactgcgt

SEQ ID NO: 288284 - DNA, 55 bp, Artificial
  Synthetic oligonucleotide
cgcgagacgtgcttcggtcctgagtctatcgcgatgaacgttggtgtggacaacg

SEQ ID NO: 288285 - DNA, 55 bp, Artificial
  Synthetic oligonucleotide
cgcgagaatacgctcgtcaatcctaccattgatggccttatgtcgcacaaacctc

SEQ ID NO: 288286 - DNA, 55 bp, Artificial
  Synthetic oligonucleotide
cgcgacgttccgtgctaaaattatgtgtggcaagggtttacagaaccgtgatact

SEQ ID NO: 288287 - DNA, 55 bp, Artificial
  Synthetic oligonucleotide
cgcgaagggagagacaggcgtcccacagagcaccaaagaacgagggctgggtcat

SEQ ID NO: 288288 - DNA, 55 bp, Artificial
  Synthetic oligonucleotide
cgcgaagatactgcgtcacgaagttctgcagccccgtcgcgataaagtacaggct

SEQ ID NO: 288289 - DNA, 55 bp, Artificial
  Synthetic oligonucleotide
cgctcaatccgcgtctcaacctcttaaccgcttataggtcatcagttagctatcc

SEQ ID NO: 288290 - DNA, 55 bp, Artificial
  Synthetic oligonucleotide
cgctcaatcagcacatttccgcctgtccacagttaatcggaaaccgtagtgccca

SEQ ID NO: 288291 - DNA, 55 bp, Artificial
  Synthetic oligonucleotide
cgctcaaatgcgaataggtgacgccgacactccacgcagaaccgacagcaagcat

SEQ ID NO: 288292 - DNA, 55 bp, Artificial
  Synthetic oligonucleotide
cgctattactttcttattaatggaagcgctggtacctgggtatccaatccagtgc

SEQ ID NO: 288293 - DNA, 58 bp, Artificial
  Synthetic oligonucleotide
taagccctattaccatacaagagatcgcgtactttggaccgaataaagctgtgaggaa

SEQ ID NO: 288294 - DNA, 60 bp, Artificial
  Synthetic oligonucleotide
agcacctttcaccagaataagagttgttgtgtgaagagctaatgcaatcgcatggtgaat

SEQ ID NO: 288295 - DNA, 55 bp, Artificial
  Synthetic oligonucleotide
cgctatgcaacgctccccattttgagggccacgagtgctgaaggaaatacgcacg

SEQ ID NO: 288296 - DNA, 55 bp, Artificial
  Synthetic oligonucleotide
cgctatgactaagcttagccgtgaagacaaggtgctgcaacgtgtacctaaggag

SEQ ID NO: 288297 - DNA, 55 bp, Artificial
  Synthetic oligonucleotide
cgctagtgtatagcgtagcgaaggagatacctgcggctgatagctttgccccggc

SEQ ID NO: 288298 - DNA, 55 bp, Artificial
  Synthetic oligonucleotide
cgctaggctgctacacacgacacaaccaccaagacacgagtcccgttggtagcgg

SEQ ID NO: 288299 - DNA, 55 bp, Artificial
  Synthetic oligonucleotide
cgctagcgagctcgggtgtatgtgagcggcgcaagttaaaggaagaaacgcacgc

SEQ ID NO: 288300 - DNA, 55 bp, Artificial
  Synthetic oligonucleotide
cgctactttggcgctggagacgctgaggaagccctacgaggtcagacggcagact

SEQ ID NO: 288301 - DNA, 55 bp, Artificial
  Synthetic oligonucleotide
cgctacctctgacgagaaggctctgtaggccacgtgtgtgcgtgttgtcatagca

SEQ ID NO: 288302 - DNA, 55 bp, Artificial
  Synthetic oligonucleotide
cgctaaaatgatagtgcgcttatgagtgcttagcctacgtctattaggtgaacga

SEQ ID NO: 288303 - DNA, 55 bp, Artificial
  Synthetic oligonucleotide
cgcgttgtgtaggtcggtatagcacatcgcgaagagcgtggttgtgtcaataggg

SEQ ID NO: 288304 - DNA, 55 bp, Artificial
  Synthetic oligonucleotide
cgcgttgtgcatgtcataagtccatcattcctaccacatcagactcaacgtgggc

SEQ ID NO: 288305 - DNA, 57 bp, Artificial
  Synthetic oligonucleotide
atattattaccgtacaagccgttagcaagacatgatagggagttgacaagttaaaga

SEQ ID NO: 288306 - DNA, 55 bp, Artificial
  Synthetic oligonucleotide
cgcgttgtaccccacataaagtcatccctccaagtcagcctaaagaaggtatgcg

SEQ ID NO: 288307 - DNA, 55 bp, Artificial
  Synthetic oligonucleotide
cgcgttgcagtacgcgcaaatgacgttgcacgacttgacagaatgggtcgtggcc

SEQ ID NO: 288308 - DNA, 52 bp, Artificial
  Synthetic oligonucleotide
cgcgttcggataaacgccttaggggctgggaccggattttcgagtacaaatc

SEQ ID NO: 288309 - DNA, 55 bp, Artificial
  Synthetic oligonucleotide
cgcgttcaatgaacataaagccccggtaactcttgtgcacacacgaaacgcgtag

SEQ ID NO: 288310 - DNA, 55 bp, Artificial
  Synthetic oligonucleotide
cgcgttagagctagcgaaagtcgcgtgaggacttgcgcacttaattcttgtgagc

SEQ ID NO: 288311 - DNA, 55 bp, Artificial
  Synthetic oligonucleotide
cgcgtgttttgcgcttgcgttgtggcgtgtgctctgttctctgttcgacgtccgt

SEQ ID NO: 288312 - DNA, 55 bp, Artificial
  Synthetic oligonucleotide
cgcgtgtcgtgtagcacgtctgccgaaatgaagtccgggaagctcacctgcgcgt

SEQ ID NO: 288313 - DNA, 55 bp, Artificial
  Synthetic oligonucleotide
cgcgtggcatgcaaaatactacgaacaaagcggtctcttgcccagagggaagagg

SEQ ID NO: 288314 - DNA, 55 bp, Artificial
  Synthetic oligonucleotide
cgcgtgattttcgggttgaatggggattctcgaagaggaaacctgtgattttcgc

SEQ ID NO: 288315 - DNA, 55 bp, Artificial
  Synthetic oligonucleotide
cgcgtgaatgtacagttccggggatatactaactccatttgttgtgtgaaaacac

SEQ ID NO: 288316 - DNA, 59 bp, Artificial
  Synthetic oligonucleotide
tcgtgagggacggcgctctctccagctaccccctcaacctgccgacaaacaacgatgac

SEQ ID NO: 288317 - DNA, 55 bp, Artificial
  Synthetic oligonucleotide
cgcgtcgtctttgacgtgaagtggaaggatcagcacgagaagagaaatcgctgct

SEQ ID NO: 288318 - DNA, 55 bp, Artificial
  Synthetic oligonucleotide
cgcgtcgaagtgctaataaagcaacttgctgacgtaaataagtgattactgataa

SEQ ID NO: 288319 - DNA, 55 bp, Artificial
  Synthetic oligonucleotide
cgcgtcccctcagctaggaattcggatagcactggcaccagcttcttgcgagaaa

SEQ ID NO: 288320 - DNA, 55 bp, Artificial
  Synthetic oligonucleotide
cgcgtcatgagtccaccgcagcacgccactttggccgaccgtgagtacttgctgt

SEQ ID NO: 288321 - DNA, 55 bp, Artificial
  Synthetic oligonucleotide
cgcgtcagtcaccgtagaccccgcttgcaatacgttggcttactgtttacctcgc

SEQ ID NO: 288322 - DNA, 55 bp, Artificial
  Synthetic oligonucleotide
cgcgtcaaatatgttccacatagtgaacgctctccggaagatgtcaacgggaacg

SEQ ID NO: 288323 - DNA, 55 bp, Artificial
  Synthetic oligonucleotide
cgcgtaggattcaggtgaccgctgagggttcgctgtgcgttaagtggctagccgc

SEQ ID NO: 288324 - DNA, 55 bp, Artificial
  Synthetic oligonucleotide
cgcgtaattgttctcactggttattacacctacgtgggcactattcggtagctgc

SEQ ID NO: 288325 - DNA, 53 bp, Artificial
  Synthetic oligonucleotide
cctgggtacgtcagcgtgtaccggccgtaaaagtggtgcgaaaagggcgcgtc

SEQ ID NO: 288326 - DNA, 55 bp, Artificial
  Synthetic oligonucleotide
cctggccgtgtcctcggagaacttgtcattcatccagttgtcctccatatgcctc

SEQ ID NO: 288327 - DNA, 59 bp, Artificial
  Synthetic oligonucleotide
tagtgcaccttcatgaccaatttaagaagggctaagcggctcgagtgggcgagtcggag

SEQ ID NO: 288328 - DNA, 55 bp, Artificial
  Synthetic oligonucleotide
cctggattaatatatttaccaaggccgggactattgcaagcccctaaccctgcta

SEQ ID NO: 288329 - DNA, 55 bp, Artificial
  Synthetic oligonucleotide
cctggatggtacagggccatttgcgctaggtaccacaccgtattgttgctcaggt

SEQ ID NO: 288330 - DNA, 55 bp, Artificial
  Synthetic oligonucleotide
cctggatagccgtggggccacaagtgcagatcattctacagcgtcttctcataca

SEQ ID NO: 288331 - DNA, 55 bp, Artificial
  Synthetic oligonucleotide
cctggagcggaataacagtaatgaacagctatgcctgattatagagtctgatgac

SEQ ID NO: 288332 - DNA, 55 bp, Artificial
  Synthetic oligonucleotide
cctggaacgtcaagtacgccagcactagcatctgagtaccgctgccgagtgctgt

SEQ ID NO: 288333 - DNA, 55 bp, Artificial
  Synthetic oligonucleotide
cctggaaaatctgcacgtgagcagcgttttcgagctcatgaagaacccagccttc

SEQ ID NO: 288334 - DNA, 55 bp, Artificial
  Synthetic oligonucleotide
cctgctgtggaaagtggttcgcgatcaaacgccacgacagacgatcgcaaaccgc

SEQ ID NO: 288335 - DNA, 55 bp, Artificial
  Synthetic oligonucleotide
cctgcgggacactgtttggaagtaagtgtatctgacactggtgtaagtgcgaagc

SEQ ID NO: 288336 - DNA, 55 bp, Artificial
  Synthetic oligonucleotide
cctgcctatcacagagcacgactaagtaagctgcgcttacacggactcgctaacc

SEQ ID NO: 288337 - DNA, 55 bp, Artificial
  Synthetic oligonucleotide
cctgccgcgaaggtgcaactttgcgcttctctctctcaagtgaaccggcggctcg

SEQ ID NO: 288338 - DNA, 60 bp, Artificial
  Synthetic oligonucleotide
tagtgacaccgcaacatattgtccctgaatgatactttttattcgcatattgtattttaa

SEQ ID NO: 288339 - DNA, 55 bp, Artificial
  Synthetic oligonucleotide
cctgccattcgagtacctgggtaaacacgtcctggtgtactacctgctccaatgg

SEQ ID NO: 288340 - DNA, 53 bp, Artificial
  Synthetic oligonucleotide
cctgcatcccacaaccttattcggacacccctacaacattattcctaaacccg

SEQ ID NO: 288341 - DNA, 55 bp, Artificial
  Synthetic oligonucleotide
cctgcagtgcctcttcgtgttgagcgttgacctcgcaccgctgggacatacccag

SEQ ID NO: 288342 - DNA, 55 bp, Artificial
  Synthetic oligonucleotide
cctgcaaagactgatccttaaattaaccagagtgaagagataagtgaagatagtt

SEQ ID NO: 288343 - DNA, 55 bp, Artificial
  Synthetic oligonucleotide
cctgaggagggatgctcccctcacccgtgtttgtgcaagctcagccatcgcgttg

SEQ ID NO: 288344 - DNA, 55 bp, Artificial
  Synthetic oligonucleotide
cctgacttccaaggaggagaggatccacgaagctagcgaggcgaacatatacacg

SEQ ID NO: 288345 - DNA, 55 bp, Artificial
  Synthetic oligonucleotide
cctgacggtgtccttgtttcgtccctgtgtgccctcgtggctatgcgaatcctcg

SEQ ID NO: 288346 - DNA, 54 bp, Artificial
  Synthetic oligonucleotide
cctcttcttgggtgtctccctccaagggcgctttgttaccacttctgggtgaac

SEQ ID NO: 288347 - DNA, 55 bp, Artificial
  Synthetic oligonucleotide
cctcttctgtgtatttactgtgggagagtccggtgccttttctcactcgttcgtc

SEQ ID NO: 288348 - DNA, 55 bp, Artificial
  Synthetic oligonucleotide
cctcttctgaaagcccagttacaagctcatggaactgcatacgaagtccacgaat

SEQ ID NO: 288349 - DNA, 54 bp, Artificial
  Synthetic oligonucleotide
tagtagtctcgccaaacctacggcacccatgggcccttaccagtgggttaatta

SEQ ID NO: 288350 - DNA, 55 bp, Artificial
  Synthetic oligonucleotide
cctcttcaacgaaggaacagagcaggtagtgcgcgtactgaagattgatcatccg

SEQ ID NO: 288351 - DNA, 55 bp, Artificial
  Synthetic oligonucleotide
cctctgcggcatgggttcccgattgttcccagcgatcccttcgggttctgcagct

SEQ ID NO: 288352 - DNA, 55 bp, Artificial
  Synthetic oligonucleotide
cctctgatagagggacgcacgtgtccgatgcacctgtcgcctccgcagcacttgt

SEQ ID NO: 288353 - DNA, 55 bp, Artificial
  Synthetic oligonucleotide
cctctctcctggcacaactgatgcttctgtgcacacgggcccacgcgccgactat

SEQ ID NO: 288354 - DNA, 55 bp, Artificial
  Synthetic oligonucleotide
cctctcctaaccgttttgtatcggctcctccaaaagtagcgtgaaacgcatgtgg

SEQ ID NO: 288355 - DNA, 55 bp, Artificial
  Synthetic oligonucleotide
cctctccatcacttgtgcttctctcgtctgcaatagcgtcggtgggagagttcgg

SEQ ID NO: 288356 - DNA, 55 bp, Artificial
  Synthetic oligonucleotide
cctctcatgggtactgtatctatcagatgcacttcattcaggactagagtcactc

SEQ ID NO: 288357 - DNA, 55 bp, Artificial
  Synthetic oligonucleotide
cctcgtgctcactcacatttcgggtggactagcttttcgctgcagaccgcgtctc

SEQ ID NO: 288358 - DNA, 55 bp, Artificial
  Synthetic oligonucleotide
cctcgtgaggttaatagactataggtttagtggaattgcacaaggtgtgggcaca

SEQ ID NO: 288359 - DNA, 55 bp, Artificial
  Synthetic oligonucleotide
ccttgttgcgccattgtagttgtatctggttgaacgtccgcactattgcagtccc

SEQ ID NO: 288360 - DNA, 60 bp, Artificial
  Synthetic oligonucleotide
aactggtgtattattagctactgcatatactccagaaatatctcacgcatactatagcgt

SEQ ID NO: 288361 - DNA, 55 bp, Artificial
  Synthetic oligonucleotide
ccttgttaattaggcgacgtaacatggagcgggatcaataatgcgctactcaagg

SEQ ID NO: 288362 - DNA, 55 bp, Artificial
  Synthetic oligonucleotide
ccttgtggcagatgttatatgtcactgagtcgccaatagcgtagccttgcgggtg

SEQ ID NO: 288363 - DNA, 55 bp, Artificial
  Synthetic oligonucleotide
ccttgtatcactaacgtaggtcttaaggtaagtgatgtaggtcctaactacagta

SEQ ID NO: 288364 - DNA, 55 bp, Artificial
  Synthetic oligonucleotide
ccttggagcggataatacctactctcacgtctggcgttataagcactacctcgac

SEQ ID NO: 288365 - DNA, 55 bp, Artificial
  Synthetic oligonucleotide
ccttgattccgccttcgctacgcacggacccgtatgctcacctgcgcaagaggca

SEQ ID NO: 288366 - DNA, 55 bp, Artificial
  Synthetic oligonucleotide
ccttgattcatcatgtgactctacgcgtgcaacgacatagtccgggaaggcacga

SEQ ID NO: 288367 - DNA, 55 bp, Artificial
  Synthetic oligonucleotide
ccttgagcattgggctatataggagatcgctctataggaattaggttacctatac

SEQ ID NO: 288368 - DNA, 54 bp, Artificial
  Synthetic oligonucleotide
ccttgaccaaccttgagtcccagctatgagtcccttgggtacccttggttctcc

SEQ ID NO: 288369 - DNA, 55 bp, Artificial
  Synthetic oligonucleotide
ccttgaaatagctgctttccagggctaggtcagcgcctgttgctatgctgtctag

SEQ ID NO: 288370 - DNA, 55 bp, Artificial
  Synthetic oligonucleotide
ccttcggctcatttaggcgacgcagagatcgctccttatggcagtattccccttg

SEQ ID NO: 288371 - DNA, 52 bp, Artificial
  Synthetic oligonucleotide
taggttttttcgcgttttttcaggagaaatccgtatatcgatgatttttaaa

SEQ ID NO: 288372 - DNA, 55 bp, Artificial
  Synthetic oligonucleotide
ccttcgcaaccaaagtaacgcatgacactcttcaattcatggtttgcactcttca

SEQ ID NO: 288373 - DNA, 55 bp, Artificial
  Synthetic oligonucleotide
ccttccctttggtcttcaacgtgttgtaaattgagtaggccctcttatagtcgca

SEQ ID NO: 288374 - DNA, 55 bp, Artificial
  Synthetic oligonucleotide
ccttcccttgtgagacgacggggtggagggtcacagagggagatgcgaggcacaa

SEQ ID NO: 288375 - DNA, 55 bp, Artificial
  Synthetic oligonucleotide
ccttcacccttcggtgttatgtgcactgtggaaggctagacgatattcacttgtg

SEQ ID NO: 288376 - DNA, 55 bp, Artificial
  Synthetic oligonucleotide
ccttcaacgccctgacatggtcttatggcgagagaggccaataacgcgcaagagc

SEQ ID NO: 288377 - DNA, 55 bp, Artificial
  Synthetic oligonucleotide
ccttatttgactaagcttatggctcaggtatatgacatgtttataaccgaagccg

SEQ ID NO: 288378 - DNA, 55 bp, Artificial
  Synthetic oligonucleotide
ccttatgcaagcacgcataatacctgcaagcgtatgtgcgggtgcagtacgcgag

SEQ ID NO: 288379 - DNA, 53 bp, Artificial
  Synthetic oligonucleotide
ccttactagaacgtaaaatatggccgcgattaaatacgtcgaggacctaatgt

SEQ ID NO: 288380 - DNA, 55 bp, Artificial
  Synthetic oligonucleotide
ccttactacgacatcatttactactatagaatgtccatatatctacgactccggg

SEQ ID NO: 288381 - DNA, 54 bp, Artificial
  Synthetic oligonucleotide
cctgttggcgccctacctaacaacggcaaaacacggagagtctcccctttctca

SEQ ID NO: 288382 - DNA, 58 bp, Artificial
  Synthetic oligonucleotide
taggtttagttttatgttgtacacacctaagtgatattactttagctattgctgctaa

SEQ ID NO: 288383 - DNA, 55 bp, Artificial
  Synthetic oligonucleotide
cctgttgcagtgcacatgcactaagaagcatcgccgaagcacccacctgcgacaa

SEQ ID NO: 288384 - DNA, 55 bp, Artificial
  Synthetic oligonucleotide
cctgtgtagttgtacatggccgaagaactacgtctgcatttgcaatccgactaac

SEQ ID NO: 288385 - DNA, 55 bp, Artificial
  Synthetic oligonucleotide
cctgtgggcgtaggattgccaacgaataaaaggtatccggggataacaggtgata

SEQ ID NO: 288386 - DNA, 55 bp, Artificial
  Synthetic oligonucleotide
cctgtgaccgctctcacagcgtgtacaacaaggaacatgctgcgacaacgctgcc

SEQ ID NO: 288387 - DNA, 55 bp, Artificial
  Synthetic oligonucleotide
cctgtgaagcgacggcaaccccactgcctcagggtgcatgtgaatcaagcacgaa

SEQ ID NO: 288388 - DNA, 55 bp, Artificial
  Synthetic oligonucleotide
cctgtatagagtttacagggacgaaacagttgacttgagtgaacaggagttggtg

SEQ ID NO: 288389 - DNA, 55 bp, Artificial
  Synthetic oligonucleotide
cctgtacgggtgcgtgagtggtgagggcgaaagtggttatcggcgtgcacacgag

SEQ ID NO: 288390 - DNA, 55 bp, Artificial
  Synthetic oligonucleotide
cctgtacgacatctctgcttgtgttgtcttgttcggtgccgttgtctgccccact

SEQ ID NO: 288391 - DNA, 55 bp, Artificial
  Synthetic oligonucleotide
cctgtacatacgtgcccctaccctaatcgtggaacaagagcggcatgcacgcccc

SEQ ID NO: 288392 - DNA, 55 bp, Artificial
  Synthetic oligonucleotide
cctgtaacccattcatagactcgtcaaaggcgccaatggaaccttcaatgtgtag

SEQ ID NO: 288393 - DNA, 58 bp, Artificial
  Synthetic oligonucleotide
taggttgtgatgggttagtgtacgatactacaagacttagagcccaatatccggagcc

SEQ ID NO: 288394 - DNA, 54 bp, Artificial
  Synthetic oligonucleotide
cctgtaaagggcgttaaggagctaaaccggaagcgaaactgataggagtgacac

SEQ ID NO: 288395 - DNA, 54 bp, Artificial
  Synthetic oligonucleotide
cctataacgcagttcgaaccgtctaggcgttaggtctcacggtccagcgtttag

SEQ ID NO: 288396 - DNA, 55 bp, Artificial
  Synthetic oligonucleotide
cctaggtaaggcgagaaagttgccaatacgaggtgaggctcgtgggaagacacgg

SEQ ID NO: 288397 - DNA, 55 bp, Artificial
  Synthetic oligonucleotide
cctagggcagcggaggacgcaaccagaggcaaaaggtgactgccaatggagtcgc

SEQ ID NO: 288398 - DNA, 54 bp, Artificial
  Synthetic oligonucleotide
cctagattaataccctaaagagaacccgtcagtggcgtacggtgagagcgtggg

SEQ ID NO: 288399 - DNA, 55 bp, Artificial
  Synthetic oligonucleotide
cctagacagtgcgtgtaggcagagaagtgtcgtgtcttccagcttaggtgacctt

SEQ ID NO: 288400 - DNA, 55 bp, Artificial
  Synthetic oligonucleotide
cctagaagccgacaggtcctttctggacgagttgattcactcagacctgattctc

SEQ ID NO: 288401 - DNA, 55 bp, Artificial
  Synthetic oligonucleotide
cctactgtccgtttcgactagtgcacttgggttacaagagcttgatcgcgtctca

SEQ ID NO: 288402 - DNA, 55 bp, Artificial
  Synthetic oligonucleotide
cctactagtacgtcgctcaataatgtagcagaaaagctcggaatcccatgctacg

SEQ ID NO: 288403 - DNA, 55 bp, Artificial
  Synthetic oligonucleotide
cctacggtgcttgattgttgcgtgtgactgaggggatgcttctgcatagttgtgc

SEQ ID NO: 288404 - DNA, 60 bp, Artificial
  Synthetic oligonucleotide
taatgttagcagctctacaagtattattcttattagcagaacaaagaaatctaactagta

SEQ ID NO: 288405 - DNA, 59 bp, Artificial
  Synthetic oligonucleotide
gactttattcttacattatctatatcacatgtatttcctatgtacccctctataaactg

SEQ ID NO: 288406 - DNA, 55 bp, Artificial
  Synthetic oligonucleotide
taggtgttattagtactgagttactactctttgttagtttcttctggggtgctta

SEQ ID NO: 288407 - DNA, 55 bp, Artificial
  Synthetic oligonucleotide
cctaagggtgagtttggtgttagtatgttatcagatggtagtgctaaaccttata

SEQ ID NO: 288408 - DNA, 55 bp, Artificial
  Synthetic oligonucleotide
cctaacgatcacgtccgtgtgcctggagccgtgccatacacctggcgcgcaggag

SEQ ID NO: 288409 - DNA, 52 bp, Artificial
  Synthetic oligonucleotide
cctaaacccggaatctaattccctgcatcccacaaccttattcggacacccc

SEQ ID NO: 288410 - DNA, 48 bp, Artificial
  Synthetic oligonucleotide
cctaaacccggaatcctactcctaaacccggaaccctactcctgaacc

SEQ ID NO: 288411 - DNA, 55 bp, Artificial
  Synthetic oligonucleotide
ccgtttgtgatgcctcgttcccacaaaagtgccaacctgtggaggtgtgcatgcg

SEQ ID NO: 288412 - DNA, 55 bp, Artificial
  Synthetic oligonucleotide
ccgtttgctcctctgttcgattatacctcgtcgtctcttgtctgccgcacgtcgg

SEQ ID NO: 288413 - DNA, 55 bp, Artificial
  Synthetic oligonucleotide
ccgtttaggacggactgagtggacgcactcgacggtgtttcgctgacgtgtgggc

SEQ ID NO: 288414 - DNA, 55 bp, Artificial
  Synthetic oligonucleotide
ccgttgtcgcttcattattatcggcaggtgttcatttcagcccgatacctgtcgt

SEQ ID NO: 288415 - DNA, 55 bp, Artificial
  Synthetic oligonucleotide
ccgttggggaggactgcgcagtaggacagagaccccacaccttagtcgcgcaagt

SEQ ID NO: 288416 - DNA, 55 bp, Artificial
  Synthetic oligonucleotide
ccgttcctatgagtcatttcatgcaacctcgtataattaaccaccccactttcac

SEQ ID NO: 288417 - DNA, 56 bp, Artificial
  Synthetic oligonucleotide
cggaaccgacagtagtagtggaagataatactgaaagaatccctatatataaacca

SEQ ID NO: 288418 - DNA, 55 bp, Artificial
  Synthetic oligonucleotide
ccgttaggtctgtgaatcccgttagtgtgatccctgaaagtggcgcagtgttcgg

SEQ ID NO: 288419 - DNA, 55 bp, Artificial
  Synthetic oligonucleotide
ccgtgtgggcatcgtgggtaccttgtttgctcctagcaggagtgtgcacatagag

SEQ ID NO: 288420 - DNA, 55 bp, Artificial
  Synthetic oligonucleotide
ccgtgtactcagtagtcgcaccttgtcacctcagtactcttgttacacggccaac

SEQ ID NO: 288421 - DNA, 55 bp, Artificial
  Synthetic oligonucleotide
ccgtgtacgtacctcgcgcaaaactgtctgcagcgtccgcaaatgacatgcgcgt

SEQ ID NO: 288422 - DNA, 55 bp, Artificial
  Synthetic oligonucleotide
ccgtggaaacgtacgcacaggcacagcgttcccgtgtgaaatcgttatcccgcga

SEQ ID NO: 288423 - DNA, 55 bp, Artificial
  Synthetic oligonucleotide
ccgtgcttctgcatcgcttttgttacgcgccacgtgttttctgtatgcttggcct

SEQ ID NO: 288424 - DNA, 55 bp, Artificial
  Synthetic oligonucleotide
ccgtgcgtgtccgttctgcctgtacatgtgcgatgaagcgtcccgttgtttaccg

SEQ ID NO: 288425 - DNA, 55 bp, Artificial
  Synthetic oligonucleotide
ccgtgatgagccccttcgcattttcggctcacaaggctattcaaccgtcccaagg

SEQ ID NO: 288426 - DNA, 55 bp, Artificial
  Synthetic oligonucleotide
ccgtgatattgcgttgtatccgcgaaccacccttatgggtatctcgtgtatccac

SEQ ID NO: 288427 - DNA, 55 bp, Artificial
  Synthetic oligonucleotide
ccgtgagggacattgcgttacgaagagtacaatctgaatcccatgcgcaacgcgg

SEQ ID NO: 288428 - DNA, 58 bp, Artificial
  Synthetic oligonucleotide
aactttatcctcatacagcacaaacgtgcttaatgctaccaaactttaatctgtaatg

SEQ ID NO: 288429 - DNA, 55 bp, Artificial
  Synthetic oligonucleotide
ccgtcttgggcaagttagcagacatgcgagtaggtgtgactgtgagtgagggagc

SEQ ID NO: 288430 - DNA, 55 bp, Artificial
  Synthetic oligonucleotide
ccgtctatgatgcgtgtgtcgagtaccgtcgcgaaagcgtcaccaactcacgttc

SEQ ID NO: 288431 - DNA, 55 bp, Artificial
  Synthetic oligonucleotide
cctcgtgactcaggaatagcaacatgaattaaatgacctgtccaagctagtgaac

SEQ ID NO: 288432 - DNA, 55 bp, Artificial
  Synthetic oligonucleotide
cctcgtagtcgtatcggctatagtaattgcggccatacgtcgcccagtgctcctc

SEQ ID NO: 288433 - DNA, 54 bp, Artificial
  Synthetic oligonucleotide
cctcggcaggtgtccatcgacctattcccctccgcgccgttcgaagaccggtct

SEQ ID NO: 288434 - DNA, 55 bp, Artificial
  Synthetic oligonucleotide
cctcggaaatcagaattccttagaaggttaccagcatcgcagtttagcggactat

SEQ ID NO: 288435 - DNA, 55 bp, Artificial
  Synthetic oligonucleotide
cctcgctgcactagctctcgatccttgacatggagggtagaatctgacgatatca

SEQ ID NO: 288436 - DNA, 55 bp, Artificial
  Synthetic oligonucleotide
cctcgcctttggtgccatatggccactggactggactcatatgaggtcacactgg

SEQ ID NO: 288437 - DNA, 55 bp, Artificial
  Synthetic oligonucleotide
cctcgccccatcctcgcccgtgtgtgcacggtcattgccatggtttctttcgttg

SEQ ID NO: 288438 - DNA, 55 bp, Artificial
  Synthetic oligonucleotide
cctcgagtgagtcattatcagtaggatcagaccataagagatcaagtattctctg

SEQ ID NO: 288439 - DNA, 60 bp, Artificial
  Synthetic oligonucleotide
ccagcacaccgtctgcgttggtggcacgagctgcgatcatgggtggcacagcgtcaatcg

SEQ ID NO: 288440 - DNA, 55 bp, Artificial
  Synthetic oligonucleotide
cctcgacaggcaaacatctttcacgtaccgcaaaaggtgcggcaactcctccgca

SEQ ID NO: 288441 - DNA, 55 bp, Artificial
  Synthetic oligonucleotide
cctcgacaatccatattcatacgcaagcccagtgcgaagtccctcctgcaacctc

SEQ ID NO: 288442 - DNA, 55 bp, Artificial
  Synthetic oligonucleotide
cctccttgctatacgcctggtacacaagaagcagcgccggggcgctattctgcag

SEQ ID NO: 288443 - DNA, 55 bp, Artificial
  Synthetic oligonucleotide
cctcctagctttatcgaatgggcctgcgctcatgtgtacggctcattacatacct

SEQ ID NO: 288444 - DNA, 55 bp, Artificial
  Synthetic oligonucleotide
cctccgtcaataatccctttcatacaactgaatactttatggcctcttgttgccc

SEQ ID NO: 288445 - DNA, 55 bp, Artificial
  Synthetic oligonucleotide
cctccctccgttcatcctgttgctcatccgcactagagtcatcatccgttgaaga

SEQ ID NO: 288446 - DNA, 55 bp, Artificial
  Synthetic oligonucleotide
cctccctcaccaactggttattgcagttgtagatctgcttcacctttgtgtacgt

SEQ ID NO: 288447 - DNA, 55 bp, Artificial
  Synthetic oligonucleotide
cctcccgaagcctcgctacgagtcctcgactcatgcttcagcctacggcaagtgc

SEQ ID NO: 288448 - DNA, 55 bp, Artificial
  Synthetic oligonucleotide
cctccagctcagtgagagcgctgctaacgtggtccatgcgacggctcaactcctc

SEQ ID NO: 288449 - DNA, 55 bp, Artificial
  Synthetic oligonucleotide
cctccagacgcgggtgtagagagtgtccacaccgtattacggcatgccgcggctt

SEQ ID NO: 288450 - DNA, 58 bp, Artificial
  Synthetic oligonucleotide
ccagattaatgaccattcttccaatacagcccaatagaaacaaggctggtaccagtgg

SEQ ID NO: 288451 - DNA, 55 bp, Artificial
  Synthetic oligonucleotide
cctcatctcagatgttgtgcaagtccttccgatctacggacgtccgtggcagtgg

SEQ ID NO: 288452 - DNA, 55 bp, Artificial
  Synthetic oligonucleotide
cctcatcgactcgtagaggattagacaagagtacgcgtgtgtggttcaagcgacg

SEQ ID NO: 288453 - DNA, 55 bp, Artificial
  Synthetic oligonucleotide
cctcagtactagtactaacctcaggtccattactggccgtagtaccagtcaccgt

SEQ ID NO: 288454 - DNA, 55 bp, Artificial
  Synthetic oligonucleotide
cctcacttagttgagctgaggacagttgtcagaagggcctcctgcaagtagaggc

SEQ ID NO: 288455 - DNA, 55 bp, Artificial
  Synthetic oligonucleotide
cctcacgcatctctcggcgtatcactccacctctttcatgctatgagagtgggag

SEQ ID NO: 288456 - DNA, 55 bp, Artificial
  Synthetic oligonucleotide
cctcaaccaccttctccagtactaccttcgcggactcaattttctgcgccttgac

SEQ ID NO: 288457 - DNA, 55 bp, Artificial
  Synthetic oligonucleotide
cctcaaaggcttcgtataggtaagagtacgcggtcttgttatctttctcctccgc

SEQ ID NO: 288458 - DNA, 55 bp, Artificial
  Synthetic oligonucleotide
cctcaaagaaaaggctagcgattgaagagatcgcttgttttcgctcacggaggaa

SEQ ID NO: 288459 - DNA, 55 bp, Artificial
  Synthetic oligonucleotide
cctatttcctgactatctatacactataagcacttgtggtccaatggtatgacgt

SEQ ID NO: 288460 - DNA, 55 bp, Artificial
  Synthetic oligonucleotide
cctattggactttgtagagaggggcagaacacgccacagagaacgcacgcggtgc

SEQ ID NO: 288461 - DNA, 60 bp, Artificial
  Synthetic oligonucleotide
tagcccattgcctagtgcacgctctcacttcacgccatcaacaaccgattggttcggaca

SEQ ID NO: 288462 - DNA, 55 bp, Artificial
  Synthetic oligonucleotide
cctatgttagtcgaagtctgaccttagttagtgaaagtaagacctatatcagtga

SEQ ID NO: 288463 - DNA, 55 bp, Artificial
  Synthetic oligonucleotide
cctatctggtagttcgggatgcacgtattgttccaccgctcgtaggggaagatgt

SEQ ID NO: 288464 - DNA, 55 bp, Artificial
  Synthetic oligonucleotide
cctatataatggcgcagtgggactcgcagaaaggcactcagtagggttgtaccct

SEQ ID NO: 288465 - DNA, 49 bp, Artificial
  Synthetic oligonucleotide
cctataccctaaaaccttactcctataccctaaaaccttactcctatac

SEQ ID NO: 288466 - DNA, 55 bp, Artificial
  Synthetic oligonucleotide
cgagctcttcacccctgcagcggaaggatgcttcttcatgaccaaccgtaaagcc

SEQ ID NO: 288467 - DNA, 55 bp, Artificial
  Synthetic oligonucleotide
cgagctctgcacatatctgtcgtacttctagctgcctatatctttagatgcgcgt

SEQ ID NO: 288468 - DNA, 55 bp, Artificial
  Synthetic oligonucleotide
cgagctcgcgtaactctcagcccagtggcgtaaaatggtgcactgctgttccctg

SEQ ID NO: 288469 - DNA, 55 bp, Artificial
  Synthetic oligonucleotide
cgagctcgcacgatgccgatgacaccacgcaaaacagcagcgaccacctgcgtct

SEQ ID NO: 288470 - DNA, 55 bp, Artificial
  Synthetic oligonucleotide
cgagctcctcaagttagagacctctataagtaaacttcttaactcccttgaattg

SEQ ID NO: 288471 - DNA, 55 bp, Artificial
  Synthetic oligonucleotide
cgagcggtactaaagcttcaacgggaggcagtcaagatagtgcgcagtgcagcac

SEQ ID NO: 288472 - DNA, 59 bp, Artificial
  Synthetic oligonucleotide
aagaaggcttaatatgcaggaggtttggtcattgaaccaaaagcaggattctatgataa

SEQ ID NO: 288473 - DNA, 55 bp, Artificial
  Synthetic oligonucleotide
cgagcgaaggagttagcagatgtgtcggaggagccacccgagtggtggccaggag

SEQ ID NO: 288474 - DNA, 55 bp, Artificial
  Synthetic oligonucleotide
cgagcccgtctacgcgtgtccgctctacgcacacggcagagagttgtctaaggtg

SEQ ID NO: 288475 - DNA, 55 bp, Artificial
  Synthetic oligonucleotide
cgagcacttgtgtcacctcatcgaactggctctgtgaggggtgcacgtagtccca

SEQ ID NO: 288476 - DNA, 55 bp, Artificial
  Synthetic oligonucleotide
cgagcacactgcgggtacatgattcggcaaatgtacaccccgccacggaaatgac

SEQ ID NO: 288477 - DNA, 55 bp, Artificial
  Synthetic oligonucleotide
cgagatgttgacgcgcatgtcatttgcggacgctgcagacagtttcgcgcgaggt

SEQ ID NO: 288478 - DNA, 55 bp, Artificial
  Synthetic oligonucleotide
cgagagtacatcagagcaaaacggggcgcccacacacaaagagtcaactggagtg

SEQ ID NO: 288479 - DNA, 55 bp, Artificial
  Synthetic oligonucleotide
cgagagggacgtgcctggatggcacacaacaaccgtgctacctccgcgtgtgtct

SEQ ID NO: 288480 - DNA, 55 bp, Artificial
  Synthetic oligonucleotide
cgagaggacccagcgagatgggagcgaagtgtctgtggtttcggccatccgacgt

SEQ ID NO: 288481 - DNA, 55 bp, Artificial
  Synthetic oligonucleotide
cgagagacggcgacagagagtgcagtctatagcgacctaaaagaaaacacccgga

SEQ ID NO: 288482 - DNA, 55 bp, Artificial
  Synthetic oligonucleotide
cgagacgccatggaaaaggccgctgtgtttaagaatcgaattcgttaggaggcgg

SEQ ID NO: 288483 - DNA, 58 bp, Artificial
  Synthetic oligonucleotide
tagcagttacaaagaatcgaacttttctaactgggaaatgagcccagattgagaccac

SEQ ID NO: 288484 - DNA, 55 bp, Artificial
  Synthetic oligonucleotide
cgagaacctggcccacgtcctaagaaatgacggaatgctaattctaatgctcgac

SEQ ID NO: 288485 - DNA, 55 bp, Artificial
  Synthetic oligonucleotide
cgacttgggcaacatacattcgacacatgcacagtcttccagccagcttaagtga

SEQ ID NO: 288486 - DNA, 55 bp, Artificial
  Synthetic oligonucleotide
cgactgtgcttgagagcccgagtcatgctgagtgagactcaccgattttggcggc

SEQ ID NO: 288487 - DNA, 55 bp, Artificial
  Synthetic oligonucleotide
cgactgcactctacgactcgtacagctaccagatactgtgtacttttctccagac

SEQ ID NO: 288488 - DNA, 55 bp, Artificial
  Synthetic oligonucleotide
cgactgagcaccgctcacctatcggcagacgctaccttcactctgcgcgggatgt

SEQ ID NO: 288489 - DNA, 55 bp, Artificial
  Synthetic oligonucleotide
cgactcgtacagctaccagatactatgtacttttctccagactacactctacgac

SEQ ID NO: 288490 - DNA, 55 bp, Artificial
  Synthetic oligonucleotide
cgactcctcgccacataatcagccttcgcccatgcacagagacggaggggaagag

SEQ ID NO: 288491 - DNA, 55 bp, Artificial
  Synthetic oligonucleotide
cgactccacagtgacgacggccatcattgttgggttgcgccgtgccttcccgtac

SEQ ID NO: 288492 - DNA, 55 bp, Artificial
  Synthetic oligonucleotide
cgactcacccgccatgaagtgaaggtggttgacctcagtcagactatcctgcaca

SEQ ID NO: 288493 - DNA, 55 bp, Artificial
  Synthetic oligonucleotide
cgactatctagtactcagagtgccacgccaggggagatcgagcaagcgtacgtcg

SEQ ID NO: 288494 - DNA, 58 bp, Artificial
  Synthetic oligonucleotide
aagaattaatctatcaagattaagaactccaggcgttaacctgtagagttgagatgga

SEQ ID NO: 288495 - DNA, 55 bp, Artificial
  Synthetic oligonucleotide
cgactaactgaggtcttacgttcactaagtgaggtccttctgttactaacatagg

SEQ ID NO: 288496 - DNA, 55 bp, Artificial
  Synthetic oligonucleotide
cgacgtgggcacaacctcacacatacgagtcgacaagccagcagttctcctcctt

SEQ ID NO: 288497 - DNA, 55 bp, Artificial
  Synthetic oligonucleotide
cgacgtctttcacatcttgacaggcaaccgatttgactcggctttagccatcaca

SEQ ID NO: 288498 - DNA, 55 bp, Artificial
  Synthetic oligonucleotide
cgatgaggcgaaacgagaggggtgaattcattacgtgcttgtcttcccacatcca

SEQ ID NO: 288499 - DNA, 55 bp, Artificial
  Synthetic oligonucleotide
cgatgaggcacgtacatgcacaccgatatatgcccacacatggcaactcgcggac

SEQ ID NO: 288500 - DNA, 55 bp, Artificial
  Synthetic oligonucleotide
cgatcttgttgggttacaaaacttggggaatgaaattggctggatcagcactccg

SEQ ID NO: 288501 - DNA, 55 bp, Artificial
  Synthetic oligonucleotide
cgatcgtgttacggcctgcgagaccctggatcagaaggagcgagcaaaggtgcgt

SEQ ID NO: 288502 - DNA, 55 bp, Artificial
  Synthetic oligonucleotide
cgatcaaccatgtatccatgttttagacgccagtagaagtgttgttgttgcctca

SEQ ID NO: 288503 - DNA, 55 bp, Artificial
  Synthetic oligonucleotide
cgatacaccaggactcaagcttgggccaatgactgttctcgtaatgactttggca

SEQ ID NO: 288504 - DNA, 54 bp, Artificial
  Synthetic oligonucleotide
cgatacaattacggggttggatgttagccccgacaattcttttctagtgtcaaa

SEQ ID NO: 288505 - DNA, 52 bp, Artificial
  Synthetic oligonucleotide
aagacaaaataggaagccgtttgccttgacaaacgaacggtgggggctcctc

SEQ ID NO: 288506 - DNA, 55 bp, Artificial
  Synthetic oligonucleotide
cgataagtcgcgcatcgctgtgcacggcccctcggcgcctgttagtgtgtcgatt

SEQ ID NO: 288507 - DNA, 55 bp, Artificial
  Synthetic oligonucleotide
cgagtttctatacatggacatgctgcggagcaacttgtcggctggactgcactac

SEQ ID NO: 288508 - DNA, 54 bp, Artificial
  Synthetic oligonucleotide
cgagtttcctacttgtacgccaaagctaaccgctggcatacctacttttcttcg

SEQ ID NO: 288509 - DNA, 55 bp, Artificial
  Synthetic oligonucleotide
cgagttgcaaggtggcaatagtgtttacaacttgaatatgactaggtgttagaca

SEQ ID NO: 288510 - DNA, 55 bp, Artificial
  Synthetic oligonucleotide
cgagttgatcgggtagaacggaatcctgcgctcagcgctcagaaaggtacggcga

SEQ ID NO: 288511 - DNA, 55 bp, Artificial
  Synthetic oligonucleotide
cgagtggtgaaacacgaagcacgaagacgagtacgtgggcgctctcttcgatagg

SEQ ID NO: 288512 - DNA, 55 bp, Artificial
  Synthetic oligonucleotide
cgagtgggacacgccatacccaccacacctatacatacgcagacaggtacacggc

SEQ ID NO: 288513 - DNA, 55 bp, Artificial
  Synthetic oligonucleotide
cgagtgcactgagtacctgtgccaactggtctatgtaggtcctgaccactgcggt

SEQ ID NO: 288514 - DNA, 55 bp, Artificial
  Synthetic oligonucleotide
cgagtgagcaccttgcgagaccgcccatgggagcgcacatcgctactcttattct

SEQ ID NO: 288515 - DNA, 55 bp, Artificial
  Synthetic oligonucleotide
cgagtgagacttacattaggtatcactgaaatagacttacaatcatagagtcgca

SEQ ID NO: 288516 - DNA, 60 bp, Artificial
  Synthetic oligonucleotide
cggctttcaacaaattcagaacgtggtgcgtggcctcaagaaacgcataccagccatgcg

SEQ ID NO: 288517 - DNA, 59 bp, Artificial
  Synthetic oligonucleotide
aagacaatatctctgattattgagcagaacagtacagaccgtaaggttataattatgtt

SEQ ID NO: 288518 - DNA, 55 bp, Artificial
  Synthetic oligonucleotide
cgagtgaacagttctgcgaggattcgtaaagggaagagcgccggagtcacacgcg

SEQ ID NO: 288519 - DNA, 55 bp, Artificial
  Synthetic oligonucleotide
cgagtctgcgtatcacgtactgtgtctggtgcgttgaaatcacctactcacagac

SEQ ID NO: 288520 - DNA, 55 bp, Artificial
  Synthetic oligonucleotide
cgagtccactgctgtggtaacgttctctcacgaggatcacaccctaggaaacccc

SEQ ID NO: 288521 - DNA, 55 bp, Artificial
  Synthetic oligonucleotide
cgagtaggcctctggtgtcaatagataggcggatatcttacgtaatgcggttaag

SEQ ID NO: 288522 - DNA, 55 bp, Artificial
  Synthetic oligonucleotide
cgagtaacaccttccaaatcatgaacaattgaaccatcttcgaatgctcctgaaa

SEQ ID NO: 288523 - DNA, 55 bp, Artificial
  Synthetic oligonucleotide
cgaggttccttttgtatcatgagtcaacgactttataatcgtagcaagcttaagt

SEQ ID NO: 288524 - DNA, 55 bp, Artificial
  Synthetic oligonucleotide
cgaggtaggcgtgatgtggagggcgtggctaagcgcatgtcaaggtctgaccagg

SEQ ID NO: 288525 - DNA, 55 bp, Artificial
  Synthetic oligonucleotide
cgaggggcccacaccactttcgctactcaccaaagcgttgacaagacggtagcta

SEQ ID NO: 288526 - DNA, 55 bp, Artificial
  Synthetic oligonucleotide
cgagggctggtgcctcacaagcgcgaaaggggttgttttgcgtttagccgtgagc

SEQ ID NO: 288527 - DNA, 55 bp, Artificial
  Synthetic oligonucleotide
cgagggcattgggagcagacgacatagtaggcggcaaggccgtgggaacgcaaga

SEQ ID NO: 288528 - DNA, 60 bp, Artificial
  Synthetic oligonucleotide
tagcagcgtgaaataagcgcgtatccacatccaatcctacagtatacatatatgagccca

SEQ ID NO: 288529 - DNA, 55 bp, Artificial
  Synthetic oligonucleotide
cgagggagcttgtcgcaaatgaaggggagtgattcacctcaaggagccaaggctt

SEQ ID NO: 288530 - DNA, 55 bp, Artificial
  Synthetic oligonucleotide
cgagggaacccgtgccttgtattggcaccctagctaactatccaaggctagtgag

SEQ ID NO: 288531 - DNA, 55 bp, Artificial
  Synthetic oligonucleotide
cgaggcgcagctgtacacgggcacgattttgcatgccgtgaaccgatgctgcaac

SEQ ID NO: 288532 - DNA, 55 bp, Artificial
  Synthetic oligonucleotide
cgaggatgcggagacaaggtaggagcgtgggcacccaaacgcgagaagaggaacc

SEQ ID NO: 288533 - DNA, 55 bp, Artificial
  Synthetic oligonucleotide
cgaggaacaaatgggagatctaatggattaattccgatgctgcgcgtttataatg

SEQ ID NO: 288534 - DNA, 55 bp, Artificial
  Synthetic oligonucleotide
cgaatctcttatggcccatcatccaccactatcattctcgtgccgagttgcgtgg

SEQ ID NO: 288535 - DNA, 55 bp, Artificial
  Synthetic oligonucleotide
cgaatccgtttgatcggaagaatccttttcgctaccctccgacgcaaggctacac

SEQ ID NO: 288536 - DNA, 55 bp, Artificial
  Synthetic oligonucleotide
cgaatccatggttcaggactacaagcgcagttggacctgtgctttcaatcgcggc

SEQ ID NO: 288537 - DNA, 55 bp, Artificial
  Synthetic oligonucleotide
cgaatagaatacatattgctgacctgatgtacgcgcagtgcagctgaaatatgcg

SEQ ID NO: 288538 - DNA, 55 bp, Artificial
  Synthetic oligonucleotide
cgaagttgccgccacacgtgtatgacataccggcatccccacaataaacatgcag

SEQ ID NO: 288539 - DNA, 60 bp, Artificial
  Synthetic oligonucleotide
gctgaataaattgcatcgatgttatggatcctataaaaaaaacagttggtactgctaatg

SEQ ID NO: 288540 - DNA, 55 bp, Artificial
  Synthetic oligonucleotide
cgaagttgaaaagagcttgaatgggcttccgcctattactgaagcagaaggcgat

SEQ ID NO: 288541 - DNA, 55 bp, Artificial
  Synthetic oligonucleotide
cgaagtgcacaatgctgtcgcagggaggcacggcgcagcttacttgtcgccgctt

SEQ ID NO: 288542 - DNA, 55 bp, Artificial
  Synthetic oligonucleotide
cgaagtctgcgaaaacgcactcaacagacggataagcgagaaccacgcaaagtcg

SEQ ID NO: 288543 - DNA, 55 bp, Artificial
  Synthetic oligonucleotide
cgaaggaggacacatctaacagcagatgagtagaattgtctagtagcattaccag

SEQ ID NO: 288544 - DNA, 55 bp, Artificial
  Synthetic oligonucleotide
cgaaggacccctattggatggtcgtccacatggtattggaacttggatggatact

SEQ ID NO: 288545 - DNA, 55 bp, Artificial
  Synthetic oligonucleotide
cgaagcgtgaccttatccgcctattaacgcatctatcctcctatatgcgtgtccg

SEQ ID NO: 288546 - DNA, 55 bp, Artificial
  Synthetic oligonucleotide
cgaagagtacgcgtggggacgcacacagacaaaccgaagaggtagcaaaggagcg

SEQ ID NO: 288547 - DNA, 55 bp, Artificial
  Synthetic oligonucleotide
cgaagagactgtcgatgtgtggctgcggtgtgtaacggcggcatcactccaacgg

SEQ ID NO: 288548 - DNA, 55 bp, Artificial
  Synthetic oligonucleotide
cgaactaaattcggctcttttgcacacaacactttgatcagaacactttgatcag

SEQ ID NO: 288549 - DNA, 54 bp, Artificial
  Synthetic oligonucleotide
cgaacgttagcaaaatgcatatgggaaatcgtttgtcgggtcgattttccccga

SEQ ID NO: 288550 - DNA, 56 bp, Artificial
  Synthetic oligonucleotide
tagagttagcacacccaggaagcccattttttaaaggtgattcattaagatactta

SEQ ID NO: 288551 - DNA, 54 bp, Artificial
  Synthetic oligonucleotide
cgaacgacaggggagggaagccgggagttgaaacggcacgtgggtgtgcttctg

SEQ ID NO: 288552 - DNA, 55 bp, Artificial
  Synthetic oligonucleotide
cgaaccaacaccagttttgtgccacgaggtctacagctgacaccggtgtcgcctt

SEQ ID NO: 288553 - DNA, 55 bp, Artificial
  Synthetic oligonucleotide
cgaacacaggggcgccgaccatcctatccttctctcacaactccagcgaagaagg

SEQ ID NO: 288554 - DNA, 55 bp, Artificial
  Synthetic oligonucleotide
cgaaatgtcgcaccatgtgcgtctctagtgggttggtataatttgtgtacgaatg

SEQ ID NO: 288555 - DNA, 55 bp, Artificial
  Synthetic oligonucleotide
cgaaagccacgagagagagccgccgtgggtaggcgtggatgtgcgtaagaagggt

SEQ ID NO: 288556 - DNA, 55 bp, Artificial
  Synthetic oligonucleotide
cgaaaatcgaggcatttgtatgaacccgcaactgtgatttgaactccgtgtactc

SEQ ID NO: 288557 - DNA, 55 bp, Artificial
  Synthetic oligonucleotide
cgaaaagtaaggacccagtcacatgtgtatagtcgattccagcctgcagacggtt

SEQ ID NO: 288558 - DNA, 54 bp, Artificial
  Synthetic oligonucleotide
cgaaaaggaaaagatgcgggtgcaaacgcgccaacacaggtccaaacaaggggc

SEQ ID NO: 288559 - DNA, 55 bp, Artificial
  Synthetic oligonucleotide
cgaaaagagagacgcaacgttgcccgttccttcgtatccagtcgctgtactgcat

SEQ ID NO: 288560 - DNA, 55 bp, Artificial
  Synthetic oligonucleotide
ccttttcgacgggttaccacgctcagttccgtgtgaataatgcacagggcggtgt

SEQ ID NO: 288561 - DNA, 60 bp, Artificial
  Synthetic oligonucleotide
gagatgtacagacacccagtgagcaccaccgtatcgagctctggcgactcttccaggtga

SEQ ID NO: 288562 - DNA, 55 bp, Artificial
  Synthetic oligonucleotide
ccttttatcctattcgttttcttgtccttgcgcgtcgattcatgcgttccactgc

SEQ ID NO: 288563 - DNA, 55 bp, Artificial
  Synthetic oligonucleotide
cctttcggctgaaggatgatagttggtagaaggcaacctttagaaactcgtcgtg

SEQ ID NO: 288564 - DNA, 55 bp, Artificial
  Synthetic oligonucleotide
cctttccacgctctaccaatattcgcttacatgttttatctcgcgtgacgagcgg

SEQ ID NO: 288565 - DNA, 52 bp, Artificial
  Synthetic oligonucleotide
cctttcaaggcgtgcggttggggactaccccaacagaggacctctacttaac

SEQ ID NO: 288566 - DNA, 53 bp, Artificial
  Synthetic oligonucleotide
cctttagggtatgatactgctttaaaaatacccttctatccaaatctattaag

SEQ ID NO: 288567 - DNA, 55 bp, Artificial
  Synthetic oligonucleotide
cctttactgaagcctacactctccaagtggtctcggaagctccgctccgacatct

SEQ ID NO: 288568 - DNA, 55 bp, Artificial
  Synthetic oligonucleotide
ccttgtttcgcattctcaataagcgaattacaaacggtatgttacagtcctccgc

SEQ ID NO: 288569 - DNA, 55 bp, Artificial
  Synthetic oligonucleotide
cgacgtagcatcatgataacaaacgccgagttgggaggaaaacttcaatacgaac

SEQ ID NO: 288570 - DNA, 55 bp, Artificial
  Synthetic oligonucleotide
cgacgtagaccactctcactaccctcacgtgtggtactgttgtcaccacttggta

SEQ ID NO: 288571 - DNA, 55 bp, Artificial
  Synthetic oligonucleotide
cgacgtagacagcattgtgtgcaccaccgcacgaagggaccgcgttttggcgacc

SEQ ID NO: 288572 - DNA, 57 bp, Artificial
  Synthetic oligonucleotide
tagaggtaaccacaataagcattgtgcaagttacactatcaaataaaaatccccaaa

SEQ ID NO: 288573 - DNA, 55 bp, Artificial
  Synthetic oligonucleotide
cgacggcgactgctgaagacgcgaccacatctcgtttgggttcggcatggtccac

SEQ ID NO: 288574 - DNA, 55 bp, Artificial
  Synthetic oligonucleotide
cgacggagggcagcgtcctacctgtcgcgtcacatgcgggcaagcggcccagaca

SEQ ID NO: 288575 - DNA, 55 bp, Artificial
  Synthetic oligonucleotide
cgacgctcacctctccgtgtccctctcgcctcagtgcgcaacacttcctttgcga

SEQ ID NO: 288576 - DNA, 55 bp, Artificial
  Synthetic oligonucleotide
cgacgctacacatgcacggagcgagggtaggtgcctacgaccacccaggttgcgc

SEQ ID NO: 288577 - DNA, 55 bp, Artificial
  Synthetic oligonucleotide
cgacgcacttacataggtgcacgtgacagtgttctgatgcgttttgttgtggtcg

SEQ ID NO: 288578 - DNA, 55 bp, Artificial
  Synthetic oligonucleotide
cgacgcaccgacagtcagcgcggctcttatactgtctctcgctaggtatcggcca

SEQ ID NO: 288579 - DNA, 55 bp, Artificial
  Synthetic oligonucleotide
cgacgcacacaaaacagacccgtatcggcgcgaagtgatttgaagcgccacgaaa

SEQ ID NO: 288580 - DNA, 55 bp, Artificial
  Synthetic oligonucleotide
cgacgaggtagaggacatttcaaccattaaggcaaatgatgacgcaacttacccg

SEQ ID NO: 288581 - DNA, 55 bp, Artificial
  Synthetic oligonucleotide
cgacgagaccaagcagtctctcggggatgacgagcctcaagggccccgctagttt

SEQ ID NO: 288582 - DNA, 55 bp, Artificial
  Synthetic oligonucleotide
cgacgaccactttcactactaccctcacttgtggctgttttgtcaccaccactag

SEQ ID NO: 288583 - DNA, 60 bp, Artificial
  Synthetic oligonucleotide
tagagctgtatttcaatctctatgtggctgtttcccctctcaaggcagctactaatcttc

SEQ ID NO: 288584 - DNA, 55 bp, Artificial
  Synthetic oligonucleotide
cgacgacatgaccccacaagcgtctccctcgctactgcaaggagcgcaaccgctt

SEQ ID NO: 288585 - DNA, 55 bp, Artificial
  Synthetic oligonucleotide
cgacgacacgtgtcattagtacagtcaatttcgccggcatgtctgaagtaagttc

SEQ ID NO: 288586 - DNA, 55 bp, Artificial
  Synthetic oligonucleotide
cgacgaacgacgttcaattcggaagtgagccgcctggcctgtcgattgaaaagta

SEQ ID NO: 288587 - DNA, 55 bp, Artificial
  Synthetic oligonucleotide
cgacctttgttggcatggccttggttcaatgcactcctaggttgctgtattctgc

SEQ ID NO: 288588 - DNA, 55 bp, Artificial
  Synthetic oligonucleotide
cgaccttgactaacttgatcatgaattgccaatgaactattaggtctaccaatca

SEQ ID NO: 288589 - DNA, 55 bp, Artificial
  Synthetic oligonucleotide
cgacctgtcagattgaggtggcgtgttcgcacgaggatgtgcagaaccacgaacc

SEQ ID NO: 288590 - DNA, 55 bp, Artificial
  Synthetic oligonucleotide
cgacctacgcggaagacctctaaccagccaaagcagtcggtcgcaagtgccatca

SEQ ID NO: 288591 - DNA, 55 bp, Artificial
  Synthetic oligonucleotide
cgaccaactccatctcccctagaagtacacgtagcgcgtgtgttgttgacgtatc

SEQ ID NO: 288592 - DNA, 55 bp, Artificial
  Synthetic oligonucleotide
cgacagtgggcagagtggcggttccaacggaagaaaagtagtgtgcaacgcacgc

SEQ ID NO: 288593 - DNA, 55 bp, Artificial
  Synthetic oligonucleotide
cgacagtcggtggccaagtaaatgcgcagtcggacgtcgctgaagaacgaaaggg

SEQ ID NO: 288594 - DNA, 56 bp, Artificial
  Synthetic oligonucleotide
tagaagttccgcccctcgcttagcgcggtcggggacgcaggaaacggcacttgatc

SEQ ID NO: 288595 - DNA, 55 bp, Artificial
  Synthetic oligonucleotide
cgacagtcacctccactccgctgggaatgtctgccacatgctgcatagctggtgg

SEQ ID NO: 288596 - DNA, 55 bp, Artificial
  Synthetic oligonucleotide
cgacagacgtgccgcggctgctatctctcctctacgaatcagagtccacacgggg

SEQ ID NO: 288597 - DNA, 55 bp, Artificial
  Synthetic oligonucleotide
cgacactaccgtaacgggcgcagactctgaaagcggcatatcagcttcactggcg

SEQ ID NO: 288598 - DNA, 55 bp, Artificial
  Synthetic oligonucleotide
cgacacgttagcgagtgcaagtctttgaatacactcaaccttgcgttttgcaaag

SEQ ID NO: 288599 - DNA, 55 bp, Artificial
  Synthetic oligonucleotide
cgaattctactagctctcccatcatgacttggtctaacccataagcacgagccat

SEQ ID NO: 288600 - DNA, 55 bp, Artificial
  Synthetic oligonucleotide
cgaattcgaactcggagctggtgagctgcgtgtacaacctagccgcctcgtacgt

SEQ ID NO: 288601 - DNA, 55 bp, Artificial
  Synthetic oligonucleotide
cgaatggcatgtactgtgcgatcctaccatctctaacaagtagagcaagcgccct

SEQ ID NO: 288602 - DNA, 55 bp, Artificial
  Synthetic oligonucleotide
cgaatgaagaaagaaaggttactcacgctaaacatccatcgactccgtgcgacac

SEQ ID NO: 288603 - DNA, 55 bp, Artificial
  Synthetic oligonucleotide
cgaatctggcggtatctaaccagcagtgcttctcgagtggatgcgctgtaggacg

SEQ ID NO: 288604 - DNA, 55 bp, Artificial
  Synthetic oligonucleotide
ctcaacacgattcagacaacgatcttcgagacagcgtttcacacatcgcagaaca

SEQ ID NO: 288605 - DNA, 60 bp, Artificial
  Synthetic oligonucleotide
ccacttcataagtatcataacttataatcatatgctaatactgattctgatgttgtatac

SEQ ID NO: 288606 - DNA, 55 bp, Artificial
  Synthetic oligonucleotide
ctatttgagaagcgcgtcggtggctacacagtcttgtacaaccctatcgaagtca

SEQ ID NO: 288607 - DNA, 55 bp, Artificial
  Synthetic oligonucleotide
ctatttgacagaaatgctcaacccatcaaacattgtgatcttccatggttcaccc

SEQ ID NO: 288608 - DNA, 55 bp, Artificial
  Synthetic oligonucleotide
ctatttactcttggtggtactactggagtagttctaggtaatactgctgtagatg

SEQ ID NO: 288609 - DNA, 55 bp, Artificial
  Synthetic oligonucleotide
ctattgccgacccaccgtcggaaccacgagcggggaagcatagtgcgtcgtatgc

SEQ ID NO: 288610 - DNA, 55 bp, Artificial
  Synthetic oligonucleotide
ctattcttagttggtttccgtgagaagcaagcggaggatcaacttagatacgaaa

SEQ ID NO: 288611 - DNA, 55 bp, Artificial
  Synthetic oligonucleotide
ctattctcaccatgtgtactattctcaccatgtgtactattctcaccatgtgtac

SEQ ID NO: 288612 - DNA, 55 bp, Artificial
  Synthetic oligonucleotide
ctattcggctggccagatcttatctgcatgtcttccccattggtgtgaggaatgc

SEQ ID NO: 288613 - DNA, 55 bp, Artificial
  Synthetic oligonucleotide
ctattatacattcagcgatagtgtttctctaactatgtctattactcatactagc

SEQ ID NO: 288614 - DNA, 55 bp, Artificial
  Synthetic oligonucleotide
ctattagcttgtccacagtttgctcgatatacaccccatactcttactcgatcac

SEQ ID NO: 288615 - DNA, 55 bp, Artificial
  Synthetic oligonucleotide
ctattagcctcggagggaatgcggtattacaacgtgttctggatacgcaagccgc

SEQ ID NO: 288616 - DNA, 54 bp, Artificial
  Synthetic oligonucleotide
tagaaataggtatgacacacggttattttcttgtaggtccattttataaacttg

SEQ ID NO: 288617 - DNA, 55 bp, Artificial
  Synthetic oligonucleotide
ctatgtgccgcagtatcttcgctggttcgaggaatgggcagaagacttttgtagg

SEQ ID NO: 288618 - DNA, 55 bp, Artificial
  Synthetic oligonucleotide
ctatgtattcatgcagagcgggcttcggtggccaatctatgattctagcaatggg

SEQ ID NO: 288619 - DNA, 55 bp, Artificial
  Synthetic oligonucleotide
ctatgcatgtctatgacgtctactggacacgcaactgcgcaccaggggaggcact

SEQ ID NO: 288620 - DNA, 55 bp, Artificial
  Synthetic oligonucleotide
ctatgagactagcagcatactcactaacttgaggtccttctcctgctaccaaggg

SEQ ID NO: 288621 - DNA, 55 bp, Artificial
  Synthetic oligonucleotide
ctatcgcctcgagatacggattcatgcgtgtcaagagcacgtagaggaccacacc

SEQ ID NO: 288622 - DNA, 55 bp, Artificial
  Synthetic oligonucleotide
ctatcgcacgttttctaattcgttgtggtatgattgttcctgaaattgggattcc

SEQ ID NO: 288623 - DNA, 55 bp, Artificial
  Synthetic oligonucleotide
ctatcatcaacagaacatgtcaagcaattagaatcgcatgggatacagattccac

SEQ ID NO: 288624 - DNA, 55 bp, Artificial
  Synthetic oligonucleotide
ctatcagctgcgccactaatgcaatcaagcactaccacaagcctcttgtgaaccg

SEQ ID NO: 288625 - DNA, 55 bp, Artificial
  Synthetic oligonucleotide
ctatatgactgctttagactccctgacatgccgacatgacgtgtttcgccctctg

SEQ ID NO: 288626 - DNA, 55 bp, Artificial
  Synthetic oligonucleotide
ctataggcctatgttgctgtagttaggacctctattagttaccttaggacctaag

SEQ ID NO: 288627 - DNA, 58 bp, Artificial
  Synthetic oligonucleotide
ccaattctgcgaatgtgcgggtattaggagattggatcttaaccgttatataggtgct

SEQ ID NO: 288628 - DNA, 60 bp, Artificial
  Synthetic oligonucleotide
atgcccgtctctctgcagcactttgccgtggtccaacttcagcgaaagtggggcttcgtg

SEQ ID NO: 288629 - DNA, 55 bp, Artificial
  Synthetic oligonucleotide
ctataaggcgccacagatggtaagtcggacatgtctcacgcgagcaccaaaccga

SEQ ID NO: 288630 - DNA, 55 bp, Artificial
  Synthetic oligonucleotide
ctagttgagcaatgaaaccttctagctaatatcatctaacgctcagctaggctct

SEQ ID NO: 288631 - DNA, 55 bp, Artificial
  Synthetic oligonucleotide
ctagtgcctctcaaggcgcttgtaactgacgccatgtacttctctcgcgttatta

SEQ ID NO: 288632 - DNA, 55 bp, Artificial
  Synthetic oligonucleotide
ctagtactcagagtgccacgccaggggagatcgagcaagcgtacgtcgacgcatt

SEQ ID NO: 288633 - DNA, 55 bp, Artificial
  Synthetic oligonucleotide
ctagggtgcatacacaggtagtggagtgggacccgttattacaaaacgttcacag

SEQ ID NO: 288634 - DNA, 55 bp, Artificial
  Synthetic oligonucleotide
ctagggataaagatcaagtgcacaagagtgctcatgtaggtacgaggccatacgt

SEQ ID NO: 288635 - DNA, 50 bp, Artificial
  Synthetic oligonucleotide
ctagggaacttgtataggggttcaccgttaacgtacagggataaattttc

SEQ ID NO: 288636 - DNA, 55 bp, Artificial
  Synthetic oligonucleotide
ctaggcacacaccgctggaacgcagagaatctcatacgtctgtcagttcgtggaa

SEQ ID NO: 288637 - DNA, 55 bp, Artificial
  Synthetic oligonucleotide
ctaggatggagtgagatgaaatcgctgagaactcttaatctggagggtactcagg

SEQ ID NO: 288638 - DNA, 55 bp, Artificial
  Synthetic oligonucleotide
ctagcggagtgtacaaaacacgcaacttcatcccggtacccacagtaactaccat

SEQ ID NO: 288639 - DNA, 56 bp, Artificial
  Synthetic oligonucleotide
aagagatcgcgtactttggattgaaacaagctgtgaggaaactacattaaaggaac

SEQ ID NO: 288640 - DNA, 55 bp, Artificial
  Synthetic oligonucleotide
ctccctgccgtgtgcatttgcctactttgcctgtttctggatgataccacgcacc

SEQ ID NO: 288641 - DNA, 55 bp, Artificial
  Synthetic oligonucleotide
ctccctccaatggagttcattccactaccactgagaggcctacttcccatattta

SEQ ID NO: 288642 - DNA, 55 bp, Artificial
  Synthetic oligonucleotide
ctccctagccgaaaaggaacctcgccccatgcatgcaacgacagtcccgctttgc

SEQ ID NO: 288643 - DNA, 55 bp, Artificial
  Synthetic oligonucleotide
ctcccctcgtgtgtataggcgcgtgttcgtataggtttggtgactctgcgactcg

SEQ ID NO: 288644 - DNA, 55 bp, Artificial
  Synthetic oligonucleotide
ctccccgttgtggttacaaacaccagaccgttcgcaaaatagatagtgtaccatg

SEQ ID NO: 288645 - DNA, 55 bp, Artificial
  Synthetic oligonucleotide
ctccccgtccaagcgttacgtacccaccacacacatacctgtgcagggtcctcac

SEQ ID NO: 288646 - DNA, 55 bp, Artificial
  Synthetic oligonucleotide
ctccccatggtgaggccccgcgtaaggctaagttctcatcacaaatgagtaaccc

SEQ ID NO: 288647 - DNA, 55 bp, Artificial
  Synthetic oligonucleotide
ctccccatcgaggccgcttaccgcttgcctgcttaaccgcaagttagagtacatg

SEQ ID NO: 288648 - DNA, 55 bp, Artificial
  Synthetic oligonucleotide
ctcccatgtctcctgataaagatgagctcagtccaaaagataatccttctagcct

SEQ ID NO: 288649 - DNA, 55 bp, Artificial
  Synthetic oligonucleotide
ctcccacggtctctctccgttcgctctataccaatacacgcacacgcgtacgcgc

SEQ ID NO: 288650 - DNA, 58 bp, Artificial
  Synthetic oligonucleotide
atgcctagacgtatacacgattaccctgtagtttttatggggtgacagagtatgtcaa

SEQ ID NO: 288651 - DNA, 55 bp, Artificial
  Synthetic oligonucleotide
ctcccacgctgtcaaaggggtgccagcatcgttgcactgcggtcgggtagagcta

SEQ ID NO: 288652 - DNA, 55 bp, Artificial
  Synthetic oligonucleotide
ctccatcccgcaagaggagcaccaaaaggtgatctccaagttgaaggtgctcacc

SEQ ID NO: 288653 - DNA, 55 bp, Artificial
  Synthetic oligonucleotide
ctccatcaggctcccctacaatcgtattccgctgtgaagccgctagatcctgccc

SEQ ID NO: 288654 - DNA, 55 bp, Artificial
  Synthetic oligonucleotide
ctccatagctgtagaattagctccctttcccatactagtaacggtgcttgctccc

SEQ ID NO: 288655 - DNA, 55 bp, Artificial
  Synthetic oligonucleotide
ctccagtggtggttggtactccactgagcccagaagcatcgaaacgagtgagtcg

SEQ ID NO: 288656 - DNA, 55 bp, Artificial
  Synthetic oligonucleotide
ctccagtgcgcctgtggactcgacactcacacgagacgggttgtccagcagctga

SEQ ID NO: 288657 - DNA, 55 bp, Artificial
  Synthetic oligonucleotide
ctccaggtgtactgcacctcacacgtcgacgtctcccaggagacagagagctacg

SEQ ID NO: 288658 - DNA, 55 bp, Artificial
  Synthetic oligonucleotide
ctcatcaaagctcgacacgctgcctccatctggtagaagcacactgtactcgctc

SEQ ID NO: 288659 - DNA, 55 bp, Artificial
  Synthetic oligonucleotide
ctcatatgcaaggcagtcgaaaaccctctcgaacagctccattgtgttgtgaacg

SEQ ID NO: 288660 - DNA, 55 bp, Artificial
  Synthetic oligonucleotide
ctcagtcggacgctaaaagcagggtgcccactaccgatgggtcgggacatgtccc

SEQ ID NO: 288661 - DNA, 60 bp, Artificial
  Synthetic oligonucleotide
atgcctagggttctatcttcgaattctactagctctcccatcatgacttggtctaaccca

SEQ ID NO: 288662 - DNA, 55 bp, Artificial
  Synthetic oligonucleotide
ctcagcacgtgctgcgttcttgctgtggaggtgaacgtcgagttaaacgttgtgc

SEQ ID NO: 288663 - DNA, 55 bp, Artificial
  Synthetic oligonucleotide
ctcagagcttttaaacgcccacgcacccattctcacactcgcgaccatagacata

SEQ ID NO: 288664 - DNA, 55 bp, Artificial
  Synthetic oligonucleotide
ctcactccgtctacatgtctttatagacgtacacgcaaacatgagtcatattagc

SEQ ID NO: 288665 - DNA, 55 bp, Artificial
  Synthetic oligonucleotide
ctcactatatcgctactctcgattaagaacatggttcgagtgcttgtcttcctgc

SEQ ID NO: 288666 - DNA, 55 bp, Artificial
  Synthetic oligonucleotide
ctcacgggatcatgcgtggaagtcatctcccgctgaggcaccgtcgttccgtgac

SEQ ID NO: 288667 - DNA, 55 bp, Artificial
  Synthetic oligonucleotide
ctcacgaacaaggggtagaccagacggacctcagcaggggtgataggagtagtag

SEQ ID NO: 288668 - DNA, 55 bp, Artificial
  Synthetic oligonucleotide
ctcacctgtctgcccgtcacacagcacgaacagaggtacgcgctcccacgtgtct

SEQ ID NO: 288669 - DNA, 55 bp, Artificial
  Synthetic oligonucleotide
ctcaccatagtaaaacatatgcctcactcagtacctcttctaccatgtcccagat

SEQ ID NO: 288670 - DNA, 55 bp, Artificial
  Synthetic oligonucleotide
ctcacaggcgaacagatagcgcacatgtcgatgacacaacagccgcaccgagcga

SEQ ID NO: 288671 - DNA, 55 bp, Artificial
  Synthetic oligonucleotide
ctcacaaagacatcgcaccaccgaatatttctgtatccctgttggcagtccaatg

SEQ ID NO: 288672 - DNA, 60 bp, Artificial
  Synthetic oligonucleotide
tactgatgctcaaaactggatggaacatactttggatacaatggttatcttaccacttcc

SEQ ID NO: 288673 - DNA, 55 bp, Artificial
  Synthetic oligonucleotide
ctcaagcgctcacagtttgcaagggagctctctatcttgatgctacactctagcc

SEQ ID NO: 288674 - DNA, 55 bp, Artificial
  Synthetic oligonucleotide
ctcaacttcaccccgttagagtacaactacggaaccgtgcgagtatccactgtgg

SEQ ID NO: 288675 - DNA, 55 bp, Artificial
  Synthetic oligonucleotide
ctaatgagcagctgccaattggataccagctcacctccttaaatctatggttagc

SEQ ID NO: 288676 - DNA, 55 bp, Artificial
  Synthetic oligonucleotide
ctaatcctggtctttactcaacggaaggaggaggtagacgagttgctggggcggc

SEQ ID NO: 288677 - DNA, 54 bp, Artificial
  Synthetic oligonucleotide
ctaaggtggaggcttcacgggtaaatgcgttggcggctgtaaggaactacaaag

SEQ ID NO: 288678 - DNA, 55 bp, Artificial
  Synthetic oligonucleotide
ctaactaaggtcatacatggactaacataggtcttaagttaactaactctggtcc

SEQ ID NO: 288679 - DNA, 55 bp, Artificial
  Synthetic oligonucleotide
ctaacctctacctttaggaggccctctaaacaactgtgttcagctcgactaggtg

SEQ ID NO: 288680 - DNA, 55 bp, Artificial
  Synthetic oligonucleotide
ctaacacgatgtgtaagtctcgttacgcgttcccctggtctaaatccatcagcca

SEQ ID NO: 288681 - DNA, 55 bp, Artificial
  Synthetic oligonucleotide
ctaacacagctcaccatcggggtaggctgacagaccgccttgcttcgtatcagcc

SEQ ID NO: 288682 - DNA, 52 bp, Artificial
  Synthetic oligonucleotide
ctaaattcgcccgcacggtttccttcctcagggccgagacatttccaccccg

SEQ ID NO: 288683 - DNA, 56 bp, Artificial
  Synthetic oligonucleotide
aacgtcaattgagctcttcaataaggacgcccgatattcgtcattttcggatcccc

SEQ ID NO: 288684 - DNA, 49 bp, Artificial
  Synthetic oligonucleotide
ctaaaccctgatcctactttgacttaacccggaacccaccttaacctta

SEQ ID NO: 288685 - DNA, 55 bp, Artificial
  Synthetic oligonucleotide
cgttttactcgtgagcgctctgccacatgcgcaccgacgcacacaagcgtgcgtg

SEQ ID NO: 288686 - DNA, 55 bp, Artificial
  Synthetic oligonucleotide
cgtttgctatttgatgtgggatgtctttggttacttttaaagcgagagataagcg

SEQ ID NO: 288687 - DNA, 55 bp, Artificial
  Synthetic oligonucleotide
cgtttctgtacgtctgagccgtcattgtgtactgtgtaagtgaagaacgcagctc

SEQ ID NO: 288688 - DNA, 55 bp, Artificial
  Synthetic oligonucleotide
cgtttcgcgcacaattacaaagagagaacgtaaaagttcgctaagctagcggcag

SEQ ID NO: 288689 - DNA, 55 bp, Artificial
  Synthetic oligonucleotide
cgtttcccctgccctgcgcctctccgacagtctctataggcagactggcatcgtg

SEQ ID NO: 288690 - DNA, 55 bp, Artificial
  Synthetic oligonucleotide
cgtttcactgccggcgcgcctccctgtgtcccctcatttgcagctatcagcacgt

SEQ ID NO: 288691 - DNA, 55 bp, Artificial
  Synthetic oligonucleotide
cgtttatatgctctgcacttatgacggcaccttgctcattaggcatgtaggaggt

SEQ ID NO: 288692 - DNA, 55 bp, Artificial
  Synthetic oligonucleotide
cgtttaggaaaagcaattcaatactggaacggtcatcctggtgaaatcgaacata

SEQ ID NO: 288693 - DNA, 55 bp, Artificial
  Synthetic oligonucleotide
cgttgtgtcccgagggaagggttgaatatcggtcggaagcgagagcacagagtcg

SEQ ID NO: 288694 - DNA, 59 bp, Artificial
  Synthetic oligonucleotide
tcacatgtcttctagtgctttgagatttgactcactttttacaaaaggttagtatcaaa

SEQ ID NO: 288695 - DNA, 55 bp, Artificial
  Synthetic oligonucleotide
cgttgtcttactggttagacacgcgtccgttctacgttgtgagcgccaccgatcc

SEQ ID NO: 288696 - DNA, 55 bp, Artificial
  Synthetic oligonucleotide
cgttggtgtagattgtgggcagtgggactatgcactccgattcgcctggtggcaa

SEQ ID NO: 288697 - DNA, 54 bp, Artificial
  Synthetic oligonucleotide
cgttgcttttcaactcacggccatgtcgcgtccgtacggaaagaaagggtacgc

SEQ ID NO: 288698 - DNA, 55 bp, Artificial
  Synthetic oligonucleotide
cgttgcttggcacctgacggagagctgcactcgttaccggttagccctctcaggg

SEQ ID NO: 288699 - DNA, 55 bp, Artificial
  Synthetic oligonucleotide
cgttgctccacgggatgcccttgctattgtatagatccacgtccgtgtgcgacgg

SEQ ID NO: 288700 - DNA, 55 bp, Artificial
  Synthetic oligonucleotide
cgttgcggttttcagctgcggaacaggtgttctggcgagtgtcggctacgcggct

SEQ ID NO: 288701 - DNA, 55 bp, Artificial
  Synthetic oligonucleotide
cgttgcctttattgtgatccattgggagtacccaattttcccgattcactctggc

SEQ ID NO: 288702 - DNA, 55 bp, Artificial
  Synthetic oligonucleotide
cgttgcctggattccgttcacggtgatgtacttgctgtacctcatcccaccgacc

SEQ ID NO: 288703 - DNA, 55 bp, Artificial
  Synthetic oligonucleotide
cgttgacaaatgcggctctacgaggctcatgtatggcagagacagtccaccttcc

SEQ ID NO: 288704 - DNA, 55 bp, Artificial
  Synthetic oligonucleotide
cgttctctggctacattttcgtatggcaggagagcctcgacagtcacaactaaca

SEQ ID NO: 288705 - DNA, 60 bp, Artificial
  Synthetic oligonucleotide
agagagcaacgcacgtggacccgatgtccgcacacggaaacacgcacacacgcactccag

SEQ ID NO: 288706 - DNA, 55 bp, Artificial
  Synthetic oligonucleotide
cgttcgactgtaggcgggcacacaagagagaggttaggatgcttctgagcacaca

SEQ ID NO: 288707 - DNA, 53 bp, Artificial
  Synthetic oligonucleotide
cgttcgaacaccacgtgttttgcgttaattcagacgcaccaggttttcggaaa

SEQ ID NO: 288708 - DNA, 55 bp, Artificial
  Synthetic oligonucleotide
cgttcctatgagtgccgtcagggatgtaataacgacaataagttcaataaccaaa

SEQ ID NO: 288709 - DNA, 55 bp, Artificial
  Synthetic oligonucleotide
cgttcccagacacgttgcggcggtcacgagatactcgatggaacacagccgaggg

SEQ ID NO: 288710 - DNA, 55 bp, Artificial
  Synthetic oligonucleotide
ctagccgaattattcaagcgctgacgacaagtgatttgatcgagtgtgagaacga

SEQ ID NO: 288711 - DNA, 55 bp, Artificial
  Synthetic oligonucleotide
ctagccattgacatccagaaactggggtcctaagctcagaacctgtcattaactc

SEQ ID NO: 288712 - DNA, 55 bp, Artificial
  Synthetic oligonucleotide
ctagcacgtggtaaccgcacagcatgcaacgccacgagacgttcttgcgctgacg

SEQ ID NO: 288713 - DNA, 55 bp, Artificial
  Synthetic oligonucleotide
ctagcaccggtgatctaagcatacacacacaggactcggcgtggccacagttgtg

SEQ ID NO: 288714 - DNA, 55 bp, Artificial
  Synthetic oligonucleotide
ctagaactgcgcacgctgagaaaccgctcggtcctggtcttgtgatgttttggct

SEQ ID NO: 288715 - DNA, 55 bp, Artificial
  Synthetic oligonucleotide
ctacttggccgaatgggaagacgtatgagctactcatccaacgcgcccgctacgt

SEQ ID NO: 288716 - DNA, 60 bp, Artificial
  Synthetic oligonucleotide
atctacttaacggaactcaatcagcaggcaatcgtgatcagaatgtagtgaaaaactact

SEQ ID NO: 288717 - DNA, 55 bp, Artificial
  Synthetic oligonucleotide
ctactctcgttgaccactccgcgcatatggtctcatggccgtcttccactcctcc

SEQ ID NO: 288718 - DNA, 55 bp, Artificial
  Synthetic oligonucleotide
ctactcggacatgtcggcaaaacccagtgcgcaagttcctctgcacggccaagcc

SEQ ID NO: 288719 - DNA, 55 bp, Artificial
  Synthetic oligonucleotide
ctactcgatgagttcagttttggcgagttagcctatgattatctcctcgatgttt

SEQ ID NO: 288720 - DNA, 55 bp, Artificial
  Synthetic oligonucleotide
ctactaggattgcggatgtggtagtcgtgaaaagagaggtccataaggggcaacg

SEQ ID NO: 288721 - DNA, 55 bp, Artificial
  Synthetic oligonucleotide
ctacgtgtgtgtcggacaaatgcagggctacagtgagagtcgaatctgcgactgc

SEQ ID NO: 288722 - DNA, 55 bp, Artificial
  Synthetic oligonucleotide
ctacggtgccataatgacgttgttgagcgggtaacaacaggaggtggactggggc

SEQ ID NO: 288723 - DNA, 55 bp, Artificial
  Synthetic oligonucleotide
ctacgcgtgctgaacctacttgccctgaacccggatctcgtgacggcccctgtag

SEQ ID NO: 288724 - DNA, 55 bp, Artificial
  Synthetic oligonucleotide
ctacgcaatcgacttcgtatatccctcgggtacgacgaagagctcttcctagcgc

SEQ ID NO: 288725 - DNA, 55 bp, Artificial
  Synthetic oligonucleotide
ctacgatgtacacacggaaatagaaggccctgcaacttacgatctcggaaaagtt

SEQ ID NO: 288726 - DNA, 55 bp, Artificial
  Synthetic oligonucleotide
ctacgacgagtgagagctgcatattgcccacacgcgtgccaacgtttcccgctgg

SEQ ID NO: 288727 - DNA, 56 bp, Artificial
  Synthetic oligonucleotide
atctatatattcggtaaaatataccaaccagaagtcaaaagttttgtttcatgtgc

SEQ ID NO: 288728 - DNA, 55 bp, Artificial
  Synthetic oligonucleotide
ctacctgtttgtccctgacgttcggtctcgatctgcgtaaggcagacgtgtgtgg

SEQ ID NO: 288729 - DNA, 54 bp, Artificial
  Synthetic oligonucleotide
ctacctgtcaatagttaaattaccgattctacctaacctttgaacagactgtaa

SEQ ID NO: 288730 - DNA, 55 bp, Artificial
  Synthetic oligonucleotide
ctacctcaatataaagagagttacattcacaggattggacgttcaggtagatttg

SEQ ID NO: 288731 - DNA, 55 bp, Artificial
  Synthetic oligonucleotide
ctacctagcctttggtgccatatggccactggactggacacatatgaggtcgcat

SEQ ID NO: 288732 - DNA, 55 bp, Artificial
  Synthetic oligonucleotide
ctacctactcgtgcggagtgttactgcgtgatgactcgcacacagcagacctctc

SEQ ID NO: 288733 - DNA, 55 bp, Artificial
  Synthetic oligonucleotide
ctaccggttccgagttgaagataaggcggaagtcactgatgctaacatgcaccgc

SEQ ID NO: 288734 - DNA, 55 bp, Artificial
  Synthetic oligonucleotide
ctaccaccagggtagcttctacacagacatgttctcccacgagtcgttcatttcg

SEQ ID NO: 288735 - DNA, 55 bp, Artificial
  Synthetic oligonucleotide
ctacaggctattgttccggctccacagtgaaccgtcgagatgggattgtcgttcc

SEQ ID NO: 288736 - DNA, 55 bp, Artificial
  Synthetic oligonucleotide
ctacaccgttgcttcccctctgtgcgtctgtcagtagtggcggcagcgtgtttgt

SEQ ID NO: 288737 - DNA, 55 bp, Artificial
  Synthetic oligonucleotide
ctacacaccctgcttcagtggtcttcaccgggtgtgcccctcagcgtggcatcct

SEQ ID NO: 288738 - DNA, 60 bp, Artificial
  Synthetic oligonucleotide
taagatgcttgcattgcgcctcgagtgataagagtgccatcctgtgtgaggtgtgcgcct

SEQ ID NO: 288739 - DNA, 56 bp, Artificial
  Synthetic oligonucleotide
tcaaaggctcgactgagccgggccctgcctataggttcgaaagaggtcgacggtgg

SEQ ID NO: 288740 - DNA, 55 bp, Artificial
  Synthetic oligonucleotide
ctacaataagtctatagtttctcaaagcgattagagccgactcggtacaaattgc

SEQ ID NO: 288741 - DNA, 55 bp, Artificial
  Synthetic oligonucleotide
ctacaaggttaggaagaaccggcaagggtattcaaccatagtcagagtgcgggag

SEQ ID NO: 288742 - DNA, 55 bp, Artificial
  Synthetic oligonucleotide
ctacaacgcttggcatctacatacgcgaaatgtaccttaacttattacacgactg

SEQ ID NO: 288743 - DNA, 55 bp, Artificial
  Synthetic oligonucleotide
ctacaacacgagcgactacaccacccgtggcacattcgagaccttctcgcatgca

SEQ ID NO: 288744 - DNA, 55 bp, Artificial
  Synthetic oligonucleotide
ctacaaaggcaggagaactgtggttgcacgcgtatatttgtggacgagttcgtgg

SEQ ID NO: 288745 - DNA, 55 bp, Artificial
  Synthetic oligonucleotide
ctaatgatgggatattgcctgaaataccgctactagaatgaagtggctctttctt

SEQ ID NO: 288746 - DNA, 55 bp, Artificial
  Synthetic oligonucleotide
ctgacactcgctctgaatccgatccattcgtactgttatatttaactcctgctgg

SEQ ID NO: 288747 - DNA, 55 bp, Artificial
  Synthetic oligonucleotide
ctgacaacatcggtaagtcggaacggtttagtgctgctaatgtcggccgccaggt

SEQ ID NO: 288748 - DNA, 55 bp, Artificial
  Synthetic oligonucleotide
ctgaagttgctggaattcatgatttaggagtattaggtaggggatataagatgga

SEQ ID NO: 288749 - DNA, 55 bp, Artificial
  Synthetic oligonucleotide
ctgaaggctggcaagagttgtaaagatcagtacgaggcacatatcccagtcagac

SEQ ID NO: 288750 - DNA, 60 bp, Artificial
  Synthetic oligonucleotide
tcaaaaacactccgtaccaatcaggcagtccgaaatcatgtcgcggaggcatgtgggggc

SEQ ID NO: 288751 - DNA, 55 bp, Artificial
  Synthetic oligonucleotide
ctgaagcgagcccatttaagttgttgacgtgtcgtttccttcagtaagaatacgc

SEQ ID NO: 288752 - DNA, 55 bp, Artificial
  Synthetic oligonucleotide
ctgaacgtcttcaacatattggtgcgtctcaagaattacgataacgagggcttga

SEQ ID NO: 288753 - DNA, 55 bp, Artificial
  Synthetic oligonucleotide
ctgaaccttcgacccatctcgtagacgggtgtagtaggctagctgtgcgctaagc

SEQ ID NO: 288754 - DNA, 55 bp, Artificial
  Synthetic oligonucleotide
ctgaaatatgcttagcgatttgctatttcttagcgggttcaggaagcgttggcct

SEQ ID NO: 288755 - DNA, 55 bp, Artificial
  Synthetic oligonucleotide
ctgaaagacacggagggatgaccgatggaggcatctgtggcgagtgagtctcact

SEQ ID NO: 288756 - DNA, 55 bp, Artificial
  Synthetic oligonucleotide
ctcttttgcgcgttacatcaacacatctactgccggggcagtcaacgggacaggc

SEQ ID NO: 288757 - DNA, 55 bp, Artificial
  Synthetic oligonucleotide
ctctttcccaagtaggtcagacccacgctcatgggagaattgcttacaagcacgg

SEQ ID NO: 288758 - DNA, 55 bp, Artificial
  Synthetic oligonucleotide
ctcttgtgtagagcttcgcgacataactgaggtacagacgcacctacgagaggcc

SEQ ID NO: 288759 - DNA, 55 bp, Artificial
  Synthetic oligonucleotide
ctcttgtcacgctgggcgatagttcaagatggactaggtgcaaaggccgcgacgc

SEQ ID NO: 288760 - DNA, 55 bp, Artificial
  Synthetic oligonucleotide
ctcttgggtgcacaccgacttacagaagctacgactgcgacgtgagagagtcacc

SEQ ID NO: 288761 - DNA, 59 bp, Artificial
  Synthetic oligonucleotide
atctggtaataaaaacgtcaaaggagctctggcttagttgagagctgcgagagaaggcg

SEQ ID NO: 288762 - DNA, 55 bp, Artificial
  Synthetic oligonucleotide
ctcttgcattatgtcttgatagattgtcacttagacgccctaaagtaataggtgg

SEQ ID NO: 288763 - DNA, 55 bp, Artificial
  Synthetic oligonucleotide
ctcttcatcggagttatcagtgacttgtgttgtaaccttacagacgcttccagat

SEQ ID NO: 288764 - DNA, 55 bp, Artificial
  Synthetic oligonucleotide
ctcttcaaggtagaaacggcgcaagagcaacatttactagcgacggtaaattgtg

SEQ ID NO: 288765 - DNA, 55 bp, Artificial
  Synthetic oligonucleotide
ctcttagtatgtttctattagggttcgtatcgcctacggttgacagtgatcttga

SEQ ID NO: 288766 - DNA, 55 bp, Artificial
  Synthetic oligonucleotide
ctcttaggcgtgctctagacgcgtcgctctcgttcttgtttcgtgctgcactcag

SEQ ID NO: 288767 - DNA, 55 bp, Artificial
  Synthetic oligonucleotide
ctcttacgatggggcggtcttattctgcactgatatcgcatctagaggattagac

SEQ ID NO: 288768 - DNA, 55 bp, Artificial
  Synthetic oligonucleotide
ctctgtccgctggattcattccctgccactgctgtgtaggtccgttcaaccggcg

SEQ ID NO: 288769 - DNA, 55 bp, Artificial
  Synthetic oligonucleotide
ctctggatctactttcatggtcttaggacctatgttcgttaagctaagacctagt

SEQ ID NO: 288770 - DNA, 55 bp, Artificial
  Synthetic oligonucleotide
ctctgcttcacaagataccacactctcattacctctcgacgaatgtacacatccc

SEQ ID NO: 288771 - DNA, 55 bp, Artificial
  Synthetic oligonucleotide
ctctgctgtttgtggttcgccaactcagcggcgagactgccaagtgcagcttgca

SEQ ID NO: 288772 - DNA, 52 bp, Artificial
  Synthetic oligonucleotide
tatttcacctttatgctattctccgtaggaacctaaccgaaattcgggcttt

SEQ ID NO: 288773 - DNA, 55 bp, Artificial
  Synthetic oligonucleotide
ctctgcggcgtactcaggtctccggcacattacctcgtgaatggagctcgatgaa

SEQ ID NO: 288774 - DNA, 55 bp, Artificial
  Synthetic oligonucleotide
ctctgcgctcttgcgccttctgtccgatcaacgacaaacgctccctctctgttcc

SEQ ID NO: 288775 - DNA, 55 bp, Artificial
  Synthetic oligonucleotide
ctctgactcgccacatcgcggttggggacgccgtggttatgacatatgcggccca

SEQ ID NO: 288776 - DNA, 55 bp, Artificial
  Synthetic oligonucleotide
ctctcttccaggaaatgcagtcggcggtgcggcgagctaccacagccaaggtacc

SEQ ID NO: 288777 - DNA, 55 bp, Artificial
  Synthetic oligonucleotide
ctctctgactctcatctagggccctcatccactccaacaggaccttgagagcggg

SEQ ID NO: 288778 - DNA, 55 bp, Artificial
  Synthetic oligonucleotide
ctctctctagcgcaagctgacgaggcgtgctcgggtttcgtgagcgaggctgtgt

SEQ ID NO: 288779 - DNA, 55 bp, Artificial
  Synthetic oligonucleotide
ctctctaccgccacatgcagattcgagaggccttttcgttcgggatttgctcggg

SEQ ID NO: 288780 - DNA, 55 bp, Artificial
  Synthetic oligonucleotide
ctgcgcctcctcggatagtccgtagcacattatctgggtgcacatttcgacgggg

SEQ ID NO: 288781 - DNA, 55 bp, Artificial
  Synthetic oligonucleotide
ctgcgcactggatggctgactcgtaggtggtggctgagtggtgtgcagggtgcta

SEQ ID NO: 288782 - DNA, 55 bp, Artificial
  Synthetic oligonucleotide
ctgcgcaactctacacataccctataggcaccgcaggaccgtgaagggagccctc

SEQ ID NO: 288783 - DNA, 60 bp, Artificial
  Synthetic oligonucleotide
cgctcttacttcatccaccaacggccttcggatcaggagcaatcagctgtccatccaaag

SEQ ID NO: 288784 - DNA, 55 bp, Artificial
  Synthetic oligonucleotide
ctgcgattatctacacgcaggatgattattgcttacatacccggtcaaggccata

SEQ ID NO: 288785 - DNA, 55 bp, Artificial
  Synthetic oligonucleotide
ctgcgacggtttgttgtccgactgccgttgggaaagtacatgtagcggttgcacc

SEQ ID NO: 288786 - DNA, 55 bp, Artificial
  Synthetic oligonucleotide
ctgcgaaatagtcaaatacgttccacctctggagcaaagaggcagccacgggtgc

SEQ ID NO: 288787 - DNA, 55 bp, Artificial
  Synthetic oligonucleotide
ctgcctgcgaagatggctgtggaggtgaccgtatctctgttgttctccgtcccgg

SEQ ID NO: 288788 - DNA, 55 bp, Artificial
  Synthetic oligonucleotide
ctgccgtctctataaaccacttacgtaatgacttgtcgtcaaattcgacgtctgg

SEQ ID NO: 288789 - DNA, 55 bp, Artificial
  Synthetic oligonucleotide
ctgccgagaaagcagatcgacttggtactccgtagtgctccctacaccgatgtgt

SEQ ID NO: 288790 - DNA, 55 bp, Artificial
  Synthetic oligonucleotide
ctgcccagtccatccatgctctcattgttacaaatcccgttataaataaacttcg

SEQ ID NO: 288791 - DNA, 55 bp, Artificial
  Synthetic oligonucleotide
ctgcccacccgtctgtgcgagcacgagcggataagttcgtcgaagcgaactgagg

SEQ ID NO: 288792 - DNA, 55 bp, Artificial
  Synthetic oligonucleotide
ctgccaagacgcaacaaggtagagcagggtgtggtgtaccgcagcatgcctcagc

SEQ ID NO: 288793 - DNA, 55 bp, Artificial
  Synthetic oligonucleotide
ctgcagcgtgtctggacgttgcgttgatttcagtgagtggccctctccttctgtg

SEQ ID NO: 288794 - DNA, 60 bp, Artificial
  Synthetic oligonucleotide
tattggttcagctactagttcactgtcagctaccatgtttcgacttcgcaccgactgttt

SEQ ID NO: 288795 - DNA, 55 bp, Artificial
  Synthetic oligonucleotide
ctgcagcgcaacttcccaggaatgacgtcacggctgaaggacgctcaaccaatct

SEQ ID NO: 288796 - DNA, 55 bp, Artificial
  Synthetic oligonucleotide
ctgcactcgctttagcgacgcgcgagttctcatcagtctttacttgtgtcccgcg

SEQ ID NO: 288797 - DNA, 55 bp, Artificial
  Synthetic oligonucleotide
ctgcacgttgggctacacacctgcgagtgacctggtgacacgggacgctctcgat

SEQ ID NO: 288798 - DNA, 55 bp, Artificial
  Synthetic oligonucleotide
ctgcaaggttccgcagctcgaaggctgatgcgaacgtagcctcgaccatcgatgc

SEQ ID NO: 288799 - DNA, 55 bp, Artificial
  Synthetic oligonucleotide
ctgatgttcgatatacatagttcgtgacgtctcggaggcatacactatttggtac

SEQ ID NO: 288800 - DNA, 55 bp, Artificial
  Synthetic oligonucleotide
ctgatgtatgaaagtacgggtatcgatgaggactagtctccctagtagtccgtac

SEQ ID NO: 288801 - DNA, 55 bp, Artificial
  Synthetic oligonucleotide
ctgataggaggggtgtacacgatccacagccgcccagggctcatggcgcctgttg

SEQ ID NO: 288802 - DNA, 55 bp, Artificial
  Synthetic oligonucleotide
ctgaggttttgcgttcactgatataggtcttacgttcactaacatgggtcataac

SEQ ID NO: 288803 - DNA, 55 bp, Artificial
  Synthetic oligonucleotide
ctgagggcaaacgtgagatacagaataggtcctgaagatggaatcacagacgttg

SEQ ID NO: 288804 - DNA, 55 bp, Artificial
  Synthetic oligonucleotide
ctgagcagactactagtaagaagctcaggaagtttcgttgcaggcggggtcgtag

SEQ ID NO: 288805 - DNA, 60 bp, Artificial
  Synthetic oligonucleotide
tattcgatctaatgacattggatgatgattagctctatgaggagagggtgataaatttat

SEQ ID NO: 288806 - DNA, 55 bp, Artificial
  Synthetic oligonucleotide
ctgagaaattcgcacagaatgagaatgccatcgtccccgagttctgcgtgatgca

SEQ ID NO: 288807 - DNA, 55 bp, Artificial
  Synthetic oligonucleotide
ctgactgaggtttgaacgagcaaacattagaccatcgctaaagcatctactcatg

SEQ ID NO: 288808 - DNA, 55 bp, Artificial
  Synthetic oligonucleotide
ctgacgtgagcctcccaccgcaggcgaaggggagacacgaaatggcgtggcgacg

SEQ ID NO: 288809 - DNA, 55 bp, Artificial
  Synthetic oligonucleotide
ctgacgcccgtcctcaagagggttaacaagacggatatatacaccttggccgctg

SEQ ID NO: 288810 - DNA, 55 bp, Artificial
  Synthetic oligonucleotide
ctgacgagatgctgcgtgttcttgcgagcagcggagcagacctgacagctgcagc

SEQ ID NO: 288811 - DNA, 55 bp, Artificial
  Synthetic oligonucleotide
ctgacgaacatatgggagacaaatatgcagggaacaacgcaccgagagagtcaca

SEQ ID NO: 288812 - DNA, 55 bp, Artificial
  Synthetic oligonucleotide
ctgacattccattacgataataagtgaaagcccgtttctcatctattgatgttgg

SEQ ID NO: 288813 - DNA, 55 bp, Artificial
  Synthetic oligonucleotide
ctgacatccaacacccctacaaccatactcctacaccttggaaccttattctgac

SEQ ID NO: 288814 - DNA, 55 bp, Artificial
  Synthetic oligonucleotide
ctgacagggccaagcacctacgacgtggggaggtcagagcgatgtatcgcgactc

SEQ ID NO: 288815 - DNA, 55 bp, Artificial
  Synthetic oligonucleotide
ctcgcgcggtgcgacgtttgtgtggggaaatgcataggggagtggcggttgtacc

SEQ ID NO: 288816 - DNA, 57 bp, Artificial
  Synthetic oligonucleotide
tattaatagtgaccatgtagatacgcttaatataccaagggttaatccttttgcacg

SEQ ID NO: 288817 - DNA, 55 bp, Artificial
  Synthetic oligonucleotide
ctcgcgaggttatatcatcctttacgagtgcagatccccgttcacgctgagcagg

SEQ ID NO: 288818 - DNA, 55 bp, Artificial
  Synthetic oligonucleotide
ctcgcaagggacttcgcaaccagaatcctctgcgtgcgttctcagcaatcacgcc

SEQ ID NO: 288819 - DNA, 55 bp, Artificial
  Synthetic oligonucleotide
ctcgcaacacgtctagttaagcagcacctaggagaggggaggtgcatcccgtgtc

SEQ ID NO: 288820 - DNA, 55 bp, Artificial
  Synthetic oligonucleotide
ctcgcaaaaggatgcactccaatttgttctacggagatagctcggcagctccgcg

SEQ ID NO: 288821 - DNA, 55 bp, Artificial
  Synthetic oligonucleotide
ctcgatttggggtgctgggcagattaaccacgcgaatacgtagtggccccttgcc

SEQ ID NO: 288822 - DNA, 55 bp, Artificial
  Synthetic oligonucleotide
ctcgattgccttgaggacgtactcgacaaaaggtacgtaaggaggtggcgattgc

SEQ ID NO: 288823 - DNA, 55 bp, Artificial
  Synthetic oligonucleotide
ctcgatgccaccaaattgaggttcctaagtcataatgatcgtgtattgaggaatg

SEQ ID NO: 288824 - DNA, 55 bp, Artificial
  Synthetic oligonucleotide
ctcgatgcaagaggacagtcacgaagaagcaggtcgcagcgtcaagcggtcactg

SEQ ID NO: 288825 - DNA, 55 bp, Artificial
  Synthetic oligonucleotide
ctcgatgagacgactttgcatcgcctcatcacttctcgtgtgccggagagagacg

SEQ ID NO: 288826 - DNA, 55 bp, Artificial
  Synthetic oligonucleotide
ctcgaggcgccctctcacatgattacgtttgtgagcattggtgtcacgatgggcg

SEQ ID NO: 288827 - DNA, 55 bp, Artificial
  Synthetic oligonucleotide
tattaaatgaacttcaggcgttaacctgtaaagttgagatggaaacagccggaaa

SEQ ID NO: 288828 - DNA, 55 bp, Artificial
  Synthetic oligonucleotide
ctcgaggaagtaaatgtagttgggctcatgggcagtcagatgtaaggcctatgcc

SEQ ID NO: 288829 - DNA, 55 bp, Artificial
  Synthetic oligonucleotide
ctcgagatggtgatgagctacttaccgatggacctgtgctatgtgaagaagtact

SEQ ID NO: 288830 - DNA, 55 bp, Artificial
  Synthetic oligonucleotide
ctcgagactagactgccgcagagctacgacaagcagtcgtccgtgaaagtgcgtc

SEQ ID NO: 288831 - DNA, 55 bp, Artificial
  Synthetic oligonucleotide
ctcgacacctcgcctgcgaccctcttcgctgctactcgtccaatcacacttgccc

SEQ ID NO: 288832 - DNA, 55 bp, Artificial
  Synthetic oligonucleotide
ctcgaacgtcttcaaatgccagcgaggcgacacgcttctttgatcaggaccgcgc

SEQ ID NO: 288833 - DNA, 55 bp, Artificial
  Synthetic oligonucleotide
ctccttttacctacaaacgcacgagtcgtgtatgtcaacgacacgtatagtgcag

SEQ ID NO: 288834 - DNA, 55 bp, Artificial
  Synthetic oligonucleotide
ctccttcaacaaatacgacctcgtcaagagagacatgaacacccgcaaagattcc

SEQ ID NO: 288835 - DNA, 53 bp, Artificial
  Synthetic oligonucleotide
ctccttagtcctccctgcccctttcgcgctcacccttgttacccgtgccttcg

SEQ ID NO: 288836 - DNA, 55 bp, Artificial
  Synthetic oligonucleotide
ctccttaccagcgatgagggtgtacgtgatcgatgtcccagcggtggagaccctg

SEQ ID NO: 288837 - DNA, 55 bp, Artificial
  Synthetic oligonucleotide
ctccttaacaagtacaatgtcacactggggcactctgcttccaagactatacagc

SEQ ID NO: 288838 - DNA, 59 bp, Artificial
  Synthetic oligonucleotide
gagctatttatgttatggcttatatgggttatttagtttgaggtcaccatatgtattta

SEQ ID NO: 288839 - DNA, 55 bp, Artificial
  Synthetic oligonucleotide
ctcctgatagcaagatggaagcctatgtacgactagtgtggtgtcggaaaagggg

SEQ ID NO: 288840 - DNA, 55 bp, Artificial
  Synthetic oligonucleotide
ctccgtttgtgaaggaggtgtatccctcatcgttctcgtgccagtcgtgtcttgc

SEQ ID NO: 288841 - DNA, 55 bp, Artificial
  Synthetic oligonucleotide
ctccgttccctctttcgtgtacatgtagacaaacttcttctgcgcgactgccgtc

SEQ ID NO: 288842 - DNA, 55 bp, Artificial
  Synthetic oligonucleotide
ctccgggtggtagtcgtggtgggtcgagtggcgttcggctcatgctttggaaacg

SEQ ID NO: 288843 - DNA, 55 bp, Artificial
  Synthetic oligonucleotide
ctccggcctctctctcgcgtgcacactcactcgaagtactttgtgcctacccctg

SEQ ID NO: 288844 - DNA, 55 bp, Artificial
  Synthetic oligonucleotide
ctccggagcttcaacgtcagaggatttcatctacacttcacgttcgtaaaccgaa

SEQ ID NO: 288845 - DNA, 55 bp, Artificial
  Synthetic oligonucleotide
ctccgctccgcatcgaacacactgccacgtatgcggtgagtggctgcttaccact

SEQ ID NO: 288846 - DNA, 55 bp, Artificial
  Synthetic oligonucleotide
ctccgcccctgactggagtcttattcggtatagtctaggccatgtagtgtctctg

SEQ ID NO: 288847 - DNA, 55 bp, Artificial
  Synthetic oligonucleotide
ctccgccactggcgccccgcaccctgctaacgaaaaggacgtcaatccgctttct

SEQ ID NO: 288848 - DNA, 55 bp, Artificial
  Synthetic oligonucleotide
ctccgacgggaaacgttacatttgtcacctcgataaactccatgttgtccgcgcc

SEQ ID NO: 288849 - DNA, 60 bp, Artificial
  Synthetic oligonucleotide
gcttctaacattccatttgcttataactgtatggacataacctccaggcaaagataatga

SEQ ID NO: 288850 - DNA, 60 bp, Artificial
  Synthetic oligonucleotide
tatgtgtacccgagcacttgcatagctctcacaaatcttggggttagatcggcttcatcg

SEQ ID NO: 288851 - DNA, 55 bp, Artificial
  Synthetic oligonucleotide
ctccgaccgccataaactcgacactgatctgcatcatgcatgactatcatgcctg

SEQ ID NO: 288852 - DNA, 55 bp, Artificial
  Synthetic oligonucleotide
ctctcgttgccattgcacatgatgcattccgacacaagacgaggagcgacaacca

SEQ ID NO: 288853 - DNA, 55 bp, Artificial
  Synthetic oligonucleotide
ctctcgtgttacgtgacaatctgcttagtgcaggataccacacagtgcccgctcg

SEQ ID NO: 288854 - DNA, 55 bp, Artificial
  Synthetic oligonucleotide
ctctcgggtgtgacgtaccctctgttcagcattggcgcggtgtagggcaagcgag

SEQ ID NO: 288855 - DNA, 55 bp, Artificial
  Synthetic oligonucleotide
ctctccggtcgctgcttccccgtcacctttcccggtagtgtatctctcgccagac

SEQ ID NO: 288856 - DNA, 55 bp, Artificial
  Synthetic oligonucleotide
ctctcccgtggtgtgaccgggcaccctctgctactaccgctatagccctctccat

SEQ ID NO: 288857 - DNA, 55 bp, Artificial
  Synthetic oligonucleotide
ctctcagcacagtaagttcgaccatcggttctgatatgaaggtcaaggtttcgat

SEQ ID NO: 288858 - DNA, 55 bp, Artificial
  Synthetic oligonucleotide
ctctcactcgtacgccaaacaagcgcatatgtatgtgtggcatgtcgtcactctc

SEQ ID NO: 288859 - DNA, 55 bp, Artificial
  Synthetic oligonucleotide
ctctcaagtctagcaacacgccctaagctcgcagggtcgtgctttctaacgaggc

SEQ ID NO: 288860 - DNA, 55 bp, Artificial
  Synthetic oligonucleotide
ctctatctgagcgtgcactgaggtggtactgccacccttaatcgtgtcgtcgtcg

SEQ ID NO: 288861 - DNA, 59 bp, Artificial
  Synthetic oligonucleotide
tagttaataagtagtatctaatctaatattggtgatttgagtgaagttgacacaaggta

SEQ ID NO: 288862 - DNA, 55 bp, Artificial
  Synthetic oligonucleotide
ctctactggttgttgtaattccccgatttcatgcgatgatgatcatgcttgtacc

SEQ ID NO: 288863 - DNA, 55 bp, Artificial
  Synthetic oligonucleotide
ctctacgactcgtagtgttaccagatactatgtacttttctccagattagactct

SEQ ID NO: 288864 - DNA, 55 bp, Artificial
  Synthetic oligonucleotide
ctctaacttcctccacatgctcaggctttcaggggccaatcttctgcgggaggta

SEQ ID NO: 288865 - DNA, 55 bp, Artificial
  Synthetic oligonucleotide
ctcgtttgaagtggaagtgcatgcaacgaggactgcatacgcgaagaacctcccc

SEQ ID NO: 288866 - DNA, 55 bp, Artificial
  Synthetic oligonucleotide
ctcgttcgcgtaagagacgacacggttccctggattcgagaggaaggcgtctgtg

SEQ ID NO: 288867 - DNA, 55 bp, Artificial
  Synthetic oligonucleotide
ctcgttattagtagcagtgctgtcgtcttctctgcacacgcgcctgtctccttcc

SEQ ID NO: 288868 - DNA, 55 bp, Artificial
  Synthetic oligonucleotide
ctcgttacctttgcccttcggtgggttagtttcaatgtgcaaggcagagcactgg

SEQ ID NO: 288869 - DNA, 55 bp, Artificial
  Synthetic oligonucleotide
ctcgtgcgtgacaacgctatttgtgtgctttgcggaagttccagtggggttgcag

SEQ ID NO: 288870 - DNA, 55 bp, Artificial
  Synthetic oligonucleotide
ctcgtctccctctcgcttgctctgggcaaactgtttggggtaagcgactctgcac

SEQ ID NO: 288871 - DNA, 55 bp, Artificial
  Synthetic oligonucleotide
ctcgtccttatgagatacctcgtacttatgagatacctcgtccttatgagatacc

SEQ ID NO: 288872 - DNA, 60 bp, Artificial
  Synthetic oligonucleotide
gctcggatggacaagggagccgaccacttcagcacctagtggcgaactgaccactaccga

SEQ ID NO: 288873 - DNA, 55 bp, Artificial
  Synthetic oligonucleotide
ctcgtacagctaccagatactatgtactcttctccaggctacactctaccattcg

SEQ ID NO: 288874 - DNA, 55 bp, Artificial
  Synthetic oligonucleotide
ctcgggtgtcacacggggttctcagcattcattgaagaggaaaggtggcgtgcga

SEQ ID NO: 288875 - DNA, 55 bp, Artificial
  Synthetic oligonucleotide
ctcggctgtcatcgtgcgtccttgtttacgatgatgtggtgcctcggttcggcgt

SEQ ID NO: 288876 - DNA, 55 bp, Artificial
  Synthetic oligonucleotide
ctcggattcccgtctctgcaggccgcgccgtcacttgaccaaggccgtgcgatat

SEQ ID NO: 288877 - DNA, 55 bp, Artificial
  Synthetic oligonucleotide
ctcgctgtacgcggccaagagtgtgctcgtgccactttaccacccacctgcacac

SEQ ID NO: 288878 - DNA, 55 bp, Artificial
  Synthetic oligonucleotide
ctcgctgcttctaccgattcttccgcgaagtacacactcgccgacgagccgtgac

SEQ ID NO: 288879 - DNA, 55 bp, Artificial
  Synthetic oligonucleotide
ctcgctgctcgggcgttcggtgccttcacaagagtgctctccgatgttggcgaac

SEQ ID NO: 288880 - DNA, 55 bp, Artificial
  Synthetic oligonucleotide
ctcgctctttctttctgagagctcgccgccacagtctagctcgcaggcacaccca

SEQ ID NO: 288881 - DNA, 55 bp, Artificial
  Synthetic oligonucleotide
ctcgctcttgtgtgccttgactctcgaccccaaatgttcaggctggctatacggt

SEQ ID NO: 288882 - DNA, 55 bp, Artificial
  Synthetic oligonucleotide
ctcgctctgtctgtcgcgcttcatgtggcaaaacagccgctgctagagcatggag

SEQ ID NO: 288883 - DNA, 53 bp, Artificial
  Synthetic oligonucleotide
tagtttttgggagtgataggggccggttttatgaatttaaacgctctgtagag

SEQ ID NO: 288884 - DNA, 55 bp, Artificial
  Synthetic oligonucleotide
ctcgctcccagtgactccgacctcccgaaagtgttcgctcagcaccacaacgacg

SEQ ID NO: 288885 - DNA, 55 bp, Artificial
  Synthetic oligonucleotide
ctcgctatctgacgtaggcgtgtcttctctctttactgtagagttgcaccacgcg

SEQ ID NO: 288886 - DNA, 55 bp, Artificial
  Synthetic oligonucleotide
ctcgcgctaatccgtcaagccttcacgccaccgggaggtatgggtgtcgtctaat

SEQ ID NO: 288887 - DNA, 55 bp, Artificial
  Synthetic oligonucleotide
cggtaatctggagcccaatgaggtgacccgtctcgcacgttggctgaactttgcg

SEQ ID NO: 288888 - DNA, 55 bp, Artificial
  Synthetic oligonucleotide
cggtaagtttagtcttatggacagtaatgcctgtaggtcaaacaagtatagtagc

SEQ ID NO: 288889 - DNA, 55 bp, Artificial
  Synthetic oligonucleotide
cggtaacggtcacacgctgttaataaatcagtccatacaactgtccaagttgcag

SEQ ID NO: 288890 - DNA, 55 bp, Artificial
  Synthetic oligonucleotide
cgggttgggtttctcgctgtgtgtgggtcgggtgcacgtggcttgactctagcag

SEQ ID NO: 288891 - DNA, 55 bp, Artificial
  Synthetic oligonucleotide
cgggttccgatctggcttttatagtgccgctgttgccgcttatgctaccaaggcg

SEQ ID NO: 288892 - DNA, 55 bp, Artificial
  Synthetic oligonucleotide
cgggtgtctacagtcggcgcgcagctatgaattcataccacgttgtaggctcctc

SEQ ID NO: 288893 - DNA, 55 bp, Artificial
  Synthetic oligonucleotide
cgggtgtccataaagattcgtggttctcgtgagtgggcaactcttctttgggccc

SEQ ID NO: 288894 - DNA, 54 bp, Artificial
  Synthetic oligonucleotide
ccaggctggttcaaaaagtcaaagattagccaaaaactggcgagaagggaagtg

SEQ ID NO: 288895 - DNA, 54 bp, Artificial
  Synthetic oligonucleotide
cgggtgcgagagatcctgggttcaattcccggaaaccctcctttatagatagtc

SEQ ID NO: 288896 - DNA, 55 bp, Artificial
  Synthetic oligonucleotide
cgggtctgccccattgaatcagagaaggggagcggttgcacgctaacagttgcgt

SEQ ID NO: 288897 - DNA, 55 bp, Artificial
  Synthetic oligonucleotide
cgggtctgagcttaacaatcgaataaattgcatcggtactagcttcaccaaatgg

SEQ ID NO: 288898 - DNA, 55 bp, Artificial
  Synthetic oligonucleotide
cgggtctactgacgtacgtgtctgacgtacttactgacgtgacgggtgtacgtgt

SEQ ID NO: 288899 - DNA, 55 bp, Artificial
  Synthetic oligonucleotide
cgggtccgtgtctcgtcgcatagatacaaaaggatcgacagagaaacacgccaag

SEQ ID NO: 288900 - DNA, 52 bp, Artificial
  Synthetic oligonucleotide
cgggtattagaagtcagattccgggtttaggaataatgttgtaggggtgtcc

SEQ ID NO: 288901 - DNA, 55 bp, Artificial
  Synthetic oligonucleotide
cgggtatatgagttaaacattcggttggaaataaaaggagcggacgtcatatcac

SEQ ID NO: 288902 - DNA, 55 bp, Artificial
  Synthetic oligonucleotide
cgggtaggtccctgtgaggcacaggtgcacaatgatgcccaagctccagatgtcg

SEQ ID NO: 288903 - DNA, 55 bp, Artificial
  Synthetic oligonucleotide
cgggtactgccctgcgctgtgaacctcggcattctggtgcacgagagatccacgt

SEQ ID NO: 288904 - DNA, 54 bp, Artificial
  Synthetic oligonucleotide
cgggtaaccctgttcacttctcctctctcgcacggggcacagaacgccccaaac

SEQ ID NO: 288905 - DNA, 60 bp, Artificial
  Synthetic oligonucleotide
tataccactatctcatccagataatgctatagttgttaatacatatgttacaccattaca

SEQ ID NO: 288906 - DNA, 55 bp, Artificial
  Synthetic oligonucleotide
cggggtttatttgcgtgattgcaagggcattcctcaagtcaaaaccattactggt

SEQ ID NO: 288907 - DNA, 55 bp, Artificial
  Synthetic oligonucleotide
cggggttgcacaactggcgccgttaggtcaacgctgtcaaagagtagcggagaga

SEQ ID NO: 288908 - DNA, 55 bp, Artificial
  Synthetic oligonucleotide
cggggtgatatgtcaatacccacagaacgatagctacatgtgcgatagctacacg

SEQ ID NO: 288909 - DNA, 55 bp, Artificial
  Synthetic oligonucleotide
cggggtagtgtaaaggttcgcatacagggctcataaccctatggtcttggttcga

SEQ ID NO: 288910 - DNA, 55 bp, Artificial
  Synthetic oligonucleotide
cggggcgctccattttgcatggcgtgctgcaaaagtcgcattctctattgtcgta

SEQ ID NO: 288911 - DNA, 55 bp, Artificial
  Synthetic oligonucleotide
cggggattcctcaccatttgagtaaaggcgctttaggaggatgtgccacctgggg

SEQ ID NO: 288912 - DNA, 55 bp, Artificial
  Synthetic oligonucleotide
cggggatgagcacaaacactgccggaatggcgatgagtggcgtgatgaggtggcc

SEQ ID NO: 288913 - DNA, 55 bp, Artificial
  Synthetic oligonucleotide
cggggagaggcatgcatgaaggatcctcttctccgctaacgtcctacgcgcaggt

SEQ ID NO: 288914 - DNA, 55 bp, Artificial
  Synthetic oligonucleotide
cgggcttagcttgtgtcgcgcgccatagaagacgacatctgccagtaaggcgaac

SEQ ID NO: 288915 - DNA, 55 bp, Artificial
  Synthetic oligonucleotide
cgggctaagtttgcaagtgaaggctcaattacaccgcctctaagtcttaatacta

SEQ ID NO: 288916 - DNA, 58 bp, Artificial
  Synthetic oligonucleotide
atgaccgtaagtaaaatgacgatttgaccataagccctgtgctggaattgaaatttca

SEQ ID NO: 288917 - DNA, 55 bp, Artificial
  Synthetic oligonucleotide
cgggcgacaacctaccagcggtcggtcaaaccactcttcgacgtacacgcagtgg

SEQ ID NO: 288918 - DNA, 55 bp, Artificial
  Synthetic oligonucleotide
cgggccttcatagtgcataggcatgcttgcaaggagtaccagtagagtcactccc

SEQ ID NO: 288919 - DNA, 55 bp, Artificial
  Synthetic oligonucleotide
cgggcctcgtatttctccttggagtgtcttactgtatcagctacctccactttga

SEQ ID NO: 288920 - DNA, 55 bp, Artificial
  Synthetic oligonucleotide
cgggcccatccgacatgcacctagaccaccccttgttacgtgcacgcaagacgtc

SEQ ID NO: 288921 - DNA, 55 bp, Artificial
  Synthetic oligonucleotide
cgtacatccgagatggtttacaaggcgattgggatcgcgattcagcttagccagc

SEQ ID NO: 288922 - DNA, 55 bp, Artificial
  Synthetic oligonucleotide
cgtacagcgcctgaactaaggatccaggtttgcactgtgcaggtaatggaggctc

SEQ ID NO: 288923 - DNA, 55 bp, Artificial
  Synthetic oligonucleotide
cgtacacagggatgatgggtacaatccgaaagatgttgtccgggtagtgccacac

SEQ ID NO: 288924 - DNA, 55 bp, Artificial
  Synthetic oligonucleotide
cgtaagcgaatcgtcgccctcacgtcaggctggcgcacggacgagagcgtgtgat

SEQ ID NO: 288925 - DNA, 54 bp, Artificial
  Synthetic oligonucleotide
cgtaagaccttagttagtcaagttatgacccatgttagtgaacgtaagacctta

SEQ ID NO: 288926 - DNA, 54 bp, Artificial
  Synthetic oligonucleotide
cgtaagacctcaattagtcaacgtaagacctgagttagttaatgtaagacctac

SEQ ID NO: 288927 - DNA, 60 bp, Artificial
  Synthetic oligonucleotide
tatagcaactacaaatgcacaattagtattcgacagctcgaggaatggcaaaggtttaag

SEQ ID NO: 288928 - DNA, 54 bp, Artificial
  Synthetic oligonucleotide
cgtaacgcgtaaacgatcgtcctaactttacgagtccaagtggttgccacacga

SEQ ID NO: 288929 - DNA, 55 bp, Artificial
  Synthetic oligonucleotide
cgtaaaaggagccgtcgtgaacacaggacctgctgacatcgtcgtagacccaccc

SEQ ID NO: 288930 - DNA, 55 bp, Artificial
  Synthetic oligonucleotide
cggttttgcagtagtcatatgggtaacagatgggagggtctcaacagtgccggct

SEQ ID NO: 288931 - DNA, 53 bp, Artificial
  Synthetic oligonucleotide
cggttgggaagccgagcggtagcgcttagtaagttactccctagggttagcta

SEQ ID NO: 288932 - DNA, 55 bp, Artificial
  Synthetic oligonucleotide
cggttggaaatcatatttggacagcatcaaacgaggaatggacaacaacaccgac

SEQ ID NO: 288933 - DNA, 55 bp, Artificial
  Synthetic oligonucleotide
cggttgcggtatcgtggccacttcacgtcttctattctacacgctcaacggtcgc

SEQ ID NO: 288934 - DNA, 55 bp, Artificial
  Synthetic oligonucleotide
cggttccacgatgtaataaaccgatatgtggatccgcacgctcaacaacctctcc

SEQ ID NO: 288935 - DNA, 55 bp, Artificial
  Synthetic oligonucleotide
cggttcagcagaggcaaactggacctaccggaacaaacgaagaaggtcgtgccag

SEQ ID NO: 288936 - DNA, 55 bp, Artificial
  Synthetic oligonucleotide
cggttcacattatcggcctaacgtaagggctatcggccaggtacgatctccaagg

SEQ ID NO: 288937 - DNA, 55 bp, Artificial
  Synthetic oligonucleotide
cggttaccggcacacgagaaacaacagcgaacactgcagacgcgtcatacacacc

SEQ ID NO: 288938 - DNA, 58 bp, Artificial
  Synthetic oligonucleotide
ccagggtaaggcgctactttggcgctggagacgctgaggaagccctacgaggtcagac

SEQ ID NO: 288939 - DNA, 55 bp, Artificial
  Synthetic oligonucleotide
cggtgttggtcgacctgggtccttgacgcagccgtggtgcaaccaaggtagacga

SEQ ID NO: 288940 - DNA, 55 bp, Artificial
  Synthetic oligonucleotide
cggtgtgcgttatcacccaggtaaaggcacatcaacgtcgtggtctccatttagg

SEQ ID NO: 288941 - DNA, 55 bp, Artificial
  Synthetic oligonucleotide
cggtgtctaggtgaatcagctgaggaacacaagcctggagatggcgctagacgag

SEQ ID NO: 288942 - DNA, 55 bp, Artificial
  Synthetic oligonucleotide
cggtggcggtgtgcagtgtcagccgggcgtagttgtccgcttggtgctctcgcaa

SEQ ID NO: 288943 - DNA, 55 bp, Artificial
  Synthetic oligonucleotide
cggtggcacaagcgagtggagtctgtgcgcgtgggacgaatcctgaaatcccatc

SEQ ID NO: 288944 - DNA, 55 bp, Artificial
  Synthetic oligonucleotide
cggtgcgacccacagaaccgaaatcactgagacagagaggggtcagacttgaccg

SEQ ID NO: 288945 - DNA, 55 bp, Artificial
  Synthetic oligonucleotide
cggtgcatagtcacaggatgtcctcgtatccatgctgttaggtaagacgcggcct

SEQ ID NO: 288946 - DNA, 55 bp, Artificial
  Synthetic oligonucleotide
cggtgatgtggagtgtaagcctggacccactctgcaccgtatgcagtcgaggtgc

SEQ ID NO: 288947 - DNA, 55 bp, Artificial
  Synthetic oligonucleotide
cggtcctgtgtacactcaaaacagtcaccaccctaaacccggaatctcacttcta

SEQ ID NO: 288948 - DNA, 55 bp, Artificial
  Synthetic oligonucleotide
cggtccaacagacgagagagaagcacaccgctaaacagggcacgtaatgcacaga

SEQ ID NO: 288949 - DNA, 53 bp, Artificial
  Synthetic oligonucleotide
aactctgggcccagagaagattctactaaagtcggttcggtaggatcggtacg

SEQ ID NO: 288950 - DNA, 55 bp, Artificial
  Synthetic oligonucleotide
cggtatctcacgtagaacaatgggcaaaatccgcaccaagaccgtgaagcgtgcc

SEQ ID NO: 288951 - DNA, 55 bp, Artificial
  Synthetic oligonucleotide
cggtatagcacatcgcaaagagcgtggttgtgtcaatagggtagcattcggaact

SEQ ID NO: 288952 - DNA, 55 bp, Artificial
  Synthetic oligonucleotide
cggtagggtgtccggacgacctgttcatgtctgagtatggccggtatcaggagcg

SEQ ID NO: 288953 - DNA, 55 bp, Artificial
  Synthetic oligonucleotide
cggtactgaaacactaccgataccttgcatggtcatagagttgtcggttcttggt

SEQ ID NO: 288954 - DNA, 55 bp, Artificial
  Synthetic oligonucleotide
cggtacctcaagaagcgactctgctccagcgtagtagtcgcagatccgacctacg

SEQ ID NO: 288955 - DNA, 55 bp, Artificial
  Synthetic oligonucleotide
cggtacaagaaccagtcacagtacaagaaccagtcacagtacaagaaccagtcac

SEQ ID NO: 288956 - DNA, 55 bp, Artificial
  Synthetic oligonucleotide
cggcgcttatccgtcaaggtttcctaagctactggtgtccgcgacgactgctggg

SEQ ID NO: 288957 - DNA, 55 bp, Artificial
  Synthetic oligonucleotide
cggcgctcaaacagagttctcgtgactagagtgctcccgacaagcctttagtagg

SEQ ID NO: 288958 - DNA, 55 bp, Artificial
  Synthetic oligonucleotide
cggcgccaagataagagagacgcactcccaaaagaatcgttgcgctgagcacggc

SEQ ID NO: 288959 - DNA, 55 bp, Artificial
  Synthetic oligonucleotide
cggcgcacgcacacaaacgtggttgttcagacgggtgatcgctgacttcatgtgc

SEQ ID NO: 288960 - DNA, 59 bp, Artificial
  Synthetic oligonucleotide
taagaatattacttagtaatcataataaaacagaatgctaaccttaattgcataggata

SEQ ID NO: 288961 - DNA, 60 bp, Artificial
  Synthetic oligonucleotide
tatcagtagccccacattgatattttagaccatttatggcatgattaacagtttgtccat

SEQ ID NO: 288962 - DNA, 55 bp, Artificial
  Synthetic oligonucleotide
cggcgcacaatccgctgtgccttatgtctgcggtatgtgttgtgaggctgcgggc

SEQ ID NO: 288963 - DNA, 55 bp, Artificial
  Synthetic oligonucleotide
cggcgacgcttcgctaatttcggcgccgcgacaaatggaaaacgaagatccgcga

SEQ ID NO: 288964 - DNA, 55 bp, Artificial
  Synthetic oligonucleotide
cggcctgtgcaatgctgtgccccgtgcgctcatcctcagtgccggagtccacgga

SEQ ID NO: 288965 - DNA, 55 bp, Artificial
  Synthetic oligonucleotide
cggcctctcgagtgcagtctggtgagttgctctctgctacccctcacctcactcg

SEQ ID NO: 288966 - DNA, 55 bp, Artificial
  Synthetic oligonucleotide
cggccatgatcagcatgagatcagctcactacgaatcgtgttggcagtttaacca

SEQ ID NO: 288967 - DNA, 55 bp, Artificial
  Synthetic oligonucleotide
cggccaggacagcattcaagtttgcggtgcacgtcgccgattcttcggtccatcg

SEQ ID NO: 288968 - DNA, 55 bp, Artificial
  Synthetic oligonucleotide
cggcatacgggagtgtatgaggcatgcgacagccagagccacacaagtgcatcac

SEQ ID NO: 288969 - DNA, 55 bp, Artificial
  Synthetic oligonucleotide
cggcaggcattgagtcggaggtacaacacgaatactgaataatgtttctgttggt

SEQ ID NO: 288970 - DNA, 55 bp, Artificial
  Synthetic oligonucleotide
cggcagaggacgccttggcagcataagcggcaacagcggcactataaaagccaga

SEQ ID NO: 288971 - DNA, 55 bp, Artificial
  Synthetic oligonucleotide
cggcactacagccaggatcactgccacactcggaaatagtcttcggttgatgtgc

SEQ ID NO: 288972 - DNA, 59 bp, Artificial
  Synthetic oligonucleotide
atgaatccattgtatcatagatacgtccatattcgcccgaaaaaaaaatttctgagctg

SEQ ID NO: 288973 - DNA, 55 bp, Artificial
  Synthetic oligonucleotide
cggcacgtctccatagcgtaacggtcacttgagggctgcagagcttgcggccacc

SEQ ID NO: 288974 - DNA, 55 bp, Artificial
  Synthetic oligonucleotide
cggcaatgccgatatgtggaacaccacgaccccgtactctgtgggcctcgaagcc

SEQ ID NO: 288975 - DNA, 55 bp, Artificial
  Synthetic oligonucleotide
cggcaaggcgcgtacgatgagcaagtgacacaacgcgaactctgattagtccgcc

SEQ ID NO: 288976 - DNA, 55 bp, Artificial
  Synthetic oligonucleotide
cggcaaggactcaaacggcgcgagacatcggcacacgtaagcaaccggcagttgg

SEQ ID NO: 288977 - DNA, 55 bp, Artificial
  Synthetic oligonucleotide
cggatgtgtacggcgccatcgattcaaaggagcgcctctgcgcgtgtgggaatcg

SEQ ID NO: 288978 - DNA, 55 bp, Artificial
  Synthetic oligonucleotide
cggatggcctattgttcatgagcaagcttacccgctggtagataggtacgtatgc

SEQ ID NO: 288979 - DNA, 55 bp, Artificial
  Synthetic oligonucleotide
cggatggagtttccctcggctgatgtcgacgtcattcgtgatgttttggcgtccg

SEQ ID NO: 288980 - DNA, 55 bp, Artificial
  Synthetic oligonucleotide
cggatcttggaggtaacaggcaacaagtggcaagttgatgtaaactcctcccaag

SEQ ID NO: 288981 - DNA, 55 bp, Artificial
  Synthetic oligonucleotide
cggatacgttacgctggcccgaggttctcagtcgcatgtactcggagggacgtgg

SEQ ID NO: 288982 - DNA, 55 bp, Artificial
  Synthetic oligonucleotide
cggagttatatacagctccactgcattcataaaggcctaagaaggggaacgtaaa

SEQ ID NO: 288983 - DNA, 59 bp, Artificial
  Synthetic oligonucleotide
atgaatatcctgtaacaccaaaagatactgtacaagatgccataataactccagttacc

SEQ ID NO: 288984 - DNA, 55 bp, Artificial
  Synthetic oligonucleotide
cggagtctaagcatccgaggtgcccttagaattgctaccgaacgacacatgttat

SEQ ID NO: 288985 - DNA, 55 bp, Artificial
  Synthetic oligonucleotide
cggaggttcaactcacgagacactccttcacatcgagcagtgtcgaagcgcatgc

SEQ ID NO: 288986 - DNA, 55 bp, Artificial
  Synthetic oligonucleotide
cggaggtcttacatgcgcggcaagtatgcgaccgtgagggtccgcttgtgaggta

SEQ ID NO: 288987 - DNA, 54 bp, Artificial
  Synthetic oligonucleotide
cggagggtcagggttaaacgtgtggtatacgttcttcccatgagaaggtgtcac

SEQ ID NO: 288988 - DNA, 55 bp, Artificial
  Synthetic oligonucleotide
cggaggcgtgaatagctacataattacctctacccaccttagatccctcatccgc

SEQ ID NO: 288989 - DNA, 55 bp, Artificial
  Synthetic oligonucleotide
cggaggcgctctggagacccacgcttgccccaagttctcttctcggcacctgtat

SEQ ID NO: 288990 - DNA, 55 bp, Artificial
  Synthetic oligonucleotide
cggaggaggcaacggacacgagcgcacgcgagtcctctttcgtcagtacagagga

SEQ ID NO: 288991 - DNA, 55 bp, Artificial
  Synthetic oligonucleotide
cgggcagatgttggtgaagaggaggggactaatcataccaaacttatggtgtacg

SEQ ID NO: 288992 - DNA, 55 bp, Artificial
  Synthetic oligonucleotide
cgggcacttcactcacatagacggttacctacgcacgtccatcagagcgcctccg

SEQ ID NO: 288993 - DNA, 54 bp, Artificial
  Synthetic oligonucleotide
cgggatttaatattttacggtgaacatgtgtaagatttcgcgttcttaggttgc

SEQ ID NO: 288994 - DNA, 60 bp, Artificial
  Synthetic oligonucleotide
tatgatgtcgctgcaaaagtagcatcccaagggggtgtgaagcgtgtcacggcagtcgtc

SEQ ID NO: 288995 - DNA, 55 bp, Artificial
  Synthetic oligonucleotide
cgggatcgtcagatggaatgcagttcttgccgcgacccgttgtctgctcgtagtc

SEQ ID NO: 288996 - DNA, 55 bp, Artificial
  Synthetic oligonucleotide
cgggagtcgttgtaaaccttcttgctagcagggatgctttgggagcggctacaga

SEQ ID NO: 288997 - DNA, 55 bp, Artificial
  Synthetic oligonucleotide
cgggagctgttccttccctggctagcatccgcgtaaggggccctctcacctgtgt

SEQ ID NO: 288998 - DNA, 55 bp, Artificial
  Synthetic oligonucleotide
cgggagcgtcgaaaggacaaagcaaccatgcccctagcgcttcagatgcgaacgt

SEQ ID NO: 288999 - DNA, 55 bp, Artificial
  Synthetic oligonucleotide
cgggagagacgtgtgcaaggtgatgtactacgcgatacagctcctctggcttcgc

SEQ ID NO: 289000 - DNA, 54 bp, Artificial
  Synthetic oligonucleotide
cgggacccgaagcaaagggaaaccacagcacagcgtctccgttcgacggtggta

SEQ ID NO: 289001 - DNA, 55 bp, Artificial
  Synthetic oligonucleotide
cgggaagaaggtcctctctttgtgtggaagcgaagagcccaacctcgccgtcaac

SEQ ID NO: 289002 - DNA, 55 bp, Artificial
  Synthetic oligonucleotide
cgggaaagatactctcacatcttcctggtcttggtgtatagtcaagttgatttgc

SEQ ID NO: 289003 - DNA, 55 bp, Artificial
  Synthetic oligonucleotide
cggcttttgctcgcgctaagatcgttccacctaaacgtttcctggcgctcttagg

SEQ ID NO: 289004 - DNA, 55 bp, Artificial
  Synthetic oligonucleotide
cggctttgaatggtacacaatgtagtaccgagacaggtatccgaacgtccgcatg

SEQ ID NO: 289005 - DNA, 58 bp, Artificial
  Synthetic oligonucleotide
tatgcaaccactttaagatatttcactgtagggttcttattctctccattcttactta

SEQ ID NO: 289006 - DNA, 51 bp, Artificial
  Synthetic oligonucleotide
cggcttctacctagctcggaggggacaacgtaagtttccgttccaccgtag

SEQ ID NO: 289007 - DNA, 55 bp, Artificial
  Synthetic oligonucleotide
cggcttccacaagttctgttcgtccctaaggctggggaactcactgcccagccta

SEQ ID NO: 289008 - DNA, 55 bp, Artificial
  Synthetic oligonucleotide
cggcttacgtttgactacagggagtacacgacagatcacgtgctctcgcgttcac

SEQ ID NO: 289009 - DNA, 55 bp, Artificial
  Synthetic oligonucleotide
cggctgttctcctgctcgtctgctagttcaatctcgagattctgtcgcatggagt

SEQ ID NO: 289010 - DNA, 55 bp, Artificial
  Synthetic oligonucleotide
cggctgtgcacgcatctccgagtaccgcgagagcacacgaagcgtctcacactga

SEQ ID NO: 289011 - DNA, 55 bp, Artificial
  Synthetic oligonucleotide
cggctgtcagacttgtcagatcaggagcggctgttacttctgcgtcaccgtagtt

SEQ ID NO: 289012 - DNA, 55 bp, Artificial
  Synthetic oligonucleotide
cggctgatggacattcatgtcacggcgtacccgggtttagttaatcagcacatgc

SEQ ID NO: 289013 - DNA, 55 bp, Artificial
  Synthetic oligonucleotide
cggctgactgtctgcttcgtccgtccgaggcacgagtactgctaggctgatgggt

SEQ ID NO: 289014 - DNA, 55 bp, Artificial
  Synthetic oligonucleotide
cggctctacagcttctggctattccacacctatccgatgtcagacaacgaagaac

SEQ ID NO: 289015 - DNA, 55 bp, Artificial
  Synthetic oligonucleotide
cggctcctcgttcagcgacactttcattaccgcagctccgcagtcatcactctcc

SEQ ID NO: 289016 - DNA, 53 bp, Artificial
  Synthetic oligonucleotide
tatgctggaaccccgggtagtatagggtacggtgacccgacgtaagtattgcg

SEQ ID NO: 289017 - DNA, 55 bp, Artificial
  Synthetic oligonucleotide
cggctatgatcgcgataactgccgcgacggagtgtgtaataaagcgcaaacaggg

SEQ ID NO: 289018 - DNA, 55 bp, Artificial
  Synthetic oligonucleotide
cggctagcgctttcggtcgttggatactttgacgagaactacttccccgcataca

SEQ ID NO: 289019 - DNA, 55 bp, Artificial
  Synthetic oligonucleotide
cggctaccgatgtggctgaagtgcgacctatccacaccatgcaagatctgcatac

SEQ ID NO: 289020 - DNA, 55 bp, Artificial
  Synthetic oligonucleotide
cggctacatctcgtccattcccaactacgattggacgcagcactggtcgtacaag

SEQ ID NO: 289021 - DNA, 55 bp, Artificial
  Synthetic oligonucleotide
cggcgtgtgcaatgaggcaataggcactcctgtgacggattacggagaagacctc

SEQ ID NO: 289022 - DNA, 55 bp, Artificial
  Synthetic oligonucleotide
cggcgtgctacccggcgcactaggccgacaaggggcagtacgcgtggagtctgtt

SEQ ID NO: 289023 - DNA, 55 bp, Artificial
  Synthetic oligonucleotide
cggcgggcacaggacacgcacggaagggcaatcaagccgggtagcttttcctgtt

SEQ ID NO: 289024 - DNA, 55 bp, Artificial
  Synthetic oligonucleotide
cggcgcttcctgacgaccatagatgtggaaacacacgcctcgtggcggggagtag

SEQ ID NO: 289025 - DNA, 55 bp, Artificial
  Synthetic oligonucleotide
cgtggctcattggattcggccccacatgggatcccttggttaggagtgtgctgcg

SEQ ID NO: 289026 - DNA, 55 bp, Artificial
  Synthetic oligonucleotide
cgtggcgcacccacttatcgctcctgaatcggttctcttagccgtcgccgctacg

SEQ ID NO: 289027 - DNA, 56 bp, Artificial
  Synthetic oligonucleotide
gagctactagactccctagtgctgtctttacttttaacgtgaatggtaacttatta

SEQ ID NO: 289028 - DNA, 55 bp, Artificial
  Synthetic oligonucleotide
cgtggcgaaaactctcgtcctggctcgggcgtactataccctacttgattgccag

SEQ ID NO: 289029 - DNA, 55 bp, Artificial
  Synthetic oligonucleotide
cgtggccgacagtgtaaccagcacgttcggttgattgagcgacttaatcacttcc

SEQ ID NO: 289030 - DNA, 55 bp, Artificial
  Synthetic oligonucleotide
cgtggccaatgtacaacagacaccctgtcgagtggactcctcacgaccccgacag

SEQ ID NO: 289031 - DNA, 55 bp, Artificial
  Synthetic oligonucleotide
cgtggcaacaccgcctcttctagtgcgggacctagttcgcgggaaggagtgttgc

SEQ ID NO: 289032 - DNA, 55 bp, Artificial
  Synthetic oligonucleotide
cgtggaagttgtgtggaattgctaattaacatctggatctcttacgaaaggacct

SEQ ID NO: 289033 - DNA, 55 bp, Artificial
  Synthetic oligonucleotide
cgtggaaatagataccctcagtgtcgccaactccaaggaaaagatctccagtctg

SEQ ID NO: 289034 - DNA, 55 bp, Artificial
  Synthetic oligonucleotide
cgtgctgacgaggtgtcgtttggcgatccagtggagttcatacttggccgagtcg

SEQ ID NO: 289035 - DNA, 55 bp, Artificial
  Synthetic oligonucleotide
cgtgcgtgttctcttacgtttcacgtgcgcgacagccctcaagcctgctgtggcg

SEQ ID NO: 289036 - DNA, 55 bp, Artificial
  Synthetic oligonucleotide
cgtgcgtacgctcaagcgggtgcttttctactcactggacccgtccccttcagcg

SEQ ID NO: 289037 - DNA, 55 bp, Artificial
  Synthetic oligonucleotide
cgtgcgcttttgccgcagggactcgagtatgtgtcgggaggatcgtttaactctg

SEQ ID NO: 289038 - DNA, 56 bp, Artificial
  Synthetic oligonucleotide
ctttcaacattgagccaaagcaagtaaaggttaattttcttattgacgcactcgaa

SEQ ID NO: 289039 - DNA, 55 bp, Artificial
  Synthetic oligonucleotide
cgtgcgcttgcgatataccgtcacacgccacgtgtatttcgtgggcttggccttc

SEQ ID NO: 289040 - DNA, 55 bp, Artificial
  Synthetic oligonucleotide
cgtgcgatggataacacgcagttctcggtagagacgcacaccgtttgggtaaccg

SEQ ID NO: 289041 - DNA, 55 bp, Artificial
  Synthetic oligonucleotide
cgtgcgaacagggcgtctgcattaacgttgctgagaacatatcgtgcttctcggc

SEQ ID NO: 289042 - DNA, 55 bp, Artificial
  Synthetic oligonucleotide
cgtgcccacttgaattgtccccttgcggagtgcgcccatgttagcctgccagcag

SEQ ID NO: 289043 - DNA, 55 bp, Artificial
  Synthetic oligonucleotide
cgtgccaccggcctatccctacaacgccttccaacgatatgcagatacatacacg

SEQ ID NO: 289044 - DNA, 55 bp, Artificial
  Synthetic oligonucleotide
cgtgcatacgttggaacagtcgtcgcgcctgaacgaatgcgtaccgagcaggaga

SEQ ID NO: 289045 - DNA, 55 bp, Artificial
  Synthetic oligonucleotide
cgtgcagcacaacgctgcagtgcagatttacgactaccgtaagaagcagccgcgc

SEQ ID NO: 289046 - DNA, 55 bp, Artificial
  Synthetic oligonucleotide
cgtgcacgcacccatagcagcaaggggaacgaaacatattctcaaggcgctcacg

SEQ ID NO: 289047 - DNA, 55 bp, Artificial
  Synthetic oligonucleotide
cgtgcacctcacggcgacagttttgctgcggaagccaaaataagctccacgacga

SEQ ID NO: 289048 - DNA, 55 bp, Artificial
  Synthetic oligonucleotide
cgtgcacagggaagcgccatcacgcgagcactcgtgcacactcgaccaggcgtgc

SEQ ID NO: 289049 - DNA, 60 bp, Artificial
  Synthetic oligonucleotide
gtaacctccaggcaaagaataatgaccgatcaaaatggaatcagatcactatggataact

SEQ ID NO: 289050 - DNA, 55 bp, Artificial
  Synthetic oligonucleotide
cgtgcacaaccgcacgtcctccggactcgccgtaggaacggcatgaaacgtcgaa

SEQ ID NO: 289051 - DNA, 55 bp, Artificial
  Synthetic oligonucleotide
cgtgcaatcctttctcacttcgcatttccctacttcgaacttgttggggtagtgc

SEQ ID NO: 289052 - DNA, 55 bp, Artificial
  Synthetic oligonucleotide
cgtgcaagagacactcgttcacgaagggtgttagttacaaaattgtattcggttc

SEQ ID NO: 289053 - DNA, 55 bp, Artificial
  Synthetic oligonucleotide
cgtgatggggtttggctgcctctgtgcgagagcgaagtagacagtcaagcgtacc

SEQ ID NO: 289054 - DNA, 55 bp, Artificial
  Synthetic oligonucleotide
cgtgatgcgcaattttatggccctccgtccgtggtcagagttcttcgacacgacg

SEQ ID NO: 289055 - DNA, 55 bp, Artificial
  Synthetic oligonucleotide
cgtgagggtgtagttcaggctgacgtacgctgagacaaagtggtgcacgtactcc

SEQ ID NO: 289056 - DNA, 55 bp, Artificial
  Synthetic oligonucleotide
cgtgaggccaatacagtctactactaacgggacaagagtccactgctacttacaa

SEQ ID NO: 289057 - DNA, 55 bp, Artificial
  Synthetic oligonucleotide
cgtgaggcacaccatagccactctgcctgcttgcgtgctggcgcaatacgctacg

SEQ ID NO: 289058 - DNA, 55 bp, Artificial
  Synthetic oligonucleotide
cgtgagctagcagtgactcgcgagatgactcgggaagatcatacctgttgcgcag

SEQ ID NO: 289059 - DNA, 55 bp, Artificial
  Synthetic oligonucleotide
cgttccaaaccacacctagcttaatatgtcttttcggctaatcaaacgcccattg

SEQ ID NO: 289060 - DNA, 54 bp, Artificial
  Synthetic oligonucleotide
gtaacctccaggcaaagaaaatgaccggtcaaaacggaatcaattaactatgga

SEQ ID NO: 289061 - DNA, 55 bp, Artificial
  Synthetic oligonucleotide
cgttcagtaaaggcgttgtatcctcaaataggacagtagtggcggaacgacatca

SEQ ID NO: 289062 - DNA, 50 bp, Artificial
  Synthetic oligonucleotide
cgttcaccaaagggctcaccgaagggttcttcgtaccgatttccaaaccg

SEQ ID NO: 289063 - DNA, 55 bp, Artificial
  Synthetic oligonucleotide
cgttagcgagcgatgtcctttctcgtcctccgcctctctaagccgccccgagtga

SEQ ID NO: 289064 - DNA, 55 bp, Artificial
  Synthetic oligonucleotide
cgttagcacacgcaggcgaacccatttcgaattcgcaacttaagcgcacgtaggc

SEQ ID NO: 289065 - DNA, 55 bp, Artificial
  Synthetic oligonucleotide
cgttacattcgcggatggacgcaaaagccgaagtctcttggcccggcagaaccgc

SEQ ID NO: 289066 - DNA, 55 bp, Artificial
  Synthetic oligonucleotide
cgttaacgatcgcccgcacagagacactgcagtccccagcgaggcacctctgaag

SEQ ID NO: 289067 - DNA, 55 bp, Artificial
  Synthetic oligonucleotide
cgtgttttcggtcaaggccacactgacgcgaagcggattggtagcagagccggcg

SEQ ID NO: 289068 - DNA, 55 bp, Artificial
  Synthetic oligonucleotide
cgtgtttgctctcgctcgctggagcaccagaacacgtgcctagacacacaacgaa

SEQ ID NO: 289069 - DNA, 51 bp, Artificial
  Synthetic oligonucleotide
cgtgtttagagtttcgattaaatcaagggttaattttccggcttcagaaaa

SEQ ID NO: 289070 - DNA, 55 bp, Artificial
  Synthetic oligonucleotide
cgtgtgttcagggatcactccaagcgaactaatgcagcctgccctttacgcactc

SEQ ID NO: 289071 - DNA, 53 bp, Artificial
  Synthetic oligonucleotide
taagaagtccgaaacaccccgaatgcaagtatgccttacaccgggaaggtccc

SEQ ID NO: 289072 - DNA, 57 bp, Artificial
  Synthetic oligonucleotide
ctcacgccatcggatcggcccccctcccccgaaactcctgtgagtgcggcagtggcg

SEQ ID NO: 289073 - DNA, 55 bp, Artificial
  Synthetic oligonucleotide
cgtgtggagttactgcaactgttgatggtgttcgcacctcctcgctacagcggag

SEQ ID NO: 289074 - DNA, 55 bp, Artificial
  Synthetic oligonucleotide
cgtgtggacgtgcacatttaacggaagtgaaaacgtagtgacaacaggttggacg

SEQ ID NO: 289075 - DNA, 55 bp, Artificial
  Synthetic oligonucleotide
cgtgtgcttgccgcagaaaactgtgcatcgacggtgtttgtatcgacgcagcaag

SEQ ID NO: 289076 - DNA, 55 bp, Artificial
  Synthetic oligonucleotide
cgtgtgcaggggtatgcagcagtcgcttctctccgcagtgctgacttggcggtac

SEQ ID NO: 289077 - DNA, 55 bp, Artificial
  Synthetic oligonucleotide
cgtgtgcacatatgctcgcttatgcacatgtacgtgcgtgaagacgaaacaaggg

SEQ ID NO: 289078 - DNA, 55 bp, Artificial
  Synthetic oligonucleotide
cgtgtctttcagacgcccctggggtgcaagcccaaggagtacggagcgcgcatat

SEQ ID NO: 289079 - DNA, 55 bp, Artificial
  Synthetic oligonucleotide
cgtgtcttgcagagcaccaggcgctcagtacgcacttgattggcgtgcccatcca

SEQ ID NO: 289080 - DNA, 55 bp, Artificial
  Synthetic oligonucleotide
cgtgtctgcatgtggcgtcatgttgggcgatttcgaagagaacagagcggggagc

SEQ ID NO: 289081 - DNA, 55 bp, Artificial
  Synthetic oligonucleotide
cgtgtctcccgtggcgtcgtttactcatcccacgaggtaggcagatagcgttcag

SEQ ID NO: 289082 - DNA, 55 bp, Artificial
  Synthetic oligonucleotide
cgtgtcgggcttagagttgattccgcgcgcagtcccctcgcggcattcccaccaa

SEQ ID NO: 289083 - DNA, 59 bp, Artificial
  Synthetic oligonucleotide
acaggtggattattaatgctggtactagacttacatctaaatacccaattctacgatgc

SEQ ID NO: 289084 - DNA, 53 bp, Artificial
  Synthetic oligonucleotide
cgtgtcgaataagtccgaagtgttttcttgcgttttacgcctacgctttcgtg

SEQ ID NO: 289085 - DNA, 55 bp, Artificial
  Synthetic oligonucleotide
cgtgtccctctcactttgtggcgtgcgtcgttgccaggagcggtctcttcgcatc

SEQ ID NO: 289086 - DNA, 55 bp, Artificial
  Synthetic oligonucleotide
cgtgtccccggaggctcacttttcgcggtacgcaagcaacagagggcttgtcagg

SEQ ID NO: 289087 - DNA, 55 bp, Artificial
  Synthetic oligonucleotide
cgtgtacttctacgttggtcaaaccggtgttctgcttttcaagtcgtcttagtga

SEQ ID NO: 289088 - DNA, 55 bp, Artificial
  Synthetic oligonucleotide
cgtgtactgcataaatatgtgaacgttgacgcatgcatcagaactggctgtagct

SEQ ID NO: 289089 - DNA, 55 bp, Artificial
  Synthetic oligonucleotide
cgtgtacgaacgcgtacaacggtgaaggtctcatgtgccggtttgactgtgcagc

SEQ ID NO: 289090 - DNA, 55 bp, Artificial
  Synthetic oligonucleotide
cgtgtaactggcacatgatcatagacgtctataggctatgcagaggcgcacagcc

SEQ ID NO: 289091 - DNA, 55 bp, Artificial
  Synthetic oligonucleotide
cgtggtacggtcagagagagagaccacttagatcatggggagcgtacacacagac

SEQ ID NO: 289092 - DNA, 55 bp, Artificial
  Synthetic oligonucleotide
cgtggtaattttgcacagtcggctaatacaattaatggttggttacgtgatttct

SEQ ID NO: 289093 - DNA, 55 bp, Artificial
  Synthetic oligonucleotide
cgtgggttcctcatgccagacgcgcattcacagaagcactcataaccgcacgacg

SEQ ID NO: 289094 - DNA, 57 bp, Artificial
  Synthetic oligonucleotide
cactgtcaactaccatgttacgacttcgcaccgactgtttcttttacctcacgagtc

SEQ ID NO: 289095 - DNA, 55 bp, Artificial
  Synthetic oligonucleotide
cgtgggcacagtcatttccggtagttgcagagtcacttcgtagttgtagctcggg

SEQ ID NO: 289096 - DNA, 55 bp, Artificial
  Synthetic oligonucleotide
cgtcacaacgaaggatgtaatcgcgggtgtgctcgggtacgtttcaagcagtacc

SEQ ID NO: 289097 - DNA, 55 bp, Artificial
  Synthetic oligonucleotide
cgtcaaccctctcggcaaacctatagatggtcaagctgactatagaagtgcgggc

SEQ ID NO: 289098 - DNA, 55 bp, Artificial
  Synthetic oligonucleotide
cgtcaaaggagctctggcttagttgagagctgcgagagaaggcggtgacaagaga

SEQ ID NO: 289099 - DNA, 55 bp, Artificial
  Synthetic oligonucleotide
cgtattcgcagaggttgctgattgccagagagccatacacttgcacgtccatttt

SEQ ID NO: 289100 - DNA, 55 bp, Artificial
  Synthetic oligonucleotide
cgtatcgagtatcatgatttctgcgtcgcttctgcgtgaggggtcacaggctcgc

SEQ ID NO: 289101 - DNA, 55 bp, Artificial
  Synthetic oligonucleotide
cgtatcgaagctgcgtcggggcggttcggtacaatcaggtgcacatgctcatgag

SEQ ID NO: 289102 - DNA, 55 bp, Artificial
  Synthetic oligonucleotide
cgtatccgtccgcacgcagtatgtgtgcgtgagaagtgtcgtgcgtgtcgacctc

SEQ ID NO: 289103 - DNA, 55 bp, Artificial
  Synthetic oligonucleotide
cgtatcccggttacacttcagtactcacttgtcgtgtcttgaaacgatctacatg

SEQ ID NO: 289104 - DNA, 55 bp, Artificial
  Synthetic oligonucleotide
cgtatccacgatcggtaactgcgcaagcgactcccaggccgggcccaatgcaggg

SEQ ID NO: 289105 - DNA, 57 bp, Artificial
  Synthetic oligonucleotide
ctcacggcccaaggtccaccccgtgtttgcttctaatgacagttattcacgtgacag

SEQ ID NO: 289106 - DNA, 55 bp, Artificial
  Synthetic oligonucleotide
cgtatcatcttccatacatagattaaaacggtagatagggaacaaactgcctcta

SEQ ID NO: 289107 - DNA, 55 bp, Artificial
  Synthetic oligonucleotide
cgtatatggcaatcacgttgtgaaggtagtaccagatgatctacgcctttctcga

SEQ ID NO: 289108 - DNA, 55 bp, Artificial
  Synthetic oligonucleotide
cgtagtgcagggtctcttggtgcctgcggggctagtgccgcatcatggccgctgt

SEQ ID NO: 289109 - DNA, 55 bp, Artificial
  Synthetic oligonucleotide
cgtagtgacgagaaggacaacttctttctccgcggcatcacgtgtcacccgcgcc

SEQ ID NO: 289110 - DNA, 55 bp, Artificial
  Synthetic oligonucleotide
cgtaggggattaccttgcccggtgagggttgggacagtacaagatacatgcgccg

SEQ ID NO: 289111 - DNA, 55 bp, Artificial
  Synthetic oligonucleotide
cgtagggattagcaaactgaacgccatacagtctaaggtgcaccaggtagccctc

SEQ ID NO: 289112 - DNA, 55 bp, Artificial
  Synthetic oligonucleotide
cgtagggatgagaccgcaaaccaaaggtcacacccttattctcctactgtatctc

SEQ ID NO: 289113 - DNA, 55 bp, Artificial
  Synthetic oligonucleotide
cgtaggcctcaagttaactaactcaggtcttacattcactgatataggtcttatg

SEQ ID NO: 289114 - DNA, 55 bp, Artificial
  Synthetic oligonucleotide
cgtaggataggttaccgcggcatgcatacgagcagagatcggtctctccagcagt

SEQ ID NO: 289115 - DNA, 55 bp, Artificial
  Synthetic oligonucleotide
cgtagctgcttgagtaagcacacgaaagatctccaggataatcacatgaacgatc

SEQ ID NO: 289116 - DNA, 60 bp, Artificial
  Synthetic oligonucleotide
ctttatagttcatggagccatggctatataccactattcatagagacaacttgtggtatc

SEQ ID NO: 289117 - DNA, 55 bp, Artificial
  Synthetic oligonucleotide
cgtagcggtcgctcgtgtgctagtcgcattcgcgagaaagagtgacacctgcgcg

SEQ ID NO: 289118 - DNA, 55 bp, Artificial
  Synthetic oligonucleotide
cgtagcgactctccagcaaagacgttactcacttccgcaattcgcatggtgctca

SEQ ID NO: 289119 - DNA, 55 bp, Artificial
  Synthetic oligonucleotide
cgtagcgaatcgagaggtcttccagagcctgcaggactcgacaggaaatcagggg

SEQ ID NO: 289120 - DNA, 55 bp, Artificial
  Synthetic oligonucleotide
cgtagatagcgtagacaacgcgcattgtgcaagtgaggtgccttccaatgtggcc

SEQ ID NO: 289121 - DNA, 55 bp, Artificial
  Synthetic oligonucleotide
cgtagaggtgcacgtcatgtgtttcggcgtgtgagtgagtcgtggctggggtgcc

SEQ ID NO: 289122 - DNA, 55 bp, Artificial
  Synthetic oligonucleotide
cgtagacgactccacgtgctgaggttgacgacagagtgtgggcctgccgtcaacg

SEQ ID NO: 289123 - DNA, 55 bp, Artificial
  Synthetic oligonucleotide
cgtacttatgagatacctcgtccttatgagatgcctcgtccttatgagatgcctc

SEQ ID NO: 289124 - DNA, 55 bp, Artificial
  Synthetic oligonucleotide
cgtactacttgatccatatctactatgatgttctttccttgaggatttatcgctc

SEQ ID NO: 289125 - DNA, 55 bp, Artificial
  Synthetic oligonucleotide
cgtactacggtggctttctgcctcacacgctggactcgtacgaccttgccgtggc

SEQ ID NO: 289126 - DNA, 55 bp, Artificial
  Synthetic oligonucleotide
cgtacgtgcgtgtggggtacgtgtatggcttgccgctgagaggttgcttgggctc

SEQ ID NO: 289127 - DNA, 57 bp, Artificial
  Synthetic oligonucleotide
ggtttcctagctttagtactcatagcgatatgttttactagtgttcaaatttgtgag

SEQ ID NO: 289128 - DNA, 55 bp, Artificial
  Synthetic oligonucleotide
cgtacgccgctgcacatatgcgtctgggaaaacttcgtggagggtgcgaagctgc

SEQ ID NO: 289129 - DNA, 55 bp, Artificial
  Synthetic oligonucleotide
cgtaccaaggagttgatagctgctggatatggcatgggtacggttcaaagctacg

SEQ ID NO: 289130 - DNA, 55 bp, Artificial
  Synthetic oligonucleotide
cgtgagagcgctcgtgacgaagccgtgcctgtacagttctccattcacgtaggta

SEQ ID NO: 289131 - DNA, 55 bp, Artificial
  Synthetic oligonucleotide
cgtgagaaaggcgtcgctgtgctactgctcatccgagcaggatcgtacgagacgt

SEQ ID NO: 289132 - DNA, 55 bp, Artificial
  Synthetic oligonucleotide
cgtcttcaggtggcatagcgttatggaagtctggcttgttacccttcatgacgtg

SEQ ID NO: 289133 - DNA, 55 bp, Artificial
  Synthetic oligonucleotide
cgtctgcttccgtctgcttctccacaaatattaggatgctcccctttgtgtacca

SEQ ID NO: 289134 - DNA, 55 bp, Artificial
  Synthetic oligonucleotide
cgtctgcctcacgcgttgacgggttggggtccactcttcacacatgaacccgtgg

SEQ ID NO: 289135 - DNA, 54 bp, Artificial
  Synthetic oligonucleotide
cgtctgacgtgaagtcgactatgggcccctgtggaacaggtcttttccggaacg

SEQ ID NO: 289136 - DNA, 55 bp, Artificial
  Synthetic oligonucleotide
cgtctctcttcgttcttcgcacctcgctcttgccgtttggtccctgtatcccggg

SEQ ID NO: 289137 - DNA, 55 bp, Artificial
  Synthetic oligonucleotide
cgtctccccttgaaaatgaaagccctacgtgggaaattctgagagctccacagtc

SEQ ID NO: 289138 - DNA, 57 bp, Artificial
  Synthetic oligonucleotide
acagtctttaggaccagtatggttgacctctcgtcaaattgaggcgactaggagaac

SEQ ID NO: 289139 - DNA, 55 bp, Artificial
  Synthetic oligonucleotide
cgtctcagcaggccgttagatgagcaccggacaacgttcctcataaacgcgaaag

SEQ ID NO: 289140 - DNA, 55 bp, Artificial
  Synthetic oligonucleotide
cgtctcaccaaggtcgccgatatgctctccgcgcaccgagtagcctacctcttca

SEQ ID NO: 289141 - DNA, 55 bp, Artificial
  Synthetic oligonucleotide
cgtctacttatgtacatccatttgaatacacgagttggaccgtgcgttgacccac

SEQ ID NO: 289142 - DNA, 55 bp, Artificial
  Synthetic oligonucleotide
cgtctacgagttgctctcgagtcttgtctggactgcgcatgtgagctcatcaagt

SEQ ID NO: 289143 - DNA, 55 bp, Artificial
  Synthetic oligonucleotide
cgtctacactgtcgcggatgtttctgtgttcccgagccatgatgagcccttcgga

SEQ ID NO: 289144 - DNA, 55 bp, Artificial
  Synthetic oligonucleotide
cgtctaatgacggctgaaccctcgtgacattccacgttacagcggcgtcccgtgc

SEQ ID NO: 289145 - DNA, 55 bp, Artificial
  Synthetic oligonucleotide
cgtcgttgccaagggtagagcgcagctgataccgcgggcccagcgcgttttcctt

SEQ ID NO: 289146 - DNA, 55 bp, Artificial
  Synthetic oligonucleotide
cgtcgggttgaccaatccgagcgcagcgtgaaccttgctaaactgtccgaatgcg

SEQ ID NO: 289147 - DNA, 55 bp, Artificial
  Synthetic oligonucleotide
cgtcgctgcctccacttaccctccagcgattgcagtccgtccgtgcggaacaaga

SEQ ID NO: 289148 - DNA, 55 bp, Artificial
  Synthetic oligonucleotide
cgtcgcgccacaattatttgtacatgaagtgcggatacgttgctatcgaatggac

SEQ ID NO: 289149 - DNA, 60 bp, Artificial
  Synthetic oligonucleotide
ctttactacttgcttgtttattcacatcaatacaggtatatgaatacatgagcgcacaat

SEQ ID NO: 289150 - DNA, 55 bp, Artificial
  Synthetic oligonucleotide
cgtcgcgcaaacgccgatgcgtccatgacgttcagtaaagtgttgcacacacccg

SEQ ID NO: 289151 - DNA, 55 bp, Artificial
  Synthetic oligonucleotide
cgtcgcatgctccaccgtagcgttacctggtatgtcgatcatcactgacagccgt

SEQ ID NO: 289152 - DNA, 55 bp, Artificial
  Synthetic oligonucleotide
cgtcgatgccttagaagcagcacaccgtccatcagtaaatctaactctcgccctc

SEQ ID NO: 289153 - DNA, 55 bp, Artificial
  Synthetic oligonucleotide
cgtccgtgaaccacttaacgcaccgccttcccgagactctcggtgtgcactaccc

SEQ ID NO: 289154 - DNA, 55 bp, Artificial
  Synthetic oligonucleotide
cgtccctttcatggtgtctcgcgtgcccaaggacacgtccactaacccgccgttc

SEQ ID NO: 289155 - DNA, 55 bp, Artificial
  Synthetic oligonucleotide
cgtccatacagttataagcaaatggaatgttagaagcaaacactagcggtggaac

SEQ ID NO: 289156 - DNA, 55 bp, Artificial
  Synthetic oligonucleotide
cgtccacacacaccatcacgtcacaacaccgcctgtgtctctgtgccactcgggc

SEQ ID NO: 289157 - DNA, 55 bp, Artificial
  Synthetic oligonucleotide
cgtcattaacgacaagcatcccaagagcatacgagttgcatgcgacaggttagtc

SEQ ID NO: 289158 - DNA, 55 bp, Artificial
  Synthetic oligonucleotide
cgtcatggtctactcaccgcgacatcaggggaggatctggaaaaccccgttgggg

SEQ ID NO: 289159 - DNA, 55 bp, Artificial
  Synthetic oligonucleotide
cgtcataatgcaccccagcacgtgggtcttcgagccgtcctgggagcggcggtaa

SEQ ID NO: 289160 - DNA, 54 bp, Artificial
  Synthetic oligonucleotide
ctcatttagggtctaaagtttgttcataaagacgtctaagacctggcgccattt

SEQ ID NO: 289161 - DNA, 55 bp, Artificial
  Synthetic oligonucleotide
cgtcagtgttcaacgttttgttactatcactagggtgagtgttaccactagttga

SEQ ID NO: 289162 - DNA, 55 bp, Artificial
  Synthetic oligonucleotide
cgtcacctcaactagaagtcgtacattgtgtgccgggccctctctcgaatacccc

SEQ ID NO: 289163 - DNA, 55 bp, Artificial
  Synthetic oligonucleotide
cgtcaccatcaactctacctacgctagggtagaaaaggtgaacttgcttctcggg

SEQ ID NO: 289164 - DNA, 55 bp, Artificial
  Synthetic oligonucleotide
cgtcacatgcgtgtgcgcggtaaggtgcacaagagagcatacacgggtctttgga

SEQ ID NO: 289165 - DNA, 55 bp, Artificial
  Synthetic oligonucleotide
gttgagacctacgttagtgtagttaggacctacatcacttaccttaagacctatg

SEQ ID NO: 289166 - DNA, 55 bp, Artificial
  Synthetic oligonucleotide
gttgagacacccactacaacgatactcgtgccatctcttgcttccgagacgtgtc

SEQ ID NO: 289167 - DNA, 55 bp, Artificial
  Synthetic oligonucleotide
gttgaactcagacagcattccgcagtatatatggccggctgcctatcccatgtgc

SEQ ID NO: 289168 - DNA, 55 bp, Artificial
  Synthetic oligonucleotide
gttgaaaagattatagtaccggtgtgcgtaacaaatacatgcgctggccaaaccc

SEQ ID NO: 289169 - DNA, 55 bp, Artificial
  Synthetic oligonucleotide
gttcttagggtgacccgttatatgcactgcgcctctgcgtttggttgttctacag

SEQ ID NO: 289170 - DNA, 55 bp, Artificial
  Synthetic oligonucleotide
gttctgtcgtaccccattgtagcgaggcacatgcgcacgcgttggttggcgccca

SEQ ID NO: 289171 - DNA, 57 bp, Artificial
  Synthetic oligonucleotide
cactcttcgatcgaatgacaccacaccccaacgcccctgcttccgtagacggctccc

SEQ ID NO: 289172 - DNA, 55 bp, Artificial
  Synthetic oligonucleotide
gttctcgcttccactctcgtacgtgcctcgagacactcacgtcgtctcctcttag

SEQ ID NO: 289173 - DNA, 54 bp, Artificial
  Synthetic oligonucleotide
gttctcctgagtgggatacacgttccccacgaaggaacccacggaatgtccctc

SEQ ID NO: 289174 - DNA, 55 bp, Artificial
  Synthetic oligonucleotide
gttctatacaaaattatgtgtccaatacttggttcaacgttaagatgcgattcgg

SEQ ID NO: 289175 - DNA, 55 bp, Artificial
  Synthetic oligonucleotide
gttcgttttcacagagactacaagttgttacgttctgtcgctcacctcgcacgct

SEQ ID NO: 289176 - DNA, 55 bp, Artificial
  Synthetic oligonucleotide
gttcggtttgataagtgagagaggagagtcctcggcgaggggcgttgttaagggc

SEQ ID NO: 289177 - DNA, 55 bp, Artificial
  Synthetic oligonucleotide
gttcgcctccttgccagtggaaacgcatccgttgatctcgcttagaatgccagag

SEQ ID NO: 289178 - DNA, 55 bp, Artificial
  Synthetic oligonucleotide
gttcgagaggaatggaatgaagcagtgccggtgtaaaccgagactttcgaggcgg

SEQ ID NO: 289179 - DNA, 55 bp, Artificial
  Synthetic oligonucleotide
gttcgaagtgtctgtgcggtctggtgtaataagggctgggtgccctttctatgag

SEQ ID NO: 289180 - DNA, 55 bp, Artificial
  Synthetic oligonucleotide
gttcctacggcggaacaccccttgccgaagtcgcctcctcgcagtttcactcctg

SEQ ID NO: 289181 - DNA, 50 bp, Artificial
  Synthetic oligonucleotide
gttcccatataccagggttaagggtatacatttaggggttagggtttata

SEQ ID NO: 289182 - DNA, 60 bp, Artificial
  Synthetic oligonucleotide
gacttctctattgtctccactaaatgttctatgaaatagacttagctttgaataggaagc

SEQ ID NO: 289183 - DNA, 60 bp, Artificial
  Synthetic oligonucleotide
ctccaaactaactcaggaagcccaatgcgattcctgaggtctctgataataagcggcaat

SEQ ID NO: 289184 - DNA, 55 bp, Artificial
  Synthetic oligonucleotide
gttccacgcagcgtcctgtcacgactccgcttgtgcaagagaacaaatttcctag

SEQ ID NO: 289185 - DNA, 55 bp, Artificial
  Synthetic oligonucleotide
gttcagtcaggttcactgaatatctagatagggttatttctcagcgtaggaggga

SEQ ID NO: 289186 - DNA, 55 bp, Artificial
  Synthetic oligonucleotide
gttcacttgtgtagcatagagttgctcacagcgggtggaagggagcgaaactggt

SEQ ID NO: 289187 - DNA, 55 bp, Artificial
  Synthetic oligonucleotide
gttcacagaacgtagatcttgcgtgcacgggcttgtttcaaggacaagtgaaagc

SEQ ID NO: 289188 - DNA, 55 bp, Artificial
  Synthetic oligonucleotide
gttcaagctcgtctagtaggtttagctcactttgctgtaggttacattgtaactt

SEQ ID NO: 289189 - DNA, 55 bp, Artificial
  Synthetic oligonucleotide
gttatctgatgggagcaacaaaccttacaaatgtaaagttagatcgcctgcactt

SEQ ID NO: 289190 - DNA, 55 bp, Artificial
  Synthetic oligonucleotide
gttatcatgtgtatatagaggaccttgggttttaccatcctttctggcttttaga

SEQ ID NO: 289191 - DNA, 55 bp, Artificial
  Synthetic oligonucleotide
gttatagttgttgtatgcgaatagtgaactgggtgtcttgtttggagttgccgcg

SEQ ID NO: 289192 - DNA, 55 bp, Artificial
  Synthetic oligonucleotide
gttatagtgccacttccatgcaattggcttcatgtgggtcgatgtgcttagctca

SEQ ID NO: 289193 - DNA, 55 bp, Artificial
  Synthetic oligonucleotide
gttatagagatcgcattattcgcataaagcacctatgtggccccgaaagcaggac

SEQ ID NO: 289194 - DNA, 60 bp, Artificial
  Synthetic oligonucleotide
ctccaggcaaagaataatgaccgatcaaaatggaatcagttaactatggatagctgatac

SEQ ID NO: 289195 - DNA, 55 bp, Artificial
  Synthetic oligonucleotide
gttaggagaccccaactgaatagacgggctagccacatgtaacttcactgggcgg

SEQ ID NO: 289196 - DNA, 55 bp, Artificial
  Synthetic oligonucleotide
gttagccaggctcgctgcgactacgaagtggagaacgaacttgaggagatgcgga

SEQ ID NO: 289197 - DNA, 55 bp, Artificial
  Synthetic oligonucleotide
gttagaggccatggcgttctatttcgttcatcgagtcccgtcacgaagagactta

SEQ ID NO: 289198 - DNA, 55 bp, Artificial
  Synthetic oligonucleotide
gttacttggcgataatcaagttcgtgcggtatctatgagtactaccgacggtata

SEQ ID NO: 289199 - DNA, 55 bp, Artificial
  Synthetic oligonucleotide
gttacttgaccaacctgctaatacaacaccgtaaacacctaaggacgagatagcg

SEQ ID NO: 289200 - DNA, 55 bp, Artificial
  Synthetic oligonucleotide
gttacggaagggaacgtgctcacgtcgaccattggcctgctcactaagcgccata

SEQ ID NO: 289201 - DNA, 54 bp, Artificial
  Synthetic oligonucleotide
taacttacgaaacttcgctcagaaaacctgcggtccttaactttctaggacagc

SEQ ID NO: 289202 - DNA, 54 bp, Artificial
  Synthetic oligonucleotide
taactgcgtaccttactggggtcgtcccgacgcaccttactcccacgtggcacg

SEQ ID NO: 289203 - DNA, 55 bp, Artificial
  Synthetic oligonucleotide
taacgaacagctccgatatctttgcagagagcgacgtatccgtctcgtccattcc

SEQ ID NO: 289204 - DNA, 55 bp, Artificial
  Synthetic oligonucleotide
taaccactaattacgaatcatccaagaattgtttaccattctcaggtccggtccg

SEQ ID NO: 289205 - DNA, 56 bp, Artificial
  Synthetic oligonucleotide
ggttcggtctatcattttccggttcggtaataagatcacatgttttatagttcatg

SEQ ID NO: 289206 - DNA, 55 bp, Artificial
  Synthetic oligonucleotide
taacatatcagccaatgtgaggcatcataaaatagtaagtaccttcacctcagct

SEQ ID NO: 289207 - DNA, 55 bp, Artificial
  Synthetic oligonucleotide
taacagagctgggaggtatgaggaggcctatcgttagtccgaccgcagagttgtc

SEQ ID NO: 289208 - DNA, 55 bp, Artificial
  Synthetic oligonucleotide
taacaataacgtcagatcgacttacaacgtcttgacgagtagccataattgtgca

SEQ ID NO: 289209 - DNA, 53 bp, Artificial
  Synthetic oligonucleotide
taacaagaggacttggtcctggtcgtttatcttgtacaaaaggacttttatcg

SEQ ID NO: 289210 - DNA, 55 bp, Artificial
  Synthetic oligonucleotide
taaatctaagcactggtcctcgtctaatgagccacaaccactcattcttaaccag

SEQ ID NO: 289211 - DNA, 55 bp, Artificial
  Synthetic oligonucleotide
taaatccgcgaaaggtgggaattgaggcaatggtcctggcattcccgaacttggc

SEQ ID NO: 289212 - DNA, 55 bp, Artificial
  Synthetic oligonucleotide
taaactagaggttggtatgttggactatcttgtactgttgctccattcagttctt

SEQ ID NO: 289213 - DNA, 55 bp, Artificial
  Synthetic oligonucleotide
taaaatactctacagttccacagacttgctgcgtatacgttcacgaagtatgaac

SEQ ID NO: 289214 - DNA, 55 bp, Artificial
  Synthetic oligonucleotide
gttttgcttcacacttcggctacggtatctacctcagtatcagagacctccgcaa

SEQ ID NO: 289215 - DNA, 55 bp, Artificial
  Synthetic oligonucleotide
gttttcgtcgcagtctaatgtccaactacggtcgataatcgagaggtatgatgag

SEQ ID NO: 289216 - DNA, 60 bp, Artificial
  Synthetic oligonucleotide
ggttcggtctataattttcctgttctgtaattagatcacatgctttatagttcatagagc

SEQ ID NO: 289217 - DNA, 55 bp, Artificial
  Synthetic oligonucleotide
gttttaacctcctgtagtacgcctcactgagtgtctcgcgttggcgtgcgtttga

SEQ ID NO: 289218 - DNA, 55 bp, Artificial
  Synthetic oligonucleotide
gtttgtgaggacgccaatgcagcgaccgttccacaaggtaatgactactgtcgtg

SEQ ID NO: 289219 - DNA, 55 bp, Artificial
  Synthetic oligonucleotide
gttgatcccaccggctgccccgctattgtcaagtactcggagcgtgaagcccaca

SEQ ID NO: 289220 - DNA, 55 bp, Artificial
  Synthetic oligonucleotide
gttgcaccaaagtataaattgcacctagttgcaccaaagtataaattgcacctag

SEQ ID NO: 289221 - DNA, 55 bp, Artificial
  Synthetic oligonucleotide
gttgccgaggggtgcatagttatcgactacccttttgaaggatacggcaagatcg

SEQ ID NO: 289222 - DNA, 55 bp, Artificial
  Synthetic oligonucleotide
gttggagacatcgtctgtggaatcgtgccccggcctcagttcgagattgcggaca

SEQ ID NO: 289223 - DNA, 55 bp, Artificial
  Synthetic oligonucleotide
gttgtagttttactgacggtactccacagttgtcatcgggcgcttggtaaggagg

SEQ ID NO: 289224 - DNA, 55 bp, Artificial
  Synthetic oligonucleotide
gttgtatctatcaaattattgggatcatgtgagtttgacgcattagaggcgcccc

SEQ ID NO: 289225 - DNA, 55 bp, Artificial
  Synthetic oligonucleotide
gttgtcttttattcgtcttctgcgcctctcacacgtccacagcgctagccgggtg

SEQ ID NO: 289226 - DNA, 55 bp, Artificial
  Synthetic oligonucleotide
gttgtgaggcaattggtcactctgtaacatgtactgctatgatttgctcgcttcg

SEQ ID NO: 289227 - DNA, 60 bp, Artificial
  Synthetic oligonucleotide
acatattctaagagctttagctatgagtagttatgtatacctaagtcttacatggactac

SEQ ID NO: 289228 - DNA, 55 bp, Artificial
  Synthetic oligonucleotide
gttgtggttacattcaagtatgcgctggcatcttacgagatccacgtaaatgtaa

SEQ ID NO: 289229 - DNA, 55 bp, Artificial
  Synthetic oligonucleotide
gtttacatgcgaagccctatttagcatcgaagttgctgatatccatttgtggagg

SEQ ID NO: 289230 - DNA, 55 bp, Artificial
  Synthetic oligonucleotide
gtttacgtcgtgtgcgtgctcgtgtgtacggtgaacaatgtcactgtagaagacg

SEQ ID NO: 289231 - DNA, 55 bp, Artificial
  Synthetic oligonucleotide
gtttagtgttcagggccacttacgaggttgttgtcgtcaccttgtggttgctata

SEQ ID NO: 289232 - DNA, 55 bp, Artificial
  Synthetic oligonucleotide
gtttccgctcttccacacatcaggctccaaatacgaagggcacgcagatgctccc

SEQ ID NO: 289233 - DNA, 54 bp, Artificial
  Synthetic oligonucleotide
gtttgactaccttaccacttactgacggtgaaacttccacgactggtttggatg

SEQ ID NO: 289234 - DNA, 55 bp, Artificial
  Synthetic oligonucleotide
gtttgcactcacctattcgcaccgaagcgtcctcacagacagcacactttcgtgc

SEQ ID NO: 289235 - DNA, 55 bp, Artificial
  Synthetic oligonucleotide
gtttggaagacgcggcactggtgtgttgctctcgcctagaagtgaataaagacgc

SEQ ID NO: 289236 - DNA, 55 bp, Artificial
  Synthetic oligonucleotide
gtttggacttcgttggcaagtgagcaagcggtgacgccccaggatatgtccgcgc

SEQ ID NO: 289237 - DNA, 55 bp, Artificial
  Synthetic oligonucleotide
gtgtcctttgcggagggtgtttccgtactaaaagaggatgaaatgcacgagtggc

SEQ ID NO: 289238 - DNA, 60 bp, Artificial
  Synthetic oligonucleotide
acatccatggctacgccctttttcagtcgccctgcatcaaaagacaatgtaagtcttagc

SEQ ID NO: 289239 - DNA, 55 bp, Artificial
  Synthetic oligonucleotide
gtgtcctctgaaagagggacgcacgtgtccgatgcacctgtcgcctccgcatcac

SEQ ID NO: 289240 - DNA, 55 bp, Artificial
  Synthetic oligonucleotide
gtgtcctattgacaatcggaaagtatgcaagtggagcaatacacaggacgcaagg

SEQ ID NO: 289241 - DNA, 55 bp, Artificial
  Synthetic oligonucleotide
gtgtcccggagctgtatcatgcaccggaggacgcccgcatacacgcagatgagcg

SEQ ID NO: 289242 - DNA, 55 bp, Artificial
  Synthetic oligonucleotide
gtgtccatcctccctaggtcgccaaagatgcctaggagcgtggtgtagaggtgaa

SEQ ID NO: 289243 - DNA, 55 bp, Artificial
  Synthetic oligonucleotide
gtgtcacagtgactcggatgcgtagcccgcccgtctctcacattgcccactgctg

SEQ ID NO: 289244 - DNA, 55 bp, Artificial
  Synthetic oligonucleotide
gtgtattgggcacagtccgttcttggccacgtacttcatgtgctgctcgaccggg

SEQ ID NO: 289245 - DNA, 55 bp, Artificial
  Synthetic oligonucleotide
gtgtagtttccccgtccagtatgtacagcgcaatgccgatcccttcgtgttcacc

SEQ ID NO: 289246 - DNA, 55 bp, Artificial
  Synthetic oligonucleotide
gtgtaggtctcttattagttggacgctgaggtcgattactatcaggccttctagg

SEQ ID NO: 289247 - DNA, 55 bp, Artificial
  Synthetic oligonucleotide
gtgtagcgcatgcaaaggtgcatccatctgcgcggtctttagatgtgctagtctc

SEQ ID NO: 289248 - DNA, 55 bp, Artificial
  Synthetic oligonucleotide
gtgtacgttcaggggtatttgctccagcgctgaagtatgaagctgcacagctata

SEQ ID NO: 289249 - DNA, 58 bp, Artificial
  Synthetic oligonucleotide
ggcttagaaggaagtattgtgataatgttaagtcatggttttgtttcaagcgcattat

SEQ ID NO: 289250 - DNA, 55 bp, Artificial
  Synthetic oligonucleotide
gtgtacactcaaaacagtcaccaccctaaacccggaatctcacttctaacatcca

SEQ ID NO: 289251 - DNA, 55 bp, Artificial
  Synthetic oligonucleotide
gtgtaataccccatcgtatcaccgtcacacttgtcatgtccgcccgggattcgac

SEQ ID NO: 289252 - DNA, 55 bp, Artificial
  Synthetic oligonucleotide
gtgtaacaaactggggtagggatactttgtgcgcagagatccgaagtagctgtgc

SEQ ID NO: 289253 - DNA, 55 bp, Artificial
  Synthetic oligonucleotide
gtggttccctgaccctttcgactcgacagccaccactgcccaaaggactcgagga

SEQ ID NO: 289254 - DNA, 55 bp, Artificial
  Synthetic oligonucleotide
gtggtggccctctctgcgccgctgtcaaagagaatgtgcacgtttacggggacgt

SEQ ID NO: 289255 - DNA, 55 bp, Artificial
  Synthetic oligonucleotide
gtggcgtttcatgctctgacgatccaagtcgattcggtgatcaatttcacggacc

SEQ ID NO: 289256 - DNA, 55 bp, Artificial
  Synthetic oligonucleotide
gtggctacaccgctggaccctcaaggctccgatgtcaagagtctccctaccgtac

SEQ ID NO: 289257 - DNA, 55 bp, Artificial
  Synthetic oligonucleotide
gtggctgatcacgcgaccagttgcctgcatacaccatagacgaatgcagttcgac

SEQ ID NO: 289258 - DNA, 55 bp, Artificial
  Synthetic oligonucleotide
gtggctgcttgactagaagagcgcagttcacgtccattcaccgccgttttagggg

SEQ ID NO: 289259 - DNA, 55 bp, Artificial
  Synthetic oligonucleotide
gtgggaagattgcgtgtgcttgtccgcagaaaatggatccttcgtgtgtgtcctc

SEQ ID NO: 289260 - DNA, 58 bp, Artificial
  Synthetic oligonucleotide
cttgtctgggttcacgtagaggcgcactttttcgtggtgcccgtcaatgacagcgtac

SEQ ID NO: 289261 - DNA, 55 bp, Artificial
  Synthetic oligonucleotide
gtgggaagggtgaggctctgcgtatcacatgcacacatgagcagaacgctacata

SEQ ID NO: 289262 - DNA, 54 bp, Artificial
  Synthetic oligonucleotide
gtgggatgcagggaattagattccgggtttaggagtcagattccgggtttagga

SEQ ID NO: 289263 - DNA, 55 bp, Artificial
  Synthetic oligonucleotide
gtgggcctgtgcacgcttcatatgtcttacgtccgttttgtgtatcttgccggcc

SEQ ID NO: 289264 - DNA, 55 bp, Artificial
  Synthetic oligonucleotide
gtggggaaggatgcccaagctcaattacacctcgactagaatttcctcctcgtgt

SEQ ID NO: 289265 - DNA, 55 bp, Artificial
  Synthetic oligonucleotide
gtgggtaagtacgtgtcgcgccgatgcatatctgagcatatacgcccctgtgtgt

SEQ ID NO: 289266 - DNA, 55 bp, Artificial
  Synthetic oligonucleotide
gtgggtggacgcaaatgctgaggtgacgtcttcccttcgccttcgttcctcgtgt

SEQ ID NO: 289267 - DNA, 55 bp, Artificial
  Synthetic oligonucleotide
gtggtacaatgctagcttttagtctagtaccagaaccaatgttaatacctatggt

SEQ ID NO: 289268 - DNA, 55 bp, Artificial
  Synthetic oligonucleotide
gtggtagatgtagaaacgaaagtggtagatgtagaaacgaaagtggtagatgtag

SEQ ID NO: 289269 - DNA, 55 bp, Artificial
  Synthetic oligonucleotide
gtggtagtcgtcgaaagacactccgagctttcgggagcaatgcagaagtccgggg

SEQ ID NO: 289270 - DNA, 55 bp, Artificial
  Synthetic oligonucleotide
gtggtatctctctcgatttccagatgttgagttactaagaggattctctccacac

SEQ ID NO: 289271 - DNA, 60 bp, Artificial
  Synthetic oligonucleotide
acatctctaatgtccatttctcctgtagcaatcgatgttatagtcctaggtctattagta

SEQ ID NO: 289272 - DNA, 55 bp, Artificial
  Synthetic oligonucleotide
gtggtctgcccatgtgtgatgtgtgtcagttgagcgcttcatgcgtttcgtcact

SEQ ID NO: 289273 - DNA, 55 bp, Artificial
  Synthetic oligonucleotide
gtggtgcgcttgggctggtgagaaacggaccgtgagacacgtccagtaccagcga

SEQ ID NO: 289274 - DNA, 55 bp, Artificial
  Synthetic oligonucleotide
gttacatggcatgcactcgacggctgataccggctgacagtttatgtggttgcgt

SEQ ID NO: 289275 - DNA, 55 bp, Artificial
  Synthetic oligonucleotide
gttaagtgacgtgcttgtggtgtgtgagccacggtcgttaccacctgcgagggtg

SEQ ID NO: 289276 - DNA, 54 bp, Artificial
  Synthetic oligonucleotide
gttaaagggagcgggagtgtgttaggggcggttggagtatatcacgtattcacc

SEQ ID NO: 289277 - DNA, 55 bp, Artificial
  Synthetic oligonucleotide
gtgtttgggcacgcatggttcgcgtgttgtttgatggagatgctaatcatgaggc

SEQ ID NO: 289278 - DNA, 55 bp, Artificial
  Synthetic oligonucleotide
gtgtttcacatcctgcgtgaatgccggcacagtgtctcacaacgctattccgcgg

SEQ ID NO: 289279 - DNA, 55 bp, Artificial
  Synthetic oligonucleotide
gtgttgtctcgcatgaccatttgtgtattctcacccattacggttgatgcttggg

SEQ ID NO: 289280 - DNA, 55 bp, Artificial
  Synthetic oligonucleotide
gtgttgtattactaagtgcttccgcagtacatgtgtctggatagggctcgcggac

SEQ ID NO: 289281 - DNA, 55 bp, Artificial
  Synthetic oligonucleotide
gtgttgacgaagaaacgtgtgtccagagggaatgcagacggtgcgctgccaccga

SEQ ID NO: 289282 - DNA, 59 bp, Artificial
  Synthetic oligonucleotide
acatcttcgaaaactaaataagtgtctcagagctccgaaattctgagaagctttcaaca

SEQ ID NO: 289283 - DNA, 55 bp, Artificial
  Synthetic oligonucleotide
gtgttcgcggctgtgatggatgttaagttacggcgctggaagtagtacggggccg

SEQ ID NO: 289284 - DNA, 55 bp, Artificial
  Synthetic oligonucleotide
gtgttcccctcgattgaaagtgcggtgacagcggccattggtgtctttggtgggc

SEQ ID NO: 289285 - DNA, 55 bp, Artificial
  Synthetic oligonucleotide
gtgttccagcagctactggacatacccaataggtttagacttgaagttcgctcag

SEQ ID NO: 289286 - DNA, 55 bp, Artificial
  Synthetic oligonucleotide
gtgttatatccgacgtgttgctttgcacttgtgcgtgcctcactgagtttactcg

SEQ ID NO: 289287 - DNA, 55 bp, Artificial
  Synthetic oligonucleotide
gtgttacaggctctagccttgcatttcgatgtcgtgatcgggcaattcaatagcc

SEQ ID NO: 289288 - DNA, 55 bp, Artificial
  Synthetic oligonucleotide
gtgtgtgtggttcaaattatgggacagggtgataggtacacgaagggaaccatgc

SEQ ID NO: 289289 - DNA, 55 bp, Artificial
  Synthetic oligonucleotide
gtgtgtgtgaaggctgagtcgcctctgactatggggtgtcgggtgtgttcagtca

SEQ ID NO: 289290 - DNA, 55 bp, Artificial
  Synthetic oligonucleotide
gtgtgtgtctttgtcgtggctcgctgaaggcagcgtgaggtgggctaacgctccc

SEQ ID NO: 289291 - DNA, 55 bp, Artificial
  Synthetic oligonucleotide
gtgtcgcagggagtgtcgatgacgggtggcggtgtctttagaatcctggaggggc

SEQ ID NO: 289292 - DNA, 55 bp, Artificial
  Synthetic oligonucleotide
gtgtcgccacagagagcacttcgtgcgagtcgtctctcttagactacgatcgcgc

SEQ ID NO: 289293 - DNA, 54 bp, Artificial
  Synthetic oligonucleotide
taactttaataacgtatctattataaaccagaacttctttgacttgccaactcc

SEQ ID NO: 289294 - DNA, 60 bp, Artificial
  Synthetic oligonucleotide
ctcccagccatgtcttgctaacagcttgtacggtaataatatcgtttttggcggctgagc

SEQ ID NO: 289295 - DNA, 55 bp, Artificial
  Synthetic oligonucleotide
gtgtcgtcacgtcacgtctggtcacgagtatattacacgggacgcgcacacatgc

SEQ ID NO: 289296 - DNA, 55 bp, Artificial
  Synthetic oligonucleotide
gtgtctctcgcaatcctcacaaccgtgatgcgtcgacaaccgcaggagtagaccc

SEQ ID NO: 289297 - DNA, 55 bp, Artificial
  Synthetic oligonucleotide
gtgtctgttgtattgttcgctccttgtgtgagacgaggattgaggaggatagtca

SEQ ID NO: 289298 - DNA, 55 bp, Artificial
  Synthetic oligonucleotide
gtgtgaacaggtgtcgatgggtgctgtacgcacggtttctccttcgcgacttgca

SEQ ID NO: 289299 - DNA, 55 bp, Artificial
  Synthetic oligonucleotide
gtgtgacgagggttccgagctccactattacgggctccagcgatggagggccttc

SEQ ID NO: 289300 - DNA, 55 bp, Artificial
  Synthetic oligonucleotide
gtgtgcaacgcggatgtgtatctctctcccgagcacttttcgctgtcagcggtag

SEQ ID NO: 289301 - DNA, 55 bp, Artificial
  Synthetic oligonucleotide
gtgtgcacgcatttcgctctctctaccacgcagcaagtccgcccactgtgcgcac

SEQ ID NO: 289302 - DNA, 55 bp, Artificial
  Synthetic oligonucleotide
gtgtgcacgctgaccgctgcatgatgcgaaaatcgaggcatttgtatgagcccgc

SEQ ID NO: 289303 - DNA, 55 bp, Artificial
  Synthetic oligonucleotide
gtgtgcgctagtcgcaagagcgtagatatatgcgcgtatgagcgtaacggccctc

SEQ ID NO: 289304 - DNA, 55 bp, Artificial
  Synthetic oligonucleotide
gtgtgctacggtagcaactacacgacgtcgcatcgcgttccgggcacccttacgg

SEQ ID NO: 289305 - DNA, 55 bp, Artificial
  Synthetic oligonucleotide
ggttcataataatgtaaactaagatggacttacttaagcagagaaattctaaact

SEQ ID NO: 289306 - DNA, 55 bp, Artificial
  Synthetic oligonucleotide
gtgtgggccgtgcctcggctgttcgtgaggaccactacaatgtgagggtcaccga

SEQ ID NO: 289307 - DNA, 55 bp, Artificial
  Synthetic oligonucleotide
gtgtggggaatgagcgagctttgagttctgccgacgcgtgcgagggccccaaaac

SEQ ID NO: 289308 - DNA, 55 bp, Artificial
  Synthetic oligonucleotide
gtgtggttgtactgacgggcagcttataacataccgcacacgtgattggtccatc

SEQ ID NO: 289309 - DNA, 55 bp, Artificial
  Synthetic oligonucleotide
gtgtgtaccctctcgctctgtgggtccgaaagtgacgtgtagctatcccgcggag

SEQ ID NO: 289310 - DNA, 55 bp, Artificial
  Synthetic oligonucleotide
gtgtgtgaaggtagtgggtatgcaatcgtgataagacgcagcgcatgaaggcaac

SEQ ID NO: 289311 - DNA, 55 bp, Artificial
  Synthetic oligonucleotide
tagtgcacgtgcaccgcagtgctggtggttcggaggttcgcatagctgtgggctc

SEQ ID NO: 289312 - DNA, 55 bp, Artificial
  Synthetic oligonucleotide
tagtgcaaggcggaagaaagacacctatgcaagcaatcgaaaataggataactgt

SEQ ID NO: 289313 - DNA, 55 bp, Artificial
  Synthetic oligonucleotide
tagtagcagtgctgtcgtcttctctgcacacgcgcctgtctccttccttagaccc

SEQ ID NO: 289314 - DNA, 55 bp, Artificial
  Synthetic oligonucleotide
tagtaacagcagaggaagctttaagccacggatttagcggtgtaatgttaagagg

SEQ ID NO: 289315 - DNA, 55 bp, Artificial
  Synthetic oligonucleotide
taggttcatgtaggtactggctggattctcacaaggtgcggcgatgtcctattgg

SEQ ID NO: 289316 - DNA, 60 bp, Artificial
  Synthetic oligonucleotide
cttgggattcgctagttccagattccacgcaaaggctattgccgctctgatcacaagaac

SEQ ID NO: 289317 - DNA, 55 bp, Artificial
  Synthetic oligonucleotide
taggtgtctctgtcagcgctcaggcgaaaggcatatggcttcgtctactttggta

SEQ ID NO: 289318 - DNA, 54 bp, Artificial
  Synthetic oligonucleotide
taggtctgaacttgactaactaaggccttaacctgactaacataggtcttaacg

SEQ ID NO: 289319 - DNA, 55 bp, Artificial
  Synthetic oligonucleotide
taggtctattgtgctccaccggtcctgtacgtgggcctctgtccgcgtgttgggg

SEQ ID NO: 289320 - DNA, 55 bp, Artificial
  Synthetic oligonucleotide
tagggtattgatttgccgcaccgtggttggcgccgtacatggtgccttgctccgt

SEQ ID NO: 289321 - DNA, 54 bp, Artificial
  Synthetic oligonucleotide
taggggccggttttatgaatttaaacgctctgtagaggataaggattgtggccc

SEQ ID NO: 289322 - DNA, 55 bp, Artificial
  Synthetic oligonucleotide
tagggcggtcttcagacgttgccaccttgccaaggccgctccgtagaggctgtct

SEQ ID NO: 289323 - DNA, 55 bp, Artificial
  Synthetic oligonucleotide
taggcgaggagaaagtgcgaggctatgcacgatgggatattacgtgtcagataca

SEQ ID NO: 289324 - DNA, 55 bp, Artificial
  Synthetic oligonucleotide
tagctaggttgtcaagaacccttgcggcattggtcaatcgatcacttgattctcc

SEQ ID NO: 289325 - DNA, 55 bp, Artificial
  Synthetic oligonucleotide
tagcgttcatcggtgtgtgccacccgtacaaggcaaatttggggcgctgcaagcg

SEQ ID NO: 289326 - DNA, 55 bp, Artificial
  Synthetic oligonucleotide
tagcgggtaccacattagcaggtaccacattagctggtaccacattagcaggtac

SEQ ID NO: 289327 - DNA, 60 bp, Artificial
  Synthetic oligonucleotide
ggttatagtcgttctgggcatctagtattagctactcgtgatgatttagtaggtcagtac

SEQ ID NO: 289328 - DNA, 55 bp, Artificial
  Synthetic oligonucleotide
tagcgatacgcgttgctggtacgcctctcgtcttatgggtcatccttcgtgcttg

SEQ ID NO: 289329 - DNA, 55 bp, Artificial
  Synthetic oligonucleotide
tagccgaccctcggggtgctttattaatgcttcggcagacgtatatgtacactga

SEQ ID NO: 289330 - DNA, 55 bp, Artificial
  Synthetic oligonucleotide
tagccaccccagcagagtacttacatgattatattggagcttgcgtacatcttcg

SEQ ID NO: 289331 - DNA, 55 bp, Artificial
  Synthetic oligonucleotide
tagcacatgggaccttcttatacgagcggtgcaccactcccacaaacaaatggac

SEQ ID NO: 289332 - DNA, 55 bp, Artificial
  Synthetic oligonucleotide
tagcacacgcgtgctttcggagacggcatctggtcaccgccactcgccccgacaa

SEQ ID NO: 289333 - DNA, 55 bp, Artificial
  Synthetic oligonucleotide
tagcacacattcccgtctagagaactacggagctgagtttaacaataggtattat

SEQ ID NO: 289334 - DNA, 55 bp, Artificial
  Synthetic oligonucleotide
tagatgtgtgccgcagctaggaggcagatgataccacccaagccgcacgcagcca

SEQ ID NO: 289335 - DNA, 55 bp, Artificial
  Synthetic oligonucleotide
tagatggactctccgagcataggtatttcggatattattacaagtagcgaggact

SEQ ID NO: 289336 - DNA, 55 bp, Artificial
  Synthetic oligonucleotide
tagatatcagtgcaagtctggttccttctggcattaccttctggtgaggtaatgc

SEQ ID NO: 289337 - DNA, 55 bp, Artificial
  Synthetic oligonucleotide
tagaggtacgagagaacagtccatggaggagattagtctcacttgatccatgaac

SEQ ID NO: 289338 - DNA, 51 bp, Artificial
  Synthetic oligonucleotide
ggttaacctttccttttccttacgtactctagctttgaacacgaatatatt

SEQ ID NO: 289339 - DNA, 55 bp, Artificial
  Synthetic oligonucleotide
tagagatacatgcggctggtagcacgaactctatcgatgacgggacgacaatccc

SEQ ID NO: 289340 - DNA, 55 bp, Artificial
  Synthetic oligonucleotide
tagaagtttggcatggtaaacactaagtaccatcagacgagagcccaaaaccctg

SEQ ID NO: 289341 - DNA, 55 bp, Artificial
  Synthetic oligonucleotide
tagaagcggatgctcctcctaacgggagggaatgttccacagaacagcacgcgac

SEQ ID NO: 289342 - DNA, 52 bp, Artificial
  Synthetic oligonucleotide
tagaagcctcagttactccgattcgaaggacgacttttaccgggtcccttta

SEQ ID NO: 289343 - DNA, 55 bp, Artificial
  Synthetic oligonucleotide
tagaaccgtggtgcactcgctttaatataggcatagttttatagggcgatgggag

SEQ ID NO: 289344 - DNA, 55 bp, Artificial
  Synthetic oligonucleotide
tagaaccctcacttctgcctactaccgaaatgcccacgcaattatcttagtatag

SEQ ID NO: 289345 - DNA, 55 bp, Artificial
  Synthetic oligonucleotide
tacttttctccagactacactctacgactcatacagctaccagatactatgtact

SEQ ID NO: 289346 - DNA, 55 bp, Artificial
  Synthetic oligonucleotide
tcaacgtgctagcgctccagctaccacgtgtggcactcgaaccagcgcgctacca

SEQ ID NO: 289347 - DNA, 55 bp, Artificial
  Synthetic oligonucleotide
tcaacctcacagtttgtatcttcaccccgttgcgttgtgagcgggtagagagggg

SEQ ID NO: 289348 - DNA, 55 bp, Artificial
  Synthetic oligonucleotide
tcaacaacagcattgacaaggtactttgctggagatataccgaactcttgagagt

SEQ ID NO: 289349 - DNA, 60 bp, Artificial
  Synthetic oligonucleotide
cactagtcgggcatcgaattagccaaaagcgattatgagacatataacatatgaatccat

SEQ ID NO: 289350 - DNA, 55 bp, Artificial
  Synthetic oligonucleotide
tcaaagactgtgcgggtgcgctcgggtgcttgtacgggacattgcccgacgtgga

SEQ ID NO: 289351 - DNA, 55 bp, Artificial
  Synthetic oligonucleotide
tcaaactgcgactacggccagtacacgactatatgggaccgcctgggtgggtcgt

SEQ ID NO: 289352 - DNA, 55 bp, Artificial
  Synthetic oligonucleotide
tatttggatgcccgcgacacgtcgctcgccctcttcgggtctgcacgacagtctc

SEQ ID NO: 289353 - DNA, 55 bp, Artificial
  Synthetic oligonucleotide
tatttgcgcaaactatcgccgtatgacgcccggtacctggtgtatgggaacatcg

SEQ ID NO: 289354 - DNA, 55 bp, Artificial
  Synthetic oligonucleotide
tattgtgcgctccaaggaccgcagcgctgccctcaaggctcacatcaaccgaggg

SEQ ID NO: 289355 - DNA, 55 bp, Artificial
  Synthetic oligonucleotide
tatgttcactgggaacatggctcagatagatggttcaccgctagcactgtccacg

SEQ ID NO: 289356 - DNA, 55 bp, Artificial
  Synthetic oligonucleotide
tatgtgtcctcaccgttcgccatggcctgtgcgtgtagggccttaatctcaagtg

SEQ ID NO: 289357 - DNA, 55 bp, Artificial
  Synthetic oligonucleotide
tatgtgcattagttatcgcatcgagtttgcccataactgctctactactcacccg

SEQ ID NO: 289358 - DNA, 55 bp, Artificial
  Synthetic oligonucleotide
tatgggcagtggtaagggctataacatttcgatcaatacgaattttgaagcctga

SEQ ID NO: 289359 - DNA, 55 bp, Artificial
  Synthetic oligonucleotide
tatgcggtgtagacactctccacacccgcgtcgggaggactcggtggtgtgacga

SEQ ID NO: 289360 - DNA, 54 bp, Artificial
  Synthetic oligonucleotide
cttgcctaagacctacattatttaccttaagacgtgtgttagtaatattaagac

SEQ ID NO: 289361 - DNA, 55 bp, Artificial
  Synthetic oligonucleotide
tatgccacgcaagactcgcgaatcccacaacgctcgaagcacacctctcttcacg

SEQ ID NO: 289362 - DNA, 55 bp, Artificial
  Synthetic oligonucleotide
tatgcaggcatagggaccccttcagagctccgcacgcgcacaatctccctcatgc

SEQ ID NO: 289363 - DNA, 55 bp, Artificial
  Synthetic oligonucleotide
tatgcaaacagggcacgctaggctggtgagctacgctccgtggctcctcgcaact

SEQ ID NO: 289364 - DNA, 55 bp, Artificial
  Synthetic oligonucleotide
tagtgccttttcgagtgtgtgagctggcccgaacaggcagagcgctttagaatag

SEQ ID NO: 289365 - DNA, 55 bp, Artificial
  Synthetic oligonucleotide
tagtgttgcagggcgtcgggttggtgcagggtcaagactggatgccaacacgggt

SEQ ID NO: 289366 - DNA, 55 bp, Artificial
  Synthetic oligonucleotide
tagttgaggaggcgcggacttgcctcgcgtccgcccagcgttgatgcactgtgtc

SEQ ID NO: 289367 - DNA, 55 bp, Artificial
  Synthetic oligonucleotide
tagttgatggcaattgtataaagtgtcgcgataatgtgctaatcgatggcatggt

SEQ ID NO: 289368 - DNA, 55 bp, Artificial
  Synthetic oligonucleotide
tagttggctaatcgcctgtgttactggcttcatgtaacgtgcccggccacgcaag

SEQ ID NO: 289369 - DNA, 55 bp, Artificial
  Synthetic oligonucleotide
tataagagactgagatatctgtgggtgcagagtgtttactcaattggtctcaacg

SEQ ID NO: 289370 - DNA, 55 bp, Artificial
  Synthetic oligonucleotide
tatacttgagaaatgccactcgaattagatccacggtaaagctactttgcgacga

SEQ ID NO: 289371 - DNA, 57 bp, Artificial
  Synthetic oligonucleotide
acgcccaggacttcctgacgcttaataacgatttctacttccagcagccatattggt

SEQ ID NO: 289372 - DNA, 55 bp, Artificial
  Synthetic oligonucleotide
tatagcgacgagggcggataatgtagcgttaagtgtttccagtgactgtcaggcg

SEQ ID NO: 289373 - DNA, 55 bp, Artificial
  Synthetic oligonucleotide
tataggccgacagtccccaatccccatccttggagtgccacccggacctgacatc

SEQ ID NO: 289374 - DNA, 55 bp, Artificial
  Synthetic oligonucleotide
tatcagcagaggggatgcccatgacggcaatgtagggtggcggcctcacagcgcc

SEQ ID NO: 289375 - DNA, 55 bp, Artificial
  Synthetic oligonucleotide
tatccctctcacgtgtccttactgcccctcagccgcactaattacccctcagccg

SEQ ID NO: 289376 - DNA, 55 bp, Artificial
  Synthetic oligonucleotide
tatcgcgaacctcaatttgtcaaggggaactagtcataacaataccctcattcag

SEQ ID NO: 289377 - DNA, 55 bp, Artificial
  Synthetic oligonucleotide
tatcgctctggaagcaggaggggccgcaaccggccgttcagcactcacggtggag

SEQ ID NO: 289378 - DNA, 55 bp, Artificial
  Synthetic oligonucleotide
tatcggacgagggagacagtaagtgctcaggtacaggaatggacggtccggcgtg

SEQ ID NO: 289379 - DNA, 55 bp, Artificial
  Synthetic oligonucleotide
tatctatttcgcattctcctggaagaagtgcgtgaccgcctcttagtagttctgc

SEQ ID NO: 289380 - DNA, 55 bp, Artificial
  Synthetic oligonucleotide
tatgaatccctacgccaggggtggaaacagcatggagctaaccaacgcaggccaa

SEQ ID NO: 289381 - DNA, 55 bp, Artificial
  Synthetic oligonucleotide
tatgatgggcagcgtgtcagcgtggctcgaacgcatctcacccgaccctcactcc

SEQ ID NO: 289382 - DNA, 60 bp, Artificial
  Synthetic oligonucleotide
acgccactcctgtccaactcaagcgtggctcaaatgctttgagccggtatcgcgactagg

SEQ ID NO: 289383 - DNA, 55 bp, Artificial
  Synthetic oligonucleotide
tacactagagtctggtattcctaagtcagactctctgcaaacttcaacctctgca

SEQ ID NO: 289384 - DNA, 55 bp, Artificial
  Synthetic oligonucleotide
tacacgcaccctagctacgtgatgtcccgtgataagatgcttcatacgatctggg

SEQ ID NO: 289385 - DNA, 55 bp, Artificial
  Synthetic oligonucleotide
tacaccggagaggcggcaggagtccccttcgtcgtggggcgctttcgaaaggaga

SEQ ID NO: 289386 - DNA, 55 bp, Artificial
  Synthetic oligonucleotide
tacacccacgtagtcaaatccggtagcggcaccggcgaaggcagttcgcggccta

SEQ ID NO: 289387 - DNA, 55 bp, Artificial
  Synthetic oligonucleotide
tacacagttagcctagtcgatttcgcttataggttcacacttaagagcggtgtca

SEQ ID NO: 289388 - DNA, 55 bp, Artificial
  Synthetic oligonucleotide
tacacagatctatcggatcgtcacaaggaactaaactccgctatgagttccattc

SEQ ID NO: 289389 - DNA, 55 bp, Artificial
  Synthetic oligonucleotide
tacacacgtacgcaaacgcacccgcccgccctctctcgccgtcgttatgatggac

SEQ ID NO: 289390 - DNA, 55 bp, Artificial
  Synthetic oligonucleotide
tacacacagtagcggacttacggtgtatgttgttggtgtgacggagaatctgagg

SEQ ID NO: 289391 - DNA, 55 bp, Artificial
  Synthetic oligonucleotide
tacacacaaggtactcaacaatatacaaaaggatatcagcgcaaacatgtgatgg

SEQ ID NO: 289392 - DNA, 55 bp, Artificial
  Synthetic oligonucleotide
tacacaaaactgctcgtgcacacaccgttcctgttcccctttgcagctcgtgcac

SEQ ID NO: 289393 - DNA, 58 bp, Artificial
  Synthetic oligonucleotide
gtatatcaatcgagttaacatgctctaccgcctaaacgatattattaccgtacaagcc

SEQ ID NO: 289394 - DNA, 55 bp, Artificial
  Synthetic oligonucleotide
tacaagagcgtagacatgcgtaggggctgtgcattgtgtctgcgtagtgacgaga

SEQ ID NO: 289395 - DNA, 55 bp, Artificial
  Synthetic oligonucleotide
tacaaccacgtaaggctgcatgtcttcgctgtggatcctctcattgagagttctc

SEQ ID NO: 289396 - DNA, 55 bp, Artificial
  Synthetic oligonucleotide
tacaaccaccccacctagtaatagtggtgccatatgtgtgccacccaggagacga

SEQ ID NO: 289397 - DNA, 55 bp, Artificial
  Synthetic oligonucleotide
tacaacagagtatacgtccgacatttcattgctcacatgaatacagcttgagtgg

SEQ ID NO: 289398 - DNA, 55 bp, Artificial
  Synthetic oligonucleotide
taattgcggcgcgccttggctcaaccccacgtgacgactctgctgccctacagac

SEQ ID NO: 289399 - DNA, 55 bp, Artificial
  Synthetic oligonucleotide
taatgcgcaagtgctcactgccgctcacgtacttggacatgacgagtgcaaggtt

SEQ ID NO: 289400 - DNA, 55 bp, Artificial
  Synthetic oligonucleotide
taagaacagctgaatcgagtgatcctgcacacggtaacgaaataatcgtccgtcc

SEQ ID NO: 289401 - DNA, 55 bp, Artificial
  Synthetic oligonucleotide
taagaacctccacggaaaagaagatctacagctactgaagctcacatgcacacag

SEQ ID NO: 289402 - DNA, 55 bp, Artificial
  Synthetic oligonucleotide
taagaccttgacgtgcacgcatttgaggcacacagaagcacgtgtctacgttagg

SEQ ID NO: 289403 - DNA, 55 bp, Artificial
  Synthetic oligonucleotide
taagagggacacaagaagatacaagacccactctcacgaatgtatgtgaagcgtt

SEQ ID NO: 289404 - DNA, 60 bp, Artificial
  Synthetic oligonucleotide
gacttctagtatctggtgttgctagtattatgtcatcactaaacttcctaaccactgtct

SEQ ID NO: 289405 - DNA, 54 bp, Artificial
  Synthetic oligonucleotide
gaaagcgaaagcaatagtctattaaaaactgacgtttgtgcacgtaattttagg

SEQ ID NO: 289406 - DNA, 55 bp, Artificial
  Synthetic oligonucleotide
taagaggggcgatatgggctggcgacgacacctcacacgtgccgtcaagcagagg

SEQ ID NO: 289407 - DNA, 55 bp, Artificial
  Synthetic oligonucleotide
taagatgctttctcaggagttttgtccaatagttgaagctctgcttaagttccta

SEQ ID NO: 289408 - DNA, 55 bp, Artificial
  Synthetic oligonucleotide
taagcacgttaacgctacgtgccgcataagtttggagacgcaagaggtgggacta

SEQ ID NO: 289409 - DNA, 55 bp, Artificial
  Synthetic oligonucleotide
taagccaaaatttgaggcggttcgtaggaaaatttctcgagcgcatattaagtag

SEQ ID NO: 289410 - DNA, 55 bp, Artificial
  Synthetic oligonucleotide
taagcgcaaacagtctgacatcttgcgtttccttatgagagttagatcatgggaa

SEQ ID NO: 289411 - DNA, 55 bp, Artificial
  Synthetic oligonucleotide
taagcgcacgagaaaacgagcatagggtccgcactaacacacaaacgaaggggag

SEQ ID NO: 289412 - DNA, 55 bp, Artificial
  Synthetic oligonucleotide
taaggatatcatgaataacctgttcaaccaactcgatagcagagcggctgatgag

SEQ ID NO: 289413 - DNA, 55 bp, Artificial
  Synthetic oligonucleotide
taagggtcaggatactctacagacgcccactatttgtctccaacgctcgacaaca

SEQ ID NO: 289414 - DNA, 55 bp, Artificial
  Synthetic oligonucleotide
taagtaatggttctctcctcacggagcggtcacaccatatcctgtggtgtggcag

SEQ ID NO: 289415 - DNA, 55 bp, Artificial
  Synthetic oligonucleotide
taagtgtccgtgaactgtaaatggcattgagagtaagaagtacaagacggtggac

SEQ ID NO: 289416 - DNA, 60 bp, Artificial
  Synthetic oligonucleotide
cagatgctctcggggacgaacatgtgttactccgttcctgattcgagccgagagctcttt

SEQ ID NO: 289417 - DNA, 55 bp, Artificial
  Synthetic oligonucleotide
taatcgaggacaagtatgtgtccggagaaatccttatgatgggcacaaaacgact

SEQ ID NO: 289418 - DNA, 55 bp, Artificial
  Synthetic oligonucleotide
taatctcagctacgcgcatggcacagcgatacacatccgcatacacggaatctcg

SEQ ID NO: 289419 - DNA, 54 bp, Artificial
  Synthetic oligonucleotide
tactgtgtataagttaaggcctgaaggattttgtaacccaggtgaccaaaattg

SEQ ID NO: 289420 - DNA, 55 bp, Artificial
  Synthetic oligonucleotide
tactgtgtagtagccgttggtaatgagcagtatacaacggtacagcgtaaccaag

SEQ ID NO: 289421 - DNA, 55 bp, Artificial
  Synthetic oligonucleotide
tactgtgcgtgcagtcagcccgacccgacagtcgagtgaaggtactcgctcgtaa

SEQ ID NO: 289422 - DNA, 55 bp, Artificial
  Synthetic oligonucleotide
tactggcgaggacggggattgtgcttcagggtgagggcatcttatagggaacggc

SEQ ID NO: 289423 - DNA, 55 bp, Artificial
  Synthetic oligonucleotide
tactcctatgctcgcctgtcctccgtctgtgcatacccgcccgtcttgctggcga

SEQ ID NO: 289424 - DNA, 55 bp, Artificial
  Synthetic oligonucleotide
tactccatgaaccctaactcgatggtctgttgtgccggccacttgcagtgtgccc

SEQ ID NO: 289425 - DNA, 55 bp, Artificial
  Synthetic oligonucleotide
tactcatgtgcgacagccatcacggcgcaaagttctttacgtgcttggcggataa

SEQ ID NO: 289426 - DNA, 55 bp, Artificial
  Synthetic oligonucleotide
tactcatctctggcctgtttcggatcacttttcatcagagggtatttaactgaag

SEQ ID NO: 289427 - DNA, 54 bp, Artificial
  Synthetic oligonucleotide
acgctattggattcaacgtccaggacttcctgacgtttaataacgatttctact

SEQ ID NO: 289428 - DNA, 55 bp, Artificial
  Synthetic oligonucleotide
tactcacgcgcggtgttacttactctgaaaccgagactacctctctcgactgctc

SEQ ID NO: 289429 - DNA, 55 bp, Artificial
  Synthetic oligonucleotide
tacgttgctgagttccgctcgagccggggtctatgggcgaacatctactgcccgc

SEQ ID NO: 289430 - DNA, 55 bp, Artificial
  Synthetic oligonucleotide
tacgtgtgcacatatctgaattcgaagtaggcttgacaggccgacgagctaaccc

SEQ ID NO: 289431 - DNA, 55 bp, Artificial
  Synthetic oligonucleotide
tacgtactgacacgcgcaccctcacacacctacttgttcctctcggacgcttcgc

SEQ ID NO: 289432 - DNA, 55 bp, Artificial
  Synthetic oligonucleotide
tacggggcgcgctgtgacagacattcaacgcgacccctcgtgctttggccgtatc

SEQ ID NO: 289433 - DNA, 55 bp, Artificial
  Synthetic oligonucleotide
tacggccacgctcgcctcaccacgcatgcatcctcagagcacacccggcccgctg

SEQ ID NO: 289434 - DNA, 55 bp, Artificial
  Synthetic oligonucleotide
tacggcatggagctagagaaggatcagaagacgtatgagcggtacaaggaggacc

SEQ ID NO: 289435 - DNA, 55 bp, Artificial
  Synthetic oligonucleotide
tacggcagtggctcgggagtatgtggaacgtactgtgacaagcagtccaggtgga

SEQ ID NO: 289436 - DNA, 55 bp, Artificial
  Synthetic oligonucleotide
tacactctcgttcgccacctcagagacgtagtacttttcgtaggtagaggaggtt

SEQ ID NO: 289437 - DNA, 55 bp, Artificial
  Synthetic oligonucleotide
tacagagtacagccgctgctgccgagagcgcaccgagagtgagggacacgccatt

SEQ ID NO: 289438 - DNA, 54 bp, Artificial
  Synthetic oligonucleotide
gtaggggaggtctatggtcatatcgaggacccccccacgtagggccctgggaga

SEQ ID NO: 289439 - DNA, 55 bp, Artificial
  Synthetic oligonucleotide
tacagcccctccgatccgcgtagcgtgcgtgcggtgctagtgcccgtgaacattg

SEQ ID NO: 289440 - DNA, 55 bp, Artificial
  Synthetic oligonucleotide
tacagcggactggagagcgtccgtctgcgcggatgtcggtacctgcgagactact

SEQ ID NO: 289441 - DNA, 55 bp, Artificial
  Synthetic oligonucleotide
tacatcctcaaacacgtcgataagcaacgccatgctacgcctccaagacacgcac

SEQ ID NO: 289442 - DNA, 55 bp, Artificial
  Synthetic oligonucleotide
tacatcgcgtggtggggagtctgcgtgtgctagcgcttgcagagcggcctgacgt

SEQ ID NO: 289443 - DNA, 55 bp, Artificial
  Synthetic oligonucleotide
taccacagacggtacccgcagttctgaagtgccgcgtcagacagcgcagcacacc

SEQ ID NO: 289444 - DNA, 55 bp, Artificial
  Synthetic oligonucleotide
tacccgggtgtgtgcggctgcgtggacggagcgaaaaccagtggtacgagcacat

SEQ ID NO: 289445 - DNA, 54 bp, Artificial
  Synthetic oligonucleotide
taccggaccctaccctagcggtggggagaggctagtttcctgtgggtcgctgaa

SEQ ID NO: 289446 - DNA, 55 bp, Artificial
  Synthetic oligonucleotide
tacctatttggttgacttagctctgtaccagggttacaagctcgcacaccactcc

SEQ ID NO: 289447 - DNA, 55 bp, Artificial
  Synthetic oligonucleotide
tacctcggtgcttcgactgcgtgagtccctagcgaccctgcaagaaggcatgcgg

SEQ ID NO: 289448 - DNA, 55 bp, Artificial
  Synthetic oligonucleotide
tacctctttatcatacctcaccgtcgctacttgtagtctcggatacacggaaccc

SEQ ID NO: 289449 - DNA, 58 bp, Artificial
  Synthetic oligonucleotide
ctagttgagtgcatctactcaaggtacaaatctaggtccactctagttgttaacggtg

SEQ ID NO: 289450 - DNA, 55 bp, Artificial
  Synthetic oligonucleotide
tacctgctgttgctagagaacggaacatacgtgcagctattcctggaatatttgg

SEQ ID NO: 289451 - DNA, 55 bp, Artificial
  Synthetic oligonucleotide
tacgaccactaaaacaaccgagaggcgacgctacgcagagactgtggccacgcgc

SEQ ID NO: 289452 - DNA, 55 bp, Artificial
  Synthetic oligonucleotide
tacgaggcacatccaaacaagccgttgatggacggtctaactgttggcacgcccc

SEQ ID NO: 289453 - DNA, 55 bp, Artificial
  Synthetic oligonucleotide
tacgcgccaactcacatcaacgcatacattccgacatccataccagctcacgcgt

SEQ ID NO: 289454 - DNA, 55 bp, Artificial
  Synthetic oligonucleotide
tacgcgtcttgtgcgagagacgccagctctgcactgtcgtgaaatactccactgc

SEQ ID NO: 289455 - DNA, 55 bp, Artificial
  Synthetic oligonucleotide
gtccagctttagctattacaatagattcagcacagcaattaaacggtagtagaca

SEQ ID NO: 289456 - DNA, 55 bp, Artificial
  Synthetic oligonucleotide
gtccagaactttggcggcgagtagagaagtggaggcggagagctcgctgcaagat

SEQ ID NO: 289457 - DNA, 55 bp, Artificial
  Synthetic oligonucleotide
gtccactcaatgtgtctgcatgccatcccacgtgctgaatcaacttcacactgag

SEQ ID NO: 289458 - DNA, 55 bp, Artificial
  Synthetic oligonucleotide
gtccacggaaagccaagctccacgctactactgcgcttccttcacgatagccccg

SEQ ID NO: 289459 - DNA, 55 bp, Artificial
  Synthetic oligonucleotide
gtccacatctttcgtcgctatgcaacgctccccattttgagggccacgagtgctg

SEQ ID NO: 289460 - DNA, 60 bp, Artificial
  Synthetic oligonucleotide
gtaggcaaatgagtaagagattacatcattcatgatgccaatgagtaccttaaacaagaa

SEQ ID NO: 289461 - DNA, 55 bp, Artificial
  Synthetic oligonucleotide
gtccacacagacgagcctttgactcgtcccaagatacacgcagacacggacgccc

SEQ ID NO: 289462 - DNA, 55 bp, Artificial
  Synthetic oligonucleotide
gtccaacgtgttgtgggtcggcaacctagtcccgtacataacgaatgagaagctg

SEQ ID NO: 289463 - DNA, 55 bp, Artificial
  Synthetic oligonucleotide
gtccaacgatgattatggcagaggaggccttcgatgctatactatgccgagatcg

SEQ ID NO: 289464 - DNA, 55 bp, Artificial
  Synthetic oligonucleotide
gtccaaacccgcgtgaagtcgataggttatgggaagtaacgtccacagcaacgcg

SEQ ID NO: 289465 - DNA, 55 bp, Artificial
  Synthetic oligonucleotide
gtcattgatagaaagggaccaaaatccaagcctccagaaatgccaccttacgagc

SEQ ID NO: 289466 - DNA, 55 bp, Artificial
  Synthetic oligonucleotide
gtcattctacgagtaaccgttaaacctttgtatggcagtacaagcgccgtgggtg

SEQ ID NO: 289467 - DNA, 55 bp, Artificial
  Synthetic oligonucleotide
gtcattcgccagttagctgagcccagaaccgaggtggcgagaggatacggagcac

SEQ ID NO: 289468 - DNA, 55 bp, Artificial
  Synthetic oligonucleotide
gtcattaggatccacgatacagagaaacatgtgcgcagccgtgcacacgtacacg

SEQ ID NO: 289469 - DNA, 55 bp, Artificial
  Synthetic oligonucleotide
gtcatgaataccgcatgtcaggtagcgattcccggacgcttaggttaaacctagc

SEQ ID NO: 289470 - DNA, 55 bp, Artificial
  Synthetic oligonucleotide
gtcatcttccagcctcactatgtgcactccgcctcggttgagaactcaccgctgg

SEQ ID NO: 289471 - DNA, 54 bp, Artificial
  Synthetic oligonucleotide
gtaggatgtatgggatatttgtagtacaccttaattggtttaacttttaatgta

SEQ ID NO: 289472 - DNA, 55 bp, Artificial
  Synthetic oligonucleotide
gtcatcgtattcgtgaaacctttgtgttgtacgatcatgaaattgttgcatcacc

SEQ ID NO: 289473 - DNA, 55 bp, Artificial
  Synthetic oligonucleotide
gtcatacttcgattaactaaggtcttacgttcactgatatacgtcttaactgcac

SEQ ID NO: 289474 - DNA, 55 bp, Artificial
  Synthetic oligonucleotide
gtcatactctgcaagagcactagctattcaggatgtgtagtatcgttagcagtcc

SEQ ID NO: 289475 - DNA, 55 bp, Artificial
  Synthetic oligonucleotide
gtcagtcgccgtaacaaaagcgagggatgttggcaacgtgcactgtaacgatcac

SEQ ID NO: 289476 - DNA, 55 bp, Artificial
  Synthetic oligonucleotide
gtcaggtgtgtcgtgggtatcactatctgtttgtggatcgtctgtaggttcgggt

SEQ ID NO: 289477 - DNA, 55 bp, Artificial
  Synthetic oligonucleotide
gtcagggaagccgacctgtaaacgtgcgtcttcgctctcaacgtgtccactcgct

SEQ ID NO: 289478 - DNA, 55 bp, Artificial
  Synthetic oligonucleotide
gtcaggcgctagaatgcatgctgcatatataagacctggcggtgtcgctcaagat

SEQ ID NO: 289479 - DNA, 55 bp, Artificial
  Synthetic oligonucleotide
gtcagccatgtacttgctaatattctcgcctctcctcgacaccacagatgggccc

SEQ ID NO: 289480 - DNA, 55 bp, Artificial
  Synthetic oligonucleotide
gtcagcatgtgccgataaagggtgcctcttgccaaccactcgtcgctccgtcgct

SEQ ID NO: 289481 - DNA, 55 bp, Artificial
  Synthetic oligonucleotide
gtcagcacgtacgctcacacacgtacccgatagacggagcgcgttcccctccatt

SEQ ID NO: 289482 - DNA, 60 bp, Artificial
  Synthetic oligonucleotide
gtagcttgcacgccattgtgatataattgtatgtgccgtaaaacccgatatagctggttc

SEQ ID NO: 289483 - DNA, 55 bp, Artificial
  Synthetic oligonucleotide
gtcagagcgtctccgatcggcccctgtaggaactcgtatcctatgttttgacgat

SEQ ID NO: 289484 - DNA, 55 bp, Artificial
  Synthetic oligonucleotide
gtcacggaatctctaagagaaaatgcctgatgtttgcactagatgtgtgattttc

SEQ ID NO: 289485 - DNA, 55 bp, Artificial
  Synthetic oligonucleotide
gtcaccgcctctctgatagccctatacagcccgataaatcaactaactcccgcaa

SEQ ID NO: 289486 - DNA, 55 bp, Artificial
  Synthetic oligonucleotide
gtcacagcgcgagtgacgtaccccttcaccacgtaggtgatcttcggaggagtgc

SEQ ID NO: 289487 - DNA, 55 bp, Artificial
  Synthetic oligonucleotide
gtcacaatgttagtcttgataggataattggcaatccttataatgcttggggacc

SEQ ID NO: 289488 - DNA, 55 bp, Artificial
  Synthetic oligonucleotide
gtcaatgtctttcaagtattagcctttggacaacctcaatgggtctgtcagtctc

SEQ ID NO: 289489 - DNA, 55 bp, Artificial
  Synthetic oligonucleotide
gtcgcacatacagtttgatttgctaaacggtttatcatcctgcgttgttgagttt

SEQ ID NO: 289490 - DNA, 55 bp, Artificial
  Synthetic oligonucleotide
gtcgataagggtcaagacgcgcagtgagcacagaggtaccgcgtcgagggcacaa

SEQ ID NO: 289491 - DNA, 55 bp, Artificial
  Synthetic oligonucleotide
gtcgagtgcgtgttttcttacgacgcacccctacggcgttgctctcgcagtcccc

SEQ ID NO: 289492 - DNA, 55 bp, Artificial
  Synthetic oligonucleotide
gtcgagaacgacttggacgtgagttaataggaatgatacaaagcgatagaccagc

SEQ ID NO: 289493 - DNA, 60 bp, Artificial
  Synthetic oligonucleotide
acacttgttcaagcaagaagaacacattatgattacagctcccaagcaaacatttaatat

SEQ ID NO: 289494 - DNA, 55 bp, Artificial
  Synthetic oligonucleotide
gtcgacgccccgtaaactgtcgtaatcatcggaagagctcgtaagtgatatcgat

SEQ ID NO: 289495 - DNA, 55 bp, Artificial
  Synthetic oligonucleotide
gtcgaagcccttcgatttgctgagtctctcactagcgttttcgcatcaacggtcc

SEQ ID NO: 289496 - DNA, 55 bp, Artificial
  Synthetic oligonucleotide
gtcgaacagttctacaaacgagaaaggacgtgtacatcgacgcatgcattgcatg

SEQ ID NO: 289497 - DNA, 55 bp, Artificial
  Synthetic oligonucleotide
gtccttgcctgccgtcaggggtgggttgtagagtgtgtgatagacgcgtcctgac

SEQ ID NO: 289498 - DNA, 55 bp, Artificial
  Synthetic oligonucleotide
gtcctggacactgaatccatgcgcgtgccatatatgctagaacggtcccaggctg

SEQ ID NO: 289499 - DNA, 55 bp, Artificial
  Synthetic oligonucleotide
gtcctgagcgctgtcatttattacccaaattacaacatcgtcagacgtcaagtcc

SEQ ID NO: 289500 - DNA, 55 bp, Artificial
  Synthetic oligonucleotide
gtcctctgcattcgggtgcctccgtctgtgagctcgtgcgtgttatgtgtgtgcg

SEQ ID NO: 289501 - DNA, 55 bp, Artificial
  Synthetic oligonucleotide
gtcctcctcgtagcagctgactgtagccgcgtagaaagactccactgtagggtag

SEQ ID NO: 289502 - DNA, 55 bp, Artificial
  Synthetic oligonucleotide
gtcctcctcacgcatggcgccgtcaaggcatccgtggctgcgtaccacgaatacc

SEQ ID NO: 289503 - DNA, 55 bp, Artificial
  Synthetic oligonucleotide
gtcctccaagacgaaggcaccgctccttgcatcaagaacactgcgatccctcgtg

SEQ ID NO: 289504 - DNA, 54 bp, Artificial
  Synthetic oligonucleotide
ctatacctaaggacgtatgtgccttgcctttgaaaccaactcttttgttagttc

SEQ ID NO: 289505 - DNA, 55 bp, Artificial
  Synthetic oligonucleotide
gtcctagcggcttctatcatgtatacccaccgtgcgcaacgcatagcattagggt

SEQ ID NO: 289506 - DNA, 55 bp, Artificial
  Synthetic oligonucleotide
gtcctactctcgctatgcatcttcgcaggcgcacgagcacagaagagacccgcgg

SEQ ID NO: 289507 - DNA, 55 bp, Artificial
  Synthetic oligonucleotide
gtccatcaagagccccgttctgatatgccctcttgacgcgcccctttcgacgtgc

SEQ ID NO: 289508 - DNA, 55 bp, Artificial
  Synthetic oligonucleotide
gtccatcagtgcgagaattgagttattgccgcttctcgtagacaaaagctggccg

SEQ ID NO: 289509 - DNA, 55 bp, Artificial
  Synthetic oligonucleotide
gtcccacacgacgcgacatctgtgtaagcttattaccagcggcactttgcacgag

SEQ ID NO: 289510 - DNA, 55 bp, Artificial
  Synthetic oligonucleotide
gtcccacttgacagcgggtcgagcgatgtctctcgccaaacaagacgcagtccgc

SEQ ID NO: 289511 - DNA, 55 bp, Artificial
  Synthetic oligonucleotide
gtcccatggagtcatgaggtgcaccttgttgccggaggaaaagagtacctgcaag

SEQ ID NO: 289512 - DNA, 55 bp, Artificial
  Synthetic oligonucleotide
gtcccgaggcgctgaaccttgatgcttggaatttcatgctcagggacttttgaag

SEQ ID NO: 289513 - DNA, 55 bp, Artificial
  Synthetic oligonucleotide
gtcccgcaagttccctccaacgagttttgataaaccctacctcattgttagctgc

SEQ ID NO: 289514 - DNA, 55 bp, Artificial
  Synthetic oligonucleotide
gtccgacacgcagctgaccgcaaggtacccgcagtatagtgttacccataaaagg

SEQ ID NO: 289515 - DNA, 60 bp, Artificial
  Synthetic oligonucleotide
taatgctattatctgatctacactttaatactttattctatgatccaacatttgcaggtg

SEQ ID NO: 289516 - DNA, 60 bp, Artificial
  Synthetic oligonucleotide
taactgttttgtgctccatatgatgatggtaggcacaactgtaacatataagctttagac

SEQ ID NO: 289517 - DNA, 57 bp, Artificial
  Synthetic oligonucleotide
ctataccttaccaatctatttgaacttgaacaaggttccattggaatgagagttcac

SEQ ID NO: 289518 - DNA, 55 bp, Artificial
  Synthetic oligonucleotide
gtccgacgaacttgttggattgcatgttcgcaacactctgtgaaatgctcgtaaa

SEQ ID NO: 289519 - DNA, 55 bp, Artificial
  Synthetic oligonucleotide
gtccgagtgtagcgagacgagggccattcgagccttgtagagtaggagaaggtcg

SEQ ID NO: 289520 - DNA, 55 bp, Artificial
  Synthetic oligonucleotide
gtccgcgccctatgtcctgtctctgcgcccatgcttgtttgtccatggcatgcac

SEQ ID NO: 289521 - DNA, 55 bp, Artificial
  Synthetic oligonucleotide
gtccgggcgaagattgtccgaattcctgaacgcgcactgaccaacctcctggctc

SEQ ID NO: 289522 - DNA, 55 bp, Artificial
  Synthetic oligonucleotide
gtccggtgcaaatctgatgatgggtcgccgaaccctcgaggcgtatgtacgtcgc

SEQ ID NO: 289523 - DNA, 55 bp, Artificial
  Synthetic oligonucleotide
gtccgtaagtagtggcattaagaccataggtgactctggatacattataggggag

SEQ ID NO: 289524 - DNA, 55 bp, Artificial
  Synthetic oligonucleotide
gtccgtccccatatctcaatagaggttgagccctgatatgtatcattgcgggtag

SEQ ID NO: 289525 - DNA, 55 bp, Artificial
  Synthetic oligonucleotide
gtccgtgcagtgacatggtctggttagtggacgaacaaacgtctcggtaatggct

SEQ ID NO: 289526 - DNA, 55 bp, Artificial
  Synthetic oligonucleotide
gtcctaaggtaactaatagaggtcctaactacagcaacataggtctataggtaag

SEQ ID NO: 289527 - DNA, 55 bp, Artificial
  Synthetic oligonucleotide
gtagaagaggtttacgcggagggtcggcgcagtattcaggagacgcggtcctcgc

SEQ ID NO: 289528 - DNA, 60 bp, Artificial
  Synthetic oligonucleotide
cagagctgcagcccggcttggtagaagtacggtgacttgcgatgaaggctgggggcaagt

SEQ ID NO: 289529 - DNA, 55 bp, Artificial
  Synthetic oligonucleotide
gtagaacgggcgccatgcgacgcaactcgaagctgtacacgtagtgtccgccagc

SEQ ID NO: 289530 - DNA, 55 bp, Artificial
  Synthetic oligonucleotide
gtagaaccaggatacacatttcaatcagttgaatctcctaagggtgagtttggtg

SEQ ID NO: 289531 - DNA, 55 bp, Artificial
  Synthetic oligonucleotide
gtagaaatcagcgggaaacttctcaactcgctgcagtgatggtgtgcagcgacgc

SEQ ID NO: 289532 - DNA, 55 bp, Artificial
  Synthetic oligonucleotide
gtactttgcttaaacatcctgcgaagactacctgtaagtgtaatcttctgcgacg

SEQ ID NO: 289533 - DNA, 55 bp, Artificial
  Synthetic oligonucleotide
gtacttcgctttcgttcccattggttggtctcctcacgtgcgtgttgctgcgctc

SEQ ID NO: 289534 - DNA, 55 bp, Artificial
  Synthetic oligonucleotide
gtactgtctagcacagaggcttcaggacacccggcaaaagcgagcccatcactgc

SEQ ID NO: 289535 - DNA, 55 bp, Artificial
  Synthetic oligonucleotide
gtactgccagtgttgtatagacatggattcagctacggtaacccattcaatctgg

SEQ ID NO: 289536 - DNA, 55 bp, Artificial
  Synthetic oligonucleotide
gtactctcgttggcagagtgcaagacgcacattgaggcacttcccacaagcacac

SEQ ID NO: 289537 - DNA, 55 bp, Artificial
  Synthetic oligonucleotide
gtactcaccacatatggctgataaggtgaaagtcgtctgatttcttgtgtggcct

SEQ ID NO: 289538 - DNA, 52 bp, Artificial
  Synthetic oligonucleotide
gtactaggttctaggggtttaacgaaaccttctgttatgatacaactttatg

SEQ ID NO: 289539 - DNA, 58 bp, Artificial
  Synthetic oligonucleotide
gtagcgtttactatcgaatgaagtaatatgttccaccgctagtgtttgcttctaacat

SEQ ID NO: 289540 - DNA, 55 bp, Artificial
  Synthetic oligonucleotide
gtactacctaataaagtactactgctaggggtaggagtaattgtgctacctatgt

SEQ ID NO: 289541 - DNA, 55 bp, Artificial
  Synthetic oligonucleotide
gtacgtagaagagagcacacacgcctctgcctgtaggcgcatccgtatgctttca

SEQ ID NO: 289542 - DNA, 55 bp, Artificial
  Synthetic oligonucleotide
gtacgctgtgccggatgcgaacgacgtgcaagttcacttgtgggcggttcagcca

SEQ ID NO: 289543 - DNA, 55 bp, Artificial
  Synthetic oligonucleotide
gtacgcgtgcgctgtgggtgcaagagatgttgtcgcgcccatcacgcctcatttt

SEQ ID NO: 289544 - DNA, 55 bp, Artificial
  Synthetic oligonucleotide
gtacgattcggcgcctcttgtatcctagcgagcacgttggaactagtagccgctc

SEQ ID NO: 289545 - DNA, 53 bp, Artificial
  Synthetic oligonucleotide
gtaaggaatgttgagttccgaccatgtaacctgttccgtgtttgtaggaaggt

SEQ ID NO: 289546 - DNA, 55 bp, Artificial
  Synthetic oligonucleotide
gtaagggagcgtactgccagttagcgggctcggcaggatgctgtgatcgcacacg

SEQ ID NO: 289547 - DNA, 53 bp, Artificial
  Synthetic oligonucleotide
gtaattatgttaacttccggcatgcttcgtcccgaagacccctcaagttccgg

SEQ ID NO: 289548 - DNA, 55 bp, Artificial
  Synthetic oligonucleotide
gtaattgtaggaggaattgcatagcctttcatatagctgtccgcataaccacccg

SEQ ID NO: 289549 - DNA, 55 bp, Artificial
  Synthetic oligonucleotide
gtacaagatcgtcctctaatccacgaggtgcagcgtagaaaacatcggcagacac

SEQ ID NO: 289550 - DNA, 60 bp, Artificial
  Synthetic oligonucleotide
ctatagaagcaatagtgcaagattcaacaggattagatacattgacaaatacggtatatt

SEQ ID NO: 289551 - DNA, 55 bp, Artificial
  Synthetic oligonucleotide
gtacaaggcttatagaaatcctatgtagagagatgaataactccaaatcaggtgg

SEQ ID NO: 289552 - DNA, 55 bp, Artificial
  Synthetic oligonucleotide
gtacaggagacgcgtgttagggtcatagccgtactcttcgataagaaacgagcgc

SEQ ID NO: 289553 - DNA, 55 bp, Artificial
  Synthetic oligonucleotide
gtacaggcacgacagtgggcaggttaattgcctccccgacgggagtcgccacttg

SEQ ID NO: 289554 - DNA, 55 bp, Artificial
  Synthetic oligonucleotide
gtacatctgatactcctaacgggatcgacgtatctaacagagctgaggcatctac

SEQ ID NO: 289555 - DNA, 55 bp, Artificial
  Synthetic oligonucleotide
gtaccaaatcgtccgatcagcgcacagcctcctcgcacgtttataccgcctccgg

SEQ ID NO: 289556 - DNA, 55 bp, Artificial
  Synthetic oligonucleotide
gtacccgctcaatcacagatggggccaccgactgaccccgtatggagccatccac

SEQ ID NO: 289557 - DNA, 55 bp, Artificial
  Synthetic oligonucleotide
gtacccgtagactttctccacagggtcaacgcgagcttgactccattgctagaca

SEQ ID NO: 289558 - DNA, 54 bp, Artificial
  Synthetic oligonucleotide
gtacccttgaccttgtcacggtggtcctggagaaaaccgatacccacttcagtg

SEQ ID NO: 289559 - DNA, 55 bp, Artificial
  Synthetic oligonucleotide
gtaccgacggcccaaggcactctcgaagcactcgtgtctctcacacaaacgtccg

SEQ ID NO: 289560 - DNA, 55 bp, Artificial
  Synthetic oligonucleotide
gtacctctgattcataagcaacggtcagtcgttgatacaaaccctccctaagcta

SEQ ID NO: 289561 - DNA, 60 bp, Artificial
  Synthetic oligonucleotide
ctatagttaccatagctgtagatggatgcttcgatatatagtatattacagtatcaatcg

SEQ ID NO: 289562 - DNA, 55 bp, Artificial
  Synthetic oligonucleotide
gtacgaggtatcccatcattgtgtcggtttgattgtgtgtcgttcttcagggacg

SEQ ID NO: 289563 - DNA, 55 bp, Artificial
  Synthetic oligonucleotide
gtacgatgtcttgcccattagaaactgtccaggcgtggaagactgtaccgattac

SEQ ID NO: 289564 - DNA, 55 bp, Artificial
  Synthetic oligonucleotide
gtcaagggtgggcaaccttgttacgcactacgtcagccatcgcgagacgtacgga

SEQ ID NO: 289565 - DNA, 55 bp, Artificial
  Synthetic oligonucleotide
gtcaaggaagatattcaccgctttgcgaggggataatgcgggacaatgcgaacac

SEQ ID NO: 289566 - DNA, 55 bp, Artificial
  Synthetic oligonucleotide
gtcaagctcatgtcgtggtttaagcctagtttaggaatcgaagaaccttttagta

SEQ ID NO: 289567 - DNA, 55 bp, Artificial
  Synthetic oligonucleotide
gtcaacacactctagctgcggacaccgttcgagtccgtcgacactccgcacgcct

SEQ ID NO: 289568 - DNA, 55 bp, Artificial
  Synthetic oligonucleotide
gtattgcagacatgcctcactcagctggaacactactgggtcgcggagcaagcat

SEQ ID NO: 289569 - DNA, 55 bp, Artificial
  Synthetic oligonucleotide
gtatggttcaccttatcgtcatttgtatggttcaccttatcgtcatttgtatggt

SEQ ID NO: 289570 - DNA, 55 bp, Artificial
  Synthetic oligonucleotide
gtatggagaccctactcgtaataacacaactcaacatcgtcacgaaccatcacac

SEQ ID NO: 289571 - DNA, 55 bp, Artificial
  Synthetic oligonucleotide
gtatctcgcgtcctccccatcagtatctcgcgctcgctcctcatcagtatctcgc

SEQ ID NO: 289572 - DNA, 57 bp, Artificial
  Synthetic oligonucleotide
gtaaggtctccagcatttcaccaccttcaagtattacctaagatgtcaaagggacac

SEQ ID NO: 289573 - DNA, 55 bp, Artificial
  Synthetic oligonucleotide
gtatccttagtaccaggtacatctgtagccgtgggagcaagcaccgtaacgggag

SEQ ID NO: 289574 - DNA, 55 bp, Artificial
  Synthetic oligonucleotide
gtatccctgtcggtctggaccgttttctgttttcgattcagttccaggagacaac

SEQ ID NO: 289575 - DNA, 55 bp, Artificial
  Synthetic oligonucleotide
gtatccagtttggcgccaacgtgaactttatcttcgagacgcacagcctcgagta

SEQ ID NO: 289576 - DNA, 55 bp, Artificial
  Synthetic oligonucleotide
gtatatatgaacaggtataatcgtcgctctcggacatgcgtaccccgaacggacc

SEQ ID NO: 289577 - DNA, 54 bp, Artificial
  Synthetic oligonucleotide
gtataagcccgtgtaaaacgactcgaggtacccagccagtaaaccatgagcggg

SEQ ID NO: 289578 - DNA, 53 bp, Artificial
  Synthetic oligonucleotide
gtagttaggacctacatcacttaccttaagacctaagatagtaaccttaagac

SEQ ID NO: 289579 - DNA, 55 bp, Artificial
  Synthetic oligonucleotide
gtagtctcgcctacgcgcacacccctcaatagagagagtcgcacgtggaggtccg

SEQ ID NO: 289580 - DNA, 55 bp, Artificial
  Synthetic oligonucleotide
gtagtagtgtagaaaaccgacgatcacaagtatgcagtaccacgcactgatggcg

SEQ ID NO: 289581 - DNA, 55 bp, Artificial
  Synthetic oligonucleotide
gtagacataggtgttgtaagctacgaacaggccttagattgagggttttctggag

SEQ ID NO: 289582 - DNA, 55 bp, Artificial
  Synthetic oligonucleotide
gtagaggaggtgtgtagtgggtggtgaagcgttacgtagagagtgcgagggagca

SEQ ID NO: 289583 - DNA, 56 bp, Artificial
  Synthetic oligonucleotide
gtaatcgtagaatcagtgttagtaaagttaagacctatataagtcgaagtgtgacc

SEQ ID NO: 289584 - DNA, 55 bp, Artificial
  Synthetic oligonucleotide
gtagatagttgcatgcgcagtttcacaaacccagagcccgtacctcatacatatg

SEQ ID NO: 289585 - DNA, 55 bp, Artificial
  Synthetic oligonucleotide
gtagatgaacgctcactccccttggacggtttggcgcttgctctcctactaccca

SEQ ID NO: 289586 - DNA, 55 bp, Artificial
  Synthetic oligonucleotide
gtagcacggcagatagacggagacacaccaaactcccacagcgagaggagaagca

SEQ ID NO: 289587 - DNA, 55 bp, Artificial
  Synthetic oligonucleotide
gtagcagcgacgctgttgacgtatcgactgacagcatggcggccgcagtgaggca

SEQ ID NO: 289588 - DNA, 55 bp, Artificial
  Synthetic oligonucleotide
gtagcgctggttattttgtacgtgtaggcgtgcctcagcttaccatgcagagggg

SEQ ID NO: 289589 - DNA, 55 bp, Artificial
  Synthetic oligonucleotide
gtagcggtaagtgtgacccgaatggagctgtagcaccacacgcatctctgaattc

SEQ ID NO: 289590 - DNA, 55 bp, Artificial
  Synthetic oligonucleotide
gtagctgacggtaggcacaccgtactggtgaaccgggaccgaataggagagaggc

SEQ ID NO: 289591 - DNA, 55 bp, Artificial
  Synthetic oligonucleotide
gtagctggcatcaactccggcacactaagaggagacatcacaatcatacgactgc

SEQ ID NO: 289592 - DNA, 55 bp, Artificial
  Synthetic oligonucleotide
gtagcttctcaagcgcttactccgatcgtctcagttttgaggcctagaacagtgg

SEQ ID NO: 289593 - DNA, 55 bp, Artificial
  Synthetic oligonucleotide
gtaggccaagatctccggacaagttgcgaagtcggacacgcggctgcctccaccc

SEQ ID NO: 289594 - DNA, 60 bp, Artificial
  Synthetic oligonucleotide
cacttgaagctccatcaggtgtctgtactggacataaatatcctaagctatcaagcgaaa

SEQ ID NO: 289595 - DNA, 55 bp, Artificial
  Synthetic oligonucleotide
gtaggcgtgtggttttatgctccacgctcactggtgctcttccctctgcacacgt

SEQ ID NO: 289596 - DNA, 55 bp, Artificial
  Synthetic oligonucleotide
gtagggaagctttgattatgcgtctatgcagatgggtcccagtacgagcattcta

SEQ ID NO: 289597 - DNA, 55 bp, Artificial
  Synthetic oligonucleotide
gtaggtcccgtgctgtgcgccatgcggagggagagcgagtccgtcagaacagcga

SEQ ID NO: 289598 - DNA, 55 bp, Artificial
  Synthetic oligonucleotide
gtaggtctgcgggtatatgtgcctctgttatacgatgcaactctctcgctcgccg

SEQ ID NO: 289599 - DNA, 53 bp, Artificial
  Synthetic oligonucleotide
gtagtaagtttaaactcttggctccctaccaggtttgttactacacgaccatg

SEQ ID NO: 289600 - DNA, 55 bp, Artificial
  Synthetic oligonucleotide
gtgccttgaagactcagccagcatactagtaatccttacagtcctagggcttgtt

SEQ ID NO: 289601 - DNA, 55 bp, Artificial
  Synthetic oligonucleotide
gtgccttcacgcaacttcatcacagctgcgacacgaagctgcacgaaaagaggga

SEQ ID NO: 289602 - DNA, 55 bp, Artificial
  Synthetic oligonucleotide
gtgcctgaagaggggtgctcccctcacccgtgtttgtgcaagctcagtcatcgcg

SEQ ID NO: 289603 - DNA, 55 bp, Artificial
  Synthetic oligonucleotide
gtgcctcataggttttatcgctacactgtgccgaatgtaacttcgcctctttggt

SEQ ID NO: 289604 - DNA, 55 bp, Artificial
  Synthetic oligonucleotide
gtgccgtcttcacccgggctgtcgcgtgtttaacggtgcagcagtccgacacaca

SEQ ID NO: 289605 - DNA, 57 bp, Artificial
  Synthetic oligonucleotide
ggctagtgaggtgttatatattccagaagcttggacttattcaaaaacggtccatgg

SEQ ID NO: 289606 - DNA, 55 bp, Artificial
  Synthetic oligonucleotide
gtgccgctaccgtgctgctccgtttctaccaaagggtcgcgtcggctaggaagag

SEQ ID NO: 289607 - DNA, 55 bp, Artificial
  Synthetic oligonucleotide
gtgccgcataggggcatgtgcatagtgtaatcggctacctagcagagcgacgcca

SEQ ID NO: 289608 - DNA, 55 bp, Artificial
  Synthetic oligonucleotide
gtgccgcaccccgtagcgaggttttagggaatgtgagcttgtcgtctgaggccgg

SEQ ID NO: 289609 - DNA, 55 bp, Artificial
  Synthetic oligonucleotide
gtgccctcgttagagaggtgcccaaagaggacaggttgcactgtatatctatagc

SEQ ID NO: 289610 - DNA, 55 bp, Artificial
  Synthetic oligonucleotide
gtgccctaaggtccacctgaaaagagtagtgtgcgcatagacgcgtgtgtgtagg

SEQ ID NO: 289611 - DNA, 55 bp, Artificial
  Synthetic oligonucleotide
gtgcccctaatcaaggaggatataggcggctctgcgcaggcgtgcgtgtgctacg

SEQ ID NO: 289612 - DNA, 55 bp, Artificial
  Synthetic oligonucleotide
gtgccattaagagattcggaggtgtgcccaaacgggcacctaaggcgacagcagg

SEQ ID NO: 289613 - DNA, 55 bp, Artificial
  Synthetic oligonucleotide
gtgccagatagaagcttggaagacgcatgatcttggtgcttccctcttgtcgggc

SEQ ID NO: 289614 - DNA, 55 bp, Artificial
  Synthetic oligonucleotide
gtgccacttgtcttgatctactccctctttgatttggcacgttccctcttgggcg

SEQ ID NO: 289615 - DNA, 55 bp, Artificial
  Synthetic oligonucleotide
gtgcattccgtcattttgaagtaccactactctaagctggtacctgagagctacg

SEQ ID NO: 289616 - DNA, 56 bp, Artificial
  Synthetic oligonucleotide
cacttgcttataactgtatggacgtaacctccaggcaaagaaaatgaccggtcaaa

SEQ ID NO: 289617 - DNA, 55 bp, Artificial
  Synthetic oligonucleotide
gtgcatggtcagaagcgcccaatcaacggagcatcaaccgcaaggtttcgtacgt

SEQ ID NO: 289618 - DNA, 55 bp, Artificial
  Synthetic oligonucleotide
gtgcatgcgtcttgctggcggtagggcgatgttgtaggggaatgacgctgccacg

SEQ ID NO: 289619 - DNA, 55 bp, Artificial
  Synthetic oligonucleotide
gtgcatctatgggcctcccgaagacatgccttgcacgaaaacgttctctcaacgg

SEQ ID NO: 289620 - DNA, 55 bp, Artificial
  Synthetic oligonucleotide
gtgcatcgtccagtagcggcccttgtgggatgggtggaaggcgtagcgcacgtag

SEQ ID NO: 289621 - DNA, 55 bp, Artificial
  Synthetic oligonucleotide
gtgcatccgtgtattgtggctaaggctcgctatcggtagtgagcgcacgcgtccg

SEQ ID NO: 289622 - DNA, 55 bp, Artificial
  Synthetic oligonucleotide
gtgcagtcgtgcgacccgattgttgtgcactcggttgcaagccattaccgccggt

SEQ ID NO: 289623 - DNA, 55 bp, Artificial
  Synthetic oligonucleotide
gtgcaggcgggtgtaagtgcattacctgtacgctgctactccgctcacaatatcg

SEQ ID NO: 289624 - DNA, 55 bp, Artificial
  Synthetic oligonucleotide
gtgcagatacagatgtccaacgcgccacaagtccacggtgcggagaaacacgagc

SEQ ID NO: 289625 - DNA, 55 bp, Artificial
  Synthetic oligonucleotide
gtgcaaagtaggttaagatgcggagctgagaaatagctcgccccagacagcgcag

SEQ ID NO: 289626 - DNA, 55 bp, Artificial
  Synthetic oligonucleotide
gtgcaaaagtgacctacgtgagaccactgccacgactgagggccggaacgggctg

SEQ ID NO: 289627 - DNA, 57 bp, Artificial
  Synthetic oligonucleotide
taactacactacgagatgccaaactattcaaccattagtactttcttattaatggaa

SEQ ID NO: 289628 - DNA, 52 bp, Artificial
  Synthetic oligonucleotide
ctcaaagagtcaaaactatttaacaaaggtattagccgcgttaaagccaaaa

SEQ ID NO: 289629 - DNA, 55 bp, Artificial
  Synthetic oligonucleotide
gtgatgtaggtcctaactacagtagcgtaggtcttaaggtaactaatacaggtcc

SEQ ID NO: 289630 - DNA, 55 bp, Artificial
  Synthetic oligonucleotide
gtgatagcgcacgcaaaacggaaccacagatgctcacgcgtgtatagccgggtag

SEQ ID NO: 289631 - DNA, 55 bp, Artificial
  Synthetic oligonucleotide
gtgatacgtcacgggatgaaatactgcgaagtacaaccgcaaacggagtcgcaag

SEQ ID NO: 289632 - DNA, 55 bp, Artificial
  Synthetic oligonucleotide
gtgataactgatagatccccaatatcacggactggaagtataactctatatgttg

SEQ ID NO: 289633 - DNA, 55 bp, Artificial
  Synthetic oligonucleotide
gtgagtcgtatgaatcatgcaaaccgtgtgagtcgtatgaatcatgcaaaccgtg

SEQ ID NO: 289634 - DNA, 55 bp, Artificial
  Synthetic oligonucleotide
gtgaggtcctcgacgtttacggtaagtcggcgacacgccacgtagcagctgtacc

SEQ ID NO: 289635 - DNA, 55 bp, Artificial
  Synthetic oligonucleotide
gtgagggtcatgcgacatgatgtaaccagggctacggcgtctgtggctgtacgtg

SEQ ID NO: 289636 - DNA, 55 bp, Artificial
  Synthetic oligonucleotide
gtggcgagtcgtattttctgtgatagtcatttgaggcgtagtggcacgcaggttc

SEQ ID NO: 289637 - DNA, 55 bp, Artificial
  Synthetic oligonucleotide
gtggccttaactaatcaaacgtctctcagtcctcgggtgtgtgctgtgatacaga

SEQ ID NO: 289638 - DNA, 55 bp, Artificial
  Synthetic oligonucleotide
gtggcactgtgggagtaatacatgccagtagtctcagtagtaccactagggtgcc

SEQ ID NO: 289639 - DNA, 59 bp, Artificial
  Synthetic oligonucleotide
ctatttcttaccaatatatctaggagcatcagaggtagcctttcctagagttaattgtg

SEQ ID NO: 289640 - DNA, 55 bp, Artificial
  Synthetic oligonucleotide
gtggatggcagaaggcttctaacaaaatatgccttgacctaggtaagacctctag

SEQ ID NO: 289641 - DNA, 55 bp, Artificial
  Synthetic oligonucleotide
gtggatgcgtttctctcggggcaccccacgaacgccattatcgccgacgtcaacc

SEQ ID NO: 289642 - DNA, 55 bp, Artificial
  Synthetic oligonucleotide
gtggatattagcttaggattatttctatgtgcgtaacataattgcccacccatac

SEQ ID NO: 289643 - DNA, 55 bp, Artificial
  Synthetic oligonucleotide
gtggagcccagtgtcggcgtgctactacgagatgaagacctccgtcgagctctgt

SEQ ID NO: 289644 - DNA, 55 bp, Artificial
  Synthetic oligonucleotide
gtggagcaccgggccctgaaaccacgctgagggaatcctcatcattcgggagatc

SEQ ID NO: 289645 - DNA, 55 bp, Artificial
  Synthetic oligonucleotide
gtggagcaaaccatagcttggctttatcagattcgggactagtatttgcatgggg

SEQ ID NO: 289646 - DNA, 55 bp, Artificial
  Synthetic oligonucleotide
gtggacaatctccatctgttttgtggcaacctgcaagtaatcgtaagttggccat

SEQ ID NO: 289647 - DNA, 55 bp, Artificial
  Synthetic oligonucleotide
gtggaactacgtttctcagccggccaagaacttactacgtcgcatgcttgcgcca

SEQ ID NO: 289648 - DNA, 55 bp, Artificial
  Synthetic oligonucleotide
gtgcttaggtactgggcccgtccttgcattcaagttttgctagcggcggaaggcc

SEQ ID NO: 289649 - DNA, 55 bp, Artificial
  Synthetic oligonucleotide
gtgctgtaccactacagcgaaaagagcaaccagctgtacctgctcgaacggaact

SEQ ID NO: 289650 - DNA, 60 bp, Artificial
  Synthetic oligonucleotide
gtacctatttactatggattacaggtctacacttctcacatgtactagtaggtgctatac

SEQ ID NO: 289651 - DNA, 55 bp, Artificial
  Synthetic oligonucleotide
gtgctggaacagctgtagagggctgctctagcagtcaattttgtggcgcgcaggg

SEQ ID NO: 289652 - DNA, 55 bp, Artificial
  Synthetic oligonucleotide
gtgctgccaacgcgcaacttcagccgtcgccactcagccccggcgaccatctggg

SEQ ID NO: 289653 - DNA, 55 bp, Artificial
  Synthetic oligonucleotide
gtgctgactgctgatgtccgcgcgttctcaggatttgtggatcctgtggagcccc

SEQ ID NO: 289654 - DNA, 55 bp, Artificial
  Synthetic oligonucleotide
gtgcgaacgaattgtaataaccacccgagggcctatcaattctatagtagacgtc

SEQ ID NO: 289655 - DNA, 55 bp, Artificial
  Synthetic oligonucleotide
gtgcgactgcgtcgaaccgcctcccattgagcggaagtcagctgaacgtcaccgt

SEQ ID NO: 289656 - DNA, 55 bp, Artificial
  Synthetic oligonucleotide
gtgcgactgctgtaggcacacgctacatgcaaaatgggcctgtgcgaacacaggg

SEQ ID NO: 289657 - DNA, 55 bp, Artificial
  Synthetic oligonucleotide
gtgcgcactgattgacattctatagtggcagacagctcggacgtctaggcacgcc

SEQ ID NO: 289658 - DNA, 55 bp, Artificial
  Synthetic oligonucleotide
gtgcgcatgtctgactcgttcgctctgctctggtcaatgccgtaccccacttccc

SEQ ID NO: 289659 - DNA, 55 bp, Artificial
  Synthetic oligonucleotide
gtgcgcctctaattcaccgtgcgacatgtaaccgaatcggagttaggagtcgctg

SEQ ID NO: 289660 - DNA, 55 bp, Artificial
  Synthetic oligonucleotide
gtgcgctggtaagggaaacgctgggcacaccgtccatagggtcaggcgggttgtt

SEQ ID NO: 289661 - DNA, 51 bp, Artificial
  Synthetic oligonucleotide
ctattggtactagaattaaaggtcctatttgtaaaagtattcgaaaaagaa

SEQ ID NO: 289662 - DNA, 55 bp, Artificial
  Synthetic oligonucleotide
gtgcggagttcaatgcactgaacactgatctagtggttaggtgatggcgcgagcc

SEQ ID NO: 289663 - DNA, 55 bp, Artificial
  Synthetic oligonucleotide
gtgcggcgcaagttcagattcacccagcatcgatagaggccagtgtcgcggcgtc

SEQ ID NO: 289664 - DNA, 55 bp, Artificial
  Synthetic oligonucleotide
gtgcggctggtctaaatgtgcagtctgtgaatgctccttcgagactagtaacagg

SEQ ID NO: 289665 - DNA, 55 bp, Artificial
  Synthetic oligonucleotide
gtgcgtcccacggcgctgttgcattgcttctctaagatgccggccctcttcatgc

SEQ ID NO: 289666 - DNA, 55 bp, Artificial
  Synthetic oligonucleotide
gtgcgtcgtccatgacctctgaggttgcttcttccccagagcccgtcatacccca

SEQ ID NO: 289667 - DNA, 55 bp, Artificial
  Synthetic oligonucleotide
gtgcgtgctcttctcaaatgacctgaacgatgcaagctacgcactgatgcacgtg

SEQ ID NO: 289668 - DNA, 55 bp, Artificial
  Synthetic oligonucleotide
gtgctagagattcacggatggtgaggccaggcttcgctggagcggtgttgtgagg

SEQ ID NO: 289669 - DNA, 55 bp, Artificial
  Synthetic oligonucleotide
gtgctcctcttgttatcagtttagtagaaagttgcgaaccagcgaaagcgggacg

SEQ ID NO: 289670 - DNA, 55 bp, Artificial
  Synthetic oligonucleotide
gtgctcttaatttacctgatatagtaataaggcacccttttgcgccagattccat

SEQ ID NO: 289671 - DNA, 55 bp, Artificial
  Synthetic oligonucleotide
gtctcctcctttcctcatattattactactcactactttcccatgtatcctcaca

SEQ ID NO: 289672 - DNA, 60 bp, Artificial
  Synthetic oligonucleotide
ctattgaaagttgaacatttggtgcatgagagcactgttgtgcaatgtcaatccttaaaa

SEQ ID NO: 289673 - DNA, 55 bp, Artificial
  Synthetic oligonucleotide
gtctcccaggtttgcagtcttttatttgcgcccaaccaagtaggaaagaggcgct

SEQ ID NO: 289674 - DNA, 55 bp, Artificial
  Synthetic oligonucleotide
gtctccaccatccagtctccaccatccagtctccaccatccagtctccaccatcc

SEQ ID NO: 289675 - DNA, 55 bp, Artificial
  Synthetic oligonucleotide
gtctatgaggtcttcgtaagagacgtagatccgcatcgtaccccagtccgcggag

SEQ ID NO: 289676 - DNA, 55 bp, Artificial
  Synthetic oligonucleotide
gtctagcttcacgagtaaaagttctgttgttcgtgtgttgtcttaacgaggagtg

SEQ ID NO: 289677 - DNA, 55 bp, Artificial
  Synthetic oligonucleotide
gtctagaccaatctcatgacacagtaacaagaatgtgtgtattacgtcacgtgtg

SEQ ID NO: 289678 - DNA, 55 bp, Artificial
  Synthetic oligonucleotide
gtctacgataagacaatatctctgtacactgattagaacaatacagaccgtaagg

SEQ ID NO: 289679 - DNA, 55 bp, Artificial
  Synthetic oligonucleotide
gtctacatgcagctcgcagtgtgcttctccctatacgaaccacttgcatttcccc

SEQ ID NO: 289680 - DNA, 55 bp, Artificial
  Synthetic oligonucleotide
gtctaacgtccatcgtaacacgcatgcagatctcgagtgaaggcaaagcaagggg

SEQ ID NO: 289681 - DNA, 55 bp, Artificial
  Synthetic oligonucleotide
gtcgttttggaaatatcctatctgctcatcttatggttgataagactagtggccg

SEQ ID NO: 289682 - DNA, 55 bp, Artificial
  Synthetic oligonucleotide
gtcgtttctcaacgatccttatttcgctgcatttgcaagttgccgttggctctct

SEQ ID NO: 289683 - DNA, 60 bp, Artificial
  Synthetic oligonucleotide
ctatgagcgctccacttcgcagtcccccaacatactgcggtttcctgcgaacacgtctga

SEQ ID NO: 289684 - DNA, 55 bp, Artificial
  Synthetic oligonucleotide
gtcgtcgtggctgtctcaacaacttgcggctaatgggcgtgtggatacgttgcgc

SEQ ID NO: 289685 - DNA, 55 bp, Artificial
  Synthetic oligonucleotide
gtcgtcgctgcagtagacctcatgcaagtagttcggctagaccaaagacgccaga

SEQ ID NO: 289686 - DNA, 55 bp, Artificial
  Synthetic oligonucleotide
gtcgtagtcagcgacctgaaacttgaagagctcattccagacggggttaaggcag

SEQ ID NO: 289687 - DNA, 55 bp, Artificial
  Synthetic oligonucleotide
gtcgtagagttacagattatagcatatgctctcaatagcttaccttgtggtacat

SEQ ID NO: 289688 - DNA, 55 bp, Artificial
  Synthetic oligonucleotide
gtcgtacacctaccaagacttcaagcagaagtgtgagtcgctacgaatatttgtt

SEQ ID NO: 289689 - DNA, 55 bp, Artificial
  Synthetic oligonucleotide
gtcgcaccacgactcctggatcgatcctttcttaatgtaccggcaccagtcaacg

SEQ ID NO: 289690 - DNA, 55 bp, Artificial
  Synthetic oligonucleotide
gtcgcaccttgtcacctcagtactcttgttacacggccaacaaaacaggagcacg

SEQ ID NO: 289691 - DNA, 55 bp, Artificial
  Synthetic oligonucleotide
gtcgcacgtcgacagtgggtacgcagcacgtctggtcgtcctccgcacaaacgtg

SEQ ID NO: 289692 - DNA, 55 bp, Artificial
  Synthetic oligonucleotide
gtcgcagttagacgtgtgccgccttgaagagggtctctacgcgtgccggagtgtg

SEQ ID NO: 289693 - DNA, 55 bp, Artificial
  Synthetic oligonucleotide
gtcgcatttggcagagctgcttgttgggcacaggcgtcctaattcaccgctagat

SEQ ID NO: 289694 - DNA, 59 bp, Artificial
  Synthetic oligonucleotide
gaaaacttatgccatctaactggggatatctatgtcctatacatacaccagacggttct

SEQ ID NO: 289695 - DNA, 53 bp, Artificial
  Synthetic oligonucleotide
gtcgcctaactccgacacgttaccatagcccaaaacctttccattatacccac

SEQ ID NO: 289696 - DNA, 55 bp, Artificial
  Synthetic oligonucleotide
gtcgccttccccaacaccagtagtcttgccgcgtgcaagtgacgtggtacactgc

SEQ ID NO: 289697 - DNA, 55 bp, Artificial
  Synthetic oligonucleotide
gtcgcgtattcttgtgctctgcctaatgcttcgtccgctcgcttacttgctaagg

SEQ ID NO: 289698 - DNA, 55 bp, Artificial
  Synthetic oligonucleotide
gtcgcgtcggggtacggactgggcacagcatgcgcgtcacaaggtgtcgggaaga

SEQ ID NO: 289699 - DNA, 55 bp, Artificial
  Synthetic oligonucleotide
gtcgctgtgcctcgtgtgtatgcatcggtatgcaacgcgaccaccctctcgtgtc

SEQ ID NO: 289700 - DNA, 55 bp, Artificial
  Synthetic oligonucleotide
gtcggaagaacagaggcccacgcacgttacacgaccactgcgcaaacgggaagcc

SEQ ID NO: 289701 - DNA, 55 bp, Artificial
  Synthetic oligonucleotide
gtcggacaggatgacatacaattcggacgtaaacttatagtggttgtccaacagg

SEQ ID NO: 289702 - DNA, 55 bp, Artificial
  Synthetic oligonucleotide
gtcggagcgagtctcgtagtcgctgcagtagccctcctgatagatctctgcgcca

SEQ ID NO: 289703 - DNA, 55 bp, Artificial
  Synthetic oligonucleotide
gtcgggagggctacgcacaatgctacgaatacgaggtacacgacggcaccattgg

SEQ ID NO: 289704 - DNA, 55 bp, Artificial
  Synthetic oligonucleotide
gtcggtcattaggcaagggcactcgaagggtgtgtgtagcattccttacgggcct

SEQ ID NO: 289705 - DNA, 53 bp, Artificial
  Synthetic oligonucleotide
ggcgtacctagtggcagttatattgtataatttggccctaaaacccgaatttc

SEQ ID NO: 289706 - DNA, 55 bp, Artificial
  Synthetic oligonucleotide
gtgagcgcgtgtgcttgtgggaagcgcctcaatgtgcgtcttgcactctgccaac

SEQ ID NO: 289707 - DNA, 55 bp, Artificial
  Synthetic oligonucleotide
gtgagcaccccaacatggtacactccagagcagacgaatcgaataaccaaacggc

SEQ ID NO: 289708 - DNA, 55 bp, Artificial
  Synthetic oligonucleotide
gtgagagtacaaagtcggacgagtaccgagaacaggagtaggcagccaagagcgg

SEQ ID NO: 289709 - DNA, 55 bp, Artificial
  Synthetic oligonucleotide
gtgactttccgctataaaacaaatgcgacacaatattagtggtaaagtgtcagta

SEQ ID NO: 289710 - DNA, 51 bp, Artificial
  Synthetic oligonucleotide
gtgactttaaagatatgggttcaagtcccgttacttacccgaggtaattac

SEQ ID NO: 289711 - DNA, 55 bp, Artificial
  Synthetic oligonucleotide
gtgactggggagttgcgcaggagtagtgtggcgcgcaatttgatacggagcgagc

SEQ ID NO: 289712 - DNA, 55 bp, Artificial
  Synthetic oligonucleotide
gtgactaagcaatgctagcacctctcccaagtcgcgtgtctccagatcgcgtatc

SEQ ID NO: 289713 - DNA, 55 bp, Artificial
  Synthetic oligonucleotide
gtgacgtgcgccgttcgctcccacacactcggcaccgactcggctgtgttttgtc

SEQ ID NO: 289714 - DNA, 55 bp, Artificial
  Synthetic oligonucleotide
gtgacgtactagacgccgttcaaccatcaagggaggagggttcacaagcagagag

SEQ ID NO: 289715 - DNA, 55 bp, Artificial
  Synthetic oligonucleotide
gtgaccccttccgcactctctttgctccgatacctccttgagccaaatgaggttc

SEQ ID NO: 289716 - DNA, 54 bp, Artificial
  Synthetic oligonucleotide
cagacgtatttatttatcactaaggaagtatttatccttagtgataaaagttaa

SEQ ID NO: 289717 - DNA, 55 bp, Artificial
  Synthetic oligonucleotide
gtgaccatacaacgaagctcactctactcctcattacgcttcctcttgggactcc

SEQ ID NO: 289718 - DNA, 55 bp, Artificial
  Synthetic oligonucleotide
gtgacacgccgcacctctgccatcaactctgagacacactgcgcatctgaaagag

SEQ ID NO: 289719 - DNA, 55 bp, Artificial
  Synthetic oligonucleotide
gtgacacagcggcaggaaagaatagagtcgtcgaggcaattccgtggccccacgc

SEQ ID NO: 289720 - DNA, 55 bp, Artificial
  Synthetic oligonucleotide
gtgacaataagccccacgagcattgcatagaccttctaacatctgtaccacccgt

SEQ ID NO: 289721 - DNA, 55 bp, Artificial
  Synthetic oligonucleotide
gtgaaccgttggtgtggtgtctctcccgttagagaatgtgcggagttgctcattg

SEQ ID NO: 289722 - DNA, 55 bp, Artificial
  Synthetic oligonucleotide
gtctcggggagatgtgtgccttttcgtgcgggactttacacaaagctggaggtct

SEQ ID NO: 289723 - DNA, 55 bp, Artificial
  Synthetic oligonucleotide
gtctcgtatgcggagcggaagctacctcaaataacagactcgaaacccaccacgt

SEQ ID NO: 289724 - DNA, 55 bp, Artificial
  Synthetic oligonucleotide
gtctctaggtgctccgatccctggtcgctaactgtgtgatgaggcatgagtcggg

SEQ ID NO: 289725 - DNA, 55 bp, Artificial
  Synthetic oligonucleotide
gtctgccatttgcttagaaccaacatggtccgcatttgctactaaaattctcggg

SEQ ID NO: 289726 - DNA, 55 bp, Artificial
  Synthetic oligonucleotide
gtctgctacgatgggtcgttcatgctgtctgatgcggagtgatcagaccactcgc

SEQ ID NO: 289727 - DNA, 58 bp, Artificial
  Synthetic oligonucleotide
cagacgtgtgaccaataaatgatcttatggtttcaccaagtgataaatcccataaacg

SEQ ID NO: 289728 - DNA, 55 bp, Artificial
  Synthetic oligonucleotide
gtctggatggtgcactcacgggcaaggcgaccccagtaacagaccccaatgtgcg

SEQ ID NO: 289729 - DNA, 55 bp, Artificial
  Synthetic oligonucleotide
gtctggcttgttcgggtacatgaagcacatgttatacgtcagctgttgaaggccc

SEQ ID NO: 289730 - DNA, 55 bp, Artificial
  Synthetic oligonucleotide
gtctgtaaagcgggcggactaccctcctcgctacacttcgccagtgcaccgtgtg

SEQ ID NO: 289731 - DNA, 55 bp, Artificial
  Synthetic oligonucleotide
gtctgtagaggaaagacacgctgaggttcgccgtttctatgcaacgtgtgcgtgc

SEQ ID NO: 289732 - DNA, 55 bp, Artificial
  Synthetic oligonucleotide
gtctgtgcagacataagagtgatgttgctcgtgccgtcaatagtggcctcacgac

SEQ ID NO: 289733 - DNA, 55 bp, Artificial
  Synthetic oligonucleotide
gtcttaaacggggatggatacttcacagaccggcaacctgtgatgtggtcaggcg

SEQ ID NO: 289734 - DNA, 54 bp, Artificial
  Synthetic oligonucleotide
gtcttaaggttactatcttaggtcttaaggtaagtgatgtaggtcgtcaggtaa

SEQ ID NO: 289735 - DNA, 55 bp, Artificial
  Synthetic oligonucleotide
gtcttactgttatcgccgtgagttggtgcgctgacaactctggtcttaaatgcgc

SEQ ID NO: 289736 - DNA, 55 bp, Artificial
  Synthetic oligonucleotide
gtcttctccacttcgcttcgttctctgctacgtggtgcgttgcacgttttactcg

SEQ ID NO: 289737 - DNA, 55 bp, Artificial
  Synthetic oligonucleotide
gtcttttcccgtcctgattatgtgcgctctggcgagtagatccttttcgtgagtc

SEQ ID NO: 289738 - DNA, 60 bp, Artificial
  Synthetic oligonucleotide
taaccagaaagtattataagggtgcatcagcttgtatcctcgctttttcaattacagatc

SEQ ID NO: 289739 - DNA, 59 bp, Artificial
  Synthetic oligonucleotide
ctatccactaattttactcaccccatatttgaagagatccaataatccctctatattca

SEQ ID NO: 289740 - DNA, 55 bp, Artificial
  Synthetic oligonucleotide
gtgaaccctcggtcgtctaaagcaaccacagcgtttctgactcctgtcatgcccc

SEQ ID NO: 289741 - DNA, 55 bp, Artificial
  Synthetic oligonucleotide
tgttgtaattcatggcattcaacactctaaacgtttcacctttgctcgagtctat

SEQ ID NO: 289742 - DNA, 55 bp, Artificial
  Synthetic oligonucleotide
tgttgcgtacccaacacaatcgttcatcttcaactcctgtgtggtgcattccgta

SEQ ID NO: 289743 - DNA, 55 bp, Artificial
  Synthetic oligonucleotide
tgttgcgcagtacactcagtttgtgcaaatctacggatgtgtgccagcacggggt

SEQ ID NO: 289744 - DNA, 55 bp, Artificial
  Synthetic oligonucleotide
tgttgccttcaaccgtgtcgtccgtcttccatgtacgcgactgtgtttctcacgt

SEQ ID NO: 289745 - DNA, 55 bp, Artificial
  Synthetic oligonucleotide
tgttcgtgcccatgtgcgcctgtgaggtcgcgtgctgcactcccatgcagctttg

SEQ ID NO: 289746 - DNA, 55 bp, Artificial
  Synthetic oligonucleotide
tgttcgtatcgtgagcacctcacctcgactctgacgggcagcatggcacagctgc

SEQ ID NO: 289747 - DNA, 55 bp, Artificial
  Synthetic oligonucleotide
tgttcggtcggcagctgatgagagccctgtggaagtacgtctgggatgtgggtcg

SEQ ID NO: 289748 - DNA, 55 bp, Artificial
  Synthetic oligonucleotide
tgtgtgttcacccgtttgctttgcgtgctactggtctttctttgcatgccactcg

SEQ ID NO: 289749 - DNA, 55 bp, Artificial
  Synthetic oligonucleotide
tgtgtgtcgggctagggtggagccgagttgtaaggcgggcatgtcctccactgac

SEQ ID NO: 289750 - DNA, 60 bp, Artificial
  Synthetic oligonucleotide
ctatcaaatgaaacaatgtgttccaccgctagtgtttgcttctaacattccacttgctta

SEQ ID NO: 289751 - DNA, 55 bp, Artificial
  Synthetic oligonucleotide
tgtgtgtccgttgtgtgcgaggaaacaccgaggcgcgtacctggcagggatcagg

SEQ ID NO: 289752 - DNA, 55 bp, Artificial
  Synthetic oligonucleotide
tgtgtctttcgacttagatggagtcgatgcagtaagcgtcttgccacagggatcg

SEQ ID NO: 289753 - DNA, 55 bp, Artificial
  Synthetic oligonucleotide
tgtgtcgcagacacgcaaactcgtctgatcggagaagcgtgagtggcgagagtgg

SEQ ID NO: 289754 - DNA, 55 bp, Artificial
  Synthetic oligonucleotide
tgtgtataatgctggcgtttccgagtcggcacagagccgcgtgcggctcctcttg

SEQ ID NO: 289755 - DNA, 55 bp, Artificial
  Synthetic oligonucleotide
tgtgggcctaacgtacctctacgggcacaagttccgcagccgagcatacattgag

SEQ ID NO: 289756 - DNA, 55 bp, Artificial
  Synthetic oligonucleotide
tgtggctcgcccgctgtgcttgtgtacatctctctcgtctggctgtacgtgcgtc

SEQ ID NO: 289757 - DNA, 55 bp, Artificial
  Synthetic oligonucleotide
tgtggagccggcgatgtagagaggggagaagatccaagcgtgtctgcctagttag

SEQ ID NO: 289758 - DNA, 55 bp, Artificial
  Synthetic oligonucleotide
tgtggaacacaaggctcttcggcctctccacggacgtcccctctgccatggactc

SEQ ID NO: 289759 - DNA, 55 bp, Artificial
  Synthetic oligonucleotide
tgtgcttgagagagcgttagagagatgcgtgtgtgttctaacaagggtttgatgt

SEQ ID NO: 289760 - DNA, 55 bp, Artificial
  Synthetic oligonucleotide
tgtgctgtagttggtaggacggagcctcctcccgccgtacctagcctacggctct

SEQ ID NO: 289761 - DNA, 56 bp, Artificial
  Synthetic oligonucleotide
ctgtaatgaactaaaaagaatcctgtagtttaataggttagaacaccacactcata

SEQ ID NO: 289762 - DNA, 55 bp, Artificial
  Synthetic oligonucleotide
tgtgctcggcacatcgcttcacacctgggtagggcttccactcgactctcttcgc

SEQ ID NO: 289763 - DNA, 55 bp, Artificial
  Synthetic oligonucleotide
tgtgccaaatctcgaagcggtcattgtggttccaataccaatcacgcttgatggg

SEQ ID NO: 289764 - DNA, 55 bp, Artificial
  Synthetic oligonucleotide
tgtgatcgcagccatgccttttgagggttttgccgtattaagtattagccacagg

SEQ ID NO: 289765 - DNA, 55 bp, Artificial
  Synthetic oligonucleotide
tgtgaggcagctcagcacgtgcctaaccgacatgtgtctctgcgccacgcgtgca

SEQ ID NO: 289766 - DNA, 54 bp, Artificial
  Synthetic oligonucleotide
tgtctgtttgtaatagactgcagggaagttttgtgaagggtcgttttcgcgggg

SEQ ID NO: 289767 - DNA, 55 bp, Artificial
  Synthetic oligonucleotide
tgtctggaggaactactggcgaacgcccattttctgacattgttactagtattcg

SEQ ID NO: 289768 - DNA, 55 bp, Artificial
  Synthetic oligonucleotide
tgtctggactccccagccgcacattgcattccatcaggacgatgctgttccgagc

SEQ ID NO: 289769 - DNA, 55 bp, Artificial
  Synthetic oligonucleotide
tgtctatcatcatcctgcctatggacgttttctccctggagcagtaatcggtcgg

SEQ ID NO: 289770 - DNA, 55 bp, Artificial
  Synthetic oligonucleotide
tgtctagtgacagaagaaatagtgcactagggagaagcgacctgaaatgtttaaa

SEQ ID NO: 289771 - DNA, 55 bp, Artificial
  Synthetic oligonucleotide
tgtcgggagccgcacagttgcacacgcacgcctaattctcgagcacaggccgcga

SEQ ID NO: 289772 - DNA, 55 bp, Artificial
  Synthetic oligonucleotide
ggtagattattagtcgatactttcctaacagctaaggaattaattagagaaacaa

SEQ ID NO: 289773 - DNA, 55 bp, Artificial
  Synthetic oligonucleotide
tgtcgctaatctaattatcccttcaagtgtacgagttgtgcaagtggtgccaccc

SEQ ID NO: 289774 - DNA, 55 bp, Artificial
  Synthetic oligonucleotide
tgtcgcggcatgttgatgagaaatcgtatttgcatcatgatagaggactacgagt

SEQ ID NO: 289775 - DNA, 55 bp, Artificial
  Synthetic oligonucleotide
ttcacgaagatacccaaaaccgatcaaaacttgcggaattactgagatatcgatc

SEQ ID NO: 289776 - DNA, 54 bp, Artificial
  Synthetic oligonucleotide
ttattttacctccggtggccccagtcgtagaccgtcctcctctcccattcgtca

SEQ ID NO: 289777 - DNA, 53 bp, Artificial
  Synthetic oligonucleotide
ttatgtaattgggtaggggttgaggagttaggtgcaaaactccaagtcccgag

SEQ ID NO: 289778 - DNA, 55 bp, Artificial
  Synthetic oligonucleotide
ttatcccttcactgcgaaccctctcgttccacgtgcatgggaggggcgcgcgttg

SEQ ID NO: 289779 - DNA, 55 bp, Artificial
  Synthetic oligonucleotide
ttatcccgattcgaagggattcgaagggaaagcccacaaataatgtcggatgaaa

SEQ ID NO: 289780 - DNA, 55 bp, Artificial
  Synthetic oligonucleotide
ttatactaaccaattgcacagcgcgtgtgagcacccagaccgattcgtcttcccc

SEQ ID NO: 289781 - DNA, 55 bp, Artificial
  Synthetic oligonucleotide
ttagttcgttctgcaacaatcactccaggcaatattgataggttaggtggttttg

SEQ ID NO: 289782 - DNA, 55 bp, Artificial
  Synthetic oligonucleotide
ttagtgattttccggttccctgcacacctactaataacagtcctctaggtgaagg

SEQ ID NO: 289783 - DNA, 53 bp, Artificial
  Synthetic oligonucleotide
ctggtttcggaaaaggaaatttgtctaggtctgaacctcttttcggtcatcca

SEQ ID NO: 289784 - DNA, 48 bp, Artificial
  Synthetic oligonucleotide
ttagggttcgtggtttagggttcgtggtttagggttcgtggtttagga

SEQ ID NO: 289785 - DNA, 54 bp, Artificial
  Synthetic oligonucleotide
ttagggactcctccgcgtctgccacgttctccgttggggctaacttttcggatg

SEQ ID NO: 289786 - DNA, 51 bp, Artificial
  Synthetic oligonucleotide
ttaggcgcaacaacgtaaaccatttaagaagtgtaacggaaacgctaaacg

SEQ ID NO: 289787 - DNA, 55 bp, Artificial
  Synthetic oligonucleotide
ttaggacgtctaactctcgttgggcacaagtgtgcatattctcagactagtgctc

SEQ ID NO: 289788 - DNA, 52 bp, Artificial
  Synthetic oligonucleotide
ttaggacctacattactccggtcaagacctaagttagtaaccctaagacgaa

SEQ ID NO: 289789 - DNA, 55 bp, Artificial
  Synthetic oligonucleotide
ttagatgcggttgtggaaaccgttaccaatctagtcaagttggcccttctggtag

SEQ ID NO: 289790 - DNA, 55 bp, Artificial
  Synthetic oligonucleotide
ttagatgcatccaagctccaatttgaagtaaccgtgtacatactcgcatagttcg

SEQ ID NO: 289791 - DNA, 55 bp, Artificial
  Synthetic oligonucleotide
ttaacagagcttgtgtatattgttcctgcttaggggagactaatccattccatcg

SEQ ID NO: 289792 - DNA, 55 bp, Artificial
  Synthetic oligonucleotide
ttaacctcctcatggccagtgcgctggggagtccagctgtgcgtggtcaacgctg

SEQ ID NO: 289793 - DNA, 55 bp, Artificial
  Synthetic oligonucleotide
ttaagccgaactaagattgtcagccgtacgtttagtacgttccatgaaacacaca

SEQ ID NO: 289794 - DNA, 56 bp, Artificial
  Synthetic oligonucleotide
ggtactaaagtatttaattggatatgtacatatatgagtagtaattttggtattac

SEQ ID NO: 289795 - DNA, 55 bp, Artificial
  Synthetic oligonucleotide
ttaatacccagcaccctccgtatgtggccacgcccagctgtgaggaccagttacg

SEQ ID NO: 289796 - DNA, 55 bp, Artificial
  Synthetic oligonucleotide
ttaatccttcgattcgctgcatttgcttaacggcgtacctgcgtgaggaatagcg

SEQ ID NO: 289797 - DNA, 55 bp, Artificial
  Synthetic oligonucleotide
ttaatgcgctgtggcgttgaggcgatcaaaacttttacacgttcgtgcctacccc

SEQ ID NO: 289798 - DNA, 53 bp, Artificial
  Synthetic oligonucleotide
ttacagacgcttccagtaatttaatttcttataaatggtagcgccggtttccc

SEQ ID NO: 289799 - DNA, 55 bp, Artificial
  Synthetic oligonucleotide
ttacatacggatatacaaagtgacgctattccaacatgtgtttgcgaaaagtctg

SEQ ID NO: 289800 - DNA, 55 bp, Artificial
  Synthetic oligonucleotide
ttacccttgatcgtttggaccaactcctctctgaaacccctaagtcctcatctac

SEQ ID NO: 289801 - DNA, 55 bp, Artificial
  Synthetic oligonucleotide
ttaccgcccactttcttcctcgcgtgtgcggttgcttctctcgcttgtgagcaag

SEQ ID NO: 289802 - DNA, 52 bp, Artificial
  Synthetic oligonucleotide
ttacctataggtgcctaaaacctaccccttagaccaactcgggcaccctgcc

SEQ ID NO: 289803 - DNA, 55 bp, Artificial
  Synthetic oligonucleotide
ttacgacgctgccccacccacatgcgacgcctagatggcacaggggcgctccaat

SEQ ID NO: 289804 - DNA, 55 bp, Artificial
  Synthetic oligonucleotide
ttacgcagggatgcagagggcctgacacgcgccgtaggcgctacactgcgaagta

SEQ ID NO: 289805 - DNA, 59 bp, Artificial
  Synthetic oligonucleotide
ctggtatatatatattttggtcctatatcatggtttttaataagagttcttactgatgc

SEQ ID NO: 289806 - DNA, 55 bp, Artificial
  Synthetic oligonucleotide
ttacgcgatcgttagagatacgacaaggggagagcaagagcactcgcaaagaggc

SEQ ID NO: 289807 - DNA, 55 bp, Artificial
  Synthetic oligonucleotide
ttacggtgagagaggagactgcccgacgacacgcacacacgcgctcctctccaga

SEQ ID NO: 289808 - DNA, 55 bp, Artificial
  Synthetic oligonucleotide
ttacgtggttgcgcgctccctaacaggcgccgccgagccaagagttctgccctgt

SEQ ID NO: 289809 - DNA, 51 bp, Artificial
  Synthetic oligonucleotide
ttactaaatgggtttgatttaccctctacaaaccgattttccccaatctcg

SEQ ID NO: 289810 - DNA, 55 bp, Artificial
  Synthetic oligonucleotide
tgggcacctccacattgtgcttgtcagctaggacgcaagagcaactccaaaggtt

SEQ ID NO: 289811 - DNA, 55 bp, Artificial
  Synthetic oligonucleotide
tgggagttacccgacacacctagacgacgcgtgcgcattttcgtgtgtgcaccgt

SEQ ID NO: 289812 - DNA, 55 bp, Artificial
  Synthetic oligonucleotide
tgggagtcctttaggcgtctgatcaagtccgtaggagaggggccttagcagccgt

SEQ ID NO: 289813 - DNA, 55 bp, Artificial
  Synthetic oligonucleotide
tgggagctctcgtccggtacgacaggtagtaactgcaaggaaccatcaatcgcga

SEQ ID NO: 289814 - DNA, 55 bp, Artificial
  Synthetic oligonucleotide
tggctgcacacgtactggaggcagcgtcgcagcgcagctagcgggtccatgacga

SEQ ID NO: 289815 - DNA, 55 bp, Artificial
  Synthetic oligonucleotide
tggcgccagttggggaaactttaccgttgacaaattgcatgcaccaaattgtggg

SEQ ID NO: 289816 - DNA, 58 bp, Artificial
  Synthetic oligonucleotide
ggtaccaggttaatggtaccttaaggtcatgcaagccgctagatgattatacaggtcc

SEQ ID NO: 289817 - DNA, 55 bp, Artificial
  Synthetic oligonucleotide
tggcgagtatcttgatcacgggctcgactgtgttacgtcactcctgtcgacgtgc

SEQ ID NO: 289818 - DNA, 55 bp, Artificial
  Synthetic oligonucleotide
tggccgcgcctcagggaccaggtgcactccaagacgctctaaaagagggtcgttc

SEQ ID NO: 289819 - DNA, 55 bp, Artificial
  Synthetic oligonucleotide
tggcccttccacactagaagtatactcagctctggtggagtgcgctacattcact

SEQ ID NO: 289820 - DNA, 55 bp, Artificial
  Synthetic oligonucleotide
tggccaagaacatgctcacagcgaagctagcgtgtgcgtcggactgcatgacggt

SEQ ID NO: 289821 - DNA, 55 bp, Artificial
  Synthetic oligonucleotide
tggcatacctaaaccatcaacaacacgacctaaaagttctctcccaacaggaacc

SEQ ID NO: 289822 - DNA, 55 bp, Artificial
  Synthetic oligonucleotide
tggcaggagttcacgtttctgctgagccccgagcttgatgtggactggagtcggc

SEQ ID NO: 289823 - DNA, 55 bp, Artificial
  Synthetic oligonucleotide
tggcagcgtgctcgaaaacacctttccccagtcgagatgttgacgcgcatgtcat

SEQ ID NO: 289824 - DNA, 55 bp, Artificial
  Synthetic oligonucleotide
tggcagcggtaacgcacacgggccatattgcctgccgcgtcacgggtggtaatct

SEQ ID NO: 289825 - DNA, 55 bp, Artificial
  Synthetic oligonucleotide
tggcacgcagcacagcggcatcgtgtgaggtgagccgctggatatgctcttggtg

SEQ ID NO: 289826 - DNA, 55 bp, Artificial
  Synthetic oligonucleotide
tggcacagtatgtttcttcgactgcgtatccgtttgcgcctattatgggaatctg

SEQ ID NO: 289827 - DNA, 52 bp, Artificial
  Synthetic oligonucleotide
ctggtaaaaaggtgaaaaccttttttacccccaaactctgtgcaatggagca

SEQ ID NO: 289828 - DNA, 55 bp, Artificial
  Synthetic oligonucleotide
tgctggttggagaattggtccaaattaccccacatgctgcccaagttacccctgc

SEQ ID NO: 289829 - DNA, 55 bp, Artificial
  Synthetic oligonucleotide
tgctgtcttgtcactccgctcctcatgtatcaggtgcgttgccgttctctctctc

SEQ ID NO: 289830 - DNA, 55 bp, Artificial
  Synthetic oligonucleotide
tgcttcccgctttgaacttcgaggctcccgagtggtcggtgcttccttttcagtg

SEQ ID NO: 289831 - DNA, 55 bp, Artificial
  Synthetic oligonucleotide
tggaaggcacctctaaaacgacatcgcataaagaggttctaccaatattacaaca

SEQ ID NO: 289832 - DNA, 55 bp, Artificial
  Synthetic oligonucleotide
tggaagggtacggaaatgtgacgccagcgattcggctctaaactcaccaccgttc

SEQ ID NO: 289833 - DNA, 55 bp, Artificial
  Synthetic oligonucleotide
tggaataataccactaacatggtcgttaaattctttcgcacttgtcctttctaaa

SEQ ID NO: 289834 - DNA, 55 bp, Artificial
  Synthetic oligonucleotide
tggacgccacccatttagtggcaggtcacgagctgaaactaggcataatatctgc

SEQ ID NO: 289835 - DNA, 54 bp, Artificial
  Synthetic oligonucleotide
tggacggagggtggacgttacacacggcggggctgggtgttcaaagggtcaaga

SEQ ID NO: 289836 - DNA, 55 bp, Artificial
  Synthetic oligonucleotide
tggacggcctgtttaacgcgtcaagctatatgtgatcctccgcatggtgttcccc

SEQ ID NO: 289837 - DNA, 55 bp, Artificial
  Synthetic oligonucleotide
tggagacagcggtgcaacgagatgggctctgttcacgctgcggcgtctccgacaa

SEQ ID NO: 289838 - DNA, 57 bp, Artificial
  Synthetic oligonucleotide
accttacagacgcttccagattattaacttcttataaatgatagcgccgatttcctg

SEQ ID NO: 289839 - DNA, 55 bp, Artificial
  Synthetic oligonucleotide
tggagagagaacggctttcgccctacctactgggaggtcgagcgacgcaccctac

SEQ ID NO: 289840 - DNA, 55 bp, Artificial
  Synthetic oligonucleotide
tggagggctctcaccgatgccaccagagcgggatgaggtgtatgatcctatcgtg

SEQ ID NO: 289841 - DNA, 55 bp, Artificial
  Synthetic oligonucleotide
tggaggtgctcctcctaccaatttagattacgtccctcaatttgtacgctggttc

SEQ ID NO: 289842 - DNA, 55 bp, Artificial
  Synthetic oligonucleotide
tggagtcattcgggaacatgcagaacaggacaaattgttagtggtccaattacag

SEQ ID NO: 289843 - DNA, 55 bp, Artificial
  Synthetic oligonucleotide
tggatcagggaggtgacggcgggaagcatcttgcagtgcgtggtgtctcgaggca

SEQ ID NO: 289844 - DNA, 55 bp, Artificial
  Synthetic oligonucleotide
tggatgtcaatttctgatgtcgcgcgctcaatgcaaaaccaccatccccattgtg

SEQ ID NO: 289845 - DNA, 55 bp, Artificial
  Synthetic oligonucleotide
tgtcgataaggacctgcgactgatggccctgtttgatcttcggcgtcacgtgcag

SEQ ID NO: 289846 - DNA, 55 bp, Artificial
  Synthetic oligonucleotide
tgtcgagtcggctggaagcctacacgcgtcaggcatggtcctcttgctctggtcg

SEQ ID NO: 289847 - DNA, 55 bp, Artificial
  Synthetic oligonucleotide
tgtcctacggcaaggcacatcgactgagcgcgacaccatggatgactgtccaggg

SEQ ID NO: 289848 - DNA, 55 bp, Artificial
  Synthetic oligonucleotide
tgtccctcaagagctccctccgtcgcgtctcgaggaagttacgtacgcgagcctc

SEQ ID NO: 289849 - DNA, 60 bp, Artificial
  Synthetic oligonucleotide
cggaggctgcggacatccgtgcaatggcatagccgcgattccgaggcagcgaaacacagg

SEQ ID NO: 289850 - DNA, 55 bp, Artificial
  Synthetic oligonucleotide
ggtaattattataggtcctaacattacatacttgggtcttaccttcaataacata

SEQ ID NO: 289851 - DNA, 55 bp, Artificial
  Synthetic oligonucleotide
tgtcatcgcgtactccgccgcgttgtctgtgatgcgcaaggcgcgtccctcttcg

SEQ ID NO: 289852 - DNA, 55 bp, Artificial
  Synthetic oligonucleotide
tgtcagactccgactagccagggtgaaggaagtgtgctcgcacgagtgggatccg

SEQ ID NO: 289853 - DNA, 55 bp, Artificial
  Synthetic oligonucleotide
tgtatggtcgccacccacccagtccgccttcagtatcgggacatgttttgggtga

SEQ ID NO: 289854 - DNA, 55 bp, Artificial
  Synthetic oligonucleotide
tgtatgccatggagtcctctctctacgctctaactgccaacctagatttgcccac

SEQ ID NO: 289855 - DNA, 55 bp, Artificial
  Synthetic oligonucleotide
tgtatctcagcgaggttcatcacccacgagttcttctcacggtggtcgctctcct

SEQ ID NO: 289856 - DNA, 55 bp, Artificial
  Synthetic oligonucleotide
tgtatagttgatcacggactatatgatagatacatccatgttggcgtacctagtg

SEQ ID NO: 289857 - DNA, 55 bp, Artificial
  Synthetic oligonucleotide
tgtagtttgtgacctcgatgttggattgccatatcctgagggttgcagtagctct

SEQ ID NO: 289858 - DNA, 55 bp, Artificial
  Synthetic oligonucleotide
tgtaggtgtgcgtttgtttctgtatgtgcttagtggaacgcgctgaagtagtgtg

SEQ ID NO: 289859 - DNA, 55 bp, Artificial
  Synthetic oligonucleotide
tgtaggtgagttcattatgcgcgccttgtgtccgctatcgacggattgacgtacg

SEQ ID NO: 289860 - DNA, 55 bp, Artificial
  Synthetic oligonucleotide
tgtagatccacacatctctcgagctaggaaaacccgtgtgtgatggatgctaggg

SEQ ID NO: 289861 - DNA, 55 bp, Artificial
  Synthetic oligonucleotide
ctgaagttaagaccttagttagtcatgttaagaccttagttagtcatgttaagac

SEQ ID NO: 289862 - DNA, 55 bp, Artificial
  Synthetic oligonucleotide
tgtactgctacgaatacatcgtggaatggatagaggcacaccactacttcacccg

SEQ ID NO: 289863 - DNA, 55 bp, Artificial
  Synthetic oligonucleotide
tgtacgccgtgtgtgggtctccgcgtacccagtcgagatggaatgacgctccgag

SEQ ID NO: 289864 - DNA, 55 bp, Artificial
  Synthetic oligonucleotide
tgggcatgccaccagctctgttagccacgttcacgctcaggtgactcccgcctca

SEQ ID NO: 289865 - DNA, 55 bp, Artificial
  Synthetic oligonucleotide
tgggccctctctggctgattgtattcgagatagagtcgaatggttgacaggatca

SEQ ID NO: 289866 - DNA, 55 bp, Artificial
  Synthetic oligonucleotide
tgggtggatgtacgtgtccgtctgagaggggcgttgcccatgcaaggcactcccc

SEQ ID NO: 289867 - DNA, 51 bp, Artificial
  Synthetic oligonucleotide
tgggttcccggttaaggataaggtaggttccgggttaaggatgacgtatgc

SEQ ID NO: 289868 - DNA, 55 bp, Artificial
  Synthetic oligonucleotide
tggtaagggagctaaatcctaagtccttcgatgggttttcttggctattagtgcc

SEQ ID NO: 289869 - DNA, 55 bp, Artificial
  Synthetic oligonucleotide
tggtagctttgagtacacggagttcaaatcacagttgcgggctcatacaaatgcc

SEQ ID NO: 289870 - DNA, 55 bp, Artificial
  Synthetic oligonucleotide
tggtatatttgtccttcctacatatactgcttatatgtgtgcgcccctgtggatt

SEQ ID NO: 289871 - DNA, 55 bp, Artificial
  Synthetic oligonucleotide
tggtcacttgcacatcgcaatggaatgcgtcaccactggtattctcggcagccgg

SEQ ID NO: 289872 - DNA, 59 bp, Artificial
  Synthetic oligonucleotide
accgaccctgatctcctagttgctcataatctttgtggaggtatgttcgaactactgct

SEQ ID NO: 289873 - DNA, 55 bp, Artificial
  Synthetic oligonucleotide
tggtccagcgcaagagctgaggcttttcttactgtccattggtttccccatgctc

SEQ ID NO: 289874 - DNA, 55 bp, Artificial
  Synthetic oligonucleotide
tggtccccggtctccgacgccaggtcaacgtcccctgaaacagcgctacgcgaca

SEQ ID NO: 289875 - DNA, 55 bp, Artificial
  Synthetic oligonucleotide
tggtctactcacatctggcgtaagtggaggcgtcgtgcgcccagcctcttcgacc

SEQ ID NO: 289876 - DNA, 55 bp, Artificial
  Synthetic oligonucleotide
tggtcttggtatggctaagttatgtgatgattgtgacggagcatgggtaagaagc

SEQ ID NO: 289877 - DNA, 55 bp, Artificial
  Synthetic oligonucleotide
tggtgagggtgggtcggtagcaatgcgccttattcggcaacgaacccacggagcg

SEQ ID NO: 289878 - DNA, 55 bp, Artificial
  Synthetic oligonucleotide
tggtgcgcacgaaagggagcgcacacgcacggaggccctttgcacggtcacacat

SEQ ID NO: 289879 - DNA, 55 bp, Artificial
  Synthetic oligonucleotide
tggtggttggatatgccgcgccatggcgtttaacgagaaagaggtgagccacgcg

SEQ ID NO: 289880 - DNA, 55 bp, Artificial
  Synthetic oligonucleotide
tggtgtaccccatgatagcgtcatactttactccccgtataatcgtgtcttaggg

SEQ ID NO: 289881 - DNA, 55 bp, Artificial
  Synthetic oligonucleotide
tgtaacttgtatagcgctttcttgtaaatcatttgaaactggccattctcgatgc

SEQ ID NO: 289882 - DNA, 55 bp, Artificial
  Synthetic oligonucleotide
ttgttggcctttccactcccgattctacagcggtgcacgcccgagttcctgtgtg

SEQ ID NO: 289883 - DNA, 60 bp, Artificial
  Synthetic oligonucleotide
ggtaataatactgagaatggtggagcatgtgcgccctatagacgattgcacatatgtgat

SEQ ID NO: 289884 - DNA, 55 bp, Artificial
  Synthetic oligonucleotide
ttgtgtaaagcgtattcatcgccactcgccacgtgttcggggtttgcgacacgag

SEQ ID NO: 289885 - DNA, 55 bp, Artificial
  Synthetic oligonucleotide
ttgtgcgtcggtgtgcctgtggctactgggctgtgcagtgcactcctgttggtgg

SEQ ID NO: 289886 - DNA, 55 bp, Artificial
  Synthetic oligonucleotide
ttgtgcccgagtccaattctcgtgaacaagagcgctcatgagtcagcgcacctcc

SEQ ID NO: 289887 - DNA, 55 bp, Artificial
  Synthetic oligonucleotide
ttgtctagattacagagacactaccgacaagtagatcggtcagtaaacaagagcc

SEQ ID NO: 289888 - DNA, 55 bp, Artificial
  Synthetic oligonucleotide
ttgtcgtacttctcgggagggcgaaaggccacgtacacgtcggatgtgtagcgag

SEQ ID NO: 289889 - DNA, 55 bp, Artificial
  Synthetic oligonucleotide
ttgtccttcatataagggttatctaaacactcatacagcgaaaatagagctagcc

SEQ ID NO: 289890 - DNA, 55 bp, Artificial
  Synthetic oligonucleotide
ttgtcaacctcatcgtttggtcttgctctctctgagtagccacaagtacgacagt

SEQ ID NO: 289891 - DNA, 52 bp, Artificial
  Synthetic oligonucleotide
ttgtactttcaaaggggtactgagggaaaagtggtagatccgggagggtctg

SEQ ID NO: 289892 - DNA, 55 bp, Artificial
  Synthetic oligonucleotide
ttgtaataggaggtgttacaggtgtcatacttggaaacgctggagtagatatatc

SEQ ID NO: 289893 - DNA, 55 bp, Artificial
  Synthetic oligonucleotide
ttggtttcgtgtagatactttcccttgagggacgaaatgctttcgctgtgtaatt

SEQ ID NO: 289894 - DNA, 57 bp, Artificial
  Synthetic oligonucleotide
ggtaaggtatagcgtttactatcgaatgaaacaatgtgttccaccgttagtgtatgc

SEQ ID NO: 289895 - DNA, 55 bp, Artificial
  Synthetic oligonucleotide
ttggttccctcacgtccccatgctgctataggttggcgtgtctacggcacgtgac

SEQ ID NO: 289896 - DNA, 55 bp, Artificial
  Synthetic oligonucleotide
ttggtgcaagtgcactgtgcgtctgctgaactccgatctgcggctctccgcagct

SEQ ID NO: 289897 - DNA, 55 bp, Artificial
  Synthetic oligonucleotide
ttggtcccactctattcccgtcccctctcgcgcgctggagggactgtgccagaga

SEQ ID NO: 289898 - DNA, 54 bp, Artificial
  Synthetic oligonucleotide
ttggtaaagtcgtcaaggaagacttgcgtttccgcgtccctgtatgttgggttc

SEQ ID NO: 289899 - DNA, 55 bp, Artificial
  Synthetic oligonucleotide
ttgggggaagctaagagtctgtgccgctagtgctcgggggtcgtttgcggtacct

SEQ ID NO: 289900 - DNA, 55 bp, Artificial
  Synthetic oligonucleotide
ttggcggactccaaatgatactaacacatcgcagactttgctagataacgcgtag

SEQ ID NO: 289901 - DNA, 55 bp, Artificial
  Synthetic oligonucleotide
ttggcgctagtgtacgacgccgagggtcccatttgaggtgggtagggaaccgagc

SEQ ID NO: 289902 - DNA, 55 bp, Artificial
  Synthetic oligonucleotide
ttggcgaactcacagtcaaatcccgttagcgacgtggacgcggtactctcgcatg

SEQ ID NO: 289903 - DNA, 55 bp, Artificial
  Synthetic oligonucleotide
ttggcagtgtacggggagcctatgcactgctggctttgggtgaccagtccatcgc

SEQ ID NO: 289904 - DNA, 55 bp, Artificial
  Synthetic oligonucleotide
ttggattgcgccgctcactgtgtgatagtttgtgaagttctaagcgagtgagcga

SEQ ID NO: 289905 - DNA, 57 bp, Artificial
  Synthetic oligonucleotide
ggtaagcttttgcacggtaacggtcacacgctgttaataaatcagtccatacaactg

SEQ ID NO: 289906 - DNA, 55 bp, Artificial
  Synthetic oligonucleotide
ttggatagtgtattagtacgtagccagttagtcagaacaatgtatgcagcacgtc

SEQ ID NO: 289907 - DNA, 55 bp, Artificial
  Synthetic oligonucleotide
ttggagagcctgtatcaaggacctcttggcccctcatcaggccttcagttgcgcc

SEQ ID NO: 289908 - DNA, 55 bp, Artificial
  Synthetic oligonucleotide
ttggacccacgcgtgaggcagtccttggcgtgcaccacagcaaataacggcccca

SEQ ID NO: 289909 - DNA, 55 bp, Artificial
  Synthetic oligonucleotide
ttggacagagcaagcaacgggacaacacggactagcgggcagctgacgaacacgc

SEQ ID NO: 289910 - DNA, 55 bp, Artificial
  Synthetic oligonucleotide
ttgcttatcgttgagttgaactgtgaggtgctcgaaggatggtggctcgcatcag

SEQ ID NO: 289911 - DNA, 55 bp, Artificial
  Synthetic oligonucleotide
ttgctctgcatagcatgctttccctgccgtttgtctgatccggaatcacttctcg

SEQ ID NO: 289912 - DNA, 55 bp, Artificial
  Synthetic oligonucleotide
ttgctcctctttccgcacgtgtgtggcacgggctacttctgagggtgcctttagc

SEQ ID NO: 289913 - DNA, 55 bp, Artificial
  Synthetic oligonucleotide
ttgctcaaaatgaagttattatccctgcaggacctacagaattgcctcctgacgg

SEQ ID NO: 289914 - DNA, 55 bp, Artificial
  Synthetic oligonucleotide
ttgcggactcttggtgctgccggacaggtctgggctgctgccgtgccgaagggac

SEQ ID NO: 289915 - DNA, 55 bp, Artificial
  Synthetic oligonucleotide
ttgcggaagaggattggaatagctcacccctcgttggtgtacagtttgacggagc

SEQ ID NO: 289916 - DNA, 59 bp, Artificial
  Synthetic oligonucleotide
cacctagttatgtaacagatacaactctgttcagtcctactgaaggtcttgtaagtata

SEQ ID NO: 289917 - DNA, 55 bp, Artificial
  Synthetic oligonucleotide
ttttctactattgtgcgtttgtagtttcctctgctacatgggtccccagctgtaa

SEQ ID NO: 289918 - DNA, 55 bp, Artificial
  Synthetic oligonucleotide
ttttcagcgactgtgtgttgatactctcatgtgcacgtggacgctgctacggtgt

SEQ ID NO: 289919 - DNA, 55 bp, Artificial
  Synthetic oligonucleotide
ttttcactgacactcgagccagcgggcaagagagcgcagccgcacacctaacggc

SEQ ID NO: 289920 - DNA, 55 bp, Artificial
  Synthetic oligonucleotide
ttttcacggtgtgggaggggagtcgtaaaacagcgaaagcacctgtcgtgcggga

SEQ ID NO: 289921 - DNA, 52 bp, Artificial
  Synthetic oligonucleotide
ttttacgacgagcttttaaaattcgacgtccagtaggggactgacttctact

SEQ ID NO: 289922 - DNA, 55 bp, Artificial
  Synthetic oligonucleotide
tttgttgacatgcacggaagaccgacggctgcacgctattgcgtcctggtggagg

SEQ ID NO: 289923 - DNA, 55 bp, Artificial
  Synthetic oligonucleotide
tttgttactgtgtgtcccttatcccacgttgttccgacgacagccccgtaggatg

SEQ ID NO: 289924 - DNA, 55 bp, Artificial
  Synthetic oligonucleotide
tttgtgctctacttctcgcctctgcactgcggctggaatggcacaaacttctaag

SEQ ID NO: 289925 - DNA, 55 bp, Artificial
  Synthetic oligonucleotide
tttgtgcagctctgcacgcgagctctgaggggaggcgagtcactgatgcccatcg

SEQ ID NO: 289926 - DNA, 55 bp, Artificial
  Synthetic oligonucleotide
tttgtacgtcaacatcgagcagccctcgagagcgatgtcgtctccgcgtctctcc

SEQ ID NO: 289927 - DNA, 60 bp, Artificial
  Synthetic oligonucleotide
cacctaataaaatccactcgatagagtgtgacttgtcatcgctacaaagtgtagaattgt

SEQ ID NO: 289928 - DNA, 55 bp, Artificial
  Synthetic oligonucleotide
tttgtacgcagtgcacgtgacgcatacgtctccccgatctctaggacttggtgtg

SEQ ID NO: 289929 - DNA, 55 bp, Artificial
  Synthetic oligonucleotide
tttggtggaggggaggcgagcatgatgtcaggcggcggctcatcagacgtgcacc

SEQ ID NO: 289930 - DNA, 55 bp, Artificial
  Synthetic oligonucleotide
tttggtgccatatggccactggactggacacatatgaggtcgcattggttacggg

SEQ ID NO: 289931 - DNA, 55 bp, Artificial
  Synthetic oligonucleotide
tttggcgttcaccttgccagtagcgtttcggcgcgcatgcggcaccctactgtcc

SEQ ID NO: 289932 - DNA, 55 bp, Artificial
  Synthetic oligonucleotide
tttgctttccctacggctacaagtgaagggtgtggacgctgagtgcaccgggcgg

SEQ ID NO: 289933 - DNA, 55 bp, Artificial
  Synthetic oligonucleotide
tttgcgataccatactcggtcgcacccatctacgcatttggtgaaacgcgaaaga

SEQ ID NO: 289934 - DNA, 55 bp, Artificial
  Synthetic oligonucleotide
ttgttgttgctatgtatccgcagtttgcgttgaccggtcccgatggcacactcgg

SEQ ID NO: 289935 - DNA, 55 bp, Artificial
  Synthetic oligonucleotide
tttaatggccactaatcgtccagacacaattgatccggcattgacaagacctggg

SEQ ID NO: 289936 - DNA, 55 bp, Artificial
  Synthetic oligonucleotide
tttacagtccaaggaggaggcacgccgtgagtgaggtgtagacaagttagtttgg

SEQ ID NO: 289937 - DNA, 55 bp, Artificial
  Synthetic oligonucleotide
tttaccaccggtagaaggctcgagaggatgtgcacgttctatggattgacgctgc

SEQ ID NO: 289938 - DNA, 60 bp, Artificial
  Synthetic oligonucleotide
cacagtgaggcgtgcctggaagttgtcgacgcaacacagcaggaggtcgatcggtgagtt

SEQ ID NO: 289939 - DNA, 55 bp, Artificial
  Synthetic oligonucleotide
tttacggacaactatggcgccccatatacttgcatttatagacttaaggtacatg

SEQ ID NO: 289940 - DNA, 55 bp, Artificial
  Synthetic oligonucleotide
tttactgaggctaccatcagctcaaaagcgacttgtgctggaccgaactacacgg

SEQ ID NO: 289941 - DNA, 55 bp, Artificial
  Synthetic oligonucleotide
tttagacaatgcattgaaattatcaaacccacctgtatcaagtcttgttgttgaa

SEQ ID NO: 289942 - DNA, 55 bp, Artificial
  Synthetic oligonucleotide
tttagatggcgtggaactctctcagcctgtcccgcgtttccctctaatcacctac

SEQ ID NO: 289943 - DNA, 47 bp, Artificial
  Synthetic oligonucleotide
tttagggtccacgggttagggtccacgggttagggtccacgggttag

SEQ ID NO: 289944 - DNA, 55 bp, Artificial
  Synthetic oligonucleotide
tttattggatggtctggcttattacttttcccttgtgcttatttagctctaggtg

SEQ ID NO: 289945 - DNA, 55 bp, Artificial
  Synthetic oligonucleotide
tttattgtcgctccttttcagtaccacgagcacgtgtacatatgtgtcgatatct

SEQ ID NO: 289946 - DNA, 55 bp, Artificial
  Synthetic oligonucleotide
tttcacctaggaggaatttatgcatccgcccgtctgtcattaaggaagcgagcgg

SEQ ID NO: 289947 - DNA, 55 bp, Artificial
  Synthetic oligonucleotide
tttcatgctaagtcgacttccgtcagcgtgggtgtccttgagacgtactcacgca

SEQ ID NO: 289948 - DNA, 55 bp, Artificial
  Synthetic oligonucleotide
tttccgagcacatgcggcagcccattggcaatcttgtcagtcagacgatggtgcc

SEQ ID NO: 289949 - DNA, 58 bp, Artificial
  Synthetic oligonucleotide
caccgctagtatttgcttctaacattccacttgcttataactgtatggacgtaacctc

SEQ ID NO: 289950 - DNA, 55 bp, Artificial
  Synthetic oligonucleotide
tttcgcgtttcgacgttggccgctggagagccggactggacgaaggccacgcaga

SEQ ID NO: 289951 - DNA, 55 bp, Artificial
  Synthetic oligonucleotide
tttctcctagtgggagatatatcaccgtatggcaactcattccattgcaatacac

SEQ ID NO: 289952 - DNA, 55 bp, Artificial
  Synthetic oligonucleotide
tttgatacgcgaagcgaagaggataactgccaccgtatgattgctcttaactacc

SEQ ID NO: 289953 - DNA, 55 bp, Artificial
  Synthetic oligonucleotide
ttcgcgaggggatgaatgcacgggttaggcgtagggcggagcacgcgtagtgatg

SEQ ID NO: 289954 - DNA, 52 bp, Artificial
  Synthetic oligonucleotide
ttcgccttttacctcccatatggttccctcggagtagacgtcttaaagaacg

SEQ ID NO: 289955 - DNA, 55 bp, Artificial
  Synthetic oligonucleotide
ttcgcagaccccaagccacacggacgaagagaaagtgttcgacccacttttcctc

SEQ ID NO: 289956 - DNA, 55 bp, Artificial
  Synthetic oligonucleotide
ttcgattggttattttctcgtatcgggtggaccgtatggtatagaattagttgca

SEQ ID NO: 289957 - DNA, 55 bp, Artificial
  Synthetic oligonucleotide
ttcgattaagagagttaggatgcgatcacatctttggagtgcctggtgactatgc

SEQ ID NO: 289958 - DNA, 55 bp, Artificial
  Synthetic oligonucleotide
ttcgatacgtaaggcggcctgtcctctcgcttcagtgcgcgaatggctgtgatac

SEQ ID NO: 289959 - DNA, 55 bp, Artificial
  Synthetic oligonucleotide
ttcgacgtagacgcatctgtgcgccacgacagggtattctctcgtacgaggtgtc

SEQ ID NO: 289960 - DNA, 60 bp, Artificial
  Synthetic oligonucleotide
tactcagtctggattggaggcagtgtcctcgcgagccttgcaacctttcagcagatgtgg

SEQ ID NO: 289961 - DNA, 58 bp, Artificial
  Synthetic oligonucleotide
gggtgcctataccagtatcttatcacctagttatataactgacacaaccttaattagc

SEQ ID NO: 289962 - DNA, 55 bp, Artificial
  Synthetic oligonucleotide
ttcgacaagaagactgcagaccgtttccatagtgatgttttgaagtcaagacttt

SEQ ID NO: 289963 - DNA, 55 bp, Artificial
  Synthetic oligonucleotide
ttccttgatccatgggtgcttgagagcgtctttggcgctcattcgacggtgtggg

SEQ ID NO: 289964 - DNA, 55 bp, Artificial
  Synthetic oligonucleotide
ttcctggtgtggggcgcctgagtgccactccgaaggttatgtaccggatggggac

SEQ ID NO: 289965 - DNA, 55 bp, Artificial
  Synthetic oligonucleotide
ttcctgagcatgtaagacaaataaaacttccgtgtgacaaggaggcccatgtagg

SEQ ID NO: 289966 - DNA, 55 bp, Artificial
  Synthetic oligonucleotide
ttcctcggttcgccactgtggtagcgcgtggcactgtgcgcttctttcttctgtg

SEQ ID NO: 289967 - DNA, 55 bp, Artificial
  Synthetic oligonucleotide
ttcctccgcgagcgagatactcgcttgggccaccgcaaaattcccaaaggaggac

SEQ ID NO: 289968 - DNA, 55 bp, Artificial
  Synthetic oligonucleotide
ttcctacgcaggtcacgaagtccgtgcacttccaatgcaactcttcggcatcgcg

SEQ ID NO: 289969 - DNA, 53 bp, Artificial
  Synthetic oligonucleotide
ttccgtttgtgtggcgatcgttcctctggtccgccctccccggaccttctaac

SEQ ID NO: 289970 - DNA, 54 bp, Artificial
  Synthetic oligonucleotide
ttccgttaacgtaaaggataaacttatccaccgaactgagcatagcggaacctc

SEQ ID NO: 289971 - DNA, 55 bp, Artificial
  Synthetic oligonucleotide
ttcacgccctctgttctttccgtcttcgcacaggccacacatgcgcgccggcgca

SEQ ID NO: 289972 - DNA, 56 bp, Artificial
  Synthetic oligonucleotide
ctggatggaccttatacccacctttaagtacatctttaatgtccctatctcctgta

SEQ ID NO: 289973 - DNA, 55 bp, Artificial
  Synthetic oligonucleotide
ttcacgtcgtaatccagaccgatcagaactcattggtcccaagggcgattcttgc

SEQ ID NO: 289974 - DNA, 55 bp, Artificial
  Synthetic oligonucleotide
ttcagacgcccctggggtgcaagcccaaggagtacggagcgcgcatatacacagg

SEQ ID NO: 289975 - DNA, 55 bp, Artificial
  Synthetic oligonucleotide
ttcagccttctagacttgagctcgaaggggcagaatgggacggcgtcgcttcgtg

SEQ ID NO: 289976 - DNA, 55 bp, Artificial
  Synthetic oligonucleotide
ttcatgctagtgtaacgttggacacctgcataattggtctctacggaccgactct

SEQ ID NO: 289977 - DNA, 55 bp, Artificial
  Synthetic oligonucleotide
ttcatgtcaacaccgcaccgctccgcccctgccatcaacggaacggcctcaaagg

SEQ ID NO: 289978 - DNA, 55 bp, Artificial
  Synthetic oligonucleotide
ttcattagctagagagctcgactcactcgaagaggctatcgctgcaggtgataag

SEQ ID NO: 289979 - DNA, 55 bp, Artificial
  Synthetic oligonucleotide
ttcattttcagcttagcgaatgcgggtgttagtttcgctgaatggacaactatac

SEQ ID NO: 289980 - DNA, 53 bp, Artificial
  Synthetic oligonucleotide
ttccaagggcccggtgcaccggttcacttttgggaagcaaagcagcccctacc

SEQ ID NO: 289981 - DNA, 55 bp, Artificial
  Synthetic oligonucleotide
ttccacaggagattggacaaagcacctactagacactgacggcaatgtacaagag

SEQ ID NO: 289982 - DNA, 55 bp, Artificial
  Synthetic oligonucleotide
ttccacatacaatagtgggttcaggacgtgtgttttgaccatttgttctgcaggg

SEQ ID NO: 289983 - DNA, 57 bp, Artificial
  Synthetic oligonucleotide
gggtcttgatatggtaagaagagattggtgtccactttctaaaacagtaggcaatta

SEQ ID NO: 289984 - DNA, 55 bp, Artificial
  Synthetic oligonucleotide
ttccagacgctagacttcgtctatctcgtctacccttgaccgactgtctcgagac

SEQ ID NO: 289985 - DNA, 55 bp, Artificial
  Synthetic oligonucleotide
ttccagagtgtctgcgcaggtgcgcgcacatgtgaccctcgtggcgcgtctatag

SEQ ID NO: 289986 - DNA, 55 bp, Artificial
  Synthetic oligonucleotide
ttccccttgcgcacaggaagggtgccgccgtgtatgctacgcgcctctcgcaaga

SEQ ID NO: 289987 - DNA, 55 bp, Artificial
  Synthetic oligonucleotide
ttcccgacccgaacaaagagacgcatagctgccaggtcagcggacacctgctcgc

SEQ ID NO: 289988 - DNA, 55 bp, Artificial
  Synthetic oligonucleotide
ttcccttcaaatcgacacagactccgtgcgatacaagatgatggcgcgagcgtct

SEQ ID NO: 289989 - DNA, 55 bp, Artificial
  Synthetic oligonucleotide
ttccgtccatcattcgtgctcctctcacctctcgatgccttgtctgggcgtgagg

SEQ ID NO: 289990 - DNA, 55 bp, Artificial
  Synthetic oligonucleotide
ttgcgccttcgtgttcgtcacaaagtacggcgacgtgtacccacgctcaaaggac

SEQ ID NO: 289991 - DNA, 55 bp, Artificial
  Synthetic oligonucleotide
ttgcctgtgctagtatgttggattcatcggccgctctactgactcgattggtgcg

SEQ ID NO: 289992 - DNA, 55 bp, Artificial
  Synthetic oligonucleotide
ttgccgcgcactgaattggtccaaatatgttgccgctgaataaaagttgatggcc

SEQ ID NO: 289993 - DNA, 55 bp, Artificial
  Synthetic oligonucleotide
ttgcccgcagtgacgaggtgagggagacgtttacagtgctgcgtatgggcagaag

SEQ ID NO: 289994 - DNA, 60 bp, Artificial
  Synthetic oligonucleotide
cacatggtacaccacgacctcatacaaaattgtcaccatccgaattcgaaaaagtatgca

SEQ ID NO: 289995 - DNA, 55 bp, Artificial
  Synthetic oligonucleotide
ttgcatgcggcggagtgcggtcgggagaaggctgcgcgcccgtggggattgacag

SEQ ID NO: 289996 - DNA, 55 bp, Artificial
  Synthetic oligonucleotide
ttgcatcgcatgagtatgatgggccacagggttcgggttctcaactataacactt

SEQ ID NO: 289997 - DNA, 55 bp, Artificial
  Synthetic oligonucleotide
ttgcatccgatctgtttgacgcttcgcatggtaggggtcagctcgtcgttcgctc

SEQ ID NO: 289998 - DNA, 55 bp, Artificial
  Synthetic oligonucleotide
ttgcaggagaggtaaaagtggtgtcttgagcagagtaggcgcggtttggttcgcg

SEQ ID NO: 289999 - DNA, 55 bp, Artificial
  Synthetic oligonucleotide
ttgcacggtactttggtggggcccctgtcatttcgattcagggtcgcacataccc

SEQ ID NO: 290000 - DNA, 55 bp, Artificial
  Synthetic oligonucleotide
ttgcaccgggtgtaccaatgccaatggtgtcgcctagactgatttcatagcaccc

SEQ ID NO: 290001 - DNA, 55 bp, Artificial
  Synthetic oligonucleotide
ttgatcgaatctataccttggtagagtacctctagttgcaatagctacaatacac

SEQ ID NO: 290002 - DNA, 55 bp, Artificial
  Synthetic oligonucleotide
ttgagctgacttcgtccttccacgctaagtagcttgctcctgcgacacccggggt

SEQ ID NO: 290003 - DNA, 55 bp, Artificial
  Synthetic oligonucleotide
ttgagcgtcctcgtccgggagtctctccgcctgggctgttgacatctcatgacgc

SEQ ID NO: 290004 - DNA, 55 bp, Artificial
  Synthetic oligonucleotide
ttgagcacgtgagccggtcgactgtttcactcaagacaactacactacttacgcc

SEQ ID NO: 290005 - DNA, 60 bp, Artificial
  Synthetic oligonucleotide
ctgatgttttacatagttgagctgttccgtcatttggtgtcaaagttgatgccgttcctg

SEQ ID NO: 290006 - DNA, 54 bp, Artificial
  Synthetic oligonucleotide
ttgacagttttcgtcgcaaagacacgggacttaggcgtgttttctacggcaacc

SEQ ID NO: 290007 - DNA, 55 bp, Artificial
  Synthetic oligonucleotide
ttgaacctttcttcgactacatattggatgtcgacgggtacacttacacagacga

SEQ ID NO: 290008 - DNA, 55 bp, Artificial
  Synthetic oligonucleotide
ttcgcgtctgttcggctgctctcgtgttggtctcatctgtgttggtttagtttct

SEQ ID NO: 290009 - DNA, 55 bp, Artificial
  Synthetic oligonucleotide
ttcggaggtagacagttgagggccagtgaaggtatcagcataaaggtcgacgagc

SEQ ID NO: 290010 - DNA, 55 bp, Artificial
  Synthetic oligonucleotide
ttcggcggctcataggaggcctcggtgatcttactcagctcgaggtctgaacgcg

SEQ ID NO: 290011 - DNA, 55 bp, Artificial
  Synthetic oligonucleotide
ttcgggtctcccactgctgtggttgcacacgggtaccttccggagtacttcactg

SEQ ID NO: 290012 - DNA, 55 bp, Artificial
  Synthetic oligonucleotide
ttcggtgtcttcagcgcagcctcaacgctgtgcacactgctgtgcgtcgcacccg

SEQ ID NO: 290013 - DNA, 55 bp, Artificial
  Synthetic oligonucleotide
ttcgtccagccacactgggttcgatcgggcggcaacgcagagacacgctcacata

SEQ ID NO: 290014 - DNA, 55 bp, Artificial
  Synthetic oligonucleotide
ttcgtgcctcactacattgttgtgtccggtagcgctgggatctcgtggtacgcgt

SEQ ID NO: 290015 - DNA, 54 bp, Artificial
  Synthetic oligonucleotide
ttcgtgggagtaccattagtcccgttttctctttcgaaccacttgggtgcggca

SEQ ID NO: 290016 - DNA, 60 bp, Artificial
  Synthetic oligonucleotide
acctcatcacgccactcatcgccattccggcagtgtttgtgctcatccccggaacccgca

SEQ ID NO: 290017 - DNA, 55 bp, Artificial
  Synthetic oligonucleotide
ttcgtgtctgactaataatcgattatacctttgaccgggagtggttcttacgctg

SEQ ID NO: 290018 - DNA, 55 bp, Artificial
  Synthetic oligonucleotide
ttctcaccgaggccctaatcgacgccacggcgcactcttcgacaccaacggagga

SEQ ID NO: 290019 - DNA, 55 bp, Artificial
  Synthetic oligonucleotide
ttctcgggtacaccatatataccatggccaaaggggcgttggaggggctgacacg

SEQ ID NO: 290020 - DNA, 55 bp, Artificial
  Synthetic oligonucleotide
ttctcgtcgcaccctatggccagagcatcatgaacggcgtgctactctccatcgt

SEQ ID NO: 290021 - DNA, 55 bp, Artificial
  Synthetic oligonucleotide
ttctctcccattcttgttccctattaattgggaggtctgttaccttctgaggctc

SEQ ID NO: 290022 - DNA, 55 bp, Artificial
  Synthetic oligonucleotide
ttctgccgtccccatagatttgtctgcctagttgaatcttctgtgctgtcgtcgc

SEQ ID NO: 290023 - DNA, 55 bp, Artificial
  Synthetic oligonucleotide
ttctgtgtagctagacgtaatcacttgtgtagtcattcccttcttgcgcatccgg

SEQ ID NO: 290024 - DNA, 55 bp, Artificial
  Synthetic oligonucleotide
ttcttccgatagttgtggggctgcgacagacgatgggacagacggagaaacgggt

SEQ ID NO: 290025 - DNA, 55 bp, Artificial
  Synthetic oligonucleotide
ttcttgtgaacctcgtaatcgtgccataatagaactttcaaggtcttgagagcct

SEQ ID NO: 290026 - DNA, 55 bp, Artificial
  Synthetic oligonucleotide
tcgcctcgcctggttgccgctaatacccggaacgcgacaggccacaaatgcccaa

SEQ ID NO: 290027 - DNA, 60 bp, Artificial
  Synthetic oligonucleotide
cacccgatcgactatgagcgctccacttcgcagtcccccaacatactgcggtttcctgcg

SEQ ID NO: 290028 - DNA, 55 bp, Artificial
  Synthetic oligonucleotide
tcgcctcatttgtgatgtcccttgaactgcgctcgtagcgccagagtcgcctgta

SEQ ID NO: 290029 - DNA, 55 bp, Artificial
  Synthetic oligonucleotide
tcgccgatcaggcggagggtcaggtacacgcattggtcgactactggggcaatcg

SEQ ID NO: 290030 - DNA, 55 bp, Artificial
  Synthetic oligonucleotide
tcgcacctgaaagaaggcgtccagcagagaccgcagaggccgatgcacgtgtgcg

SEQ ID NO: 290031 - DNA, 55 bp, Artificial
  Synthetic oligonucleotide
tcgcacatagggtctgtcgaggccgcctagccacgcctggtacaacatctccgta

SEQ ID NO: 290032 - DNA, 55 bp, Artificial
  Synthetic oligonucleotide
tcgcaaatacatgttggaatggcatcactatgtatatcagtttgtaatgtcgcga

SEQ ID NO: 290033 - DNA, 55 bp, Artificial
  Synthetic oligonucleotide
tcgatgtgcttacgggcacgtgtgtgcatctgtaggcctctgtgtgtcctcttcc

SEQ ID NO: 290034 - DNA, 55 bp, Artificial
  Synthetic oligonucleotide
tcgatgacgggtacgacatgggcgaaggaaacggtcggtagagtggcaagcagcg

SEQ ID NO: 290035 - DNA, 55 bp, Artificial
  Synthetic oligonucleotide
tcgatctataagcccgtattcaagtgcttcgtgagaagacataaagttatctcga

SEQ ID NO: 290036 - DNA, 55 bp, Artificial
  Synthetic oligonucleotide
tcgatcccgtgctcatcagaaatgacttcccagaatttagcaccaatctggttcc

SEQ ID NO: 290037 - DNA, 55 bp, Artificial
  Synthetic oligonucleotide
tcgactggttagcggtgggcagattaccgctgggttggttgacggcgcgatgctg

SEQ ID NO: 290038 - DNA, 60 bp, Artificial
  Synthetic oligonucleotide
accgggcagatgtcagtaacttgaactattcatcagaattatcagtgacttgtgttgtaa

SEQ ID NO: 290039 - DNA, 55 bp, Artificial
  Synthetic oligonucleotide
tcgactgcgccggcagtatcgactacatgtgtgtgtagtgcacctccgtctcccc

SEQ ID NO: 290040 - DNA, 55 bp, Artificial
  Synthetic oligonucleotide
tcgactcagccgcttctcttataaggctgcaacgcgcgtaccaaccgctgtctag

SEQ ID NO: 290041 - DNA, 55 bp, Artificial
  Synthetic oligonucleotide
tcgacggagttcaccacagggacgacgtactacccgtgctacctctcgaggtcag

SEQ ID NO: 290042 - DNA, 55 bp, Artificial
  Synthetic oligonucleotide
tcgacgctagccaagtgtacgcacagctccacaacgtgggactccagtacgggcc

SEQ ID NO: 290043 - DNA, 55 bp, Artificial
  Synthetic oligonucleotide
tcgacgactatacactttagagcaggagaggatcgccgtgagagagaaaccgccg

SEQ ID NO: 290044 - DNA, 55 bp, Artificial
  Synthetic oligonucleotide
tcgacagactatttgtgcggcaaccaaggggcagttcacgtcagccagttccagc

SEQ ID NO: 290045 - DNA, 55 bp, Artificial
  Synthetic oligonucleotide
tccttcttgcacctatgcgtccccgccaacgtttaccacggccccgatgcgggta

SEQ ID NO: 290046 - DNA, 55 bp, Artificial
  Synthetic oligonucleotide
tcctgtgaagagagcgtgcaacagaaaaccgcgcctgcactcacataaagcaggc

SEQ ID NO: 290047 - DNA, 55 bp, Artificial
  Synthetic oligonucleotide
tcctggggcgggagtcaggttccaattcacgttccatttagtccgtcagcagtcc

SEQ ID NO: 290048 - DNA, 55 bp, Artificial
  Synthetic oligonucleotide
tcctggagatttgaccacgggccttagacaggtcacagaagcatttgttgctcac

SEQ ID NO: 290049 - DNA, 55 bp, Artificial
  Synthetic oligonucleotide
acctacggatgttatgtgttacgacgattatggaaatttacattattcgtgtaaa

SEQ ID NO: 290050 - DNA, 55 bp, Artificial
  Synthetic oligonucleotide
tcctgcgcgtggtttcgtttccgcccgttgtgcaactcgtgccgagtacgcagtc

SEQ ID NO: 290051 - DNA, 55 bp, Artificial
  Synthetic oligonucleotide
tcctgcgcccctcagcgcagagaggggccacactgtgcggttgccgctttctgtg

SEQ ID NO: 290052 - DNA, 55 bp, Artificial
  Synthetic oligonucleotide
tcctctcaagcggatgcacaccaagctaaggacctatgcgcacacgtggatgcag

SEQ ID NO: 290053 - DNA, 55 bp, Artificial
  Synthetic oligonucleotide
tcctccggccacgaaaaggagtgtataggcaagagggcagtgcgccctcacgagc

SEQ ID NO: 290054 - DNA, 55 bp, Artificial
  Synthetic oligonucleotide
tcctccgaagcgcacgcgtcacacacaaggcaagagcgccagctggtgtggctta

SEQ ID NO: 290055 - DNA, 55 bp, Artificial
  Synthetic oligonucleotide
tcctatggctcgaatgcgttcccacgttatcctccagaacagggggcagcaaggg

SEQ ID NO: 290056 - DNA, 55 bp, Artificial
  Synthetic oligonucleotide
tccgttgtctggagactgatgtttgatgtgacgtactggaaagtgaatccgtcct

SEQ ID NO: 290057 - DNA, 55 bp, Artificial
  Synthetic oligonucleotide
tccgttgctgtcttgcgactgcgtcacagagagaatcgtaaaagcgccgctcctc

SEQ ID NO: 290058 - DNA, 55 bp, Artificial
  Synthetic oligonucleotide
tccgttcagattaactccaatcatactacataatctgggtacgttacggtgcttg

SEQ ID NO: 290059 - DNA, 55 bp, Artificial
  Synthetic oligonucleotide
tccgtgcagatctgccccgctgcgttaccctttcgccttgtcaaccgccggtgat

SEQ ID NO: 290060 - DNA, 54 bp, Artificial
  Synthetic oligonucleotide
accgtaaattctaggtttccaactcactgaaaaacatagttggttgatacagtc

SEQ ID NO: 290061 - DNA, 55 bp, Artificial
  Synthetic oligonucleotide
tctacaaagggattcctagcgcctttggagctctcatccagtccacaggaaacta

SEQ ID NO: 290062 - DNA, 55 bp, Artificial
  Synthetic oligonucleotide
tctaaggagggcgttcaatcactcaagacattagaacctacggacaggatagatg

SEQ ID NO: 290063 - DNA, 55 bp, Artificial
  Synthetic oligonucleotide
tctaacttaggtcttacgttcactaacatgggtcataacttgactaactaaggtc

SEQ ID NO: 290064 - DNA, 55 bp, Artificial
  Synthetic oligonucleotide
tctaacaccatcgcgcagtagtaaaacttggatcatacagctagttcgtatgcgc

SEQ ID NO: 290065 - DNA, 55 bp, Artificial
  Synthetic oligonucleotide
tcgttgttattgttcacccgaaaccgaagcagcactcggtctctcccgttccacg

SEQ ID NO: 290066 - DNA, 55 bp, Artificial
  Synthetic oligonucleotide
tcgttgtctcattggactccttcggcaatgaaagactcgtgcaacttcgtgcact

SEQ ID NO: 290067 - DNA, 55 bp, Artificial
  Synthetic oligonucleotide
tcgttcacaagaaacgcctcaccatagctgcagtcctgtcgggcaatgttggccc

SEQ ID NO: 290068 - DNA, 55 bp, Artificial
  Synthetic oligonucleotide
tcgtggtggttatacacagtggtctaccgcatatagtggggttacatgattccac

SEQ ID NO: 290069 - DNA, 55 bp, Artificial
  Synthetic oligonucleotide
tcgtggaatggtatcggagcaggggacgtgctcagagggatcgaggtagttttcg

SEQ ID NO: 290070 - DNA, 54 bp, Artificial
  Synthetic oligonucleotide
tcgtggaaataaatttcgcagctttaactacggaaacaccacgaacacactttg

SEQ ID NO: 290071 - DNA, 60 bp, Artificial
  Synthetic oligonucleotide
tactcacctgcaacggagttggcgtatctgaagagtcgtctgtgcggtgcgtcgataacg

SEQ ID NO: 290072 - DNA, 55 bp, Artificial
  Synthetic oligonucleotide
gggtacctggtttctaacaaattataaacgagtaacagagctattagagctataa

SEQ ID NO: 290073 - DNA, 55 bp, Artificial
  Synthetic oligonucleotide
tcgtgcagtggttcgtacataggtgcagtccccacgaagaggaatttcccctccg

SEQ ID NO: 290074 - DNA, 55 bp, Artificial
  Synthetic oligonucleotide
tcgtctcgctaccttgggcgtcgacacaccacaaactctactcctacatccttgc

SEQ ID NO: 290075 - DNA, 55 bp, Artificial
  Synthetic oligonucleotide
tcgtctcgagtgaggtaagaattctgcaagcagcagtgcggtgctcctccgacct

SEQ ID NO: 290076 - DNA, 55 bp, Artificial
  Synthetic oligonucleotide
tcgtcaggagatggcaacgcttctgtgatttcatgctccttggacttgcattatg

SEQ ID NO: 290077 - DNA, 55 bp, Artificial
  Synthetic oligonucleotide
tcgtcaactatccacccatactgacgaataagctcctccttaactcggcagctca

SEQ ID NO: 290078 - DNA, 55 bp, Artificial
  Synthetic oligonucleotide
tcgcgagagacgtgcggtggaccaccgaagtacggaggcgaagggcttctttagc

SEQ ID NO: 290079 - DNA, 55 bp, Artificial
  Synthetic oligonucleotide
tcgcgagccaccgcgatgttccgttcgtgcactttgcatgctccgacgagtgtgc

SEQ ID NO: 290080 - DNA, 55 bp, Artificial
  Synthetic oligonucleotide
tcgcggaataattcaagatcccaatatacccagtgccaaatagctgctaagaaaa

SEQ ID NO: 290081 - DNA, 55 bp, Artificial
  Synthetic oligonucleotide
tcgcggactcgcaaatgagcgatgtatatctgccgtatcagtccagacgtgactc

SEQ ID NO: 290082 - DNA, 55 bp, Artificial
  Synthetic oligonucleotide
tcgcggcaaaagggtacgaccgcctcgcagcttagccgcttcccagttaaccgct

SEQ ID NO: 290083 - DNA, 58 bp, Artificial
  Synthetic oligonucleotide
gggtaccgggcagatgtcataaactatacctcctcatcaaagttagcagtgtcttacg

SEQ ID NO: 290084 - DNA, 55 bp, Artificial
  Synthetic oligonucleotide
tcgcgggcccctacgagtggtcagccgtgccgaagttcctaaagtcgaagatgct

SEQ ID NO: 290085 - DNA, 55 bp, Artificial
  Synthetic oligonucleotide
tcgcgtcgtgtagctaaccgtatgacagcccactcaagattcctatttgtacatg

SEQ ID NO: 290086 - DNA, 55 bp, Artificial
  Synthetic oligonucleotide
tcgctatggggaaaaggctctgtacgcgtgcgtcgtgttgagagaaggatgcgtg

SEQ ID NO: 290087 - DNA, 55 bp, Artificial
  Synthetic oligonucleotide
tcgctctgcggcacgaagtaatgctgcggtcgatgtggtcccgtcgtctctctct

SEQ ID NO: 290088 - DNA, 55 bp, Artificial
  Synthetic oligonucleotide
tcgctgcgcctgtcgttgtctcggcgtctctcttggacggctcgacagcgttgcc

SEQ ID NO: 290089 - DNA, 55 bp, Artificial
  Synthetic oligonucleotide
tcgctggcgctcttcatttgcgaattccacagagacggatcccagtgggatggac

SEQ ID NO: 290090 - DNA, 55 bp, Artificial
  Synthetic oligonucleotide
tcgcttctctactcggccaccctccgtgtgcagctgccaccgatatacgcacgga

SEQ ID NO: 290091 - DNA, 55 bp, Artificial
  Synthetic oligonucleotide
tcgcttctgagacgcgacgttggctaccacgtcggggcgtatgtgactcccagtc

SEQ ID NO: 290092 - DNA, 55 bp, Artificial
  Synthetic oligonucleotide
tcggggcagggatagaaaagccactcggggtcaccacatccgcggactggatgac

SEQ ID NO: 290093 - DNA, 55 bp, Artificial
  Synthetic oligonucleotide
tcgggtcgtaccataattcagaaaggacacgcaggcactaaccgacgggcgccac

SEQ ID NO: 290094 - DNA, 59 bp, Artificial
  Synthetic oligonucleotide
ctgcgaccatattgaagaaggtggactcacgtgttcttttaaagttgcgctctggttga

SEQ ID NO: 290095 - DNA, 55 bp, Artificial
  Synthetic oligonucleotide
tcggtacttactcgtatcaaacatgtttagattatgggttaacaggtgttatggc

SEQ ID NO: 290096 - DNA, 55 bp, Artificial
  Synthetic oligonucleotide
tcgtacttcccagcgcctctcacctacgcctgaagcgcacagacactcgcgtgtc

SEQ ID NO: 290097 - DNA, 55 bp, Artificial
  Synthetic oligonucleotide
tccaacgctagcttttccttgtgtcactcactaggccggacaggagctctgtggc

SEQ ID NO: 290098 - DNA, 50 bp, Artificial
  Synthetic oligonucleotide
tccaaagggctcaccgaagggttcttcgtaccgatttccaaaccggtcgt

SEQ ID NO: 290099 - DNA, 55 bp, Artificial
  Synthetic oligonucleotide
tcatgtcgcacacctcgacatgcactactgctggcgtgccaacatctggccacac

SEQ ID NO: 290100 - DNA, 55 bp, Artificial
  Synthetic oligonucleotide
tcatgtagccgtaagcttttcgcggattgtactgccgtcccttgtggtagtaatc

SEQ ID NO: 290101 - DNA, 55 bp, Artificial
  Synthetic oligonucleotide
tcatgatcgtcgtgatggcaggtgtagatagtgtggcgacaggcgtccgagtctt

SEQ ID NO: 290102 - DNA, 55 bp, Artificial
  Synthetic oligonucleotide
tcatcgatcgcggggtctgatcacatagcaggaatggcggtgggtgggaggtaga

SEQ ID NO: 290103 - DNA, 55 bp, Artificial
  Synthetic oligonucleotide
tcatcaccccgcgaggtggacgtgtgcgactgcacctgtcgcagccctcttccct

SEQ ID NO: 290104 - DNA, 55 bp, Artificial
  Synthetic oligonucleotide
tcataatgatactatgtcggcattaggtcgatctgatgatatgttttcggacact

SEQ ID NO: 290105 - DNA, 60 bp, Artificial
  Synthetic oligonucleotide
ctgcgcttggtaagcttgttaatttcgatcatgcggacattataggctactataatagcg

SEQ ID NO: 290106 - DNA, 55 bp, Artificial
  Synthetic oligonucleotide
tcagttctcgtcccatccgagcctcatctatgcgtgtctatgataggcgctaagg

SEQ ID NO: 290107 - DNA, 55 bp, Artificial
  Synthetic oligonucleotide
tcagttaatgctcacctaagggaggtgttttgcgggagctgagggtatcttggtg

SEQ ID NO: 290108 - DNA, 55 bp, Artificial
  Synthetic oligonucleotide
tcagtggggtggcgggtgatcgcacttgcagcgactcgtagctgtgagccgatgg

SEQ ID NO: 290109 - DNA, 55 bp, Artificial
  Synthetic oligonucleotide
tcagtgcatgcgtcggtccgcgtagaagctcgctgctaggcacggatgtgacgct

SEQ ID NO: 290110 - DNA, 55 bp, Artificial
  Synthetic oligonucleotide
tcagtataccgttattacgcgctttattgtcggcgactggtccgtgatgagcccc

SEQ ID NO: 290111 - DNA, 55 bp, Artificial
  Synthetic oligonucleotide
tcagctatctgccgctggtgtggactcctgtatcgagggctcagaatcaaaccac

SEQ ID NO: 290112 - DNA, 55 bp, Artificial
  Synthetic oligonucleotide
tcagattcgaactgattacctttggtccttcaaaccaacactctagccgttagtg

SEQ ID NO: 290113 - DNA, 55 bp, Artificial
  Synthetic oligonucleotide
tcagaatgaaccttgtctagctcaagatactacagcatttactggagttactatg

SEQ ID NO: 290114 - DNA, 55 bp, Artificial
  Synthetic oligonucleotide
tcaaggaggcctagacctggagctccgtcgccagtgtgtggacgccatggttgag

SEQ ID NO: 290115 - DNA, 55 bp, Artificial
  Synthetic oligonucleotide
tcaatccctactatcggggtagtagcagatgttagctacaaatccaaagcacaaa

SEQ ID NO: 290116 - DNA, 53 bp, Artificial
  Synthetic oligonucleotide
accaaagattcgaactcagaacacctcgcttaaaaagcgaatactttacctat

SEQ ID NO: 290117 - DNA, 55 bp, Artificial
  Synthetic oligonucleotide
tcaatcgctgcgaggtgcggcctccccgactgtttgcgtgagctccagctctctt

SEQ ID NO: 290118 - DNA, 55 bp, Artificial
  Synthetic oligonucleotide
tcacaaattactcatggaacaactattgaaatcgtgtggacagttacaccgagcc

SEQ ID NO: 290119 - DNA, 55 bp, Artificial
  Synthetic oligonucleotide
tcacaccgaaaacgaaacaatataagaggtggcgaaacaagcgcggagaggcccg

SEQ ID NO: 290120 - DNA, 55 bp, Artificial
  Synthetic oligonucleotide
tcacacggaagtacacatggacccaaccatccgacgtcccatcgctgtcatctgc

SEQ ID NO: 290121 - DNA, 55 bp, Artificial
  Synthetic oligonucleotide
tcacatgcttattgagctttgcacctcttaactggcgcgagtagttgcgtcgggg

SEQ ID NO: 290122 - DNA, 55 bp, Artificial
  Synthetic oligonucleotide
tcacccagacgcggagctgattctgaaggacgtggagtttgagccctgggactca

SEQ ID NO: 290123 - DNA, 55 bp, Artificial
  Synthetic oligonucleotide
tcacccgtgttactgagttacatggcttctgtgtacctcttcgatgtgagctacc

SEQ ID NO: 290124 - DNA, 55 bp, Artificial
  Synthetic oligonucleotide
tcaccctctcgttacttaacctgtccggcagggtattgattcgaggatgcactgg

SEQ ID NO: 290125 - DNA, 55 bp, Artificial
  Synthetic oligonucleotide
tcacgcatctggcagagtgcgatcgccttaggtgaccatctctacatgcacgtgc

SEQ ID NO: 290126 - DNA, 55 bp, Artificial
  Synthetic oligonucleotide
tcacgcccaaaccgtcgatagcctttacctcaagaatcgtgcagcttaattcacg

SEQ ID NO: 290127 - DNA, 60 bp, Artificial
  Synthetic oligonucleotide
gggacacttattagcagacttatctgcattaataggaactattgatatagttttcggaga

SEQ ID NO: 290128 - DNA, 55 bp, Artificial
  Synthetic oligonucleotide
tcacgccttaattagacccttaagacgtcgcctataggtatgtaagcaaagatgt

SEQ ID NO: 290129 - DNA, 55 bp, Artificial
  Synthetic oligonucleotide
tcacgtacggccactcgccgttccaaaggacaagcgtccgcaccgtctgtgagtc

SEQ ID NO: 290130 - DNA, 55 bp, Artificial
  Synthetic oligonucleotide
tcactccatcaaacccgcctgccgattacacgaactttgaagccccaaatgccgg

SEQ ID NO: 290131 - DNA, 55 bp, Artificial
  Synthetic oligonucleotide
tcactcgaacaacgacagagagggctcttcggtagtcaagacgaggacaagtgga

SEQ ID NO: 290132 - DNA, 55 bp, Artificial
  Synthetic oligonucleotide
tcacttaaccagcacgaggtctttaattgctttcgcgctatctaagggcatagag

SEQ ID NO: 290133 - DNA, 55 bp, Artificial
  Synthetic oligonucleotide
tccgtgagggaaccatcgcagcgctgtcagtccgcgggtgagaggattcggccct

SEQ ID NO: 290134 - DNA, 55 bp, Artificial
  Synthetic oligonucleotide
tccgtcctcttccatgcccgcgacgagagtagcaatggtactgtgaggcggctgg

SEQ ID NO: 290135 - DNA, 55 bp, Artificial
  Synthetic oligonucleotide
tccgggacagtttgcgcacacgggccttatcttcccgcggaaggccctgttgcat

SEQ ID NO: 290136 - DNA, 55 bp, Artificial
  Synthetic oligonucleotide
tccgctgctgaagggacgcggtacgtctccacggccgcgtttatcgcggctcaag

SEQ ID NO: 290137 - DNA, 55 bp, Artificial
  Synthetic oligonucleotide
tccgctgcctgcactcccgtcatgggtcccggttgtgggcggtcgtcacatcggc

SEQ ID NO: 290138 - DNA, 60 bp, Artificial
  Synthetic oligonucleotide
ggtgcgatgtgcgcactggtggactcgaacggtgctgagcttgccatcagtcgtgccttt

SEQ ID NO: 290139 - DNA, 55 bp, Artificial
  Synthetic oligonucleotide
tccgcgtatggaacccgtaccgctccaagctagcgtccgcgatctacgctggtgt

SEQ ID NO: 290140 - DNA, 55 bp, Artificial
  Synthetic oligonucleotide
tccgcgggtagtactgccaagaccgcacgagggagccagtcgaagagatgatggc

SEQ ID NO: 290141 - DNA, 55 bp, Artificial
  Synthetic oligonucleotide
tccgcgctttgtcacagcgaatcctctcacgaaagatgggtgcgccctcgtgggg

SEQ ID NO: 290142 - DNA, 55 bp, Artificial
  Synthetic oligonucleotide
tccgccgttacccgaagcgtgaggccggagagcgtgcacacccgcagagcaatag

SEQ ID NO: 290143 - DNA, 55 bp, Artificial
  Synthetic oligonucleotide
tccgagactcgggtgcggagcttgttgcactgcctgtacacatcggcccggtttg

SEQ ID NO: 290144 - DNA, 55 bp, Artificial
  Synthetic oligonucleotide
tcccttgtcacccatggacgggcgcgtatgattgcctcaaggcgacgagactccc

SEQ ID NO: 290145 - DNA, 55 bp, Artificial
  Synthetic oligonucleotide
tcccttcaccttgcccacgttcgccccggacgcgagccaggcgctctcttgcagt

SEQ ID NO: 290146 - DNA, 55 bp, Artificial
  Synthetic oligonucleotide
tccctgctacgtccacgcgaagagtgcagtagctcggcagttgtgctcgccttcc

SEQ ID NO: 290147 - DNA, 55 bp, Artificial
  Synthetic oligonucleotide
tcccgtgtggtcaaacatcagtgcgtcactaatcgccgtcgctcgtagcatcctg

SEQ ID NO: 290148 - DNA, 55 bp, Artificial
  Synthetic oligonucleotide
tcccgtggcgaggtaaatgattaggcacacagccaagatcttgcactggaacgtc

SEQ ID NO: 290149 - DNA, 53 bp, Artificial
  Synthetic oligonucleotide
caattaaaataagaagcccttcaaattattcttaacaattaactaaatgtgta

SEQ ID NO: 290150 - DNA, 55 bp, Artificial
  Synthetic oligonucleotide
tcccgtgcatgtttcgcagacttcctagtcagccggcagtgcccgtccgagtcta

SEQ ID NO: 290151 - DNA, 55 bp, Artificial
  Synthetic oligonucleotide
tccaagggtctgggcggttgttgatacgggtgaccgagtgtgcatgcgtctcccc

SEQ ID NO: 290152 - DNA, 55 bp, Artificial
  Synthetic oligonucleotide
tccacatgtcggacgaaggcatgagtcgctctacctttagcgtctctggtgccat

SEQ ID NO: 290153 - DNA, 55 bp, Artificial
  Synthetic oligonucleotide
tccaccgataagtcaaatcttcggctgctcaggtcacaacagctcaagagaaggg

SEQ ID NO: 290154 - DNA, 55 bp, Artificial
  Synthetic oligonucleotide
tccacgaccacaggacaacggcaactgttgttagcggctgtgagttgtacagtag

SEQ ID NO: 290155 - DNA, 55 bp, Artificial
  Synthetic oligonucleotide
tccactaaccccgcagggcccttgtaagctttgagaccaggcaaatgccaccgcg

SEQ ID NO: 290156 - DNA, 55 bp, Artificial
  Synthetic oligonucleotide
tccactacgcgactgttatggcccacacgcatgtgtgtcaattcaaacgtggacg

SEQ ID NO: 290157 - DNA, 55 bp, Artificial
  Synthetic oligonucleotide
tccacttaatgtgggctcgccacactaggcccatattcagattataccggctgcc

SEQ ID NO: 290158 - DNA, 55 bp, Artificial
  Synthetic oligonucleotide
tccatcacgtggctcaccgatgtacccgcaccgacctccgtgtcagatggactcg

SEQ ID NO: 290159 - DNA, 55 bp, Artificial
  Synthetic oligonucleotide
tcccaaccagacgtgagaggagccagcaccgaaggttctaaatctcagcagtctg

SEQ ID NO: 290160 - DNA, 60 bp, Artificial
  Synthetic oligonucleotide
cttccttggttacaaccttgatcgtgatgacatgcagagtattgtgatgtatgtcctata

SEQ ID NO: 290161 - DNA, 55 bp, Artificial
  Synthetic oligonucleotide
tcccagcttactgcacagtagtctcccagttatttgatgtaggatgtgcagcatc

SEQ ID NO: 290162 - DNA, 55 bp, Artificial
  Synthetic oligonucleotide
tcccagtagtctgcttggagctcgacgccacctggacacttcttatcggctggtg

SEQ ID NO: 290163 - DNA, 55 bp, Artificial
  Synthetic oligonucleotide
tccccaatctatactactggcatctgctattcaacatacatcgccaaaagaaatt

SEQ ID NO: 290164 - DNA, 55 bp, Artificial
  Synthetic oligonucleotide
tccccacgcttacggacggtggtgcgcacacctacttcgcgacggatacactcgt

SEQ ID NO: 290165 - DNA, 55 bp, Artificial
  Synthetic oligonucleotide
tcccctgcgaagatcatcacatccaattgggcagcacccataggggttgttcccc

SEQ ID NO: 290166 - DNA, 53 bp, Artificial
  Synthetic oligonucleotide
tcccgcacgggaatttctccgggcctacatttcgtacgtgaacgagcgttagg

SEQ ID NO: 290167 - DNA, 55 bp, Artificial
  Synthetic oligonucleotide
tgcactacacactgcacgaatgcctcatgctatgcgctgtatgcgtgttctctgg

SEQ ID NO: 290168 - DNA, 55 bp, Artificial
  Synthetic oligonucleotide
tgcacgggtgctgcagtctcgtcctgaagccgcgtgctttctctcgtgcaatggc

SEQ ID NO: 290169 - DNA, 55 bp, Artificial
  Synthetic oligonucleotide
tgcacggctgcactgtactggagctctgctgtcccagagagtgttgtccccggtc

SEQ ID NO: 290170 - DNA, 55 bp, Artificial
  Synthetic oligonucleotide
tgcacgacaccgccactaactgagtatgtcctgcaccgagaggagaagtgggtgc

SEQ ID NO: 290171 - DNA, 57 bp, Artificial
  Synthetic oligonucleotide
cttccgttcctgcatgtgacgtttcagctgtgtttgtagtagtcccgtttataccaa

SEQ ID NO: 290172 - DNA, 55 bp, Artificial
  Synthetic oligonucleotide
tgcaccactttatgaacatgtgcgtgtgacatgtgcccagttttggaagggcccc

SEQ ID NO: 290173 - DNA, 55 bp, Artificial
  Synthetic oligonucleotide
tgcaccaccagattggattccatttggcagtagttccatcgaaagatatcaagag

SEQ ID NO: 290174 - DNA, 55 bp, Artificial
  Synthetic oligonucleotide
tgcacacctcgagggtaggggtacctcacatgcggagaggagccgacggtaccag

SEQ ID NO: 290175 - DNA, 55 bp, Artificial
  Synthetic oligonucleotide
tgcacaatgtagttgtagtgtgcccagactagccttaggaggggtggcgctacag

SEQ ID NO: 290176 - DNA, 55 bp, Artificial
  Synthetic oligonucleotide
tgcaatgttcgaaatgtacgtgttattcgattctccgaaggggaaagcatcccac

SEQ ID NO: 290177 - DNA, 55 bp, Artificial
  Synthetic oligonucleotide
tgcaacccattgcgcaattttaaagtcgctacctccagagtacacgtagccaccg

SEQ ID NO: 290178 - DNA, 55 bp, Artificial
  Synthetic oligonucleotide
tgcaacacagcgctcactaaatagcttttccgcgctctctttccgttagtctcac

SEQ ID NO: 290179 - DNA, 55 bp, Artificial
  Synthetic oligonucleotide
tgcaaatcgccagctagcgttctcgtcctctgccctgtcccgtgggccgctctcc

SEQ ID NO: 290180 - DNA, 55 bp, Artificial
  Synthetic oligonucleotide
tgattagtgatgacacttcattcgagaggtcagaggaatataaactggcccaatc

SEQ ID NO: 290181 - DNA, 55 bp, Artificial
  Synthetic oligonucleotide
tgattaatcacggcactactgtccaacaaaacgtcattcaatccaatattgggca

SEQ ID NO: 290182 - DNA, 60 bp, Artificial
  Synthetic oligonucleotide
gctgctttagcaatgaacattcctgtagacttcctgtatttcatcactagtgtacaagct

SEQ ID NO: 290183 - DNA, 60 bp, Artificial
  Synthetic oligonucleotide
accagatcacaacataataccaatgaaatcgctatgatctcatgcattattcactagaat

SEQ ID NO: 290184 - DNA, 55 bp, Artificial
  Synthetic oligonucleotide
tgagcggacccttgcacgtgtcagcccattcgcgtagcgctctacgtaatgctta

SEQ ID NO: 290185 - DNA, 55 bp, Artificial
  Synthetic oligonucleotide
tgagctcgagagagcagagggcgccgtggtgaatgaaggatgcgatgagacgcgg

SEQ ID NO: 290186 - DNA, 55 bp, Artificial
  Synthetic oligonucleotide
tgaggaggtaaggcagtgcgcatatctttcccacgcgccctgcagctgcggacca

SEQ ID NO: 290187 - DNA, 55 bp, Artificial
  Synthetic oligonucleotide
tgaggtgtgggcacgagaaagtgcgagacggcacgtacgtgaagagctacacggg

SEQ ID NO: 290188 - DNA, 55 bp, Artificial
  Synthetic oligonucleotide
tgagtccaccataccgtcccaagtcggccccattggtgtccgagccacggctgac

SEQ ID NO: 290189 - DNA, 55 bp, Artificial
  Synthetic oligonucleotide
tgagtgccgagaatcgaatctggcgtccatggtgatgcatgcagtgcgtcacggg

SEQ ID NO: 290190 - DNA, 55 bp, Artificial
  Synthetic oligonucleotide
tgataaatgttcacgccaattagccgtcgtacttccggataaggctttaatggaa

SEQ ID NO: 290191 - DNA, 55 bp, Artificial
  Synthetic oligonucleotide
tgataagctcgtaggctccttgcgtcatctcagcgtcgggtatgttcacccggcc

SEQ ID NO: 290192 - DNA, 55 bp, Artificial
  Synthetic oligonucleotide
tgataaggactgttcaatcaaagatgaggcatgtacaataagaacactgagcgag

SEQ ID NO: 290193 - DNA, 55 bp, Artificial
  Synthetic oligonucleotide
tgatacatacacgtaataagaagtgccgagagggctaccaccgtacccgaaaagt

SEQ ID NO: 290194 - DNA, 60 bp, Artificial
  Synthetic oligonucleotide
ggtgataaagacacgcaggcgtcagtgtcaccacaggtggttggtgagacaccacaggtt

SEQ ID NO: 290195 - DNA, 55 bp, Artificial
  Synthetic oligonucleotide
tgatcaccgaatcgacttggatcgtcagagcatgaaacgccactaccctaggcgg

SEQ ID NO: 290196 - DNA, 55 bp, Artificial
  Synthetic oligonucleotide
tgatctcttatggtctgatcctactgataatgactcactcgagggaattgttcct

SEQ ID NO: 290197 - DNA, 55 bp, Artificial
  Synthetic oligonucleotide
tgatgccctgtggtcgaggtccgcacttgagacagcctataggaccggagctccg

SEQ ID NO: 290198 - DNA, 55 bp, Artificial
  Synthetic oligonucleotide
tgatgcgatcacgtgcatcccacccgcagtgcttgggattcccctcgcggggtgt

SEQ ID NO: 290199 - DNA, 55 bp, Artificial
  Synthetic oligonucleotide
tgatgcgtgctcacacacttgaggaagttcacgaagcccctaacactccccgacc

SEQ ID NO: 290200 - DNA, 55 bp, Artificial
  Synthetic oligonucleotide
tgatgggatgtgcaacagcggagcaaagggaggggcacgaccgtttgcgtttcct

SEQ ID NO: 290201 - DNA, 55 bp, Artificial
  Synthetic oligonucleotide
tgattaaaacgtgtagcatatgctccaagagttaaaccgatagacgagtgtatcg

SEQ ID NO: 290202 - DNA, 55 bp, Artificial
  Synthetic oligonucleotide
tgctgagagtcacagcggcattcgaagcaagggcgcactttgggcagtagcgggg

SEQ ID NO: 290203 - DNA, 55 bp, Artificial
  Synthetic oligonucleotide
tgctcttctcgactctctgctcacatcgcaagaggagacccgcacgcctcaatgg

SEQ ID NO: 290204 - DNA, 55 bp, Artificial
  Synthetic oligonucleotide
tgctatcgaacgccatatgcgggtgagctgatgggtgtccgtccgtgacactggc

SEQ ID NO: 290205 - DNA, 57 bp, Artificial
  Synthetic oligonucleotide
ggtgagtttggagtaagtatgttatctgatgggagcaacaaaccttacaaatgtaaa

SEQ ID NO: 290206 - DNA, 55 bp, Artificial
  Synthetic oligonucleotide
tgctactgctacgccgtgactactccaaaaggtatgctagtgagacgcacgacaa

SEQ ID NO: 290207 - DNA, 55 bp, Artificial
  Synthetic oligonucleotide
tgcgtttatctgtacacgatgaacctttcttacgttttgcctatgcttactatgg

SEQ ID NO: 290208 - DNA, 55 bp, Artificial
  Synthetic oligonucleotide
tgcgtggacgccctttgtgccccgctatcctccacaggctgcctcttcgtttctc

SEQ ID NO: 290209 - DNA, 55 bp, Artificial
  Synthetic oligonucleotide
tgcgtaacatgcacgagggtgtgtaaaatatgcctacgtacaagcacacgcgcgt

SEQ ID NO: 290210 - DNA, 55 bp, Artificial
  Synthetic oligonucleotide
tgcggtagcacttctcgcacaagccggggtggcacagcatgccgcacacgtgttg

SEQ ID NO: 290211 - DNA, 55 bp, Artificial
  Synthetic oligonucleotide
tgcgggctgcatggatacaagacagagcccaataaagtggagcacgttaagtacg

SEQ ID NO: 290212 - DNA, 55 bp, Artificial
  Synthetic oligonucleotide
tgcggcgattctgtgtcggtggtttcttctgtaaccccaggggcttatggcacgc

SEQ ID NO: 290213 - DNA, 55 bp, Artificial
  Synthetic oligonucleotide
tgcggaacatttgactggtctgtgggtcgcgtaacgcatgcgctgcctggcgagc

SEQ ID NO: 290214 - DNA, 55 bp, Artificial
  Synthetic oligonucleotide
tgcgctcactcctgcctactcgtttattggtgcgtagttgcctctgccctcgtgg

SEQ ID NO: 290215 - DNA, 55 bp, Artificial
  Synthetic oligonucleotide
tgcgcgccaacgggtgcgtatgtgagttggcattagtgtgtactgagctacaggg

SEQ ID NO: 290216 - DNA, 57 bp, Artificial
  Synthetic oligonucleotide
cttccatattccgcagggtagaatcgttaagatcggttagacaatcttctagacctg

SEQ ID NO: 290217 - DNA, 55 bp, Artificial
  Synthetic oligonucleotide
tgcgagtgtgagttgattggcccgtgtgtagtattctgccagaggaactacctcg

SEQ ID NO: 290218 - DNA, 55 bp, Artificial
  Synthetic oligonucleotide
tgcgacaacgccccttaacgtctgtatcgatgccttgtacataaccgtcgagccc

SEQ ID NO: 290219 - DNA, 55 bp, Artificial
  Synthetic oligonucleotide
tgcagctgctcaggcgactcagcgcttcggttagcgtggagctactcatgtttgc

SEQ ID NO: 290220 - DNA, 55 bp, Artificial
  Synthetic oligonucleotide
tgcagttcgtccccaccgtccaccgatgctttggcgagtcgagtgacacgtgtgg

SEQ ID NO: 290221 - DNA, 55 bp, Artificial
  Synthetic oligonucleotide
tgcatcccgagcccagcaagtcagcagtgatgcgcgtgcagaggtgcaccgtcta

SEQ ID NO: 290222 - DNA, 55 bp, Artificial
  Synthetic oligonucleotide
tgcatctactacttgtccagaggcgctactgtgcaggtgtcgagtgaaatgtgca

SEQ ID NO: 290223 - DNA, 55 bp, Artificial
  Synthetic oligonucleotide
tgcatgcctggtgttttgtattaagacgctaacttcctggttaaacttcccaatg

SEQ ID NO: 290224 - DNA, 55 bp, Artificial
  Synthetic oligonucleotide
tgcatgcgtgccctcctctctgaccttacacgcgccacgcttgtgtggactttac

SEQ ID NO: 290225 - DNA, 55 bp, Artificial
  Synthetic oligonucleotide
tgccacgtgataggcagaagccctactagatcttcccgattgccgtctgcgacgc

SEQ ID NO: 290226 - DNA, 55 bp, Artificial
  Synthetic oligonucleotide
tgccaggggtcgctcgatagagaacgccgggacagagtgacgtgtgccagtgtag

SEQ ID NO: 290227 - DNA, 60 bp, Artificial
  Synthetic oligonucleotide
cttcataagcactatgagcaaacatggcctcgtcaaaatctaattcgtcaaaatttacta

SEQ ID NO: 290228 - DNA, 55 bp, Artificial
  Synthetic oligonucleotide
tgccattcatggctcgaatcggcgtaacagattcttggggcggttggagtattac

SEQ ID NO: 290229 - DNA, 55 bp, Artificial
  Synthetic oligonucleotide
tgcccacgcggtctctcggacggtatcctcactggcgttctcacacagagagctc

SEQ ID NO: 290230 - DNA, 55 bp, Artificial
  Synthetic oligonucleotide
tgccctctgacctcgcagagcttcctaagcgtctccggcgccaaagtagcgcctt

SEQ ID NO: 290231 - DNA, 55 bp, Artificial
  Synthetic oligonucleotide
tgccgcacttgtgggcagacgtcggtgatggcaacacaggagaccatagggcgcg

SEQ ID NO: 290232 - DNA, 55 bp, Artificial
  Synthetic oligonucleotide
tgccgcggtgttgttggcgtgtgccgaagcgaggaggcacgccagacacgggaaa

SEQ ID NO: 290233 - DNA, 55 bp, Artificial
  Synthetic oligonucleotide
tgccgcgtccacgtctcgtcgacacacacgtactcctcaacccatggacgcacgt

SEQ ID NO: 290234 - DNA, 55 bp, Artificial
  Synthetic oligonucleotide
tgccgggacttcctcagcgtacgaagcactatacacgtatggcagactctcaatg

SEQ ID NO: 290235 - DNA, 55 bp, Artificial
  Synthetic oligonucleotide
tgccgtccgagatgcacaaagtatgtatgcctgtatccgatgactatggtttact

SEQ ID NO: 290236 - DNA, 53 bp, Artificial
  Synthetic oligonucleotide
tcttaggggtgtcggaatagcgccttaggggtgtcagaatagggtcttagggg

SEQ ID NO: 290237 - DNA, 55 bp, Artificial
  Synthetic oligonucleotide
tcttagattgtacccataccgacgcacggccagagcttcagagcgggtgggagat

SEQ ID NO: 290238 - DNA, 60 bp, Artificial
  Synthetic oligonucleotide
cacgctctgttgcgtgcacttattcgaactctatcaacttggcacagtttctaacaattg

SEQ ID NO: 290239 - DNA, 55 bp, Artificial
  Synthetic oligonucleotide
tctgtgtatcatcacgtgttccggcagagaagcagacgggttgaatcttgcgggg

SEQ ID NO: 290240 - DNA, 55 bp, Artificial
  Synthetic oligonucleotide
tctgtggcagctccttcgcaactagccccgtccacgcctgggacggaatcaaacc

SEQ ID NO: 290241 - DNA, 55 bp, Artificial
  Synthetic oligonucleotide
tctgtggagtcagggaggcggttcgacgcgtacatacgcggttggatgcagggta

SEQ ID NO: 290242 - DNA, 55 bp, Artificial
  Synthetic oligonucleotide
tctggtagctgtacgagtcgtagagtgtagtctggagaaaagtacacagtatctg

SEQ ID NO: 290243 - DNA, 55 bp, Artificial
  Synthetic oligonucleotide
tctggtacgtacggtatgtcaaccgtcggtcacttcccgtgggctgccggcgaag

SEQ ID NO: 290244 - DNA, 55 bp, Artificial
  Synthetic oligonucleotide
tctggaagcagcacttctgtcccgcgaggtgtctcgacagctggtgtgcgcctcg

SEQ ID NO: 290245 - DNA, 55 bp, Artificial
  Synthetic oligonucleotide
tctgctctcgtgaggtttccgttacgcgcctccgccccatgcgtgcatccgcgtg

SEQ ID NO: 290246 - DNA, 55 bp, Artificial
  Synthetic oligonucleotide
tctgcgtctgtcaaccctcccctctgtcactatcgtgtggcccacccaagagcgg

SEQ ID NO: 290247 - DNA, 55 bp, Artificial
  Synthetic oligonucleotide
tctgcgggtgtctgcccactggtagttaccctgcggaaccctgcacggggagcat

SEQ ID NO: 290248 - DNA, 55 bp, Artificial
  Synthetic oligonucleotide
tctgccgtgagcgacctgggagcacttgccgcgtgttcgtgcctggaacggatta

SEQ ID NO: 290249 - DNA, 60 bp, Artificial
  Synthetic oligonucleotide
ggtgaaaattcttaatatctatttgctcgattgaaccgatgtgtcctttccactgtctga

SEQ ID NO: 290250 - DNA, 55 bp, Artificial
  Synthetic oligonucleotide
tctgccctgtcgatgcgcacacggacgctcggatgtgtatgcgcgtgggtaggca

SEQ ID NO: 290251 - DNA, 55 bp, Artificial
  Synthetic oligonucleotide
tctgacttgcctctgcgacgctaagccggtggccgcagaggcgatgctagacatg

SEQ ID NO: 290252 - DNA, 55 bp, Artificial
  Synthetic oligonucleotide
tctctggttcgactaagcggcactggtttggctagaaaaggatacactatgcgcg

SEQ ID NO: 290253 - DNA, 55 bp, Artificial
  Synthetic oligonucleotide
tctctctgtcgcgcgctcatggtgtgtgggccaccgtgtatacgagggcgtgact

SEQ ID NO: 290254 - DNA, 55 bp, Artificial
  Synthetic oligonucleotide
tctacagaggcagtgcaacagcagtcgcggcactttgcagcagtaacgggagagt

SEQ ID NO: 290255 - DNA, 55 bp, Artificial
  Synthetic oligonucleotide
tctaccttccagtggccacgcgtcctccatgcaaccgcctctcctcgcgagcgac

SEQ ID NO: 290256 - DNA, 55 bp, Artificial
  Synthetic oligonucleotide
tctactatgtgtgtagtctcctattttgcatcacgttgtgacggggagcctttta

SEQ ID NO: 290257 - DNA, 55 bp, Artificial
  Synthetic oligonucleotide
tctacttcatgtacctccagcttgattgggctctacattcgactcgtctccttcg

SEQ ID NO: 290258 - DNA, 55 bp, Artificial
  Synthetic oligonucleotide
tctagcagaagggctcccgtggtcagaagcggggccattaactccaggcagcccc

SEQ ID NO: 290259 - DNA, 55 bp, Artificial
  Synthetic oligonucleotide
tctagttacgccacagttcaagtgatttaatctaagccaaccgcttgtggggtac

SEQ ID NO: 290260 - DNA, 56 bp, Artificial
  Synthetic oligonucleotide
ggtctttttggtggatatggtaattatttcttaccaatttatctaggagcttctga

SEQ ID NO: 290261 - DNA, 55 bp, Artificial
  Synthetic oligonucleotide
tctcaagacgcgccgacttctagtcgagagccttgctattctgcacaagcgcaca

SEQ ID NO: 290262 - DNA, 55 bp, Artificial
  Synthetic oligonucleotide
tctccagaacccacggccgccgcagacatcatctgtcatgttggaccccacgcaa

SEQ ID NO: 290263 - DNA, 55 bp, Artificial
  Synthetic oligonucleotide
tctcccgtgcatgagcagacctctgcacgaatggtacatgcgcacgggttgcccc

SEQ ID NO: 290264 - DNA, 55 bp, Artificial
  Synthetic oligonucleotide
tctccgaggcacgatgacataacatggcgccattcctcaccgctcacaagtcccc

SEQ ID NO: 290265 - DNA, 55 bp, Artificial
  Synthetic oligonucleotide
tctccgcaacggtacagaaacccctcacgacatcggaaccacaatggaacatgtt

SEQ ID NO: 290266 - DNA, 55 bp, Artificial
  Synthetic oligonucleotide
tctccgccccgttctgtcttacaatgtgtcaatacctgggtcataccgtggtcat

SEQ ID NO: 290267 - DNA, 55 bp, Artificial
  Synthetic oligonucleotide
tctccgctccacattgagtcatccaaacgagaaagtcacctaggcgggcgagaga

SEQ ID NO: 290268 - DNA, 55 bp, Artificial
  Synthetic oligonucleotide
tctcctccttcacaaagctctgtcacgtacagcaaatcctccgtcgtctgcattg

SEQ ID NO: 290269 - DNA, 55 bp, Artificial
  Synthetic oligonucleotide
tctcgacaattctagagccaacacacacgttacctcacatgtgtttagaaactag

SEQ ID NO: 290270 - DNA, 55 bp, Artificial
  Synthetic oligonucleotide
tctcgtgtgtgactcgtatatcggcatggatcagcagtacagcttcatccttcct

SEQ ID NO: 290271 - DNA, 55 bp, Artificial
  Synthetic oligonucleotide
acccacatactgtccctatgaaagtttctggaaaatgtggtagtgttcgtattcg

SEQ ID NO: 290272 - DNA, 55 bp, Artificial
  Synthetic oligonucleotide
tctctcgtagaggcttccagcaacgtagcgccctctatgcttaacgacgtatgaa

SEQ ID NO: 290273 - DNA, 55 bp, Artificial
  Synthetic oligonucleotide
tgagcactccagcgccatgtgcgtgcaccctttctatgggtgcggttgcgcagag

SEQ ID NO: 290274 - DNA, 55 bp, Artificial
  Synthetic oligonucleotide
tgactgccgcactccatcgtacggcggcgtcactctactccgttgttggaggcga

SEQ ID NO: 290275 - DNA, 55 bp, Artificial
  Synthetic oligonucleotide
tgactgaagtaacacactgctacaatgggaatataaaagacggtctgtttcacgg

SEQ ID NO: 290276 - DNA, 55 bp, Artificial
  Synthetic oligonucleotide
tgacgtgggttcattaaacactattggcatccttatacgggataaatccttccct

SEQ ID NO: 290277 - DNA, 55 bp, Artificial
  Synthetic oligonucleotide
tgacggagcaactcagtgcacgtgggccgcctgtcaggggatttcacgacacacg

SEQ ID NO: 290278 - DNA, 55 bp, Artificial
  Synthetic oligonucleotide
tgacgcggcaggcaatatggcccgtgtgcgttaccgctgccacatcgagtcaagc

SEQ ID NO: 290279 - DNA, 55 bp, Artificial
  Synthetic oligonucleotide
tgacgcacgtctcgatagagctcagggcattccatgtctcttgtccacagactcc

SEQ ID NO: 290280 - DNA, 55 bp, Artificial
  Synthetic oligonucleotide
tgaccttcccatgcagtaaacgacacggcgtccggatagactacggcaagcaagg

SEQ ID NO: 290281 - DNA, 55 bp, Artificial
  Synthetic oligonucleotide
tgacctggtttaacagtactgtcctgtttgtctccaacaatgcatgattacctag

SEQ ID NO: 290282 - DNA, 60 bp, Artificial
  Synthetic oligonucleotide
cttcaataacgaatgatatcaatgtgatagtgaacgcgcgatatttagaacgcgtgaccg

SEQ ID NO: 290283 - DNA, 55 bp, Artificial
  Synthetic oligonucleotide
tgaccgagagtattagtaattctcgcctcagtggcgcatagcaagctaacgcagt

SEQ ID NO: 290284 - DNA, 55 bp, Artificial
  Synthetic oligonucleotide
tgaccgaatggcagtggcggtgaaaccggaaactacacacgacaacccgacaacc

SEQ ID NO: 290285 - DNA, 55 bp, Artificial
  Synthetic oligonucleotide
tgacccacaatggtaggggctccacccctgacactccctgcagtgctccacatag

SEQ ID NO: 290286 - DNA, 55 bp, Artificial
  Synthetic oligonucleotide
tgacacgcctcggccgagtactggacacgacccctaccgctggagtcgagggtaa

SEQ ID NO: 290287 - DNA, 55 bp, Artificial
  Synthetic oligonucleotide
tgacaccccacggtttggaggttgcgacgggcaacgcagcagtgagcttgagcac

SEQ ID NO: 290288 - DNA, 55 bp, Artificial
  Synthetic oligonucleotide
tgacaacgcggaagtgctcgcccaagatgagccgcacctccgtcacgcatcgact

SEQ ID NO: 290289 - DNA, 55 bp, Artificial
  Synthetic oligonucleotide
tgaataaggttggttgccggtcgttagaattatgttgcatgagtatcagaatgaa

SEQ ID NO: 290290 - DNA, 55 bp, Artificial
  Synthetic oligonucleotide
tcttctacacagcctcgtcgcctctaggggccctcaactgcgtgcgggacactgt

SEQ ID NO: 290291 - DNA, 55 bp, Artificial
  Synthetic oligonucleotide
tcttctagaataccgaatacattcgtcggggtgttcggactgagcggtgcagccc

SEQ ID NO: 290292 - DNA, 55 bp, Artificial
  Synthetic oligonucleotide
tcttgccctgcgtgtgtccccgcgcgccgctctagtgtttggtttcgctctttcg

SEQ ID NO: 290293 - DNA, 59 bp, Artificial
  Synthetic oligonucleotide
gctggagcttaactcgaatcacggcctcaacgtcttcttgtaccgactcatctccttta

SEQ ID NO: 290294 - DNA, 60 bp, Artificial
  Synthetic oligonucleotide
ggtagcttacaatataatccagatagccaagttcgagtatatacttcttctagtattatg

SEQ ID NO: 290295 - DNA, 55 bp, Artificial
  Synthetic oligonucleotide
tcttgggagccgaagtcggaggactccatgtacgaggccaggcttcgcgtgttcg

SEQ ID NO: 290296 - DNA, 55 bp, Artificial
  Synthetic oligonucleotide
tcttggggtcgcctgcggcatggcatagccacttgatcggatatgcgagggacgg

SEQ ID NO: 290297 - DNA, 55 bp, Artificial
  Synthetic oligonucleotide
tcttgtaaaaggctaactgataagagatggttgaggtaggttaaagtggatagac

SEQ ID NO: 290298 - DNA, 55 bp, Artificial
  Synthetic oligonucleotide
tcttgtgtcgccgactggccactgcgtcgtggaccctaccttacgcgaggagtgg

SEQ ID NO: 290299 - DNA, 55 bp, Artificial
  Synthetic oligonucleotide
tctttatcgcgccgtctcatctacggacaccgacgcgaatacgcccaaacacctc

SEQ ID NO: 290300 - DNA, 55 bp, Artificial
  Synthetic oligonucleotide
tctttcgcagccgttcgccctgagttgcattgatcggtccaacacgccttttcat

SEQ ID NO: 290301 - DNA, 55 bp, Artificial
  Synthetic oligonucleotide
tcttttccgtcgtttctggaatgcgtctgcgtgtgatgcatctcttcgtgccggc

SEQ ID NO: 290302 - DNA, 55 bp, Artificial
  Synthetic oligonucleotide
tgaaagaaggcaccactgtcttcgtgcctggccgcttcggtgtgatgctcgagtg

SEQ ID NO: 290303 - DNA, 55 bp, Artificial
  Synthetic oligonucleotide
tgaaatgcatgtcgtaagatttgattatagagtagatgcttgcaaaagctttact

SEQ ID NO: 290304 - DNA, 55 bp, Artificial
  Synthetic oligonucleotide
tgaacacgtaccgctccgtttcgcacgagagcattgtgaagtattacggtagggg

SEQ ID NO: 290305 - DNA, 60 bp, Artificial
  Synthetic oligonucleotide
cacctttgagcgccgtactatttaagctgacactaagctatcactgaaatcagagtataa

SEQ ID NO: 290306 - DNA, 55 bp, Artificial
  Synthetic oligonucleotide
tgaagcaaccctaatcccaatggtaataatgataggagtatggggctcaagaacc

SEQ ID NO: 290307 - DNA, 55 bp, Artificial
  Synthetic oligonucleotide
tgaagccacatggggttcccggggccaaggtacacggcagagtagatgtgcggag

SEQ ID NO: 290308 - DNA, 55 bp, Artificial
  Synthetic oligonucleotide
tgaagtgatcgctgtagctatgccggacgttgatgtagcggtaacacacaggcgg

SEQ ID NO: 290309 - DNA, 55 bp, Artificial
  Synthetic oligonucleotide
gctaattgaactccgtatatgtctagtgcctgccttagcttgggtgttaagttgg

SEQ ID NO: 290310 - DNA, 55 bp, Artificial
  Synthetic oligonucleotide
gctaattacaatgattgctcaatcgggaggtaccaacaaatcagcaggagctaac

SEQ ID NO: 290311 - DNA, 55 bp, Artificial
  Synthetic oligonucleotide
gctaagcttaccctaggtatgctagaggtatcctgtgcacctttgaggtaccgga

SEQ ID NO: 290312 - DNA, 55 bp, Artificial
  Synthetic oligonucleotide
gctaagacggtggcatccactgcacgcattacttcgacacgactacacgtgagcg

SEQ ID NO: 290313 - DNA, 55 bp, Artificial
  Synthetic oligonucleotide
gctaacgtccagcaggaacaagtcgctggttactcgtagcactgtcaagaccggg

SEQ ID NO: 290314 - DNA, 55 bp, Artificial
  Synthetic oligonucleotide
gctaacggagagcgggctgcgattcccctggttgaacagattagcgtacttgaag

SEQ ID NO: 290315 - DNA, 55 bp, Artificial
  Synthetic oligonucleotide
gctaacgcgtgcatatgtcaccccgagcagttggcccgccaagctcatatcgtgg

SEQ ID NO: 290316 - DNA, 57 bp, Artificial
  Synthetic oligonucleotide
ggtatagaaatgtttaataagggactgtctcaaggtgaatctggtgataatgttggg

SEQ ID NO: 290317 - DNA, 55 bp, Artificial
  Synthetic oligonucleotide
gctaacctcgttgcttcctgtttcgctacatgtacccgtgcaactgatacggcta

SEQ ID NO: 290318 - DNA, 55 bp, Artificial
  Synthetic oligonucleotide
gctaaacagaggtctaggctagaagattgggaacacaccaatggctggacagagg

SEQ ID NO: 290319 - DNA, 55 bp, Artificial
  Synthetic oligonucleotide
gcgttgtgtgctacctgcgcactggactaatgtcctctgtgtgcgagatggagcg

SEQ ID NO: 290320 - DNA, 55 bp, Artificial
  Synthetic oligonucleotide
gcgttgtctctaggggatgagcggtcacaccatggagtgcgggtcgtcgtgtgtc

SEQ ID NO: 290321 - DNA, 55 bp, Artificial
  Synthetic oligonucleotide
gcgttgcttttctgagaacacaccgcaaatagggccggcggtgctgagaggtctc

SEQ ID NO: 290322 - DNA, 55 bp, Artificial
  Synthetic oligonucleotide
gcgttgctgccctgaaatgatacacccatcgacctatgtgaaccttgcaaagtgc

SEQ ID NO: 290323 - DNA, 55 bp, Artificial
  Synthetic oligonucleotide
gcgttgcacgtttggtatatataggctacactcagtccgggccatgccaaatgtg

SEQ ID NO: 290324 - DNA, 55 bp, Artificial
  Synthetic oligonucleotide
gcgttgcaactgacaaatcgttatccccgacaaatgagttgcaaggatccagtgc

SEQ ID NO: 290325 - DNA, 53 bp, Artificial
  Synthetic oligonucleotide
gcgttgatccgcggatcccgtgttttggtttcgtgggccaaggtttcgccagg

SEQ ID NO: 290326 - DNA, 55 bp, Artificial
  Synthetic oligonucleotide
gcgttctcgacgtagcgccagtctttgcgcaggtaggcacgattccactgcacca

SEQ ID NO: 290327 - DNA, 58 bp, Artificial
  Synthetic oligonucleotide
ggtatagcgtttactatcgaatgaaacattgtgttccaccgctagtgtttgcttctaa

SEQ ID NO: 290328 - DNA, 55 bp, Artificial
  Synthetic oligonucleotide
gcgttattctctacccaccaagcattatctccatatcgagtacgaatttctcgga

SEQ ID NO: 290329 - DNA, 55 bp, Artificial
  Synthetic oligonucleotide
gcgttagtcgatctaatcaagatactttcacttcggtggatattatgcagcgcgc

SEQ ID NO: 290330 - DNA, 55 bp, Artificial
  Synthetic oligonucleotide
gcgtgtttctcttcagcatccgttaacccaccccgcacacgtacccttcagtccg

SEQ ID NO: 290331 - DNA, 55 bp, Artificial
  Synthetic oligonucleotide
gcgtgttggtgcacccaggtaggctcgggctgtttctacaggtgctccggatgag

SEQ ID NO: 290332 - DNA, 55 bp, Artificial
  Synthetic oligonucleotide
gcgtgtgtctattaagaatccgtgacgtaagaggcgcgctaccaatagtgtgcag

SEQ ID NO: 290333 - DNA, 55 bp, Artificial
  Synthetic oligonucleotide
gcgtgtgcagctgtcacttgtggacgttgattactcagacacctacgccccggca

SEQ ID NO: 290334 - DNA, 55 bp, Artificial
  Synthetic oligonucleotide
gcgtgtctaagtactttctcgcattctcggtactccccttgtaaggaagccagga

SEQ ID NO: 290335 - DNA, 55 bp, Artificial
  Synthetic oligonucleotide
gcgtgtcgacgtgtttgaatgcctcgatgtgtgtcgttcagctttcggtgaagag

SEQ ID NO: 290336 - DNA, 55 bp, Artificial
  Synthetic oligonucleotide
gcgtgtcctcatagctgacctcctcgagagtctagcgctgcctgtcgtactcttg

SEQ ID NO: 290337 - DNA, 55 bp, Artificial
  Synthetic oligonucleotide
gcgtgtccatgcgtcgtttgcgtgcacgcgtacctgggcacattaccacaacgcg

SEQ ID NO: 290338 - DNA, 58 bp, Artificial
  Synthetic oligonucleotide
acgaatcatacggccttgagcttcactacgctctaagtagaaaccaggttcactagta

SEQ ID NO: 290339 - DNA, 53 bp, Artificial
  Synthetic oligonucleotide
gcgtgggcttacgcgtgttcttttcctacaacggtgaagtaaccgttgcgaaa

SEQ ID NO: 290340 - DNA, 55 bp, Artificial
  Synthetic oligonucleotide
gcgtgggcctcgcatcgctgtgctaccacggctgtgtaaacaggcgatctcttaa

SEQ ID NO: 290341 - DNA, 55 bp, Artificial
  Synthetic oligonucleotide
gcgtgcttgctgccaaatgtgcgtgatagatagtgccgttaccttcgctagcgtg

SEQ ID NO: 290342 - DNA, 55 bp, Artificial
  Synthetic oligonucleotide
gcgtgccttgaagcacgacgcgagggacgcatagaaaccgacagagaaaaggcga

SEQ ID NO: 290343 - DNA, 55 bp, Artificial
  Synthetic oligonucleotide
gcgtgcaacgccactggcacccctccattcatcgttcactctagcatcaaccatg

SEQ ID NO: 290344 - DNA, 55 bp, Artificial
  Synthetic oligonucleotide
gctcgacacacgtacacgcctgcagaacttgtgtgtcctttctcacgctctaccg

SEQ ID NO: 290345 - DNA, 55 bp, Artificial
  Synthetic oligonucleotide
gctcgacaatgtatagtggttgcagcgtaaggcaatacgtaacaacatgaaatga

SEQ ID NO: 290346 - DNA, 55 bp, Artificial
  Synthetic oligonucleotide
gctcctttacgcggagaagtggtgcctaacgagtctctttgcttcgcctatcccc

SEQ ID NO: 290347 - DNA, 55 bp, Artificial
  Synthetic oligonucleotide
gctccttcgcaactagccccgtccacgcctgggacggaatcaagcctgtgtgaag

SEQ ID NO: 290348 - DNA, 55 bp, Artificial
  Synthetic oligonucleotide
gctcctctctggcgatgactcgagggcgcactgcttccatccagcacccgcattt

SEQ ID NO: 290349 - DNA, 60 bp, Artificial
  Synthetic oligonucleotide
cacgaagtaggcaaggcaccgtggctacggatctcctcccgcgcacggcagccgctagcc

SEQ ID NO: 290350 - DNA, 55 bp, Artificial
  Synthetic oligonucleotide
gctccggttgcagtgaacaagaacagtgtcttaagtcgtatacgtaaggcggtac

SEQ ID NO: 290351 - DNA, 55 bp, Artificial
  Synthetic oligonucleotide
gctccgcaatgagatccccgtgccaccccatggtctttccagtgctccgctctgt

SEQ ID NO: 290352 - DNA, 55 bp, Artificial
  Synthetic oligonucleotide
gctccactaccagaagatgattagtcgagcttactcttcctacagcggtgaagtc

SEQ ID NO: 290353 - DNA, 55 bp, Artificial
  Synthetic oligonucleotide
gctcagttaagtgttctcatcgggtagcttctgagcttgacggtgtgagagcgcg

SEQ ID NO: 290354 - DNA, 55 bp, Artificial
  Synthetic oligonucleotide
gctcacttggatcagcatacgcactagcacgacctgtaaattgggacagctgtct

SEQ ID NO: 290355 - DNA, 55 bp, Artificial
  Synthetic oligonucleotide
gctcactattttcgaggctctttctctgtcgataatcccagcttccgtcttacag

SEQ ID NO: 290356 - DNA, 55 bp, Artificial
  Synthetic oligonucleotide
gctcacgttgcaatcctttagatacggattgagggtgaggcatcgatccacgcct

SEQ ID NO: 290357 - DNA, 55 bp, Artificial
  Synthetic oligonucleotide
gctcacctgcccctgtggggcactgccgttacatccccgttgtgtagcgcgagct

SEQ ID NO: 290358 - DNA, 55 bp, Artificial
  Synthetic oligonucleotide
gctcaccagttagtcgaagaccgcaccactgtgcgtatgtgagtgcgagcgtgtg

SEQ ID NO: 290359 - DNA, 55 bp, Artificial
  Synthetic oligonucleotide
gctcaccagtgacgggacaaccattgtcgtgagctgtcacgagcaccgtagcgcc

SEQ ID NO: 290360 - DNA, 60 bp, Artificial
  Synthetic oligonucleotide
acccggaaattcactggcagcgaaccagcgttgtgtgctacctgcgcactggactaatgt

SEQ ID NO: 290361 - DNA, 55 bp, Artificial
  Synthetic oligonucleotide
gctcacagtactcggaatggcgatttcttagcccattcttggccccactggaccg

SEQ ID NO: 290362 - DNA, 55 bp, Artificial
  Synthetic oligonucleotide
gctacatgatcaagagcctggacaaacgccctcatagcgattcggacgtggtgac

SEQ ID NO: 290363 - DNA, 55 bp, Artificial
  Synthetic oligonucleotide
gctacctcgccgttatttgatgcggtccgcgggctatactgtcgtggcgaagagt

SEQ ID NO: 290364 - DNA, 55 bp, Artificial
  Synthetic oligonucleotide
gctacgcagatgcagtgtgttgtgcggcggataccttcgcgtaataaagtccatg

SEQ ID NO: 290365 - DNA, 55 bp, Artificial
  Synthetic oligonucleotide
gctagaacgaaatgttggttagcatgtgtaaagggaagtggtagacatcttcgcg

SEQ ID NO: 290366 - DNA, 55 bp, Artificial
  Synthetic oligonucleotide
gctagaagaatcactgttacaaaagaagggacgactattatagctgaagggcacg

SEQ ID NO: 290367 - DNA, 55 bp, Artificial
  Synthetic oligonucleotide
gctaggacttaagcagagaggatagggcgagtggcgacaaagaactaaggggcgc

SEQ ID NO: 290368 - DNA, 55 bp, Artificial
  Synthetic oligonucleotide
gctaggtgcactggtgatggagtaattgaggcgacgatttgggatgtagccgtac

SEQ ID NO: 290369 - DNA, 55 bp, Artificial
  Synthetic oligonucleotide
gctagtgagacattagaaggaataagaagtgacgttgccacgcttaaacaaaagg

SEQ ID NO: 290370 - DNA, 55 bp, Artificial
  Synthetic oligonucleotide
gctataatagtcggcaacatcggagactcacatcattccggccttagtgagctcc

SEQ ID NO: 290371 - DNA, 58 bp, Artificial
  Synthetic oligonucleotide
ggtatgataagtgtaaatactctgtagtttgtaaagatgcaaaacattctcctaataa

SEQ ID NO: 290372 - DNA, 55 bp, Artificial
  Synthetic oligonucleotide
gctatcaccacgtacaggagcctcacgttaacgttccctgccatgtgccgatccc

SEQ ID NO: 290373 - DNA, 55 bp, Artificial
  Synthetic oligonucleotide
gctatcctccgcgtatccgcagcacacttgatctccgtaaaggacaacttccccg

SEQ ID NO: 290374 - DNA, 55 bp, Artificial
  Synthetic oligonucleotide
gctatcctctctcttaaagttgtcctcccttttgaagctatcctctctcttaaag

SEQ ID NO: 290375 - DNA, 55 bp, Artificial
  Synthetic oligonucleotide
gctattcatgtgcaggtaccctaggcagaggaagttagtgctcaggactaggttg

SEQ ID NO: 290376 - DNA, 55 bp, Artificial
  Synthetic oligonucleotide
gctattgaactaccgatgtagggatctggatggtcacaagacgctcggctagctc

SEQ ID NO: 290377 - DNA, 55 bp, Artificial
  Synthetic oligonucleotide
gctcaacaagcggatttacttcatgacgtgcagcgaagactccacttgcatcgtc

SEQ ID NO: 290378 - DNA, 55 bp, Artificial
  Synthetic oligonucleotide
gcgtacaggcacgggagctctcaaacttcatggagatgccccttcatcgggctcc

SEQ ID NO: 290379 - DNA, 55 bp, Artificial
  Synthetic oligonucleotide
gcgtacagatatcatgacgcattgcactgccgaccacagtaatagagaccacgca

SEQ ID NO: 290380 - DNA, 53 bp, Artificial
  Synthetic oligonucleotide
gcgtaagggattacaccagattcgtaacggtcacttttaattcgagtccgttc

SEQ ID NO: 290381 - DNA, 55 bp, Artificial
  Synthetic oligonucleotide
gcggtttgaagcgatacttggcacatcggctcgcgattggatcgatgatgcggct

SEQ ID NO: 290382 - DNA, 60 bp, Artificial
  Synthetic oligonucleotide
ggtcaattaatatccttatttgtgttaacagttgctgcagctgaatccgctataggtttg

SEQ ID NO: 290383 - DNA, 55 bp, Artificial
  Synthetic oligonucleotide
gcggtgttgcgtacgcgtaggtgtatgccgctctctccgtgtaagggcgaccatg

SEQ ID NO: 290384 - DNA, 55 bp, Artificial
  Synthetic oligonucleotide
gcggtggccaccttctgtcgtcttgttcgcatgcacagttataggagagggcgcg

SEQ ID NO: 290385 - DNA, 55 bp, Artificial
  Synthetic oligonucleotide
gcggtgcgtgcaaggaaagtcgtgggcgagtgtatgggtggatatcctactctgc

SEQ ID NO: 290386 - DNA, 55 bp, Artificial
  Synthetic oligonucleotide
gcggtgcgtcgaagagagttttatgtggggctctaaatgggacttcacgtgaggc

SEQ ID NO: 290387 - DNA, 55 bp, Artificial
  Synthetic oligonucleotide
gcggtctcaactccactgggataggcacctggaaaggagaagcctgtaaggttcg

SEQ ID NO: 290388 - DNA, 55 bp, Artificial
  Synthetic oligonucleotide
gcggtcgatgttatgaaaggatgtttgcaaagaaatcctaatgcccgtccttcga

SEQ ID NO: 290389 - DNA, 55 bp, Artificial
  Synthetic oligonucleotide
gcggtatggcgcgccgtacgtagcgaaagggtacgcatcactagacccgagatgt

SEQ ID NO: 290390 - DNA, 55 bp, Artificial
  Synthetic oligonucleotide
gcggtatcgtccattggctcatgtgcgtatgcgtgtacgatcggggcacacaact

SEQ ID NO: 290391 - DNA, 55 bp, Artificial
  Synthetic oligonucleotide
gcgggttgacaatacggttagtctcttcaccatggtactgcccatacaggaaggt

SEQ ID NO: 290392 - DNA, 55 bp, Artificial
  Synthetic oligonucleotide
gcgggttcgtcctccctcgatgcaaatttcagatgactagtaatgtcagcatcgt

SEQ ID NO: 290393 - DNA, 60 bp, Artificial
  Synthetic oligonucleotide
ctctgaggttcgcggctcgtgtgcgattcgagtctgtatgggtgttcgagtaatccgact

SEQ ID NO: 290394 - DNA, 55 bp, Artificial
  Synthetic oligonucleotide
gcgggtgacactcttaccaggtatttagccacacagtggcgcacgcctttagagc

SEQ ID NO: 290395 - DNA, 54 bp, Artificial
  Synthetic oligonucleotide
gcgggtctacgtatagttgcgtccgtacgtgtacgggtacgtgtgcggattagg

SEQ ID NO: 290396 - DNA, 55 bp, Artificial
  Synthetic oligonucleotide
gcggcagacaagagacgacgaggtataatcgaacagaggagcaaacggctcgcgt

SEQ ID NO: 290397 - DNA, 55 bp, Artificial
  Synthetic oligonucleotide
gcggcaggtgtacacccttcaacatgccactagcggaggaaaggttagagtcaag

SEQ ID NO: 290398 - DNA, 55 bp, Artificial
  Synthetic oligonucleotide
gcggcagtagtgatgctgcacatcgcaccgtgcgtatcgttggcaaggcgaaggg

SEQ ID NO: 290399 - DNA, 55 bp, Artificial
  Synthetic oligonucleotide
gcggcagtgcgtcgttcccacatttcctcgtactctgttacacgctgccaaagac

SEQ ID NO: 290400 - DNA, 55 bp, Artificial
  Synthetic oligonucleotide
gcggcatggtaccacaagacggtggaagaacgcatcttttatcggcctcataagg

SEQ ID NO: 290401 - DNA, 55 bp, Artificial
  Synthetic oligonucleotide
gcggccaccgggatgcaggtcgagaaatttggtcacatcgtatactttgttattg

SEQ ID NO: 290402 - DNA, 55 bp, Artificial
  Synthetic oligonucleotide
gcggccattgttagtgtagttcatacataccaacaggtgcgtgtttcctcgccgg

SEQ ID NO: 290403 - DNA, 55 bp, Artificial
  Synthetic oligonucleotide
gcggcctaaacaggggcgccgcgagtagaagcggcctaaacagaagtgcctcgaa

SEQ ID NO: 290404 - DNA, 60 bp, Artificial
  Synthetic oligonucleotide
aagagtctatgttcggttatacagctaatgtctttactcgaaatacatcagattctccat

SEQ ID NO: 290405 - DNA, 58 bp, Artificial
  Synthetic oligonucleotide
ctctctaactaggtcacgtttcgagtctcagaggcagcgtttacaaagaggtctaaga

SEQ ID NO: 290406 - DNA, 55 bp, Artificial
  Synthetic oligonucleotide
gcgggaatggaaacgccttggaaagccatcagctacacactgcccagcacggcac

SEQ ID NO: 290407 - DNA, 55 bp, Artificial
  Synthetic oligonucleotide
gcgggactccatcgacttgcgacgcgaccacacgcatatccggtccgtatagcta

SEQ ID NO: 290408 - DNA, 55 bp, Artificial
  Synthetic oligonucleotide
gcgggagataggatcgtgtgagttggcggtcgtgagggatgcatgagatgacgcg

SEQ ID NO: 290409 - DNA, 55 bp, Artificial
  Synthetic oligonucleotide
gcgggagcacagaattcatggactactgcccgattatcgtgccctacggcactgc

SEQ ID NO: 290410 - DNA, 55 bp, Artificial
  Synthetic oligonucleotide
gcgggcggctcagcacagaaaagtgagggtgacgcacatgaatagggtcggactg

SEQ ID NO: 290411 - DNA, 55 bp, Artificial
  Synthetic oligonucleotide
gcgggctatcaaaaggggctccgccccacacaagccaaagcgagataagtcgggc

SEQ ID NO: 290412 - DNA, 55 bp, Artificial
  Synthetic oligonucleotide
gcggggctattggagagtacggggctggaactatcagtgctagacttagtggtga

SEQ ID NO: 290413 - DNA, 55 bp, Artificial
  Synthetic oligonucleotide
gcgtgattaccagtgcgtccttttatgggtgtgttcgcgcgcgcttctctgtacg

SEQ ID NO: 290414 - DNA, 55 bp, Artificial
  Synthetic oligonucleotide
gcgtgagatactgccgctgagtactgacgcggtgttccaaaaggaggtgcagcgg

SEQ ID NO: 290415 - DNA, 55 bp, Artificial
  Synthetic oligonucleotide
gcgtgacatgtgctttacgtgtgctgttcgtcttatcgtgcatcggcttagcctt

SEQ ID NO: 290416 - DNA, 55 bp, Artificial
  Synthetic oligonucleotide
ctgtttcgcatttgactacataggttaacttacatagtccattttttaacgataa

SEQ ID NO: 290417 - DNA, 55 bp, Artificial
  Synthetic oligonucleotide
gcgtgaattatcagaaagtgctcccaaccatggaggaagttggctctcatataag

SEQ ID NO: 290418 - DNA, 55 bp, Artificial
  Synthetic oligonucleotide
gcgtgaaagtgtagcaagtcgctaaggtacttactctcgctcttgtagcgcccgg

SEQ ID NO: 290419 - DNA, 55 bp, Artificial
  Synthetic oligonucleotide
gcgtctgtgagagacgatcagcgcttcggtaagccgacactcgtccgcgtgctca

SEQ ID NO: 290420 - DNA, 55 bp, Artificial
  Synthetic oligonucleotide
gcgtctgctacgactgacgccggatcgataacggtgttgaggtgtgaaggaaagg

SEQ ID NO: 290421 - DNA, 55 bp, Artificial
  Synthetic oligonucleotide
gcgtctcttccagcggtgctcgacgggactcgaggaaaacaccgcagctttcctc

SEQ ID NO: 290422 - DNA, 55 bp, Artificial
  Synthetic oligonucleotide
gcgtcgttccgacagtgtatccacaacagggtgcccacttcgagtcgcctcgcct

SEQ ID NO: 290423 - DNA, 55 bp, Artificial
  Synthetic oligonucleotide
gcgtcgtcgtggacgctgcactccactcactattaaggaagagagccaccatgcg

SEQ ID NO: 290424 - DNA, 55 bp, Artificial
  Synthetic oligonucleotide
gcgtcgcctcttctactgctatgactgcctcattaccgtacacccggagtcccac

SEQ ID NO: 290425 - DNA, 55 bp, Artificial
  Synthetic oligonucleotide
gcgtcgccctcgctttcgttgtgatgttgacacttgccatgtgcgttcgatccgc

SEQ ID NO: 290426 - DNA, 55 bp, Artificial
  Synthetic oligonucleotide
gcgtcgacacattaacgcatcgtcacatgcactgcactacacactcgaaaagatg

SEQ ID NO: 290427 - DNA, 59 bp, Artificial
  Synthetic oligonucleotide
cttactatataactgatgttccatctttctgtgatccctcttactaaataactgactaa

SEQ ID NO: 290428 - DNA, 55 bp, Artificial
  Synthetic oligonucleotide
gcgtccgttctctttaaaagtgcaccttgtctgtgtgagttgtcttgaatacacc

SEQ ID NO: 290429 - DNA, 55 bp, Artificial
  Synthetic oligonucleotide
gcgtccgttccagtggtgtgatctgaagagaatacgcgactgggagtggttcgac

SEQ ID NO: 290430 - DNA, 55 bp, Artificial
  Synthetic oligonucleotide
gcgtccggagcacgttacgaataccgagtacacattgggcagcctcatagtggac

SEQ ID NO: 290431 - DNA, 55 bp, Artificial
  Synthetic oligonucleotide
gcgtacgggtgtcgtgtgattcagtgcatcatgcagcactgccctgagcaggagg

SEQ ID NO: 290432 - DNA, 55 bp, Artificial
  Synthetic oligonucleotide
gcgtacgtttattactatgactattccttcgttcgcagccagacgaagtcgcgcc

SEQ ID NO: 290433 - DNA, 55 bp, Artificial
  Synthetic oligonucleotide
gcgtagcaaaacgcttggctcgcctgccttcgtcgcacctgtcactcatgctgag

SEQ ID NO: 290434 - DNA, 55 bp, Artificial
  Synthetic oligonucleotide
gcgtaggaatttgtaacatttgcccctgatgagtattcgagaccaagtgttaaat

SEQ ID NO: 290435 - DNA, 55 bp, Artificial
  Synthetic oligonucleotide
gcgtagtgcgacacgacacgggttgtatgcatttgggttgcaaggtacgcctgac

SEQ ID NO: 290436 - DNA, 54 bp, Artificial
  Synthetic oligonucleotide
gcgtatccgccagggaatccatttaaggtattcctaagcccacgaaaccttgtc

SEQ ID NO: 290437 - DNA, 55 bp, Artificial
  Synthetic oligonucleotide
gcgtcactcaagaagccaaacggtatcgagatgcattacgtcatgccgtaactgt

SEQ ID NO: 290438 - DNA, 56 bp, Artificial
  Synthetic oligonucleotide
cttaggtgcagaaactactcgtagtatgggtctaggttattaagataaagtatata

SEQ ID NO: 290439 - DNA, 55 bp, Artificial
  Synthetic oligonucleotide
gcgtcactggcttgtccctgccaggtgcgacgctcttaaaactaaagcgggatgc

SEQ ID NO: 290440 - DNA, 55 bp, Artificial
  Synthetic oligonucleotide
gcgtcagactagccgacagtttctatcgctcgagactcgccggggcacacacacc

SEQ ID NO: 290441 - DNA, 55 bp, Artificial
  Synthetic oligonucleotide
gcgtcagccaatatactaatgctagggtcggcataaatcagctccccatttgctt

SEQ ID NO: 290442 - DNA, 55 bp, Artificial
  Synthetic oligonucleotide
gcgtcagttatcccgctgaaatcgcgcacatttgtgagttccttaaatcttcggt

SEQ ID NO: 290443 - DNA, 55 bp, Artificial
  Synthetic oligonucleotide
gcgtcatcaatgcatcgcgtcgcacagcccgtacaaacttattggcagcaaaggc

SEQ ID NO: 290444 - DNA, 55 bp, Artificial
  Synthetic oligonucleotide
gcgtccacttgaccattagtactgtccgtgaccatctccctaagtacacccttta

SEQ ID NO: 290445 - DNA, 55 bp, Artificial
  Synthetic oligonucleotide
gcgtccagcagtgcaccatgagccagtagttaaaggtgagcgcgacgtagccctg

SEQ ID NO: 290446 - DNA, 55 bp, Artificial
  Synthetic oligonucleotide
gcgtccattcttttctgctacgagagcgatggagctgcgtagagacctgtgcaag

SEQ ID NO: 290447 - DNA, 55 bp, Artificial
  Synthetic oligonucleotide
gcgtccctgtgaccacctacgcaagcacacattcatacgcgcatgctatatttga

SEQ ID NO: 290448 - DNA, 55 bp, Artificial
  Synthetic oligonucleotide
gcgtcccttatgcacctccttgcgctcgatacagtagttcgcgtacctcttcatg

SEQ ID NO: 290449 - DNA, 60 bp, Artificial
  Synthetic oligonucleotide
ctcgttgtgtacacctccgcccactgtccaaacacataccgaagcacacacgcttacgca

SEQ ID NO: 290450 - DNA, 55 bp, Artificial
  Synthetic oligonucleotide
ggaaatcgttagcagcgttggcgcattatttcgagcagttctcacaaaagggacg

SEQ ID NO: 290451 - DNA, 55 bp, Artificial
  Synthetic oligonucleotide
ggaaagccgcgccacatgccgcaataaggactcaagcataaaggcagcatacacg

SEQ ID NO: 290452 - DNA, 55 bp, Artificial
  Synthetic oligonucleotide
ggaaacgtacgtgatgcacgtgcgcgcatattgcatgcccgcccctcccaacctc

SEQ ID NO: 290453 - DNA, 55 bp, Artificial
  Synthetic oligonucleotide
ggaaaacaagataaagacgcgaggtgctcgtgctacccgtagcggtgaaaaggac

SEQ ID NO: 290454 - DNA, 55 bp, Artificial
  Synthetic oligonucleotide
gcttttgtgacgtctcagctgcgcacagagatgcgtgaggcagagccggccttgg

SEQ ID NO: 290455 - DNA, 55 bp, Artificial
  Synthetic oligonucleotide
gcttttatttgaggtgttaccaacagcttggcacatcaccctttgatccctccca

SEQ ID NO: 290456 - DNA, 55 bp, Artificial
  Synthetic oligonucleotide
gcttttatggctagcttccctcccatttgcgttagacttaactgggtggcatggc

SEQ ID NO: 290457 - DNA, 55 bp, Artificial
  Synthetic oligonucleotide
gctttccttccctccgcagtccgttcccacgcggtgtagagcccctctctcgtat

SEQ ID NO: 290458 - DNA, 55 bp, Artificial
  Synthetic oligonucleotide
gctttatcggctcgccttgtcacactcggccctgcagtagcgtcaatgcgactcc

SEQ ID NO: 290459 - DNA, 55 bp, Artificial
  Synthetic oligonucleotide
gcttgttagctggaccgctcaaccgggccgctcattagctgaacgctcccgagtg

SEQ ID NO: 290460 - DNA, 60 bp, Artificial
  Synthetic oligonucleotide
acccatccgtgttgccgacagatgcgagtgtcctggctatcctccccactatccttgaca

SEQ ID NO: 290461 - DNA, 55 bp, Artificial
  Synthetic oligonucleotide
gcttgttaatcggtgggccccgtaacatagagatgtgttcagtcccaagagtcgc

SEQ ID NO: 290462 - DNA, 55 bp, Artificial
  Synthetic oligonucleotide
gcttgtcaagagacggaaggtgcaaatgagcgaagcgcaaactttaccgtcagcc

SEQ ID NO: 290463 - DNA, 55 bp, Artificial
  Synthetic oligonucleotide
gcttggcgttctttggtatgccgcccaaggggtaccacgggtgtgtgtcttgcgc

SEQ ID NO: 290464 - DNA, 55 bp, Artificial
  Synthetic oligonucleotide
gcttggcgccagaggtcttgtcaagaaaagccactcgcggttgtgcgtcgctcca

SEQ ID NO: 290465 - DNA, 54 bp, Artificial
  Synthetic oligonucleotide
gcttggacctttatcgggaggcgtgtcgggatggttcgtggaccccgagtgttg

SEQ ID NO: 290466 - DNA, 55 bp, Artificial
  Synthetic oligonucleotide
gcttgctggctcagctgacaccggtgcggacaggatggcagtcccaaagtgctgt

SEQ ID NO: 290467 - DNA, 55 bp, Artificial
  Synthetic oligonucleotide
gcttgagaggccaaaatatgtgccaccacttttacgaaataaatggcaatacttg

SEQ ID NO: 290468 - DNA, 55 bp, Artificial
  Synthetic oligonucleotide
gcttgacggttcccaaacgtgactgcgtcatgtaaagtatgatttgtccctaggg

SEQ ID NO: 290469 - DNA, 55 bp, Artificial
  Synthetic oligonucleotide
gcttgacatacgaccatgttaagttcgtccattcttttgactcagctaccaagga

SEQ ID NO: 290470 - DNA, 55 bp, Artificial
  Synthetic oligonucleotide
gcttgaagaatgtcacgcggttatgctcccgctcaatgttgaacgtcacctccgc

SEQ ID NO: 290471 - DNA, 59 bp, Artificial
  Synthetic oligonucleotide
gggcaaggcgaccccagtaacagaccccaatgtgcgtcccctggaggtgtacatgtgca

SEQ ID NO: 290472 - DNA, 55 bp, Artificial
  Synthetic oligonucleotide
gcttcttcacgtgaccgatggccggtcccttctggccgcactgagcgcatgcccg

SEQ ID NO: 290473 - DNA, 55 bp, Artificial
  Synthetic oligonucleotide
gcttctcggaggtgtagacttatgggcccgcgtgtgcgcgagagggtggaggtag

SEQ ID NO: 290474 - DNA, 55 bp, Artificial
  Synthetic oligonucleotide
gcttctccacaccggcgcgttagagaaacttatagtctgtcgaacagttttccac

SEQ ID NO: 290475 - DNA, 55 bp, Artificial
  Synthetic oligonucleotide
gcttcgtggtgcatgttgagaataacggacgtgtgagtgacaagggtctccacca

SEQ ID NO: 290476 - DNA, 55 bp, Artificial
  Synthetic oligonucleotide
gcttcggaggcggcctgtattgcgggcagttcatgatagtgcaactcagcagcgg

SEQ ID NO: 290477 - DNA, 55 bp, Artificial
  Synthetic oligonucleotide
gcttcgcttgcgtccgcatgtcgctacacactctttcacgtatctctaagcgcat

SEQ ID NO: 290478 - DNA, 55 bp, Artificial
  Synthetic oligonucleotide
gcttcgatgcgacgaggcacgaaaggtgctaaagctggaggaggacgcttcgagt

SEQ ID NO: 290479 - DNA, 55 bp, Artificial
  Synthetic oligonucleotide
gcttccattcgtcaagacccatctagcacctcgactcacgccatgtctcctcgag

SEQ ID NO: 290480 - DNA, 55 bp, Artificial
  Synthetic oligonucleotide
gcttccaatgtgtaccttgtggggatctgttcttcgcctgtggtgcaccgcgggg

SEQ ID NO: 290481 - DNA, 55 bp, Artificial
  Synthetic oligonucleotide
gcttcagcgaacagcggaggtatagtagactccacatttgtggcgttccggtaat

SEQ ID NO: 290482 - DNA, 53 bp, Artificial
  Synthetic oligonucleotide
ggagtaggaacagttaaaccaagaaacctaattctgcaaacgcaaaattacaa

SEQ ID NO: 290483 - DNA, 55 bp, Artificial
  Synthetic oligonucleotide
gcttatcgtgtagtgtgcagaggaatccaaaacacggagtgtagattccaagggc

SEQ ID NO: 290484 - DNA, 55 bp, Artificial
  Synthetic oligonucleotide
ggacctattgctcttccactttcggattccaaacaagtgcattgattgggacctg

SEQ ID NO: 290485 - DNA, 55 bp, Artificial
  Synthetic oligonucleotide
ggacctatgttagtgaaggtaagacctacatcagtaatgttaggacctctattag

SEQ ID NO: 290486 - DNA, 55 bp, Artificial
  Synthetic oligonucleotide
ggacctatatagaccagttggcacaggtactcagtgcactcgttgggtggagtag

SEQ ID NO: 290487 - DNA, 55 bp, Artificial
  Synthetic oligonucleotide
ggacctagcctgaaccgtatgcagtgggccttaacggcgcccaacggtgctggtt

SEQ ID NO: 290488 - DNA, 53 bp, Artificial
  Synthetic oligonucleotide
ggaccactactcccgcgaaggaggtaactgggccgtgtacaccgacaagtccc

SEQ ID NO: 290489 - DNA, 55 bp, Artificial
  Synthetic oligonucleotide
ggaccactaacaatttgtcctgttctgcatgttcccgaatgactccatacatctt

SEQ ID NO: 290490 - DNA, 55 bp, Artificial
  Synthetic oligonucleotide
ggacatggatctacgacggacactatactcccacatcgtgttgtctggcggcacg

SEQ ID NO: 290491 - DNA, 55 bp, Artificial
  Synthetic oligonucleotide
ggacagtagacctattaaaaggcatacacaactgttttccacttggaccacgccg

SEQ ID NO: 290492 - DNA, 55 bp, Artificial
  Synthetic oligonucleotide
ggacaggggtgaagttgctgtagcgatacgggtataccctacaaggaaagtgagg

SEQ ID NO: 290493 - DNA, 60 bp, Artificial
  Synthetic oligonucleotide
cgtctaattcgttccagagataagccttgacagcaacttactagattttctattgactca

SEQ ID NO: 290494 - DNA, 55 bp, Artificial
  Synthetic oligonucleotide
ggacagggacattacatacacaatgcggaataagtagggtactcaccttagcttg

SEQ ID NO: 290495 - DNA, 55 bp, Artificial
  Synthetic oligonucleotide
ggacagctacgctacttgtcccctcgttgcagtaaacgtcgcttttcaagtccgc

SEQ ID NO: 290496 - DNA, 55 bp, Artificial
  Synthetic oligonucleotide
ggacagattctggtagaggatcccaaacaatggtaaagctagctagatcacaccc

SEQ ID NO: 290497 - DNA, 55 bp, Artificial
  Synthetic oligonucleotide
ggacacgtcatagctttccaaacttggtctcgatttgcttcccaccagtctgatc

SEQ ID NO: 290498 - DNA, 55 bp, Artificial
  Synthetic oligonucleotide
ggacacgaagcggtgacacggagcacgcaggcacttcgacctggcaagaaaccct

SEQ ID NO: 290499 - DNA, 55 bp, Artificial
  Synthetic oligonucleotide
ggacaaatgtccggtaaatccttggtcgtttgcaacatcaagtgctgatccaaaa

SEQ ID NO: 290500 - DNA, 55 bp, Artificial
  Synthetic oligonucleotide
ggaattccgaaggcggcagaatcgattcgtgattaggcagccccacgttccatac

SEQ ID NO: 290501 - DNA, 55 bp, Artificial
  Synthetic oligonucleotide
ggaaatgtgtaccaatgtatggggatcgtgacttgggaaaatgtagagagattac

SEQ ID NO: 290502 - DNA, 55 bp, Artificial
  Synthetic oligonucleotide
ggaacactaccggtgtcactaggttttccacttggtgtgacacacctccatcccc

SEQ ID NO: 290503 - DNA, 55 bp, Artificial
  Synthetic oligonucleotide
ggaacagcacgtatgggttccggaaagggtgacattgacgattggtatgttcccg

SEQ ID NO: 290504 - DNA, 59 bp, Artificial
  Synthetic oligonucleotide
attcgcttctattgggatctttgctctaggtatagttccttatatcaacgcttcaatta

SEQ ID NO: 290505 - DNA, 55 bp, Artificial
  Synthetic oligonucleotide
ggaaccaatagaccaaaccgtagagtactatctcggcggtctcatccgtggctcg

SEQ ID NO: 290506 - DNA, 55 bp, Artificial
  Synthetic oligonucleotide
ggaaccgtgaaggaaacacttgcttccgctctctttcagccactcaggtcttgag

SEQ ID NO: 290507 - DNA, 55 bp, Artificial
  Synthetic oligonucleotide
ggaacgcaagcgactcttgtctagtgacccagggagtaggccgcagtgaaacgtg

SEQ ID NO: 290508 - DNA, 55 bp, Artificial
  Synthetic oligonucleotide
ggaactccccagggtgataccactccagaggataatgttggtaacagggatgaac

SEQ ID NO: 290509 - DNA, 55 bp, Artificial
  Synthetic oligonucleotide
ggaagaagatcgatggccgcttgtacgcgattaagaagattgcaatgacagaggc

SEQ ID NO: 290510 - DNA, 55 bp, Artificial
  Synthetic oligonucleotide
ggaagagaacggcacgcggcaaacagagatccacaccatgctgtgcacgtacgtg

SEQ ID NO: 290511 - DNA, 55 bp, Artificial
  Synthetic oligonucleotide
ggaagcccaatgcgattcctgaggtctctgataataagcggcaattataaggtac

SEQ ID NO: 290512 - DNA, 55 bp, Artificial
  Synthetic oligonucleotide
ggaagctcgcagaggagttccaactagccacgccatcggttgacttgctccagcg

SEQ ID NO: 290513 - DNA, 55 bp, Artificial
  Synthetic oligonucleotide
ggaagctgctctttcacggcagaaacgtgagttcaaatctcataaaggacatagt

SEQ ID NO: 290514 - DNA, 55 bp, Artificial
  Synthetic oligonucleotide
ggaaggatgtgttggttgtgctctactgtttgcaaatctagatcaatgccgaggc

SEQ ID NO: 290515 - DNA, 60 bp, Artificial
  Synthetic oligonucleotide
tacgtactctagcttttaacacaatttgattgtctatactagatactatagctgaaacag

SEQ ID NO: 290516 - DNA, 60 bp, Artificial
  Synthetic oligonucleotide
ggagtcgaatggggtagagcgcagcgatacatgcgccgcactgtgcacgcaacaactgag

SEQ ID NO: 290517 - DNA, 55 bp, Artificial
  Synthetic oligonucleotide
ggaagggactcttcagtggttgtttcgtaacgtgtcgtgtttccttcagttggca

SEQ ID NO: 290518 - DNA, 55 bp, Artificial
  Synthetic oligonucleotide
ggaatcacgtcctacgcagatccagagctgagttgcccgtgtatctactctcgag

SEQ ID NO: 290519 - DNA, 55 bp, Artificial
  Synthetic oligonucleotide
ggaattaatagaaccattacctcgatttgcaattgggattgctcaaacacgtggt

SEQ ID NO: 290520 - DNA, 55 bp, Artificial
  Synthetic oligonucleotide
ggaattccacgtagtgatagcatatccatcaaaagctaggttagttccgattctg

SEQ ID NO: 290521 - DNA, 55 bp, Artificial
  Synthetic oligonucleotide
gctgcagacttcttacgccaagttgtcgagtgatggcgggtactgccatgtgctc

SEQ ID NO: 290522 - DNA, 55 bp, Artificial
  Synthetic oligonucleotide
gctgcactccagctttcctggacatcgttccgcatcctcacggaatgcggcaccc

SEQ ID NO: 290523 - DNA, 55 bp, Artificial
  Synthetic oligonucleotide
gctgattggtctgagcatccgtctgcagctcgagcgatcactacccgagtacacg

SEQ ID NO: 290524 - DNA, 55 bp, Artificial
  Synthetic oligonucleotide
gctgaggagaccattcactattagcgaacagaggtgatctcgaactagttgttgg

SEQ ID NO: 290525 - DNA, 55 bp, Artificial
  Synthetic oligonucleotide
gctgagaagttaggcgttaacccgaagtacgtccacggcagtgttattggcgcac

SEQ ID NO: 290526 - DNA, 55 bp, Artificial
  Synthetic oligonucleotide
gctgactcgcgcgccctttgcagtcgcacggatacgctcacagctcttcttcacc

SEQ ID NO: 290527 - DNA, 60 bp, Artificial
  Synthetic oligonucleotide
cgtctacgcttgaaaattcatacgcaggagtaggcgttatacccatcacatggctctcaa

SEQ ID NO: 290528 - DNA, 55 bp, Artificial
  Synthetic oligonucleotide
gctgacccgatttagtggggtcttccttgcacctcgcagattcgagattgcacat

SEQ ID NO: 290529 - DNA, 55 bp, Artificial
  Synthetic oligonucleotide
gctgacacaagtacacgccggcacacgggatcagctagggaggaagcaagagcag

SEQ ID NO: 290530 - DNA, 55 bp, Artificial
  Synthetic oligonucleotide
gctgaacctttaccacaacaagcagcaatccttgggcaaaatgtacctgagttac

SEQ ID NO: 290531 - DNA, 55 bp, Artificial
  Synthetic oligonucleotide
gctgaacctcctgcccattggtctcatcttatcagagtccaagaggccgcttgag

SEQ ID NO: 290532 - DNA, 54 bp, Artificial
  Synthetic oligonucleotide
gctcttgttttctacgttacgtgacaccgtttcaccttctctttactccgtcgc

SEQ ID NO: 290533 - DNA, 55 bp, Artificial
  Synthetic oligonucleotide
gctcttctgtgtttatatccactaagatgttctatcatgggtgccatctctgtat

SEQ ID NO: 290534 - DNA, 55 bp, Artificial
  Synthetic oligonucleotide
gctcttcgctgtacatgtaacatcttcatcttagtgcacgcttcatcgttgcaca

SEQ ID NO: 290535 - DNA, 55 bp, Artificial
  Synthetic oligonucleotide
gctcttatagaaccagctgatgagaaaggggtgttagagttcgttgacgagcgtc

SEQ ID NO: 290536 - DNA, 55 bp, Artificial
  Synthetic oligonucleotide
gctctggtgcaacagctgccacagatacccacgcaccgacgcatccgacacgaca

SEQ ID NO: 290537 - DNA, 55 bp, Artificial
  Synthetic oligonucleotide
gctctgcggactgacaccccacggtttggaggttgcgacagacaacgcagcagtg

SEQ ID NO: 290538 - DNA, 56 bp, Artificial
  Synthetic oligonucleotide
actaatccaaaagctattggttgtaataataaggatatactattaattcttggata

SEQ ID NO: 290539 - DNA, 55 bp, Artificial
  Synthetic oligonucleotide
gctcgactctaggtaaaagcggagggagtggtgtgcgagcttgtaaccctggtac

SEQ ID NO: 290540 - DNA, 55 bp, Artificial
  Synthetic oligonucleotide
gctcgagcattctatcgcgtaacgcacttgcgagacctggtgccgaaggtcaacg

SEQ ID NO: 290541 - DNA, 55 bp, Artificial
  Synthetic oligonucleotide
gctcgatgcctcctacgagacgtcaagcataggaacgaggcgcgagcacccatgc

SEQ ID NO: 290542 - DNA, 55 bp, Artificial
  Synthetic oligonucleotide
gctcgcggtgtgtggaaggcctcgcgtttattctgtgttctgcgccgatgcgtcc

SEQ ID NO: 290543 - DNA, 55 bp, Artificial
  Synthetic oligonucleotide
gctcgctactacggactgaggcgtggtcaggtagtccgcattgagcgtaagagca

SEQ ID NO: 290544 - DNA, 55 bp, Artificial
  Synthetic oligonucleotide
gctcgctcgttgcctatgttgagtattgataatcgtggaaaggctaggcttgtgc

SEQ ID NO: 290545 - DNA, 55 bp, Artificial
  Synthetic oligonucleotide
gctcggaagatgcgagcgcgaccactgggagagctcagcgagcactaagcttcga

SEQ ID NO: 290546 - DNA, 55 bp, Artificial
  Synthetic oligonucleotide
gctcggcacctgagacgccacccactcgtgcattcgctgcgttgcattctcctca

SEQ ID NO: 290547 - DNA, 55 bp, Artificial
  Synthetic oligonucleotide
gctcggcagagctaacgtgaagacgagtatgccgagtactagatgggcacgacgc

SEQ ID NO: 290548 - DNA, 55 bp, Artificial
  Synthetic oligonucleotide
gctcgtcggcagtcggagcattttcgctagtgagatgtggggcaccataacaccg

SEQ ID NO: 290549 - DNA, 56 bp, Artificial
  Synthetic oligonucleotide
gacatgacagggagttggcaagttaaagaagttctggtttataatagatacgttat

SEQ ID NO: 290550 - DNA, 55 bp, Artificial
  Synthetic oligonucleotide
gctcgtggttcggcagttcgcataggcgtgggttcccgacgatggatgcagtaag

SEQ ID NO: 290551 - DNA, 55 bp, Artificial
  Synthetic oligonucleotide
gctctaagtagtgcccgtgttccgctgacatgtccccacgtcaggatccgtgcaa

SEQ ID NO: 290552 - DNA, 55 bp, Artificial
  Synthetic oligonucleotide
gctctagtggcaccctagtggtactactgagactactggcgtgtattactcccac

SEQ ID NO: 290553 - DNA, 55 bp, Artificial
  Synthetic oligonucleotide
gctctcactaccacgcagcaagtccgcccactgtgcgcacacgacacctctatcg

SEQ ID NO: 290554 - DNA, 55 bp, Artificial
  Synthetic oligonucleotide
gctctcatgaacaattggtgtttcgcattaagggtgttacttccctctcatgtgg

SEQ ID NO: 290555 - DNA, 55 bp, Artificial
  Synthetic oligonucleotide
gctctccgagactctggagaagcggtaagctagcgcgagactgcgagagagtgcg

SEQ ID NO: 290556 - DNA, 55 bp, Artificial
  Synthetic oligonucleotide
gctctcgttactagagctcgaatttcatcacacgcacggcgcaacgcactcctac

SEQ ID NO: 290557 - DNA, 55 bp, Artificial
  Synthetic oligonucleotide
gcttagttcctgtatcagaacttgtatatcccattggacctcccataataaaatc

SEQ ID NO: 290558 - DNA, 55 bp, Artificial
  Synthetic oligonucleotide
gcttagctttaacctttatgattatcaaagaaagcggtttgcttaccgtgcgtcg

SEQ ID NO: 290559 - DNA, 54 bp, Artificial
  Synthetic oligonucleotide
gcttacgttctactgtttggtaattagaaagaactcccggcaatatagggtctg

SEQ ID NO: 290560 - DNA, 60 bp, Artificial
  Synthetic oligonucleotide
catatgatgaccgttggcctagaaacagatacacgagcttacttctctgctataacgatg

SEQ ID NO: 290561 - DNA, 55 bp, Artificial
  Synthetic oligonucleotide
gcttacgggcgcacgtctgatgccccgccttcgcagttgatccacaacgcgtatc

SEQ ID NO: 290562 - DNA, 55 bp, Artificial
  Synthetic oligonucleotide
gcttaagtgttggtggccgtctacgctatggaaccgatcccatgagctgcagcgg

SEQ ID NO: 290563 - DNA, 55 bp, Artificial
  Synthetic oligonucleotide
gctgttctaagcgaagtaacaagtagtaatatgccgtaccgccattagagagttt

SEQ ID NO: 290564 - DNA, 55 bp, Artificial
  Synthetic oligonucleotide
gctgttcatcggccaagcagtcaaagaggttggttgcactgagagtctcgtgcgc

SEQ ID NO: 290565 - DNA, 55 bp, Artificial
  Synthetic oligonucleotide
gctgtgtgcgtgtttcaactgcaccgatgagtgaggtcaaggtagaggtacgact

SEQ ID NO: 290566 - DNA, 55 bp, Artificial
  Synthetic oligonucleotide
gctgtgtgcgatgttgtctgtctgcgcatgcctgggtgctgtgtacggtaacacg

SEQ ID NO: 290567 - DNA, 55 bp, Artificial
  Synthetic oligonucleotide
gctgtgtactgtgtcagccttggtatgctactcactgtgtacgctgtgagactaa

SEQ ID NO: 290568 - DNA, 55 bp, Artificial
  Synthetic oligonucleotide
gctgtggtcaggcaagtacccgctcaaatacgtgtggtccggcaaggatatttgc

SEQ ID NO: 290569 - DNA, 55 bp, Artificial
  Synthetic oligonucleotide
gctgtgctgtaatagagcataggataatgcaacatatccctgattggattctgca

SEQ ID NO: 290570 - DNA, 55 bp, Artificial
  Synthetic oligonucleotide
gctgtgccactctagcagtatgcgcgcccttttcgtcaacgcctgacacgctcgc

SEQ ID NO: 290571 - DNA, 58 bp, Artificial
  Synthetic oligonucleotide
catagtgtatcttttcgtgcatggattttttaaggctatttcgttcctctgcgtcgga

SEQ ID NO: 290572 - DNA, 55 bp, Artificial
  Synthetic oligonucleotide
gctgtgattcttcacacaacaccaagacgtgaatccagtgtgcttccaaaggttc

SEQ ID NO: 290573 - DNA, 55 bp, Artificial
  Synthetic oligonucleotide
gctgtcttcggtgggcaaatctaggttggcagttagagcgtagagagcggactcc

SEQ ID NO: 290574 - DNA, 55 bp, Artificial
  Synthetic oligonucleotide
gctgtatgagtcgtagagtgtagtctggagaaaagtacatagtatctggtagctg

SEQ ID NO: 290575 - DNA, 55 bp, Artificial
  Synthetic oligonucleotide
gctgcatcacgtcgaagggccgtcaatgcgacgcgtgcccaaggctaacctagtg

SEQ ID NO: 290576 - DNA, 55 bp, Artificial
  Synthetic oligonucleotide
gctgcatcatggctaggtgttccatcgtgtggttcggcatgaacagacactcgcc

SEQ ID NO: 290577 - DNA, 55 bp, Artificial
  Synthetic oligonucleotide
gctgccatgtgggtgttacccgagaaccgattagcgcgtggctctttgcccgttg

SEQ ID NO: 290578 - DNA, 55 bp, Artificial
  Synthetic oligonucleotide
gctgccttgttatatcgaggcacgcaacgtttaacgcacgtcaccacatatcgtg

SEQ ID NO: 290579 - DNA, 55 bp, Artificial
  Synthetic oligonucleotide
gctgcgacaccgtctatcacgatgcacggtaccctatcctcggggcacctcttgg

SEQ ID NO: 290580 - DNA, 55 bp, Artificial
  Synthetic oligonucleotide
gctgcgaggagcaaaacacagttcaggcgcagttagcttgtagagtcaccgaggg

SEQ ID NO: 290581 - DNA, 55 bp, Artificial
  Synthetic oligonucleotide
gctgcgtaggtggtgcccattcgtccagctgttccaaagggagaacgctagcccg

SEQ ID NO: 290582 - DNA, 56 bp, Artificial
  Synthetic oligonucleotide
catagggttgtgcgataaggatacaaatctcgatagacttccaggttgggaaaaaa

SEQ ID NO: 290583 - DNA, 55 bp, Artificial
  Synthetic oligonucleotide
gctgcgtgcataagcagcgctccgtaatattatgcatttgtccattcggcgctgt

SEQ ID NO: 290584 - DNA, 55 bp, Artificial
  Synthetic oligonucleotide
gctgcgtgcatacgtggcacacaaagcgggacgacagaaacgaggaaggaagctg

SEQ ID NO: 290585 - DNA, 55 bp, Artificial
  Synthetic oligonucleotide
gctgctcattggcctatacaagatgccctcgcaaactcgtagcctcatctactcc

SEQ ID NO: 290586 - DNA, 55 bp, Artificial
  Synthetic oligonucleotide
gctgctgtagttgtcagcaagaatagtgatgccctgctacgaaggagcgtacagg

SEQ ID NO: 290587 - DNA, 55 bp, Artificial
  Synthetic oligonucleotide
gctggaggcgtgagctcgggcgtaactctttaggaggtgaggcgcgaatgagagc

SEQ ID NO: 290588 - DNA, 51 bp, Artificial
  Synthetic oligonucleotide
gctggagggaaaacccctaacccgtacaaccgtacacctagtcacctggga

SEQ ID NO: 290589 - DNA, 55 bp, Artificial
  Synthetic oligonucleotide
gctggataaatgtgtcagagcttcagacttggttaagtttcccagaattcccgta

SEQ ID NO: 290590 - DNA, 55 bp, Artificial
  Synthetic oligonucleotide
gctgaattgggtagcacgtccaggtggtggcgaagtgtcgctcaatgtgcccctt

SEQ ID NO: 290591 - DNA, 55 bp, Artificial
  Synthetic oligonucleotide
gctggttcagaaattgttgataatggtaaacgaattacacaagtcgttcatgggg

SEQ ID NO: 290592 - DNA, 54 bp, Artificial
  Synthetic oligonucleotide
gctgtaggggtgtccgaataaaggttgtacgggtgtcagaataagatggtacgg

SEQ ID NO: 290593 - DNA, 58 bp, Artificial
  Synthetic oligonucleotide
ggataatggaaccaatttttagcgtgttcatcagtgtgccattaaaacacttaggagc

SEQ ID NO: 290594 - DNA, 55 bp, Artificial
  Synthetic oligonucleotide
gccgcttgcaattaccctatctgcgccactgtacaagagtacgtgtacaacgtgt

SEQ ID NO: 290595 - DNA, 55 bp, Artificial
  Synthetic oligonucleotide
gccgcttctactggcacaactattcactgccggggacacgcgtttgaagcatccg

SEQ ID NO: 290596 - DNA, 55 bp, Artificial
  Synthetic oligonucleotide
gccgctgagaggcaccggatacatcgagctgtagagaccactagtgcaatgcggc

SEQ ID NO: 290597 - DNA, 55 bp, Artificial
  Synthetic oligonucleotide
gccgctcagatgcgagtttgcgcagcgatctgaaatgtatacgtcatcaccggtg

SEQ ID NO: 290598 - DNA, 55 bp, Artificial
  Synthetic oligonucleotide
gccgctagccacgcagcgttgcgtcagcagaacgcagtattgaccgcgtctgtcg

SEQ ID NO: 290599 - DNA, 55 bp, Artificial
  Synthetic oligonucleotide
gccgcggaatcggggaaatacatcgtacggcttcctctggccctttcacgtgaag

SEQ ID NO: 290600 - DNA, 55 bp, Artificial
  Synthetic oligonucleotide
gccgcataagtttggagacgcaagaggtgggactaattggctggtgcgacgaagg

SEQ ID NO: 290601 - DNA, 55 bp, Artificial
  Synthetic oligonucleotide
gccgatgcgtacgagcgaacgcgcggttaatacaggacacacgaagatgcggagg

SEQ ID NO: 290602 - DNA, 55 bp, Artificial
  Synthetic oligonucleotide
gccgatacggctttcttcagtggagtgtagactgagaggcgagcgtatgagtgag

SEQ ID NO: 290603 - DNA, 55 bp, Artificial
  Synthetic oligonucleotide
gccgagtatcttagaatgacaacaagccgaaagtcaccgattgtgcatggtgcga

SEQ ID NO: 290604 - DNA, 60 bp, Artificial
  Synthetic oligonucleotide
catagaatgaacatataaaccagatagtaggaacagaatattctctagcaccaaaagcaa

SEQ ID NO: 290605 - DNA, 55 bp, Artificial
  Synthetic oligonucleotide
gccgagggtagcagcaggggttgcttggagctaaatctggcctggctccactctc

SEQ ID NO: 290606 - DNA, 55 bp, Artificial
  Synthetic oligonucleotide
gccgagctcggcgcttaaagagcaaacgatacgacacctgctgtgtgtgttgcgc

SEQ ID NO: 290607 - DNA, 55 bp, Artificial
  Synthetic oligonucleotide
gccgacgtgtgccagtgcgtctgctagtgccctctgcgcaatgtgagagtccttg

SEQ ID NO: 290608 - DNA, 55 bp, Artificial
  Synthetic oligonucleotide
gccgacatttcaaactgcgggcgcccgcttgacatttacctgcgctggggagcga

SEQ ID NO: 290609 - DNA, 55 bp, Artificial
  Synthetic oligonucleotide
gccgacacagtacaccttcagcaccactgggagcgcgtacacatacagctcctgc

SEQ ID NO: 290610 - DNA, 55 bp, Artificial
  Synthetic oligonucleotide
gccgaaacatgtcgaagaactaccgcattcttcgcagcccaacctatcgtacgac

SEQ ID NO: 290611 - DNA, 55 bp, Artificial
  Synthetic oligonucleotide
gccgaaaaggtcaagtaacttatcgtatcgtagcaatgaataatttaagtcgacg

SEQ ID NO: 290612 - DNA, 55 bp, Artificial
  Synthetic oligonucleotide
gcccttgtaggcgtacatatcaatgcgcatcagagtcgattgggaccggctaggc

SEQ ID NO: 290613 - DNA, 55 bp, Artificial
  Synthetic oligonucleotide
gcccttcatcactaattgctcactccgtcactgtaatccgttagccttacgcacg

SEQ ID NO: 290614 - DNA, 55 bp, Artificial
  Synthetic oligonucleotide
gccctctgtcaagtaaccacccaacgatggaagactactcttatacaattcgaat

SEQ ID NO: 290615 - DNA, 57 bp, Artificial
  Synthetic oligonucleotide
catagaactgtcggtccactttcagccctaatcgatgttaatcctagatacctaaag

SEQ ID NO: 290616 - DNA, 55 bp, Artificial
  Synthetic oligonucleotide
gccctctgatctccaaaagaccccaacggatcgtgacgactaccgcgtgtacgag

SEQ ID NO: 290617 - DNA, 54 bp, Artificial
  Synthetic oligonucleotide
gccctcatcaccttttggtacaaggggaacaacgcattcctgaacctaacaaag

SEQ ID NO: 290618 - DNA, 55 bp, Artificial
  Synthetic oligonucleotide
gccctagtgatgaatggcaatggactggatcgaccgtgctgcgtggtatgcctgc

SEQ ID NO: 290619 - DNA, 55 bp, Artificial
  Synthetic oligonucleotide
gccctaccccacgttctttggttcgcttcttcgacttccatgagaaccatgcctc

SEQ ID NO: 290620 - DNA, 55 bp, Artificial
  Synthetic oligonucleotide
gcccgtcggtggcatgaggtgcgaacgattctaacggccttttcgctgcaatact

SEQ ID NO: 290621 - DNA, 55 bp, Artificial
  Synthetic oligonucleotide
gcccgtagaagcgcagcgctgtgaaggagagactcacgacgtccgcctttagggt

SEQ ID NO: 290622 - DNA, 54 bp, Artificial
  Synthetic oligonucleotide
gcccggtcgccgttctacgttggaccgagtaagaccaacagaagcaacccagcg

SEQ ID NO: 290623 - DNA, 55 bp, Artificial
  Synthetic oligonucleotide
gcccggcgagtaaggcgcgggtctacgttgatcttcgttacctccgtgatccctc

SEQ ID NO: 290624 - DNA, 55 bp, Artificial
  Synthetic oligonucleotide
gcccgcaacacgcctgtagacgggatgcaccagcgtgtggtcaatgtccaccaga

SEQ ID NO: 290625 - DNA, 55 bp, Artificial
  Synthetic oligonucleotide
gcccgagtgcactcagctccccacatctccgccccttacaagcaggtctatgcac

SEQ ID NO: 290626 - DNA, 59 bp, Artificial
  Synthetic oligonucleotide
taatgcacttacgtgcaaaaggattaacacttggtatactaagtgtttcaacatggtca

SEQ ID NO: 290627 - DNA, 60 bp, Artificial
  Synthetic oligonucleotide
atgcgcatagacataggggaatacgaataaatagtcggcgcgtgggcccgtgtgcacaga

SEQ ID NO: 290628 - DNA, 58 bp, Artificial
  Synthetic oligonucleotide
gacagggccacagacgtaggagtcgactgtccaagtgcaggaaccgttcacacgcctt

SEQ ID NO: 290629 - DNA, 55 bp, Artificial
  Synthetic oligonucleotide
gcccgaggtatcgctagtaatcgttgcagatgtactaccactgacttgtgtaggg

SEQ ID NO: 290630 - DNA, 55 bp, Artificial
  Synthetic oligonucleotide
gcctcccatgagaggcacggcggtgatgtcgcactcaagcctggcatcgtggcga

SEQ ID NO: 290631 - DNA, 55 bp, Artificial
  Synthetic oligonucleotide
gcctccaatgaggtgaggggcggcgtctgtgggcggtacgcagacggagacgaat

SEQ ID NO: 290632 - DNA, 55 bp, Artificial
  Synthetic oligonucleotide
gcctcacacgcgaagccgccactctcgtacaaccacgcacctactctgcgagtgt

SEQ ID NO: 290633 - DNA, 55 bp, Artificial
  Synthetic oligonucleotide
gcctcaacaatcttgacgacctctgccgagagggactcacacacggatggatcag

SEQ ID NO: 290634 - DNA, 55 bp, Artificial
  Synthetic oligonucleotide
gcctatcgaactcagcttttactcgggcttgctcctcaaaacgccacatggatgt

SEQ ID NO: 290635 - DNA, 55 bp, Artificial
  Synthetic oligonucleotide
gcctatcagattatcttataagggatatgggtgctaagctccacagtttcgggca

SEQ ID NO: 290636 - DNA, 55 bp, Artificial
  Synthetic oligonucleotide
gcctagggtaagccaaaggactgaagtaacacacaagtctaaaacacactagatg

SEQ ID NO: 290637 - DNA, 55 bp, Artificial
  Synthetic oligonucleotide
gcctagaactaagagtatcaacacacacaggtgataactacgcgtcgaatatttg

SEQ ID NO: 290638 - DNA, 55 bp, Artificial
  Synthetic oligonucleotide
gcctactctgtggcctacttgcaccatctattcaagatgagtgaaccaacttata

SEQ ID NO: 290639 - DNA, 59 bp, Artificial
  Synthetic oligonucleotide
gacacttccatttcgtcctatcaattggtgccattattggattattcaccttagtaagc

SEQ ID NO: 290640 - DNA, 55 bp, Artificial
  Synthetic oligonucleotide
gcctacgcaccgactcaaacagcctctctgaagggctcctcgtgcgcactcaagc

SEQ ID NO: 290641 - DNA, 55 bp, Artificial
  Synthetic oligonucleotide
gcctacacaaatttcatttcgtcaggagctacgtcagcgcccattggaccgcggt

SEQ ID NO: 290642 - DNA, 55 bp, Artificial
  Synthetic oligonucleotide
gcctaagatcagcaagcgcttctttgaaattgcatctaggaagaacgaacccgga

SEQ ID NO: 290643 - DNA, 55 bp, Artificial
  Synthetic oligonucleotide
gcctaactcatttaggaacccagctgtctctaatccaatgtaagaagctccaatg

SEQ ID NO: 290644 - DNA, 55 bp, Artificial
  Synthetic oligonucleotide
accaaaacgatattattaccgtacaagccgttagcaagacatgacagggagttgg

SEQ ID NO: 290645 - DNA, 55 bp, Artificial
  Synthetic oligonucleotide
gccgttgcctggcgttggttcacacgaccacaacaaaacgcatcagaacactgtc

SEQ ID NO: 290646 - DNA, 55 bp, Artificial
  Synthetic oligonucleotide
gccgtgtggtgttttcgtgacagagtaccaggccacagattgtgttctgcattga

SEQ ID NO: 290647 - DNA, 55 bp, Artificial
  Synthetic oligonucleotide
gccgctttcccgtgggtatgtcccaataacggaacaccacacagctatacgctgc

SEQ ID NO: 290648 - DNA, 55 bp, Artificial
  Synthetic oligonucleotide
gccggacattattgaggcacaactcacgctcagctacagccgtctcactgatgtg

SEQ ID NO: 290649 - DNA, 55 bp, Artificial
  Synthetic oligonucleotide
gccggatgacggtactctcatagcgcttcgctacctttcacacgactatgcaggc

SEQ ID NO: 290650 - DNA, 58 bp, Artificial
  Synthetic oligonucleotide
attggattcaacgtccaggacttcctgacgcttaataacgatttctacttccagcagc

SEQ ID NO: 290651 - DNA, 55 bp, Artificial
  Synthetic oligonucleotide
gccggcgactgcaagcacgcaccaaggcaccaacatccgccacgaccataagctt

SEQ ID NO: 290652 - DNA, 55 bp, Artificial
  Synthetic oligonucleotide
gccgggctcgtctcttacccgcttgcatgtgaaggacgtagcgttgccacttgcg

SEQ ID NO: 290653 - DNA, 55 bp, Artificial
  Synthetic oligonucleotide
gccggggaaggttcgttgccttcgcatatgaggagtgcgaaagagagtcgggtac

SEQ ID NO: 290654 - DNA, 55 bp, Artificial
  Synthetic oligonucleotide
gccggtacagctctcggggtgcaccgggcgcctcaacaatgtgacacttcacgtt

SEQ ID NO: 290655 - DNA, 55 bp, Artificial
  Synthetic oligonucleotide
gccggtcttttccctgccacccggttggtcgctcactagtaggttcactccagcg

SEQ ID NO: 290656 - DNA, 54 bp, Artificial
  Synthetic oligonucleotide
gccgtacggtccaacggtggagacttccttgtcgagtaactaccgtcccgctgc

SEQ ID NO: 290657 - DNA, 55 bp, Artificial
  Synthetic oligonucleotide
gccgtagcggtgcacagtgtccctctctaggttagaggggaggttgatgatacga

SEQ ID NO: 290658 - DNA, 55 bp, Artificial
  Synthetic oligonucleotide
gccgtatatccttctcctcgtgtttctacggcagtagtagaaccttataactctg

SEQ ID NO: 290659 - DNA, 55 bp, Artificial
  Synthetic oligonucleotide
gccgtatggtaaggagctgttaggtgccccagcacaacgcgaggtgttacggccc

SEQ ID NO: 290660 - DNA, 55 bp, Artificial
  Synthetic oligonucleotide
gccgtgacgtcaaaggggattcgtgacgctcgcagagacatcgtgtcgcaacgcg

SEQ ID NO: 290661 - DNA, 57 bp, Artificial
  Synthetic oligonucleotide
gtgattattagaatggaattaagtattcctggtagtccctttttagctggagattca

SEQ ID NO: 290662 - DNA, 55 bp, Artificial
  Synthetic oligonucleotide
gccgtgagaatgccctcttaggtaggtggaaacgaagtgcgtgtgcgagcacacg

SEQ ID NO: 290663 - DNA, 55 bp, Artificial
  Synthetic oligonucleotide
gccgtgctttcagagaccattgcagacgcacgccagagcgacactaccaccatgg

SEQ ID NO: 290664 - DNA, 55 bp, Artificial
  Synthetic oligonucleotide
gccgtgtccccaagccactcgggctcgatctaggcgtgtatgaagactccagcct

SEQ ID NO: 290665 - DNA, 55 bp, Artificial
  Synthetic oligonucleotide
gccgtgtcgagcctctgcaaccactaacagaatgggcacgcgctcagatagcaac

SEQ ID NO: 290666 - DNA, 55 bp, Artificial
  Synthetic oligonucleotide
gccactagctcttcgtccgggaaaggtctcgtgcctctgtatcacctcaatccaa

SEQ ID NO: 290667 - DNA, 55 bp, Artificial
  Synthetic oligonucleotide
gccacgtcgcctctgttttgttctcctacgaagctgctcatcacacacgatttga

SEQ ID NO: 290668 - DNA, 55 bp, Artificial
  Synthetic oligonucleotide
gccacgtcaaggcggcactgagcgtactagctatggtgtactgcaaccatatgcg

SEQ ID NO: 290669 - DNA, 55 bp, Artificial
  Synthetic oligonucleotide
gccacgtatcacaaactcttatatcaatcgttacgtgggcttcatcttttcggcg

SEQ ID NO: 290670 - DNA, 55 bp, Artificial
  Synthetic oligonucleotide
gccacgcgtgaggttacacgtttgccattttgacgggtgttccgctgatcagggg

SEQ ID NO: 290671 - DNA, 55 bp, Artificial
  Synthetic oligonucleotide
gccacctgccctctgtgcgggtggaatgggccatggtcaacggacggagcgcaca

SEQ ID NO: 290672 - DNA, 60 bp, Artificial
  Synthetic oligonucleotide
ggatgttgatactagagcgtattttactggggcgactatgataattgcaatacctactgg

SEQ ID NO: 290673 - DNA, 55 bp, Artificial
  Synthetic oligonucleotide
gccaccgcctagagacagcagcataaaggagaccgatgcggtgccagaactcacc

SEQ ID NO: 290674 - DNA, 55 bp, Artificial
  Synthetic oligonucleotide
gccaccacacgtgttcacatgtgctagggaagctttgtctaatctccatggtgta

SEQ ID NO: 290675 - DNA, 55 bp, Artificial
  Synthetic oligonucleotide
gccacagtgtagagcgaggtgtgccttgagcttcgaagggcccgagaacctcgtg

SEQ ID NO: 290676 - DNA, 55 bp, Artificial
  Synthetic oligonucleotide
gccacagcgacgcaacacgaactaatgtcaacaatacactcccagccgtggtggc

SEQ ID NO: 290677 - DNA, 55 bp, Artificial
  Synthetic oligonucleotide
gccacagccgcagcggataagggcttagggcacaccctgtcgagctagacatgtc

SEQ ID NO: 290678 - DNA, 55 bp, Artificial
  Synthetic oligonucleotide
gccacaatatagaatgtataatcgctaccacgactaagccccgttacagtgtacg

SEQ ID NO: 290679 - DNA, 55 bp, Artificial
  Synthetic oligonucleotide
gccacaatacgcttactgtggggaacattcacaaacgagcgaggcacgcatactc

SEQ ID NO: 290680 - DNA, 55 bp, Artificial
  Synthetic oligonucleotide
gccaagtcatgcaatcggccaacgccctccttaatgcgacataaccctgcgtcga

SEQ ID NO: 290681 - DNA, 55 bp, Artificial
  Synthetic oligonucleotide
gccaaatagatccgaagggaaggtttgtaatttgcgttgattcgagcaaagaaat

SEQ ID NO: 290682 - DNA, 55 bp, Artificial
  Synthetic oligonucleotide
gccaaacccagttgtatactttgatatctcaatcggccaaactccagccggtcgt

SEQ ID NO: 290683 - DNA, 57 bp, Artificial
  Synthetic oligonucleotide
atttaagtataggtaacttatatagttacgagtcaatagctcagttggaagagtatg

SEQ ID NO: 290684 - DNA, 55 bp, Artificial
  Synthetic oligonucleotide
gcatccctgcaggtgaacacacaagggtaaagctcgtcagtgttcgttcgtttgc

SEQ ID NO: 290685 - DNA, 55 bp, Artificial
  Synthetic oligonucleotide
gcatcgcgtagtgccgcgtgttcacaatttgcttaccacataattgctctgttag

SEQ ID NO: 290686 - DNA, 55 bp, Artificial
  Synthetic oligonucleotide
gcatctctcgatgtactcgaagctgacttcctcgtcagcacatggacagttagcg

SEQ ID NO: 290687 - DNA, 55 bp, Artificial
  Synthetic oligonucleotide
gcatgaataggcctctttcgtggtcacatctttgaagcatgtactctgcaccttc

SEQ ID NO: 290688 - DNA, 55 bp, Artificial
  Synthetic oligonucleotide
gcatgcacgtttgtacatcacccttggctactacgctctctctttcccgcagcgc

SEQ ID NO: 290689 - DNA, 55 bp, Artificial
  Synthetic oligonucleotide
gcatggcggtaaacggctgtgtgcaggtgaacatgtgggaccgggccatcgctct

SEQ ID NO: 290690 - DNA, 55 bp, Artificial
  Synthetic oligonucleotide
gcatggttgaagcttgatgtcataaggtattgcccatccttctctatcgattcct

SEQ ID NO: 290691 - DNA, 55 bp, Artificial
  Synthetic oligonucleotide
gcatgtacgtcgttgatgggcggtacttctgaggggcagcgccagggttcgggtc

SEQ ID NO: 290692 - DNA, 55 bp, Artificial
  Synthetic oligonucleotide
gcatgtatctgttcccagagagttacacgtgacgggagcggctgtaggcgcatgc

SEQ ID NO: 290693 - DNA, 55 bp, Artificial
  Synthetic oligonucleotide
gcatgttatcgagcctcctacgtttctaagcgcgcgggtcggaatgagacacgga

SEQ ID NO: 290694 - DNA, 60 bp, Artificial
  Synthetic oligonucleotide
gacaaagtcccagcagtagcggtcaaactattgaagagccgagtgttatccatccatacc

SEQ ID NO: 290695 - DNA, 55 bp, Artificial
  Synthetic oligonucleotide
gcatgtttaaccgtatacatattactgtaaatcagctcgtagcatcggacctttt

SEQ ID NO: 290696 - DNA, 55 bp, Artificial
  Synthetic oligonucleotide
gcattagcctctagcaaacggtaggcggagacatcgatacagttcttcgcgcggt

SEQ ID NO: 290697 - DNA, 55 bp, Artificial
  Synthetic oligonucleotide
gcattatccacccaaatcatgtaatctcgaatgctattcactgcatctatgcctc

SEQ ID NO: 290698 - DNA, 55 bp, Artificial
  Synthetic oligonucleotide
gcattgaaggcgtgagcattagggagctatctctggatgaatcacacggaatcac

SEQ ID NO: 290699 - DNA, 55 bp, Artificial
  Synthetic oligonucleotide
gcattgggctcgccagggcttttcagacggcccaccgcggactgagctgtgccgt

SEQ ID NO: 290700 - DNA, 55 bp, Artificial
  Synthetic oligonucleotide
gcattttgctatcggacctatgtcagttctattaattccatgccgagttatgctc

SEQ ID NO: 290701 - DNA, 55 bp, Artificial
  Synthetic oligonucleotide
gccaaaaccatctatggatgtcataaaggatgcaaccagtggaaaacagagttgt

SEQ ID NO: 290702 - DNA, 55 bp, Artificial
  Synthetic oligonucleotide
gcccgaataagtcattaactggaaacaatagaagtaactcacagtagccagccag

SEQ ID NO: 290703 - DNA, 55 bp, Artificial
  Synthetic oligonucleotide
gcccctcccacgactttggaatcgcttcgccgcagtttatggtcgtggccatgtc

SEQ ID NO: 290704 - DNA, 55 bp, Artificial
  Synthetic oligonucleotide
gcccctcaataagaacgcaagtgaaagaatcctattttgttgtagaaggttccac

SEQ ID NO: 290705 - DNA, 54 bp, Artificial
  Synthetic oligonucleotide
gtgaggtaactacattaaaggaactcgactggcctactatttaagaacgaacgc

SEQ ID NO: 290706 - DNA, 55 bp, Artificial
  Synthetic oligonucleotide
gccccgtctaccacgtgtacctggccaatacgacagaccagccgtaccctgtgct

SEQ ID NO: 290707 - DNA, 55 bp, Artificial
  Synthetic oligonucleotide
gccccgagtcatcattcgcacgattatttcatcgcatgggtaccatggtggacaa

SEQ ID NO: 290708 - DNA, 55 bp, Artificial
  Synthetic oligonucleotide
gccccacttgctttgcccgcccgtcactggcgttaccaccactggactcgtgaga

SEQ ID NO: 290709 - DNA, 55 bp, Artificial
  Synthetic oligonucleotide
gccccaacatgcatgtctgacgctcatgattccgctagtgcggctcaacaccatg

SEQ ID NO: 290710 - DNA, 55 bp, Artificial
  Synthetic oligonucleotide
gccccaaaattcggtgtgcgcgtttggccgtgctcacctgtcagcacacgtgatc

SEQ ID NO: 290711 - DNA, 55 bp, Artificial
  Synthetic oligonucleotide
gcccatcggaatgactgctcaaatgttccgcaccgtccctcccagctatgtgaag

SEQ ID NO: 290712 - DNA, 55 bp, Artificial
  Synthetic oligonucleotide
gcccagtcaatctctcgctgaggtgatctcgaccagctgtagagaatcctctgag

SEQ ID NO: 290713 - DNA, 55 bp, Artificial
  Synthetic oligonucleotide
gcccagcgagggagcgctctaacttctctatgtacgcccgcagcatacgtagctc

SEQ ID NO: 290714 - DNA, 55 bp, Artificial
  Synthetic oligonucleotide
gcccactcagcgagtactgtgcatactgctttccagctgtggtgcaggctatcgg

SEQ ID NO: 290715 - DNA, 55 bp, Artificial
  Synthetic oligonucleotide
gcccacaagcctgtgcacaacggcggtgtagggaagcgagaggaggtggatgcta

SEQ ID NO: 290716 - DNA, 55 bp, Artificial
  Synthetic oligonucleotide
acgtgctaaaggtttaacccttggtatgttaagtgtatcagtatggtcattaata

SEQ ID NO: 290717 - DNA, 55 bp, Artificial
  Synthetic oligonucleotide
gcccaactggtaactgcccaactggtaactgcccaactggtaactgcccaactgg

SEQ ID NO: 290718 - DNA, 55 bp, Artificial
  Synthetic oligonucleotide
gcccaaactaccatgatgtctctgttaccatttccaatccaagtcttgtctccat

SEQ ID NO: 290719 - DNA, 55 bp, Artificial
  Synthetic oligonucleotide
gccattccacaagcgccataaacactacgtgatagccgaacactcaatgcacggc

SEQ ID NO: 290720 - DNA, 55 bp, Artificial
  Synthetic oligonucleotide
gccactcagtaacggatcgtcccactccttgtacgtcacgagagaaggtcacccc

SEQ ID NO: 290721 - DNA, 55 bp, Artificial
  Synthetic oligonucleotide
gccactccgggttgtgacgaatatactgcggagggaccgttgcttgtttgtccgc

SEQ ID NO: 290722 - DNA, 55 bp, Artificial
  Synthetic oligonucleotide
gccactcgaatgccacgttggtgccaaaggtcgctgaggagactcaacagagctc

SEQ ID NO: 290723 - DNA, 55 bp, Artificial
  Synthetic oligonucleotide
gccactgctattgaggaattgaaccttaacggttgtcgccgaataacacgaggga

SEQ ID NO: 290724 - DNA, 55 bp, Artificial
  Synthetic oligonucleotide
gccacttctctcttggttttgcgtattgctggcggcgtgtttgcatgcgtctctc

SEQ ID NO: 290725 - DNA, 55 bp, Artificial
  Synthetic oligonucleotide
gccacttgttaagccgttcctcaaccttatgccacaccctcagtgtttccctgcg

SEQ ID NO: 290726 - DNA, 55 bp, Artificial
  Synthetic oligonucleotide
gccagccatcactgttacttccgtccaaggaggcgggctagatgaatgacggctg

SEQ ID NO: 290727 - DNA, 60 bp, Artificial
  Synthetic oligonucleotide
aatggaagcgctggtacctgggtatccaatccagtgctcctcattcggcatagagactca

SEQ ID NO: 290728 - DNA, 55 bp, Artificial
  Synthetic oligonucleotide
gccagcgaggtacttgtagtactccagcatgaagctcggggcactgttgatggct

SEQ ID NO: 290729 - DNA, 55 bp, Artificial
  Synthetic oligonucleotide
gccaggcaagtggagctgcactacacgaaacaccacaaggcgtacgtggataagc

SEQ ID NO: 290730 - DNA, 55 bp, Artificial
  Synthetic oligonucleotide
gccagtagctacacttgctagattggaacagtccttattagacgcacgtgatgta

SEQ ID NO: 290731 - DNA, 55 bp, Artificial
  Synthetic oligonucleotide
gccagtgctcccctagctaattaaagacgctgcttctccatacgtggtggtatct

SEQ ID NO: 290732 - DNA, 55 bp, Artificial
  Synthetic oligonucleotide
gccagtggctctacgtaaattctggtgcctcatacgttattgtccctctgctgcg

SEQ ID NO: 290733 - DNA, 55 bp, Artificial
  Synthetic oligonucleotide
gccagtttgacgaatactagtcttgacctccaattctccgcgggaagctctgagc

SEQ ID NO: 290734 - DNA, 55 bp, Artificial
  Synthetic oligonucleotide
gccatacagtgtgaagtcctagtgatgaccatacggaacttcaaattctcgagga

SEQ ID NO: 290735 - DNA, 55 bp, Artificial
  Synthetic oligonucleotide
gccatcgcgtgagaagcggttacagtggttcgagtcactaagctccttcgcgcac

SEQ ID NO: 290736 - DNA, 55 bp, Artificial
  Synthetic oligonucleotide
gccatgacttggtaatatgcttagtgccagctgtggcgtacgtagtttccgcgag

SEQ ID NO: 290737 - DNA, 55 bp, Artificial
  Synthetic oligonucleotide
gccatggatcgaggagctgatggggtgccgctacatggaaagtgtccctaagttc

SEQ ID NO: 290738 - DNA, 60 bp, Artificial
  Synthetic oligonucleotide
tacgctatcgcagtagaaagtatggtgtgtggcccttccaggaacgcagtcaatctttat

SEQ ID NO: 290739 - DNA, 54 bp, Artificial
  Synthetic oligonucleotide
atttatacgaatggagttaagccaaccgggaaatcaattattagcgggtaatca

SEQ ID NO: 290740 - DNA, 55 bp, Artificial
  Synthetic oligonucleotide
gcgcctccttcgaggtggcgctagaggtgatactgaactcaaagttccagaagct

SEQ ID NO: 290741 - DNA, 55 bp, Artificial
  Synthetic oligonucleotide
gcgccgttcttcgttttgctgcaaagatggggaagtcgctacggttgttcttgcg

SEQ ID NO: 290742 - DNA, 55 bp, Artificial
  Synthetic oligonucleotide
gcgccgtcgtgtacagaaacgcacaacagacgagaacggtgcctacgttcacgac

SEQ ID NO: 290743 - DNA, 55 bp, Artificial
  Synthetic oligonucleotide
gcgccggttgtcgactcggctaatcgaagctcctgcattgccggttgctgtgacg

SEQ ID NO: 290744 - DNA, 55 bp, Artificial
  Synthetic oligonucleotide
gcgccgatgatacaagctctagcgtcctttgctgtgtcaaccgacatgtcagtcc

SEQ ID NO: 290745 - DNA, 55 bp, Artificial
  Synthetic oligonucleotide
gcgccgacgaagaaagggatctgcagcatgtagtgcaaaatcgaaagcactgcga

SEQ ID NO: 290746 - DNA, 55 bp, Artificial
  Synthetic oligonucleotide
gcgccctgccattgtctacatggagtccttcacgtgcgtatcgcacctatccctg

SEQ ID NO: 290747 - DNA, 55 bp, Artificial
  Synthetic oligonucleotide
gcgccctagcgcagctgttcgtgaacaacggcgactgtgtggccatgctgtacac

SEQ ID NO: 290748 - DNA, 55 bp, Artificial
  Synthetic oligonucleotide
gcgcccagcactgctgtagctgttcgtgccaccgggcttcacgcgcatggtaatg

SEQ ID NO: 290749 - DNA, 55 bp, Artificial
  Synthetic oligonucleotide
gcgccacgcatgcgccggtcgtgtctcgatatgcgcatctcattgccctactctc

SEQ ID NO: 290750 - DNA, 60 bp, Artificial
  Synthetic oligonucleotide
atttcctgttctgtaattagatcacatgctttatagttcatggagctatggctatatacc

SEQ ID NO: 290751 - DNA, 55 bp, Artificial
  Synthetic oligonucleotide
gcgccaatggatgtatgggcgtctgtgttatcttagtgcgagcaggcgtgaacgt

SEQ ID NO: 290752 - DNA, 55 bp, Artificial
  Synthetic oligonucleotide
gcgccaataagcttcatgagatgttcgtgtatgccactccaccggcaagtatcgg

SEQ ID NO: 290753 - DNA, 50 bp, Artificial
  Synthetic oligonucleotide
gcgccaaaacggtaaattaccggtcagaaattcgataccggggagttttg

SEQ ID NO: 290754 - DNA, 55 bp, Artificial
  Synthetic oligonucleotide
gcgcattgttggccagagacgcctccacgatggcaaacatgcgtgcaatgctgtt

SEQ ID NO: 290755 - DNA, 55 bp, Artificial
  Synthetic oligonucleotide
gcgcattggagcacgagtatccgctctatcttcgcgggatgttggaggtgcatcg

SEQ ID NO: 290756 - DNA, 55 bp, Artificial
  Synthetic oligonucleotide
gcgcattcgccaaaagacggcacctcccaattttccttctccatgatgcaccaac

SEQ ID NO: 290757 - DNA, 55 bp, Artificial
  Synthetic oligonucleotide
gcgcattcagctgcgttactccactccggccaacatacttggtggggtgctgaga

SEQ ID NO: 290758 - DNA, 55 bp, Artificial
  Synthetic oligonucleotide
gcgcatgacactctccgtgccacgaactcgactgcacattctctcagactgagcg

SEQ ID NO: 290759 - DNA, 55 bp, Artificial
  Synthetic oligonucleotide
gcgcatcaccttgacagcaggacgtaacaaagacaccgtgtttcgactcggcctt

SEQ ID NO: 290760 - DNA, 55 bp, Artificial
  Synthetic oligonucleotide
gcgcaggggagagacctcgagcggagatgtgtatggtagaatgttgtggcgagtc

SEQ ID NO: 290761 - DNA, 57 bp, Artificial
  Synthetic oligonucleotide
ggatttactcttatatatattccagatcaaaattttaggccttagaagaagtgaata

SEQ ID NO: 290762 - DNA, 55 bp, Artificial
  Synthetic oligonucleotide
gcgcagctatgtgcgcccgatgaggcagcttcgataccgtctgtctacacagccc

SEQ ID NO: 290763 - DNA, 55 bp, Artificial
  Synthetic oligonucleotide
gcgcagctacccatagataatactcatttgggatctaaggtttgttcatataatc

SEQ ID NO: 290764 - DNA, 55 bp, Artificial
  Synthetic oligonucleotide
gcgcagccgtacactcacaggcagacatacgtgtgtgggcgcgcatacatgcgtc

SEQ ID NO: 290765 - DNA, 55 bp, Artificial
  Synthetic oligonucleotide
gcgcagacacacctcgcagcgaagaaaactcaagcatacgtcgttgaagtcttcc

SEQ ID NO: 290766 - DNA, 55 bp, Artificial
  Synthetic oligonucleotide
gcgcactattagccagtgggcatcaaacttgcgggtagatacacccttttctagg

SEQ ID NO: 290767 - DNA, 55 bp, Artificial
  Synthetic oligonucleotide
gcgcactaccgctcactacgtgctcacgtgggtgtcatcgttgataaggagaccg

SEQ ID NO: 290768 - DNA, 55 bp, Artificial
  Synthetic oligonucleotide
gcgcactacccgttttgacctctctcccttacttgactatctctgctgtgcgctg

SEQ ID NO: 290769 - DNA, 55 bp, Artificial
  Synthetic oligonucleotide
gcgcacgtgtatcggggattctgttgtgttcgcttcagcgagcccattctctgcc

SEQ ID NO: 290770 - DNA, 55 bp, Artificial
  Synthetic oligonucleotide
gcgcacgtatagaggggaggtacagggtagcagagggccacctctacccgcgtat

SEQ ID NO: 290771 - DNA, 55 bp, Artificial
  Synthetic oligonucleotide
gcgcacctcacggcgcaagtttcttcttggaggagagacggagcgcacccctcat

SEQ ID NO: 290772 - DNA, 60 bp, Artificial
  Synthetic oligonucleotide
acgtgcacgtaacgcacacgcacagaggccgcaccgtgagactcacggctctcgctctcc

SEQ ID NO: 290773 - DNA, 55 bp, Artificial
  Synthetic oligonucleotide
gcggcaatgtagataaataattattccaacgtatatgttgtcctcgtgactcagg

SEQ ID NO: 290774 - DNA, 55 bp, Artificial
  Synthetic oligonucleotide
gcggcaacacacctgcgataaggcactcgatcgggtctaccacactcacgccgac

SEQ ID NO: 290775 - DNA, 55 bp, Artificial
  Synthetic oligonucleotide
gcggattctctacagctggtcgagatcacctcagcgagagattgactggtctttg

SEQ ID NO: 290776 - DNA, 55 bp, Artificial
  Synthetic oligonucleotide
gcggatggccaccccatgcgattgtagaatggcgagcttcgcgtcaagcttcctt

SEQ ID NO: 290777 - DNA, 55 bp, Artificial
  Synthetic oligonucleotide
gcggaggttgtccaactcaaggctacggggtgcgctcctttgaaaatatgcggtg

SEQ ID NO: 290778 - DNA, 55 bp, Artificial
  Synthetic oligonucleotide
gcggagccaagtttggcttccgaagctgggcatcacagcgacccaacagatgacg

SEQ ID NO: 290779 - DNA, 55 bp, Artificial
  Synthetic oligonucleotide
gcggagcatctatgcacccagaaaccaatgcgttagagagtagtcctctcttcgc

SEQ ID NO: 290780 - DNA, 55 bp, Artificial
  Synthetic oligonucleotide
gcggagcagtcggtcgcaacgtacgtcaaggctcgagaggtgttgcaccggatgt

SEQ ID NO: 290781 - DNA, 55 bp, Artificial
  Synthetic oligonucleotide
gcggagatagagagcatgatcgccctgttacggagagacggggacgttaggccac

SEQ ID NO: 290782 - DNA, 55 bp, Artificial
  Synthetic oligonucleotide
gcggactctttgggacagcaaaggatactgggaggtctcctggccaaatttactg

SEQ ID NO: 290783 - DNA, 60 bp, Artificial
  Synthetic oligonucleotide
gaatttggatcaggtattggttggacactacatcctccactaagtacatctctaatgtcc

SEQ ID NO: 290784 - DNA, 55 bp, Artificial
  Synthetic oligonucleotide
gcggactcggaggctttcaaccaacccacagaaacggctacatgaacgcctcggc

SEQ ID NO: 290785 - DNA, 55 bp, Artificial
  Synthetic oligonucleotide
gcggacgctacagaagagaaattgcctctgatgcggattacgaatggcgcagaga

SEQ ID NO: 290786 - DNA, 55 bp, Artificial
  Synthetic oligonucleotide
gcggaccaaaagcagagcgggacaacaagtgtagcgcgagaaagaacatgggccg

SEQ ID NO: 290787 - DNA, 55 bp, Artificial
  Synthetic oligonucleotide
gcggaagacgccaggaaatgtgtgacggcatcccttgtcccttagctctctcgct

SEQ ID NO: 290788 - DNA, 55 bp, Artificial
  Synthetic oligonucleotide
gcgcttgtgcagctgttggtcaagatgtccgcagccggagatataacgtcctctc

SEQ ID NO: 290789 - DNA, 55 bp, Artificial
  Synthetic oligonucleotide
gcgcttccactacgatacctctgttttcgtgtctgcatcttcagactcgacctgg

SEQ ID NO: 290790 - DNA, 55 bp, Artificial
  Synthetic oligonucleotide
gcgcctctctcatccatagcagctcggagcaggggcactacgctgccttgtgcat

SEQ ID NO: 290791 - DNA, 55 bp, Artificial
  Synthetic oligonucleotide
gcgcctctgacctgtgtgtgctggcgctcattctaagcgggagtgcggaggttaa

SEQ ID NO: 290792 - DNA, 55 bp, Artificial
  Synthetic oligonucleotide
gcgcctgtgaatccaatcaatggtacacgaccttctaaacgtttacgagttaatg

SEQ ID NO: 290793 - DNA, 55 bp, Artificial
  Synthetic oligonucleotide
gcgcgaccgcagacagtgagcgaggttgcgttcacagtgtcatccgcagacagag

SEQ ID NO: 290794 - DNA, 52 bp, Artificial
  Synthetic oligonucleotide
gaatttcgggaaaataaaatattgctagttcctgggcccctcgagtttatag

SEQ ID NO: 290795 - DNA, 55 bp, Artificial
  Synthetic oligonucleotide
gcgcgagctttcagatggtagtacgcatgcgcgacagaatggacggcagtacgca

SEQ ID NO: 290796 - DNA, 55 bp, Artificial
  Synthetic oligonucleotide
gcgcgcacttgcacgctggagagattgggtggaagcacaagacccctaaaccgac

SEQ ID NO: 290797 - DNA, 55 bp, Artificial
  Synthetic oligonucleotide
gcgcgcctgtgcgtatcggtgtgtgcgcaaagaactgtgcatcgcttacacaacc

SEQ ID NO: 290798 - DNA, 55 bp, Artificial
  Synthetic oligonucleotide
gcgcgctctgtgaagagcccgttctttaggtatcgtccaagcgtacgtcgggagc

SEQ ID NO: 290799 - DNA, 55 bp, Artificial
  Synthetic oligonucleotide
gcgcggaaccctgctggggcggtcatatctcagccaacttggacaacaacacacg

SEQ ID NO: 290800 - DNA, 55 bp, Artificial
  Synthetic oligonucleotide
gcgcggctgtccaattccacgcaagagttgcttctccgggtgccgttcgcacagt

SEQ ID NO: 290801 - DNA, 55 bp, Artificial
  Synthetic oligonucleotide
gcgcgttcttaccaaatgattgtcacttccgccctattatacacgattcacgagt

SEQ ID NO: 290802 - DNA, 55 bp, Artificial
  Synthetic oligonucleotide
gcgctacacatcctgcttgcttaggagtgcttgagtgtgcatgagatggcagttg

SEQ ID NO: 290803 - DNA, 55 bp, Artificial
  Synthetic oligonucleotide
gcgctacagcaatgtgccgactcggtgatgtgagcacggcccctgttgcagactc

SEQ ID NO: 290804 - DNA, 55 bp, Artificial
  Synthetic oligonucleotide
gcgctcacaggattattcgattacgccatgtgatatgtgcctgggtcaacatggt

SEQ ID NO: 290805 - DNA, 60 bp, Artificial
  Synthetic oligonucleotide
gtgaagaggtaggctactcggtgcgcggagagcatatcggcgaccttggtgagacgaaga

SEQ ID NO: 290806 - DNA, 55 bp, Artificial
  Synthetic oligonucleotide
gcgctccagtaaagttctgtagggcgaggagtgtgtcgcctcctgtgatgcttgc

SEQ ID NO: 290807 - DNA, 55 bp, Artificial
  Synthetic oligonucleotide
gcgctcgaatctatgcacagatataagcacaccggtaccaaagacgttgtgtgcg

SEQ ID NO: 290808 - DNA, 55 bp, Artificial
  Synthetic oligonucleotide
gcgctcgggatcacagtctgcatcgtggtggcagacctctatgcgcgtcgtttcg

SEQ ID NO: 290809 - DNA, 55 bp, Artificial
  Synthetic oligonucleotide
gcgacaccagctatcacgaattgtggtccttctgcctcgagcgcttttctaggtt

SEQ ID NO: 290810 - DNA, 55 bp, Artificial
  Synthetic oligonucleotide
gcgaatggatgccatagcagtggagggcctgaagttcattcctatatattaactg

SEQ ID NO: 290811 - DNA, 55 bp, Artificial
  Synthetic oligonucleotide
gcgaatgaggttgaaaacttcccctacgataccagtgtggactacgtaaagtctg

SEQ ID NO: 290812 - DNA, 55 bp, Artificial
  Synthetic oligonucleotide
gcgaagtgtaatcagcggcggtccggcgatgaggggctgtgcttcaccaaagtcg

SEQ ID NO: 290813 - DNA, 55 bp, Artificial
  Synthetic oligonucleotide
gcgaagtgaacactgcaatgtacggtttcacacagaacacgtttgcaaatggaag

SEQ ID NO: 290814 - DNA, 55 bp, Artificial
  Synthetic oligonucleotide
gcgaagtaagaacgggctgtacgcccctaatcgttcagcgcagcacacagggcat

SEQ ID NO: 290815 - DNA, 55 bp, Artificial
  Synthetic oligonucleotide
gcgaaggtgcttgggctcatagactttagactgtcgagaaattataggctatgcc

SEQ ID NO: 290816 - DNA, 60 bp, Artificial
  Synthetic oligonucleotide
aatgtccccgatcgctgcactctgtgcccaaatagtgacataacacagccacattattcc

SEQ ID NO: 290817 - DNA, 55 bp, Artificial
  Synthetic oligonucleotide
gcgaacggcccaaattttgtcttgtcgacctctcagcacccgcagagagtgcgac

SEQ ID NO: 290818 - DNA, 55 bp, Artificial
  Synthetic oligonucleotide
gcgaacgcagatgcaggccactcgaatgccacgttggtgccaaaggtcgctgagg

SEQ ID NO: 290819 - DNA, 55 bp, Artificial
  Synthetic oligonucleotide
gcgaacgaattgaatcctcggagaacacgtcacctaggcggaaaacagtgctgtg

SEQ ID NO: 290820 - DNA, 55 bp, Artificial
  Synthetic oligonucleotide
gcctttgctgagtagatgtgatagctgataaaacagaaagtctgtttactcgaga

SEQ ID NO: 290821 - DNA, 55 bp, Artificial
  Synthetic oligonucleotide
gcctttctgccgtgcgcacctgacgccagcctgcgacaaacgttgatgagaaagc

SEQ ID NO: 290822 - DNA, 55 bp, Artificial
  Synthetic oligonucleotide
gcctttactcgggtctgagaagtctctgctatgcgggcaggcacttgaaaggctg

SEQ ID NO: 290823 - DNA, 55 bp, Artificial
  Synthetic oligonucleotide
gccttgttttcaagtcgtaggcgacacccacaagaacagccccacatacaccgcc

SEQ ID NO: 290824 - DNA, 55 bp, Artificial
  Synthetic oligonucleotide
gccttgcacaaagttaccgcggacccactctccacggtactcgctcccatccgca

SEQ ID NO: 290825 - DNA, 55 bp, Artificial
  Synthetic oligonucleotide
gccttctcacgtctgccccacgtacacgcgtgcactcgtactgatgtgtacgtcc

SEQ ID NO: 290826 - DNA, 55 bp, Artificial
  Synthetic oligonucleotide
gcctcctgcgaaatcattgcgccaccgtccctgacggacgagtctgtcgagcact

SEQ ID NO: 290827 - DNA, 59 bp, Artificial
  Synthetic oligonucleotide
gtgtactcgccccttccacagctgtgacgatgatggccgtcgttctttgcctactttcc

SEQ ID NO: 290828 - DNA, 55 bp, Artificial
  Synthetic oligonucleotide
gcctctagcaggtatcaacttaatgagtgaataaccagggtattacctaaatagc

SEQ ID NO: 290829 - DNA, 55 bp, Artificial
  Synthetic oligonucleotide
gcctctagcggttgtagagagagcgcgcagtgactccatcgctccactgttcgtg

SEQ ID NO: 290830 - DNA, 55 bp, Artificial
  Synthetic oligonucleotide
gcctctataccctgatgacgaagggtccaactcagcgtggtatcacagggtccag

SEQ ID NO: 290831 - DNA, 55 bp, Artificial
  Synthetic oligonucleotide
gcctgagtcgtggacgttgaaacgtaagcttatggtcaccattgaggcagaccac

SEQ ID NO: 290832 - DNA, 55 bp, Artificial
  Synthetic oligonucleotide
gcctgagtgttcaaaaggagtggcctgtagatccatagactagttcttcatcagt

SEQ ID NO: 290833 - DNA, 55 bp, Artificial
  Synthetic oligonucleotide
gcctgatctgcctagatggaactcctgttatacattatgcgtgtgacagagggtg

SEQ ID NO: 290834 - DNA, 55 bp, Artificial
  Synthetic oligonucleotide
gcctgcaccacaacgtctctgctgagtgggcctcccgatctgcatccctctcgag

SEQ ID NO: 290835 - DNA, 55 bp, Artificial
  Synthetic oligonucleotide
gcctgcgcatctatgcgggaatagatgagtgcgtgcttactggcataggcgagga

SEQ ID NO: 290836 - DNA, 55 bp, Artificial
  Synthetic oligonucleotide
gcctgcgtgtgttggctatcaatacagccgcgtagggtagtcgtttcggcgcaag

SEQ ID NO: 290837 - DNA, 55 bp, Artificial
  Synthetic oligonucleotide
gcctgctcagagctcccttaggctttctataaacttgcggtagtacacgagaaca

SEQ ID NO: 290838 - DNA, 60 bp, Artificial
  Synthetic oligonucleotide
attagatcacatgctttatagttcatggagatatgactataccactattcatagagacaa

SEQ ID NO: 290839 - DNA, 55 bp, Artificial
  Synthetic oligonucleotide
gcctggcgtggcgggtccatactctcagagcccaaacttaaggacattagtgcta

SEQ ID NO: 290840 - DNA, 55 bp, Artificial
  Synthetic oligonucleotide
gcctggggagtgtacccttcgcctctcaaaatttcgggagctgtccactggtagg

SEQ ID NO: 290841 - DNA, 55 bp, Artificial
  Synthetic oligonucleotide
gcctgtgtgtgcgcttcacattcttacctcagcaacatgcccattatgtgtctcc

SEQ ID NO: 290842 - DNA, 55 bp, Artificial
  Synthetic oligonucleotide
gccttacatcacacgtgctccccggagggccatcgatcaaatgccgaatggctgg

SEQ ID NO: 290843 - DNA, 55 bp, Artificial
  Synthetic oligonucleotide
gccttccgtggtcgctgtctttactgcgtcggttggttgcagacacctctttccg

SEQ ID NO: 290844 - DNA, 54 bp, Artificial
  Synthetic oligonucleotide
gccttcctgtttgtataccatacttttggatacctaacgtaccaggagttacaa

SEQ ID NO: 290845 - DNA, 55 bp, Artificial
  Synthetic oligonucleotide
gcgcacccctacacgccagtggtatagagatagacgtgtgtgagagagcctctcc

SEQ ID NO: 290846 - DNA, 55 bp, Artificial
  Synthetic oligonucleotide
gcgcaccatcaaagcacccctttcgagcgaggacgactctgcgggctcattatgt

SEQ ID NO: 290847 - DNA, 55 bp, Artificial
  Synthetic oligonucleotide
gcgcacacgggatggtatctgcggcacatgattgagcgtaaggagcttcacggcc

SEQ ID NO: 290848 - DNA, 55 bp, Artificial
  Synthetic oligonucleotide
gcgcacaagtaagctctgtgtgacgcgttgatgggtaaaggaatcgtcgaacgga

SEQ ID NO: 290849 - DNA, 59 bp, Artificial
  Synthetic oligonucleotide
gctgggcccagtgatgagaaccttttccgatggaccgcctccatcataggtccgtccga

SEQ ID NO: 290850 - DNA, 56 bp, Artificial
  Synthetic oligonucleotide
actccaggcgttaacctgtagagttgagatggaaacagccggaaaggtcatattac

SEQ ID NO: 290851 - DNA, 55 bp, Artificial
  Synthetic oligonucleotide
gcgcaacagattgtcactgcttaagcgaattactaagtctaccatgtctaaagtc

SEQ ID NO: 290852 - DNA, 55 bp, Artificial
  Synthetic oligonucleotide
gcgatttcccgcttcgttcgagcacacccatgacgttacgtccagccgcattctc

SEQ ID NO: 290853 - DNA, 55 bp, Artificial
  Synthetic oligonucleotide
gcgattgtgatgcaaggtgaggtagggtgccgcctagagacgttgactgtcgacc

SEQ ID NO: 290854 - DNA, 55 bp, Artificial
  Synthetic oligonucleotide
gcgatgtcgcgttgtagatgtgggccgagccttaggcagctacggagtgtgaacg

SEQ ID NO: 290855 - DNA, 55 bp, Artificial
  Synthetic oligonucleotide
gcgatgagtggaacctgtaaggaggtagaactgccccgttagagcgtgtcattcg

SEQ ID NO: 290856 - DNA, 55 bp, Artificial
  Synthetic oligonucleotide
gcgatctatgatgcgacagtaagccccagccacgtatcactgtaccactaatgaa

SEQ ID NO: 290857 - DNA, 55 bp, Artificial
  Synthetic oligonucleotide
gcgatcaccgccgctgtctcaaacaagtccagtttaaccagttgttgtggttgtg

SEQ ID NO: 290858 - DNA, 55 bp, Artificial
  Synthetic oligonucleotide
gcgatattctcaaaatggctaacaaggccctaggtgttgtataatttatacgtgt

SEQ ID NO: 290859 - DNA, 55 bp, Artificial
  Synthetic oligonucleotide
gcgataagagccatgacaacaatcttgatcgtccacgattagctgagcagcccgc

SEQ ID NO: 290860 - DNA, 55 bp, Artificial
  Synthetic oligonucleotide
gcgagttgtcgtatcagcccttacgcttcgcgagccccgtcaaggcttgactgcc

SEQ ID NO: 290861 - DNA, 54 bp, Artificial
  Synthetic oligonucleotide
gacctatataagtcgaagtgtgaccttagttagttaacttaagacctatgttag

SEQ ID NO: 290862 - DNA, 55 bp, Artificial
  Synthetic oligonucleotide
gcgaggctgagtacatgtcagcagggctctgtaccactccgtagggatatactgt

SEQ ID NO: 290863 - DNA, 55 bp, Artificial
  Synthetic oligonucleotide
gcgacccaaaggggcccactcttgtgtactggcagtgctgtactccgctgagtgg

SEQ ID NO: 290864 - DNA, 55 bp, Artificial
  Synthetic oligonucleotide
gcgacccacgcatggtcgtgcggagcaaagcaagccacgagaagcacaggaacga

SEQ ID NO: 290865 - DNA, 55 bp, Artificial
  Synthetic oligonucleotide
gcgacgcagagccatcgtcctgggcattcagttccaactcggaaacacagaacag

SEQ ID NO: 290866 - DNA, 55 bp, Artificial
  Synthetic oligonucleotide
gcgacgccacggagagacttgggaactcggacgcagctgactcccctatgacaga

SEQ ID NO: 290867 - DNA, 55 bp, Artificial
  Synthetic oligonucleotide
gcgacggatcgagctgtttgtgcgccggctctacgtggaggcacgagagcggctc

SEQ ID NO: 290868 - DNA, 55 bp, Artificial
  Synthetic oligonucleotide
gcgacggcacgtgagatcttaccgggaactttccgtgtcacacccggtcactcac

SEQ ID NO: 290869 - DNA, 55 bp, Artificial
  Synthetic oligonucleotide
gcgacgtacgaggcttcgccacagcacaaagttgcgccagcgcttgtactcgcga

SEQ ID NO: 290870 - DNA, 55 bp, Artificial
  Synthetic oligonucleotide
gcgacgtgcctccttcgcccacctttcgttcaacagttgcttgccgcggctctct

SEQ ID NO: 290871 - DNA, 55 bp, Artificial
  Synthetic oligonucleotide
gcgacgttggttgtctcgatgaaagactctgcgtgagtaccgtcagacacgagtg

SEQ ID NO: 290872 - DNA, 56 bp, Artificial
  Synthetic oligonucleotide
gtggttctccagaattagctttccctagattaaacagtatatctttactattacaa

SEQ ID NO: 290873 - DNA, 55 bp, Artificial
  Synthetic oligonucleotide
gcgactatggggatcgacccatgacttctgttacagacagatgctctacgctagc

SEQ ID NO: 290874 - DNA, 55 bp, Artificial
  Synthetic oligonucleotide
gcgactgccgtttagacgacagccaaaatctaacgaagacgaagcactcgtgcag

SEQ ID NO: 290875 - DNA, 55 bp, Artificial
  Synthetic oligonucleotide
gcgactggaggggctttagcacgctcaggctgcgacacgccgttgcatcctctat

SEQ ID NO: 290876 - DNA, 55 bp, Artificial
  Synthetic oligonucleotide
gcgactgtgtgcgtgtattcgcgtgcgttcgtaggtgcacgtcctacagagagcg

SEQ ID NO: 290877 - DNA, 55 bp, Artificial
  Synthetic oligonucleotide
gcgacttattgtgtacatgcatcaaggctttacgcatcaccctacacttccaggt

SEQ ID NO: 290878 - DNA, 55 bp, Artificial
  Synthetic oligonucleotide
gcgagcacgttggaactagtagccgctcacttgggatgatgcaggttgacgggtt

SEQ ID NO: 290879 - DNA, 55 bp, Artificial
  Synthetic oligonucleotide
gcgagcatgtacattatatgagcatgtgcattataggagcatgtacgaattaaac

SEQ ID NO: 290880 - DNA, 55 bp, Artificial
  Synthetic oligonucleotide
gcgaggcgactctcttacacgatctcaacgacaacccaaatgtggtgaagcttct

SEQ ID NO: 290881 - DNA, 55 bp, Artificial
  Synthetic oligonucleotide
gggtgaccttcgtacaccggacaagtcacgtacacatgaacgtttacacacacgc

SEQ ID NO: 290882 - DNA, 55 bp, Artificial
  Synthetic oligonucleotide
gggtgaaagtgaacgcgacaacggtcaacacggtgctaagtagcctaagcaaggc

SEQ ID NO: 290883 - DNA, 60 bp, Artificial
  Synthetic oligonucleotide
catgcataaagtgtaatccagttactagatagaatactgtagtaatcatagcatcattta

SEQ ID NO: 290884 - DNA, 55 bp, Artificial
  Synthetic oligonucleotide
gggtcttcagtactggctcagttctaaagggttccagtcccgatacatcctgtgc

SEQ ID NO: 290885 - DNA, 55 bp, Artificial
  Synthetic oligonucleotide
gggtctgatattacctccatgtacgcggtacaaggtcttccctacgggatcgtct

SEQ ID NO: 290886 - DNA, 55 bp, Artificial
  Synthetic oligonucleotide
gggtcgtgcggtacgactagtgctgctgttcatctggtaatgggtggagaacgtg

SEQ ID NO: 290887 - DNA, 55 bp, Artificial
  Synthetic oligonucleotide
gggtcgctcttcacttgccagagattcaggactgcggagcgggagagaagggtgc

SEQ ID NO: 290888 - DNA, 48 bp, Artificial
  Synthetic oligonucleotide
gggtccgggttaaaatgaaggtaggttacggattaagggtaagagtgg

SEQ ID NO: 290889 - DNA, 54 bp, Artificial
  Synthetic oligonucleotide
gggtcccattttctgattgggctcacgagaaaataccaactttgggtgcttccc

SEQ ID NO: 290890 - DNA, 55 bp, Artificial
  Synthetic oligonucleotide
gggtcatgagtggtgcgcttgggctggtgagaaacggaccgtgagacacgtccag

SEQ ID NO: 290891 - DNA, 55 bp, Artificial
  Synthetic oligonucleotide
gggtcaatagtacactatagtgcctaagtaatgtgtgtaactcctattgcccctc

SEQ ID NO: 290892 - DNA, 55 bp, Artificial
  Synthetic oligonucleotide
gggtatttggatcaaaagcgactctggtgtggtcattaatggtaagaccgagggg

SEQ ID NO: 290893 - DNA, 55 bp, Artificial
  Synthetic oligonucleotide
gggtattataggccgattctcaagctttgatgtactgaaggttccgaaaggtggt

SEQ ID NO: 290894 - DNA, 53 bp, Artificial
  Synthetic oligonucleotide
aagttagtaaccctaagacgaaagctagtaatgttaggacctacattactcca

SEQ ID NO: 290895 - DNA, 55 bp, Artificial
  Synthetic oligonucleotide
gggtagtgaagacttgtggtatacaaatccaatctccgtttcaagaccatccaac

SEQ ID NO: 290896 - DNA, 55 bp, Artificial
  Synthetic oligonucleotide
gggtagctggcaactggagtgacagttagtcaacaataccgcgtggacgtctggc

SEQ ID NO: 290897 - DNA, 55 bp, Artificial
  Synthetic oligonucleotide
gggtagctgctcacatgagtgatcgtgagaaatgcgtctaatctggggcaattcc

SEQ ID NO: 290898 - DNA, 55 bp, Artificial
  Synthetic oligonucleotide
gggtacttcacaaaggtggcgctctctcttccgacaaagcaccagtttatgacgc

SEQ ID NO: 290899 - DNA, 55 bp, Artificial
  Synthetic oligonucleotide
gggtactgtgaactgacctccagactacactctacgactcgtacagctaccagat

SEQ ID NO: 290900 - DNA, 55 bp, Artificial
  Synthetic oligonucleotide
gggtacgggaccctgacaccacacaccgaggcgtcctcacaacatccgcttaagg

SEQ ID NO: 290901 - DNA, 55 bp, Artificial
  Synthetic oligonucleotide
gggtaccattggttctcccttgtccaaccttgagtccagcattgagtcaccctag

SEQ ID NO: 290902 - DNA, 55 bp, Artificial
  Synthetic oligonucleotide
gggtacattccaacaattatgggtgtccaaaagtgagtaccttgattcaggacac

SEQ ID NO: 290903 - DNA, 55 bp, Artificial
  Synthetic oligonucleotide
gggtacacccatcgcgtggacaagggactggagtgccgcaagctggcgtttgagt

SEQ ID NO: 290904 - DNA, 55 bp, Artificial
  Synthetic oligonucleotide
gggtaagacgggtgaaacaagcgagtagcgagcgcatgctacctctccgacaggc

SEQ ID NO: 290905 - DNA, 60 bp, Artificial
  Synthetic oligonucleotide
attaggagcctcatactagcgacaatgtggaagtcgttacatcattcatgcaggacggta

SEQ ID NO: 290906 - DNA, 55 bp, Artificial
  Synthetic oligonucleotide
ggggtttgcattaggtagagggttgtctctcatagaacgactcttaggctcgtaa

SEQ ID NO: 290907 - DNA, 54 bp, Artificial
  Synthetic oligonucleotide
ggggtttcctgttgttcgtcgtgtttctactatcggtgtccgtgtgtgcttcgg

SEQ ID NO: 290908 - DNA, 55 bp, Artificial
  Synthetic oligonucleotide
ggggtgtagctggactgccgcagaggcgagctgcacggatacgggtctgcctttt

SEQ ID NO: 290909 - DNA, 55 bp, Artificial
  Synthetic oligonucleotide
ggggtgcgtacgtgggaatgccagttcggcatacatgtagagaggctaggttgtg

SEQ ID NO: 290910 - DNA, 55 bp, Artificial
  Synthetic oligonucleotide
ggggtgcatgcggggtcaatgtggagacatgacgtttctggaggcgtaccagctc

SEQ ID NO: 290911 - DNA, 54 bp, Artificial
  Synthetic oligonucleotide
ggggtgacgtgtgtaactgcgagactgacagcggtaccctttcggttccccaaa

SEQ ID NO: 290912 - DNA, 55 bp, Artificial
  Synthetic oligonucleotide
ggggtctcccgacctgagattggcctgccccacattcaccgtcactgcacatcga

SEQ ID NO: 290913 - DNA, 55 bp, Artificial
  Synthetic oligonucleotide
ggggtctacccaggattcaaaggcgaccactttacctgatcgttcggtcacgaca

SEQ ID NO: 290914 - DNA, 55 bp, Artificial
  Synthetic oligonucleotide
ggggtcgactgcaggcagtaatgcatgtcctcgagagctggaacggagtcggggt

SEQ ID NO: 290915 - DNA, 55 bp, Artificial
  Synthetic oligonucleotide
ggtagggcttctcgcagcacaacaccaatgatttgcccgcgaccatctttgatgg

SEQ ID NO: 290916 - DNA, 49 bp, Artificial
  Synthetic oligonucleotide
aagttcttggggagccctttacttccaagaactggggtagtaaagtaac

SEQ ID NO: 290917 - DNA, 55 bp, Artificial
  Synthetic oligonucleotide
ggtaggctcaatcggcctaactacggagcctttgtcctcgaatagagccctatac

SEQ ID NO: 290918 - DNA, 55 bp, Artificial
  Synthetic oligonucleotide
ggtagctgcatatttcttccgtggagaactgtaggtttccgaagagagccctcct

SEQ ID NO: 290919 - DNA, 55 bp, Artificial
  Synthetic oligonucleotide
ggtagcctctacaagcgcgtagctctccaagggatgtacacctcgccatggaagg

SEQ ID NO: 290920 - DNA, 55 bp, Artificial
  Synthetic oligonucleotide
ggtagcagcggcggaatcatctataggtcttgctatattagttgtttattatcga

SEQ ID NO: 290921 - DNA, 55 bp, Artificial
  Synthetic oligonucleotide
ggtagagtatctgactcccgctcttcgcgactccttcagcgaccaaccggccctc

SEQ ID NO: 290922 - DNA, 55 bp, Artificial
  Synthetic oligonucleotide
ggtagagcaggaccgcgagaacacgagggccactttagaggagcgactccgggtt

SEQ ID NO: 290923 - DNA, 55 bp, Artificial
  Synthetic oligonucleotide
ggtagagactcatggaccccgtaattggagcactatcgctgctgcattacctggc

SEQ ID NO: 290924 - DNA, 55 bp, Artificial
  Synthetic oligonucleotide
ggtacgctcctccatgctccgattgtacgaagccagatgtcgttggacgtcacgc

SEQ ID NO: 290925 - DNA, 55 bp, Artificial
  Synthetic oligonucleotide
ggtaccacgtagtatgtatagttgatcacggactataacatggtatacacgaaaa

SEQ ID NO: 290926 - DNA, 55 bp, Artificial
  Synthetic oligonucleotide
ggtacagctacgatatgatgggtcccacgggcaagtgggaggcgtacccgcggta

SEQ ID NO: 290927 - DNA, 59 bp, Artificial
  Synthetic oligonucleotide
aagttgggcatcagccggtagacgtgcgtgtcttccgacatctcaacccgagaggagtc

SEQ ID NO: 290928 - DNA, 54 bp, Artificial
  Synthetic oligonucleotide
ggtacacacaacgttggggaataattttggggcaatccgttgcggagacaagac

SEQ ID NO: 290929 - DNA, 55 bp, Artificial
  Synthetic oligonucleotide
ggtacaaacttctctcattcacgaccacctgtgcacccgcgcttgtcacttcccc

SEQ ID NO: 290930 - DNA, 55 bp, Artificial
  Synthetic oligonucleotide
ggtaatgaagatgtactgcgtctgcacaggccagaggtacttgaattggttgcgc

SEQ ID NO: 290931 - DNA, 55 bp, Artificial
  Synthetic oligonucleotide
ggtaagcctacttctcccgatttaatcaatgggtctggagtagccacagatctgc

SEQ ID NO: 290932 - DNA, 55 bp, Artificial
  Synthetic oligonucleotide
ggtaagcaattttcgaagtgggccaacaccgctcacacacatgggcgtcatcttg

SEQ ID NO: 290933 - DNA, 55 bp, Artificial
  Synthetic oligonucleotide
gggtgatgaggaacgaatgtagaggagcggacggggtgtggtggccagacggaca

SEQ ID NO: 290934 - DNA, 55 bp, Artificial
  Synthetic oligonucleotide
gggtgattgtatctttgcgaaagagaatattgttctaaaaccgggaaactctaca

SEQ ID NO: 290935 - DNA, 55 bp, Artificial
  Synthetic oligonucleotide
gggtgctggatgtacgttgaaagctcctcccatgggtacagctctgatttaggtg

SEQ ID NO: 290936 - DNA, 55 bp, Artificial
  Synthetic oligonucleotide
gggtggagagggtgtcgaagcggcgacagtgaacgcagcgtgtcttggcggacgc

SEQ ID NO: 290937 - DNA, 53 bp, Artificial
  Synthetic oligonucleotide
gggtggccatttcgcagcgcccgaggggattttccccgttctactcttcctac

SEQ ID NO: 290938 - DNA, 60 bp, Artificial
  Synthetic oligonucleotide
gtggtacttatggctatgataattcattttgctactacggtcgtgctggtatagtcccta

SEQ ID NO: 290939 - DNA, 55 bp, Artificial
  Synthetic oligonucleotide
gggtggcgtactcgaggtggtgtacagcccatgaatagaaaaggtatattacttt

SEQ ID NO: 290940 - DNA, 55 bp, Artificial
  Synthetic oligonucleotide
gggtgtgaaagtgactagtccatcctcgtcagtatattcgaactcggtagtagac

SEQ ID NO: 290941 - DNA, 55 bp, Artificial
  Synthetic oligonucleotide
gggtgtgttgcagacgcgctcagcaaaagctacggtgtgacgattgacttacgcg

SEQ ID NO: 290942 - DNA, 55 bp, Artificial
  Synthetic oligonucleotide
gggtgttttctcggggctgttgcgctcttggtgtttcgagggtcagaggagtcgg

SEQ ID NO: 290943 - DNA, 52 bp, Artificial
  Synthetic oligonucleotide
gggttcacagtttagggttcacagtttagggttcacagtttagggttcacag

SEQ ID NO: 290944 - DNA, 55 bp, Artificial
  Synthetic oligonucleotide
gggttcctcgcccctctgtctgaatagagatcgtataactgcctataattatccg

SEQ ID NO: 290945 - DNA, 55 bp, Artificial
  Synthetic oligonucleotide
gggttcttgcatttacagtccttaaactctatgtcaaaaggacatatgatagctg

SEQ ID NO: 290946 - DNA, 55 bp, Artificial
  Synthetic oligonucleotide
gggttgcacaatttctaacagcgccgaatggacaaatgcataatattacggagcg

SEQ ID NO: 290947 - DNA, 55 bp, Artificial
  Synthetic oligonucleotide
gggttggatgcgcgtacacagtcatacataccctttcacacacgtgcgctggcgg

SEQ ID NO: 290948 - DNA, 55 bp, Artificial
  Synthetic oligonucleotide
gggtttgacgtactgaatgcattgaccggaggacctactgaggatttgagtgcaa

SEQ ID NO: 290949 - DNA, 60 bp, Artificial
  Synthetic oligonucleotide
aagttgtctctatgaatagtggtatatagccatgtctccatgaactataaagcatgtgat

SEQ ID NO: 290950 - DNA, 55 bp, Artificial
  Synthetic oligonucleotide
ggtaacacggggaaacgcaggcaaactctcagacgcacaccctcacctcggccac

SEQ ID NO: 290951 - DNA, 55 bp, Artificial
  Synthetic oligonucleotide
ggtaactgcggaagttgccactctcgtccatcaagccacttcgtacatgatgagc

SEQ ID NO: 290952 - DNA, 55 bp, Artificial
  Synthetic oligonucleotide
gggcttggcattatgcgaggaaaggcctcaagagagtgtgggaaagcggcgggag

SEQ ID NO: 290953 - DNA, 53 bp, Artificial
  Synthetic oligonucleotide
gggctggggtacggacagtaccttgaaccagggtgggtgggaacaccgatgga

SEQ ID NO: 290954 - DNA, 55 bp, Artificial
  Synthetic oligonucleotide
gggctgggcgtgtaatcgtgccgcagtggccttctcctgaaaccagtatctcccg

SEQ ID NO: 290955 - DNA, 55 bp, Artificial
  Synthetic oligonucleotide
gggctgctactgttataactagccttttctctgcaattcctgttgttggtgaata

SEQ ID NO: 290956 - DNA, 55 bp, Artificial
  Synthetic oligonucleotide
gggctgcactgtacaggaacacacctcgagttaggagtggcatgtctcaggcagg

SEQ ID NO: 290957 - DNA, 55 bp, Artificial
  Synthetic oligonucleotide
gggctctttacaacactcagaacagggttgtgggttcattcagctgaaaattaag

SEQ ID NO: 290958 - DNA, 55 bp, Artificial
  Synthetic oligonucleotide
gggctctcacgcattggtcccttgacggcagacccatcctctattgttcacttcc

SEQ ID NO: 290959 - DNA, 55 bp, Artificial
  Synthetic oligonucleotide
gggctccgcgcacccagcttacattctccacccttttcagacccgtcagcacggt

SEQ ID NO: 290960 - DNA, 60 bp, Artificial
  Synthetic oligonucleotide
gctgtactgctcagcctcggtaggggtgcgaaacaaatcatcccccatcagcggctccac

SEQ ID NO: 290961 - DNA, 53 bp, Artificial
  Synthetic oligonucleotide
aagtttaatacaaagaagggtaggtcctcattatgtaggttatagaggtagat

SEQ ID NO: 290962 - DNA, 55 bp, Artificial
  Synthetic oligonucleotide
gggctagacatacacggaacgggctgtaccctatccacagccatagcgtgctact

SEQ ID NO: 290963 - DNA, 55 bp, Artificial
  Synthetic oligonucleotide
gggcgtgcgtgagtatgacaagcgtgactcgttgccgtccgtgcgctctctccat

SEQ ID NO: 290964 - DNA, 55 bp, Artificial
  Synthetic oligonucleotide
gggcgtcgcttgacgttggtggagcggcggtggtcgatactcctgccaaagactc

SEQ ID NO: 290965 - DNA, 55 bp, Artificial
  Synthetic oligonucleotide
gggcgctcagcccgcagcctcacaacacataccgcagacataaggcacagcggat

SEQ ID NO: 290966 - DNA, 55 bp, Artificial
  Synthetic oligonucleotide
gggcgcattgtgttctatgtgatgaaaccgagagcgacacaggaccggagctgat

SEQ ID NO: 290967 - DNA, 55 bp, Artificial
  Synthetic oligonucleotide
gggcgaggcctccgcacgtatctgggtttggaggcactacgtcacatggcattgc

SEQ ID NO: 290968 - DNA, 55 bp, Artificial
  Synthetic oligonucleotide
gggcgagagcccgagtttcttgtttcgtcacgttccccaggcgctgagttcattc

SEQ ID NO: 290969 - DNA, 55 bp, Artificial
  Synthetic oligonucleotide
gggcgacgtgcgagacgcctgtagtgccaccgacgcgttcacatgccctctcgaa

SEQ ID NO: 290970 - DNA, 55 bp, Artificial
  Synthetic oligonucleotide
gggcaatttatcagttaagtaagactcacacagcatcagatgtaggacaattcgc

SEQ ID NO: 290971 - DNA, 55 bp, Artificial
  Synthetic oligonucleotide
gggcactacagtccctgccgcgtgacacgtactccattcagaacgctacgatcct

SEQ ID NO: 290972 - DNA, 58 bp, Artificial
  Synthetic oligonucleotide
actcagcctatgttcaactttgtaggataaagcttttggtatctcgtaatgtagaaca

SEQ ID NO: 290973 - DNA, 55 bp, Artificial
  Synthetic oligonucleotide
gggcactccatcgctttcgactttgcaaccgctggtgaggcggagtacaaaatgc

SEQ ID NO: 290974 - DNA, 55 bp, Artificial
  Synthetic oligonucleotide
gggcagagtggcggttccaacggaagaaaagtagtgtgcaacgcacgcaagaggc

SEQ ID NO: 290975 - DNA, 55 bp, Artificial
  Synthetic oligonucleotide
gggcaggaggcaagcgaggtatgagacgggaaaagtagaggagatgacctgcacg

SEQ ID NO: 290976 - DNA, 55 bp, Artificial
  Synthetic oligonucleotide
gggcagtaactgcggtcttgctaggcaactgcacgcttgcctggccacagtttct

SEQ ID NO: 290977 - DNA, 55 bp, Artificial
  Synthetic oligonucleotide
gggcagtcgtcaagcaacctaaccctaaagacccactcatccgctcgattcttcg

SEQ ID NO: 290978 - DNA, 55 bp, Artificial
  Synthetic oligonucleotide
gggcatcacacgtacaaacaaagccgcgaaagaatgcaacgggacgtccccgtcc

SEQ ID NO: 290979 - DNA, 55 bp, Artificial
  Synthetic oligonucleotide
gggcatctttaagcggttaagccatccatcgatcttcccgtgtcgtctgccgggg

SEQ ID NO: 290980 - DNA, 55 bp, Artificial
  Synthetic oligonucleotide
gggcccacttggcacccatgtggggacataccttgttgcccatttcccctcgtta

SEQ ID NO: 290981 - DNA, 55 bp, Artificial
  Synthetic oligonucleotide
gggcccctatctcgtcattctgagctccaccgtgtcaggctacgagggtactggc

SEQ ID NO: 290982 - DNA, 55 bp, Artificial
  Synthetic oligonucleotide
gggcccgatttggtagtatcaggcaatgtccacgttgctcggcaacgtagggccg

SEQ ID NO: 290983 - DNA, 60 bp, Artificial
  Synthetic oligonucleotide
actcagatatggcaaatgagtttgaacaaccaaatgctttcgatagttatatggttgcag

SEQ ID NO: 290984 - DNA, 55 bp, Artificial
  Synthetic oligonucleotide
gggcccgtctcgcacgctcatctttgcggtacgattgggcatggtgaaactctgc

SEQ ID NO: 290985 - DNA, 54 bp, Artificial
  Synthetic oligonucleotide
gggccctctgtaggaccggggtcttacgatctagataagcggaccgttgccaac

SEQ ID NO: 290986 - DNA, 55 bp, Artificial
  Synthetic oligonucleotide
gggccgggagatgtacatgcgcatgtgtgatgcggcgcagtctccgaaaacggaa

SEQ ID NO: 290987 - DNA, 55 bp, Artificial
  Synthetic oligonucleotide
gggccgggaggtgtttgcgtgtctgcatgcgttgatctataagtggtggttgccg

SEQ ID NO: 290988 - DNA, 55 bp, Artificial
  Synthetic oligonucleotide
gggcctccagcggctctgcaaggcctactcagtaatcccacagtctgacgtcgca

SEQ ID NO: 290989 - DNA, 55 bp, Artificial
  Synthetic oligonucleotide
ggggtataaagtgaggtgcgaagcgtgcaccccaacacgaacgcacgccattgag

SEQ ID NO: 290990 - DNA, 55 bp, Artificial
  Synthetic oligonucleotide
ggggtagtgcccacggttggaggtcccggtacagtgtgagagttcgcattgcctt

SEQ ID NO: 290991 - DNA, 55 bp, Artificial
  Synthetic oligonucleotide
ggggtacatccccacagatatgcgcgtgtgcgtgcgtctctgcgttcgaagtaga

SEQ ID NO: 290992 - DNA, 55 bp, Artificial
  Synthetic oligonucleotide
ggggtaattactcttcctcgtgttcaagttctgcctagactattagtacgcactc

SEQ ID NO: 290993 - DNA, 55 bp, Artificial
  Synthetic oligonucleotide
ggggtaatctgtcacttgctgagacatgtactcgtagccattgttagcgttatag

SEQ ID NO: 290994 - DNA, 57 bp, Artificial
  Synthetic oligonucleotide
catccataccaggcgtaaaaagcgttcgttctgaaaagaaacagatgccaggccaac

SEQ ID NO: 290995 - DNA, 51 bp, Artificial
  Synthetic oligonucleotide
ggggcggaaggtaattgttgcttaactgttttaggggcggaaggtaattgc

SEQ ID NO: 290996 - DNA, 54 bp, Artificial
  Synthetic oligonucleotide
ggggcgcgttgggaggtctaccgcattacccaggaggagagtaccagtaggttg

SEQ ID NO: 290997 - DNA, 55 bp, Artificial
  Synthetic oligonucleotide
ggggcgatgtggagtgggttagtgagcgatgtagagtggataataatcaccactt

SEQ ID NO: 290998 - DNA, 55 bp, Artificial
  Synthetic oligonucleotide
ggggcccttaacgttttagcgacagctgcgtagtggctctcccactcctccgtaa

SEQ ID NO: 290999 - DNA, 55 bp, Artificial
  Synthetic oligonucleotide
ggggcacactcacccttcctcccttaagtcgctccttcagcggagaaaagcccgc

SEQ ID NO: 291000 - DNA, 54 bp, Artificial
  Synthetic oligonucleotide
ggggcaagttttcagaagtgtggaattcaataaggcgtttccatagtaataggt

SEQ ID NO: 291001 - DNA, 55 bp, Artificial
  Synthetic oligonucleotide
ggggcaacacattgtagtgtaacatggaagcatttcacatacaacacgcagcggt

SEQ ID NO: 291002 - DNA, 55 bp, Artificial
  Synthetic oligonucleotide
ggggcaaacagtgggaagatcatgtgtgatagtagaactcgaaaacagacgaatt

SEQ ID NO: 291003 - DNA, 55 bp, Artificial
  Synthetic oligonucleotide
ggggcaaaacgtacaaagcggtcctataccactcaggcatgtggaatactacccc

SEQ ID NO: 291004 - DNA, 55 bp, Artificial
  Synthetic oligonucleotide
ggggatgcaatggtctgcctgacaaattgttcagggactatatatggcgttcgtc

SEQ ID NO: 291005 - DNA, 60 bp, Artificial
  Synthetic oligonucleotide
ggaggtgcacgagaccgtgatgaaccaaatagccacgtatgaaaatgggccccacacata

SEQ ID NO: 291006 - DNA, 55 bp, Artificial
  Synthetic oligonucleotide
gggctttagtttgtttcatacggtgcatctccgtccttcacagttagtcctacag

SEQ ID NO: 291007 - DNA, 55 bp, Artificial
  Synthetic oligonucleotide
ggggaacagtggtaggtcggagctagcaaagctcaacaacgtacgtagctcgtcg

SEQ ID NO: 291008 - DNA, 55 bp, Artificial
  Synthetic oligonucleotide
ggggaacgttccatctgcggtgcgggttacatactgtgcgttacgctgagatttg

SEQ ID NO: 291009 - DNA, 55 bp, Artificial
  Synthetic oligonucleotide
ggggaagaggcgtggcgccagtgcacgcgaggcgcatctgcatggaagcagcaca

SEQ ID NO: 291010 - DNA, 55 bp, Artificial
  Synthetic oligonucleotide
ggggaagcctgtgcagtgcgagtgagacgtgcgtcatcaggtcactgcatgcaag

SEQ ID NO: 291011 - DNA, 55 bp, Artificial
  Synthetic oligonucleotide
ggggaagctctcgggagacgaatccagcgcatagggaagaccgatggaagaggca

SEQ ID NO: 291012 - DNA, 55 bp, Artificial
  Synthetic oligonucleotide
ggggaatcactaagagtgtatttaggagtgcttgatgcttctactccataagtaa

SEQ ID NO: 291013 - DNA, 55 bp, Artificial
  Synthetic oligonucleotide
ggggaatgccgctaatctgggcgccgctcatccgcactcacttccgtgaaagacg

SEQ ID NO: 291014 - DNA, 55 bp, Artificial
  Synthetic oligonucleotide
ggggacagcctttcaagtgcctgcccgcatagcggagacttctcacgcccgagta

SEQ ID NO: 291015 - DNA, 55 bp, Artificial
  Synthetic oligonucleotide
ggggacagggctgacgtctagtccgacacaacaccaatgacggcgtccggcgtat

SEQ ID NO: 291016 - DNA, 60 bp, Artificial
  Synthetic oligonucleotide
actacgtagacgaggataagtagctgaaatgaaagtttgatcagccacactgaaattgag

SEQ ID NO: 291017 - DNA, 55 bp, Artificial
  Synthetic oligonucleotide
ggggaccatcttatctccatgagctcctatcacaaatccttgtacatctccggga

SEQ ID NO: 291018 - DNA, 55 bp, Artificial
  Synthetic oligonucleotide
ggggacgcttaggcacccttgtcaagagagagatgtggactggtgcggtctccag

SEQ ID NO: 291019 - DNA, 55 bp, Artificial
  Synthetic oligonucleotide
ggggactgagacaccccagatgaatgcatgcggtgatacgtcggtgctgccagcc

SEQ ID NO: 291020 - DNA, 55 bp, Artificial
  Synthetic oligonucleotide
ggggagaacacatccggttgcgtccgtgaagaagtgtgtgcccgcaagtgcactg

SEQ ID NO: 291021 - DNA, 55 bp, Artificial
  Synthetic oligonucleotide
ggggagaacgacttcgacacttcatgatctcgattctccgttgacagaaacgacg

SEQ ID NO: 291022 - DNA, 55 bp, Artificial
  Synthetic oligonucleotide
ggggagataatggtgatgcgcggttgcacctcgttgtgtcctacgccgctgcctc

SEQ ID NO: 291023 - DNA, 55 bp, Artificial
  Synthetic oligonucleotide
ggggatcatgcatcgtgaccgactgccacgttcctctaaaggggtgaaaaggtcc

SEQ ID NO: 291024 - DNA, 55 bp, Artificial
  Synthetic oligonucleotide
ggttacagggaaagcataacgataagggcgagagcgcatgtgagtaccaggggtg

SEQ ID NO: 291025 - DNA, 55 bp, Artificial
  Synthetic oligonucleotide
ggttaagtctctgctagatcgtcttagtattgttggctctatcaagccctatctg

SEQ ID NO: 291026 - DNA, 55 bp, Artificial
  Synthetic oligonucleotide
ggtgttttgcgtgcaccaatcctctgtgcacctgtacggcggttacgaggaacgc

SEQ ID NO: 291027 - DNA, 58 bp, Artificial
  Synthetic oligonucleotide
gtgctggtgctcaaacttccagaccaacaatccgaactgccctcctagggttagagat

SEQ ID NO: 291028 - DNA, 55 bp, Artificial
  Synthetic oligonucleotide
ggtgttttgcgtagaacaggtgtaattcaatttcgtcctcgggtagcaactaagc

SEQ ID NO: 291029 - DNA, 55 bp, Artificial
  Synthetic oligonucleotide
ggtgtttccagcccgtgttcccggagatgcacgtccgcgcatccacgcacgaagt

SEQ ID NO: 291030 - DNA, 55 bp, Artificial
  Synthetic oligonucleotide
ggtgttacccgcatctactttagtgctgcgagaccagacgtccattcacgtatgt

SEQ ID NO: 291031 - DNA, 55 bp, Artificial
  Synthetic oligonucleotide
ggtgtgtcgagaggcgccctttctcttcacgtgacttgcgttgcacactgtcacg

SEQ ID NO: 291032 - DNA, 55 bp, Artificial
  Synthetic oligonucleotide
ggtgtgtccctcacgcgataccatgccacattggacgatcctgccgtagctacgc

SEQ ID NO: 291033 - DNA, 55 bp, Artificial
  Synthetic oligonucleotide
ggtgtgggtatgcctacagggatgccagcccgtacaggccagaactagtacataa

SEQ ID NO: 291034 - DNA, 55 bp, Artificial
  Synthetic oligonucleotide
ggtgtgctgccccaagtatcacgacaagggtgccggctattcggtgccctactgc

SEQ ID NO: 291035 - DNA, 55 bp, Artificial
  Synthetic oligonucleotide
ggtgtgcggcaatcgacgcctcaagggtaaatcaagagagtcaagcgatgaagcg

SEQ ID NO: 291036 - DNA, 55 bp, Artificial
  Synthetic oligonucleotide
ggtgtgagtgcaagagtgtctgagaggtgctcacaccgatggaaaagctgccacg

SEQ ID NO: 291037 - DNA, 55 bp, Artificial
  Synthetic oligonucleotide
ggtgtgacgctcgtggcgcgacaccgtataaacgacgtggagggaaacgcgagag

SEQ ID NO: 291038 - DNA, 58 bp, Artificial
  Synthetic oligonucleotide
attcctcctattcagagatctttaatttattgcatatagctaattaaagtatttcgta

SEQ ID NO: 291039 - DNA, 55 bp, Artificial
  Synthetic oligonucleotide
ggtgtgaccattggcttactcgtagccgttttggcctgagtatgaaactggagac

SEQ ID NO: 291040 - DNA, 55 bp, Artificial
  Synthetic oligonucleotide
ggtgtctagtaagcattgcttctctgtagcacgcaacgagtggtggaccaacccg

SEQ ID NO: 291041 - DNA, 55 bp, Artificial
  Synthetic oligonucleotide
ggtgtcgtattgctcagggaagaggtgcatctccacaagtagcatgtgctcctcg

SEQ ID NO: 291042 - DNA, 55 bp, Artificial
  Synthetic oligonucleotide
ggtgtcctgcacccttaactgggactcttccgtgagggcaccgaagctgctcata

SEQ ID NO: 291043 - DNA, 55 bp, Artificial
  Synthetic oligonucleotide
ggtgtatgttctgttgctatgtccaagcagatacgtactagtgtgaggcacgggg

SEQ ID NO: 291044 - DNA, 55 bp, Artificial
  Synthetic oligonucleotide
ggtgtagcacaagtcgacagctatcccttgcgtagtggccgcgcttggagcgtcc

SEQ ID NO: 291045 - DNA, 55 bp, Artificial
  Synthetic oligonucleotide
ggtgtactagagctatggactggaacactcgagctgtgaactggtgtacttgaac

SEQ ID NO: 291046 - DNA, 55 bp, Artificial
  Synthetic oligonucleotide
ggtggtgtcctcgtggccatctgctggtcgtatattgttttggctggagtacatg

SEQ ID NO: 291047 - DNA, 55 bp, Artificial
  Synthetic oligonucleotide
ggtggtgcaaataatcgaatacgttctttaagacgtctactccgagggaaccata

SEQ ID NO: 291048 - DNA, 55 bp, Artificial
  Synthetic oligonucleotide
ggtgggtgacggactcccagccatctgaggcaagacttgatatggaggtgatgac

SEQ ID NO: 291049 - DNA, 56 bp, Artificial
  Synthetic oligonucleotide
gaccagaaattagtataggagccgtatgacctcctttaggaattcaacctatagaa

SEQ ID NO: 291050 - DNA, 55 bp, Artificial
  Synthetic oligonucleotide
ggtgggcgacttctgtgctctgcgtttaatcgatacatcggcataccagtagcgc

SEQ ID NO: 291051 - DNA, 55 bp, Artificial
  Synthetic oligonucleotide
ggtgggacataattttgcataccattacttccaggagcaccattaaatcctgggt

SEQ ID NO: 291052 - DNA, 55 bp, Artificial
  Synthetic oligonucleotide
ggtggccccgccatctgggttctcggtagcgtggttcgtcattagattcgcaggc

SEQ ID NO: 291053 - DNA, 55 bp, Artificial
  Synthetic oligonucleotide
ggtggacatttaggtgccgctgacaggaggaaatacgcaggctcacagaggagcc

SEQ ID NO: 291054 - DNA, 55 bp, Artificial
  Synthetic oligonucleotide
ggtggacatatttattcgttagtcctgatgatccaggcaatagtgatggcagccc

SEQ ID NO: 291055 - DNA, 55 bp, Artificial
  Synthetic oligonucleotide
ggtggaaatttacccatacagtcgtgttcgacatttggcacccacgactaataac

SEQ ID NO: 291056 - DNA, 55 bp, Artificial
  Synthetic oligonucleotide
ggtgcttggacgacccagacagcaccatccgactcaaggctttgcaccttttgcg

SEQ ID NO: 291057 - DNA, 55 bp, Artificial
  Synthetic oligonucleotide
ggtgctgagcagcacacaaagaatgtgtccgaagtgtgatgcatcgctggtcatc

SEQ ID NO: 291058 - DNA, 55 bp, Artificial
  Synthetic oligonucleotide
ggtgctcttgaggggccgagttgatgggatacgaggcaccttgagccccgtactg

SEQ ID NO: 291059 - DNA, 55 bp, Artificial
  Synthetic oligonucleotide
gtaagatcccacagtctattatttccgcatataatcataggatagaccactggtc

SEQ ID NO: 291060 - DNA, 59 bp, Artificial
  Synthetic oligonucleotide
gaccaggtcattacgatctgtttcgaatttcacccatgctccacgattggaaatcaaac

SEQ ID NO: 291061 - DNA, 55 bp, Artificial
  Synthetic oligonucleotide
gtaacgttacctcagagagagaggcactcgcacgccaaaacgaaaattgtacgtg

SEQ ID NO: 291062 - DNA, 55 bp, Artificial
  Synthetic oligonucleotide
gtaacatgcgaggtgcacaataagtccaaaacaaagtgcttagaagcgcagtgca

SEQ ID NO: 291063 - DNA, 55 bp, Artificial
  Synthetic oligonucleotide
gtaaaactcttgccctatagaagataatgactgtatttaggagcaagcgctggcc

SEQ ID NO: 291064 - DNA, 51 bp, Artificial
  Synthetic oligonucleotide
ggttttaacggtgtcagattaaggtgttaagggtgttagattaaggtgtta

SEQ ID NO: 291065 - DNA, 54 bp, Artificial
  Synthetic oligonucleotide
ggtttggtcgcccttcaagaccactttaccgcctcgcacgaggcctaacgacgc

SEQ ID NO: 291066 - DNA, 55 bp, Artificial
  Synthetic oligonucleotide
ggtttcgtaagtgtcaaaaccgctaagttgtgtacggaggcgcgcagtgccacag

SEQ ID NO: 291067 - DNA, 55 bp, Artificial
  Synthetic oligonucleotide
ggtttcggcgtttcggtcacaggtatcatcgtctatcgaggctcctatttcggat

SEQ ID NO: 291068 - DNA, 53 bp, Artificial
  Synthetic oligonucleotide
ggtttcggatattgggtgacggtttcgcattttagggtgttagaacaacaata

SEQ ID NO: 291069 - DNA, 55 bp, Artificial
  Synthetic oligonucleotide
ggtttcagcacattcatgagtcgctttaaggatagggcatgcatgtgcggggacg

SEQ ID NO: 291070 - DNA, 55 bp, Artificial
  Synthetic oligonucleotide
ggttgtgcgagaaggacccacgggccgctacactactgtgcgaattctgcacgcc

SEQ ID NO: 291071 - DNA, 58 bp, Artificial
  Synthetic oligonucleotide
tacgaaacatgatttttggcggcattattggaaatattgtctaaaaggattgtatata

SEQ ID NO: 291072 - DNA, 60 bp, Artificial
  Synthetic oligonucleotide
gtggagattgtgctgaatgccagctacattccgccgcactgcatccccgttgtgtttccg

SEQ ID NO: 291073 - DNA, 55 bp, Artificial
  Synthetic oligonucleotide
ggttgtatcgtgagagagcgacccaatgtctacgggaacccaatctttatcaccc

SEQ ID NO: 291074 - DNA, 55 bp, Artificial
  Synthetic oligonucleotide
ggttgtactgcagcgcgttccgttgcatcaccttgttccatcggtgttcccaccc

SEQ ID NO: 291075 - DNA, 55 bp, Artificial
  Synthetic oligonucleotide
ggttggatcaggtatatagagctccgccagagatgcgtacgggctgccgattccc

SEQ ID NO: 291076 - DNA, 55 bp, Artificial
  Synthetic oligonucleotide
ggttgccggcgtagtgacttgtcgactaattcaggtggaatcgctactcgatgaa

SEQ ID NO: 291077 - DNA, 55 bp, Artificial
  Synthetic oligonucleotide
ggttattagatatagagcacaatcgacattttcattcatggccgccaggtgtagc

SEQ ID NO: 291078 - DNA, 55 bp, Artificial
  Synthetic oligonucleotide
ggttattcgatagcctaagctagttctaagtgcgccattctatatgggctttctt

SEQ ID NO: 291079 - DNA, 55 bp, Artificial
  Synthetic oligonucleotide
ggttcaacaacgcaagtaatgtcagatagtgaaccttctctaccaaattccatcg

SEQ ID NO: 291080 - DNA, 55 bp, Artificial
  Synthetic oligonucleotide
ggttcataatcctggtcccgtagcctttaatttgttcagtggatttcacggctaa

SEQ ID NO: 291081 - DNA, 48 bp, Artificial
  Synthetic oligonucleotide
ggttccaggttaagagtaaagtaggttccgggttaagagtaaagtagg

SEQ ID NO: 291082 - DNA, 55 bp, Artificial
  Synthetic oligonucleotide
ggttccgaacagctgcactacaactaccgtcgcggagacgcgatcaagagcctcc

SEQ ID NO: 291083 - DNA, 58 bp, Artificial
  Synthetic oligonucleotide
catcgcttctaacggtgaactctcattccaatggaaccttgttcaagttcaaatagat

SEQ ID NO: 291084 - DNA, 49 bp, Artificial
  Synthetic oligonucleotide
ggttccgggttaagcataaggtaggttccgggttaagcataaggtaggt

SEQ ID NO: 291085 - DNA, 44 bp, Artificial
  Synthetic oligonucleotide
ggttccgggttaagggtaaggtgggttccgggttaagggtaagg

SEQ ID NO: 291086 - DNA, 55 bp, Artificial
  Synthetic oligonucleotide
ggttcctatggttcagataatggaattagaataccactcaaatatacgcgtcttc

SEQ ID NO: 291087 - DNA, 55 bp, Artificial
  Synthetic oligonucleotide
ggttcgatctgcgactactacgctggagcagagtcgcttcttgaggtaccgcaag

SEQ ID NO: 291088 - DNA, 54 bp, Artificial
  Synthetic oligonucleotide
ggttcgattccagttaggcctattttattagggagattgtaattagccgcttgg

SEQ ID NO: 291089 - DNA, 55 bp, Artificial
  Synthetic oligonucleotide
ggttcgcattttgaagagtgtgttagtgagcacagtcgattttgtcttgtacacc

SEQ ID NO: 291090 - DNA, 55 bp, Artificial
  Synthetic oligonucleotide
ggttcgcgactgcgaaaacagtcaccgcctctgatccgctagatacttccgctcg

SEQ ID NO: 291091 - DNA, 55 bp, Artificial
  Synthetic oligonucleotide
ggttcggttgtgcgatatttctattgacattggttccgcgtgatgcgattgacta

SEQ ID NO: 291092 - DNA, 55 bp, Artificial
  Synthetic oligonucleotide
ggttctactaggatatgcacgcgtttacctgtaggcttctctccgcacgtgtggg

SEQ ID NO: 291093 - DNA, 55 bp, Artificial
  Synthetic oligonucleotide
ggttgaaatgtgatgctcccgcatcaacgaaagcaggtctctcggcttcattgca

SEQ ID NO: 291094 - DNA, 58 bp, Artificial
  Synthetic oligonucleotide
catcggtagggggacaaagtcatcgacattatggcccggatagactgtttcaagaagc

SEQ ID NO: 291095 - DNA, 55 bp, Artificial
  Synthetic oligonucleotide
ggttgacggcatgccctcgactcgctacggcagctaagttcgcgagccacttcct

SEQ ID NO: 291096 - DNA, 55 bp, Artificial
  Synthetic oligonucleotide
ggtcgctagaacctcacttgaaagtagtcgcggtattacgggagaagactctcta

SEQ ID NO: 291097 - DNA, 55 bp, Artificial
  Synthetic oligonucleotide
ggtcgatgatgtcctaatcagcatataatgatcacggtgtggcgagcacagagcg

SEQ ID NO: 291098 - DNA, 54 bp, Artificial
  Synthetic oligonucleotide
ggtcgaggtaaggaagtttatcatcgaaaacacttttggagagtacgagtgcgt

SEQ ID NO: 291099 - DNA, 55 bp, Artificial
  Synthetic oligonucleotide
ggtcgagatgcgccatgcaggggaccgggtcaacttattctgcgccaggggtgtt

SEQ ID NO: 291100 - DNA, 55 bp, Artificial
  Synthetic oligonucleotide
ggtcgagagatccgtgttgggtatttgtcctgcggggacgttgggccgacgactg

SEQ ID NO: 291101 - DNA, 55 bp, Artificial
  Synthetic oligonucleotide
ggtcgacttgtacccgtctgccttcttgcaacgccctattatgctattcgcccca

SEQ ID NO: 291102 - DNA, 55 bp, Artificial
  Synthetic oligonucleotide
ggtcgacgttttgtacgttctgtggctaggatgcgccttcacggtgctggggttc

SEQ ID NO: 291103 - DNA, 55 bp, Artificial
  Synthetic oligonucleotide
ggtcgaacttcgcactttggaagcgcaccatgctagctccacccatgcgcagtgt

SEQ ID NO: 291104 - DNA, 54 bp, Artificial
  Synthetic oligonucleotide
ggtcctggaccgccttttcggagtcgtttgcgtatgtacaaccggctccgttga

SEQ ID NO: 291105 - DNA, 60 bp, Artificial
  Synthetic oligonucleotide
aatcataagaccagacattaataagcctgcaacagcacaccagtataattcaacttcact

SEQ ID NO: 291106 - DNA, 55 bp, Artificial
  Synthetic oligonucleotide
ggtcctctcgtgctgcaacggacgccgacagcttccttccacgcatttcgtgcct

SEQ ID NO: 291107 - DNA, 50 bp, Artificial
  Synthetic oligonucleotide
ggtccgtatgaagtaaacggggtccctttaaagagagttaacccacgata

SEQ ID NO: 291108 - DNA, 55 bp, Artificial
  Synthetic oligonucleotide
ggtccgtactcttgcttcctagtgatctctggcgggaggtaatcgtaggtcccgc

SEQ ID NO: 291109 - DNA, 51 bp, Artificial
  Synthetic oligonucleotide
ggtccggaaccctttccaccggatccaccatatggcccgtaaccctttcca

SEQ ID NO: 291110 - DNA, 55 bp, Artificial
  Synthetic oligonucleotide
ggtcccgcattacattacgtgtaggggtaggtcatcaggaaccacacaaagacgc

SEQ ID NO: 291111 - DNA, 51 bp, Artificial
  Synthetic oligonucleotide
ggtccccaaagaagcctcgagggcccttgaattggaattagggtttagacg

SEQ ID NO: 291112 - DNA, 55 bp, Artificial
  Synthetic oligonucleotide
ggtcccatgggtgatcccatagatggacccataggtgatcccatagatggtccca

SEQ ID NO: 291113 - DNA, 55 bp, Artificial
  Synthetic oligonucleotide
ggtagtgcctgattaccattcatgatcgcgcagaggcgctgctaaagtgggagcc

SEQ ID NO: 291114 - DNA, 53 bp, Artificial
  Synthetic oligonucleotide
ggtagtgttcgtattcgtttaataccagccccaagaggtacacaaattgtcgg

SEQ ID NO: 291115 - DNA, 55 bp, Artificial
  Synthetic oligonucleotide
ggtatagcaccagcgtccttctcgccactctgagctgtaactcgccgctgccacc

SEQ ID NO: 291116 - DNA, 60 bp, Artificial
  Synthetic oligonucleotide
aatatcaatatactgtgtatagaactccaggcgttaacctgtagagttgagatggaaaca

SEQ ID NO: 291117 - DNA, 55 bp, Artificial
  Synthetic oligonucleotide
ggtatagtatgcgcttgtagcttagttggtaaagcactcgtttgataagcgagtg

SEQ ID NO: 291118 - DNA, 55 bp, Artificial
  Synthetic oligonucleotide
ggtatcacgacgctcactaacgtccacacatccgtacatacacacgctcttcgac

SEQ ID NO: 291119 - DNA, 55 bp, Artificial
  Synthetic oligonucleotide
ggtatgaacagctctggctacacgccttctcagcgttccttggtgcagtacgtcg

SEQ ID NO: 291120 - DNA, 55 bp, Artificial
  Synthetic oligonucleotide
ggtatgaccagacattgtcatggtgcaacgttgtaactctgtgtcccaaactcta

SEQ ID NO: 291121 - DNA, 55 bp, Artificial
  Synthetic oligonucleotide
ggtcaagccagcggaactcctgtatcaagtggttctaccaaacaagttacccttg

SEQ ID NO: 291122 - DNA, 55 bp, Artificial
  Synthetic oligonucleotide
ggtcaaggatatgacgtcctcttcaccgatgtccaggaggctaataattcccctg

SEQ ID NO: 291123 - DNA, 55 bp, Artificial
  Synthetic oligonucleotide
ggtcagacaggtaacaaactgcaggcctcctttctcgtgtcacagcagcagaacg

SEQ ID NO: 291124 - DNA, 55 bp, Artificial
  Synthetic oligonucleotide
ggtcaggtgacggtgcattcggtggtaggccgctcgcactacctcatctggatgc

SEQ ID NO: 291125 - DNA, 55 bp, Artificial
  Synthetic oligonucleotide
ggtcattcggcttgtcgacagccttagacgtgtgcggactcggttgttattatag

SEQ ID NO: 291126 - DNA, 55 bp, Artificial
  Synthetic oligonucleotide
ggtcattggtgcatacaagatagagctgctcaatggattagtcctttattggatc

SEQ ID NO: 291127 - DNA, 59 bp, Artificial
  Synthetic oligonucleotide
aatatattcgagtatcaatcgagttaacatgctcagccgccaaaaacgatattattacc

SEQ ID NO: 291128 - DNA, 55 bp, Artificial
  Synthetic oligonucleotide
ggtccaagagacgtgcaacgctgcggcctcccttccttaccacgtatcgatttcc

SEQ ID NO: 291129 - DNA, 55 bp, Artificial
  Synthetic oligonucleotide
ggtccagacgcgtcatgtttggcacggttgccgttctgtcagtgagaggctgcgt

SEQ ID NO: 291130 - DNA, 55 bp, Artificial
  Synthetic oligonucleotide
ggtccatcgcttagtgacaagtagccgtagacacgggacctacggcactgggacg

SEQ ID NO: 291131 - DNA, 55 bp, Artificial
  Synthetic oligonucleotide
ggtcccacagtcgtgccgtagagtccatacccgccgttagcacaacgttgcctgt

SEQ ID NO: 291132 - DNA, 55 bp, Artificial
  Synthetic oligonucleotide
ggtgctagcctctagcatgacggccttccccatcggtgtcatggccgcatctgct

SEQ ID NO: 291133 - DNA, 55 bp, Artificial
  Synthetic oligonucleotide
ggtgctacattaacctggtcacatcatgcaattctatcctcaaatagaggtaacg

SEQ ID NO: 291134 - DNA, 55 bp, Artificial
  Synthetic oligonucleotide
ggtgcgtaggagaatcgtagcaaagtggtaggaagccgtttgcgtacaggtggcc

SEQ ID NO: 291135 - DNA, 55 bp, Artificial
  Synthetic oligonucleotide
ggtgcgactgcctaccccgtccacaagtccaggatgcaagcagcgactactcgct

SEQ ID NO: 291136 - DNA, 55 bp, Artificial
  Synthetic oligonucleotide
ggtgcctagcccacacacctcatctcttggggagatagcaaggtggcctgtagct

SEQ ID NO: 291137 - DNA, 55 bp, Artificial
  Synthetic oligonucleotide
ggtgccaagccgctctgcaccaaccagcgacttgtcaagagcgtggatgtgtggt

SEQ ID NO: 291138 - DNA, 59 bp, Artificial
  Synthetic oligonucleotide
actcaaaaacttaagctatcatatcacacttgacttagatgtatcattcaaaaaaacca

SEQ ID NO: 291139 - DNA, 55 bp, Artificial
  Synthetic oligonucleotide
ggtgcatgctgtgaggcagacgctaattcaacaatttaacgaacacatggcccag

SEQ ID NO: 291140 - DNA, 55 bp, Artificial
  Synthetic oligonucleotide
ggtgcatccatacggcagtcgcggcacatgtagacgccggtgtagcagcccaaga

SEQ ID NO: 291141 - DNA, 55 bp, Artificial
  Synthetic oligonucleotide
ggtgcaccgcgttacagtctgcccatccgcacatccctctccaacacatcagccc

SEQ ID NO: 291142 - DNA, 55 bp, Artificial
  Synthetic oligonucleotide
ggtgcacccgaaccgcgtggcctttgacatggaaacatacgagctggtcacgcta

SEQ ID NO: 291143 - DNA, 55 bp, Artificial
  Synthetic oligonucleotide
ggtgcaatttacagaccagcaagagcatctcattgtccttcgtgtgataactgcg

SEQ ID NO: 291144 - DNA, 55 bp, Artificial
  Synthetic oligonucleotide
ggtgatagtccttgtgttgataagggccctgtttcttgttgtccgcttgatgagg

SEQ ID NO: 291145 - DNA, 55 bp, Artificial
  Synthetic oligonucleotide
ggtgagttataaaggatcgcctatcgcctaattgctcacacaggaccccgaccag

SEQ ID NO: 291146 - DNA, 53 bp, Artificial
  Synthetic oligonucleotide
ggtgagtggcttaactcgccgtgttgccagaaggttagacgcgggttcgggtt

SEQ ID NO: 291147 - DNA, 55 bp, Artificial
  Synthetic oligonucleotide
ggtgagtgcaacgcgttaggggttgtgcagatgtctagcacttctcatccggtac

SEQ ID NO: 291148 - DNA, 55 bp, Artificial
  Synthetic oligonucleotide
ggtgaggtgatgagggtcaaggacgtctctgcaagtgtgtcagcgcgcgcgttgc

SEQ ID NO: 291149 - DNA, 57 bp, Artificial
  Synthetic oligonucleotide
actcaacaatttggattcttgtgccacgcggttccaccgctctaccaatcttaacta

SEQ ID NO: 291150 - DNA, 55 bp, Artificial
  Synthetic oligonucleotide
ggtcgctcttgcacacagcagccgcacgactaccgatttcactgagctgcgagcg

SEQ ID NO: 291151 - DNA, 55 bp, Artificial
  Synthetic oligonucleotide
ggtcgtcatgaaccatcgcggcctctcccgacctgttctctgtctgtgtcgcacc

SEQ ID NO: 291152 - DNA, 55 bp, Artificial
  Synthetic oligonucleotide
ggtcgttcaaaggctgagtgcgttaaccgaaatacgcgctcctcatactcgcgtt

SEQ ID NO: 291153 - DNA, 55 bp, Artificial
  Synthetic oligonucleotide
ggtcgttgtccttgtcatccggcgacaacagctcgagtagtaatgcggacgacgc

SEQ ID NO: 291154 - DNA, 55 bp, Artificial
  Synthetic oligonucleotide
ggtctactctggcggaacgaagattgtgctgctgtgcgggtacaagtggagcgac

SEQ ID NO: 291155 - DNA, 54 bp, Artificial
  Synthetic oligonucleotide
ggtctagggaggggcggccttctcatatcgaaatccttcaccttaaggagggag

SEQ ID NO: 291156 - DNA, 55 bp, Artificial
  Synthetic oligonucleotide
ggtctctcggtgtgtcgtggaaaataagacgccccagaagtaatgttaagatgcg

SEQ ID NO: 291157 - DNA, 55 bp, Artificial
  Synthetic oligonucleotide
ggtctgtgcgtgcgacgaatcatgtaaacctctcggggagtaatgtcgtacaacg

SEQ ID NO: 291158 - DNA, 55 bp, Artificial
  Synthetic oligonucleotide
ggtcttgacggacccgagtgtcgctgtgtggagcatagatcttcaagcactcacg

SEQ ID NO: 291159 - DNA, 55 bp, Artificial
  Synthetic oligonucleotide
ggtgaagacgcgtctgtgtgttgcgcaataggaaatcacctctcacagagccgaa

SEQ ID NO: 291160 - DNA, 59 bp, Artificial
  Synthetic oligonucleotide
gaccctataagttcgagatagtttagtgcacacatacggatcttatacctggacgtgaa

SEQ ID NO: 291161 - DNA, 55 bp, Artificial
  Synthetic oligonucleotide
ggtgaattatcgtgatagcgaaggtgaaagacgctcgataactgtgacgagcacc

SEQ ID NO: 291162 - DNA, 55 bp, Artificial
  Synthetic oligonucleotide
ggtgacaagatggcagaacgttcaaggactcgagtcttcggtttgggtgatgtgg

SEQ ID NO: 291163 - DNA, 55 bp, Artificial
  Synthetic oligonucleotide
ggtgacagacgacatctgggtctatgacgatgcagagaacactatgaagcagcgc

SEQ ID NO: 291164 - DNA, 55 bp, Artificial
  Synthetic oligonucleotide
ggtgacgaggcgacaacacaggggtaagtatatacaaagagcggtctctaaaatg

SEQ ID NO: 291165 - DNA, 55 bp, Artificial
  Synthetic oligonucleotide
ggtgagacctatatcagtgaagataagacccaagttaataccttaatgacctagg

SEQ ID NO: 291166 - DNA, 55 bp, Artificial
  Synthetic oligonucleotide
ggtgaggacaaggggcgcgttgggagcaatggacttcacaaagagtcggtagcgt

SEQ ID NO: 291167 - DNA, 55 bp, Artificial
  Synthetic oligonucleotide
ggtgaggcgaaagatgtacctccctgcgtggaggtgcccctacatatgcagaggc

SEQ ID NO: 291168 - DNA, 55 bp, Artificial
  Synthetic oligonucleotide
ggcagaattctgacgtaaggatcggcaacgcggcactgggataagtagcggcgcg

SEQ ID NO: 291169 - DNA, 55 bp, Artificial
  Synthetic oligonucleotide
ggcacttgtgcttaaataattaggtggattcagtagattgaatgctcaatgccca

SEQ ID NO: 291170 - DNA, 55 bp, Artificial
  Synthetic oligonucleotide
ggcactggaaaggcggaacacgcacacactgagcgagggagatagatgtatacta

SEQ ID NO: 291171 - DNA, 60 bp, Artificial
  Synthetic oligonucleotide
actcactgcgatacacacaattgtcaacctcatcgtttggtcttgctctctctgagtagc

SEQ ID NO: 291172 - DNA, 55 bp, Artificial
  Synthetic oligonucleotide
ggcactaggcaccagtatgaaggtagcgccttaccacgcccagatgaatatggcg

SEQ ID NO: 291173 - DNA, 55 bp, Artificial
  Synthetic oligonucleotide
ggcacgtggagcacatgcccacatacaggtcggaaggggaacagcgtgagacgac

SEQ ID NO: 291174 - DNA, 55 bp, Artificial
  Synthetic oligonucleotide
ggcacggaaaaggcgcacaagaacgcaggattgctgcgtcgaagcagagaagtgg

SEQ ID NO: 291175 - DNA, 55 bp, Artificial
  Synthetic oligonucleotide
ggcacgcgcgttcgtgtttatgttcgaggcccgttgctcgctacagcgccgtcga

SEQ ID NO: 291176 - DNA, 55 bp, Artificial
  Synthetic oligonucleotide
ggcacgcatgaagacggcacgcacatagaggatacacacgctctacaagccagcc

SEQ ID NO: 291177 - DNA, 55 bp, Artificial
  Synthetic oligonucleotide
ggcacctaccgtctcttcatgtggagctacggcggtcgtgagtgcttccgctacg

SEQ ID NO: 291178 - DNA, 55 bp, Artificial
  Synthetic oligonucleotide
ggcaccgctgcgcctttgatgcaactcgggtagcgaggctctgcgaaagctctac

SEQ ID NO: 291179 - DNA, 55 bp, Artificial
  Synthetic oligonucleotide
ggcaccgcctactcaacgaacccacaggttgttttgtgtgcgggtttctgtgtcg

SEQ ID NO: 291180 - DNA, 55 bp, Artificial
  Synthetic oligonucleotide
ggcacccgcaggtgatccgtattgtggacatgtttatgagctaccagttccaacg

SEQ ID NO: 291181 - DNA, 55 bp, Artificial
  Synthetic oligonucleotide
ggcaccatgtgcaaatgacgggacagagagaaatcgaccgcacagtctttatcgc

SEQ ID NO: 291182 - DNA, 57 bp, Artificial
  Synthetic oligonucleotide
taccgtacaagccgttagcaagacatgacagggagttggcaagttaaagaagttctg

SEQ ID NO: 291183 - DNA, 53 bp, Artificial
  Synthetic oligonucleotide
acaatatactggttctatcaatttacccctttcgatgaaagaaaaggtttcga

SEQ ID NO: 291184 - DNA, 55 bp, Artificial
  Synthetic oligonucleotide
ggcacagtggcagtatataacgagtcagagacgtgtacctgtatagtgtaccgtg

SEQ ID NO: 291185 - DNA, 55 bp, Artificial
  Synthetic oligonucleotide
ggcacagccttccctataatgtctcgctcgtttctcgtggcaatgcggttggctc

SEQ ID NO: 291186 - DNA, 55 bp, Artificial
  Synthetic oligonucleotide
ggcacacgtttggcggttggcacactcttgtttccatgactgctttaacgaacga

SEQ ID NO: 291187 - DNA, 55 bp, Artificial
  Synthetic oligonucleotide
ggcacacctgaagtacccctgtgcagcgcagagactcacagcaacgcgccacgag

SEQ ID NO: 291188 - DNA, 55 bp, Artificial
  Synthetic oligonucleotide
ggcacaccagctgcacgcgtacacgtgcgcccacgactcaataaagttcttcatc

SEQ ID NO: 291189 - DNA, 55 bp, Artificial
  Synthetic oligonucleotide
ggcacaataaacataagcacgcggattaaacacagatcgcgcgaaatttacacga

SEQ ID NO: 291190 - DNA, 55 bp, Artificial
  Synthetic oligonucleotide
ggcaatctacagtgcgcacaggagtactcaggtgaccctcaggggtactttgggg

SEQ ID NO: 291191 - DNA, 55 bp, Artificial
  Synthetic oligonucleotide
ggcaactcataaagcgactcgtaccagagcactccgtggggtgccttataccgtc

SEQ ID NO: 291192 - DNA, 55 bp, Artificial
  Synthetic oligonucleotide
ggcaacgcacacgttagctaggtacacattggctaggcatacattgattgcctgc

SEQ ID NO: 291193 - DNA, 55 bp, Artificial
  Synthetic oligonucleotide
ggcaacgaagccaggtcgtagcgtcgtgccgacccatgcagggccgaccattgga

SEQ ID NO: 291194 - DNA, 53 bp, Artificial
  Synthetic oligonucleotide
cgtttacttagtgacgggcaccaacttaacgcactcgtactctccaaaagtgt

SEQ ID NO: 291195 - DNA, 55 bp, Artificial
  Synthetic oligonucleotide
ggattgggctaacgatatggttgggtcgcttgcaatgtacgttagatttggtcca

SEQ ID NO: 291196 - DNA, 55 bp, Artificial
  Synthetic oligonucleotide
ggattgaaacaagctgtgaggaaactacattaaaggaactcgactggcctacaac

SEQ ID NO: 291197 - DNA, 55 bp, Artificial
  Synthetic oligonucleotide
ggattccccatgctcgaaaacctatatgcttcaactttcagccctattcgcttcc

SEQ ID NO: 291198 - DNA, 55 bp, Artificial
  Synthetic oligonucleotide
ggattcaatgcccagccaacaccatccaatttgattgggaattatctgtgttaca

SEQ ID NO: 291199 - DNA, 55 bp, Artificial
  Synthetic oligonucleotide
ggattacaaagcagtatgtaggcgggctccaaatcttgaaggtggcctactaggc

SEQ ID NO: 291200 - DNA, 55 bp, Artificial
  Synthetic oligonucleotide
ggattaataggtggaactgtagtatatgctgcagcagtaaaggctgctacgaaag

SEQ ID NO: 291201 - DNA, 55 bp, Artificial
  Synthetic oligonucleotide
ggccccacaacgtacctccttgcggcgaacgagaaggtaccgaagctgtacaaga

SEQ ID NO: 291202 - DNA, 55 bp, Artificial
  Synthetic oligonucleotide
ggcccatggttgtgaagtgatggcgtagcgagatttacgtagactagttgacgaa

SEQ ID NO: 291203 - DNA, 55 bp, Artificial
  Synthetic oligonucleotide
ggcccacgctgaatcagctggtagagactgacacgagcacgtccgtcccagtagc

SEQ ID NO: 291204 - DNA, 55 bp, Artificial
  Synthetic oligonucleotide
ggccatgacgtacgctctgacgccctcgagagttagtacgtggcgtgactatgcg

SEQ ID NO: 291205 - DNA, 55 bp, Artificial
  Synthetic oligonucleotide
acgggaatctttccacgctctaccgttattcgctataatgttttaactcgcgtga

SEQ ID NO: 291206 - DNA, 55 bp, Artificial
  Synthetic oligonucleotide
ggccaggttagtcatggtaatgacacgtcaccatcagacgttgatcttacaaggg

SEQ ID NO: 291207 - DNA, 55 bp, Artificial
  Synthetic oligonucleotide
ggccacaccgagattgggtacgagttcgccctagccttccacgacgagttcagcg

SEQ ID NO: 291208 - DNA, 55 bp, Artificial
  Synthetic oligonucleotide
ggccaagttgcgctgaacattagagtctgcctgtctggtctaatctgtcctacga

SEQ ID NO: 291209 - DNA, 55 bp, Artificial
  Synthetic oligonucleotide
ggccaagtaaggtttaagtcttcactatctgcaaacttacagactaataagcctg

SEQ ID NO: 291210 - DNA, 55 bp, Artificial
  Synthetic oligonucleotide
ggccaaggctcggccagttccccatgaactcgcgctcgtcattgttccggcttta

SEQ ID NO: 291211 - DNA, 54 bp, Artificial
  Synthetic oligonucleotide
ggccaacctgtctttaagcgttaaccaatatatgtacacggatatacttacccc

SEQ ID NO: 291212 - DNA, 55 bp, Artificial
  Synthetic oligonucleotide
ggccaaatgggaagacgtatgagctactcatccaacgcgcccgctacgtgcacca

SEQ ID NO: 291213 - DNA, 55 bp, Artificial
  Synthetic oligonucleotide
ggcattgatcgtttccctatgttaagatttggtacgagatccgccattgaaatgc

SEQ ID NO: 291214 - DNA, 55 bp, Artificial
  Synthetic oligonucleotide
ggcattcgcgcggcttgtgtggttcagcatgtccaccaacggtacgatcgacagc

SEQ ID NO: 291215 - DNA, 55 bp, Artificial
  Synthetic oligonucleotide
ggcatgcgacgacgttgcctacacgctagaaccgcagtgcactgtggatggctac

SEQ ID NO: 291216 - DNA, 54 bp, Artificial
  Synthetic oligonucleotide
caggcgttaacctgtagagttgagatggaaacagccggaaaggtaattttacgc

SEQ ID NO: 291217 - DNA, 55 bp, Artificial
  Synthetic oligonucleotide
ggcatgcatcgctgtctgggtagctggtatgtgcctactccgtggtgggcagtgt

SEQ ID NO: 291218 - DNA, 55 bp, Artificial
  Synthetic oligonucleotide
ggcatgaagtagttaccttgctggtatcactatgacacatctgcgctcgcctatt

SEQ ID NO: 291219 - DNA, 55 bp, Artificial
  Synthetic oligonucleotide
ggcagagcaacggctcgagtactgacagcaatttgcaccgaataacgtcaaaggc

SEQ ID NO: 291220 - DNA, 55 bp, Artificial
  Synthetic oligonucleotide
ggcagcacgcacccgcagtgctactacgatatgaacagaagctcgatgaaaagta

SEQ ID NO: 291221 - DNA, 55 bp, Artificial
  Synthetic oligonucleotide
ggcagcacgttcaaaactggcgatgtccttgtgtactggtgtatgcatacgcgca

SEQ ID NO: 291222 - DNA, 55 bp, Artificial
  Synthetic oligonucleotide
ggcagcgcttacataaaagcgcgtgagtagatggaggaatgttacgtgtctgtca

SEQ ID NO: 291223 - DNA, 55 bp, Artificial
  Synthetic oligonucleotide
ggcaggcatagtgcaactacaaccggacatgtggtattacctgaggtcgctaccg

SEQ ID NO: 291224 - DNA, 55 bp, Artificial
  Synthetic oligonucleotide
ggcagggacgaagagacgtgaggactgtgcctcagcccatatcagcccaatccgg

SEQ ID NO: 291225 - DNA, 55 bp, Artificial
  Synthetic oligonucleotide
ggcagggctatctcactcttcaaccattagccaggtttgcccaaagacatgtggt

SEQ ID NO: 291226 - DNA, 55 bp, Artificial
  Synthetic oligonucleotide
ggcaggtaggggtagcttaccgcacaagtgagttgcaaacagatggagacgccac

SEQ ID NO: 291227 - DNA, 55 bp, Artificial
  Synthetic oligonucleotide
caggcgttaacctgtagagttgagatggaaacagccggaaaggaaatagtacgcc

SEQ ID NO: 291228 - DNA, 55 bp, Artificial
  Synthetic oligonucleotide
ggcagtgacgggaatcggccacctttcagcgatggtgacagagtcgtacaagcgg

SEQ ID NO: 291229 - DNA, 55 bp, Artificial
  Synthetic oligonucleotide
ggcataacacgcttgcgcaatgtggagacgtacggcgagttacgcttctccaagg

SEQ ID NO: 291230 - DNA, 55 bp, Artificial
  Synthetic oligonucleotide
ggcatagaatgaggcacctcctaacggctggcttcttatctatcccctgcttcag

SEQ ID NO: 291231 - DNA, 55 bp, Artificial
  Synthetic oligonucleotide
ggcatagactagtcccatacctactaggacaattagcaatggagcggccatatga

SEQ ID NO: 291232 - DNA, 55 bp, Artificial
  Synthetic oligonucleotide
ggcatagttgtacgccaaagcacccggaacgctaaaggtaactgagttagcccag

SEQ ID NO: 291233 - DNA, 55 bp, Artificial
  Synthetic oligonucleotide
ggcatccaggagcacattcctcacaaataccacatgtctttgggcaaacctggct

SEQ ID NO: 291234 - DNA, 55 bp, Artificial
  Synthetic oligonucleotide
ggcatcggcgtctgtcactggtagcggggttacgccccatgcactgcattggttg

SEQ ID NO: 291235 - DNA, 55 bp, Artificial
  Synthetic oligonucleotide
ggcatctttctcgctttagtaagcggacaggaagagaggcactcgggaaatgtgg

SEQ ID NO: 291236 - DNA, 55 bp, Artificial
  Synthetic oligonucleotide
ggaggcacgttctggtagtatgaatcacgttcgtaatgtctttctcttctcgggt

SEQ ID NO: 291237 - DNA, 55 bp, Artificial
  Synthetic oligonucleotide
ggagcggggacatttactgtgttggttgagaccgctctgtctgcttgtcgggagc

SEQ ID NO: 291238 - DNA, 50 bp, Artificial
  Synthetic oligonucleotide
cgttttaccccgtatttagaccttttagttgcacgacgagctcttttaac

SEQ ID NO: 291239 - DNA, 55 bp, Artificial
  Synthetic oligonucleotide
ggagcgcaccattcaagcaccgggccccctacgtgtgctgttactcctcctcgtt

SEQ ID NO: 291240 - DNA, 55 bp, Artificial
  Synthetic oligonucleotide
ggagcgacaaaccatgagatctctgtgcgcaagtaaatgcttatccgcgggcccc

SEQ ID NO: 291241 - DNA, 55 bp, Artificial
  Synthetic oligonucleotide
ggagccttggcagattggatcaaatgcgggcagcctaagtaggaaacagttgagc

SEQ ID NO: 291242 - DNA, 55 bp, Artificial
  Synthetic oligonucleotide
ggagccgtgtgtggcgctgaaagacgttttggagagtttagagttgcgacggcac

SEQ ID NO: 291243 - DNA, 55 bp, Artificial
  Synthetic oligonucleotide
ggagccatggctatataccactattcatagagacaacttgtggtatctctctcga

SEQ ID NO: 291244 - DNA, 55 bp, Artificial
  Synthetic oligonucleotide
ggagcatgcactcctccgtagcactgtcaaatcgttcgccattggtgctcagcgg

SEQ ID NO: 291245 - DNA, 55 bp, Artificial
  Synthetic oligonucleotide
ggagatcaggggtctgacatattcggtacttgtatgcgcacgtagaaatacggat

SEQ ID NO: 291246 - DNA, 55 bp, Artificial
  Synthetic oligonucleotide
ggagagtgtagagagcaagcgccgtcggctcatctaccaatcgcgctaccgtggt

SEQ ID NO: 291247 - DNA, 55 bp, Artificial
  Synthetic oligonucleotide
ggagagattgaccagatgaacatgatttctcgctatggcggccttggttgatcca

SEQ ID NO: 291248 - DNA, 55 bp, Artificial
  Synthetic oligonucleotide
ggagagagttgaatcgtggcaaacattggtgaatgcaccgctagaatgctcagcc

SEQ ID NO: 291249 - DNA, 58 bp, Artificial
  Synthetic oligonucleotide
caggccaataacccaaaattagagctacgacgctatcgattgtacaagacggacacaa

SEQ ID NO: 291250 - DNA, 55 bp, Artificial
  Synthetic oligonucleotide
ggagactggatggtggagactggatggtggagactggatggtggagactggatgt

SEQ ID NO: 291251 - DNA, 55 bp, Artificial
  Synthetic oligonucleotide
ggacctcagtggaactacgtttctcagccggccaagaacttactacgtcgcatgc

SEQ ID NO: 291252 - DNA, 55 bp, Artificial
  Synthetic oligonucleotide
ggacctctaacaaccatggcgcactcaaacgatgaacacagcagctccggtcacc

SEQ ID NO: 291253 - DNA, 55 bp, Artificial
  Synthetic oligonucleotide
ggacctgcacaacgagatgagctctcaaggagagtgacaacccaaaacagagagg

SEQ ID NO: 291254 - DNA, 55 bp, Artificial
  Synthetic oligonucleotide
ggaccttgctcacttgtctctattgctatctaagcataggctggcaagcaagctc

SEQ ID NO: 291255 - DNA, 54 bp, Artificial
  Synthetic oligonucleotide
ggaccttgttcaaatataacccggcaacccatcgaggggaggagcagaggaggg

SEQ ID NO: 291256 - DNA, 55 bp, Artificial
  Synthetic oligonucleotide
ggacgacaagcggtgccaggtgaacgcgttggagtacaagcctgtgatgatcagc

SEQ ID NO: 291257 - DNA, 55 bp, Artificial
  Synthetic oligonucleotide
ggacgaggtaacgcgcttcaggtacctacatccactgggaagcatgcagatcatg

SEQ ID NO: 291258 - DNA, 55 bp, Artificial
  Synthetic oligonucleotide
ggacgggccagctgcacgttcgtgatgcccttgtcactcgtgtcgatcctcacaa

SEQ ID NO: 291259 - DNA, 55 bp, Artificial
  Synthetic oligonucleotide
ggacgtatgctcatgtctgtcatggggccaaagtgctacacggctcgaggtacgc

SEQ ID NO: 291260 - DNA, 57 bp, Artificial
  Synthetic oligonucleotide
ctaaagcgttggactgtaaatccaaaatggttattccatgtcaacagttcgaatctg

SEQ ID NO: 291261 - DNA, 55 bp, Artificial
  Synthetic oligonucleotide
ggactagtcggaggagcatgtactccggtaaccgaagaattatctaagggagagt

SEQ ID NO: 291262 - DNA, 54 bp, Artificial
  Synthetic oligonucleotide
ggactcaaggttggacaggtacctcaaacacctgaaggttacctctaggggtga

SEQ ID NO: 291263 - DNA, 55 bp, Artificial
  Synthetic oligonucleotide
ggactcaattgcctttcgcacccctgtcgcacggccgtcttctggcttcaccgct

SEQ ID NO: 291264 - DNA, 55 bp, Artificial
  Synthetic oligonucleotide
ggactgcaacgaacagcaaattttacgataacactgttcgtcctttctccgaggt

SEQ ID NO: 291265 - DNA, 55 bp, Artificial
  Synthetic oligonucleotide
ggactttcgcacatcagtgctctaccatgcgactctcctgtacgcacagtgggcg

SEQ ID NO: 291266 - DNA, 55 bp, Artificial
  Synthetic oligonucleotide
ggagaagagggtcgagcgcttagagacagtgacgattggcaactttcagcgagtg

SEQ ID NO: 291267 - DNA, 55 bp, Artificial
  Synthetic oligonucleotide
ggagaccgcatgcctaacagtctcatcaagggattcgccgttgaatgcctcttgc

SEQ ID NO: 291268 - DNA, 55 bp, Artificial
  Synthetic oligonucleotide
ggagacgccacagataagccgtagagactaggcgaagggcatgcaagtcggacaa

SEQ ID NO: 291269 - DNA, 55 bp, Artificial
  Synthetic oligonucleotide
ggattaagactgagtcaggctaaagtgcggaattgtttagaaagtactttgccgg

SEQ ID NO: 291270 - DNA, 55 bp, Artificial
  Synthetic oligonucleotide
ggatgggaaattgtgtaggcgtgcgtgtgtaacagcgagaagcggggctctctgg

SEQ ID NO: 291271 - DNA, 54 bp, Artificial
  Synthetic oligonucleotide
ctaaagtatggggataaataggattagagacctagtagtccataccttaaacaa

SEQ ID NO: 291272 - DNA, 55 bp, Artificial
  Synthetic oligonucleotide
ggatggagaatggcggtagaattcatactatttggaagtattcctaatatgccct

SEQ ID NO: 291273 - DNA, 55 bp, Artificial
  Synthetic oligonucleotide
ggatgcaatcgctgtgttcagatggattctcgcgattcggaagactgtcgtacgc

SEQ ID NO: 291274 - DNA, 55 bp, Artificial
  Synthetic oligonucleotide
ggatgatgagcgactccggaagctagagcgcgacacaaactgcttgcgcagtgct

SEQ ID NO: 291275 - DNA, 55 bp, Artificial
  Synthetic oligonucleotide
ggatgagttcgagtcacgctgacattctgcgcatcacatgggtggtacaagtctg

SEQ ID NO: 291276 - DNA, 55 bp, Artificial
  Synthetic oligonucleotide
ggatgagatgactctgctgtgtcgcaagtactgctgacggtcgtcgctagcttgg

SEQ ID NO: 291277 - DNA, 55 bp, Artificial
  Synthetic oligonucleotide
ggatctcgtaatgcagaagatgttggtccgaaacctacataaattgaataacctg

SEQ ID NO: 291278 - DNA, 55 bp, Artificial
  Synthetic oligonucleotide
ggatcgttgggaacaaccggggacccatgtcgcagaggaaactacaaacgcacaa

SEQ ID NO: 291279 - DNA, 55 bp, Artificial
  Synthetic oligonucleotide
ggatcgctaagctgaaatgaaccaaacacggggtcaatgacgaataagcaacgga

SEQ ID NO: 291280 - DNA, 55 bp, Artificial
  Synthetic oligonucleotide
ggatccgtggaggaggttgataacgagtcaacggaaagcgttctccagctgcctg

SEQ ID NO: 291281 - DNA, 55 bp, Artificial
  Synthetic oligonucleotide
ggatattcactccacttaattctcctcaaaaggagcttagtgtacctccgaatgc

SEQ ID NO: 291282 - DNA, 53 bp, Artificial
  Synthetic oligonucleotide
ctaaattttctaactacagttgtacatttacgagcaaaaggactaacattagg

SEQ ID NO: 291283 - DNA, 55 bp, Artificial
  Synthetic oligonucleotide
ggatatgccgcgccatggcgtttaacgagaaagaggtgagccacgcgaatggtgc

SEQ ID NO: 291284 - DNA, 49 bp, Artificial
  Synthetic oligonucleotide
ggatacgggttaaggataaggtaggttccgggttagaaataaggcaggt

SEQ ID NO: 291285 - DNA, 55 bp, Artificial
  Synthetic oligonucleotide
ggatacacattgccacgtccagcaatgactaacgctgatattacccgtatcatca

SEQ ID NO: 291286 - DNA, 55 bp, Artificial
  Synthetic oligonucleotide
ggataatgtagattctcttcgaactctattgattggaggcacagcagtcatgaga

SEQ ID NO: 291287 - DNA, 55 bp, Artificial
  Synthetic oligonucleotide
ggagggagccatgttgaggtggcacaggaagtagagatactgaatggtgtccagc

SEQ ID NO: 291288 - DNA, 55 bp, Artificial
  Synthetic oligonucleotide
ggagggctccactacgtggatatgcacgcgccaatgcaacccgagcacatggtcc

SEQ ID NO: 291289 - DNA, 55 bp, Artificial
  Synthetic oligonucleotide
ggagggctctcctccatgctcgttgacacattccggcttacattgtaagaggtgg

SEQ ID NO: 291290 - DNA, 54 bp, Artificial
  Synthetic oligonucleotide
ggaggggtacgaccggcccaatacacgggtgccgggcaacaagcaccactacta

SEQ ID NO: 291291 - DNA, 55 bp, Artificial
  Synthetic oligonucleotide
ggaggtgcaaatcttgtatgtggggtaacagattctagccgtggcttagtttctg

SEQ ID NO: 291292 - DNA, 55 bp, Artificial
  Synthetic oligonucleotide
ggaggttgtacaatgtacgctccgcaacgcagatgcacacgacacagaatgccag

SEQ ID NO: 291293 - DNA, 57 bp, Artificial
  Synthetic oligonucleotide
taccacagtagtacacttacgtgctaaaggattaacacttggtatattaagtgtatc

SEQ ID NO: 291294 - DNA, 52 bp, Artificial
  Synthetic oligonucleotide
ggccctagtaacgcgtcttactcccgcgcctagttaaaaacggataagctaa

SEQ ID NO: 291295 - DNA, 55 bp, Artificial
  Synthetic oligonucleotide
ggaggtttatgcaacgagtgcagcgaccctcttttaatataagggcttatatgcg

SEQ ID NO: 291296 - DNA, 55 bp, Artificial
  Synthetic oligonucleotide
ggagtcacatccctcattccggtgtcctccaagggctttccacagctaccagtca

SEQ ID NO: 291297 - DNA, 55 bp, Artificial
  Synthetic oligonucleotide
ggagtcagagggcgtgataggacgatttgctacgtagtagcccttcgctcagtcg

SEQ ID NO: 291298 - DNA, 55 bp, Artificial
  Synthetic oligonucleotide
ggagtcccgataattgcatgacggattcccattcccttcggcgagcctctatcgt

SEQ ID NO: 291299 - DNA, 55 bp, Artificial
  Synthetic oligonucleotide
ggagtcgctgtctgagcatgccactgtcgttgttccggtgtgcgtatgtgtaggc

SEQ ID NO: 291300 - DNA, 55 bp, Artificial
  Synthetic oligonucleotide
ggagtcgtgcacgtttcaaactgggcaccctttgcttgttatactcttgcctcgc

SEQ ID NO: 291301 - DNA, 55 bp, Artificial
  Synthetic oligonucleotide
ggagtgccctgagaagttgcgagctcttctgcggagcgccgtagcggatagtgtc

SEQ ID NO: 291302 - DNA, 55 bp, Artificial
  Synthetic oligonucleotide
ggagtgggcttgcatggtgatgtttcattgcagaggacgcaccaagcgtggttgg

SEQ ID NO: 291303 - DNA, 55 bp, Artificial
  Synthetic oligonucleotide
ggagttatagcgctgtaggggcctgtattccaactcgctggcacgcatacgtaaa

SEQ ID NO: 291304 - DNA, 54 bp, Artificial
  Synthetic oligonucleotide
ggataaatgattagttactaaccctggtctttcggctaaccatcaaatacgact

SEQ ID NO: 291305 - DNA, 51 bp, Artificial
  Synthetic oligonucleotide
ctaacttaggtcttatggttactaacttaggtcttatggttactaacttag

SEQ ID NO: 291306 - DNA, 55 bp, Artificial
  Synthetic oligonucleotide
ggataatagaaacgaccaatctgaatgcaatacagtggacaatgatagagaaccc

SEQ ID NO: 291307 - DNA, 55 bp, Artificial
  Synthetic oligonucleotide
gggaagtgcctcaatgtgcgtcttgcactctgccaacgagagtacaaacacatac

SEQ ID NO: 291308 - DNA, 55 bp, Artificial
  Synthetic oligonucleotide
gggaagcatcctcggtgccgatagtgacagagtcgtgcgcaatggcgccacgttc

SEQ ID NO: 291309 - DNA, 55 bp, Artificial
  Synthetic oligonucleotide
gggaagatgtactactccataaataatggctcgtctgcatcaggagcgtcgtcat

SEQ ID NO: 291310 - DNA, 53 bp, Artificial
  Synthetic oligonucleotide
gggaagaggcggctcctgttcgcctccgtctttcctatttctggtagggtttc

SEQ ID NO: 291311 - DNA, 55 bp, Artificial
  Synthetic oligonucleotide
gggaacgtgatagatccaccgcagaaacgacaggtttcgacgacctcggagcaca

SEQ ID NO: 291312 - DNA, 55 bp, Artificial
  Synthetic oligonucleotide
gggaacgcaaagaggtggaaagcccgaacagggacacggaggagtgagaggtcca

SEQ ID NO: 291313 - DNA, 55 bp, Artificial
  Synthetic oligonucleotide
gggaaccagacgtaaccacttacagcccagccgctagtgtcctttaagtgcatac

SEQ ID NO: 291314 - DNA, 54 bp, Artificial
  Synthetic oligonucleotide
gggaacaagcggtagtgtcaaatttccacaacgttttagaagcgccctcaggta

SEQ ID NO: 291315 - DNA, 55 bp, Artificial
  Synthetic oligonucleotide
gggaaaggtatctgtgtggtgtggcggatgttgctactttcgtcctgcacagtcc

SEQ ID NO: 291316 - DNA, 60 bp, Artificial
  Synthetic oligonucleotide
caggaatgcctagaagaattcatgattatcctgtagtatttatgggttgacatagtatgt

SEQ ID NO: 291317 - DNA, 55 bp, Artificial
  Synthetic oligonucleotide
gggaaaagggtcctactccacagtgcggttgtgctacaacttggcggatggccac

SEQ ID NO: 291318 - DNA, 55 bp, Artificial
  Synthetic oligonucleotide
ggctttcaggggcacacaggaggcatgcgcaaaagcatacgcggcacagtcggca

SEQ ID NO: 291319 - DNA, 55 bp, Artificial
  Synthetic oligonucleotide
ggctttatcaacgaaggccgaaggagtaccttgttgtgtgaacaggactccgagg

SEQ ID NO: 291320 - DNA, 55 bp, Artificial
  Synthetic oligonucleotide
ggcttgtggctgcccaagctgatacggagcacctcgtgtaccgtgccagtgacct

SEQ ID NO: 291321 - DNA, 55 bp, Artificial
  Synthetic oligonucleotide
ggcttggctttccgcgctcgcagactccgttcccttttacaaggactgtctcgtg

SEQ ID NO: 291322 - DNA, 55 bp, Artificial
  Synthetic oligonucleotide
ggcttgcgtaggtgctcactactgccggttgttccacaaaagtgtaaatgtccct

SEQ ID NO: 291323 - DNA, 55 bp, Artificial
  Synthetic oligonucleotide
ggcttgcacgagtctgcgtatcacgtactgtgtctggtgcgttgaaatcacctac

SEQ ID NO: 291324 - DNA, 55 bp, Artificial
  Synthetic oligonucleotide
ggctcccaggtacttagatttgatctgcatgcactaatgaaatcctctatagtaa

SEQ ID NO: 291325 - DNA, 55 bp, Artificial
  Synthetic oligonucleotide
ggctcccgatacgaactgaataactcaaaccggatacacagagacggagcgtggt

SEQ ID NO: 291326 - DNA, 55 bp, Artificial
  Synthetic oligonucleotide
ggctccgttcgtgtgaggtcctcgacgtttacagtaagttggcgacacgccacgt

SEQ ID NO: 291327 - DNA, 55 bp, Artificial
  Synthetic oligonucleotide
gaactaagcttgatgtaaacctaccacaagggttgttcttttcgcaagattgggc

SEQ ID NO: 291328 - DNA, 55 bp, Artificial
  Synthetic oligonucleotide
ggctcctggaggtggtgacgttcgtttaattactgacgcaactattagtcctgct

SEQ ID NO: 291329 - DNA, 55 bp, Artificial
  Synthetic oligonucleotide
ggctcgacacttctgtggtatggcatcgaatggtcgcgtctcaagtggaaaacac

SEQ ID NO: 291330 - DNA, 55 bp, Artificial
  Synthetic oligonucleotide
ggctcgcgcctgttcgctatgtaaacgcgtatgagcgcgcaagagacacctcgcc

SEQ ID NO: 291331 - DNA, 55 bp, Artificial
  Synthetic oligonucleotide
ggctcgtgtgtccataccgtgtgaacgcaggtcatgcttgtgcgccctcagtcgc

SEQ ID NO: 291332 - DNA, 55 bp, Artificial
  Synthetic oligonucleotide
ggctctcaccgttgctcagtagccgtacatgtgcgtgcctgtgtggatgggtcgg

SEQ ID NO: 291333 - DNA, 55 bp, Artificial
  Synthetic oligonucleotide
ggctctcgcccgagagaggtaatgaacggtgccatgttcatcaggaccacagtgc

SEQ ID NO: 291334 - DNA, 55 bp, Artificial
  Synthetic oligonucleotide
ggctctgtgttagcgcaccgcatggtacgagcagcttggttgtccgtaagcgcgt

SEQ ID NO: 291335 - DNA, 55 bp, Artificial
  Synthetic oligonucleotide
ggctgatccacacaaaaccagaccatctagatgtaagctttcgcatacttgacgg

SEQ ID NO: 291336 - DNA, 55 bp, Artificial
  Synthetic oligonucleotide
ggctgcctagcttgctgcaagcctttgtaagcgcgtctatttgcgttttggcgtc

SEQ ID NO: 291337 - DNA, 55 bp, Artificial
  Synthetic oligonucleotide
ggctgtgtcgagtgcgacttcaaatgcagcactgggaacgagatgagccgccaca

SEQ ID NO: 291338 - DNA, 60 bp, Artificial
  Synthetic oligonucleotide
acacccagtgagcaccaccgtatcgagctctggcgactcttccaggtgaatcaaggtgta

SEQ ID NO: 291339 - DNA, 55 bp, Artificial
  Synthetic oligonucleotide
ggcttcacagccgagcgtaaatgcacggtccctaggtaaggtcgtttgcgacggc

SEQ ID NO: 291340 - DNA, 55 bp, Artificial
  Synthetic oligonucleotide
ggcttccagaagctcatgtggaagcaccaacaagtggttcagttatcttagctgg

SEQ ID NO: 291341 - DNA, 55 bp, Artificial
  Synthetic oligonucleotide
ggcttcgtgatccgtgcaaactgaccgatgtgtctaccaaccatcatgccaagga

SEQ ID NO: 291342 - DNA, 55 bp, Artificial
  Synthetic oligonucleotide
gggattttcaagccgactgcgcttggtaagcttgttaatttcgatcatgcggaca

SEQ ID NO: 291343 - DNA, 55 bp, Artificial
  Synthetic oligonucleotide
gggatttgtaggaacttcagaccatcagtccttacaaagacgatgatacatactg

SEQ ID NO: 291344 - DNA, 55 bp, Artificial
  Synthetic oligonucleotide
gggatctaagtctttctcttgttagcgatccgaactcgactgcaaggcttagcca

SEQ ID NO: 291345 - DNA, 55 bp, Artificial
  Synthetic oligonucleotide
gggatcgcggctgggcagcactcattctaagctacacgaagctaagaaaatacgg

SEQ ID NO: 291346 - DNA, 55 bp, Artificial
  Synthetic oligonucleotide
gggatccttgctcactactctttgattcaattaggggcagtggtttagcatatag

SEQ ID NO: 291347 - DNA, 55 bp, Artificial
  Synthetic oligonucleotide
gggatcaacatgaccgaaaagagtgctactttagaggttacgcgaagtcctcgcc

SEQ ID NO: 291348 - DNA, 55 bp, Artificial
  Synthetic oligonucleotide
gggatcaaagaccatttcttaccggatctatagatgatgatacccagttaactcc

SEQ ID NO: 291349 - DNA, 55 bp, Artificial
  Synthetic oligonucleotide
gtccaagaatctattaacaccgtagtagaagttatacgattaaggtctcttaata

SEQ ID NO: 291350 - DNA, 55 bp, Artificial
  Synthetic oligonucleotide
gggatactaggacgttggtgttccagtgcacgtaagaagtcgccctttctaccgc

SEQ ID NO: 291351 - DNA, 55 bp, Artificial
  Synthetic oligonucleotide
gggataacgaaatggttctttcacaacttgggtcaagccttgtgacagcattacg

SEQ ID NO: 291352 - DNA, 53 bp, Artificial
  Synthetic oligonucleotide
gggagttatacttcgtaatccccgcgtttggcacacccgaatagcaaccaagg

SEQ ID NO: 291353 - DNA, 55 bp, Artificial
  Synthetic oligonucleotide
gggagtgatacacgacctgaatgtgtgtgcaatcgatagttcgctttccgcatgt

SEQ ID NO: 291354 - DNA, 55 bp, Artificial
  Synthetic oligonucleotide
gggagtacccagtggccctgctcattaacctcccaatggactataggtaatggct

SEQ ID NO: 291355 - DNA, 55 bp, Artificial
  Synthetic oligonucleotide
gggaggggaccgaactcctgcggccccaaaatgagtagtgcatcgtgcagttcac

SEQ ID NO: 291356 - DNA, 51 bp, Artificial
  Synthetic oligonucleotide
gggagggagttttccacgttgtttaactgtatcctttcggtagttctagtc

SEQ ID NO: 291357 - DNA, 55 bp, Artificial
  Synthetic oligonucleotide
gggaggcgaatgggagaaggggataggccgatcacacaccgacacagcgacgtag

SEQ ID NO: 291358 - DNA, 55 bp, Artificial
  Synthetic oligonucleotide
gggaagttgctagaggtgcgcccacgcaagagcgtgaccgagagtagcggcaatg

SEQ ID NO: 291359 - DNA, 55 bp, Artificial
  Synthetic oligonucleotide
gggaatctttcctttccacctggaccgtattttagtttacatgcatcagtgagat

SEQ ID NO: 291360 - DNA, 60 bp, Artificial
  Synthetic oligonucleotide
ggcctctttataccatagatggacctgcgcttagtcttgtctcgcacacctaagaagtcc

SEQ ID NO: 291361 - DNA, 55 bp, Artificial
  Synthetic oligonucleotide
gggacaaaatttgaagttattagctggcaagtcgctttacaacaaattgtgacgc

SEQ ID NO: 291362 - DNA, 55 bp, Artificial
  Synthetic oligonucleotide
gggacaacaggcttatagcttttaaaagttcatattgacgaagctgtttggcacc

SEQ ID NO: 291363 - DNA, 55 bp, Artificial
  Synthetic oligonucleotide
gggacacactcagtctacacatcagtacagaggcgcaaacaagtgcagcggcagt

SEQ ID NO: 291364 - DNA, 55 bp, Artificial
  Synthetic oligonucleotide
gggacaggacgcttaaatgtgtatctcgattatgcgcaaggatctgtcatgttta

SEQ ID NO: 291365 - DNA, 55 bp, Artificial
  Synthetic oligonucleotide
gggaccgtcgacacaatccgtcgcgggcttctactatcgtgcttacagcaacacg

SEQ ID NO: 291366 - DNA, 55 bp, Artificial
  Synthetic oligonucleotide
gggacgctcagagcaacaatagctgcaactccccgaacttagctcccgtaccagg

SEQ ID NO: 291367 - DNA, 55 bp, Artificial
  Synthetic oligonucleotide
gggactcgcccctccagtgggtagttgtgtgccctcgttagctgtggcgactcat

SEQ ID NO: 291368 - DNA, 55 bp, Artificial
  Synthetic oligonucleotide
gggacttcgtgcgatcttggggcgtgtctagttgaagaacgcccattatgcgtag

SEQ ID NO: 291369 - DNA, 55 bp, Artificial
  Synthetic oligonucleotide
gggagacccggtgtgtagaatgcgagaaaaggccttctgcggaactccgacatgc

SEQ ID NO: 291370 - DNA, 55 bp, Artificial
  Synthetic oligonucleotide
gggagactcaccaacacatgggtgtgcattcttgcacaatcctgccgcggcgaca

SEQ ID NO: 291371 - DNA, 60 bp, Artificial
  Synthetic oligonucleotide
gtcagtgtctatccattaaagacattattactgctgcacctaaaataggtgtaacaatag

SEQ ID NO: 291372 - DNA, 55 bp, Artificial
  Synthetic oligonucleotide
gggagcacgggcgagcaatcctactggagaacatctcacttgacacgctagacgc

SEQ ID NO: 291373 - DNA, 55 bp, Artificial
  Synthetic oligonucleotide
gggagccgtctacggaagcaggggcgttggggtgtggtgtcattcgatcgaagag

SEQ ID NO: 291374 - DNA, 55 bp, Artificial
  Synthetic oligonucleotide
gggagcgagcttatagacccaccagacaggcgactcggaggacccgatagagacg

SEQ ID NO: 291375 - DNA, 55 bp, Artificial
  Synthetic oligonucleotide
gggagcttgataggcaccaccctacgcattgtatccaccttctgcagtcccgctg

SEQ ID NO: 291376 - DNA, 54 bp, Artificial
  Synthetic oligonucleotide
gggaggactctttcgagtacaacgagtactaccctcgcggtacggttccacaca

SEQ ID NO: 291377 - DNA, 55 bp, Artificial
  Synthetic oligonucleotide
ggcgccagagaccgtcaggaggactgcactgagtttgtcaagaagccgtatgcgg

SEQ ID NO: 291378 - DNA, 55 bp, Artificial
  Synthetic oligonucleotide
ggcgccaacatgtgttataggtttgccgcgtcacaccaaatctcctgcgagggag

SEQ ID NO: 291379 - DNA, 55 bp, Artificial
  Synthetic oligonucleotide
ggcgcattcaacccatcacgccttgaagttaaggacggcataataatttgtgtcg

SEQ ID NO: 291380 - DNA, 55 bp, Artificial
  Synthetic oligonucleotide
ggcgcagtcggcaatccggccgagactagcctctctatacgccgccgctgtctgt

SEQ ID NO: 291381 - DNA, 55 bp, Artificial
  Synthetic oligonucleotide
ggcgatttgaacaggagcaatatgtccagtatgcgaaacgcattttcaattcggt

SEQ ID NO: 291382 - DNA, 56 bp, Artificial
  Synthetic oligonucleotide
gaaccccctttggctctgatcccgtggctagcgcgtgtccgttcccatccgcgctt

SEQ ID NO: 291383 - DNA, 55 bp, Artificial
  Synthetic oligonucleotide
ggcgatgtgtcaggggttctcgtatacactactggtggccgcttcagtctgcagc

SEQ ID NO: 291384 - DNA, 55 bp, Artificial
  Synthetic oligonucleotide
ggcgatcatcaagttagtcaaattaggcttgcaaagcttaatcggtattcggtac

SEQ ID NO: 291385 - DNA, 55 bp, Artificial
  Synthetic oligonucleotide
ggcgagctgtggcttgaactgtgtaggtgtgttgaagcgatgaataacgcgactt

SEQ ID NO: 291386 - DNA, 55 bp, Artificial
  Synthetic oligonucleotide
ggcgagccaaggagagtaggcaacaggtgccggacaacgaagcaagaagcgtgcg

SEQ ID NO: 291387 - DNA, 55 bp, Artificial
  Synthetic oligonucleotide
ggcgagaaagaaatgaactctacgctgtcgttggcgcatacagccagaaacgggt

SEQ ID NO: 291388 - DNA, 55 bp, Artificial
  Synthetic oligonucleotide
ggcgactttaatcgcggcatgtagctcatagtagctaatgagttcggctagttcg

SEQ ID NO: 291389 - DNA, 55 bp, Artificial
  Synthetic oligonucleotide
ggcgacggacctccctatcaccatagtccctttgtagcgcgacgatcgattgcac

SEQ ID NO: 291390 - DNA, 55 bp, Artificial
  Synthetic oligonucleotide
ggcgacgcgtgcgtaggagtcgtaggatgagcttcgggtccatgactagtacgtc

SEQ ID NO: 291391 - DNA, 55 bp, Artificial
  Synthetic oligonucleotide
ggcgacgaaaatcttgagttggtcctgtcggtctgtctctggggttgcagtgacg

SEQ ID NO: 291392 - DNA, 55 bp, Artificial
  Synthetic oligonucleotide
ggcgaccttgacctcacagacctactcctgcggtcagacacggatctcgacctcc

SEQ ID NO: 291393 - DNA, 60 bp, Artificial
  Synthetic oligonucleotide
acacgatcctccatgcagagttgtcactgattttcactatctagatagactcccccataa

SEQ ID NO: 291394 - DNA, 55 bp, Artificial
  Synthetic oligonucleotide
ggcgacatgttggtgactgatgtaacatgtctcaaattttagcgacggtttaacg

SEQ ID NO: 291395 - DNA, 55 bp, Artificial
  Synthetic oligonucleotide
ggcccctctacgaacggtgcgtacaaaccgtactccacagagccatgtagtagca

SEQ ID NO: 291396 - DNA, 55 bp, Artificial
  Synthetic oligonucleotide
ggcccggcctattaaagctcacagacgcgcgctgcagagacgccatggcttacga

SEQ ID NO: 291397 - DNA, 55 bp, Artificial
  Synthetic oligonucleotide
ggccctctctgtggaaggatccgcaatgagcctcgtcactatggagagtgaaccg

SEQ ID NO: 291398 - DNA, 55 bp, Artificial
  Synthetic oligonucleotide
ggcccttttcctgtctcaccgacctcaggtacctgattcattcctggtgcatagg

SEQ ID NO: 291399 - DNA, 55 bp, Artificial
  Synthetic oligonucleotide
ggccgaccgtgagtacttgctgttgatctcggagaggtgcgttagcacgacgccc

SEQ ID NO: 291400 - DNA, 55 bp, Artificial
  Synthetic oligonucleotide
ggccgacgcacgtgcaaagaacgtgtcccagatggctcgaaggtgcatcttgttt

SEQ ID NO: 291401 - DNA, 55 bp, Artificial
  Synthetic oligonucleotide
ggccgcagatttcgatgtgagaactacatgcccttcaatcagtgcggcatcacag

SEQ ID NO: 291402 - DNA, 55 bp, Artificial
  Synthetic oligonucleotide
ggccggtatttggatgcccgcgacacgtcgctcgccctcttcgggtctgcacgac

SEQ ID NO: 291403 - DNA, 55 bp, Artificial
  Synthetic oligonucleotide
ggccgtcttcaacaagtagatgtccctgtacagactgaaatgcaacttgtgtatg

SEQ ID NO: 291404 - DNA, 60 bp, Artificial
  Synthetic oligonucleotide
tacatgctcagccgccaaaaatataacgatattattaccgtacaagccgttagcaagaca

SEQ ID NO: 291405 - DNA, 60 bp, Artificial
  Synthetic oligonucleotide
gtcagcttatgaatgtggcttcgatccatttaatgacgcacgaaacacttttgatgtacg

SEQ ID NO: 291406 - DNA, 55 bp, Artificial
  Synthetic oligonucleotide
ggccgtgcacccgctacgacatcgcacacttcaacgacatttctgtggtgtcgtc

SEQ ID NO: 291407 - DNA, 55 bp, Artificial
  Synthetic oligonucleotide
ggccgtgctcacatgactgagtcggcgtattgctgtaacgcgggtgtctagggct

SEQ ID NO: 291408 - DNA, 55 bp, Artificial
  Synthetic oligonucleotide
ggcctcccaaacattgcgcgtctagacttgcagtttcgatagagtaacactgtcg

SEQ ID NO: 291409 - DNA, 55 bp, Artificial
  Synthetic oligonucleotide
ggcctgagttgacacatgtcagccccgggtggtagctcgctgcctatacgcagac

SEQ ID NO: 291410 - DNA, 55 bp, Artificial
  Synthetic oligonucleotide
ggcctgatgcgccagttgatctacgcaaccgcccgtctgggcttctacccgagtt

SEQ ID NO: 291411 - DNA, 55 bp, Artificial
  Synthetic oligonucleotide
ggcctggaacaagattgaccaaacctcgctaacagactggctggctttctcacgg

SEQ ID NO: 291412 - DNA, 55 bp, Artificial
  Synthetic oligonucleotide
ggcctttccacagctagtggccacccggttcacacgtgtctcccgtttaaacgca

SEQ ID NO: 291413 - DNA, 55 bp, Artificial
  Synthetic oligonucleotide
ggcgacatgccgactgcaaatttgacacgtgtcggaagcaagagatggcacgagt

SEQ ID NO: 291414 - DNA, 55 bp, Artificial
  Synthetic oligonucleotide
ggctcattcgtcatcaattccaacagaacgggactggcagcctaacaatgtactg

SEQ ID NO: 291415 - DNA, 55 bp, Artificial
  Synthetic oligonucleotide
ggctcactagtcgcgagctatcgtagatttgtaatcacgtgtctgtgtgacggtg

SEQ ID NO: 291416 - DNA, 60 bp, Artificial
  Synthetic oligonucleotide
cagcgaaccagcattgtgtgctacctgcgcactggactaatgtcctctgtgtgcgagatg

SEQ ID NO: 291417 - DNA, 54 bp, Artificial
  Synthetic oligonucleotide
ggctcaaccaagtacccatctacgttcggagttaagaaatcccttgggccgcca

SEQ ID NO: 291418 - DNA, 55 bp, Artificial
  Synthetic oligonucleotide
ggctagtaatctttggctgacccggtagtattttagaaaccttgtgcatgacctt

SEQ ID NO: 291419 - DNA, 55 bp, Artificial
  Synthetic oligonucleotide
ggctagacgcaccgactacgtccaatggcggttgtggcttatccccggataccta

SEQ ID NO: 291420 - DNA, 55 bp, Artificial
  Synthetic oligonucleotide
ggctacgcgagacggcatcccctgccacgtcaccgatacaaccccagactcgccc

SEQ ID NO: 291421 - DNA, 55 bp, Artificial
  Synthetic oligonucleotide
ggctaccattggagtcccgataagccgatctgtagatacgactaaagttaaaccc

SEQ ID NO: 291422 - DNA, 55 bp, Artificial
  Synthetic oligonucleotide
ggctaatcttggtcgacagtctacgggtatgttgacggatatcttagcagtgcgc

SEQ ID NO: 291423 - DNA, 55 bp, Artificial
  Synthetic oligonucleotide
ggctaaactcccctccactaagcgtctttcgacacttatgcacgaactcttgcag

SEQ ID NO: 291424 - DNA, 55 bp, Artificial
  Synthetic oligonucleotide
ggcgtttcagatcagtgggtatctaatgtgtgcttgacgttctccgtttgattcc

SEQ ID NO: 291425 - DNA, 55 bp, Artificial
  Synthetic oligonucleotide
ggcgttatggaggagacgtgcgaagagggcgagagagcgcatggtacagctctcg

SEQ ID NO: 291426 - DNA, 55 bp, Artificial
  Synthetic oligonucleotide
ggcgttagcgaacaggcggtagcacacggcgttcacagcaccgtcacttgtgtcg

SEQ ID NO: 291427 - DNA, 58 bp, Artificial
  Synthetic oligonucleotide
acacgcacacgcacgggccctaacttgacaggaaagccgtgtctattgaagacgtcag

SEQ ID NO: 291428 - DNA, 55 bp, Artificial
  Synthetic oligonucleotide
ggcgtgtgcgacacacagactgactcgttcgtttgatctcgaagagacttgacga

SEQ ID NO: 291429 - DNA, 55 bp, Artificial
  Synthetic oligonucleotide
ggcgtggtaggaaagcactccactggaagctcgtacctgatcccacatagaagtc

SEQ ID NO: 291430 - DNA, 55 bp, Artificial
  Synthetic oligonucleotide
ggcgtgcgtgcctgttggatggacgtcctcctttactgcctctcgtccctctgag

SEQ ID NO: 291431 - DNA, 55 bp, Artificial
  Synthetic oligonucleotide
ggcgtgatcgtggagaggtggcctcttgtatgccctatatatgctcggaagcacg

SEQ ID NO: 291432 - DNA, 55 bp, Artificial
  Synthetic oligonucleotide
ggcgccgtcaatacgcagtgggccattccacccaacgtgctcctggaaggtacct

SEQ ID NO: 291433 - DNA, 55 bp, Artificial
  Synthetic oligonucleotide
ggcgcctgttctaaatcggttcgacgatatcctacagaggtacattgtccataat

SEQ ID NO: 291434 - DNA, 55 bp, Artificial
  Synthetic oligonucleotide
ggcgccttctctcatgttcgtgcagtctctggtgagcggacacacatgtgcggat

SEQ ID NO: 291435 - DNA, 55 bp, Artificial
  Synthetic oligonucleotide
ggcggaacgcagattgtgctgctgtgcgggtacaagtggagcgaccttgtgtgga

SEQ ID NO: 291436 - DNA, 55 bp, Artificial
  Synthetic oligonucleotide
ggcggagaggcactcacgcactgaaaagaacgcgtttatgcatgttcagcgagag

SEQ ID NO: 291437 - DNA, 55 bp, Artificial
  Synthetic oligonucleotide
ggcggatacaggggtgccatgtttgccgtcgtgtgggctctatttctcatggttg

SEQ ID NO: 291438 - DNA, 59 bp, Artificial
  Synthetic oligonucleotide
caactattctatatgaattctagtattctaactgctgcaaaccataaagaattaggtat

SEQ ID NO: 291439 - DNA, 55 bp, Artificial
  Synthetic oligonucleotide
ggcggccgagtggacagagagcacggtggtgtcttgtggcagagctagggacgga

SEQ ID NO: 291440 - DNA, 55 bp, Artificial
  Synthetic oligonucleotide
ggcggcgttggtacaactccgctactgcacgtcaaattcgttcacggcgactggg

SEQ ID NO: 291441 - DNA, 55 bp, Artificial
  Synthetic oligonucleotide
ggcggctcacgattgctagtatagcatcacgtcagagaacctcaatgcgccgtcc

SEQ ID NO: 291442 - DNA, 55 bp, Artificial
  Synthetic oligonucleotide
ggcgggattccacaaattctctttaggccgctacaactgtggaagaggtgccgta

SEQ ID NO: 291443 - DNA, 55 bp, Artificial
  Synthetic oligonucleotide
ggcgggcacacaagagagaggctaggatgcttctgagcacacatagcggtgcgag

SEQ ID NO: 291444 - DNA, 55 bp, Artificial
  Synthetic oligonucleotide
ggcggtctgctaagccaagccgtggtgggccgttacataccgctccgcacattca

SEQ ID NO: 291445 - DNA, 55 bp, Artificial
  Synthetic oligonucleotide
ggcggtgcccttctctctcattacgtctccttaacatcttgcgcgccagtcaacc

SEQ ID NO: 291446 - DNA, 55 bp, Artificial
  Synthetic oligonucleotide
ggcgtcaacatggatgccctcgctacaggggcagcagtcaatagtggcaccacac

SEQ ID NO: 291447 - DNA, 55 bp, Artificial
  Synthetic oligonucleotide
ggcgtcctcagagagtgggtgcgggaccctgtataccacacaccgaggtgcgtgt

SEQ ID NO: 291448 - DNA, 55 bp, Artificial
  Synthetic oligonucleotide
caactccacagattgctacgcaaagcatccaaaggccaaaacatatgacaacaag

SEQ ID NO: 291449 - DNA, 60 bp, Artificial
  Synthetic oligonucleotide
cagccatattggttcagctactagttcactgtcagctaccatgtttcgacttcgcaccga

SEQ ID NO: 291450 - DNA, 55 bp, Artificial
  Synthetic oligonucleotide
caactccactgggataggcacctggaaaggagaagcctgtaaggtccgtgacccc

SEQ ID NO: 291451 - DNA, 55 bp, Artificial
  Synthetic oligonucleotide
caactcgctgtcctcacctgcgtgatcgtcaaggtctcgtacaggtcacagagcg

SEQ ID NO: 291452 - DNA, 55 bp, Artificial
  Synthetic oligonucleotide
caactgctaatgttttccggtggacatcacaagaaaggcaggtctcgcatgccct

SEQ ID NO: 291453 - DNA, 55 bp, Artificial
  Synthetic oligonucleotide
caacttgggcagttcgaaccatgggctgtacctcagcgagaacgtgcactccctc

SEQ ID NO: 291454 - DNA, 55 bp, Artificial
  Synthetic oligonucleotide
caagaaccagttacaacacaagaaccagttacaacacaagaaccagttacaacac

SEQ ID NO: 291455 - DNA, 55 bp, Artificial
  Synthetic oligonucleotide
caagaacctgtgacaccacaagaacctgtgacaccacaagaacctgtgacaccac

SEQ ID NO: 291456 - DNA, 55 bp, Artificial
  Synthetic oligonucleotide
caagacacaacactcactggtgtggcacacacgaacctaccataaggtgccacaa

SEQ ID NO: 291457 - DNA, 55 bp, Artificial
  Synthetic oligonucleotide
caagatcgcggactacgcacaaaccaaacacaagatagcccaagcaggtgcaacg

SEQ ID NO: 291458 - DNA, 55 bp, Artificial
  Synthetic oligonucleotide
caagcagtattcaggcgaagagcaagagtggcaaccctcgtctcggcagaccggc

SEQ ID NO: 291459 - DNA, 55 bp, Artificial
  Synthetic oligonucleotide
caaaccgctgtccccatcacctcagacgttagaagatcccaccgggagtgtcaag

SEQ ID NO: 291460 - DNA, 57 bp, Artificial
  Synthetic oligonucleotide
gtatttatagaagataccatactagatctttagtagaggtaaatggaattttacata

SEQ ID NO: 291461 - DNA, 55 bp, Artificial
  Synthetic oligonucleotide
caagcgacagatctcaggcgttgcatgtgcataccgagaggaggcagaccgtgcg

SEQ ID NO: 291462 - DNA, 55 bp, Artificial
  Synthetic oligonucleotide
caagcgcgcagccaaggatctatctggaggaatgttgcgacggctagccctggca

SEQ ID NO: 291463 - DNA, 55 bp, Artificial
  Synthetic oligonucleotide
caagctatcctacacaggtaaatgcagacagaagtagcgaaagggactggggcaa

SEQ ID NO: 291464 - DNA, 55 bp, Artificial
  Synthetic oligonucleotide
caagctcatgcgcctcgcataaaagccggtgtctcctacagaggacgcaaaccat

SEQ ID NO: 291465 - DNA, 55 bp, Artificial
  Synthetic oligonucleotide
caagctcgtcacagcgaccctagggcatgtcagcaagcgggtcgttgcctggcag

SEQ ID NO: 291466 - DNA, 55 bp, Artificial
  Synthetic oligonucleotide
caagcttcctgacatgctgatgtccacagggataaacttccagcggcctcactgc

SEQ ID NO: 291467 - DNA, 55 bp, Artificial
  Synthetic oligonucleotide
caaggcaggagacggtacgactacttctactgttttaacgcaagcgattatatcc

SEQ ID NO: 291468 - DNA, 55 bp, Artificial
  Synthetic oligonucleotide
caaggcgagttagctacacgcgcactgaaacgtaagtgatcggagcaactgaaac

SEQ ID NO: 291469 - DNA, 55 bp, Artificial
  Synthetic oligonucleotide
caagggaaaagacgccagagccacagacgtaggagtcgactgtacacctgcgggg

SEQ ID NO: 291470 - DNA, 55 bp, Artificial
  Synthetic oligonucleotide
caagggtctctctcggagtcatgcaagtcataccgaagtcaatcaaagcccagtc

SEQ ID NO: 291471 - DNA, 57 bp, Artificial
  Synthetic oligonucleotide
gtatttaaaacgtcagagatttgaagataggcttctacatttaattcagctagtaaa

SEQ ID NO: 291472 - DNA, 55 bp, Artificial
  Synthetic oligonucleotide
caagtaaatacacaccgacagacacagtcacaaagcattagtacaacgaggagga

SEQ ID NO: 291473 - DNA, 55 bp, Artificial
  Synthetic oligonucleotide
caagtacacgtttctagtcccctacgtgaagaacagcgcgtctgacctagtggag

SEQ ID NO: 291474 - DNA, 55 bp, Artificial
  Synthetic oligonucleotide
caagtatcggtcctggactggcgtgacctggcagcgcaggcacgtgacgatgttc

SEQ ID NO: 291475 - DNA, 55 bp, Artificial
  Synthetic oligonucleotide
caagtctgccaaaacgcaaacggtgcgagacatccagacacgtgagcaagcggca

SEQ ID NO: 291476 - DNA, 55 bp, Artificial
  Synthetic oligonucleotide
caagtgcgtgcgcacaagtctctgtacaagaattcggattcgcacaagcctatcc

SEQ ID NO: 291477 - DNA, 55 bp, Artificial
  Synthetic oligonucleotide
caagtggagaaagcaccgcgctgagtagcatcagggatcgcactattgcgctgag

SEQ ID NO: 291478 - DNA, 55 bp, Artificial
  Synthetic oligonucleotide
caagtggtgaggtggttgtgcgaggcattcaacgcgggagcagcgatgtcgcagg

SEQ ID NO: 291479 - DNA, 55 bp, Artificial
  Synthetic oligonucleotide
caagtgtcgtgttgcgaggcctgtacgcaatatcgtacactgcaacgccgtcccc

SEQ ID NO: 291480 - DNA, 55 bp, Artificial
  Synthetic oligonucleotide
caagttgccaatcagctgttacagcgataattcgaaatcgagctagtgcctaccg

SEQ ID NO: 291481 - DNA, 55 bp, Artificial
  Synthetic oligonucleotide
caaacaaacggcaacgaatgggaggactacttccgctctctcacatgctgacagg

SEQ ID NO: 291482 - DNA, 60 bp, Artificial
  Synthetic oligonucleotide
gtattacctatgttagaatcatacactctagtatactggcattttgtagaagctatctgg

SEQ ID NO: 291483 - DNA, 55 bp, Artificial
  Synthetic oligonucleotide
caaaccgagaacgagcgaaccgacagcaaatgaaacactgacgatactgtgccta

SEQ ID NO: 291484 - DNA, 55 bp, Artificial
  Synthetic oligonucleotide
caaacgagtccagtcgccatcgaagatctttgtgagcctgtgtgttaccttctgc

SEQ ID NO: 291485 - DNA, 55 bp, Artificial
  Synthetic oligonucleotide
caaacgtgcggagcgcatgcagtttgtgtggttcctctatgtgcattaaacagca

SEQ ID NO: 291486 - DNA, 55 bp, Artificial
  Synthetic oligonucleotide
caaacgtggaaccggcgtccatttacactgcaccaaagcaccgtctgatggtctc

SEQ ID NO: 291487 - DNA, 55 bp, Artificial
  Synthetic oligonucleotide
caaactcacacgtcaactgtcggcgctgtgtatgggtacaatttcatgtgatatg

SEQ ID NO: 291488 - DNA, 55 bp, Artificial
  Synthetic oligonucleotide
caaacttcatgagaagtcaattcgaagagcggaagggcattacctcgcacgcacg

SEQ ID NO: 291489 - DNA, 55 bp, Artificial
  Synthetic oligonucleotide
caaagcatagattccatagagcaaaactataacccacagtacagggccatgaccc

SEQ ID NO: 291490 - DNA, 55 bp, Artificial
  Synthetic oligonucleotide
caaaggacgaaaccgcaatactcttagtctcatcagatatgaatgaccatgatgg

SEQ ID NO: 291491 - DNA, 55 bp, Artificial
  Synthetic oligonucleotide
caaagtcattccttagctcacaaatatctataactctctcccatgaatcctggtc

SEQ ID NO: 291492 - DNA, 55 bp, Artificial
  Synthetic oligonucleotide
caaatcctaatgttggtttagatagtgaagcgttagctttagcaactcctccgcg

SEQ ID NO: 291493 - DNA, 55 bp, Artificial
  Synthetic oligonucleotide
caactggtactaaagtatttaattggatatgtacatatatgggtagtaattttgg

SEQ ID NO: 291494 - DNA, 55 bp, Artificial
  Synthetic oligonucleotide
caaattctgaggtaatgaatgaaacaggtgttcatgtatattgccgtgtaagacc

SEQ ID NO: 291495 - DNA, 55 bp, Artificial
  Synthetic oligonucleotide
caacaacaacgctagcaacgagaagaggatgaggcgcatgcagctgtttggggtg

SEQ ID NO: 291496 - DNA, 55 bp, Artificial
  Synthetic oligonucleotide
caacaactcgcaagaggggtggcccgaagcacagtcttcaggtagaggcgactag

SEQ ID NO: 291497 - DNA, 55 bp, Artificial
  Synthetic oligonucleotide
caacaagactcgccagagcagcattacttcgtcgctgatcgagattatctcagcc

SEQ ID NO: 291498 - DNA, 55 bp, Artificial
  Synthetic oligonucleotide
caacacaagaaccagttacaacacaagaaccagttacaacacaagaaccagtcgt

SEQ ID NO: 291499 - DNA, 55 bp, Artificial
  Synthetic oligonucleotide
caacacaatggagctgttcgagagggttttcgactgccttgcatatgaggagtcc

SEQ ID NO: 291500 - DNA, 55 bp, Artificial
  Synthetic oligonucleotide
caacaggttgcgccttacgcgtgcgaatgttccgcatcggtggttgagcattgcg

SEQ ID NO: 291501 - DNA, 55 bp, Artificial
  Synthetic oligonucleotide
caaccatggtcaaacagctctcatgtgggtggcggggtatagtcccatagaggcg

SEQ ID NO: 291502 - DNA, 55 bp, Artificial
  Synthetic oligonucleotide
caaccgctcccgtagtgatgcggcctatcgcgcattaaaacgtagatccacatcc

SEQ ID NO: 291503 - DNA, 55 bp, Artificial
  Synthetic oligonucleotide
caacgagacgtgacactcgcccgtgctgaacaagcacacaacaccgtagcttctg

SEQ ID NO: 291504 - DNA, 59 bp, Artificial
  Synthetic oligonucleotide
gtatgattgacatttaaccactaattacgaatcatccaagaattgtttaccattctcag

SEQ ID NO: 291505 - DNA, 55 bp, Artificial
  Synthetic oligonucleotide
caacgcccctcgccgaggactctcctctctcacttatcaaaccgaacaggtgcga

SEQ ID NO: 291506 - DNA, 55 bp, Artificial
  Synthetic oligonucleotide
caacgcccctgttcaacacacccttgtcagcgctagcactttcaaccacgtctcc

SEQ ID NO: 291507 - DNA, 55 bp, Artificial
  Synthetic oligonucleotide
caacgcgcatacgccgacatgcgtgtgtaacggccatcgctaactcggtccaacc

SEQ ID NO: 291508 - DNA, 55 bp, Artificial
  Synthetic oligonucleotide
caacgctcgcaggagggtgttgcccgtggcctaagcgagagagaggcgagtacat

SEQ ID NO: 291509 - DNA, 55 bp, Artificial
  Synthetic oligonucleotide
caacgtagccggcgtgcgcatccaagtaccgagtcagccccgcatcgctgtggat

SEQ ID NO: 291510 - DNA, 55 bp, Artificial
  Synthetic oligonucleotide
caactacacatcttgtcaaacaacctcttatgatgaagagccattttcgttgtca

SEQ ID NO: 291511 - DNA, 55 bp, Artificial
  Synthetic oligonucleotide
caactagacatgctaatgtaaatgtgggacagctcgggaggtttcaaccctaagc

SEQ ID NO: 291512 - DNA, 55 bp, Artificial
  Synthetic oligonucleotide
caactatacaggcaggctacacaaacttcccaccgcgcttgacggagaagttgtg

SEQ ID NO: 291513 - DNA, 55 bp, Artificial
  Synthetic oligonucleotide
cacacgtctacccgctgtgagaatcgacgcgctttcttgtggccaagagtactag

SEQ ID NO: 291514 - DNA, 55 bp, Artificial
  Synthetic oligonucleotide
cacactagagaacgcacggtaatggtacacgagtagaagtgagtggggcgcggtg

SEQ ID NO: 291515 - DNA, 58 bp, Artificial
  Synthetic oligonucleotide
tacatgagttaagtacaaaaataggggactaccgaactatatatgaggtatagacata

SEQ ID NO: 291516 - DNA, 58 bp, Artificial
  Synthetic oligonucleotide
gtatctattataaaccagaacttctttaacttgccaactccctgtcatgtcttgctaa

SEQ ID NO: 291517 - DNA, 55 bp, Artificial
  Synthetic oligonucleotide
cacactcaaccttgaattgtgtgatatgaccgatgcttcatgtcttgctaatatc

SEQ ID NO: 291518 - DNA, 55 bp, Artificial
  Synthetic oligonucleotide
cacagaagatgtcgcaacgcatccacctttgagtactcagctgggtccgtctggg

SEQ ID NO: 291519 - DNA, 55 bp, Artificial
  Synthetic oligonucleotide
cacagactgcagtttataggtctcggtaacagtttacacagcatgtcgtgctcag

SEQ ID NO: 291520 - DNA, 55 bp, Artificial
  Synthetic oligonucleotide
cacagagcatgtcgtgcaaatgcagccctccttcgcacgctgacacgttgtgcag

SEQ ID NO: 291521 - DNA, 55 bp, Artificial
  Synthetic oligonucleotide
cacagaggcgcctccctcttccgccttatgcgaagtggcgagcggcacagacttt

SEQ ID NO: 291522 - DNA, 55 bp, Artificial
  Synthetic oligonucleotide
cacagaggtacggagaagctaattgagtacaaaacttacattcaagcactgcctt

SEQ ID NO: 291523 - DNA, 55 bp, Artificial
  Synthetic oligonucleotide
cacagattcgagcgttatcatggggtcaatacatgagcataactgcaaaatggac

SEQ ID NO: 291524 - DNA, 55 bp, Artificial
  Synthetic oligonucleotide
cacagcgcgcctctagaccggtacacacaccttagccgtgggtagtgttatcggt

SEQ ID NO: 291525 - DNA, 55 bp, Artificial
  Synthetic oligonucleotide
cacagctgcacacatgcggtcagaaaagtagaatgtagcgaggtgcattcagatc

SEQ ID NO: 291526 - DNA, 54 bp, Artificial
  Synthetic oligonucleotide
cacaggtcttactttaacttactaaggtcagacttcgacttatataggtcttac

SEQ ID NO: 291527 - DNA, 55 bp, Artificial
  Synthetic oligonucleotide
cagtgacttgtgttgtaaccttacagacgcttccagtaatttaatttcttataaa

SEQ ID NO: 291528 - DNA, 55 bp, Artificial
  Synthetic oligonucleotide
cacatccgcttacggagagtacgcgcgaacgcagttgcctggtgctaccgcagag

SEQ ID NO: 291529 - DNA, 55 bp, Artificial
  Synthetic oligonucleotide
cacatcgcgcaccaggtttcgctagtgctgctagaatacgtggaaacgagcagct

SEQ ID NO: 291530 - DNA, 55 bp, Artificial
  Synthetic oligonucleotide
cacatcgttggagagtgtcagcacccggagatatacttttctcgctttgcagtgt

SEQ ID NO: 291531 - DNA, 55 bp, Artificial
  Synthetic oligonucleotide
cacatgagcgatcataaccacatgagcgatcataaccacaagagcgatcataacc

SEQ ID NO: 291532 - DNA, 55 bp, Artificial
  Synthetic oligonucleotide
cacatgcacattgtcagactgaatgttattcacacgaaattgtgtcgttctacgt

SEQ ID NO: 291533 - DNA, 55 bp, Artificial
  Synthetic oligonucleotide
cacatgcagcgcaccgtactgtgttgtaggtgcctctttccttccccgtttcgta

SEQ ID NO: 291534 - DNA, 55 bp, Artificial
  Synthetic oligonucleotide
cacattatcaggcgccgagtcgtccaggattaaggctgtgcgctcctcaaattga

SEQ ID NO: 291535 - DNA, 55 bp, Artificial
  Synthetic oligonucleotide
cacattctcgtaggaagaacgccggagggttgaagggcacgcttcccgatcgctg

SEQ ID NO: 291536 - DNA, 55 bp, Artificial
  Synthetic oligonucleotide
caccacaacatacgtatgcgcagtgaggtatacgatagcggtggggaacactaac

SEQ ID NO: 291537 - DNA, 55 bp, Artificial
  Synthetic oligonucleotide
caccacatgtgttgtattaccacgaagcagtgtttatctaacacttggttttagg

SEQ ID NO: 291538 - DNA, 55 bp, Artificial
  Synthetic oligonucleotide
cagtcggttggtaaggaaacgtcgtttagcgagccactgccctcgccagaggcct

SEQ ID NO: 291539 - DNA, 55 bp, Artificial
  Synthetic oligonucleotide
caccacggatgcactaattccggcgtgcctcatgtctgccaccgcggctggcatg

SEQ ID NO: 291540 - DNA, 55 bp, Artificial
  Synthetic oligonucleotide
caccactcctacattgatctcccacatccgatactaaacccgttcaagccgtaca

SEQ ID NO: 291541 - DNA, 55 bp, Artificial
  Synthetic oligonucleotide
caccaggccagtgagaattctgtcgctgattcgaaaagtccatacgcgcgctaat

SEQ ID NO: 291542 - DNA, 51 bp, Artificial
  Synthetic oligonucleotide
caccattgggcgtcacgataaaagtcaaagaaccaaaaccttggtttaatt

SEQ ID NO: 291543 - DNA, 55 bp, Artificial
  Synthetic oligonucleotide
caccatttaggtggtttatttggtactagttcattagcatggactggtcacatag

SEQ ID NO: 291544 - DNA, 55 bp, Artificial
  Synthetic oligonucleotide
cacccacaaatgctactacatccaactgcaatgttgttgtgactctcacgcctgg

SEQ ID NO: 291545 - DNA, 55 bp, Artificial
  Synthetic oligonucleotide
cacccagccacatacgcaacaatacaaaacgccctggcaaacgtgggaaagctcg

SEQ ID NO: 291546 - DNA, 55 bp, Artificial
  Synthetic oligonucleotide
caccccatgcctagtctgctcgccgttgtttgatgtatgagtcccatgacacaga

SEQ ID NO: 291547 - DNA, 55 bp, Artificial
  Synthetic oligonucleotide
caagtttgagactgcctctaggtccatgccagttgctacttgacacacagctaag

SEQ ID NO: 291548 - DNA, 55 bp, Artificial
  Synthetic oligonucleotide
caagtttgccgcgaggctgcaaccggaggattctcttgcggagcgaacccgggac

SEQ ID NO: 291549 - DNA, 56 bp, Artificial
  Synthetic oligonucleotide
aattaatttttcggttccacgatgtaataaaccgatatgtggatccgcacgctcaa

SEQ ID NO: 291550 - DNA, 55 bp, Artificial
  Synthetic oligonucleotide
caataaatcttctacggcatacaaaacgtttcgctaccgagttactcgccgcttc

SEQ ID NO: 291551 - DNA, 55 bp, Artificial
  Synthetic oligonucleotide
caatacgtatgctacccattttgacggcgcactaaacgagtatattaacctaagg

SEQ ID NO: 291552 - DNA, 55 bp, Artificial
  Synthetic oligonucleotide
caatcagttccttcagcagttttgcttcaatcagcgacaattctatgcctcctgt

SEQ ID NO: 291553 - DNA, 55 bp, Artificial
  Synthetic oligonucleotide
caatctaagcatcgttagcggatattattcgttgtggggatcagggcagcgtgtc

SEQ ID NO: 291554 - DNA, 55 bp, Artificial
  Synthetic oligonucleotide
caatctctgaagtatacactgtctgtcaccgggtaaaacacggaggtacccaaag

SEQ ID NO: 291555 - DNA, 55 bp, Artificial
  Synthetic oligonucleotide
caatctgtagataagctactccactgtccctaggaacgtcaaacagctcgcttgc

SEQ ID NO: 291556 - DNA, 55 bp, Artificial
  Synthetic oligonucleotide
caatgcacgaggtggtgacgtctgtcgtgcgggtaatgggtcgcctgggtgcacg

SEQ ID NO: 291557 - DNA, 55 bp, Artificial
  Synthetic oligonucleotide
caatggattctatggtagtaaaggcttgagtagtgcagtacccgactgttatgca

SEQ ID NO: 291558 - DNA, 55 bp, Artificial
  Synthetic oligonucleotide
caatgtcctctacccagccatctaccttggcggggttccactgttcgcccgctag

SEQ ID NO: 291559 - DNA, 55 bp, Artificial
  Synthetic oligonucleotide
caatgtgtgcgaatcctgtaatacactgcattccacgctcaaggagagccgtcac

SEQ ID NO: 291560 - DNA, 52 bp, Artificial
  Synthetic oligonucleotide
aattaccccttctcgtgggtccgtgtaccaatccttaaactcctccacagaa

SEQ ID NO: 291561 - DNA, 55 bp, Artificial
  Synthetic oligonucleotide
caattatcgaacacggaatgtgcgagtccgaaggtttgccaagcgcgcattcgtc

SEQ ID NO: 291562 - DNA, 55 bp, Artificial
  Synthetic oligonucleotide
caattcatgtttccgacgctttgttgttccatgcagtccgtccggtaagtgcaaa

SEQ ID NO: 291563 - DNA, 55 bp, Artificial
  Synthetic oligonucleotide
caattcgcctctcgtttcctctattgcctctcctccatacccgacctctcgcgcc

SEQ ID NO: 291564 - DNA, 55 bp, Artificial
  Synthetic oligonucleotide
caattgaatcaacggctccttatgtaagtcatggtacaagtcctgcttggggtgg

SEQ ID NO: 291565 - DNA, 55 bp, Artificial
  Synthetic oligonucleotide
caatttaggtgactcctgaggtgacggacttgaattatttgactgcggagacggg

SEQ ID NO: 291566 - DNA, 55 bp, Artificial
  Synthetic oligonucleotide
caatttgcacgtccaatttgtggggctatttgtgtaatagcggctgcaagtgatg

SEQ ID NO: 291567 - DNA, 55 bp, Artificial
  Synthetic oligonucleotide
caattttccaacaatagagcttcacatcccatatatagctgagtaacgcccaggc

SEQ ID NO: 291568 - DNA, 55 bp, Artificial
  Synthetic oligonucleotide
cacaaaacgtgacgggtttccctttacgagatccagtaagtatgcagcctgccta

SEQ ID NO: 291569 - DNA, 55 bp, Artificial
  Synthetic oligonucleotide
cacaaagagactaacgaacatgttagtgttatgcgtgcaaacccaaactgacgag

SEQ ID NO: 291570 - DNA, 55 bp, Artificial
  Synthetic oligonucleotide
cacaacgcggtcagtttgaggaataatagagtcgacaaccctgtaaagctcctcc

SEQ ID NO: 291571 - DNA, 53 bp, Artificial
  Synthetic oligonucleotide
aattacgaatcttccaagaatatttcaagagtccaaggttcggtctattaatt

SEQ ID NO: 291572 - DNA, 55 bp, Artificial
  Synthetic oligonucleotide
cacaagccagggtggcacagcatgccgcacacgtgttggtcgcaatcgcgcttct

SEQ ID NO: 291573 - DNA, 55 bp, Artificial
  Synthetic oligonucleotide
cacaagtggcagagttgtgccccgtagtagatgtgacacaggagtgaagtgactg

SEQ ID NO: 291574 - DNA, 55 bp, Artificial
  Synthetic oligonucleotide
cacaataagtcgcaccaatatgcacaataagtcgcaccaatatgcacacaatttt

SEQ ID NO: 291575 - DNA, 55 bp, Artificial
  Synthetic oligonucleotide
cacaatgtgtctacgcctgtacgtgcacacaccgtggtaggcaacagacctacac

SEQ ID NO: 291576 - DNA, 55 bp, Artificial
  Synthetic oligonucleotide
cacacaactcaagtaggtctatataagggctagacacgcacgcacctgttgcccg

SEQ ID NO: 291577 - DNA, 55 bp, Artificial
  Synthetic oligonucleotide
cacaccccacttctgcacaaccgatcgtagcaagacaagggtcgagtagcgacgc

SEQ ID NO: 291578 - DNA, 55 bp, Artificial
  Synthetic oligonucleotide
cacacgagtatcctgtaatgcatgtgagtgcgtcgtgttttgtcccagattcggg

SEQ ID NO: 291579 - DNA, 55 bp, Artificial
  Synthetic oligonucleotide
cacacgccatacgttcatgtatgccaaacgagtataggctttcgaggaggcacct

SEQ ID NO: 291580 - DNA, 55 bp, Artificial
  Synthetic oligonucleotide
cacacgctagttatccttcgtcattaattcaatcctccctcgattccggtacatt

SEQ ID NO: 291581 - DNA, 55 bp, Artificial
  Synthetic oligonucleotide
atatactgagcgcgccgtaatgaaggggcgccttcggcgcgacagtgtcctaggg

SEQ ID NO: 291582 - DNA, 58 bp, Artificial
  Synthetic oligonucleotide
aattcactttactttctatactctataagaatgggatctcgtaaacatgcgaactcac

SEQ ID NO: 291583 - DNA, 55 bp, Artificial
  Synthetic oligonucleotide
atatccagagggacacccctcacactctgcgtagtacctcggcgcccagtacacc

SEQ ID NO: 291584 - DNA, 55 bp, Artificial
  Synthetic oligonucleotide
atatgcacattggcgttttcacccgttctagcctgtggcaccttcccgcgagccg

SEQ ID NO: 291585 - DNA, 55 bp, Artificial
  Synthetic oligonucleotide
atattcacagattcacgtaggaacacgtataaacgtgcgtgtctatgttcgcagc

SEQ ID NO: 291586 - DNA, 55 bp, Artificial
  Synthetic oligonucleotide
atcaatgagagaattcatgctaccgtttacacactctccacgattgtacccctta

SEQ ID NO: 291587 - DNA, 55 bp, Artificial
  Synthetic oligonucleotide
atcaccatgtggaccgttcgcccttcactgcttaaaccgcgctgtataattgact

SEQ ID NO: 291588 - DNA, 55 bp, Artificial
  Synthetic oligonucleotide
atcacctagcggtatacgcggagacagccgcgttgcgagaggtttcgcacagcgg

SEQ ID NO: 291589 - DNA, 55 bp, Artificial
  Synthetic oligonucleotide
atcacgacgtatgagtagtagacgcatgcgtgcttaggcgcatacatggctgcca

SEQ ID NO: 291590 - DNA, 55 bp, Artificial
  Synthetic oligonucleotide
atcagtgctcacgacaggggcggtactagctggcaatgcgaccgcgagcctgaga

SEQ ID NO: 291591 - DNA, 55 bp, Artificial
  Synthetic oligonucleotide
atcatactagccgaccatctatgcattgagcggaatagccaaccatagttcactt

SEQ ID NO: 291592 - DNA, 55 bp, Artificial
  Synthetic oligonucleotide
atcatcatacagtaaccgcagcacgcaaatgttcacgagcaaggccacgcacatc

SEQ ID NO: 291593 - DNA, 59 bp, Artificial
  Synthetic oligonucleotide
ggcacggactctcgacgagtccagcaatttttgaacaaatgtagtagataacaggacgc

SEQ ID NO: 291594 - DNA, 55 bp, Artificial
  Synthetic oligonucleotide
atccacgcagagtcttgcagtcaacgcggaggtccgtcactccgcgactcagctg

SEQ ID NO: 291595 - DNA, 55 bp, Artificial
  Synthetic oligonucleotide
atccactccgcaaactctaaatgatttggaatggtagcggacaagaacactagtc

SEQ ID NO: 291596 - DNA, 55 bp, Artificial
  Synthetic oligonucleotide
atccatatctccgcgtgttttacacacactggatccatgtgcttcggggcgcttg

SEQ ID NO: 291597 - DNA, 55 bp, Artificial
  Synthetic oligonucleotide
atccccaatcattagcaatcgctttagctgttagtgattttccggttccctgcac

SEQ ID NO: 291598 - DNA, 52 bp, Artificial
  Synthetic oligonucleotide
atccggttttatccctggattgattccgagttgtttgacgcggggtggagtt

SEQ ID NO: 291599 - DNA, 55 bp, Artificial
  Synthetic oligonucleotide
atccgttatttgcggcaatcacgaatagtgttggttagttattgagcgccaacgt

SEQ ID NO: 291600 - DNA, 55 bp, Artificial
  Synthetic oligonucleotide
atcctcacagataatgcgcgtatgaagaacgcggcttactaacgagaggccagga

SEQ ID NO: 291601 - DNA, 54 bp, Artificial
  Synthetic oligonucleotide
atcctccgtttgccctattctgaactacgttgttcctttattcctcgcaaaagc

SEQ ID NO: 291602 - DNA, 55 bp, Artificial
  Synthetic oligonucleotide
atcgatgcccttccaagtgtacagcccatgtatccgcgtcagcgctcctgctgac

SEQ ID NO: 291603 - DNA, 55 bp, Artificial
  Synthetic oligonucleotide
atcgcgttgccttccccttacactcccgggttgagcggtgcacccacaaacagcc

SEQ ID NO: 291604 - DNA, 54 bp, Artificial
  Synthetic oligonucleotide
aattcgtacttccactaccagaatattctctcatgttccaaattctaggttttt

SEQ ID NO: 291605 - DNA, 55 bp, Artificial
  Synthetic oligonucleotide
atcggaggttccatatgctctgattgcggccctgtcaccgccatagattcgccat

SEQ ID NO: 291606 - DNA, 55 bp, Artificial
  Synthetic oligonucleotide
atcggctcctcagtgcgcccgtgtgccttgctcaagtgagagacacgcttcggac

SEQ ID NO: 291607 - DNA, 55 bp, Artificial
  Synthetic oligonucleotide
atcggtcgctagatacctgaccagctgatcactaaaggttaccgcgaacgagcga

SEQ ID NO: 291608 - DNA, 55 bp, Artificial
  Synthetic oligonucleotide
atcgtgacggtaatcccgctatccagggcgtgtatcgtcgtgggccccacaaacg

SEQ ID NO: 291609 - DNA, 55 bp, Artificial
  Synthetic oligonucleotide
atctaagttgtggaaatcaggaccattgtaggagttagcaagtctgtcgtatctg

SEQ ID NO: 291610 - DNA, 55 bp, Artificial
  Synthetic oligonucleotide
atctccgtcttataagcaataacgtgagccacggcacggtagcacaagggacggc

SEQ ID NO: 291611 - DNA, 55 bp, Artificial
  Synthetic oligonucleotide
atctggcgcgtccgcgagtagtgtgttgcgtgcgagccctcttcttacgggttgg

SEQ ID NO: 291612 - DNA, 55 bp, Artificial
  Synthetic oligonucleotide
atcttcaggagtacctggcttacgaaggcgttcaggaagaggacccgacgtctct

SEQ ID NO: 291613 - DNA, 55 bp, Artificial
  Synthetic oligonucleotide
atgaagcaccacgtgtactggtccgacacatgcacggcgatctgagggcgaggtc

SEQ ID NO: 291614 - DNA, 55 bp, Artificial
  Synthetic oligonucleotide
agtggggcgcggggcacaatgcgtgacttcttgagtgagaccgttttaagtgggc

SEQ ID NO: 291615 - DNA, 56 bp, Artificial
  Synthetic oligonucleotide
aattctagtattctaactgccgcaaaccataaagaattaggtatttactatgtatg

SEQ ID NO: 291616 - DNA, 55 bp, Artificial
  Synthetic oligonucleotide
agtggtcataataatttaaccacgtgtatgtcgtacgaaccatcaatacgtctca

SEQ ID NO: 291617 - DNA, 55 bp, Artificial
  Synthetic oligonucleotide
agtgtcgtgcaagtgcgcctgccaatttaaatctttcctgtgcataattccctcg

SEQ ID NO: 291618 - DNA, 55 bp, Artificial
  Synthetic oligonucleotide
agtgtctcagagctccgaaattctgagaagctttcaacattgagccaaagcaagt

SEQ ID NO: 291619 - DNA, 51 bp, Artificial
  Synthetic oligonucleotide
agttagaggaaaacaactgttggttgcgtagtggggcctattggggtcggg

SEQ ID NO: 291620 - DNA, 55 bp, Artificial
  Synthetic oligonucleotide
agttattgtgtatatatcatggggcggtccattaggtataacagaagctctatcg

SEQ ID NO: 291621 - DNA, 55 bp, Artificial
  Synthetic oligonucleotide
agttcaactatacaggcaggctacacaagcttcccaccgcgcttgacggagaggt

SEQ ID NO: 291622 - DNA, 55 bp, Artificial
  Synthetic oligonucleotide
agttgacgacgacgagggttcgacatacatgtctcggcaggggccggtggcagac

SEQ ID NO: 291623 - DNA, 55 bp, Artificial
  Synthetic oligonucleotide
agttgactctccacggtgtctcgaccaaccaatgtgcatgcagacgatgggttgg

SEQ ID NO: 291624 - DNA, 55 bp, Artificial
  Synthetic oligonucleotide
agttgtggcaccgagttgcaacacaaccaacgaccctgcaacgcaagcatcgctg

SEQ ID NO: 291625 - DNA, 55 bp, Artificial
  Synthetic oligonucleotide
agtttccaagcttcgggcccactccgctcgcagaagggtgcacctccgcagcaaa

SEQ ID NO: 291626 - DNA, 58 bp, Artificial
  Synthetic oligonucleotide
gcttatccaagaattaacagtatatcactattattacaacctattgcttttggattag

SEQ ID NO: 291627 - DNA, 60 bp, Artificial
  Synthetic oligonucleotide
aattgagtaaattgatcgaatctataccttggtagagtacctctagttgcaatagctaca

SEQ ID NO: 291628 - DNA, 55 bp, Artificial
  Synthetic oligonucleotide
agtttgccatccgataagtctatacccggggtcttcacaacgtgtgattctcccc

SEQ ID NO: 291629 - DNA, 55 bp, Artificial
  Synthetic oligonucleotide
ataaatcggcgtccatcgcaaggcggggacgacagtggggtcgacgtgtcaggca

SEQ ID NO: 291630 - DNA, 54 bp, Artificial
  Synthetic oligonucleotide
ataaccaatgaccatcgccactactaattaaaacgggtccttctctacccacta

SEQ ID NO: 291631 - DNA, 51 bp, Artificial
  Synthetic oligonucleotide
ataaccggttgtaagggaactcaatcttctactattttgttattcggtcct

SEQ ID NO: 291632 - DNA, 55 bp, Artificial
  Synthetic oligonucleotide
ataactttgcttaaggttgctcttcttgccctaactattccaacggatagtgctc

SEQ ID NO: 291633 - DNA, 55 bp, Artificial
  Synthetic oligonucleotide
ataagcctgcaacagcacaccagtataattcaacttcactcgtaataccttcagc

SEQ ID NO: 291634 - DNA, 55 bp, Artificial
  Synthetic oligonucleotide
atacactttcaaggtcatacgggtctgtggatctggtaattgaaatattcggagt

SEQ ID NO: 291635 - DNA, 55 bp, Artificial
  Synthetic oligonucleotide
ataccgtgtgattttcggagagtatcggacacccgtacttcggggtctctctgcg

SEQ ID NO: 291636 - DNA, 55 bp, Artificial
  Synthetic oligonucleotide
atacgcactcaggctctacggatggcttggacgacgtcagggtagcgactggaga

SEQ ID NO: 291637 - DNA, 55 bp, Artificial
  Synthetic oligonucleotide
atacggtggcgtgtttgggcacggacgagactgcgaagccaccctatccttccgc

SEQ ID NO: 291638 - DNA, 58 bp, Artificial
  Synthetic oligonucleotide
gtctatttacttggtctattgtatttacagccatcatgttaattggtacattaccaat

SEQ ID NO: 291639 - DNA, 55 bp, Artificial
  Synthetic oligonucleotide
atacttgagtcgtgcgcctcttgagattgattgtgagattctgaggatgtatgtc

SEQ ID NO: 291640 - DNA, 55 bp, Artificial
  Synthetic oligonucleotide
atagagttacgggcttgaatgacctcgactcgtgtacgactcctctgagagagcg

SEQ ID NO: 291641 - DNA, 55 bp, Artificial
  Synthetic oligonucleotide
atagcacaggtccatcggtaagtagctcatcaccatctcgagatatgcaaacgct

SEQ ID NO: 291642 - DNA, 55 bp, Artificial
  Synthetic oligonucleotide
atagctggttgggcaagcaattcgagatacgcatttcttggtgcgttacgttcag

SEQ ID NO: 291643 - DNA, 55 bp, Artificial
  Synthetic oligonucleotide
atagggttagcaccatttcatggctgggttattgatacttatgaaggaacaggcc

SEQ ID NO: 291644 - DNA, 55 bp, Artificial
  Synthetic oligonucleotide
atagtacttaccgagagcacgaaatacccacgtgtacgtgacggcgtctggactg

SEQ ID NO: 291645 - DNA, 55 bp, Artificial
  Synthetic oligonucleotide
atataccctaaaattgcataactgggaaggcatagtaaaatagggcaagcacggc

SEQ ID NO: 291646 - DNA, 55 bp, Artificial
  Synthetic oligonucleotide
atatacgatctgagcatcgattcacactgccaattacaactgatacgctgttggc

SEQ ID NO: 291647 - DNA, 55 bp, Artificial
  Synthetic oligonucleotide
attaccatcaagctgcgaggttgttcgtgcggcgtcccaggtactgcgagcacag

SEQ ID NO: 291648 - DNA, 55 bp, Artificial
  Synthetic oligonucleotide
attaccctcctccacgagcgatggggcagcttccgtcctctctcgcatcaggagc

SEQ ID NO: 291649 - DNA, 60 bp, Artificial
  Synthetic oligonucleotide
aattgtccacgattcatatagacaactagtggcttctctctcgatttccatatggtgagt

SEQ ID NO: 291650 - DNA, 54 bp, Artificial
  Synthetic oligonucleotide
attactggtgctactaggattactgttggtagggttaacaccaggcaaattccc

SEQ ID NO: 291651 - DNA, 55 bp, Artificial
  Synthetic oligonucleotide
attagaaatttggcatccggggaattactgccgaagtttagagatataagctcgc

SEQ ID NO: 291652 - DNA, 55 bp, Artificial
  Synthetic oligonucleotide
attaggaccacctctttgattaactttgtagtgactggtacccaacttcgtcagc

SEQ ID NO: 291653 - DNA, 55 bp, Artificial
  Synthetic oligonucleotide
attatgtgttttggcgctcgtcaagtccgacgtgagcgtttcgtagttgtcgttg

SEQ ID NO: 291654 - DNA, 55 bp, Artificial
  Synthetic oligonucleotide
attcaccgacccatcgcatctcacgcgtgtcgctcactgtacacagtctcacctg

SEQ ID NO: 291655 - DNA, 55 bp, Artificial
  Synthetic oligonucleotide
attccatgttgatacgtttgacaaatgagacgacgcggattgtgattttgtcacc

SEQ ID NO: 291656 - DNA, 55 bp, Artificial
  Synthetic oligonucleotide
attcccttcactacatgggcgctgactatctaaaccagtacgaaaagtgcattcg

SEQ ID NO: 291657 - DNA, 55 bp, Artificial
  Synthetic oligonucleotide
attcgcacagcagtgtagcagcccgtgggtccttctcgcacaacccctacgccga

SEQ ID NO: 291658 - DNA, 55 bp, Artificial
  Synthetic oligonucleotide
attcgccctcctatcaaaatctctcgaatcctaattggacatggaagccgaataa

SEQ ID NO: 291659 - DNA, 54 bp, Artificial
  Synthetic oligonucleotide
attctcggctgaagcctcttctcagttttccgttgcgcttttaaacaacacggg

SEQ ID NO: 291660 - DNA, 58 bp, Artificial
  Synthetic oligonucleotide
cagtaatttggatatgtggaggatatactgtgagtgatcctacaataaaacgattttt

SEQ ID NO: 291661 - DNA, 54 bp, Artificial
  Synthetic oligonucleotide
attctcgtattgaagcctgtatgggttttgggtttaataaggagttggcgtctg

SEQ ID NO: 291662 - DNA, 55 bp, Artificial
  Synthetic oligonucleotide
attctgtcggagctgcacttgatcgtgtttggcgaagcaatgcgtccgcggtggc

SEQ ID NO: 291663 - DNA, 55 bp, Artificial
  Synthetic oligonucleotide
attcttgccgtgcgtacgctcaagcgggtgctcttctactcgctggacccgtccc

SEQ ID NO: 291664 - DNA, 55 bp, Artificial
  Synthetic oligonucleotide
attgaaaagtttcgctaccccgccctcatgtctgctgaggagtcctactgcttcg

SEQ ID NO: 291665 - DNA, 55 bp, Artificial
  Synthetic oligonucleotide
attgaaccttaacggttgtcgccgaataacacgagggataggcgttgtgtgggca

SEQ ID NO: 291666 - DNA, 54 bp, Artificial
  Synthetic oligonucleotide
attgctagttcctgggcccctcgagtttatagtcaatccgacccttacttttga

SEQ ID NO: 291667 - DNA, 55 bp, Artificial
  Synthetic oligonucleotide
attggacgacgagaaagtcgtgcaagtgttgcatcagtcccggccgacagctgag

SEQ ID NO: 291668 - DNA, 54 bp, Artificial
  Synthetic oligonucleotide
attgggacgtcttatttcggtttacgaacgtgaagtgtagatgaaaccctctga

SEQ ID NO: 291669 - DNA, 55 bp, Artificial
  Synthetic oligonucleotide
attgggatagatggaactatttatgcagttgaattttcacaccgttcaggaagag

SEQ ID NO: 291670 - DNA, 55 bp, Artificial
  Synthetic oligonucleotide
attggggtcattgcccaccctgttgtgcaccaccttagggtttacgaagctgccc

SEQ ID NO: 291671 - DNA, 59 bp, Artificial
  Synthetic oligonucleotide
gtctaatcgtaataatggtaatccccaatcattagcaatcgctttagctgttagtgatt

SEQ ID NO: 291672 - DNA, 55 bp, Artificial
  Synthetic oligonucleotide
attgtcagtgcttttaggagtactcagcagtactcacagtggtgagggagtggtc

SEQ ID NO: 291673 - DNA, 54 bp, Artificial
  Synthetic oligonucleotide
atttaacttgggtggtcatattaaccacgccatttactgggataaccttgctcc

SEQ ID NO: 291674 - DNA, 55 bp, Artificial
  Synthetic oligonucleotide
atttaggttgcttagctgttccggtgcttgatgcaggccttctagcgctgcctgg

SEQ ID NO: 291675 - DNA, 55 bp, Artificial
  Synthetic oligonucleotide
atttgcactgcacagtggtctaagcggtggagttgttttgttcgcgtattctgcg

SEQ ID NO: 291676 - DNA, 55 bp, Artificial
  Synthetic oligonucleotide
atttgtggttgacgctcctctcaggcagcaatccggcgcctgtcaaagcgcgttc

SEQ ID NO: 291677 - DNA, 53 bp, Artificial
  Synthetic oligonucleotide
attttcggttggattactttgattaacaaaggctctagaagggcaattttctg

SEQ ID NO: 291678 - DNA, 55 bp, Artificial
  Synthetic oligonucleotide
caaaacaaataggtgcaggactcgcgacaattggtctcgcaggagtaggtgtggg

SEQ ID NO: 291679 - DNA, 51 bp, Artificial
  Synthetic oligonucleotide
caaaagggtatatatttacgtgcggggtcgggaagggtgtcaaatcggacg

SEQ ID NO: 291680 - DNA, 55 bp, Artificial
  Synthetic oligonucleotide
atgaagcatttccctgcacaataagcgtattgacatttggctcccttcaggatgg

SEQ ID NO: 291681 - DNA, 55 bp, Artificial
  Synthetic oligonucleotide
atgaaggcacatactgtatctataaggacgttgttaatggcacactgtcgcttag

SEQ ID NO: 291682 - DNA, 53 bp, Artificial
  Synthetic oligonucleotide
gtctaaccagtcgcaacatttgtaccgataaatactcggaccttaaaaaccta

SEQ ID NO: 291683 - DNA, 55 bp, Artificial
  Synthetic oligonucleotide
atgaaggcacgcccacacagtctttgagaggagttgtaattgcggacacacggcg

SEQ ID NO: 291684 - DNA, 55 bp, Artificial
  Synthetic oligonucleotide
atgaatccaggcagaggcgtgtctactccgcgtccccgccccttcatacgcctca

SEQ ID NO: 291685 - DNA, 55 bp, Artificial
  Synthetic oligonucleotide
atgaatcctcgattgggttttagaatcaactatcgcaccaacatagtgaacttga

SEQ ID NO: 291686 - DNA, 55 bp, Artificial
  Synthetic oligonucleotide
atgaggaggacgacttagcaatacagacgcctgtcctgggtgtttgtggcatata

SEQ ID NO: 291687 - DNA, 55 bp, Artificial
  Synthetic oligonucleotide
atgcaaatccctcgtcacactcaaccttgaatcgtgttatatgaccgatgcttca

SEQ ID NO: 291688 - DNA, 55 bp, Artificial
  Synthetic oligonucleotide
atgcacagctcaacggttagatgcctgtccgtgtgacctgaaccttcaaaaggag

SEQ ID NO: 291689 - DNA, 55 bp, Artificial
  Synthetic oligonucleotide
atgcaccgaattatatcaagcctttggtacattgttctggccctcgtcataacac

SEQ ID NO: 291690 - DNA, 55 bp, Artificial
  Synthetic oligonucleotide
atgcacgtgcggacgcgccggtacacgatacctggcgcaccttgggttatcacac

SEQ ID NO: 291691 - DNA, 55 bp, Artificial
  Synthetic oligonucleotide
atgcagcatagcgcgaacatcgggttctccacagagtggtacgccacttcacgca

SEQ ID NO: 291692 - DNA, 55 bp, Artificial
  Synthetic oligonucleotide
atgcctaacataacatcattaggatcgaatacaagcgaaacttcgtctatagcag

SEQ ID NO: 291693 - DNA, 52 bp, Artificial
  Synthetic oligonucleotide
acaaaggcctacttcgaatgagcctgggtttaccctttctagaacggaagga

SEQ ID NO: 291694 - DNA, 55 bp, Artificial
  Synthetic oligonucleotide
atgcctgttcgccgatccttctccctgaactcaatgagtctcggatcaacacgca

SEQ ID NO: 291695 - DNA, 55 bp, Artificial
  Synthetic oligonucleotide
atgcgactagataatattgtctttcgtttaggaatggcacctactattccagcat

SEQ ID NO: 291696 - DNA, 55 bp, Artificial
  Synthetic oligonucleotide
atgcgagtgggtatcggactcctcgtgggaccgtagacgtgcttgcatacgccgc

SEQ ID NO: 291697 - DNA, 55 bp, Artificial
  Synthetic oligonucleotide
atgcgggaccgcgacatccccgaaacctacgataagatgcgactactgatcgagg

SEQ ID NO: 291698 - DNA, 55 bp, Artificial
  Synthetic oligonucleotide
atgcgggagacgtcgcggcagccgccccttgtgtggctgtaagaagcagcgcacc

SEQ ID NO: 291699 - DNA, 55 bp, Artificial
  Synthetic oligonucleotide
atgctcgtcccgtcctgtacacgtccaggttcacaatgtattatacggatgacgc

SEQ ID NO: 291700 - DNA, 55 bp, Artificial
  Synthetic oligonucleotide
atgcttcctccctttgtgtgtatggccgcgctccggccatggttgactctggccg

SEQ ID NO: 291701 - DNA, 55 bp, Artificial
  Synthetic oligonucleotide
atggacctcacatccgccacccgcactgcctactggtgtgagaagaccctgggtt

SEQ ID NO: 291702 - DNA, 55 bp, Artificial
  Synthetic oligonucleotide
atggatgggcgactgaccacgcctgtcaagccgtcgtgaggttccatccccatgg

SEQ ID NO: 291703 - DNA, 55 bp, Artificial
  Synthetic oligonucleotide
atggcacaagggcgtttacagtcgcagccttccctaacggcccgccatccagcct

SEQ ID NO: 291704 - DNA, 58 bp, Artificial
  Synthetic oligonucleotide
cgttgtgacacctccgctctcggtgatggaaacccgctcgaccgtacagagcgtgtat

SEQ ID NO: 291705 - DNA, 55 bp, Artificial
  Synthetic oligonucleotide
atggccacaaacgggtgtcacgagaacactttcgacgtacacatgacttgtcgtg

SEQ ID NO: 291706 - DNA, 55 bp, Artificial
  Synthetic oligonucleotide
atgggtgtcggctcgacacgtcaggccgctctgcaagcgctagcacacgcagact

SEQ ID NO: 291707 - DNA, 55 bp, Artificial
  Synthetic oligonucleotide
atgtaggttgatgccgtccgttgcgtgcattaggcctttaagttgcccgtcgtgg

SEQ ID NO: 291708 - DNA, 55 bp, Artificial
  Synthetic oligonucleotide
atgtcgcctctgtgcgtcctgtagtgcagctaggcgctgatacaagtcgccgcgg

SEQ ID NO: 291709 - DNA, 55 bp, Artificial
  Synthetic oligonucleotide
atgtctgtgctcgtgtgtgacacagccgttgagacgtcgtgaagccaacacagtg

SEQ ID NO: 291710 - DNA, 55 bp, Artificial
  Synthetic oligonucleotide
atgtgctgtggtaggagtccctctcttggggcggtcatacgtttgtgttaacccc

SEQ ID NO: 291711 - DNA, 55 bp, Artificial
  Synthetic oligonucleotide
atgtggcacaagtgcgtcgctgaaaacgccgttgcgtatccggctctgtgcaata

SEQ ID NO: 291712 - DNA, 55 bp, Artificial
  Synthetic oligonucleotide
atgttagcccacatagttggcaaatacaattatacatacagcctctgtggtacct

SEQ ID NO: 291713 - DNA, 55 bp, Artificial
  Synthetic oligonucleotide
atgttgtgcgagttggtgagagtccagcattgtcgtgcaaatcagtggctggtcg

SEQ ID NO: 291714 - DNA, 55 bp, Artificial
  Synthetic oligonucleotide
cagggcccacaatcacgtaagcagacccacacgccccgagtgatgtggacgcgtt

SEQ ID NO: 291715 - DNA, 57 bp, Artificial
  Synthetic oligonucleotide
acaagccgtgcccgaaaccagcccatggacgcctaccagtggccaaagaagagcgga

SEQ ID NO: 291716 - DNA, 55 bp, Artificial
  Synthetic oligonucleotide
cagggctttctggactgcaatagctgtgctcaaacatgtggggcccgtcgcgacg

SEQ ID NO: 291717 - DNA, 55 bp, Artificial
  Synthetic oligonucleotide
caggggaggaaatacaacaccccatttccagagcacaaggactaaagagacaccc

SEQ ID NO: 291718 - DNA, 55 bp, Artificial
  Synthetic oligonucleotide
caggggtaacgttcgtgtcctttgacgcctatctcactctcgcgcacactgtggc

SEQ ID NO: 291719 - DNA, 55 bp, Artificial
  Synthetic oligonucleotide
caggggtagacgtattgactcgttggaagcgcacgcagtggattgtgcgaggcgc

SEQ ID NO: 291720 - DNA, 55 bp, Artificial
  Synthetic oligonucleotide
cagggtccacatcgtccgacgttccttcgccgtgaacctttaccctcgctgtctc

SEQ ID NO: 291721 - DNA, 53 bp, Artificial
  Synthetic oligonucleotide
caggtagagggcctccgggttggactcgatgggaacccaaacgttgttgcgta

SEQ ID NO: 291722 - DNA, 55 bp, Artificial
  Synthetic oligonucleotide
caggtccatggaggggtcgacggagagtagcacattccgcacaaagacgtgggcc

SEQ ID NO: 291723 - DNA, 55 bp, Artificial
  Synthetic oligonucleotide
caggtcctagcgtgctagagtaagggctggctcggagtggcgtgagatataaggg

SEQ ID NO: 291724 - DNA, 55 bp, Artificial
  Synthetic oligonucleotide
caggtggtgttattgcgagcgcagattacgcttctgctgaaggtagccatagaac

SEQ ID NO: 291725 - DNA, 55 bp, Artificial
  Synthetic oligonucleotide
caggtgtgcaagcagcattccggtcacccagacggcaaaggtctgcggcagactc

SEQ ID NO: 291726 - DNA, 59 bp, Artificial
  Synthetic oligonucleotide
ggcatcgtataggacgcctaggggactatatcaaggtctccatacgtagtacaaagcca

SEQ ID NO: 291727 - DNA, 55 bp, Artificial
  Synthetic oligonucleotide
caggttggactgtttacccacctttaagtagtgtcgaaggtcacccaagtgctgc

SEQ ID NO: 291728 - DNA, 47 bp, Artificial
  Synthetic oligonucleotide
caggtttagggtttcaggtttagggtttcaggtttagggtttcaggt

SEQ ID NO: 291729 - DNA, 55 bp, Artificial
  Synthetic oligonucleotide
cagtactgccgtggcaccagtcatcgaatactccgtacacttaaacaaacgctcc

SEQ ID NO: 291730 - DNA, 55 bp, Artificial
  Synthetic oligonucleotide
cagtacttatggtgagatcgctaacttgctcatttaggataaccgtgtcttgcgc

SEQ ID NO: 291731 - DNA, 55 bp, Artificial
  Synthetic oligonucleotide
cagtagcggtgatcttaggaaggaaatgtaagacgaaccccgctctatgcgtgtc

SEQ ID NO: 291732 - DNA, 55 bp, Artificial
  Synthetic oligonucleotide
cagtaggcgtcatgattcctccactagtactgtcagcacgatttgcagccggtgc

SEQ ID NO: 291733 - DNA, 55 bp, Artificial
  Synthetic oligonucleotide
cagtagtgaacgcaccaactaaaccagggccaaacagagggatagaccaggacgg

SEQ ID NO: 291734 - DNA, 55 bp, Artificial
  Synthetic oligonucleotide
cagtccaaaggaactacggatggtaatacagagaggggttctatttatgaatacg

SEQ ID NO: 291735 - DNA, 55 bp, Artificial
  Synthetic oligonucleotide
cagtccacagcaatctcggagttcattgagtgttcggcttgcggtgccttctcgc

SEQ ID NO: 291736 - DNA, 51 bp, Artificial
  Synthetic oligonucleotide
cagtcccttgccttttacggccgccaaagaacgcccgtacacgttaacctc

SEQ ID NO: 291737 - DNA, 60 bp, Artificial
  Synthetic oligonucleotide
taatcttcagatatgtgagaggaggttagcatattgattaatgcacccggtatgtattta

SEQ ID NO: 291738 - DNA, 60 bp, Artificial
  Synthetic oligonucleotide
taattgctagattagtaatactccaatctgtttggtagaatacaatgccttcgtatcgca

SEQ ID NO: 291739 - DNA, 58 bp, Artificial
  Synthetic oligonucleotide
caaatcagaccgtaaggttataattatgtactatgattggaaaatatgactatagtta

SEQ ID NO: 291740 - DNA, 55 bp, Artificial
  Synthetic oligonucleotide
cagtcgcgcggatggacaggttggctgttcgaatttgtcgttaagggataccgcg

SEQ ID NO: 291741 - DNA, 55 bp, Artificial
  Synthetic oligonucleotide
cagtctcaaactgagtggtctctattattttcccagcttattgtgtcttatatgg

SEQ ID NO: 291742 - DNA, 55 bp, Artificial
  Synthetic oligonucleotide
cagtctgcactgcgctctcttgcgcttggcatcacttgcgcgcttgtgtggggtt

SEQ ID NO: 291743 - DNA, 55 bp, Artificial
  Synthetic oligonucleotide
cagtgccccgagcttcatgctcgagtactacaagtacctcgctggcaacaaggct

SEQ ID NO: 291744 - DNA, 55 bp, Artificial
  Synthetic oligonucleotide
cagtgccgcgtcaagcatatcaggcgcatacatgtcagtgttacccttcaccgtc

SEQ ID NO: 291745 - DNA, 55 bp, Artificial
  Synthetic oligonucleotide
cagtgcgacgctacctgcgagatatcgcgcgtggtttgagttatctgcacacggc

SEQ ID NO: 291746 - DNA, 55 bp, Artificial
  Synthetic oligonucleotide
cagtgcgtggtactgcatacttgtgatcgtcggttttctacactactacggggta

SEQ ID NO: 291747 - DNA, 55 bp, Artificial
  Synthetic oligonucleotide
cagtgctcatcgagaggtactactgtctccccgtcgacgttggctttgcgccgga

SEQ ID NO: 291748 - DNA, 55 bp, Artificial
  Synthetic oligonucleotide
cagtggtggtcgtttactgtaggactaactgtgaaggacggagatgcaccgtatg

SEQ ID NO: 291749 - DNA, 55 bp, Artificial
  Synthetic oligonucleotide
cagccttgcagatggcctacccgcctgtgccattggtgacagccttctacggcca

SEQ ID NO: 291750 - DNA, 53 bp, Artificial
  Synthetic oligonucleotide
caaatagttttaaacgcggccagcaatcctggtttttttgatatagggttcaa

SEQ ID NO: 291751 - DNA, 55 bp, Artificial
  Synthetic oligonucleotide
cagcgcgttccgttgcatcaccttgttccaccggtgttcccacccaccctggttc

SEQ ID NO: 291752 - DNA, 55 bp, Artificial
  Synthetic oligonucleotide
cagcgggaacgtacgacttgcgtgaagcgaaggcgagcgtcgtgtcttcattcgc

SEQ ID NO: 291753 - DNA, 55 bp, Artificial
  Synthetic oligonucleotide
cagcggttggtcaggtttgtgatcaattgttagaaactgtgccaagttgatagag

SEQ ID NO: 291754 - DNA, 55 bp, Artificial
  Synthetic oligonucleotide
cagcgtttgctgcggggcaaggcaaatctagtagagctacctccctggaacaagc

SEQ ID NO: 291755 - DNA, 55 bp, Artificial
  Synthetic oligonucleotide
cagctcccttaatacgataagcacctcccttgatttggcatgatccttaaactcc

SEQ ID NO: 291756 - DNA, 55 bp, Artificial
  Synthetic oligonucleotide
cagctccttgtacaacaagactcgccagagcagcattacttcgtcgctgatcgag

SEQ ID NO: 291757 - DNA, 55 bp, Artificial
  Synthetic oligonucleotide
cagctctcggggtgcaccgggcgcctcaacaatgtggcacttcacgttttcgtgg

SEQ ID NO: 291758 - DNA, 55 bp, Artificial
  Synthetic oligonucleotide
cagctctttatggcaaagtcggttgccgtagtgaagcgctgccggagggaggggc

SEQ ID NO: 291759 - DNA, 55 bp, Artificial
  Synthetic oligonucleotide
cagctgcatcgcgcggtgtgagattccgagaagcagtagcgctgcgagaaccgac

SEQ ID NO: 291760 - DNA, 55 bp, Artificial
  Synthetic oligonucleotide
cagctgccagaaccgtacatcttgcatttaacgtagtgtgtatacctgccttagc

SEQ ID NO: 291761 - DNA, 52 bp, Artificial
  Synthetic oligonucleotide
cgttcgcggtttttacctaccgagcttaccaggagtactacactggcgggcg

SEQ ID NO: 291762 - DNA, 55 bp, Artificial
  Synthetic oligonucleotide
cagctggtccctgtgtagcctcttgggcactacggtcaacgatgttatgttccgc

SEQ ID NO: 291763 - DNA, 55 bp, Artificial
  Synthetic oligonucleotide
cagcttcggttcctcctcgtactggtaacagagaaagccgacagagagcagatat

SEQ ID NO: 291764 - DNA, 55 bp, Artificial
  Synthetic oligonucleotide
cagcttgcggcactccagtcccttgtccacgcgatgggtgtacccgctcagatca

SEQ ID NO: 291765 - DNA, 55 bp, Artificial
  Synthetic oligonucleotide
cagcttggaattgatgcgcaccccacgcacgtctgtcgaaacggcagtgaagcgg

SEQ ID NO: 291766 - DNA, 55 bp, Artificial
  Synthetic oligonucleotide
caggacagttggccagtagtgtctgctgctctccgtgcatgtttgtgttccggca

SEQ ID NO: 291767 - DNA, 55 bp, Artificial
  Synthetic oligonucleotide
caggactgctccttcgctgcactcgagggtacagcttcccaagagagttcacagg

SEQ ID NO: 291768 - DNA, 55 bp, Artificial
  Synthetic oligonucleotide
caggatgccgtgatgctccacgagcatatcgaatggcaacgaaaaccactcgtgt

SEQ ID NO: 291769 - DNA, 55 bp, Artificial
  Synthetic oligonucleotide
caggatgctcataaattttgtattctgcaccctctgtttggctagttaggctcct

SEQ ID NO: 291770 - DNA, 55 bp, Artificial
  Synthetic oligonucleotide
caggcagttgacacggcgcctgcacacggcttcatacgctagctatgtacggtgg

SEQ ID NO: 291771 - DNA, 55 bp, Artificial
  Synthetic oligonucleotide
caggccaataacccaataatggagctatgacgctatcgattttgacaaggcgggt

SEQ ID NO: 291772 - DNA, 59 bp, Artificial
  Synthetic oligonucleotide
gtcgctccactagcaatagagggcggtgtatgtgttaatgttcgatttctacggaactg

SEQ ID NO: 291773 - DNA, 55 bp, Artificial
  Synthetic oligonucleotide
caggccaattcagtgccttcgagttcagagcgtccactgcgtcattggcgttcgc

SEQ ID NO: 291774 - DNA, 55 bp, Artificial
  Synthetic oligonucleotide
caggcgaccacgcgtgcctctgattctctacctctcgatgtgtctacccgtgggg

SEQ ID NO: 291775 - DNA, 55 bp, Artificial
  Synthetic oligonucleotide
caggcgcgtatgcggcacagagagacgatgtgtacgccgttgggctctgcagagt

SEQ ID NO: 291776 - DNA, 55 bp, Artificial
  Synthetic oligonucleotide
caggctctaagcatctttacttccgtgttcggatggaacgggtgtatcctacttg

SEQ ID NO: 291777 - DNA, 55 bp, Artificial
  Synthetic oligonucleotide
caggctctcatacggctcgttcagtcctctccgactctgacgcagtgcaacatat

SEQ ID NO: 291778 - DNA, 55 bp, Artificial
  Synthetic oligonucleotide
caggcttgtactccgacgcgttcacctggcaccgcttgtcgtcctgcgaaatcac

SEQ ID NO: 291779 - DNA, 55 bp, Artificial
  Synthetic oligonucleotide
cagggaaagcgtgtgcgatgcctatgcaaggttcaaacatgaggcggaagagcga

SEQ ID NO: 291780 - DNA, 55 bp, Artificial
  Synthetic oligonucleotide
cagggaccgacgcaccgcttctctgtcgaggcgcaccgtgcgacatggaaatcgt

SEQ ID NO: 291781 - DNA, 55 bp, Artificial
  Synthetic oligonucleotide
catcgaataggtcctatcatacatatacaccgctattaactaaaactgcacgagg

SEQ ID NO: 291782 - DNA, 55 bp, Artificial
  Synthetic oligonucleotide
catcgacacgctctgtcgcctcccaccccttatggcaggaacatgtacaaggagc

SEQ ID NO: 291783 - DNA, 53 bp, Artificial
  Synthetic oligonucleotide
caaagttagcagtgtcttacgtttgaatccaacagacgctttccgttttttaa

SEQ ID NO: 291784 - DNA, 55 bp, Artificial
  Synthetic oligonucleotide
catcgcctggtaccacgtcacgtcggaggactacgtcaagtggacgcgtcctgag

SEQ ID NO: 291785 - DNA, 55 bp, Artificial
  Synthetic oligonucleotide
catcgcgtttgcctcgtacaacgcaagtggcatgcagcagtggagggtagtgtgc

SEQ ID NO: 291786 - DNA, 55 bp, Artificial
  Synthetic oligonucleotide
catcgtcaacaaagaggtcttactgctgcaggcagaaagtcacgtggcttacaag

SEQ ID NO: 291787 - DNA, 55 bp, Artificial
  Synthetic oligonucleotide
catcgttgctgtcccgtgcgtctacatcagcacagaacgtgagggaatacaagaa

SEQ ID NO: 291788 - DNA, 55 bp, Artificial
  Synthetic oligonucleotide
catctagccacgcggcgccgagaggtttatgggctgacgtggctcacttccactg

SEQ ID NO: 291789 - DNA, 55 bp, Artificial
  Synthetic oligonucleotide
catctatcgttgcgtgacatgtgctctgttcgtcctatcgtgcatcggcttagcc

SEQ ID NO: 291790 - DNA, 55 bp, Artificial
  Synthetic oligonucleotide
catctcagtggctttacgacctaatgtctttacgtgattcacgacaaagttggtc

SEQ ID NO: 291791 - DNA, 55 bp, Artificial
  Synthetic oligonucleotide
catctgggcgtataacaactaatggtatcggattaatgcttgggaccgcatcacc

SEQ ID NO: 291792 - DNA, 55 bp, Artificial
  Synthetic oligonucleotide
catgaaccggtgccatcatgttacacgtgaccgtgagtgagtgtagtcatgcatc

SEQ ID NO: 291793 - DNA, 55 bp, Artificial
  Synthetic oligonucleotide
catgacgattctgagtgtatttcccagcagtcgcggcgctgtgattgccgtaatg

SEQ ID NO: 291794 - DNA, 53 bp, Artificial
  Synthetic oligonucleotide
caaagttaacctgttggaaattagacaggcccgaataagtcattaactggaaa

SEQ ID NO: 291795 - DNA, 55 bp, Artificial
  Synthetic oligonucleotide
catgacggacgcgtcttcgaggtgagctgccagtgcatctgataggctgcgcctg

SEQ ID NO: 291796 - DNA, 55 bp, Artificial
  Synthetic oligonucleotide
catgatacagtacatggcaccataccctaccgtctgcagtgacgcaacgtagacg

SEQ ID NO: 291797 - DNA, 55 bp, Artificial
  Synthetic oligonucleotide
catgatgggtcttgagtcatatcataagagttacccgtcatgtatagtggctccc

SEQ ID NO: 291798 - DNA, 55 bp, Artificial
  Synthetic oligonucleotide
catgcacctagaccaccccttgttacgtgcacgcaagacgtcactgtctccgcac

SEQ ID NO: 291799 - DNA, 55 bp, Artificial
  Synthetic oligonucleotide
catgcatagtacagttttcctgcgagccatccaagtcaagacttatggcctcccc

SEQ ID NO: 291800 - DNA, 55 bp, Artificial
  Synthetic oligonucleotide
catgcatcagacgcatgcgcctccgcatctccacacaggttgctgtccgacgtac

SEQ ID NO: 291801 - DNA, 55 bp, Artificial
  Synthetic oligonucleotide
catgccccatgagtgcgtctcgcatcttgtggctaagtggtcagttcggcagaac

SEQ ID NO: 291802 - DNA, 55 bp, Artificial
  Synthetic oligonucleotide
catggcccattcagactcggtttaccttagggcctccaatttggcctggtctgtg

SEQ ID NO: 291803 - DNA, 55 bp, Artificial
  Synthetic oligonucleotide
catgggtggtgtgcccctagtgcgaaagagctgtgatgtttgacgcgtaaacgtc

SEQ ID NO: 291804 - DNA, 55 bp, Artificial
  Synthetic oligonucleotide
catggtggaagctcccgtctagtgtgaccaactacgttcacttggcggaccggcg

SEQ ID NO: 291805 - DNA, 56 bp, Artificial
  Synthetic oligonucleotide
caggtaataaaatattcaattgggtaacaacattacaatgtgtcgaatcaataaaa

SEQ ID NO: 291806 - DNA, 55 bp, Artificial
  Synthetic oligonucleotide
catgtattgccagggctctccctaagacaaataatgatacctcagaggttttggt

SEQ ID NO: 291807 - DNA, 55 bp, Artificial
  Synthetic oligonucleotide
catgtcaagacgcgttcacctgacaaacttaacgcagcccctttgattacgctgt

SEQ ID NO: 291808 - DNA, 55 bp, Artificial
  Synthetic oligonucleotide
catgtctacctgtgcaaacactgaaacctgacgataagacgccaaagctgcaccc

SEQ ID NO: 291809 - DNA, 55 bp, Artificial
  Synthetic oligonucleotide
catgtgaacctcgcgtcgtcagtttcatctaaggctgctcttgtcgagtctatgc

SEQ ID NO: 291810 - DNA, 55 bp, Artificial
  Synthetic oligonucleotide
catgtggatcattgcactcgcgctttgctaagttatggggagtagggaagagcac

SEQ ID NO: 291811 - DNA, 55 bp, Artificial
  Synthetic oligonucleotide
catgtgtactattctcaccatgtgtactattctcaccatatgtactattctcacc

SEQ ID NO: 291812 - DNA, 55 bp, Artificial
  Synthetic oligonucleotide
catgtgtgcatctcaccccagcacacataccaggagatctccaaacagagagggg

SEQ ID NO: 291813 - DNA, 54 bp, Artificial
  Synthetic oligonucleotide
catgtgttggaacaaatagacaatgggtcggaataggagaaggtaaaaacaggt

SEQ ID NO: 291814 - DNA, 55 bp, Artificial
  Synthetic oligonucleotide
cagtgtgatagcagacacgaaatttgtacaagtcgcacgatggtgcatcttaccc

SEQ ID NO: 291815 - DNA, 55 bp, Artificial
  Synthetic oligonucleotide
cagttaccgttgaacacaatggaacctctccgagcctggtcaaggacgaatatgg

SEQ ID NO: 291816 - DNA, 56 bp, Artificial
  Synthetic oligonucleotide
gtcggtttgacattgtttcttcgcaataaatctcaaggaaaatgaggtcggtttga

SEQ ID NO: 291817 - DNA, 55 bp, Artificial
  Synthetic oligonucleotide
cagttgtagagcgtgatatcatgactgactgcagttaccatacgtcttgtgcggc

SEQ ID NO: 291818 - DNA, 55 bp, Artificial
  Synthetic oligonucleotide
cagttgtgcacatcacagaggggcaatcatttggcgttcaccttacgatgcgggg

SEQ ID NO: 291819 - DNA, 55 bp, Artificial
  Synthetic oligonucleotide
cagtttaatcgtcctaaattgagctaatcgtggcgcaactggatccctcgttcgc

SEQ ID NO: 291820 - DNA, 51 bp, Artificial
  Synthetic oligonucleotide
cagtttagggttcacagtttagggttcacagtttagggttcacagtttagg

SEQ ID NO: 291821 - DNA, 55 bp, Artificial
  Synthetic oligonucleotide
cagtttccggagatgtgaatggagttgatatgtgtaacgtcgtggagtgggaggg

SEQ ID NO: 291822 - DNA, 55 bp, Artificial
  Synthetic oligonucleotide
cagtttggacacgccgtccctttacgtgtacactcgtggtgtcgccagcagaggt

SEQ ID NO: 291823 - DNA, 55 bp, Artificial
  Synthetic oligonucleotide
cagttttccctttactcgtctgcgcgagactgtttgatcggcctcggactgtcca

SEQ ID NO: 291824 - DNA, 53 bp, Artificial
  Synthetic oligonucleotide
cataaatttaagtgtagacaggcggataaaagagttagtacgggagtacccaa

SEQ ID NO: 291825 - DNA, 54 bp, Artificial
  Synthetic oligonucleotide
cataagacctaagttagctaagtgaagacctaagttagtgaaagtaagacctac

SEQ ID NO: 291826 - DNA, 55 bp, Artificial
  Synthetic oligonucleotide
cataatcaagaagaaccaggagtacttcagaaagcacggcgtgagcacggacacc

SEQ ID NO: 291827 - DNA, 60 bp, Artificial
  Synthetic oligonucleotide
acaaccgccgtaggactctcctcgcgcatgccaataagcgtacccgagctctgataacta

SEQ ID NO: 291828 - DNA, 55 bp, Artificial
  Synthetic oligonucleotide
catacacattggaaagtctaattacgaccaggttgcaaacttagagagcgaagta

SEQ ID NO: 291829 - DNA, 55 bp, Artificial
  Synthetic oligonucleotide
cataccatgtgatgatgtcgtatccctacgctgactggttacatgtgttctacat

SEQ ID NO: 291830 - DNA, 55 bp, Artificial
  Synthetic oligonucleotide
catacgtccacttcgactggaacttcgtcgagcccatcacgtacctcgtcgggta

SEQ ID NO: 291831 - DNA, 55 bp, Artificial
  Synthetic oligonucleotide
catactcctcgagtcggtactaataacctgatccaccgatctacagtacaacgcc

SEQ ID NO: 291832 - DNA, 55 bp, Artificial
  Synthetic oligonucleotide
catactgcgtacaaccctaaccctttactgatagttaatgcgtagcaacaaccgc

SEQ ID NO: 291833 - DNA, 55 bp, Artificial
  Synthetic oligonucleotide
catagcaccgccccacgggacaaggatccctccagcggactcttggatgccaact

SEQ ID NO: 291834 - DNA, 55 bp, Artificial
  Synthetic oligonucleotide
catagccatcgcgaccctaaccgtctggacccgtaaagcacatccacgaccaagc

SEQ ID NO: 291835 - DNA, 55 bp, Artificial
  Synthetic oligonucleotide
catagctttgcgtactgcgctcccgttatgactcatttaactgcgggattgacag

SEQ ID NO: 291836 - DNA, 55 bp, Artificial
  Synthetic oligonucleotide
catagttgtggagcaggtcagtcgggtcattgttctctggtcctctaaggggcgc

SEQ ID NO: 291837 - DNA, 55 bp, Artificial
  Synthetic oligonucleotide
catatactgataaacctaggtgctacccacccttttcgaatggcccagcgcacct

SEQ ID NO: 291838 - DNA, 60 bp, Artificial
  Synthetic oligonucleotide
cgttcaaaatcgcttgcagaaagttgttcttcacatggagctgtaggagctctataacat

SEQ ID NO: 291839 - DNA, 55 bp, Artificial
  Synthetic oligonucleotide
catatgctaagccatcctcatatgctaagctatcctcatatggcgcacctgaccc

SEQ ID NO: 291840 - DNA, 55 bp, Artificial
  Synthetic oligonucleotide
catatgtgcgattctcgtcatatgtgcgattcttatcatatgtgcgattctcatc

SEQ ID NO: 291841 - DNA, 55 bp, Artificial
  Synthetic oligonucleotide
catatgtgctttgagaggagtagtgcgaggccaattcaactccctctgcgtgaca

SEQ ID NO: 291842 - DNA, 55 bp, Artificial
  Synthetic oligonucleotide
catattcgcatacacgcggcagagggcggaacatcatcgttgaaagcacccacag

SEQ ID NO: 291843 - DNA, 55 bp, Artificial
  Synthetic oligonucleotide
catcactgctgtgtagggtggtcgctatagatgtagcaagttaaccgagttgcac

SEQ ID NO: 291844 - DNA, 55 bp, Artificial
  Synthetic oligonucleotide
catcatgtgactctacgcgtgcaacgacatagtcggggaaggcacgaataagaag

SEQ ID NO: 291845 - DNA, 55 bp, Artificial
  Synthetic oligonucleotide
catcctaggagcaatcgccatagccattaattcttggaaaagtaacttacacgca

SEQ ID NO: 291846 - DNA, 55 bp, Artificial
  Synthetic oligonucleotide
cacgatagccgttgacgcaagcggatgcaactccaatgttgtagtttcccgccct

SEQ ID NO: 291847 - DNA, 55 bp, Artificial
  Synthetic oligonucleotide
cacgcacgcagtcacgcatatggcaaaaggttgcacgcgctgtgtcgagaccctc

SEQ ID NO: 291848 - DNA, 55 bp, Artificial
  Synthetic oligonucleotide
cacgcatctgctccttcacgtatcgttaacgtacggtagactttcacgatagacg

SEQ ID NO: 291849 - DNA, 55 bp, Artificial
  Synthetic oligonucleotide
taattgtagtacaccttgattggtttaactttttatatacttagatatatgttcg

SEQ ID NO: 291850 - DNA, 54 bp, Artificial
  Synthetic oligonucleotide
cgttattaaagttaggatgtatgggataattgtagtacaccttgattggtttta

SEQ ID NO: 291851 - DNA, 55 bp, Artificial
  Synthetic oligonucleotide
cacgcgcagaaagatacgctcgaataaagcgtagaacaaacacgcccagagaggt

SEQ ID NO: 291852 - DNA, 55 bp, Artificial
  Synthetic oligonucleotide
cacgcgcatacatgcgtcctcacatgctcgactttacgtactctcccatccaccc

SEQ ID NO: 291853 - DNA, 55 bp, Artificial
  Synthetic oligonucleotide
cacgcggtagtgttcccgcttatttgcgtcgtcatccgaggggtcactcgcttcc

SEQ ID NO: 291854 - DNA, 55 bp, Artificial
  Synthetic oligonucleotide
cacgcgtgtctgtcttccccgtacgcgagacgtattttcggtcctccctcgccag

SEQ ID NO: 291855 - DNA, 55 bp, Artificial
  Synthetic oligonucleotide
cacgctctctcggggtggattggacagaagagaatcgtggaaatcggctggtttt

SEQ ID NO: 291856 - DNA, 55 bp, Artificial
  Synthetic oligonucleotide
cacgctctgtacggtcgagcgggtttccatcaccgagagcggaggtgtcacaacg

SEQ ID NO: 291857 - DNA, 55 bp, Artificial
  Synthetic oligonucleotide
cacgctgcttgcatccttgtatcgcttcctgtcaaacctctccagcgccggtgcc

SEQ ID NO: 291858 - DNA, 55 bp, Artificial
  Synthetic oligonucleotide
cacgctttggaattccgaaggcggcagaatcgattcgtgattaggcagccccacg

SEQ ID NO: 291859 - DNA, 55 bp, Artificial
  Synthetic oligonucleotide
cacggaacccattacgcggcgattcgttgccatgcgccacacatgcacgcagaag

SEQ ID NO: 291860 - DNA, 55 bp, Artificial
  Synthetic oligonucleotide
cacggcccgtgccgtgcctattattcgcatctcttaacacacgcacaggacctcg

SEQ ID NO: 291861 - DNA, 60 bp, Artificial
  Synthetic oligonucleotide
gtcgtgctatttgtatagaatagcaaattctcatttacgatagatggacaacgataaggt

SEQ ID NO: 291862 - DNA, 55 bp, Artificial
  Synthetic oligonucleotide
cacggcgaggcatggtcttccctcgtgttgactacactattatcggtgctgcagg

SEQ ID NO: 291863 - DNA, 55 bp, Artificial
  Synthetic oligonucleotide
cacggtaggcaaggggccactacgtattcgcgtggttaatctgcccagcacccca

SEQ ID NO: 291864 - DNA, 55 bp, Artificial
  Synthetic oligonucleotide
cacggtgtacaacaagacgaacataaaactgaacgaatgcaatcggtgcagcaac

SEQ ID NO: 291865 - DNA, 55 bp, Artificial
  Synthetic oligonucleotide
cacgtacgtacatgcgcgcgtctctgtgtggggtttagccgtcacggatgtggca

SEQ ID NO: 291866 - DNA, 55 bp, Artificial
  Synthetic oligonucleotide
cacgtactccgtgataagggcaacgctggcgcattccctcagcggcgtatagtgc

SEQ ID NO: 291867 - DNA, 55 bp, Artificial
  Synthetic oligonucleotide
cacgtcatcgagagagcactggcctgtcgagtcatgatatccctgcgtccctccg

SEQ ID NO: 291868 - DNA, 55 bp, Artificial
  Synthetic oligonucleotide
cacgtcctgcagagatcaatgacgtcagacaacatgtgggagcgcaagagggccc

SEQ ID NO: 291869 - DNA, 55 bp, Artificial
  Synthetic oligonucleotide
cacgtctcctcagagagacccgcgctcatggcacagagggtttgcgagcgtacgt

SEQ ID NO: 291870 - DNA, 55 bp, Artificial
  Synthetic oligonucleotide
cacgtgacccatgcgggtactgacgtactcgaccgctccactgtccgaccagaca

SEQ ID NO: 291871 - DNA, 55 bp, Artificial
  Synthetic oligonucleotide
cacgtggccgcccttctgtgaatgatgactgctttccgtaggatgctactatcca

SEQ ID NO: 291872 - DNA, 56 bp, Artificial
  Synthetic oligonucleotide
gtcgttccattagtcgattaacccgagtgatcactctaatttgggccgttatccaa

SEQ ID NO: 291873 - DNA, 55 bp, Artificial
  Synthetic oligonucleotide
cacgtggtgtcatcgacagtcgcagaacacgcgggttttctctcagaaggaacgc

SEQ ID NO: 291874 - DNA, 55 bp, Artificial
  Synthetic oligonucleotide
cacgttcccgctcgtagacgcgttgaatcgaaggtgccgcgacgtttgattggcg

SEQ ID NO: 291875 - DNA, 55 bp, Artificial
  Synthetic oligonucleotide
cacgttctgcttccatatagtctaagcacttctctcttacggtagagtgcatttc

SEQ ID NO: 291876 - DNA, 55 bp, Artificial
  Synthetic oligonucleotide
cacgtttcacatcgcacttatccgttccccagcggcacagcacacaccccttcgc

SEQ ID NO: 291877 - DNA, 55 bp, Artificial
  Synthetic oligonucleotide
cactaaaggacgaagtcgagaggctgcgcaagacactcgaagtccactgcatacc

SEQ ID NO: 291878 - DNA, 55 bp, Artificial
  Synthetic oligonucleotide
cacccctgtggggagcttgtccaagttatttgtgacctctcttctgcgttcaccg

SEQ ID NO: 291879 - DNA, 55 bp, Artificial
  Synthetic oligonucleotide
cacccgacaagcaaggacgtcgcgtgcttcatgattcgagtgcagggagaagcct

SEQ ID NO: 291880 - DNA, 55 bp, Artificial
  Synthetic oligonucleotide
cacccgctagaaagagtgcatgcatagtcatcaacaaccgcaacgtccactcacc

SEQ ID NO: 291881 - DNA, 55 bp, Artificial
  Synthetic oligonucleotide
cacccgctgacgactcgccattttctggagtcgctttggacaacttagcttgggg

SEQ ID NO: 291882 - DNA, 55 bp, Artificial
  Synthetic oligonucleotide
cacccgtttgctcaccccgcagagacctttacgcacggagtggactgctttaccc

SEQ ID NO: 291883 - DNA, 54 bp, Artificial
  Synthetic oligonucleotide
gtctaaaacacctagtataactttatatttaactccaggcaaatctggaacatt

SEQ ID NO: 291884 - DNA, 52 bp, Artificial
  Synthetic oligonucleotide
caccctgaaacctccgtcctaaacccggaatctaagtacttacaccctgaca

SEQ ID NO: 291885 - DNA, 55 bp, Artificial
  Synthetic oligonucleotide
cacccttattctcctcgtcatgcgtttcggcctagccacacctcaccggcatacg

SEQ ID NO: 291886 - DNA, 55 bp, Artificial
  Synthetic oligonucleotide
caccgacagtccagtctgcttagcgtgttatcaaacagaggagcacggcatgctg

SEQ ID NO: 291887 - DNA, 55 bp, Artificial
  Synthetic oligonucleotide
caccgactacgtgcgctgtcttgagccatacgctggtggctcgttctttagcggc

SEQ ID NO: 291888 - DNA, 55 bp, Artificial
  Synthetic oligonucleotide
caccgatacatgcacaaacgcggagacgcaactacacgcggactgcggtaggctg

SEQ ID NO: 291889 - DNA, 55 bp, Artificial
  Synthetic oligonucleotide
caccgatgtagcgaggtcgcggcatcagctcactagtgctctgcatcacgtctgc

SEQ ID NO: 291890 - DNA, 55 bp, Artificial
  Synthetic oligonucleotide
caccgcccctcctggaggcatgcacaagccggaccacattatctgggctgacgtg

SEQ ID NO: 291891 - DNA, 55 bp, Artificial
  Synthetic oligonucleotide
caccgcttttccgaaattaacattcgttgctctgaccaaaatactatctatacgc

SEQ ID NO: 291892 - DNA, 55 bp, Artificial
  Synthetic oligonucleotide
caccggacgaggggcgacggagcggcacgtccctgcagagcgagggtggcctcta

SEQ ID NO: 291893 - DNA, 55 bp, Artificial
  Synthetic oligonucleotide
cacctagttgcaccaaagtataaattgcacctagttgcaccaaagtataaattgc

SEQ ID NO: 291894 - DNA, 60 bp, Artificial
  Synthetic oligonucleotide
tgtggtataatgctagaacgaaatgttggttagcatgtgtaaagggaagtggtagacatc

SEQ ID NO: 291895 - DNA, 55 bp, Artificial
  Synthetic oligonucleotide
cacctcggacaccaaggctttccgattcccctacatgagcacaactatccggtac

SEQ ID NO: 291896 - DNA, 55 bp, Artificial
  Synthetic oligonucleotide
cacctcgtaaaagtcgctccaccctgtcggctggtgatttgagtcgccaggcacg

SEQ ID NO: 291897 - DNA, 55 bp, Artificial
  Synthetic oligonucleotide
cacctctgcatatgctttgccaaagctcccacaacgggcatgtgctaccaaaggg

SEQ ID NO: 291898 - DNA, 55 bp, Artificial
  Synthetic oligonucleotide
cacctcttagtgtgcaagttccactatctgttagcgtgagcaggagaactagact

SEQ ID NO: 291899 - DNA, 55 bp, Artificial
  Synthetic oligonucleotide
cacctgctatctgcttatcgttattacttagccctccgacttcgctaccgcttcc

SEQ ID NO: 291900 - DNA, 55 bp, Artificial
  Synthetic oligonucleotide
cacctggacctactcctaggccaagcgtagctaaatgaggtaagaggatagctcc

SEQ ID NO: 291901 - DNA, 55 bp, Artificial
  Synthetic oligonucleotide
cacctgtctctgctaggagtgactctattctgcgtatccccttgtcctcatagcg

SEQ ID NO: 291902 - DNA, 55 bp, Artificial
  Synthetic oligonucleotide
caccttcactactcgttccaagagcaaggaaacttgtacatgatcctcgacctac

SEQ ID NO: 291903 - DNA, 55 bp, Artificial
  Synthetic oligonucleotide
caccttccaacgcatcttagccctggacttcttatacctgcttgctccatgtgcc

SEQ ID NO: 291904 - DNA, 55 bp, Artificial
  Synthetic oligonucleotide
caccttctgcgcgtgtgcctctttcgcaggaatactcactgccggtgcgacgagg

SEQ ID NO: 291905 - DNA, 60 bp, Artificial
  Synthetic oligonucleotide
tgtggtacaaattgttacaggattattactagcttctagatatactagtgaaatgtcaca

SEQ ID NO: 291906 - DNA, 55 bp, Artificial
  Synthetic oligonucleotide
caccttgactccaaccataatagtccccactcatatatctcatacacggcaacgt

SEQ ID NO: 291907 - DNA, 55 bp, Artificial
  Synthetic oligonucleotide
cacctttcaaagttatttgcacgtcatgcagaacatccaacacatgggaggaacg

SEQ ID NO: 291908 - DNA, 55 bp, Artificial
  Synthetic oligonucleotide
cacgacataccgcacgctcgtgtttgtgggtaccagtgacagcaaggtgcttgcg

SEQ ID NO: 291909 - DNA, 55 bp, Artificial
  Synthetic oligonucleotide
cacgaggggcgttgcagatcaatatgcctgcgcgaattgcttccaggcgggtttc

SEQ ID NO: 291910 - DNA, 55 bp, Artificial
  Synthetic oligonucleotide
cacgagtgacgacatcggggatcagaataacggtgtcctacatagtaacgaaacg

SEQ ID NO: 291911 - DNA, 55 bp, Artificial
  Synthetic oligonucleotide
cagaagcttacttgacggactgggtgtaccaaccctacgtgaaggaacacatcat

SEQ ID NO: 291912 - DNA, 55 bp, Artificial
  Synthetic oligonucleotide
cagaatatttgtcccttcgtccttgtgtttgacaataacgacactcttacggccc

SEQ ID NO: 291913 - DNA, 55 bp, Artificial
  Synthetic oligonucleotide
cagaatgcactgtaaaatgtctttcatggacatttgaatcagaatggctcgaaag

SEQ ID NO: 291914 - DNA, 55 bp, Artificial
  Synthetic oligonucleotide
cagacaaatggcgcttgacctgttttcacatggcggcgttgggtcgggatggcgg

SEQ ID NO: 291915 - DNA, 55 bp, Artificial
  Synthetic oligonucleotide
cagacgaaatgtcagacgaaatgtcagacgaaatgtcagacgaaatgtcagacga

SEQ ID NO: 291916 - DNA, 60 bp, Artificial
  Synthetic oligonucleotide
gcctagtgtgctgtaagtgacaatagaagttattagcgcatgagttcccacaggagccaa

SEQ ID NO: 291917 - DNA, 55 bp, Artificial
  Synthetic oligonucleotide
cagacgacccgaaaagagcgacgctatcatcaagagcataggcagtcatgatgtc

SEQ ID NO: 291918 - DNA, 55 bp, Artificial
  Synthetic oligonucleotide
cagacggcaacatggagaacgcacgcgtcttcttgcgagaggatcacacagcgtc

SEQ ID NO: 291919 - DNA, 55 bp, Artificial
  Synthetic oligonucleotide
cagacggtgcagacgcttgtcctttggaacggcgagtggccgtacgtgaagcgtg

SEQ ID NO: 291920 - DNA, 55 bp, Artificial
  Synthetic oligonucleotide
cagacgtcagatacaagtgagaggcctagcatttattcgagaggactcaagcgag

SEQ ID NO: 291921 - DNA, 55 bp, Artificial
  Synthetic oligonucleotide
cagagagacgcgacacgaagccccaggcggttggcccgccgttgctctgcacagt

SEQ ID NO: 291922 - DNA, 55 bp, Artificial
  Synthetic oligonucleotide
cagagagccgccacgcatcttaggtcaataaagtgaagcacggcagtaaacatga

SEQ ID NO: 291923 - DNA, 55 bp, Artificial
  Synthetic oligonucleotide
cagagatcggctgagatcttgctgttgcctatcatgggcatcaagacacgcctcc

SEQ ID NO: 291924 - DNA, 55 bp, Artificial
  Synthetic oligonucleotide
cagagcaggcgctgagtagatacgttcaccgctcatgaggggtcgtctgacgttc

SEQ ID NO: 291925 - DNA, 55 bp, Artificial
  Synthetic oligonucleotide
cagagggcttgtcaggctcgttctcctctggtcactgtacccgcgtctcgctacc

SEQ ID NO: 291926 - DNA, 55 bp, Artificial
  Synthetic oligonucleotide
cagatagcaggtatctcttttctggaggatgcgataatgagcttaagatgcatga

SEQ ID NO: 291927 - DNA, 60 bp, Artificial
  Synthetic oligonucleotide
cgaagatacgtgtgcctctcgctcgctttaacactgtgcgtgtgcgcttgtctaagatga

SEQ ID NO: 291928 - DNA, 55 bp, Artificial
  Synthetic oligonucleotide
cagatcactctgcctacgctgcgtgctatggcatccctgcggtgtagtcacgccc

SEQ ID NO: 291929 - DNA, 55 bp, Artificial
  Synthetic oligonucleotide
cagatcctaaaccccgcattacgagcatacagatcgtcgctagaccgtgtcctgt

SEQ ID NO: 291930 - DNA, 55 bp, Artificial
  Synthetic oligonucleotide
cagatgcacgcgtaaacgcttcagcagaatgttagtgcacagacacagcgacaca

SEQ ID NO: 291931 - DNA, 55 bp, Artificial
  Synthetic oligonucleotide
cagatgccgtgcgttatcgtgctccgctacaagactactgagatctgcaagaggg

SEQ ID NO: 291932 - DNA, 55 bp, Artificial
  Synthetic oligonucleotide
cagcaaaggtgccgctgagaagaggagcaaactccgtggcagtgcgagtgacccc

SEQ ID NO: 291933 - DNA, 55 bp, Artificial
  Synthetic oligonucleotide
cagcaatcaggtggggtagcacgagacactcctcgtacaagctcagcacctggcg

SEQ ID NO: 291934 - DNA, 55 bp, Artificial
  Synthetic oligonucleotide
cagcacagccactagcgctttatgagtttagcgcctcgttacgggtgccggcagg

SEQ ID NO: 291935 - DNA, 55 bp, Artificial
  Synthetic oligonucleotide
cagcacgtgtgccaagccagctgaacaactcgccctcctacatgggtacttcgcg

SEQ ID NO: 291936 - DNA, 55 bp, Artificial
  Synthetic oligonucleotide
cagcactgatgcaaaactctgtgtataggcttgtgaacttgcgctgtgagtcggt

SEQ ID NO: 291937 - DNA, 55 bp, Artificial
  Synthetic oligonucleotide
cagcagtagcggtcatactattgaagagccgagtgttatccatccataccaggcg

SEQ ID NO: 291938 - DNA, 53 bp, Artificial
  Synthetic oligonucleotide
ccgaaccttggactcttgaaatattcttggaagattcgtaattagtggttaaa

SEQ ID NO: 291939 - DNA, 55 bp, Artificial
  Synthetic oligonucleotide
cagcagtggcatcccttttaccaccagcactacgtttaagacgtcttttggcgac

SEQ ID NO: 291940 - DNA, 55 bp, Artificial
  Synthetic oligonucleotide
cagcatccgcaagactgtttggtgcctcacgacgctcatgcgccggtgggaggta

SEQ ID NO: 291941 - DNA, 55 bp, Artificial
  Synthetic oligonucleotide
cagccacgccaccacgtctttcctaataagcgcggactggcgctatcaacgcatg

SEQ ID NO: 291942 - DNA, 55 bp, Artificial
  Synthetic oligonucleotide
cagccgtacgctgtatgtgagaaatccgtaccacagaacgggaacactacctaca

SEQ ID NO: 291943 - DNA, 54 bp, Artificial
  Synthetic oligonucleotide
cagcctccgcaaaggccgtttcgtctagtttggttaggacgttagcttttcatg

SEQ ID NO: 291944 - DNA, 55 bp, Artificial
  Synthetic oligonucleotide
cactaagaagggaacgcacagacagccgaagacggaaagccagcgaggggtacac

SEQ ID NO: 291945 - DNA, 55 bp, Artificial
  Synthetic oligonucleotide
cactacgagtcgtagagtgcagtctggagaagagtacacagtatctggtagctgt

SEQ ID NO: 291946 - DNA, 55 bp, Artificial
  Synthetic oligonucleotide
cactacgcgtgcgcctcaaaggggacggccagacgagtcattattttagggcccc

SEQ ID NO: 291947 - DNA, 55 bp, Artificial
  Synthetic oligonucleotide
cactagacatggaaaacctggtattggtgctacacattcatctcgttttattcca

SEQ ID NO: 291948 - DNA, 55 bp, Artificial
  Synthetic oligonucleotide
cactatggagtggcgagttaggaactaagcgaagtgacaacacgactacgatgcg

SEQ ID NO: 291949 - DNA, 60 bp, Artificial
  Synthetic oligonucleotide
ataataatactagacgtgtagcatcaaaacatcatatgatttgggcaatatatgttatgt

SEQ ID NO: 291950 - DNA, 55 bp, Artificial
  Synthetic oligonucleotide
cactcacgccgtccaaggggagcgaaatcaacgacacacatacacgcaagcgacg

SEQ ID NO: 291951 - DNA, 55 bp, Artificial
  Synthetic oligonucleotide
cactcagcgccctcagctgcaatggtccgctcttcagtacgtggtgtgcgctgtg

SEQ ID NO: 291952 - DNA, 55 bp, Artificial
  Synthetic oligonucleotide
cactcataagcagacacgggtctgttaagtcggccgctcatccacgcccatttac

SEQ ID NO: 291953 - DNA, 55 bp, Artificial
  Synthetic oligonucleotide
cactcgactagttgtcctccccgatgtggaagcgtcgtacggagaggggacacgc

SEQ ID NO: 291954 - DNA, 55 bp, Artificial
  Synthetic oligonucleotide
cactcgaggtcccacgcaagaggtgagtctactcccgcccttctgcagtcttcgc

SEQ ID NO: 291955 - DNA, 55 bp, Artificial
  Synthetic oligonucleotide
cactctatacgcacataaccgccgcgtctacattcccgctcaaacaaatcacacg

SEQ ID NO: 291956 - DNA, 55 bp, Artificial
  Synthetic oligonucleotide
cactcttggtctttacgttcataatgatgtagtacaagcttttggaacaccagag

SEQ ID NO: 291957 - DNA, 55 bp, Artificial
  Synthetic oligonucleotide
cactgacaccacgtcactctgacacgcgcacaagcttcgagtctcctcacagacc

SEQ ID NO: 291958 - DNA, 55 bp, Artificial
  Synthetic oligonucleotide
cactgattgcgaggtatgactgctacgaggtgaaaactgttggtgatttgttcac

SEQ ID NO: 291959 - DNA, 55 bp, Artificial
  Synthetic oligonucleotide
cactgcatgaaggggcagtcgataaagttacacattgcactggcactagagtccg

SEQ ID NO: 291960 - DNA, 59 bp, Artificial
  Synthetic oligonucleotide
tacaaatcgttagcaagacatgacagggagttggcaagtcaaagaagttctggtttata

SEQ ID NO: 291961 - DNA, 54 bp, Artificial
  Synthetic oligonucleotide
ccgaaacaccccgaatgcaagtatgccttacaccgggaaggtccctgcagcccc

SEQ ID NO: 291962 - DNA, 55 bp, Artificial
  Synthetic oligonucleotide
cactgccaacgcgcaaaatgacaacgtaacccctgtaagcggctaatagccctgt

SEQ ID NO: 291963 - DNA, 55 bp, Artificial
  Synthetic oligonucleotide
cactggtgtcggtcgttacttaactggtaaattcactcaactcttggaaattgtc

SEQ ID NO: 291964 - DNA, 55 bp, Artificial
  Synthetic oligonucleotide
cactgtatccagaacaatcggtgccgctagcagcgtgggacacagaacatcctcg

SEQ ID NO: 291965 - DNA, 55 bp, Artificial
  Synthetic oligonucleotide
cactgtggtgtcaatcctaagtgtcactggtgcgatgggaccaatgataatgctg

SEQ ID NO: 291966 - DNA, 55 bp, Artificial
  Synthetic oligonucleotide
cacttcaatgctcggcatcatctctccgttctccatacgttccaataggggttca

SEQ ID NO: 291967 - DNA, 55 bp, Artificial
  Synthetic oligonucleotide
cacttcgcagaattgggttgtttctccttactgagctcccaagaatcacctctcg

SEQ ID NO: 291968 - DNA, 55 bp, Artificial
  Synthetic oligonucleotide
cacttctcctcgtaggttgggtcgcgtcgcttgagtacccctcggcgagtcattg

SEQ ID NO: 291969 - DNA, 55 bp, Artificial
  Synthetic oligonucleotide
cacttgccaagcccgtcaatgctgtcgatgcagctatgcttttcaatagggctct

SEQ ID NO: 291970 - DNA, 55 bp, Artificial
  Synthetic oligonucleotide
cacttgcgtcttcgtctgcgcatctcttccctttagttgtgggctgctgtgcgtc

SEQ ID NO: 291971 - DNA, 55 bp, Artificial
  Synthetic oligonucleotide
cagaaagtaatgtacttgaagcagcccataacagtgatgatccaaatccacatac

SEQ ID NO: 291972 - DNA, 57 bp, Artificial
  Synthetic oligonucleotide
aaaggaacagtccttttctataatggttagatggacgcaagcataaatccagccgga

SEQ ID NO: 291973 - DNA, 55 bp, Artificial
  Synthetic oligonucleotide
cagaaatattaacatctacacctccaagggtaacgcaatgttctaccaggtggtt

SEQ ID NO: 291974 - DNA, 55 bp, Artificial
  Synthetic oligonucleotide
cagaaatccaatacgtagctcttcgctcaatcctggttgtcatatcaaagtaccc

SEQ ID NO: 291975 - DNA, 55 bp, Artificial
  Synthetic oligonucleotide
cagaaattaactctgtaaactatgtatctccgcgctcttggttatctacttctca

SEQ ID NO: 291976 - DNA, 55 bp, Artificial
  Synthetic oligonucleotide
cagaaccaccggattcagttacaatagtgatatctttgggatgcatagatggatc

SEQ ID NO: 291977 - DNA, 55 bp, Artificial
  Synthetic oligonucleotide
cagaagacatgagaaaacccgcaaagtccccgcacaacagcaaagatgcgctgat

SEQ ID NO: 291978 - DNA, 55 bp, Artificial
  Synthetic oligonucleotide
cagaagcctgcactggtcgcgaatgaatgtatcactatccgtgtacgtggcggcc

SEQ ID NO: 291979 - DNA, 55 bp, Artificial
  Synthetic oligonucleotide
acacagggcagctcgcacaatatcgcggtgtgtgcgccgtaccgtctggcgcatg

SEQ ID NO: 291980 - DNA, 55 bp, Artificial
  Synthetic oligonucleotide
acaccacaagtagaggagcctctgcgcgtgtcgtctgtgtatgccagtcgcggcg

SEQ ID NO: 291981 - DNA, 53 bp, Artificial
  Synthetic oligonucleotide
acaccccatcggactggttctacgtcgactacggaggtgtgaaaacaaacgcg

SEQ ID NO: 291982 - DNA, 55 bp, Artificial
  Synthetic oligonucleotide
acacccgatacgatgctaaacgtactcatgtccgcttctattctcgcgtgcgtcc

SEQ ID NO: 291983 - DNA, 60 bp, Artificial
  Synthetic oligonucleotide
tgtgaatggtataacgacttctctattgtctccactaaatgttctatgaaatagacttag

SEQ ID NO: 291984 - DNA, 55 bp, Artificial
  Synthetic oligonucleotide
acaccgaagtgtctggtgaccccggaatcaggacgcaggggtacagagaagactg

SEQ ID NO: 291985 - DNA, 55 bp, Artificial
  Synthetic oligonucleotide
acaccgagaaggcagcggagccgaccctcacgtaggcaggagatcctaacgcgtg

SEQ ID NO: 291986 - DNA, 55 bp, Artificial
  Synthetic oligonucleotide
acaccgtgctactgttgcttatctatcctcaccgacgtatccgtgattcgagtcc

SEQ ID NO: 291987 - DNA, 55 bp, Artificial
  Synthetic oligonucleotide
acacctgtaagcgcgtacacgcgcacatctgcgacccgcctcatcttggctcggc

SEQ ID NO: 291988 - DNA, 55 bp, Artificial
  Synthetic oligonucleotide
acacgcaagaggttcagcaagtgctgtaagtcggcttgccagaacggccgccctg

SEQ ID NO: 291989 - DNA, 55 bp, Artificial
  Synthetic oligonucleotide
acacgccactcccactggacgcggcaatgaagagtgtcccacgcaacgctgtcct

SEQ ID NO: 291990 - DNA, 55 bp, Artificial
  Synthetic oligonucleotide
acacgcgagaagcgcgagagagggaacgcagactatgtcctatcggcagctggcc

SEQ ID NO: 291991 - DNA, 55 bp, Artificial
  Synthetic oligonucleotide
acacggacaggcagacgggtagacgcacgcacgaccaacaagtgcgaggcgagga

SEQ ID NO: 291992 - DNA, 55 bp, Artificial
  Synthetic oligonucleotide
acacgggaggcggttgggagatacactcccatcgactcaggcatttcggtgcttc

SEQ ID NO: 291993 - DNA, 55 bp, Artificial
  Synthetic oligonucleotide
acacgtgcctgcgatctgcatgcggcctgtccgcacatcgactcgcacatgccta

SEQ ID NO: 291994 - DNA, 53 bp, Artificial
  Synthetic oligonucleotide
tgtcttacgtttgaatccaacagacgctttccgttttttaactacactacgaa

SEQ ID NO: 291995 - DNA, 55 bp, Artificial
  Synthetic oligonucleotide
acacgtggacgaacaccgcctcgaaagtctcggtttacaccggcactgcttcatt

SEQ ID NO: 291996 - DNA, 55 bp, Artificial
  Synthetic oligonucleotide
acacgttggacgcagcacggtaaaggcacagcgacgcgtggagggtgagccaaga

SEQ ID NO: 291997 - DNA, 55 bp, Artificial
  Synthetic oligonucleotide
acacgtttctttctcagcccacgttgcgcgtggaggggctcgtgtgccacgatcc

SEQ ID NO: 291998 - DNA, 55 bp, Artificial
  Synthetic oligonucleotide
acactcgggctctcctcacctcataaagcacgcatggcccgcacgcttgcgctct

SEQ ID NO: 291999 - DNA, 55 bp, Artificial
  Synthetic oligonucleotide
acactctcattacctctcgacgaatgtacacatcccggtcaaacacgtagtctcc

SEQ ID NO: 292000 - DNA, 55 bp, Artificial
  Synthetic oligonucleotide
acacttgcgtggcttgcagcggtccgaattcaccactgcaatacgggtaagccgg

SEQ ID NO: 292001 - DNA, 55 bp, Artificial
  Synthetic oligonucleotide
acagaacgtgacagtggacgctactttcatacactcagcggcacatttggttggc

SEQ ID NO: 292002 - DNA, 55 bp, Artificial
  Synthetic oligonucleotide
acagagtggcacagaggactccgctcaccttgcgcggaactccaacttacttcgt

SEQ ID NO: 292003 - DNA, 55 bp, Artificial
  Synthetic oligonucleotide
acagagttggatctgttacactccccaatccgtcctgaagtggcccgagttgtgg

SEQ ID NO: 292004 - DNA, 55 bp, Artificial
  Synthetic oligonucleotide
acagatgcgcggatagtgtgggaatatgcatgtctttccaggtagacgtgtctgc

SEQ ID NO: 292005 - DNA, 59 bp, Artificial
  Synthetic oligonucleotide
gcctgaatcgcaagttacgaagtaaatgacaactcccgaacggctgcgattcagacgat

SEQ ID NO: 292006 - DNA, 55 bp, Artificial
  Synthetic oligonucleotide
acagcacggcccacacatacatatgaggcgtgcactaggcaacagagggtgcagc

SEQ ID NO: 292007 - DNA, 55 bp, Artificial
  Synthetic oligonucleotide
acagcctcttgggtgtgcgtggccggtaggtcatgtacacgacccttcgtcctcc

SEQ ID NO: 292008 - DNA, 55 bp, Artificial
  Synthetic oligonucleotide
acagcgcgggtgctggaccctgacacgatacactggggcctctcccgtcgtcagg

SEQ ID NO: 292009 - DNA, 55 bp, Artificial
  Synthetic oligonucleotide
acagcgctccatcgactctccacccgtccactcgctcgcgaagacccacgatcgc

SEQ ID NO: 292010 - DNA, 55 bp, Artificial
  Synthetic oligonucleotide
acagcggtccaggacttgtgccttcgtaagccgcatgcaacgcacggcagtccgt

SEQ ID NO: 292011 - DNA, 55 bp, Artificial
  Synthetic oligonucleotide
acagggactatatacaacaacgaccggatggtatggaccggatggtatgtaccgg

SEQ ID NO: 292012 - DNA, 55 bp, Artificial
  Synthetic oligonucleotide
aatcattgcagtggtgcacatcgcttgatgcttctcacatgcttggcgtccactg

SEQ ID NO: 292013 - DNA, 55 bp, Artificial
  Synthetic oligonucleotide
aatccataagaaatacggatgaataacaggagtacatattttccgacctgggacc

SEQ ID NO: 292014 - DNA, 55 bp, Artificial
  Synthetic oligonucleotide
aatcgattgatgcgtactatcctgagaagaggcagtatcagtagatagcaatgga

SEQ ID NO: 292015 - DNA, 55 bp, Artificial
  Synthetic oligonucleotide
aatcgctcccattggggctcaacacttcctcaccactggttatgatggaaacgta

SEQ ID NO: 292016 - DNA, 55 bp, Artificial
  Synthetic oligonucleotide
tgtccgtgaatcaacttttgaagggcaccatattaaagcagtaaaaaccggtcta

SEQ ID NO: 292017 - DNA, 55 bp, Artificial
  Synthetic oligonucleotide
aatcgtccctccaagtccgtgtccgccgcagcaacggagaagcgaagacgcgcaa

SEQ ID NO: 292018 - DNA, 55 bp, Artificial
  Synthetic oligonucleotide
aatctccagtcctaacctaagcgacgtgtgcctctggaaccccggtgagtccaag

SEQ ID NO: 292019 - DNA, 55 bp, Artificial
  Synthetic oligonucleotide
aatctgcgaatgtgcttgtggcggtccgcactacatagccccactcctcaaggat

SEQ ID NO: 292020 - DNA, 55 bp, Artificial
  Synthetic oligonucleotide
aatcttaacccaggtgatctcttaggtactggtacaattagtggcccaactgaag

SEQ ID NO: 292021 - DNA, 53 bp, Artificial
  Synthetic oligonucleotide
aatgaggatgaccggttccactcaaagggattgttacgttatttcttccaacg

SEQ ID NO: 292022 - DNA, 55 bp, Artificial
  Synthetic oligonucleotide
aatgagttaccattccctagtgaaccaataactgaatcttccaactgtacaccct

SEQ ID NO: 292023 - DNA, 55 bp, Artificial
  Synthetic oligonucleotide
aatgcaagcgtccttgtgcttcctcttcgcagccgcttcagaagtcgttcaaagc

SEQ ID NO: 292024 - DNA, 55 bp, Artificial
  Synthetic oligonucleotide
aatgcccctcggtcgaaagcaatttcctcattgaactagttagtgcacccaaacc

SEQ ID NO: 292025 - DNA, 55 bp, Artificial
  Synthetic oligonucleotide
aatggcacgtgttatggcgggatggtgcgtcgaaatccgcactgtgttcacatca

SEQ ID NO: 292026 - DNA, 55 bp, Artificial
  Synthetic oligonucleotide
aatgggagcttacacgtatataggtgtgttgcatatacacgccacgttcaggtgc

SEQ ID NO: 292027 - DNA, 59 bp, Artificial
  Synthetic oligonucleotide
cccttaggccagaagagtcggattactcgaacacccatacagactcgaatcgcacacga

SEQ ID NO: 292028 - DNA, 55 bp, Artificial
  Synthetic oligonucleotide
aatggtgaaggatgacctagtagttctactagacgaggacatgcatcactacgca

SEQ ID NO: 292029 - DNA, 55 bp, Artificial
  Synthetic oligonucleotide
aattacgcagcagaggcactaacggtccgaagatcctggcagccctctccgcgcc

SEQ ID NO: 292030 - DNA, 55 bp, Artificial
  Synthetic oligonucleotide
aattggactggtgtatcattttgcagagaacgtatgcatagggcagaaggatcgc

SEQ ID NO: 292031 - DNA, 55 bp, Artificial
  Synthetic oligonucleotide
aatttcgatcatgcggacattataggctactataatagcgttgctcgtggtatca

SEQ ID NO: 292032 - DNA, 55 bp, Artificial
  Synthetic oligonucleotide
acaaatactcgaaactgaagatgagtcgcgagcgaatgtttgggattctgaagcg

SEQ ID NO: 292033 - DNA, 55 bp, Artificial
  Synthetic oligonucleotide
acaactacgtttgcagacgattgttggcagcagagtcatccacgggttgcagatg

SEQ ID NO: 292034 - DNA, 55 bp, Artificial
  Synthetic oligonucleotide
acaaggcaaccgcggcaagtatagcgcgcaaggtgccacatggggaaggcagtcc

SEQ ID NO: 292035 - DNA, 55 bp, Artificial
  Synthetic oligonucleotide
acaagtacgcatggaaggttgccaggtagcggcggaggcacacgtccgaagatga

SEQ ID NO: 292036 - DNA, 55 bp, Artificial
  Synthetic oligonucleotide
acaatagacgtattcaggggtgtaccgagcgtcttcgcgtcactagaaatgaggg

SEQ ID NO: 292037 - DNA, 55 bp, Artificial
  Synthetic oligonucleotide
acaatcattcgttggcgtggagagccaaatgcatgcaagattgcatgtagtgacg

SEQ ID NO: 292038 - DNA, 53 bp, Artificial
  Synthetic oligonucleotide
aacattctagggtttttcgcgttttttcaggagaaatccgtatatcgatgtct

SEQ ID NO: 292039 - DNA, 55 bp, Artificial
  Synthetic oligonucleotide
acaatcgaaacacgtaggggtgatattccccagcactacgtggcgtgcttgcatg

SEQ ID NO: 292040 - DNA, 55 bp, Artificial
  Synthetic oligonucleotide
acacaaccccacaccaaaggtgcgtaggcgcaaaaggagggcaggtgaggcgacc

SEQ ID NO: 292041 - DNA, 55 bp, Artificial
  Synthetic oligonucleotide
acacaacggtttaggttgtatcctccgtatgtgcaacgcactagtgctgggtgat

SEQ ID NO: 292042 - DNA, 55 bp, Artificial
  Synthetic oligonucleotide
acacagagtcggtcgcgtctgcgtcgctctttacgcgccgcgcatccattagctc

SEQ ID NO: 292043 - DNA, 55 bp, Artificial
  Synthetic oligonucleotide
acacagcgtgcgtccgtttatcctacagcggtaaaagggtgaagcattgagccga

SEQ ID NO: 292044 - DNA, 55 bp, Artificial
  Synthetic oligonucleotide
acccatcactctcttgtacctgccgtgctcggaaggcgaatagacacaacacccg

SEQ ID NO: 292045 - DNA, 55 bp, Artificial
  Synthetic oligonucleotide
acccatgtagaggcttaatgggatcaaaaatgcatactcaagccttacctttaat

SEQ ID NO: 292046 - DNA, 54 bp, Artificial
  Synthetic oligonucleotide
accccacgggtgcttctatccccacgggtgaatataacactaggggtgcttcta

SEQ ID NO: 292047 - DNA, 55 bp, Artificial
  Synthetic oligonucleotide
accccagctttacacaagcattgcccggttaacacgtcacaggtgctgttgacac

SEQ ID NO: 292048 - DNA, 55 bp, Artificial
  Synthetic oligonucleotide
acccgcgctcgtggtgtgttgtacgtaagcgtcgcccgcactggaggctgcgtaa

SEQ ID NO: 292049 - DNA, 60 bp, Artificial
  Synthetic oligonucleotide
tgtatgcttctaacattccatttgcttataactgtatggacgtaacctccaggcaaagat

SEQ ID NO: 292050 - DNA, 55 bp, Artificial
  Synthetic oligonucleotide
acccgtatgtggcgtctgcagcggagacgtggccatacacgagctgttcaccgat

SEQ ID NO: 292051 - DNA, 55 bp, Artificial
  Synthetic oligonucleotide
acccgtccgttgctcactccggaacccttctgcgaatggagagtagagacagtga

SEQ ID NO: 292052 - DNA, 55 bp, Artificial
  Synthetic oligonucleotide
acccgtgaatgctgctcgagcaacccaccgtcttggaatgcttgccacaccagca

SEQ ID NO: 292053 - DNA, 55 bp, Artificial
  Synthetic oligonucleotide
accctacggtaaagtgcgctagccctaccagacgcgcctgaacgatcgataacgc

SEQ ID NO: 292054 - DNA, 55 bp, Artificial
  Synthetic oligonucleotide
accctgcgctcaatctccacaataccttcgttgttgagcaggcgtaacttgcgcc

SEQ ID NO: 292055 - DNA, 55 bp, Artificial
  Synthetic oligonucleotide
accctgctccgctggatagcgctgccccttcatcgaatacgtgtaatgcaatggc

SEQ ID NO: 292056 - DNA, 53 bp, Artificial
  Synthetic oligonucleotide
accgaaccgtaaggagaacgtaggagggtgcaacaacgcgggtcctgtgtcca

SEQ ID NO: 292057 - DNA, 55 bp, Artificial
  Synthetic oligonucleotide
accgcacgaagcatcgctctcgtttcccgcttcggtgattcctggcgacgcctct

SEQ ID NO: 292058 - DNA, 55 bp, Artificial
  Synthetic oligonucleotide
accgcagtttacctggcgtaaccccttacccgcatgcacgcactttaagtgacgc

SEQ ID NO: 292059 - DNA, 55 bp, Artificial
  Synthetic oligonucleotide
accgcggacgcccagtatgtgtcggaaacctacgccgcaccacaggatgtcgtga

SEQ ID NO: 292060 - DNA, 54 bp, Artificial
  Synthetic oligonucleotide
gcaacagtcgatcaaagtgggattcgttacccagtcgtagttcgttttgaaaac

SEQ ID NO: 292061 - DNA, 55 bp, Artificial
  Synthetic oligonucleotide
accgctcggtacaagcaccgggctgtccgatattgtgtcttgcggagactaggcg

SEQ ID NO: 292062 - DNA, 55 bp, Artificial
  Synthetic oligonucleotide
accgctgtccttcatggggtgcgggcgagacacggcgacactgcccaaggtacat

SEQ ID NO: 292063 - DNA, 55 bp, Artificial
  Synthetic oligonucleotide
accgtatcctcatcacgttggggagactctcgtttcggagctcaacacgctttgc

SEQ ID NO: 292064 - DNA, 55 bp, Artificial
  Synthetic oligonucleotide
acctaatccctcagtaatgggcaaactgcaaagctgcccctgtgaattggatacg

SEQ ID NO: 292065 - DNA, 55 bp, Artificial
  Synthetic oligonucleotide
acctacaaatgctagtctttcattgcaaggtacttcttaaccccaccatgatgcc

SEQ ID NO: 292066 - DNA, 55 bp, Artificial
  Synthetic oligonucleotide
acctacattagctacacagcagcgagtggctagtgcactgtcgcccacccatccg

SEQ ID NO: 292067 - DNA, 55 bp, Artificial
  Synthetic oligonucleotide
acctccggtacctcaaagatacacaggtcacctctagcatagctatgactcaagg

SEQ ID NO: 292068 - DNA, 55 bp, Artificial
  Synthetic oligonucleotide
acctcgaaggatcagtgcaagtactgcggctccgaggcgcacctctcgcgtcact

SEQ ID NO: 292069 - DNA, 55 bp, Artificial
  Synthetic oligonucleotide
acctctgtaaacatacctgcacttacctctgtaaacgtacctgtgagcacgcgtg

SEQ ID NO: 292070 - DNA, 55 bp, Artificial
  Synthetic oligonucleotide
acctgtggtgtcgtagcactgagggcggcggtaactctcactagtgtataaacac

SEQ ID NO: 292071 - DNA, 59 bp, Artificial
  Synthetic oligonucleotide
gcttatagcacagcctcgattacctatttggttgacttagctctgtaccagggttacaa

SEQ ID NO: 292072 - DNA, 57 bp, Artificial
  Synthetic oligonucleotide
aaagggaggtgcgccgtgtccaaatctggaggacttacgtccctgctcaagagaagc

SEQ ID NO: 292073 - DNA, 53 bp, Artificial
  Synthetic oligonucleotide
acgaaccggttgcggtgtttcggttcttatccgtgaatgtttccggatgtcta

SEQ ID NO: 292074 - DNA, 55 bp, Artificial
  Synthetic oligonucleotide
acgacggttgttggctgtggtacgccgccaactcagtggtgtctctcaacgggcg

SEQ ID NO: 292075 - DNA, 55 bp, Artificial
  Synthetic oligonucleotide
acgagatctctgacgctgataggggagcccagaattggtgtatcgcagctatcag

SEQ ID NO: 292076 - DNA, 55 bp, Artificial
  Synthetic oligonucleotide
acgagccgcacactggggcgtacatgatgtgcatggtgaaccgcttcaacttctg

SEQ ID NO: 292077 - DNA, 55 bp, Artificial
  Synthetic oligonucleotide
acaggtcgagacgcgaggcgcactctttcgaggcgaatttcttggcatgtcgcag

SEQ ID NO: 292078 - DNA, 55 bp, Artificial
  Synthetic oligonucleotide
acagtcccgagacgatcaaacacccagccgcgagacacgcgaagggcacacgagt

SEQ ID NO: 292079 - DNA, 55 bp, Artificial
  Synthetic oligonucleotide
acagtgcggtagactcgcgtcgtcgggtccgctccggctctatgagtgatgggtg

SEQ ID NO: 292080 - DNA, 55 bp, Artificial
  Synthetic oligonucleotide
acataaagccgtgtgatggtgttccgtgctgagagtgcgctgcacacatgtcccc

SEQ ID NO: 292081 - DNA, 55 bp, Artificial
  Synthetic oligonucleotide
acatcagcggcggctgcacttttgcacgttcgcctcgaacctctgtgcgcagcac

SEQ ID NO: 292082 - DNA, 55 bp, Artificial
  Synthetic oligonucleotide
acatctaaattacgttgtgcttgtctgagctttgatgcagctaccattttcatcg

SEQ ID NO: 292083 - DNA, 53 bp, Artificial
  Synthetic oligonucleotide
agcgggacgaaaacggtggttggggattcgtccatctgttagaggtgtagtaa

SEQ ID NO: 292084 - DNA, 55 bp, Artificial
  Synthetic oligonucleotide
acatctgcggaaatatgtatattcgtgtaaggcttcagtcgggcgaggatgtgtt

SEQ ID NO: 292085 - DNA, 55 bp, Artificial
  Synthetic oligonucleotide
acatctgcttcacgtagcaaagcgcgcccacctcgtaccctctcccctttaccgc

SEQ ID NO: 292086 - DNA, 55 bp, Artificial
  Synthetic oligonucleotide
acatgaccaggctcaggtctatagcgagcctgctttattccagacacgtaactgc

SEQ ID NO: 292087 - DNA, 55 bp, Artificial
  Synthetic oligonucleotide
acatgatgcggaggacggggacgctcatgacagacgtgttgccacccacgcagac

SEQ ID NO: 292088 - DNA, 55 bp, Artificial
  Synthetic oligonucleotide
acatgcctgtacatgtgcggaatgagagtaccatatacgatacgcgatggagagg

SEQ ID NO: 292089 - DNA, 55 bp, Artificial
  Synthetic oligonucleotide
acatgcgcgcaggggtagacatcgggacagagatgtgccggcccaacgtctgctt

SEQ ID NO: 292090 - DNA, 55 bp, Artificial
  Synthetic oligonucleotide
acatggtcgacacgtttctctctcagcccacgttgcgcgtggaggggctcgtgtg

SEQ ID NO: 292091 - DNA, 55 bp, Artificial
  Synthetic oligonucleotide
acatggtttgccagctctgtttggaaatgttacggtatcatcacgcacagtttcg

SEQ ID NO: 292092 - DNA, 55 bp, Artificial
  Synthetic oligonucleotide
acatgtcgcttagggctcgtcatgtggaggggcagccatcgtcgttggtatagcc

SEQ ID NO: 292093 - DNA, 55 bp, Artificial
  Synthetic oligonucleotide
acatgttgtgtgtacatccttgcgtacgtgggtgttcattcggatatctttggtg

SEQ ID NO: 292094 - DNA, 60 bp, Artificial
  Synthetic oligonucleotide
aacattatctactagcgcaggcaaattagtgttcggtggtccgtcaatgatactagctat

SEQ ID NO: 292095 - DNA, 55 bp, Artificial
  Synthetic oligonucleotide
acattattctccttcacggcctccattgcgaaacacagcgtaccgtcctccatct

SEQ ID NO: 292096 - DNA, 55 bp, Artificial
  Synthetic oligonucleotide
acattcacttaatcacatgcatcccactcgtcataacgcagcacgtcccttcacc

SEQ ID NO: 292097 - DNA, 55 bp, Artificial
  Synthetic oligonucleotide
acattcccacaatgcgtcgctgctatacgttcaaaacgcgctgtactgggtcccc

SEQ ID NO: 292098 - DNA, 55 bp, Artificial
  Synthetic oligonucleotide
accaaagacattatccttagacacccaaacaacagtggtaccctgagataccttg

SEQ ID NO: 292099 - DNA, 55 bp, Artificial
  Synthetic oligonucleotide
accaacacgcaagaggtagcggataagctgcagaaaataatctccgttgcgcgtg

SEQ ID NO: 292100 - DNA, 55 bp, Artificial
  Synthetic oligonucleotide
accaacgcttcacactgctctgcgacggagtcgttcacggagtgcagcacacgcc

SEQ ID NO: 292101 - DNA, 55 bp, Artificial
  Synthetic oligonucleotide
accacataacgaagggaattggaacactggccaggttgttacgattgcgtatgct

SEQ ID NO: 292102 - DNA, 55 bp, Artificial
  Synthetic oligonucleotide
accaccgagtcctcccgacgcgggtgtggagagtgtctacaccgcataacggcat

SEQ ID NO: 292103 - DNA, 51 bp, Artificial
  Synthetic oligonucleotide
accacgtgtaaaacgcctttgtgtccgtcggaacggggtcacgcaccaacc

SEQ ID NO: 292104 - DNA, 55 bp, Artificial
  Synthetic oligonucleotide
accactggaacgccatacccgcactgtgtggtcctctgaggcagtgtacagctcc

SEQ ID NO: 292105 - DNA, 55 bp, Artificial
  Synthetic oligonucleotide
tgtactaataccagctaaaacaaccgacactaataaaatatcttgggctccaaaa

SEQ ID NO: 292106 - DNA, 55 bp, Artificial
  Synthetic oligonucleotide
accatctcgcaaaagagggaagttgtttacgtgcacacatccgtgagtgtcgcgg

SEQ ID NO: 292107 - DNA, 55 bp, Artificial
  Synthetic oligonucleotide
accatctcgtctcggagcttcgcagctaccttcactctcgatatggaactggggt

SEQ ID NO: 292108 - DNA, 55 bp, Artificial
  Synthetic oligonucleotide
accatgtaatgcccaagacacaattcgattatgcttgcttattaatatgctcgtc

SEQ ID NO: 292109 - DNA, 55 bp, Artificial
  Synthetic oligonucleotide
acccaagcataatcgttggtgagtagtagtactcccgaggtgttcctatcaagtc

SEQ ID NO: 292110 - DNA, 55 bp, Artificial
  Synthetic oligonucleotide
acccacccagcaccccgatagtcccgtgccctctcgtgcgccttctctcccatac

SEQ ID NO: 292111 - DNA, 55 bp, Artificial
  Synthetic oligonucleotide
aaatccgtcatcgccaccgagtggtgccgagtgcgacctttcgacacctgtgccg

SEQ ID NO: 292112 - DNA, 55 bp, Artificial
  Synthetic oligonucleotide
aaatctactcctgacacagggtattggttcaagtccgatagcgggtagtttgata

SEQ ID NO: 292113 - DNA, 55 bp, Artificial
  Synthetic oligonucleotide
aaatctcccttggtcgacgcagcaacactgtagagtgagggtcagcctttgtggc

SEQ ID NO: 292114 - DNA, 55 bp, Artificial
  Synthetic oligonucleotide
aaatgggatactgggatgctgattacgttatcaaagatactgacgtacttgcaat

SEQ ID NO: 292115 - DNA, 55 bp, Artificial
  Synthetic oligonucleotide
aaattgcaggtaagaacgacgcaaggcagcaccactcggctgagcaagaggaggt

SEQ ID NO: 292116 - DNA, 60 bp, Artificial
  Synthetic oligonucleotide
gatcattgagcgtcttattaatagacgtatgttcgcaatctgttattcctatatagatgg

SEQ ID NO: 292117 - DNA, 55 bp, Artificial
  Synthetic oligonucleotide
aaattggcgatgcttatcgttggcatggagtaccatatgagtctcccagactacg

SEQ ID NO: 292118 - DNA, 55 bp, Artificial
  Synthetic oligonucleotide
aacaaaatcgagtccctcccgatatgcacttatcgacctctctatatgctgagat

SEQ ID NO: 292119 - DNA, 55 bp, Artificial
  Synthetic oligonucleotide
aacaaagaccgagcgaacagaggagacgagcgggcatccctcgctagggtgaggg

SEQ ID NO: 292120 - DNA, 55 bp, Artificial
  Synthetic oligonucleotide
aacaaaggacaacgtgtttgtgacgctatcgctcgtcatacagtaccaagtggcc

SEQ ID NO: 292121 - DNA, 54 bp, Artificial
  Synthetic oligonucleotide
aacaaaggtatacatacgtcccctacatgccaccgtgagtaaatgggtctcggg

SEQ ID NO: 292122 - DNA, 55 bp, Artificial
  Synthetic oligonucleotide
aacaaccggcggagtaacttctcaactgggaatacacacgtaagagaatggcaga

SEQ ID NO: 292123 - DNA, 55 bp, Artificial
  Synthetic oligonucleotide
aacaattcacacgagaagagtggcttcatcgatgcgtatactaagacgaatgcac

SEQ ID NO: 292124 - DNA, 55 bp, Artificial
  Synthetic oligonucleotide
aacacaaacgaggtagaaatctccattgttgtgactaatcgcattcgcgggactg

SEQ ID NO: 292125 - DNA, 51 bp, Artificial
  Synthetic oligonucleotide
aacacccttacaacccctttgttacaaccccaagaacttcattaagacgca

SEQ ID NO: 292126 - DNA, 55 bp, Artificial
  Synthetic oligonucleotide
aacactatctgccaatctagacatcatattgccagccctggataacaacatagcc

SEQ ID NO: 292127 - DNA, 60 bp, Artificial
  Synthetic oligonucleotide
tgtaccttcatctgtcgaaatcgcgttccgtgacagccgagcatattcgcatggaaaaca

SEQ ID NO: 292128 - DNA, 55 bp, Artificial
  Synthetic oligonucleotide
aacaggttcctataactttgccgaatcttccaacaaacgcctcgtgtgcgcctaa

SEQ ID NO: 292129 - DNA, 55 bp, Artificial
  Synthetic oligonucleotide
aacatcctaaagagcacctcggctcgtgtctgtgtccctgttatcgtagcccctt

SEQ ID NO: 292130 - DNA, 52 bp, Artificial
  Synthetic oligonucleotide
aaccccgtccaagttttgggacacggatctagtcgcatttacccccgcatcc

SEQ ID NO: 292131 - DNA, 55 bp, Artificial
  Synthetic oligonucleotide
aaccccttttgcgtgtagtggagtaaacaccagcctgcggaatgctagcgcgata

SEQ ID NO: 292132 - DNA, 55 bp, Artificial
  Synthetic oligonucleotide
aacccgtgtcgcagtcgtcttgtcagcagggttctgctccgctagtcgttgcgac

SEQ ID NO: 292133 - DNA, 55 bp, Artificial
  Synthetic oligonucleotide
aacccgttatggaaagggtgcgaagttccgcgggccgcatgcgataggggcacga

SEQ ID NO: 292134 - DNA, 52 bp, Artificial
  Synthetic oligonucleotide
aaccctagggagggccactccccagtttaaggccgctaggtttctatgtcca

SEQ ID NO: 292135 - DNA, 55 bp, Artificial
  Synthetic oligonucleotide
aaccgaagcgacaccaccggatgtgggaagctcaccctcacgactcgcccttgga

SEQ ID NO: 292136 - DNA, 55 bp, Artificial
  Synthetic oligonucleotide
aacctgaagagtcgccagcgaggagtccaagcgcagtacgcgtatgccgcagcga

SEQ ID NO: 292137 - DNA, 55 bp, Artificial
  Synthetic oligonucleotide
aacctgtctttggtcaggctcgtttcactatccgttcattctctatccgtagggc

SEQ ID NO: 292138 - DNA, 54 bp, Artificial
  Synthetic oligonucleotide
tgtaacctactctcaccaattccataccttgtaacttggttactaggaggtttc

SEQ ID NO: 292139 - DNA, 55 bp, Artificial
  Synthetic oligonucleotide
aacctgtgcacacgcgcgcggcatattgcggaggggtgacggacgaagaccaagg

SEQ ID NO: 292140 - DNA, 54 bp, Artificial
  Synthetic oligonucleotide
aacgaggagtggaaacttggacacctatccgttctagatcacgaaaaccaacga

SEQ ID NO: 292141 - DNA, 51 bp, Artificial
  Synthetic oligonucleotide
aacgtacccgtcaacccgagggacccgcgttggaaacacatggtgtggccc

SEQ ID NO: 292142 - DNA, 51 bp, Artificial
  Synthetic oligonucleotide
aaaacgatccggttggacaacaaaacgatccggttggacaacaaaacgatc

SEQ ID NO: 292143 - DNA, 52 bp, Artificial
  Synthetic oligonucleotide
aaaacgttcgcggataaccccgtgcgtagctttcacgacgaaacggagcacc

SEQ ID NO: 292144 - DNA, 55 bp, Artificial
  Synthetic oligonucleotide
aaaacttcccgggcaccagagtcccgtcgcacggcgccttgacaaatcgctggcc

SEQ ID NO: 292145 - DNA, 55 bp, Artificial
  Synthetic oligonucleotide
aaaagcgagtccgtcgcaaacgccctgaggagcgacctcggcgacaaatccttcg

SEQ ID NO: 292146 - DNA, 55 bp, Artificial
  Synthetic oligonucleotide
aaaatgctcaagtcggtattgctattggaggatctggaattggaatgtggtttgc

SEQ ID NO: 292147 - DNA, 55 bp, Artificial
  Synthetic oligonucleotide
aaaattgatgtatcaacgtccatggagtacttcgttttgcttcggttgtctcccc

SEQ ID NO: 292148 - DNA, 55 bp, Artificial
  Synthetic oligonucleotide
aaacaagaaattcgcctttagtccattagaaacgatgtagcatgtagctcgtggc

SEQ ID NO: 292149 - DNA, 58 bp, Artificial
  Synthetic oligonucleotide
tggtttatttcagctggtacacaacaaatataatgattagcctttacagtagtagaag

SEQ ID NO: 292150 - DNA, 55 bp, Artificial
  Synthetic oligonucleotide
aaacacagaagacccacttctaacgaactcatctgctgtgtgttggttcctttta

SEQ ID NO: 292151 - DNA, 53 bp, Artificial
  Synthetic oligonucleotide
aaaccggcgaccactcccattgtagttgggagacttgccgtacaaacgtcggc

SEQ ID NO: 292152 - DNA, 55 bp, Artificial
  Synthetic oligonucleotide
aaaccgtgaagccacgacaaggatggactcggagcagcccaagaaggtcccaagg

SEQ ID NO: 292153 - DNA, 47 bp, Artificial
  Synthetic oligonucleotide
aaaccttactcctataccctaaaaccttactcctataccctaaaacc

SEQ ID NO: 292154 - DNA, 55 bp, Artificial
  Synthetic oligonucleotide
aaacgaggtacggatgcagattactcttgtgggtctgaaaggcccacgagtcccc

SEQ ID NO: 292155 - DNA, 54 bp, Artificial
  Synthetic oligonucleotide
aaacggcgtggttattcggttatttctctccacatttacgctaaggcaatatta

SEQ ID NO: 292156 - DNA, 55 bp, Artificial
  Synthetic oligonucleotide
aaacgtccaatggatttccatacaattaccgagagactacacacaaagcactact

SEQ ID NO: 292157 - DNA, 55 bp, Artificial
  Synthetic oligonucleotide
aaactgcacactctcgtccgagcgttcaagaggtagtttcgccttttgttaaatg

SEQ ID NO: 292158 - DNA, 55 bp, Artificial
  Synthetic oligonucleotide
aaagagtcgcgaggggcgaggtcccgtccacacgacttgtcgtagtcaccacgga

SEQ ID NO: 292159 - DNA, 55 bp, Artificial
  Synthetic oligonucleotide
aaagatagcccacaagcctgtgcacaacggcggtgtagggaagcgagaggaggtg

SEQ ID NO: 292160 - DNA, 60 bp, Artificial
  Synthetic oligonucleotide
ccctgaggtactcgggatgggatccaatcagtacacgagcgcggtagatgtctggagcct

SEQ ID NO: 292161 - DNA, 55 bp, Artificial
  Synthetic oligonucleotide
aaagatgcggtacgctctgtcatgcatcttttgcgaatagacgtcctccacacct

SEQ ID NO: 292162 - DNA, 55 bp, Artificial
  Synthetic oligonucleotide
aaagcaagcaggtaaccgggaacgagctatgagtcttcacacaggaggcaaccaa

SEQ ID NO: 292163 - DNA, 55 bp, Artificial
  Synthetic oligonucleotide
aaagcagcccggcatacgtgctgtgcgagccttcctttgggttaaagcgcatctc

SEQ ID NO: 292164 - DNA, 55 bp, Artificial
  Synthetic oligonucleotide
aaagccggggtgtcgcccctcccctgtaggccagcgcattcacgagaggtctgag

SEQ ID NO: 292165 - DNA, 55 bp, Artificial
  Synthetic oligonucleotide
aaagggccacagaaacaaatcgtgggaaatgcgtaagcgctgctgccgtgtcagc

SEQ ID NO: 292166 - DNA, 55 bp, Artificial
  Synthetic oligonucleotide
aaagggtacagcggtcgtcatagtcgcccgcgtggttctttagtggatgtcccag

SEQ ID NO: 292167 - DNA, 55 bp, Artificial
  Synthetic oligonucleotide
aaaggtagccgagattgtacttctgaacaaggagatccggtatccaagccctaca

SEQ ID NO: 292168 - DNA, 55 bp, Artificial
  Synthetic oligonucleotide
aaaggtccctctccgcgcatgtgcgtgccacacgtgtgctgctgtcagcgtttcc

SEQ ID NO: 292169 - DNA, 52 bp, Artificial
  Synthetic oligonucleotide
aaagtacaaggaaggtccgagacccgtggcacgaacgacgcagtccaccggg

SEQ ID NO: 292170 - DNA, 55 bp, Artificial
  Synthetic oligonucleotide
aaagtcaaaacgcgtcacctttctaggcccgtctgaggatgccatgtttgcgttg

SEQ ID NO: 292171 - DNA, 56 bp, Artificial
  Synthetic oligonucleotide
gcgaaagggatcgtatccccggaggctcacttttcgcggtacgcaagcaacagagg

SEQ ID NO: 292172 - DNA, 55 bp, Artificial
  Synthetic oligonucleotide
aaagtgcctgcgggacaggggacagcttcggagactccggagggacagtagtggc

SEQ ID NO: 292173 - DNA, 55 bp, Artificial
  Synthetic oligonucleotide
aaagtgtccaaacaccgtcagacttgctatggcttgctgtaatcttcgcttaggt

SEQ ID NO: 292174 - DNA, 53 bp, Artificial
  Synthetic oligonucleotide
aaatcattcctttccagatggaaggggcgtttctactccaccaggtttgttgg

SEQ ID NO: 292175 - DNA, 55 bp, Artificial
  Synthetic oligonucleotide
aaggacaactgacgatgcggcttacgttggtgagaactctcactggactgggtcg

SEQ ID NO: 292176 - DNA, 55 bp, Artificial
  Synthetic oligonucleotide
aaggacgagacacagtcacgttggtcaacgcagccgctgtaacggtggccccgca

SEQ ID NO: 292177 - DNA, 55 bp, Artificial
  Synthetic oligonucleotide
aaggacgcagagcgtgctaatcctcttgcaaagaaacttatggtctttgcgaagg

SEQ ID NO: 292178 - DNA, 55 bp, Artificial
  Synthetic oligonucleotide
aaggagcgtcggaggtgtggtttcggcagttgcaaacacccttccgcgtgcgcgt

SEQ ID NO: 292179 - DNA, 55 bp, Artificial
  Synthetic oligonucleotide
aagggaccgaagacacgctgacagagtcgcatacgcctcgcacggcgattctccg

SEQ ID NO: 292180 - DNA, 55 bp, Artificial
  Synthetic oligonucleotide
aagggactgtctcaaggtgaatctggtgataatgttgggttacttttacgtggta

SEQ ID NO: 292181 - DNA, 54 bp, Artificial
  Synthetic oligonucleotide
aagggatggtcctatatgtcccctaaattcgttttatttgacttggcctatata

SEQ ID NO: 292182 - DNA, 57 bp, Artificial
  Synthetic oligonucleotide
actttgtgcgaaaataccccacaacggtgcgcccaaagcgctcctcttcgcagaaga

SEQ ID NO: 292183 - DNA, 59 bp, Artificial
  Synthetic oligonucleotide
gcgccgcctgcaataagtagtaaacaaaaacatgttaatagcatatagaacgatgaatt

SEQ ID NO: 292184 - DNA, 54 bp, Artificial
  Synthetic oligonucleotide
aagggcgctagttatgtttagttttgcgggctttaatagctctagctaccctaa

SEQ ID NO: 292185 - DNA, 55 bp, Artificial
  Synthetic oligonucleotide
aaggggagcgttagtaatgcttcacgcacaatgcataggaagcgcccctgtagaa

SEQ ID NO: 292186 - DNA, 55 bp, Artificial
  Synthetic oligonucleotide
aaggtgcgccgaggtcttgtcgacggcgctctagcgagaggcgcatgtacctagt

SEQ ID NO: 292187 - DNA, 55 bp, Artificial
  Synthetic oligonucleotide
aagtacatagtatctggtaacactacgaatggtagagtgcagtctggagaagagt

SEQ ID NO: 292188 - DNA, 55 bp, Artificial
  Synthetic oligonucleotide
aagtatgcctctattagcgcacatgaagaagcgtgctacgctttgaagagtgccg

SEQ ID NO: 292189 - DNA, 55 bp, Artificial
  Synthetic oligonucleotide
aagtcagcgagccgttccatccatacttcgcgtcgacagcgagagtggcggagcg

SEQ ID NO: 292190 - DNA, 55 bp, Artificial
  Synthetic oligonucleotide
aagtcccaccgctctcgtcgtgctcctgaggaggtttggcttctgcactgcggga

SEQ ID NO: 292191 - DNA, 55 bp, Artificial
  Synthetic oligonucleotide
aagtccctgcgaagcgcatcacgagatgacgtcctacagtgtgggagaaagagct

SEQ ID NO: 292192 - DNA, 55 bp, Artificial
  Synthetic oligonucleotide
aagtcgcaccaatatgcacaataagtcgcaccaatatgcacaataagtcgcacca

SEQ ID NO: 292193 - DNA, 55 bp, Artificial
  Synthetic oligonucleotide
aagtcgcgcgcccttcaagtattatacgcacgggcgctgaataggccacaggtga

SEQ ID NO: 292194 - DNA, 56 bp, Artificial
  Synthetic oligonucleotide
aaagtccaattataaacttataagtagatctgtagcttaattagataaagtatgta

SEQ ID NO: 292195 - DNA, 55 bp, Artificial
  Synthetic oligonucleotide
aagtctcgcacctcggaaggaaggtgcacgccctgcaaggagagcctcacactcg

SEQ ID NO: 292196 - DNA, 55 bp, Artificial
  Synthetic oligonucleotide
aagtgcgactcatcgccaatgttgcatgccttttccatgttcgtcttgttatccc

SEQ ID NO: 292197 - DNA, 55 bp, Artificial
  Synthetic oligonucleotide
aagttaaactgttgagtcgagatggaaacaaccggaaaggttactgcatgtccta

SEQ ID NO: 292198 - DNA, 55 bp, Artificial
  Synthetic oligonucleotide
aagttgaaccctccgcagtcaccgatgcgacttaggtgctgccgtaagcctcgga

SEQ ID NO: 292199 - DNA, 55 bp, Artificial
  Synthetic oligonucleotide
aagttggggaacgctattggcctggagccctaactataattgtacctgcaagtgg

SEQ ID NO: 292200 - DNA, 55 bp, Artificial
  Synthetic oligonucleotide
aagttgtcaggctctaattccgtcgtccgcggtagacagtacatggacttgaagg

SEQ ID NO: 292201 - DNA, 54 bp, Artificial
  Synthetic oligonucleotide
aatacagggttcagggtttagagttgcgtattgggaacatatatttggggtcag

SEQ ID NO: 292202 - DNA, 55 bp, Artificial
  Synthetic oligonucleotide
aatatactggctagtcgttatgttagacctttgagacagagagctgagaaattct

SEQ ID NO: 292203 - DNA, 55 bp, Artificial
  Synthetic oligonucleotide
aatatgggtcctgtgcaatacgtagactatttgatcagggagttgttaataccgc

SEQ ID NO: 292204 - DNA, 55 bp, Artificial
  Synthetic oligonucleotide
aatcaacagaacttaactgttgatccaattgcatacgatccagcggttgggtcgc

SEQ ID NO: 292205 - DNA, 56 bp, Artificial
  Synthetic oligonucleotide
gcaaagacgtaagtggtctagtttgcaaaaaatgcaacggaggcattcccgaataa

SEQ ID NO: 292206 - DNA, 55 bp, Artificial
  Synthetic oligonucleotide
aatcagctcccactgtggcatcctcagcagctcagacacggtgagattccctctc

SEQ ID NO: 292207 - DNA, 48 bp, Artificial
  Synthetic oligonucleotide
aacgtcccgtcttccctctttggcggaacgttactttcccttctgggg

SEQ ID NO: 292208 - DNA, 55 bp, Artificial
  Synthetic oligonucleotide
aactagccagcgagcctgcaccttcagatctttgcgttctaatggccatccgcgt

SEQ ID NO: 292209 - DNA, 55 bp, Artificial
  Synthetic oligonucleotide
aactcgacttcccctcagcgagattacacaacggaccatagcatgattcgtggtg

SEQ ID NO: 292210 - DNA, 55 bp, Artificial
  Synthetic oligonucleotide
aactcgtcataccgcagcgacccaggcgctggcgtgagtagccatcttctgacgc

SEQ ID NO: 292211 - DNA, 54 bp, Artificial
  Synthetic oligonucleotide
aagaaaacgcactggaacatggcccttcgtcgccgggagacaccaaacgcggcg

SEQ ID NO: 292212 - DNA, 55 bp, Artificial
  Synthetic oligonucleotide
aagaactaccgtgcctacagcaacaaacacacaccggtcgagaccccgcgtcgca

SEQ ID NO: 292213 - DNA, 55 bp, Artificial
  Synthetic oligonucleotide
aagaactccaggcgttaacctgtagagttgagatggaaacagccggaaaggtatc

SEQ ID NO: 292214 - DNA, 55 bp, Artificial
  Synthetic oligonucleotide
aagaagtcgcagataaaacatccacactctttattagttggttggcatataaggg

SEQ ID NO: 292215 - DNA, 55 bp, Artificial
  Synthetic oligonucleotide
aagacagccaaaccatcgaggatgtatcgcacgcgcactatacaaccccacccgt

SEQ ID NO: 292216 - DNA, 55 bp, Artificial
  Synthetic oligonucleotide
aaactttgacactcctaagaaagttagatggaatgcctttaccatttgatttcga

SEQ ID NO: 292217 - DNA, 55 bp, Artificial
  Synthetic oligonucleotide
aagacattctaacatagcggacaatgagataggaggtattactcaaaagctggga

SEQ ID NO: 292218 - DNA, 55 bp, Artificial
  Synthetic oligonucleotide
aagacgggagcactcgagagggttcaaccctagacagcccgcacgcctggagcca

SEQ ID NO: 292219 - DNA, 55 bp, Artificial
  Synthetic oligonucleotide
aagagaacacagtaaacgctggttttatctgtgcaggatgggattgtttccgtgg

SEQ ID NO: 292220 - DNA, 55 bp, Artificial
  Synthetic oligonucleotide
aagagagcgcgaatcgcagatatcgtagtctaaacgtgcgcatgtgtgcatagcc

SEQ ID NO: 292221 - DNA, 55 bp, Artificial
  Synthetic oligonucleotide
aagagaggtaatggtacctcgttcaggaatggtcactctacccctggaagtaaca

SEQ ID NO: 292222 - DNA, 55 bp, Artificial
  Synthetic oligonucleotide
aagaggtgcgagacagtcgcacgtcgcagagagaggcacgcaacgcatcgtgggc

SEQ ID NO: 292223 - DNA, 55 bp, Artificial
  Synthetic oligonucleotide
aagaggtgcgaggcacattccggtacatggccccggaggtctacaagggtgaccc

SEQ ID NO: 292224 - DNA, 55 bp, Artificial
  Synthetic oligonucleotide
aagagtagaaaggctgcgacgacgacgttaccggctgtggcggagccaacagcgg

SEQ ID NO: 292225 - DNA, 55 bp, Artificial
  Synthetic oligonucleotide
aagagtcgactgatcgcgttagcggtgctgcgtcactcgcctggggaggatggca

SEQ ID NO: 292226 - DNA, 55 bp, Artificial
  Synthetic oligonucleotide
aagatgctccaccatctcacatgtgcgtcggtaggatacctaatccgtatcttac

SEQ ID NO: 292227 - DNA, 60 bp, Artificial
  Synthetic oligonucleotide
ccgatccacatatggtgcgtgaataatgaaatttgcgtcgcatagttctgagctagaaaa

SEQ ID NO: 292228 - DNA, 54 bp, Artificial
  Synthetic oligonucleotide
aagattcgccctgtataggaaagggtggcgacaaggtacgaatggaaataagac

SEQ ID NO: 292229 - DNA, 55 bp, Artificial
  Synthetic oligonucleotide
aagcacaactgacgatgcttcacgtctttctcgcctcctctcccgtttagctcgt

SEQ ID NO: 292230 - DNA, 55 bp, Artificial
  Synthetic oligonucleotide
aagcagtatgcacggcacacggagcagtagtgcggagtagcggcaaggggagagc

SEQ ID NO: 292231 - DNA, 55 bp, Artificial
  Synthetic oligonucleotide
aagcccttaagtcacgggccacagcttacttgacccgcgttctcgggagccctgc

SEQ ID NO: 292232 - DNA, 55 bp, Artificial
  Synthetic oligonucleotide
aagcggcagtggtgcgctgtccccttgacgccatcgatctggttacgagtagccg

SEQ ID NO: 292233 - DNA, 55 bp, Artificial
  Synthetic oligonucleotide
aagcgggcacacgactacatgtttcacgggcatcatctcctgcgcacggtctacg

SEQ ID NO: 292234 - DNA, 55 bp, Artificial
  Synthetic oligonucleotide
aagcggtgccattggggccctctcccctgcacgcacgtatgtgcatactccctct

SEQ ID NO: 292235 - DNA, 55 bp, Artificial
  Synthetic oligonucleotide
aagcgtgatcattcgagaagacgtcctgacaaagggagagacgacgtgtacagaa

SEQ ID NO: 292236 - DNA, 55 bp, Artificial
  Synthetic oligonucleotide
aagctggacgaaggagctccgtggagagacgcaagacgcgacgtgtaggcaaggc

SEQ ID NO: 292237 - DNA, 55 bp, Artificial
  Synthetic oligonucleotide
aagcttggcgctgccaacgccgtaacaacggtcatcgtccacagcgactttccgc

SEQ ID NO: 292238 - DNA, 60 bp, Artificial
  Synthetic oligonucleotide
tgacagccggtgaagtcaacacactctagctgcggacaccgttcgagtccgtcgacactc

SEQ ID NO: 292239 - DNA, 52 bp, Artificial
  Synthetic oligonucleotide
aaggaaaccgagctcgttaacacgaccgtctctccttgcaattccgtacggg

SEQ ID NO: 292240 - DNA, 55 bp, Artificial
  Synthetic oligonucleotide
agccgaggagtggaggatgttccaccccgacatgcccaactccagtggcgtcggg

SEQ ID NO: 292241 - DNA, 55 bp, Artificial
  Synthetic oligonucleotide
agccgcacgttgccatcgtggcgcctgagtctgccacacggagctttgtgacgct

SEQ ID NO: 292242 - DNA, 55 bp, Artificial
  Synthetic oligonucleotide
agccgttacgcgcgaaccgcttaccacgtgctgcacctctctgccgctaacacgc

SEQ ID NO: 292243 - DNA, 55 bp, Artificial
  Synthetic oligonucleotide
agcctactgctcgcaccaaacactgtagcgtactcccgcgtgctgacattaacag

SEQ ID NO: 292244 - DNA, 55 bp, Artificial
  Synthetic oligonucleotide
agcctccctctctcgctgtggcgcacagtacccctagatggtgaagcgtgcagct

SEQ ID NO: 292245 - DNA, 55 bp, Artificial
  Synthetic oligonucleotide
agccttcaacgcagcctaacaggcgaaacatccaatactcagatggtgcattggc

SEQ ID NO: 292246 - DNA, 55 bp, Artificial
  Synthetic oligonucleotide
agcgacacgcgatttgccctgacgctttcgatcaatccagaagtccgcacgctcc

SEQ ID NO: 292247 - DNA, 55 bp, Artificial
  Synthetic oligonucleotide
agcgactgtgcacaggacatcgaggctaaggagcccgccagtgtagtcaccccag

SEQ ID NO: 292248 - DNA, 55 bp, Artificial
  Synthetic oligonucleotide
agcgagagaggcccgtgtgcgtgggccttcatgatcacgccagcgctagcagaat

SEQ ID NO: 292249 - DNA, 54 bp, Artificial
  Synthetic oligonucleotide
aaagaagttctggtttataatagatacgttattaaagttaggatgtatgggata

SEQ ID NO: 292250 - DNA, 55 bp, Artificial
  Synthetic oligonucleotide
agcgcacagggactctcgcgtggtctgactcgcacctgacacgactaacgcgaac

SEQ ID NO: 292251 - DNA, 55 bp, Artificial
  Synthetic oligonucleotide
agcgcacccgacagtggacaatgtgcgcagccacacgagtggatcaaagggccct

SEQ ID NO: 292252 - DNA, 55 bp, Artificial
  Synthetic oligonucleotide
agcggagacaaagagacgaagcgaacgcattgttccctaaagcgtggctgatacg

SEQ ID NO: 292253 - DNA, 55 bp, Artificial
  Synthetic oligonucleotide
agcggcgacccttgccaattacctttccgggttgcccgctgactcgaccactgtc

SEQ ID NO: 292254 - DNA, 55 bp, Artificial
  Synthetic oligonucleotide
agcgggatcttcggccgtgtttgacgtccactactgattcctgcgtgctgaaagc

SEQ ID NO: 292255 - DNA, 55 bp, Artificial
  Synthetic oligonucleotide
agcgggcaccagtcgccacgcggcatgcaagagggacgctcaccgccctacacgg

SEQ ID NO: 292256 - DNA, 55 bp, Artificial
  Synthetic oligonucleotide
agcgttcgttctgaaaagaaacagatgccaggccaactgaactcgtttatgttta

SEQ ID NO: 292257 - DNA, 55 bp, Artificial
  Synthetic oligonucleotide
agcgtttcctccgcatacgctcttccgttagtccattggaccttgcatttatacg

SEQ ID NO: 292258 - DNA, 55 bp, Artificial
  Synthetic oligonucleotide
agctacgggtgcttctcctacaaatacgggagggaaagcgtataccacattgaag

SEQ ID NO: 292259 - DNA, 55 bp, Artificial
  Synthetic oligonucleotide
agctcagagagagccgagctcttgtcagtgccgcagtccgaacaccccatcgagc

SEQ ID NO: 292260 - DNA, 60 bp, Artificial
  Synthetic oligonucleotide
ttagcaaagaagagcaactccttaacaagtacaatgtcacactggggcactctgcttcca

SEQ ID NO: 292261 - DNA, 55 bp, Artificial
  Synthetic oligonucleotide
agctcctctttcgctaggattagaaaccgcaggaggggtaatgacggtattgatt

SEQ ID NO: 292262 - DNA, 55 bp, Artificial
  Synthetic oligonucleotide
agctgaactatttgaacccgtccccaactcttgttgtcgttctgaatattcgtga

SEQ ID NO: 292263 - DNA, 55 bp, Artificial
  Synthetic oligonucleotide
agcttcggtgccctcacggaagagtcccagctaaggatacaggacaccattacgc

SEQ ID NO: 292264 - DNA, 55 bp, Artificial
  Synthetic oligonucleotide
aggaagagtgtgcaagacagagggagcacaccctagggccgataaagtgttgaga

SEQ ID NO: 292265 - DNA, 55 bp, Artificial
  Synthetic oligonucleotide
aggaagggcggatgagagcaggcggttgtttgcacacgtgttcggacgtgggtgc

SEQ ID NO: 292266 - DNA, 55 bp, Artificial
  Synthetic oligonucleotide
aggaatttctacactgggcactatgtgtaccggggtactacgaagattggcactt

SEQ ID NO: 292267 - DNA, 55 bp, Artificial
  Synthetic oligonucleotide
aggacatagtctgcgttccctctctcgcgcttctcgcgtgtgcccctcctgctag

SEQ ID NO: 292268 - DNA, 55 bp, Artificial
  Synthetic oligonucleotide
aggacatgcagccgaccctgcagacgcaataaagcacgtgtgccgcccctcacga

SEQ ID NO: 292269 - DNA, 54 bp, Artificial
  Synthetic oligonucleotide
aggagacgaacttccggtttctatgtttgatcctaccggcactgttcctcttgg

SEQ ID NO: 292270 - DNA, 55 bp, Artificial
  Synthetic oligonucleotide
aggagcccaccactttatacgttgtcatgcataacggcccaaaatcagtgcccac

SEQ ID NO: 292271 - DNA, 60 bp, Artificial
  Synthetic oligonucleotide
gcgctaaacccggagagttctgcatctgcgccgaccttcaactgcccctggtccacacgc

SEQ ID NO: 292272 - DNA, 55 bp, Artificial
  Synthetic oligonucleotide
aggaggacgaattaagccaacgacttccatgacgactaataaatgacttttgtgc

SEQ ID NO: 292273 - DNA, 55 bp, Artificial
  Synthetic oligonucleotide
agaggcgtcgaagtgaactggaggggaacgtaaccaagtcagaaggctgtgcgtg

SEQ ID NO: 292274 - DNA, 53 bp, Artificial
  Synthetic oligonucleotide
agaggggatcacaaatttatagtctttaacaaatttacaccagtcttaggcgg

SEQ ID NO: 292275 - DNA, 55 bp, Artificial
  Synthetic oligonucleotide
agaggtgaacgggaatcgtgttttgtggatgacgtttgaagactttgctgctacg

SEQ ID NO: 292276 - DNA, 55 bp, Artificial
  Synthetic oligonucleotide
agagttcattgcggcatgcggaccactagtgttgcagagagaggcacgccacacc

SEQ ID NO: 292277 - DNA, 55 bp, Artificial
  Synthetic oligonucleotide
agatacctcgtacttatgagatacctcgtccttatgagatacctcgtccttatga

SEQ ID NO: 292278 - DNA, 55 bp, Artificial
  Synthetic oligonucleotide
agatattgagactcagtaacgaattcgacgaggtttggggtggaattaaggactg

SEQ ID NO: 292279 - DNA, 55 bp, Artificial
  Synthetic oligonucleotide
agatcgcctcttctcgcgactgtacgtctcctattttgaaagcgtctctgtacgc

SEQ ID NO: 292280 - DNA, 55 bp, Artificial
  Synthetic oligonucleotide
agatgaggatgctcacctctagacacctcctactgagactggtcacgttttcccc

SEQ ID NO: 292281 - DNA, 55 bp, Artificial
  Synthetic oligonucleotide
agatgctagaaaggtccaaacacacagggagttggccaacagcctagcatgggcg

SEQ ID NO: 292282 - DNA, 54 bp, Artificial
  Synthetic oligonucleotide
ttactacccaagcggagtatttttgcgttaacttattaatcaatactcatcttt

SEQ ID NO: 292283 - DNA, 55 bp, Artificial
  Synthetic oligonucleotide
agcaaactcccatggcagagtgttgaacacacctcattgcgatgtcggaatccgg

SEQ ID NO: 292284 - DNA, 52 bp, Artificial
  Synthetic oligonucleotide
agcaaacttcgtcgtaccggccaattagtcccacctctttcgtctccaaact

SEQ ID NO: 292285 - DNA, 55 bp, Artificial
  Synthetic oligonucleotide
agcaacgaattgtccaccttgaaagtcagcgtgtacgctgtgaacgactttcgca

SEQ ID NO: 292286 - DNA, 55 bp, Artificial
  Synthetic oligonucleotide
agcaactccgatttacgacatacggtgttcagcgtgcctccagtcagtgagccat

SEQ ID NO: 292287 - DNA, 55 bp, Artificial
  Synthetic oligonucleotide
agcacaaggctccggtccgttgcaactggtgcgtcaagaaagtgtacgcgtcggg

SEQ ID NO: 292288 - DNA, 55 bp, Artificial
  Synthetic oligonucleotide
agcacatgtccgtcttgatagcacacactctccacggaactcccgccctcaccgc

SEQ ID NO: 292289 - DNA, 55 bp, Artificial
  Synthetic oligonucleotide
agcaccgcgagaggcgggcacacagttgcccaggcattggacgtcaaagtcgccc

SEQ ID NO: 292290 - DNA, 55 bp, Artificial
  Synthetic oligonucleotide
agcagacctacgtgacgaaatacacgacagacatcgaccctcgcatgctgccgga

SEQ ID NO: 292291 - DNA, 55 bp, Artificial
  Synthetic oligonucleotide
agcaggaatgcatctcgcagcggagtgcgtagtcggcctgaccactggcgttgag

SEQ ID NO: 292292 - DNA, 55 bp, Artificial
  Synthetic oligonucleotide
agcaggactcccacaactctgaggtgcccagacagtcactcaccatgcggattcc

SEQ ID NO: 292293 - DNA, 55 bp, Artificial
  Synthetic oligonucleotide
tacaagagatcgcgtactttggaccgaaaaaagctgtgaggaaactacattaaag

SEQ ID NO: 292294 - DNA, 60 bp, Artificial
  Synthetic oligonucleotide
ttactaagcgccaggtagtcctggacactgaatccatgcgcgtgccatatatgctagaac

SEQ ID NO: 292295 - DNA, 55 bp, Artificial
  Synthetic oligonucleotide
agcagtggccattcgtcgaaataagtagaagacggagatcaacacaacggaaaca

SEQ ID NO: 292296 - DNA, 55 bp, Artificial
  Synthetic oligonucleotide
agcatatggcgcacaatgcgaggccggacctcctcacagcaaaacacaggcgggg

SEQ ID NO: 292297 - DNA, 55 bp, Artificial
  Synthetic oligonucleotide
agcatcgatttccctcatgtctcgtgacagacgattggtgagacgcccgagtggg

SEQ ID NO: 292298 - DNA, 55 bp, Artificial
  Synthetic oligonucleotide
agcatgacaagaagtgcgatgacaacgcatggcaactgtttcatcctaatctatt

SEQ ID NO: 292299 - DNA, 55 bp, Artificial
  Synthetic oligonucleotide
agcatgaggcgaggggtgcactgaaccctgtgacaccacgcacggaggtgtgtag

SEQ ID NO: 292300 - DNA, 55 bp, Artificial
  Synthetic oligonucleotide
agccacagtcgggagagagaatcatggaaggtgtgtaggagcgctccggaggcga

SEQ ID NO: 292301 - DNA, 55 bp, Artificial
  Synthetic oligonucleotide
agcccaatatccggagcctgtaatgtattctactgcggatgttttaaatcagccg

SEQ ID NO: 292302 - DNA, 55 bp, Artificial
  Synthetic oligonucleotide
agcccacaggtcgagagtcgtagtggcagcgagagtcccgccccagtgccctctc

SEQ ID NO: 292303 - DNA, 55 bp, Artificial
  Synthetic oligonucleotide
agcccaccttggcacactaccgtgcatgtggcactgcaaaggcggcccctatgct

SEQ ID NO: 292304 - DNA, 55 bp, Artificial
  Synthetic oligonucleotide
agcccctctctcgagcggagtcgtgctgcacagatacccttgtgcactgtgttgc

SEQ ID NO: 292305 - DNA, 53 bp, Artificial
  Synthetic oligonucleotide
agtcaatccgacccttacttttgattggacagggtcaaaacggcttctaggac

SEQ ID NO: 292306 - DNA, 55 bp, Artificial
  Synthetic oligonucleotide
agccctaagtttggatgttctgaggatattgcacgaatttgcgctatgctgtcgg

SEQ ID NO: 292307 - DNA, 55 bp, Artificial
  Synthetic oligonucleotide
agtaaagatgcttagagcctgatcagtaccattatgttcacacagatggggaacg

SEQ ID NO: 292308 - DNA, 55 bp, Artificial
  Synthetic oligonucleotide
agtaaggtgcacccacacggactcgctaaccccatcaccgacgcacagacttccc

SEQ ID NO: 292309 - DNA, 55 bp, Artificial
  Synthetic oligonucleotide
agtacaggccatatcacataggagtgtatgctatgctgtgtccactttcatcgga

SEQ ID NO: 292310 - DNA, 55 bp, Artificial
  Synthetic oligonucleotide
agtactccagtgcgcctgtggactcgacgctcacacgacacgggttgtccagcag

SEQ ID NO: 292311 - DNA, 55 bp, Artificial
  Synthetic oligonucleotide
agtactcctggcatcgcggacgcccagtatgtgtcggaaacctacgccgcaccac

SEQ ID NO: 292312 - DNA, 55 bp, Artificial
  Synthetic oligonucleotide
agtagatgttcgcccatagaccccggctcgagcggaactcagcaacgtagcgccg

SEQ ID NO: 292313 - DNA, 55 bp, Artificial
  Synthetic oligonucleotide
agtcaatccgagctccccaccaccggcgctacaacaacccgctccgccgccgtgg

SEQ ID NO: 292314 - DNA, 55 bp, Artificial
  Synthetic oligonucleotide
agtcacacacaagcaatgtagcacagcactacccctgctcgagtctctctcatcg

SEQ ID NO: 292315 - DNA, 55 bp, Artificial
  Synthetic oligonucleotide
agtcacataagtgacgcggaggagactctggctgtgggcggaggcaacaccaccc

SEQ ID NO: 292316 - DNA, 60 bp, Artificial
  Synthetic oligonucleotide
agctgcgatgggttctgagggtacggaaggtcgtatgacgctatgataagcgcctgtgcc

SEQ ID NO: 292317 - DNA, 55 bp, Artificial
  Synthetic oligonucleotide
agtcattacgagaacagtcattggcccaagcttgagtcctggtgtatcatcaacg

SEQ ID NO: 292318 - DNA, 55 bp, Artificial
  Synthetic oligonucleotide
agtccattccgctgtgaagattggagtgtgcgcaaaggtgatttagcgtatgtcc

SEQ ID NO: 292319 - DNA, 55 bp, Artificial
  Synthetic oligonucleotide
agtccgagtacgcgactgcgctttaccgatcggttcgcgtgtggctctgcagagc

SEQ ID NO: 292320 - DNA, 55 bp, Artificial
  Synthetic oligonucleotide
agtccgtgcaacgctcagcagcatgcgagcgatctccgatctctcttcacggccc

SEQ ID NO: 292321 - DNA, 55 bp, Artificial
  Synthetic oligonucleotide
agtcctacagtgtcttaagggaggtacagctatagtaccaatcaaatcctaatag

SEQ ID NO: 292322 - DNA, 55 bp, Artificial
  Synthetic oligonucleotide
agtcggctcacctcagacgtcaatgtggtcgatcatactttgacccgcactcttg

SEQ ID NO: 292323 - DNA, 55 bp, Artificial
  Synthetic oligonucleotide
agtcgtacacactgccgtagttggggaagcgtgccaccgactcgagaagcgtgcg

SEQ ID NO: 292324 - DNA, 51 bp, Artificial
  Synthetic oligonucleotide
agtcttcctacggggtccccaaagccgacgtccgcctccctacacgcctcc

SEQ ID NO: 292325 - DNA, 55 bp, Artificial
  Synthetic oligonucleotide
agtgaagatggtaatttctgtggacgcagaaccgagtgaatacccctcactcaag

SEQ ID NO: 292326 - DNA, 55 bp, Artificial
  Synthetic oligonucleotide
agtgacagccaacgtggcgtcagtcaacgtagcggcagtcaacctaccgacagct

SEQ ID NO: 292327 - DNA, 60 bp, Artificial
  Synthetic oligonucleotide
cgcaccactatgcacaataagtcgcaccactatgcacaataagtcgcaccactatgcaca

SEQ ID NO: 292328 - DNA, 55 bp, Artificial
  Synthetic oligonucleotide
agtgaccagcgaggggaggggcaccgcttcggggaagcctctgcactgctctata

SEQ ID NO: 292329 - DNA, 55 bp, Artificial
  Synthetic oligonucleotide
agtgactagcaggtgcttgaaactattcggtgggccgcactgagaagtgatgctc

SEQ ID NO: 292330 - DNA, 55 bp, Artificial
  Synthetic oligonucleotide
agtgaggagagtcaaatctagtcacattacaccttgaaccaaacttttctgactc

SEQ ID NO: 292331 - DNA, 55 bp, Artificial
  Synthetic oligonucleotide
agtgcgcaacgccgttctacacactcctagcgtcttgagagcggtacctcgtgcc

SEQ ID NO: 292332 - DNA, 55 bp, Artificial
  Synthetic oligonucleotide
agtgcgcgtgtcggctctctgtcacgcccacccgcgtatctttccttacctcgca

SEQ ID NO: 292333 - DNA, 55 bp, Artificial
  Synthetic oligonucleotide
agtggatggagtggcgtcttcgactgggcaccgtcttgtacgcctccgactggca

SEQ ID NO: 292334 - DNA, 55 bp, Artificial
  Synthetic oligonucleotide
agtggcacgtgccgtgtccactctgaaggtgcactcaacgatcgcgggtgcagtg

SEQ ID NO: 292335 - DNA, 55 bp, Artificial
  Synthetic oligonucleotide
agtggctctcccactcctccgtaaattgactagatcacatagtcgaagggcggtg

SEQ ID NO: 292336 - DNA, 55 bp, Artificial
  Synthetic oligonucleotide
agtggggatgcaagatgtagatggctggactgcgttaatgtgtgcggcctggaat

SEQ ID NO: 292337 - DNA, 55 bp, Artificial
  Synthetic oligonucleotide
aggaggtacaactggtgttgtgcttggaaatgctggactagacgtagtattgcat

SEQ ID NO: 292338 - DNA, 57 bp, Artificial
  Synthetic oligonucleotide
gcgcgtgtgctccctctcggtacgtatttggtcgccgcgtcccgtcagaggacaccc

SEQ ID NO: 292339 - DNA, 55 bp, Artificial
  Synthetic oligonucleotide
aggatgtgaggagtagtggcaagacgaacggggctctgcgcgaggagggatgacg

SEQ ID NO: 292340 - DNA, 55 bp, Artificial
  Synthetic oligonucleotide
aggcacaccactttcgtcgacacgcgtcaagtacgacctaaagtcaagccccatg

SEQ ID NO: 292341 - DNA, 55 bp, Artificial
  Synthetic oligonucleotide
aggcacagggtacggcaccaagtatagtagagtccgctgcctcacccacggagcg

SEQ ID NO: 292342 - DNA, 55 bp, Artificial
  Synthetic oligonucleotide
aggcctcatgcgacagtggtaatggtcaacagggagactgactagggaggctctg

SEQ ID NO: 292343 - DNA, 55 bp, Artificial
  Synthetic oligonucleotide
agggacttcgggacagagacctagacgcctccacaccttggcctggcacgagggt

SEQ ID NO: 292344 - DNA, 55 bp, Artificial
  Synthetic oligonucleotide
agggagccgaccacttcagcacctagtggcgaactgaccactaccgaaccgggtg

SEQ ID NO: 292345 - DNA, 55 bp, Artificial
  Synthetic oligonucleotide
agggccacgtacctgcgacatggggaggcccgagcgaactgtccctacggatatt

SEQ ID NO: 292346 - DNA, 55 bp, Artificial
  Synthetic oligonucleotide
agggcgagaggtagagcaacgtcaaaacaagaggcgtccagcattgtagtcgcaa

SEQ ID NO: 292347 - DNA, 55 bp, Artificial
  Synthetic oligonucleotide
agggctatctctagcgtccgtggctgaggtgccacgctgcacgttggcgggagta

SEQ ID NO: 292348 - DNA, 55 bp, Artificial
  Synthetic oligonucleotide
aggggcgcgaaaagttggcggcctgacagagattccaggcgtagagccgtatgtg

SEQ ID NO: 292349 - DNA, 58 bp, Artificial
  Synthetic oligonucleotide
agctgcaccgaacctccctagacatggacgccaaaagggtgcctccaatacggcagcc

SEQ ID NO: 292350 - DNA, 55 bp, Artificial
  Synthetic oligonucleotide
aggggcgtgaccacgctctccgattgtgtcgggcgttcactgctgacgttgcagt

SEQ ID NO: 292351 - DNA, 55 bp, Artificial
  Synthetic oligonucleotide
aggggtatgcgctgtgcacaccgtgagcgaaggttcatggaggcggactcgtgtc

SEQ ID NO: 292352 - DNA, 55 bp, Artificial
  Synthetic oligonucleotide
agggtagcgcatcggttggtccgttgaaggtatgcccaacacgatcaagtgtctc

SEQ ID NO: 292353 - DNA, 55 bp, Artificial
  Synthetic oligonucleotide
agggtatacatctctgtcgagaaaagcgcactgggagttatttcgttcagtccgg

SEQ ID NO: 292354 - DNA, 54 bp, Artificial
  Synthetic oligonucleotide
agggtgacccgcgttgggcgacgttgtcgggagttagccgacccactatctcca

SEQ ID NO: 292355 - DNA, 55 bp, Artificial
  Synthetic oligonucleotide
agggttactagcagccgctggttatcaaattagtgctaacgaaaatacagcctcc

SEQ ID NO: 292356 - DNA, 55 bp, Artificial
  Synthetic oligonucleotide
aggtaacgcctagatattgcgtacacgggaaacgaaggccgctccctttcagcga

SEQ ID NO: 292357 - DNA, 55 bp, Artificial
  Synthetic oligonucleotide
aggtaccacaagagcccgcctgcaccgtaggctgccagtcgctgcttaagtggca

SEQ ID NO: 292358 - DNA, 55 bp, Artificial
  Synthetic oligonucleotide
aggtagtgtgacatgcggataccgtgaatcattaacttttcgaacgcaaccggcg

SEQ ID NO: 292359 - DNA, 55 bp, Artificial
  Synthetic oligonucleotide
aggtatcatgtggagccgtacgcctactggcgatccggcaagcaccagtgcccca

SEQ ID NO: 292360 - DNA, 60 bp, Artificial
  Synthetic oligonucleotide
ttaccgatgggctctggtatgatgacaaccatgtatgaactttctcaaggagttgttaat

SEQ ID NO: 292361 - DNA, 55 bp, Artificial
  Synthetic oligonucleotide
aggtcttggaggatagaaggccaccaggcggggaggaggtgcttcatgcaaccgg

SEQ ID NO: 292362 - DNA, 55 bp, Artificial
  Synthetic oligonucleotide
aggtggacactgacctcccaagcagatacgcacggaggcgctacccaggcacatg

SEQ ID NO: 292363 - DNA, 55 bp, Artificial
  Synthetic oligonucleotide
aggtggttggtggtcccctatgaacctgtcgtggcaactgactccgcatgtgtgg

SEQ ID NO: 292364 - DNA, 55 bp, Artificial
  Synthetic oligonucleotide
aggtgtaggcgtgtggccagcctgtgaccggcagtctattgtgttagggcaggat

SEQ ID NO: 292365 - DNA, 55 bp, Artificial
  Synthetic oligonucleotide
aggtgtgcgaaacagtgaaaagcgcactcactggtgacgatctcacaaaggcgtg

SEQ ID NO: 292366 - DNA, 55 bp, Artificial
  Synthetic oligonucleotide
aggtgtggctatttcgtactatgactacctttcttgaacgtgaggagaggaattc

SEQ ID NO: 292367 - DNA, 55 bp, Artificial
  Synthetic oligonucleotide
aggttctggtgcgaagcattagccggaaattcctgacgcgataaaagggtccgcg

SEQ ID NO: 292368 - DNA, 55 bp, Artificial
  Synthetic oligonucleotide
acgggcacggttgctggccgtgtggttcggcgacccagaaccgtatcgacgataa

SEQ ID NO: 292369 - DNA, 55 bp, Artificial
  Synthetic oligonucleotide
acgggctcaacacgtgcacaggcctgtgtgcgatgggtctgtgccgggcgcagaa

SEQ ID NO: 292370 - DNA, 54 bp, Artificial
  Synthetic oligonucleotide
acgggtaccgttcctcacagtctggacccacctcgccgtacttacaggcgtcac

SEQ ID NO: 292371 - DNA, 56 bp, Artificial
  Synthetic oligonucleotide
ttacagtatattgcacccttcgtgggaacaacccaggctgagtactttttgtacag

SEQ ID NO: 292372 - DNA, 55 bp, Artificial
  Synthetic oligonucleotide
acgggttgactctctccttagtgacagctgcgtcgacacttgccggatgttgggg

SEQ ID NO: 292373 - DNA, 54 bp, Artificial
  Synthetic oligonucleotide
acggtgggtgcgagaaagtaataagtgcaaagtaggcgaaataaagaggactac

SEQ ID NO: 292374 - DNA, 55 bp, Artificial
  Synthetic oligonucleotide
acggtgtgcgcagtgcgtacgctgcgtccttcagctacaagagccttacattcgc

SEQ ID NO: 292375 - DNA, 55 bp, Artificial
  Synthetic oligonucleotide
acggttgggcgagaggaggagttcccaagcaaatttatcacagccaggtagcggc

SEQ ID NO: 292376 - DNA, 55 bp, Artificial
  Synthetic oligonucleotide
acgtagaacgggatatccttgccatcccacgaggtgataccaaggcacccacaga

SEQ ID NO: 292377 - DNA, 55 bp, Artificial
  Synthetic oligonucleotide
acgtagccagcggtcgccaaccgagccatctgcactgagctgcgggtagcccgta

SEQ ID NO: 292378 - DNA, 53 bp, Artificial
  Synthetic oligonucleotide
acgtcccaccggtgtcaaaagttatttccgagttaaggaatggcttctatggc

SEQ ID NO: 292379 - DNA, 55 bp, Artificial
  Synthetic oligonucleotide
acgtcgaacgcctgccacaccctgttctcctgcgtaggtgcgcgtgagtgatgga

SEQ ID NO: 292380 - DNA, 55 bp, Artificial
  Synthetic oligonucleotide
acgtctgctcctcgagagagaagccgggtcgcttcaggaaggctaccgagtaggc

SEQ ID NO: 292381 - DNA, 53 bp, Artificial
  Synthetic oligonucleotide
acgtgaccgtgtcgaacgggatagggtggtccccggctggggatgtcttgtac

SEQ ID NO: 292382 - DNA, 59 bp, Artificial
  Synthetic oligonucleotide
ttacaacctattgcatttgcattaatagttttatctacagcagccgaatttagtggtgg

SEQ ID NO: 292383 - DNA, 55 bp, Artificial
  Synthetic oligonucleotide
acgtggccgtgaggcgacctgcgaagccgctaactgggcagactccgagcaaggg

SEQ ID NO: 292384 - DNA, 52 bp, Artificial
  Synthetic oligonucleotide
acgttttcaccattaatagtccaaccgccccaagaatttgtaataccaaggc

SEQ ID NO: 292385 - DNA, 55 bp, Artificial
  Synthetic oligonucleotide
actaaacgagcggcggtaaatgtgtagagatgcgtttctcgaggtgtacgtacac

SEQ ID NO: 292386 - DNA, 55 bp, Artificial
  Synthetic oligonucleotide
actaagcgggtgctacgtacgcttatgcctactcaccaactagcgcgtgtgcgcg

SEQ ID NO: 292387 - DNA, 55 bp, Artificial
  Synthetic oligonucleotide
actaccggcgcctctagcggttgcagagagagcgcgcagtgactccatcgctcca

SEQ ID NO: 292388 - DNA, 55 bp, Artificial
  Synthetic oligonucleotide
actaccggtcttactttgcactcgtctgggtgctctctgtgatgttatttacggc

SEQ ID NO: 292389 - DNA, 55 bp, Artificial
  Synthetic oligonucleotide
actacctgtctagccggcgaccacagcacgtgcgtcgcatgcgaatcggggtaca

SEQ ID NO: 292390 - DNA, 55 bp, Artificial
  Synthetic oligonucleotide
actactgcttgcaagaatccagttcctcaagataaaccattggtcccgtattggt

SEQ ID NO: 292391 - DNA, 55 bp, Artificial
  Synthetic oligonucleotide
actagtcgtggccgggtcagccgttggctcgacacctcgtcaggtaagatgcgac

SEQ ID NO: 292392 - DNA, 55 bp, Artificial
  Synthetic oligonucleotide
actatgtacttttctccagactacactctacgactcatacagctaccagatactg

SEQ ID NO: 292393 - DNA, 60 bp, Artificial
  Synthetic oligonucleotide
ccgagagtcgagaccattcgaacagcaggctaggcctcatgtactctccacccccaatgg

SEQ ID NO: 292394 - DNA, 55 bp, Artificial
  Synthetic oligonucleotide
actcaacaagcccgtgtatcattacgagcaagagcaccatgtgtaacaattgaat

SEQ ID NO: 292395 - DNA, 55 bp, Artificial
  Synthetic oligonucleotide
actcaccttgcacactctgcataaccccatcgcagtagcttcgctgattcgaagg

SEQ ID NO: 292396 - DNA, 55 bp, Artificial
  Synthetic oligonucleotide
actcagcgatggtctccgtactgccctgtagaggagcccgcagtagcaggggagg

SEQ ID NO: 292397 - DNA, 55 bp, Artificial
  Synthetic oligonucleotide
actcaggaagcgtgaggtgtggagtgcgtcattggtcttggcgcctgacgggtcg

SEQ ID NO: 292398 - DNA, 55 bp, Artificial
  Synthetic oligonucleotide
actccccgcatgtccgtttggcatgccgccctctgaccgtaatgagtgggcaccc

SEQ ID NO: 292399 - DNA, 55 bp, Artificial
  Synthetic oligonucleotide
actcccgagagacagtacgccaggtagtgagaccacgagccacctacatgacacg

SEQ ID NO: 292400 - DNA, 55 bp, Artificial
  Synthetic oligonucleotide
acgagctccacagcacactcatgacacgcaccttgtccggaaagcagacaaccgc

SEQ ID NO: 292401 - DNA, 55 bp, Artificial
  Synthetic oligonucleotide
acgaggatcaagtacctattctacggtggcacgatcagacttatctttaacacgg

SEQ ID NO: 292402 - DNA, 55 bp, Artificial
  Synthetic oligonucleotide
acgaggcttacacgtcgcagtcagacttgaggtagttaacgtcgatcgcttcagg

SEQ ID NO: 292403 - DNA, 55 bp, Artificial
  Synthetic oligonucleotide
acgagtcacgcgtggcatatcaagcctagcacggggtcggacgcccttataccaa

SEQ ID NO: 292404 - DNA, 57 bp, Artificial
  Synthetic oligonucleotide
tacaataccccgatgtgttgggccgcattcccccaacgtgtttcacgtgcatcccac

SEQ ID NO: 292405 - DNA, 60 bp, Artificial
  Synthetic oligonucleotide
tgactataccactattcatagagacaactaatggcatctctctcgatttccagatgttga

SEQ ID NO: 292406 - DNA, 55 bp, Artificial
  Synthetic oligonucleotide
acgatactggtcgaacgctatcagtccaagtgccagaagagcgtcactcgccttc

SEQ ID NO: 292407 - DNA, 55 bp, Artificial
  Synthetic oligonucleotide
acgatccacctacgcccacatcggcacttggctgacggatgctcggctgaacacg

SEQ ID NO: 292408 - DNA, 54 bp, Artificial
  Synthetic oligonucleotide
acgatgcagtgaagcgaaaccgaagaccgtacgaagcaaaactaaggaggaggg

SEQ ID NO: 292409 - DNA, 55 bp, Artificial
  Synthetic oligonucleotide
acgcaagcacatgcagctgtggcggttatcgatgcaccctcttgtgccccttggg

SEQ ID NO: 292410 - DNA, 55 bp, Artificial
  Synthetic oligonucleotide
acgcacgcagccaaggggcggaaccaccttcacatacgggtacgcgtgcgaccgt

SEQ ID NO: 292411 - DNA, 55 bp, Artificial
  Synthetic oligonucleotide
acgcagctactggtcctcgcctctgctaccttctcttcagccgtcgccccgctaa

SEQ ID NO: 292412 - DNA, 55 bp, Artificial
  Synthetic oligonucleotide
acgcatcccctcgtctgctcgtgcgttgcggatgcagagacttcaatacggtcct

SEQ ID NO: 292413 - DNA, 55 bp, Artificial
  Synthetic oligonucleotide
acgccacctacgtggaatctttacacaagtgttgtgcataatactggaattcgag

SEQ ID NO: 292414 - DNA, 55 bp, Artificial
  Synthetic oligonucleotide
acgccacgtgacgaggacagacgtcaccaataccgacgcacccctcttcccacac

SEQ ID NO: 292415 - DNA, 55 bp, Artificial
  Synthetic oligonucleotide
acgccatcttctagtctagggagtggcacttgggccattgtgggtggggaaacgc

SEQ ID NO: 292416 - DNA, 53 bp, Artificial
  Synthetic oligonucleotide
ttaacctgtagagttgagatggaaacagccggaaaggtaactttacgccctta

SEQ ID NO: 292417 - DNA, 55 bp, Artificial
  Synthetic oligonucleotide
acgcccagcttcgttcagtggcctctttggctcgagccttggtgctccgttgacc

SEQ ID NO: 292418 - DNA, 55 bp, Artificial
  Synthetic oligonucleotide
acgccccgacatcgcttctacagaccagcgcgcgcactcctctcaccgggccatc

SEQ ID NO: 292419 - DNA, 55 bp, Artificial
  Synthetic oligonucleotide
acgccggctaatcgatccgtgtatgcgcccatgcgtctgtgtgcgcgcttgtgca

SEQ ID NO: 292420 - DNA, 55 bp, Artificial
  Synthetic oligonucleotide
acgcgaacgctgggcgctgcggaagggtcgaacgcttcgcttctgggagtacact

SEQ ID NO: 292421 - DNA, 55 bp, Artificial
  Synthetic oligonucleotide
acgcgcctaacacctcatcaaactctgccgtgtccacgcagtgctttcctcgtgc

SEQ ID NO: 292422 - DNA, 55 bp, Artificial
  Synthetic oligonucleotide
acgcgcgagtggacggatggtattctgagcaacatcgcccgcggcattacccgag

SEQ ID NO: 292423 - DNA, 55 bp, Artificial
  Synthetic oligonucleotide
acgcggatatacaacccacaaacatgtctggcgcacagacggtgttggccgctac

SEQ ID NO: 292424 - DNA, 55 bp, Artificial
  Synthetic oligonucleotide
acgcgtgtggaggccgagtaggaacaggcatgcgggcagacacggctacaagaca

SEQ ID NO: 292425 - DNA, 55 bp, Artificial
  Synthetic oligonucleotide
acgctccacttacacccgttaagtgtcgcgctccgcagatgcaaagcccataacg

SEQ ID NO: 292426 - DNA, 55 bp, Artificial
  Synthetic oligonucleotide
acgctctcgctctgtctgtcgcactgcatgtggcaaaacagccgcagatagagca

SEQ ID NO: 292427 - DNA, 60 bp, Artificial
  Synthetic oligonucleotide
gccgtttgtctgagcaatcgcaacgactcgcttcctgtctcctatcgcgtgcctccaatt

SEQ ID NO: 292428 - DNA, 55 bp, Artificial
  Synthetic oligonucleotide
acggactgcggttactgcgcctgcatcgtgagctgactacagtggatgctacagc

SEQ ID NO: 292429 - DNA, 53 bp, Artificial
  Synthetic oligonucleotide
acggaggtaaccgcagcttctttcgagcccaaattaccggtgcccatcgtagg

SEQ ID NO: 292430 - DNA, 55 bp, Artificial
  Synthetic oligonucleotide
acggcgctgtgggtgtgaagtggtcctactgaatgttgaaacaaagcctcggcga

SEQ ID NO: 292431 - DNA, 54 bp, Artificial
  Synthetic oligonucleotide
acggcgtagaaatgatacctttggtcgtgtagcaggaaaagtgattaaggtacg

SEQ ID NO: 292432 - DNA, 55 bp, Artificial
  Synthetic oligonucleotide
acgggacctgccgctaagtagccccatttctcctctgagagaagggtagtaacgc

SEQ ID NO: 292433 - DNA, 55 bp, Artificial
  Synthetic oligonucleotide
acgggagagcccgagtctgtacagagggcaatcagcaatattaacgggacctaca

SEQ ID NO: 292434 - DNA, 54 bp, Artificial
  Synthetic oligonucleotide
acgggagaggtaccgtgcaggctaatctggtcaaagccgtttacgtttcccagc

SEQ ID NO: 292435 - DNA, 55 bp, Artificial
  Synthetic oligonucleotide
agaaaggtgtgccaattaaaagttctccaaggataactccggcagaccacatgtc

SEQ ID NO: 292436 - DNA, 55 bp, Artificial
  Synthetic oligonucleotide
agaacagagcgccaacgcggttattcagctcactcattgtggtaccgagtcgcca

SEQ ID NO: 292437 - DNA, 55 bp, Artificial
  Synthetic oligonucleotide
agaacgaaggccgtgaggaggcacggacatctcccgtgtgtcgggtgtacataca

SEQ ID NO: 292438 - DNA, 54 bp, Artificial
  Synthetic oligonucleotide
ttaaatatcagtctacaagcggattgaattgtggttagtcgttaccccccctaa

SEQ ID NO: 292439 - DNA, 51 bp, Artificial
  Synthetic oligonucleotide
agaacggcggaccggtttccttccgcggatgcggggtgtgtactccgggaa

SEQ ID NO: 292440 - DNA, 55 bp, Artificial
  Synthetic oligonucleotide
agaactgcgagcaatcctctccgacccaagtccagtcatagtcctccccaaggag

SEQ ID NO: 292441 - DNA, 55 bp, Artificial
  Synthetic oligonucleotide
agaactgcgtgtgggatgttgcatcgctacgagcttacgcgtgatacgcgcggag

SEQ ID NO: 292442 - DNA, 55 bp, Artificial
  Synthetic oligonucleotide
agaactgtgtggtcgacgcaagttctgtgctatacgccttacatacggagggagg

SEQ ID NO: 292443 - DNA, 55 bp, Artificial
  Synthetic oligonucleotide
agaaggcctctcaagccaggactacgcgtgtgtccagtacacacatacaggggac

SEQ ID NO: 292444 - DNA, 55 bp, Artificial
  Synthetic oligonucleotide
agaatcgtttggggagtcgttacgagatgcctcgtccttatgagatacctcgtcc

SEQ ID NO: 292445 - DNA, 55 bp, Artificial
  Synthetic oligonucleotide
agaattaagcatcgcattagatgcgtctttccccacagtataatgcccactatcc

SEQ ID NO: 292446 - DNA, 55 bp, Artificial
  Synthetic oligonucleotide
agacaggtagactgtgcggtcttcccagagcgacgtgcacgagcgctccgtcctt

SEQ ID NO: 292447 - DNA, 55 bp, Artificial
  Synthetic oligonucleotide
agacatcgcagtagacctcattgcacgaaaaggatcggccacacgtctgacgagg

SEQ ID NO: 292448 - DNA, 55 bp, Artificial
  Synthetic oligonucleotide
agacatctaagatcccgtatatgcatcctggcgaaaattttccgtggcttgcggg

SEQ ID NO: 292449 - DNA, 51 bp, Artificial
  Synthetic oligonucleotide
ttaaagacgaagaaagacgttttaaattacgaaatactttaattagctata

SEQ ID NO: 292450 - DNA, 55 bp, Artificial
  Synthetic oligonucleotide
agaccaccgcaccacgccaaggggctcgcgcgtatggggcaggtttcggctacga

SEQ ID NO: 292451 - DNA, 55 bp, Artificial
  Synthetic oligonucleotide
agacgccactgggcaagccatatgtggcgaccaaggccctgtgcaaggctggcat

SEQ ID NO: 292452 - DNA, 55 bp, Artificial
  Synthetic oligonucleotide
agacgcctcggtaccgcgacggaagtgatgcgaccgctgaatcctccaaggatgg

SEQ ID NO: 292453 - DNA, 55 bp, Artificial
  Synthetic oligonucleotide
agactgccgcgtcgatcacacacgcgccatcgcgttcaccatactctcgtcgcag

SEQ ID NO: 292454 - DNA, 55 bp, Artificial
  Synthetic oligonucleotide
agacttcctcacgagctcttcgaggtccgacgacgtactggggcctacctccgtg

SEQ ID NO: 292455 - DNA, 55 bp, Artificial
  Synthetic oligonucleotide
agagaaacgagagacccacgtggtagtagtatggggcggggcagagaactgttcc

SEQ ID NO: 292456 - DNA, 55 bp, Artificial
  Synthetic oligonucleotide
agagaatgcagaggcgctgtcgagtcctgtgctgcgcgatgactcagcacctcgg

SEQ ID NO: 292457 - DNA, 55 bp, Artificial
  Synthetic oligonucleotide
agagaccattcgcaaggactcccaactccccgcttgccttcacatacgtgtgcgc

SEQ ID NO: 292458 - DNA, 55 bp, Artificial
  Synthetic oligonucleotide
agagagaaagcccgacgccatgcactctagctcgccaactggcgctttccagacg

SEQ ID NO: 292459 - DNA, 55 bp, Artificial
  Synthetic oligonucleotide
agagagacttcactcgtacgagtagcggctaagcgggcgcagggagggcaccagt

SEQ ID NO: 292460 - DNA, 52 bp, Artificial
  Synthetic oligonucleotide
ttaaaagcgttcgttcttgttatgtaggccagtcgagttcctttaatttagt

SEQ ID NO: 292461 - DNA, 55 bp, Artificial
  Synthetic oligonucleotide
agagcattggaatgacacccgatcagcgagagctcacgataaatcgaggcgtagt

SEQ ID NO: 292462 - DNA, 55 bp, Artificial
  Synthetic oligonucleotide
agagcctggagtacatcacccgttgtgcggatggggtgctgcatgcctctcaaaa

SEQ ID NO: 292463 - DNA, 55 bp, Artificial
  Synthetic oligonucleotide
agagcgtgcgggtaggggtatgggagtcatgacattggacgcacgcgtgacgcac

SEQ ID NO: 292464 - DNA, 55 bp, Artificial
  Synthetic oligonucleotide
agagctcgccgcacggggtgtaggcagccctcgtgtgctgaatcacctaagctca

SEQ ID NO: 292465 - DNA, 55 bp, Artificial
  Synthetic oligonucleotide
agagctcgcgacccggtgctttgcgatcatcgtgaacagtcttgtagtcggaggc

SEQ ID NO: 292466 - DNA, 55 bp, Artificial
  Synthetic oligonucleotide
agaggattctgtgtcaccgtcttcatctccagagattctatcccatataagtttc

SEQ ID NO: 292467 - DNA, 55 bp, Artificial
  Synthetic oligonucleotide
actccttgacagccacacctaacttatgcgccttggtatggagccgtctttcccc

SEQ ID NO: 292468 - DNA, 55 bp, Artificial
  Synthetic oligonucleotide
actcgaagcttgtggagaggtgctcgctgcctgtgacgggcctgcattgcgtgac

SEQ ID NO: 292469 - DNA, 55 bp, Artificial
  Synthetic oligonucleotide
actcgagcatctcttcacccggattcggaccctgcttttgcctagttgcgtgagg

SEQ ID NO: 292470 - DNA, 55 bp, Artificial
  Synthetic oligonucleotide
actcgggtagtgatcgctcgagctgcagacggatgctcagaccaatcagcgtggt

SEQ ID NO: 292471 - DNA, 60 bp, Artificial
  Synthetic oligonucleotide
gcctaaaacctctgtatacatgaaaagtgttcacaattcatacagaactcgtatctccaa

SEQ ID NO: 292472 - DNA, 55 bp, Artificial
  Synthetic oligonucleotide
actctctggctggcgcgcttgtatctcaccgccaaaccaacgctgctgtgggcac

SEQ ID NO: 292473 - DNA, 55 bp, Artificial
  Synthetic oligonucleotide
actgacaactcgacttcatctgctatcatccccttttcaccccttatacaataca

SEQ ID NO: 292474 - DNA, 55 bp, Artificial
  Synthetic oligonucleotide
actgacgcatcagtgctcacaacaggggcggtactagctggcaatgcgaccgcga

SEQ ID NO: 292475 - DNA, 55 bp, Artificial
  Synthetic oligonucleotide
actgaggcgtgctgcaccatgtacttgagcttccccgtgctttgcgggcaaaatg

SEQ ID NO: 292476 - DNA, 55 bp, Artificial
  Synthetic oligonucleotide
actgatgtcgagttacaagactgggattcctctaacatgttggtgtactcaagtc

SEQ ID NO: 292477 - DNA, 55 bp, Artificial
  Synthetic oligonucleotide
actgcccttgcacaaagttaccgcggacccactctccacggtactcgctcccctc

SEQ ID NO: 292478 - DNA, 55 bp, Artificial
  Synthetic oligonucleotide
actgccttctagttctgcttaagcctcgggcggaatctatatgcacggaaagggg

SEQ ID NO: 292479 - DNA, 55 bp, Artificial
  Synthetic oligonucleotide
actgcgctacgtatcggacagagagccgcgttcgctgcaggttctccgacccgcg

SEQ ID NO: 292480 - DNA, 55 bp, Artificial
  Synthetic oligonucleotide
actgcggcgccccattttgtttgattggagccgctgagtaggaagcgtgcgctag

SEQ ID NO: 292481 - DNA, 55 bp, Artificial
  Synthetic oligonucleotide
actgctctcacaggatcgccgatggtgggtacagaacacggtgagagtgcgcggg

SEQ ID NO: 292482 - DNA, 57 bp, Artificial
  Synthetic oligonucleotide
cgaacaagagagaaaggagtcgaacctttacctatgattttggagatcattattcta

SEQ ID NO: 292483 - DNA, 55 bp, Artificial
  Synthetic oligonucleotide
actggacacgtgactccagctcatgcatgcgtgtctccagccgcttgagaccccg

SEQ ID NO: 292484 - DNA, 55 bp, Artificial
  Synthetic oligonucleotide
actggctggaacatgtctgacgtcgctccaaataacttctctgaaagcgatgact

SEQ ID NO: 292485 - DNA, 55 bp, Artificial
  Synthetic oligonucleotide
actgtaagacccggtgtactaggatggacctcgatattgttgcgtgcatgcacag

SEQ ID NO: 292486 - DNA, 55 bp, Artificial
  Synthetic oligonucleotide
actgtacagagacatctacgcgtacaagtgcctcgaagcgagcgtgtacatgatc

SEQ ID NO: 292487 - DNA, 55 bp, Artificial
  Synthetic oligonucleotide
actgtagaagtctattcggaaaccaatctatgattctagccatgagttgtattgc

SEQ ID NO: 292488 - DNA, 55 bp, Artificial
  Synthetic oligonucleotide
actgtcgagcacaactacgctgcgtactatggcgagttcccaatgacgaacccgt

SEQ ID NO: 292489 - DNA, 55 bp, Artificial
  Synthetic oligonucleotide
acttctccgctggacgagcacgataccctgctaagtagccgctacacagaggagg

SEQ ID NO: 292490 - DNA, 55 bp, Artificial
  Synthetic oligonucleotide
acttctgaatgccacagcgctactttcgcacactctctacctgtcttcgtggttc

SEQ ID NO: 292491 - DNA, 55 bp, Artificial
  Synthetic oligonucleotide
acttgcacatgtagaggtcagaggggaccttgtgatagttggctctatccttcca

SEQ ID NO: 292492 - DNA, 55 bp, Artificial
  Synthetic oligonucleotide
acttgcgatgtgaacccatgacactcaactcgatggaccccagccccagtgtaac

SEQ ID NO: 292493 - DNA, 58 bp, Artificial
  Synthetic oligonucleotide
tgtgttgtaaccttacagacgcttccagataactaacttcttataaatgataacgctg

SEQ ID NO: 292494 - DNA, 55 bp, Artificial
  Synthetic oligonucleotide
actttaatgcaccaccttctagacgcccctctcctatgcgcacctaaccgggcta

SEQ ID NO: 292495 - DNA, 55 bp, Artificial
  Synthetic oligonucleotide
actttagagtgaattgtgtggtccttaccaacataggtattttgacctgcgtgcc

SEQ ID NO: 292496 - DNA, 55 bp, Artificial
  Synthetic oligonucleotide
actttgcattgaatcctctgacctatcctcacttaaccacatacatagttgcgaa

SEQ ID NO: 292497 - DNA, 55 bp, Artificial
  Synthetic oligonucleotide
actttgtgcaggtgacgcagacgtgctgcatgtgccttgacgcacgccatgcatc

SEQ ID NO: 292498 - DNA, 55 bp, Artificial
  Synthetic oligonucleotide
acttttgcccagtctcccgctccggcgtagttgcatgcacgcctgtctcggcagt

SEQ ID NO: 292499 - DNA, 55 bp, Artificial
  Synthetic oligonucleotide
agaaacattcgtccctccttacgaatcaacagtcacacaacgtctatggcaagcc

SEQ ID NO: 292500 - DNA, 55 bp, Artificial
  Synthetic oligonucleotide
agaaagatggagttggatcgatggaatctggcataacgcattggcgtgcactcac

SEQ ID NO: 292501 - DNA, 54 bp, Artificial
  Synthetic oligonucleotide
cccctaacacatgtataactaaccccaggtaaatctcttgcaccacccccacga

SEQ ID NO: 292502 - DNA, 55 bp, Artificial
  Synthetic oligonucleotide
cccgtgctctcaccttgtcatcaacagctaggagtcggtctactatgtcgcagac

SEQ ID NO: 292503 - DNA, 55 bp, Artificial
  Synthetic oligonucleotide
ccgaacatgggcaacctaatcagccggagtgacgtttacgtgttgcaggacacag

SEQ ID NO: 292504 - DNA, 55 bp, Artificial
  Synthetic oligonucleotide
agctaggacatttcacctgtaacgtaaaataccctattctagcaataaacagctt

SEQ ID NO: 292505 - DNA, 55 bp, Artificial
  Synthetic oligonucleotide
ccccacatcttacacatgcaagcacatctagagattgacatgcacgccgctttgt

SEQ ID NO: 292506 - DNA, 55 bp, Artificial
  Synthetic oligonucleotide
ccatggagatggggtcgttacccagactagacgtgtacatcaaacggggtgcaat

SEQ ID NO: 292507 - DNA, 55 bp, Artificial
  Synthetic oligonucleotide
ccccacatccgccgctcccttcatggtaacgtcccgtccctcgcatatccgatca

SEQ ID NO: 292508 - DNA, 53 bp, Artificial
  Synthetic oligonucleotide
cccctaagaccttactcctgaacccggaatctgacatctaacacccctacaac

SEQ ID NO: 292509 - DNA, 51 bp, Artificial
  Synthetic oligonucleotide
ccgaacctacgtcatccttaacgcggaacccacttgtatccttaacccgga

SEQ ID NO: 292510 - DNA, 53 bp, Artificial
  Synthetic oligonucleotide
ccattacttacccagtcgcggttcttaccgccgtcagtttctttcaaccatcg

SEQ ID NO: 292511 - DNA, 55 bp, Artificial
  Synthetic oligonucleotide
ccgaagatgagctcggtgatcacatgaaggcggtcgggcctgtcgtgtcggtcga

SEQ ID NO: 292512 - DNA, 55 bp, Artificial
  Synthetic oligonucleotide
cccgtgcagccagaacttctttgttggatgcagcgttcggggcacggggacgtct

SEQ ID NO: 292513 - DNA, 55 bp, Artificial
  Synthetic oligonucleotide
ccattcacgaaaagtgtgccgcgacactgcataacattggacgcgtctttctaga

SEQ ID NO: 292514 - DNA, 55 bp, Artificial
  Synthetic oligonucleotide
cccctacaacttgcagtcgaagcgcctctaagctttaaactgcagcagaggcaat

SEQ ID NO: 292515 - DNA, 57 bp, Artificial
  Synthetic oligonucleotide
tacaatagctgttctaggtgtaacaaatggtgcaaaaccgtggtgtctatttacttg

SEQ ID NO: 292516 - DNA, 52 bp, Artificial
  Synthetic oligonucleotide
agtcctttcataaaaacactactcaaaagtcacaaaaaaataagatggaaac

SEQ ID NO: 292517 - DNA, 55 bp, Artificial
  Synthetic oligonucleotide
cccctaccggggactggagtaccgctgtgagaacccctgatgtgagagcgtttcc

SEQ ID NO: 292518 - DNA, 55 bp, Artificial
  Synthetic oligonucleotide
ccgaagcctgcgttttgggttgtccaccccacctcatgcgccaagacacgcatgc

SEQ ID NO: 292519 - DNA, 55 bp, Artificial
  Synthetic oligonucleotide
ccgcgtttgccgaaaccatcgaatagccagtgtttggtgtaatagaactttctag

SEQ ID NO: 292520 - DNA, 55 bp, Artificial
  Synthetic oligonucleotide
ccgcgttctccactgagagggaaaagctcgtcttgactccacgtagtcatcctcc

SEQ ID NO: 292521 - DNA, 55 bp, Artificial
  Synthetic oligonucleotide
cccctactaacagcagtggtgaatatacgagctcctctgctggtaccactccagt

SEQ ID NO: 292522 - DNA, 55 bp, Artificial
  Synthetic oligonucleotide
ccacgcacgggtgtccgtcctcctcgacagcaaggtgcaggacgtagagagtggc

SEQ ID NO: 292523 - DNA, 55 bp, Artificial
  Synthetic oligonucleotide
ccattcctcgaaccaccgaagatactgcggcacatagtcaaaatacgtagggaca

SEQ ID NO: 292524 - DNA, 55 bp, Artificial
  Synthetic oligonucleotide
ccacgcacagacactcgatggtaggtagcctagccgtgtccccactcaacgcctc

SEQ ID NO: 292525 - DNA, 55 bp, Artificial
  Synthetic oligonucleotide
ccgaagtaccttactgcagctcatgcaaggcaatttgagggaccgacgactgggg

SEQ ID NO: 292526 - DNA, 55 bp, Artificial
  Synthetic oligonucleotide
ccgaagtcaatcaaagcccagtcaatctctcgctgaggtgatctcgaccagctgt

SEQ ID NO: 292527 - DNA, 59 bp, Artificial
  Synthetic oligonucleotide
ataatgattattgtagaaagtatggtaaatgtcagatagatgaaaaatggttagaatgg

SEQ ID NO: 292528 - DNA, 55 bp, Artificial
  Synthetic oligonucleotide
cccctcacgttgtcgtccgtcccactatcttcgcccaaactcgcccatgtccctc

SEQ ID NO: 292529 - DNA, 55 bp, Artificial
  Synthetic oligonucleotide
ccattcctttcccgagctcgcgtgaaatgtgccgcagatcccgcggctagatgcg

SEQ ID NO: 292530 - DNA, 55 bp, Artificial
  Synthetic oligonucleotide
ccacgacatgtgcggtgctgaatgactatcgtccgacctttcatgcgccgttcag

SEQ ID NO: 292531 - DNA, 55 bp, Artificial
  Synthetic oligonucleotide
ccacgacagcgagtttggttgaatgacaacacattgggtgcatccctgcgtgggg

SEQ ID NO: 292532 - DNA, 55 bp, Artificial
  Synthetic oligonucleotide
ccgaagttatgacacccgctcaacttggggaggtgagtatgacgcgttccgccgt

SEQ ID NO: 292533 - DNA, 55 bp, Artificial
  Synthetic oligonucleotide
cccgtctgtacagaacggttgatgtaagagtgtagttgtgattgtccctatgaga

SEQ ID NO: 292534 - DNA, 54 bp, Artificial
  Synthetic oligonucleotide
cccgttccgtgctagccacccgacgtcggtgcacaagtggtcgtacccgtccga

SEQ ID NO: 292535 - DNA, 55 bp, Artificial
  Synthetic oligonucleotide
cccgttcagcgctgtacattgtgtcgagcagaggcgcgtcattcagcatgtcctg

SEQ ID NO: 292536 - DNA, 55 bp, Artificial
  Synthetic oligonucleotide
cccgtgtccaaccggctcattttcagatcgcgaaggggtcacgagcgcagacact

SEQ ID NO: 292537 - DNA, 55 bp, Artificial
  Synthetic oligonucleotide
ccactctgcttgtccaattctcgcatgcagaagcaacgcacaccacctccacagg

SEQ ID NO: 292538 - DNA, 59 bp, Artificial
  Synthetic oligonucleotide
tgtggtctgggctcccgtttgttggtgcccaaatgaggtcattggtagcagagggtgac

SEQ ID NO: 292539 - DNA, 55 bp, Artificial
  Synthetic oligonucleotide
ccatctaactggggatatctatgtcctatacatacaccagacggttctttatgtg

SEQ ID NO: 292540 - DNA, 55 bp, Artificial
  Synthetic oligonucleotide
ccactctgcatcatagtcccgttcacgacagggagcctagtcggctagattcctc

SEQ ID NO: 292541 - DNA, 55 bp, Artificial
  Synthetic oligonucleotide
ccgaaaagttcataatatctctacaccttcctgttacgtaagagatgtatacgtc

SEQ ID NO: 292542 - DNA, 55 bp, Artificial
  Synthetic oligonucleotide
ccgctctccaccgtatgctcttccgtgctaaattcgcacaccgtgagaggcggcc

SEQ ID NO: 292543 - DNA, 55 bp, Artificial
  Synthetic oligonucleotide
ccactaggcgatcagtgtgactacgtactgggttatccatagggttcacgcccga

SEQ ID NO: 292544 - DNA, 55 bp, Artificial
  Synthetic oligonucleotide
ccatctagcaagccgtagtcaggatacccatagctacttcccagcgcccgcggcg

SEQ ID NO: 292545 - DNA, 55 bp, Artificial
  Synthetic oligonucleotide
ccgctccaatctatggttctgctcatagtgtacctgatagagaaatggttggtac

SEQ ID NO: 292546 - DNA, 55 bp, Artificial
  Synthetic oligonucleotide
ccgaaactgatcatggaggaggccccggagagctacaaggacgtgagcgaagtgg

SEQ ID NO: 292547 - DNA, 55 bp, Artificial
  Synthetic oligonucleotide
ccatctttctgtgatccctcttactaaataactgactaacatcgctggtaacctc

SEQ ID NO: 292548 - DNA, 55 bp, Artificial
  Synthetic oligonucleotide
ccatgagtgcaccacattggtagagtagagctggcacacagcaaccttcttgtcc

SEQ ID NO: 292549 - DNA, 57 bp, Artificial
  Synthetic oligonucleotide
ataatcgttcaaatcgaaatgaatcctatcttccgattgctgcgccccgaactttaa

SEQ ID NO: 292550 - DNA, 54 bp, Artificial
  Synthetic oligonucleotide
ccccgtgggaccatttccgtcgttacgatccagtagcgattcgtttccatagcg

SEQ ID NO: 292551 - DNA, 55 bp, Artificial
  Synthetic oligonucleotide
ccatgcgcaacgcggttattggttgtttcccgctgcgctcggaaacggggctcca

SEQ ID NO: 292552 - DNA, 45 bp, Artificial
  Synthetic oligonucleotide
ccgggtttaggagtagggttccgggtttaggagtagggttccggg

SEQ ID NO: 292553 - DNA, 55 bp, Artificial
  Synthetic oligonucleotide
ccgaaagccacccgagcagacgcgttacactagagatccgggtggtacctggcta

SEQ ID NO: 292554 - DNA, 55 bp, Artificial
  Synthetic oligonucleotide
ccgctcagtccgaacaccccgacgaatgtattcggtattctagaagaggtgctga

SEQ ID NO: 292555 - DNA, 55 bp, Artificial
  Synthetic oligonucleotide
ccacgtgccagttcatacgtgcacgcgtctttaaagaagaagtgcgctctagaga

SEQ ID NO: 292556 - DNA, 55 bp, Artificial
  Synthetic oligonucleotide
ccgctagatgtgacaactatggtaatgtacgactttatacgttaataaggcaggt

SEQ ID NO: 292557 - DNA, 55 bp, Artificial
  Synthetic oligonucleotide
ccgctaccgctgatgaggacccacttacgacggtcttatgacacaacacatcccg

SEQ ID NO: 292558 - DNA, 53 bp, Artificial
  Synthetic oligonucleotide
ccccgttgtcgcggtccggttcctctctgatggggcatctttggtaacccttg

SEQ ID NO: 292559 - DNA, 52 bp, Artificial
  Synthetic oligonucleotide
ccggtaccagactttctgtcttaggggtgaggttcagcgggaacacccttgg

SEQ ID NO: 292560 - DNA, 60 bp, Artificial
  Synthetic oligonucleotide
tggatcacttctggatagccgatgtattgatacaattgttgagatactttcgctcccatt

SEQ ID NO: 292561 - DNA, 55 bp, Artificial
  Synthetic oligonucleotide
ccggtagcttgaacgactgcccagcggccaggttcttggtggacgcaccagtgct

SEQ ID NO: 292562 - DNA, 54 bp, Artificial
  Synthetic oligonucleotide
ccacgtctacctcgtcattcgtttggctagtaaccattttgggatcccctcttc

SEQ ID NO: 292563 - DNA, 55 bp, Artificial
  Synthetic oligonucleotide
ccgaacaaggtgcaaggcgcgaggggcatcaatggggatagcacccaacccgtga

SEQ ID NO: 292564 - DNA, 55 bp, Artificial
  Synthetic oligonucleotide
ccccgtttgagtagcaaagaaacgcacatgtctcacaatagggagaggcacaatg

SEQ ID NO: 292565 - DNA, 55 bp, Artificial
  Synthetic oligonucleotide
cccctaaaatagtctacacagggtttacactttctcattcgatggagcatcttgt

SEQ ID NO: 292566 - DNA, 55 bp, Artificial
  Synthetic oligonucleotide
ccccaccaaccatctctgcagcaacgctaaggaacgtgtgcggtgctgtccagcc

SEQ ID NO: 292567 - DNA, 55 bp, Artificial
  Synthetic oligonucleotide
ccacggcaaagcgggactacgctggacttaccggactaacagagcgggacacgct

SEQ ID NO: 292568 - DNA, 55 bp, Artificial
  Synthetic oligonucleotide
ccacacatggacaagaaaccgtgctgcagtgagcgggatgcaacagtagagggtg

SEQ ID NO: 292569 - DNA, 55 bp, Artificial
  Synthetic oligonucleotide
ccccaaggcgtgctcagcatcgctagagtatgacggcccagaggaaacgcgcgtt

SEQ ID NO: 292570 - DNA, 55 bp, Artificial
  Synthetic oligonucleotide
ccacacagagtcctcgtgtgcatcgcacacatagaacctcccctcaccacctcac

SEQ ID NO: 292571 - DNA, 60 bp, Artificial
  Synthetic oligonucleotide
cgagaggagggaatgcgtctcatcttataagcactggtgctcatacggtcgtaacaacac

SEQ ID NO: 292572 - DNA, 54 bp, Artificial
  Synthetic oligonucleotide
cccgtcaaaggggaaggcgtgcccactctggggagcgcatcgggtgaattttac

SEQ ID NO: 292573 - DNA, 55 bp, Artificial
  Synthetic oligonucleotide
cccaacgcactatgctgcagcacagccttatggtattaccactgtgccacgtcca

SEQ ID NO: 292574 - DNA, 53 bp, Artificial
  Synthetic oligonucleotide
ccgcggtaactcgtcttgtccagctggccttttcgggtcaaaatataacgcgg

SEQ ID NO: 292575 - DNA, 55 bp, Artificial
  Synthetic oligonucleotide
ccgaatgagcaagagggcaaccctcctctcgctctcactctaagtcgagcagggg

SEQ ID NO: 292576 - DNA, 55 bp, Artificial
  Synthetic oligonucleotide
cccgtagtactcgagaatgtagttgtacaccatgacaggaacctcgcacagggtg

SEQ ID NO: 292577 - DNA, 55 bp, Artificial
  Synthetic oligonucleotide
cccgtaaaatattgaatcccgcaacctacatgcgaaatcttacacatgcaccgta

SEQ ID NO: 292578 - DNA, 55 bp, Artificial
  Synthetic oligonucleotide
ccacaatttactctaggtcgtctgtaacatattcgcgaaaagactcacgaacgtg

SEQ ID NO: 292579 - DNA, 55 bp, Artificial
  Synthetic oligonucleotide
ccacaagagtgagcgcatgggagcacacctgtgtaggcatggatgggtgtacccc

SEQ ID NO: 292580 - DNA, 55 bp, Artificial
  Synthetic oligonucleotide
ccacaactcgccaaatgcgtcaagcctggtactcgcagcaaaccgtgccctgcac

SEQ ID NO: 292581 - DNA, 54 bp, Artificial
  Synthetic oligonucleotide
cccctcctggtcgccatccgagacgaccctaaaccgaatggacaccttcgtgta

SEQ ID NO: 292582 - DNA, 56 bp, Artificial
  Synthetic oligonucleotide
gattagacttgagttagctcatccaggtagtccgttttttaaaggagactctctaa

SEQ ID NO: 292583 - DNA, 55 bp, Artificial
  Synthetic oligonucleotide
cccggtttcactcaaacacgctatatcagtggggtcgagcgatgatacgatgcgc

SEQ ID NO: 292584 - DNA, 55 bp, Artificial
  Synthetic oligonucleotide
cccaagccactcgggctcgatctaggcgtgtatcaagactccagccttgtactcg

SEQ ID NO: 292585 - DNA, 55 bp, Artificial
  Synthetic oligonucleotide
ccggtgtttgcgtgtgaactgttcggtttggcctgtacgtgtgaccgcagtggcg

SEQ ID NO: 292586 - DNA, 55 bp, Artificial
  Synthetic oligonucleotide
ccacaacgaagggaccgagcggagaggtagcgtcagttgcatagtagccctcggc

SEQ ID NO: 292587 - DNA, 55 bp, Artificial
  Synthetic oligonucleotide
ccggttcagaacctccgcgtattgctcgcagtaatggtagtcccgcattcgtgga

SEQ ID NO: 292588 - DNA, 54 bp, Artificial
  Synthetic oligonucleotide
ccgcggccaccccagattgtgcaaaccgctttcatttccaacccgtcggttggc

SEQ ID NO: 292589 - DNA, 52 bp, Artificial
  Synthetic oligonucleotide
ccacaaaattaatagtggtcttttcgtctagttcggtgaggacgttagcttt

SEQ ID NO: 292590 - DNA, 55 bp, Artificial
  Synthetic oligonucleotide
ccaatttgtatcatcccaatacgtggggagcttctaaatggatgacaccaatgcg

SEQ ID NO: 292591 - DNA, 55 bp, Artificial
  Synthetic oligonucleotide
ccgaccattatattcgcggacactccttttatattgtcgtaaatgccaaatacag

SEQ ID NO: 292592 - DNA, 55 bp, Artificial
  Synthetic oligonucleotide
ccgcggagtagacgagcatcaagtttgtgcgctcgcattgtgtgtggtccgtcct

SEQ ID NO: 292593 - DNA, 56 bp, Artificial
  Synthetic oligonucleotide
gatctataattggaacacattttttttattagctagagcatgttttttttcgacag

SEQ ID NO: 292594 - DNA, 53 bp, Artificial
  Synthetic oligonucleotide
ccaatttacctatacggggtcagcgaactcatacgaacgctaaaacttcgcgt

SEQ ID NO: 292595 - DNA, 55 bp, Artificial
  Synthetic oligonucleotide
cccggttgatgtacgcgatggacgcagggccaacagaggtctgatcgggtagtgg

SEQ ID NO: 292596 - DNA, 55 bp, Artificial
  Synthetic oligonucleotide
ccaattgctactacacgtacgacccgaggctgctaatctttgagtacacgaacaa

SEQ ID NO: 292597 - DNA, 55 bp, Artificial
  Synthetic oligonucleotide
cccggttctggcgatacaaaagggctagggtgaagctgaagggaatgatagtgcg

SEQ ID NO: 292598 - DNA, 55 bp, Artificial
  Synthetic oligonucleotide
ccgcgcctctctcacagctaatggagcactcacggtcacacagggcacagcaacg

SEQ ID NO: 292599 - DNA, 53 bp, Artificial
  Synthetic oligonucleotide
ccccaagccgaacgtaacattaataacccaatttgtgttacacgatcgaacga

SEQ ID NO: 292600 - DNA, 55 bp, Artificial
  Synthetic oligonucleotide
ccaattacttgaccgcgtacactcatttgggagtccaatctcgaaagaggattgt

SEQ ID NO: 292601 - DNA, 55 bp, Artificial
  Synthetic oligonucleotide
ccaatgatgtggttgcgtctcgttatgcgagtattctgcagcggggcggagtcgc

SEQ ID NO: 292602 - DNA, 55 bp, Artificial
  Synthetic oligonucleotide
cccctctccgacctttgttggcatggccttggttcaatgcactcctaggttgctg

SEQ ID NO: 292603 - DNA, 55 bp, Artificial
  Synthetic oligonucleotide
ccacgaacaccaggcttggtgataccagagaaccccaggctcaactgactttccg

SEQ ID NO: 292604 - DNA, 58 bp, Artificial
  Synthetic oligonucleotide
cccgtgcggagaccataatgtaacccgtacacgcgcaagtccgtcattatactgccca

SEQ ID NO: 292605 - DNA, 55 bp, Artificial
  Synthetic oligonucleotide
ccacctcaccgatacagaaacaccagactcaaggaacgtccgttgcagtgtttcg

SEQ ID NO: 292606 - DNA, 55 bp, Artificial
  Synthetic oligonucleotide
ccacctcaccagagcattcaaatgattgagtgaatgtgttgaaacgacttagctg

SEQ ID NO: 292607 - DNA, 55 bp, Artificial
  Synthetic oligonucleotide
ccggtccaactccgctaagcgttctcccggtgtgtctcgttacactactgagaag

SEQ ID NO: 292608 - DNA, 55 bp, Artificial
  Synthetic oligonucleotide
ccattcttccaatacagcccaatagaaacaaggctggtaccagtggtacacttgt

SEQ ID NO: 292609 - DNA, 55 bp, Artificial
  Synthetic oligonucleotide
ccacctagagcatcggcataagttatgactcccactaaactcggtgaggggagca

SEQ ID NO: 292610 - DNA, 55 bp, Artificial
  Synthetic oligonucleotide
ccggtgcaacgcgtagttctaccgagcagtcatctgcgattaatagagcagagtt

SEQ ID NO: 292611 - DNA, 55 bp, Artificial
  Synthetic oligonucleotide
ccattgggacatcggcatttgtcattagcttgggctccacctcgttcgtcactac

SEQ ID NO: 292612 - DNA, 55 bp, Artificial
  Synthetic oligonucleotide
ccaccgtctatgaagtcgatcaagaggaaccgcccagatatatcaaagtcacctc

SEQ ID NO: 292613 - DNA, 52 bp, Artificial
  Synthetic oligonucleotide
cccaaaaggctcggtttcgaataacggaacgaaaatactcagtatctccacg

SEQ ID NO: 292614 - DNA, 54 bp, Artificial
  Synthetic oligonucleotide
ccccaattcgattacaaggttagactgcatccgaagcggtaacgagggtgggcg

SEQ ID NO: 292615 - DNA, 58 bp, Artificial
  Synthetic oligonucleotide
agcgatgttatctagtaattttactatgagatcttctagtactataaacatcgaaaaa

SEQ ID NO: 292616 - DNA, 55 bp, Artificial
  Synthetic oligonucleotide
ccggtggggatagcatagcttcatgttgtacggcttttggctgttcacacactgc

SEQ ID NO: 292617 - DNA, 55 bp, Artificial
  Synthetic oligonucleotide
ccaccacggtacgactatcgggtgcgccaacagggatgcggcgtccttcgtgcag

SEQ ID NO: 292618 - DNA, 55 bp, Artificial
  Synthetic oligonucleotide
ccaccaccaacccgtacctgtcctacaccatggcggatgcgtgctacccgttcac

SEQ ID NO: 292619 - DNA, 55 bp, Artificial
  Synthetic oligonucleotide
ccacatggtgttcaatgggatgtcaatcaggcccttaatcagacaatattctgcg

SEQ ID NO: 292620 - DNA, 55 bp, Artificial
  Synthetic oligonucleotide
ccgcgtatacacccgcccctctgctacgccccaagaacaccgttatgtgccaaca

SEQ ID NO: 292621 - DNA, 55 bp, Artificial
  Synthetic oligonucleotide
cccctccgccaagatctactgtgaggcacacaaccggtacgaaccggagatacat

SEQ ID NO: 292622 - DNA, 55 bp, Artificial
  Synthetic oligonucleotide
cccgtcgctcgagatctgagtctgtttcaacgggttatggtcgcgtatcaactag

SEQ ID NO: 292623 - DNA, 55 bp, Artificial
  Synthetic oligonucleotide
cccaaactaccccatcgacgtgccactctggctcgccctctacttgcgacagacc

SEQ ID NO: 292624 - DNA, 55 bp, Artificial
  Synthetic oligonucleotide
cccctccgctcttcactgacgcgtaggcgcacatctatgcacaaggcacgcacag

SEQ ID NO: 292625 - DNA, 55 bp, Artificial
  Synthetic oligonucleotide
cccaaactgataaagagagcacacccattggaggaggcgaacttattggtgactc

SEQ ID NO: 292626 - DNA, 56 bp, Artificial
  Synthetic oligonucleotide
gcttagcaggaattgaacccgcacactttccgttatgagcggaacgttgtaaccaa

SEQ ID NO: 292627 - DNA, 60 bp, Artificial
  Synthetic oligonucleotide
tggaagaccaacataagatatatgtaaatctggaccaggcactataacagatctacctga

SEQ ID NO: 292628 - DNA, 55 bp, Artificial
  Synthetic oligonucleotide
cccaaagcagatgccgtgcgttatcgtgctccgctacaagactactgagatctgc

SEQ ID NO: 292629 - DNA, 55 bp, Artificial
  Synthetic oligonucleotide
cccaaatgaacaaaggggcgaacgaactgatgagaccatccatacggagcgccac

SEQ ID NO: 292630 - DNA, 55 bp, Artificial
  Synthetic oligonucleotide
ccacaggtgcgagacaggtaaccacagctatgagacaggcaaccacaggtgtgag

SEQ ID NO: 292631 - DNA, 55 bp, Artificial
  Synthetic oligonucleotide
ccacaggcgtgaaaataagcatgcaacggttcgtctgacgcattccgattctctg

SEQ ID NO: 292632 - DNA, 55 bp, Artificial
  Synthetic oligonucleotide
cccgtcgaagaagtacggtggtgacaagatggcagaacgttcaaggactcgagtc

SEQ ID NO: 292633 - DNA, 55 bp, Artificial
  Synthetic oligonucleotide
cccctcctcctgtaatgtgtacgactcgttgctctccctacgcatcgaatcggag

SEQ ID NO: 292634 - DNA, 55 bp, Artificial
  Synthetic oligonucleotide
ccacagagaacacttcgtgcgagtcgtctctcttagactacgatcgcgcaatcgc

SEQ ID NO: 292635 - DNA, 55 bp, Artificial
  Synthetic oligonucleotide
cccgtccatatatggttaccagaagctcatgtcgaagctcctactgcaggttccg

SEQ ID NO: 292636 - DNA, 50 bp, Artificial
  Synthetic oligonucleotide
cccgtcattccccgcacttaaccttttcgaaccgaggagttggtaaaaga

SEQ ID NO: 292637 - DNA, 55 bp, Artificial
  Synthetic oligonucleotide
ccccaagtatcacgacaagggtgccggctattcagtgccctactgcagcgtcacg

SEQ ID NO: 292638 - DNA, 55 bp, Artificial
  Synthetic oligonucleotide
aacaacaaactaacgatactcttagatatatttagggtctattcaatgtaagaac

SEQ ID NO: 292639 - DNA, 55 bp, Artificial
  Synthetic oligonucleotide
ccagtgacgggacaacgattgtcgtgagctgccacgagcaccgtagcgccttgca

SEQ ID NO: 292640 - DNA, 55 bp, Artificial
  Synthetic oligonucleotide
ccctcgtcacactcagccttgaatcgtgtgatatgaccgatgcttcatgtcttgc

SEQ ID NO: 292641 - DNA, 55 bp, Artificial
  Synthetic oligonucleotide
ccggccgaatgggctcaagacaaccatcgaattctatataggaactaagaacccg

SEQ ID NO: 292642 - DNA, 55 bp, Artificial
  Synthetic oligonucleotide
ccagttacaacacaagaaccagttacaacacaagaaccagttacaacacaagaac

SEQ ID NO: 292643 - DNA, 55 bp, Artificial
  Synthetic oligonucleotide
ccctgtgtctcccgcgtaagcagaagcgaacccaggcgaagagacggagaaaggg

SEQ ID NO: 292644 - DNA, 55 bp, Artificial
  Synthetic oligonucleotide
ccagttatggctgtccagtggcagaacaagacgccgatcgatcgccttacgactg

SEQ ID NO: 292645 - DNA, 55 bp, Artificial
  Synthetic oligonucleotide
ccggcctcccacatcaatactggaccatccttttccccggttgagtctatgagtc

SEQ ID NO: 292646 - DNA, 55 bp, Artificial
  Synthetic oligonucleotide
ccggagcaaagcctctaatcgatttggttagtgacgactcgaggaagatagaggg

SEQ ID NO: 292647 - DNA, 55 bp, Artificial
  Synthetic oligonucleotide
ccggcgctccaacgcatttcagttggacggaggtgttaaccacgggagtgacaga

SEQ ID NO: 292648 - DNA, 55 bp, Artificial
  Synthetic oligonucleotide
ccctcggcagctctcctactctaccacggtcgccacgactcagctggaagatgta

SEQ ID NO: 292649 - DNA, 56 bp, Artificial
  Synthetic oligonucleotide
gatggttccagtgagggctcatttccctcgatccagaaagttcgattcttttaaac

SEQ ID NO: 292650 - DNA, 55 bp, Artificial
  Synthetic oligonucleotide
ccggacgccatcattggtgttgtgtcggactagacgtcagccctgtcccctcacc

SEQ ID NO: 292651 - DNA, 55 bp, Artificial
  Synthetic oligonucleotide
ccggacccgaaggtagacctgtcggacattgtagcggtcgtgaagaaggcgctca

SEQ ID NO: 292652 - DNA, 55 bp, Artificial
  Synthetic oligonucleotide
ccaggagtagcaccgttgcggaacacggcccattgatctatcggcggacttgctc

SEQ ID NO: 292653 - DNA, 55 bp, Artificial
  Synthetic oligonucleotide
ccagttccggtggaaagactcactatgacggaccaggagtaattatgcactcacc

SEQ ID NO: 292654 - DNA, 55 bp, Artificial
  Synthetic oligonucleotide
ccggcgttacaacgaaccaagatagctcatgcgacggaagccggccgacactccg

SEQ ID NO: 292655 - DNA, 55 bp, Artificial
  Synthetic oligonucleotide
ccagctggtaaggagacaatcctaactagtcaatcgcagtgaagctctacatgcg

SEQ ID NO: 292656 - DNA, 55 bp, Artificial
  Synthetic oligonucleotide
ccgggatattgcgtagcgcctcagcatacgctgcccgcgtctctgacagaggttg

SEQ ID NO: 292657 - DNA, 55 bp, Artificial
  Synthetic oligonucleotide
ccgggcagaagtgagccgtatgaacagaatgcggttctttgccgacgcgtctttt

SEQ ID NO: 292658 - DNA, 53 bp, Artificial
  Synthetic oligonucleotide
cccttagggcaaggccacgttaggaagtgcgactgggaatctaagttgggaaa

SEQ ID NO: 292659 - DNA, 55 bp, Artificial
  Synthetic oligonucleotide
ccggaccatgagaggaaccggatgggcgtagcgtttcctgagcatgttcttcccc

SEQ ID NO: 292660 - DNA, 52 bp, Artificial
  Synthetic oligonucleotide
agccgtttgccttgacaaacgaacggtgggggctcctcggtaacgataattc

SEQ ID NO: 292661 - DNA, 55 bp, Artificial
  Synthetic oligonucleotide
ccccgcgtgttgttacggcatgcattctccgtgagaagtcacgcgtgcgctcatc

SEQ ID NO: 292662 - DNA, 55 bp, Artificial
  Synthetic oligonucleotide
ccagcgtcatatcatcttcgagcgcgtcccctgcaccgtcactgccatgctttcc

SEQ ID NO: 292663 - DNA, 55 bp, Artificial
  Synthetic oligonucleotide
ccagcgcgggcttgattcggagcgatggcgttacccacatcacatgtggcgcgtt

SEQ ID NO: 292664 - DNA, 55 bp, Artificial
  Synthetic oligonucleotide
ccagcgacaaccactaacacatccacagacgcactctcgtgcttctctgcaatgc

SEQ ID NO: 292665 - DNA, 55 bp, Artificial
  Synthetic oligonucleotide
ccgggcatcgatagattagctgctaccatagatcctactgtactaccacaaggtg

SEQ ID NO: 292666 - DNA, 51 bp, Artificial
  Synthetic oligonucleotide
ccgggcgagttgtggcccacaaacgggcgtgggttccggttaggtcattac

SEQ ID NO: 292667 - DNA, 55 bp, Artificial
  Synthetic oligonucleotide
ccccacttgacctctcagactttcttgcagtgcgcgactactgtaggagacttcg

SEQ ID NO: 292668 - DNA, 55 bp, Artificial
  Synthetic oligonucleotide
ccatagagacgtgttccgttatagagaagagagcgtcgcacgcgcaggcacgctc

SEQ ID NO: 292669 - DNA, 55 bp, Artificial
  Synthetic oligonucleotide
ccctcctccttaggactgttttgaaagtggtcgtgctcacacggttagaacagag

SEQ ID NO: 292670 - DNA, 54 bp, Artificial
  Synthetic oligonucleotide
ccggaatctgactcctaaacccggaatctgactcctaaacccggaatctgactc

SEQ ID NO: 292671 - DNA, 60 bp, Artificial
  Synthetic oligonucleotide
tgctccattatcacatccagataatgctattccagtaaatagatatcaaacacctcaaca

SEQ ID NO: 292672 - DNA, 55 bp, Artificial
  Synthetic oligonucleotide
ccctcccgctgaccgagttgtgtcggcggagagaacagtcttatcacgccgagtg

SEQ ID NO: 292673 - DNA, 55 bp, Artificial
  Synthetic oligonucleotide
ccccatcctatcccagccgcactctcgtgcgtaccaagcaacataattggatagg

SEQ ID NO: 292674 - DNA, 52 bp, Artificial
  Synthetic oligonucleotide
ccccattgccgacgggtttgcattttggtacaaaccaagtgggtacaggcgg

SEQ ID NO: 292675 - DNA, 55 bp, Artificial
  Synthetic oligonucleotide
ccagtacgatgacaccgtgtccggagtcgtggcaaacaccttctgtggaacaccg

SEQ ID NO: 292676 - DNA, 55 bp, Artificial
  Synthetic oligonucleotide
ccggagctcattgcaaagcagcgcgcgctactcagcctaccgctataagacggcg

SEQ ID NO: 292677 - DNA, 55 bp, Artificial
  Synthetic oligonucleotide
ccagtacgggtaaatcgtggacctaaacacgcttgctgatttgccgcatctacat

SEQ ID NO: 292678 - DNA, 55 bp, Artificial
  Synthetic oligonucleotide
ccagtatgatccgctacacgtgcgcgtgtgcatcaaggagatgcgaagtcgaccc

SEQ ID NO: 292679 - DNA, 55 bp, Artificial
  Synthetic oligonucleotide
ccaggtgtgtacgcagccgcgcgtgtgtaaactgcgctcacgtgtaaacttccgc

SEQ ID NO: 292680 - DNA, 55 bp, Artificial
  Synthetic oligonucleotide
ccctgcgaggtcgtcccattggcgcaatggtgatcgatagctttccggtgcagct

SEQ ID NO: 292681 - DNA, 55 bp, Artificial
  Synthetic oligonucleotide
ccaggtcgaggcctctccatcacctgtgattagcacccaaaacacacgaatgacg

SEQ ID NO: 292682 - DNA, 60 bp, Artificial
  Synthetic oligonucleotide
cgatagaatgtatctataaactggtcaaatttgatcttatcattactgttattagcagtg

SEQ ID NO: 292683 - DNA, 55 bp, Artificial
  Synthetic oligonucleotide
ccaggtacggttttatgaccgacgctcgaatgaccgaccagtgcaggaattcgag

SEQ ID NO: 292684 - DNA, 50 bp, Artificial
  Synthetic oligonucleotide
ccctggaaccttattccaatacccctaaatccttactcctataccctaaa

SEQ ID NO: 292685 - DNA, 55 bp, Artificial
  Synthetic oligonucleotide
ccctgcctcttgtaaaaggctacctggaggaagatggaaggctacgccctcccat

SEQ ID NO: 292686 - DNA, 55 bp, Artificial
  Synthetic oligonucleotide
ccccagtcctccgtatcttcctcgatcttccacgcacagtatctaccctcgctgg

SEQ ID NO: 292687 - DNA, 55 bp, Artificial
  Synthetic oligonucleotide
ccctgcattgggacactgctggcgcctcggtaaggcgcatgtgcgctgaatggtt

SEQ ID NO: 292688 - DNA, 55 bp, Artificial
  Synthetic oligonucleotide
ccctgcagcagtcgtcagaagccatggaggatccctacaactgcaccccgcggta

SEQ ID NO: 292689 - DNA, 55 bp, Artificial
  Synthetic oligonucleotide
ccctgcacgatccacgaccttgctaaggatcggcttcggtagcataaggcccatc

SEQ ID NO: 292690 - DNA, 55 bp, Artificial
  Synthetic oligonucleotide
ccaggggatgcacactgacgccaacaaggatcacagccgcaaaggtttgaagggc

SEQ ID NO: 292691 - DNA, 55 bp, Artificial
  Synthetic oligonucleotide
ccctggcggactctacactgctgatgcacctcaagtccgtagtttgtgctctccg

SEQ ID NO: 292692 - DNA, 55 bp, Artificial
  Synthetic oligonucleotide
ccctgagctagcttcgtgacatgtatccaggtagacaagaggaaagcacgctcag

SEQ ID NO: 292693 - DNA, 59 bp, Artificial
  Synthetic oligonucleotide
gatctggcgcaattattagtaggttcatttaccaatgtcgaaattcgacagttcttaca

SEQ ID NO: 292694 - DNA, 55 bp, Artificial
  Synthetic oligonucleotide
ccagggaggtaaaggtcggggctcgcttcttctctccactagtgtgggtctgcgc

SEQ ID NO: 292695 - DNA, 55 bp, Artificial
  Synthetic oligonucleotide
ccctgtccagtagcggtgcgcacatgtctgtgacgctcgtatgtacgttagtgcg

SEQ ID NO: 292696 - DNA, 55 bp, Artificial
  Synthetic oligonucleotide
ccctgtgacgacagacaggcacgaatagaaggcaggagacacgcttgtctcgcgg

SEQ ID NO: 292697 - DNA, 55 bp, Artificial
  Synthetic oligonucleotide
ccggagtatgcgtaccgtcctcaatggaaggttagttttcgtccttctgcactct

SEQ ID NO: 292698 - DNA, 55 bp, Artificial
  Synthetic oligonucleotide
ccctgacgcgtttgttggttgtcccttaaccacgaaagagaattgtcacatgaca

SEQ ID NO: 292699 - DNA, 55 bp, Artificial
  Synthetic oligonucleotide
ccagtcacagtacaagaaccagtcacagtacaagaacctgtgacaccacaagaac

SEQ ID NO: 292700 - DNA, 55 bp, Artificial
  Synthetic oligonucleotide
ccggcagccagaggtcaggcagcgctcctgtttagaagtcctccgagagggagaa

SEQ ID NO: 292701 - DNA, 55 bp, Artificial
  Synthetic oligonucleotide
ccggccatggaacacgattgtggactctggcgtaggaaatgaacctaagaacccc

SEQ ID NO: 292702 - DNA, 55 bp, Artificial
  Synthetic oligonucleotide
ccctgacacgaactcaggtggaggcgcatgcttctgcgcattctgcgttacttcg

SEQ ID NO: 292703 - DNA, 55 bp, Artificial
  Synthetic oligonucleotide
ccccagtattggagtcgcgacaagaagatttcctgcgttcatgctaatggcctta

SEQ ID NO: 292704 - DNA, 54 bp, Artificial
  Synthetic oligonucleotide
cgagcttccaaaggtcgaggtaaggaagtttatcatcgaaaacacttttggaga

SEQ ID NO: 292705 - DNA, 55 bp, Artificial
  Synthetic oligonucleotide
ccagtcgtacaaggactctagtgcgtaatgctccgcacgatgggagctgtaccag

SEQ ID NO: 292706 - DNA, 55 bp, Artificial
  Synthetic oligonucleotide
ccagtctagccactacagacagttgcacgaaaatatggacgtaatctacccatcg

SEQ ID NO: 292707 - DNA, 55 bp, Artificial
  Synthetic oligonucleotide
ccctcgtgtctctttagtttcatatctactaccctcgtgtctctttagtttcata

SEQ ID NO: 292708 - DNA, 55 bp, Artificial
  Synthetic oligonucleotide
ccgctgtgtgcgtgcacagcgatgagtactttcgtatgtaggatgaggctgtggg

SEQ ID NO: 292709 - DNA, 55 bp, Artificial
  Synthetic oligonucleotide
ccatcctccacgctctccgctacatatgcttcaccataggaacccaatcctacaa

SEQ ID NO: 292710 - DNA, 55 bp, Artificial
  Synthetic oligonucleotide
ccccgtctagattagtcgagataaacatagcggcacgatgacataggagtaacaa

SEQ ID NO: 292711 - DNA, 55 bp, Artificial
  Synthetic oligonucleotide
ccccgtctcctctgttcttatggtaggaatagacgctatcgctcacgtgttcgcc

SEQ ID NO: 292712 - DNA, 55 bp, Artificial
  Synthetic oligonucleotide
ccctacgaatggtagagtgtagtctggagaaaagtacatagtatctgataaccct

SEQ ID NO: 292713 - DNA, 55 bp, Artificial
  Synthetic oligonucleotide
ccctaccttggtgatactggcgtccagcaactactgagagcccttctgtgtctgg

SEQ ID NO: 292714 - DNA, 55 bp, Artificial
  Synthetic oligonucleotide
ccagacgcctgaggtgacacactccaaccagcgacgagatgggtcgccttgtttc

SEQ ID NO: 292715 - DNA, 57 bp, Artificial
  Synthetic oligonucleotide
tgctagaatatttaacgtctagtactctttgacgtttaatatcaattcctacggcca

SEQ ID NO: 292716 - DNA, 54 bp, Artificial
  Synthetic oligonucleotide
ccctaagaccctattctgacacccctaagaccctattctgacacctctaagacc

SEQ ID NO: 292717 - DNA, 55 bp, Artificial
  Synthetic oligonucleotide
cccttctctgctggattttgaggtctctatcgttgtctctgcgaattttcatcgc

SEQ ID NO: 292718 - DNA, 55 bp, Artificial
  Synthetic oligonucleotide
ccccacgatgccacataagcagtgcgacatctttaaccaatgcgcttggacaacc

SEQ ID NO: 292719 - DNA, 55 bp, Artificial
  Synthetic oligonucleotide
ccagacgacgatgagtcgctcagaccgcccgctcaagcacacacgtcttccactg

SEQ ID NO: 292720 - DNA, 55 bp, Artificial
  Synthetic oligonucleotide
ccagacagctggttgattgttattcctttcgaataaggtacggctaatactttcg

SEQ ID NO: 292721 - DNA, 50 bp, Artificial
  Synthetic oligonucleotide
ccctaaacccatgaaccctaaacccatgaaccctaaacccatgaacccta

SEQ ID NO: 292722 - DNA, 47 bp, Artificial
  Synthetic oligonucleotide
ccctaaaccacgaaccctaaaccacgaaccctaaaccacgaacccta

SEQ ID NO: 292723 - DNA, 55 bp, Artificial
  Synthetic oligonucleotide
ccgggttaaatgagtcgcacaacgtgtttggttctgctaactgccctttgaggac

SEQ ID NO: 292724 - DNA, 49 bp, Artificial
  Synthetic oligonucleotide
ccctaaaaccttactcctataccctaaaaccttactcctatacccctca

SEQ ID NO: 292725 - DNA, 55 bp, Artificial
  Synthetic oligonucleotide
cccttcttaaaacgatcgaaatgagttctcctagtgcatcaatcgttggtcatag

SEQ ID NO: 292726 - DNA, 51 bp, Artificial
  Synthetic oligonucleotide
agcctcccgcgtgtgtgacccgggagcctaggagggccccccaaccgtccg

SEQ ID NO: 292727 - DNA, 55 bp, Artificial
  Synthetic oligonucleotide
ccatcctcgttcgcattttgaagagtgtgttagtgagcacagtcgattttgtctt

SEQ ID NO: 292728 - DNA, 55 bp, Artificial
  Synthetic oligonucleotide
ccccacctgcattcaccaccggtacactgatgaaaacattgcccaacacagtttg

SEQ ID NO: 292729 - DNA, 55 bp, Artificial
  Synthetic oligonucleotide
cccttgccacacataattttagcacggaacgtcgcgaggtagaatgcaagaagtg

SEQ ID NO: 292730 - DNA, 51 bp, Artificial
  Synthetic oligonucleotide
cccgtttagttgtaaaattatataaaccaccttctcctaattgattacctc

SEQ ID NO: 292731 - DNA, 55 bp, Artificial
  Synthetic oligonucleotide
ccatcgaacgcgtaaaggagagtgcgctcgactaggacacgttttaagctgagag

SEQ ID NO: 292732 - DNA, 55 bp, Artificial
  Synthetic oligonucleotide
ccagaacgcgatactgcagggttagaggaggtgtgaagccaatctgtcaggagcc

SEQ ID NO: 292733 - DNA, 55 bp, Artificial
  Synthetic oligonucleotide
ccctttctctgtggtgtcatgcgctgacgtgggtctccccgttacgcgtcgtctc

SEQ ID NO: 292734 - DNA, 55 bp, Artificial
  Synthetic oligonucleotide
ccgctggttgccccagattgcgcccctaggtcctcgtcagacagtctaaacatcg

SEQ ID NO: 292735 - DNA, 55 bp, Artificial
  Synthetic oligonucleotide
ccatcgcacgcctccctacgtagcgagaccttgtgctcgctgtacccttctcgag

SEQ ID NO: 292736 - DNA, 55 bp, Artificial
  Synthetic oligonucleotide
ccatcgcactctccatcgaattgccgcacacttctcttgtgcacgtgcggctccc

SEQ ID NO: 292737 - DNA, 55 bp, Artificial
  Synthetic oligonucleotide
gcttacgacatagtttagttcacttaagacctgtattagtacctttatgacctaa

SEQ ID NO: 292738 - DNA, 58 bp, Artificial
  Synthetic oligonucleotide
cgaggatcccgtataatcttggtagtggtgccctactgaagggcttgagcctcggcga

SEQ ID NO: 292739 - DNA, 55 bp, Artificial
  Synthetic oligonucleotide
ccacttacatccgaaagccacccgagcagacgcgttacactagagatccgggtgg

SEQ ID NO: 292740 - DNA, 55 bp, Artificial
  Synthetic oligonucleotide
ccgctgccatcgagtcccttcactgaatgcttgcctgctgactcgtgcgtcactc

SEQ ID NO: 292741 - DNA, 55 bp, Artificial
  Synthetic oligonucleotide
ccactgggatccgtctctgtggaattcgcaaatgaagagcgccagcgaagaaccg

SEQ ID NO: 292742 - DNA, 55 bp, Artificial
  Synthetic oligonucleotide
ccatcgcctgtgaacgtccctcgtgaatcaagtgcttctcgacaagcgggagagc

SEQ ID NO: 292743 - DNA, 55 bp, Artificial
  Synthetic oligonucleotide
ccgctgcactcaggcacgctggactgcggtttcttgtggtactaccgccatggtc

SEQ ID NO: 292744 - DNA, 55 bp, Artificial
  Synthetic oligonucleotide
ccatagggtgtgcgaagtgactggggagcagttattcctcgtcaagtggatgagc

SEQ ID NO: 292745 - DNA, 55 bp, Artificial
  Synthetic oligonucleotide
ccggaagtgtaaccgtgtactgccgttgcgcatagtcgtcttttcgaggcgtagc

SEQ ID NO: 292746 - DNA, 55 bp, Artificial
  Synthetic oligonucleotide
ccatatcgtaatagtaaatgtcctgcttcagtcattaaagcgcgtcgtccactcc

SEQ ID NO: 292747 - DNA, 55 bp, Artificial
  Synthetic oligonucleotide
cccttatcgtgctttgcctcctgcttgtggagcgactctcgcggcccaaagacgc

SEQ ID NO: 292748 - DNA, 55 bp, Artificial
  Synthetic oligonucleotide
ccagcctcttgggtgcacaccgacttacagaagctacgactgcgacatgagagag

SEQ ID NO: 292749 - DNA, 60 bp, Artificial
  Synthetic oligonucleotide
tgcatatgggtgcaactttactatatggtgcatatgggtgcaactttactatatggtgca

SEQ ID NO: 292750 - DNA, 55 bp, Artificial
  Synthetic oligonucleotide
ccagccgttatataagtattccgcatgcgacttgccgcagaactagcgtagtgtt

SEQ ID NO: 292751 - DNA, 53 bp, Artificial
  Synthetic oligonucleotide
cccttcgaaggtgagagtaattatcgaagcgaattcgggcccaaaccgttgcc

SEQ ID NO: 292752 - DNA, 55 bp, Artificial
  Synthetic oligonucleotide
ccagccacttccttacggtgccgtccactccagcgatcgtgggaactgctcgtga

SEQ ID NO: 292753 - DNA, 55 bp, Artificial
  Synthetic oligonucleotide
ccatccgagtacacgcccatcgaaacgtacacgccctctggtgtgccatgtatcc

SEQ ID NO: 292754 - DNA, 46 bp, Artificial
  Synthetic oligonucleotide
ccggaaccctactcctaaacccggaaccttactcctaaacccggaa

SEQ ID NO: 292755 - DNA, 55 bp, Artificial
  Synthetic oligonucleotide
ccctccacatggcatcaagatatggcgagggcactgaggtggatgttacgggcgc

SEQ ID NO: 292756 - DNA, 55 bp, Artificial
  Synthetic oligonucleotide
ccctcatgagccacaggatgtggatttatccacgcgatgagatgcagctccgttg

SEQ ID NO: 292757 - DNA, 55 bp, Artificial
  Synthetic oligonucleotide
ccccggcgcgcatgtccttagtgcgcaatcatgttgtatcgaccgctgcgcacag

SEQ ID NO: 292758 - DNA, 52 bp, Artificial
  Synthetic oligonucleotide
ccctcacaggaaggtgtaccaacggaggaacccataaaagaggaactaccaa

SEQ ID NO: 292759 - DNA, 55 bp, Artificial
  Synthetic oligonucleotide
ccggggcgtctgtggaaaactcacgtgacaaggaacgatctgtcgacgtactgag

SEQ ID NO: 292760 - DNA, 52 bp, Artificial
  Synthetic oligonucleotide
aacacaactattgggagtaataaacggtttagccatcgacctaaatacgatt

SEQ ID NO: 292761 - DNA, 54 bp, Artificial
  Synthetic oligonucleotide
ccctattaatcctgcgttttgtccttcgggcgtttcaattgggcatattctacc

SEQ ID NO: 292762 - DNA, 53 bp, Artificial
  Synthetic oligonucleotide
ccctatagaccctttcctgctgtagttaggacctctattagttaccgtaggac

SEQ ID NO: 292763 - DNA, 55 bp, Artificial
  Synthetic oligonucleotide
ccctagtgtggcggtgtatgtggggctgttcttgtgggtgtcgcctacgacttga

SEQ ID NO: 292764 - DNA, 55 bp, Artificial
  Synthetic oligonucleotide
ccccgtccaatgacgaagctgtgaatgaactttgttcctacgatacacactccaa

SEQ ID NO: 292765 - DNA, 55 bp, Artificial
  Synthetic oligonucleotide
ccagcacgcttgttcacatcctgttttcgccagcgtgtgtccttctaccacgaac

SEQ ID NO: 292766 - DNA, 55 bp, Artificial
  Synthetic oligonucleotide
ccagatacacatgcggtatgtaacacctacacatgtgcctactaagatgaagggg

SEQ ID NO: 292767 - DNA, 55 bp, Artificial
  Synthetic oligonucleotide
cccttcgccggcttcgcaaggtggacttcaaacggtactgggagataatccgcga

SEQ ID NO: 292768 - DNA, 55 bp, Artificial
  Synthetic oligonucleotide
ccagagtccgtggcactgtgggagtaatacatgccagtagtctcagtagtaccac

SEQ ID NO: 292769 - DNA, 55 bp, Artificial
  Synthetic oligonucleotide
ccctagcttgttgcattatgagaagaggggtactgcagtcgaatttcgggctaac

SEQ ID NO: 292770 - DNA, 55 bp, Artificial
  Synthetic oligonucleotide
ccagactgatctctacaatccgtagagtttctgggtactgtgaactgacctccag

SEQ ID NO: 292771 - DNA, 57 bp, Artificial
  Synthetic oligonucleotide
aacaccatccaatttgattgggaattatctgtgttacaatactttttgatcccaggc

SEQ ID NO: 292772 - DNA, 54 bp, Artificial
  Synthetic oligonucleotide
ccccacgtgaagataccaattaaaggcaccacacgaaacgtatacaaagggtca

SEQ ID NO: 292773 - DNA, 55 bp, Artificial
  Synthetic oligonucleotide
cccttctcacatttgcgatctcccctctgcacgtgccgtgttcccatctcagtca

SEQ ID NO: 292774 - DNA, 55 bp, Artificial
  Synthetic oligonucleotide
ccggaacacgattcacgcgtttgaaggacgcctaaaagcagaacgatgttggacc

SEQ ID NO: 292775 - DNA, 55 bp, Artificial
  Synthetic oligonucleotide
ccagactacactctacgactcgtacagctaccagatactatgtactcttctccag

SEQ ID NO: 292776 - DNA, 55 bp, Artificial
  Synthetic oligonucleotide
ccgcttgtggttcttatgctgcgggtccacgaagttgtaccagaatcgcatcttg

SEQ ID NO: 292777 - DNA, 55 bp, Artificial
  Synthetic oligonucleotide
ccaaaggatcagagtgctatttggctgagcctctccttaaagaatgtcctacagg

SEQ ID NO: 292778 - DNA, 55 bp, Artificial
  Synthetic oligonucleotide
cccgcgtgaagcgctgacttttatggtctcaggcgaagtgttggctgtagcagtc

SEQ ID NO: 292779 - DNA, 55 bp, Artificial
  Synthetic oligonucleotide
cccactggcattcctgagcctgacgtctcactgtccatgcagagccacggtttcg

SEQ ID NO: 292780 - DNA, 55 bp, Artificial
  Synthetic oligonucleotide
ccgccacaatccccgtcaattgccagcggcagttttgtacagttgaccacggagg

SEQ ID NO: 292781 - DNA, 55 bp, Artificial
  Synthetic oligonucleotide
ccgagcaaatgaaggggaggtgatatattgctccctcgtagacatatacaaggcg

SEQ ID NO: 292782 - DNA, 60 bp, Artificial
  Synthetic oligonucleotide
tgcgcagcggtacaacaagctcgtctacccgctccagtttccaccagcaacgcaccggta

SEQ ID NO: 292783 - DNA, 55 bp, Artificial
  Synthetic oligonucleotide
cccactttaggcgaataggcaatatccctctgatatattgttttgaagttactag

SEQ ID NO: 292784 - DNA, 55 bp, Artificial
  Synthetic oligonucleotide
ccccttcacttgatcttgtgcgctgagtcgtcgcatgggagagggagcacccaga

SEQ ID NO: 292785 - DNA, 55 bp, Artificial
  Synthetic oligonucleotide
catttgagaggcacttgggtagccactgtctattcgcccgggagcgggttacgct

SEQ ID NO: 292786 - DNA, 55 bp, Artificial
  Synthetic oligonucleotide
cccagagcactgccatatccgcacgagacagtgggcgcagaacttctgatgaccg

SEQ ID NO: 292787 - DNA, 55 bp, Artificial
  Synthetic oligonucleotide
ccccttcgacatgttcattcgtgccgtcgtatgcgttaacacacgacagaatcgt

SEQ ID NO: 292788 - DNA, 55 bp, Artificial
  Synthetic oligonucleotide
ccgccaacaatttcttacttgtggtcgagattctgaggtaagctgtaactcaaat

SEQ ID NO: 292789 - DNA, 55 bp, Artificial
  Synthetic oligonucleotide
cccgcggctcttcgcattctgcgcctacactggacatatcgaactgttgggatac

SEQ ID NO: 292790 - DNA, 55 bp, Artificial
  Synthetic oligonucleotide
cccgcctctcgagagaccaccagtacgaggccgtctggagaataacaaagcaacg

SEQ ID NO: 292791 - DNA, 55 bp, Artificial
  Synthetic oligonucleotide
ccgcatgaacagctggggaccacggaaacgtctgcaagcagatagaaacacagtc

SEQ ID NO: 292792 - DNA, 55 bp, Artificial
  Synthetic oligonucleotide
ccccttcggcgacgttattcttttcaccgcctcaactaggcagaccccacatgca

SEQ ID NO: 292793 - DNA, 50 bp, Artificial
  Synthetic oligonucleotide
tgcgattactaaggggaaaggttttactggggttgtacaaagatgggggg

SEQ ID NO: 292794 - DNA, 55 bp, Artificial
  Synthetic oligonucleotide
cccagcaacggaagcgcgtgaagagaacggctacttacctaccacgttgcgcagc

SEQ ID NO: 292795 - DNA, 55 bp, Artificial
  Synthetic oligonucleotide
cattgtgggccgcttcgatgcatacgcggggcatacgttgatgcatcggcctggg

SEQ ID NO: 292796 - DNA, 55 bp, Artificial
  Synthetic oligonucleotide
cccattcctcgaaccagcgaagatactgtggcacataatcgaaatacgtaggagg

SEQ ID NO: 292797 - DNA, 52 bp, Artificial
  Synthetic oligonucleotide
ccccttctccgttgtcgttccgttgttccttgacgtccttcgaggaccacta

SEQ ID NO: 292798 - DNA, 55 bp, Artificial
  Synthetic oligonucleotide
ccgcatctgccgagcgtctactgtggggagagtgccatggacacgttgatggatg

SEQ ID NO: 292799 - DNA, 55 bp, Artificial
  Synthetic oligonucleotide
cattggggcatacctcaagtcatcgttcccaagagggacgtggcccgcagtgcgg

SEQ ID NO: 292800 - DNA, 55 bp, Artificial
  Synthetic oligonucleotide
ccgtcctgtgcagaggaccacatgccatgtgccggggaacggagctgtaagcaac

SEQ ID NO: 292801 - DNA, 55 bp, Artificial
  Synthetic oligonucleotide
ccgcatacacccgcgctctaaaattccgtctgctcacgacgacaactgcataatc

SEQ ID NO: 292802 - DNA, 55 bp, Artificial
  Synthetic oligonucleotide
cccgccggtgcactgcttgctgagcggaacacactcgtccttgccacagtacact

SEQ ID NO: 292803 - DNA, 55 bp, Artificial
  Synthetic oligonucleotide
cccagctactacggaaaacgaaagcactcgccgcctttctatcacctgccaccgc

SEQ ID NO: 292804 - DNA, 56 bp, Artificial
  Synthetic oligonucleotide
agttctggtttataatagatacgttattaatgttaggatgtatgggatatttgtag

SEQ ID NO: 292805 - DNA, 55 bp, Artificial
  Synthetic oligonucleotide
ccgagcctgcacatttgcactcaaacaccacaactaaaaggagttatgacaatac

SEQ ID NO: 292806 - DNA, 55 bp, Artificial
  Synthetic oligonucleotide
cccagctgtggtccactcacgttgcggaagttggcggagaggtacccgttgatcg

SEQ ID NO: 292807 - DNA, 55 bp, Artificial
  Synthetic oligonucleotide
cattggatcgcatgtttgtggccacggtcgtatgcccatcctccgcgtctgcagc

SEQ ID NO: 292808 - DNA, 55 bp, Artificial
  Synthetic oligonucleotide
cccaggaggcgaaaactatatgtcacaccactaacgaagtgggcaactaccgcgg

SEQ ID NO: 292809 - DNA, 54 bp, Artificial
  Synthetic oligonucleotide
cccagggaccccgcaattatcaaaacagcgggagaggtgtaggattccggggca

SEQ ID NO: 292810 - DNA, 55 bp, Artificial
  Synthetic oligonucleotide
cccacgaggaccttgtgcgttgcccgcatggttgtgcgagatcgtcggtagcgta

SEQ ID NO: 292811 - DNA, 55 bp, Artificial
  Synthetic oligonucleotide
ccgactagctcgttccctcgaaactctctcgccctacgcgaggatccacatgggg

SEQ ID NO: 292812 - DNA, 55 bp, Artificial
  Synthetic oligonucleotide
ccgactcgatttcgcacctcagctatcggatggcctgcacacagctgtccctcgc

SEQ ID NO: 292813 - DNA, 55 bp, Artificial
  Synthetic oligonucleotide
cccacgcccgcactcgtacacgtacaagacgcatctattgtgtaagctccttttg

SEQ ID NO: 292814 - DNA, 55 bp, Artificial
  Synthetic oligonucleotide
cccctgcttgctgtccgcagaagctggtacggtctgtcgtacatctcagtccagc

SEQ ID NO: 292815 - DNA, 60 bp, Artificial
  Synthetic oligonucleotide
gatgattcgatcattaagtatgtttgagtatcaatcgagttaacatgctcagccgccaaa

SEQ ID NO: 292816 - DNA, 54 bp, Artificial
  Synthetic oligonucleotide
ccaacggggaggggcgtaacgaggacggaagcaccgagcgacaggatctcccca

SEQ ID NO: 292817 - DNA, 55 bp, Artificial
  Synthetic oligonucleotide
cccacgcctcctttggtgcgcccactaccacgaatctaccgtgcggtgtcactct

SEQ ID NO: 292818 - DNA, 55 bp, Artificial
  Synthetic oligonucleotide
cccctgtgaagtgagcgtatacaacgaagtggtgtttgaagaggcaagcgcaaaa

SEQ ID NO: 292819 - DNA, 55 bp, Artificial
  Synthetic oligonucleotide
ccgccgacctatacacactctcattcattccctacacgtacgtgcaccgacaccc

SEQ ID NO: 292820 - DNA, 55 bp, Artificial
  Synthetic oligonucleotide
cccgcgtggtctgtcggtgatgacatccctttcgctgcttttgcaagtggcccgc

SEQ ID NO: 292821 - DNA, 55 bp, Artificial
  Synthetic oligonucleotide
ccgtcagttctggttctgtgagtctagacgctttcaatcgctcctccgcctcatg

SEQ ID NO: 292822 - DNA, 55 bp, Artificial
  Synthetic oligonucleotide
ccaaccctcgtcttagtaggcgatctcgtttagcacactcggcagggtatgtcca

SEQ ID NO: 292823 - DNA, 55 bp, Artificial
  Synthetic oligonucleotide
ccaacatgaatcaggatcatcagtatcttccctcaaccttctcctacattcatct

SEQ ID NO: 292824 - DNA, 55 bp, Artificial
  Synthetic oligonucleotide
ccaacaggagtcggctgaagatagtcttgcggttcgcctttctatacaggcgagc

SEQ ID NO: 292825 - DNA, 55 bp, Artificial
  Synthetic oligonucleotide
cccacggatgcagatgcaggccactcgaatgccacgttggtgccaaaggtcgctg

SEQ ID NO: 292826 - DNA, 55 bp, Artificial
  Synthetic oligonucleotide
agttatagtccctgttatgttagctgttcttataaaaaattgaggcttataacca

SEQ ID NO: 292827 - DNA, 52 bp, Artificial
  Synthetic oligonucleotide
ccaacacataagaactttagggaagttaaggtgctcagggtcttaccgtcgg

SEQ ID NO: 292828 - DNA, 55 bp, Artificial
  Synthetic oligonucleotide
ccgccctgtaggtaagctcaatgggtggggatcaatcgaacagggtgatatacgg

SEQ ID NO: 292829 - DNA, 49 bp, Artificial
  Synthetic oligonucleotide
cccctgttgggtactcccctgttgggtactcccctgttgggtactcccc

SEQ ID NO: 292830 - DNA, 55 bp, Artificial
  Synthetic oligonucleotide
ccaacaaaggggtttggattactattgtttcccactaatggcgatgcgccgagca

SEQ ID NO: 292831 - DNA, 55 bp, Artificial
  Synthetic oligonucleotide
ccgactcgtggaggctttctcaggtttgtatgtctgtgtgcatcaactccacaca

SEQ ID NO: 292832 - DNA, 55 bp, Artificial
  Synthetic oligonucleotide
ccgtcccaagacctccaattatccaatcagtagcctctggatttaacaccaccag

SEQ ID NO: 292833 - DNA, 55 bp, Artificial
  Synthetic oligonucleotide
ccccttaccttaccctgtagcgatagacagagaccttcgtgacgagcaatgtggt

SEQ ID NO: 292834 - DNA, 55 bp, Artificial
  Synthetic oligonucleotide
ccgactctttgtgaagtccattgctcccaacgcgccccttgtcctcacctagtcg

SEQ ID NO: 292835 - DNA, 55 bp, Artificial
  Synthetic oligonucleotide
cccacgtgcaccgtgacacgctgccatctatacgtgattcgcgtgtgattcaagc

SEQ ID NO: 292836 - DNA, 54 bp, Artificial
  Synthetic oligonucleotide
ccgccatttccccggtaattgccccggaatcctacacctctcccgctgttctga

SEQ ID NO: 292837 - DNA, 59 bp, Artificial
  Synthetic oligonucleotide
gcgcactgccctcttgcctacacactccttttcgtggccggaggactcgttttgcacgc

SEQ ID NO: 292838 - DNA, 55 bp, Artificial
  Synthetic oligonucleotide
cccattgatccaaataatactctaactggtttggttcataacactggagaggagc

SEQ ID NO: 292839 - DNA, 55 bp, Artificial
  Synthetic oligonucleotide
ccgccacacatataattgcctcacctcccgccaagcgaagagctcattgggtatg

SEQ ID NO: 292840 - DNA, 55 bp, Artificial
  Synthetic oligonucleotide
ccaaaggtatggtggagagtcctctttggtcccgacatcaaagaaccagtcgacg

SEQ ID NO: 292841 - DNA, 55 bp, Artificial
  Synthetic oligonucleotide
ccccttcaagctgagaacggaagagcatgtcacacaaacgacgatggctcggtcc

SEQ ID NO: 292842 - DNA, 55 bp, Artificial
  Synthetic oligonucleotide
cccgcagtaatgtaggcgggtggttcaagcaggctactacctcagcatgcagtgg

SEQ ID NO: 292843 - DNA, 55 bp, Artificial
  Synthetic oligonucleotide
ccgtcgtcagagacagccgcaggaggggctcggtgctccacacattcgcaacaga

SEQ ID NO: 292844 - DNA, 55 bp, Artificial
  Synthetic oligonucleotide
ccgcactagacgatgcctctcgatatcacgaggtatgtacatgggtagttcgcgc

SEQ ID NO: 292845 - DNA, 55 bp, Artificial
  Synthetic oligonucleotide
cccgaaatacttttaggagcaagatcgtattccactcccatagatatatggtccg

SEQ ID NO: 292846 - DNA, 55 bp, Artificial
  Synthetic oligonucleotide
cattcaccccgctctgcgtgcagcaactgcgggagtcgcgagagtacgctgtgct

SEQ ID NO: 292847 - DNA, 55 bp, Artificial
  Synthetic oligonucleotide
ccgcacagacacgcagcacaggtgcgcctgaacgaagtaacgaggtcatgcgtca

SEQ ID NO: 292848 - DNA, 60 bp, Artificial
  Synthetic oligonucleotide
taatctgtatgatcgaccttgtaatcggatatactgctattcaaagtatggcgatctggg

SEQ ID NO: 292849 - DNA, 56 bp, Artificial
  Synthetic oligonucleotide
atgctctaagttttatcttcctatttactcttggtggtactactggagtagttcta

SEQ ID NO: 292850 - DNA, 57 bp, Artificial
  Synthetic oligonucleotide
cgagttaacatgctcagccgccaaaaataatataacgatattattaccgtacaagcc

SEQ ID NO: 292851 - DNA, 55 bp, Artificial
  Synthetic oligonucleotide
cccgaagacgagctaccacccatcgatgtaggggcgttaagcagcattggttctt

SEQ ID NO: 292852 - DNA, 55 bp, Artificial
  Synthetic oligonucleotide
cccatgcccgtgtaccctctccagacgtctcctttcataccccatgccttgccgc

SEQ ID NO: 292853 - DNA, 55 bp, Artificial
  Synthetic oligonucleotide
ccgcaagatgcaggacacctgctgatgtgcggtgcccagtgcatggtgctctctg

SEQ ID NO: 292854 - DNA, 55 bp, Artificial
  Synthetic oligonucleotide
cccgcacatgtgccccattaagcattgaattgaaggggtacttctcgtctcgtct

SEQ ID NO: 292855 - DNA, 55 bp, Artificial
  Synthetic oligonucleotide
ccgatggtgagcctcgtgtacaacgacgggtccaacaccaagcacttcgactctg

SEQ ID NO: 292856 - DNA, 55 bp, Artificial
  Synthetic oligonucleotide
cccgaatcgtctgagctctcactgcttcacctcatacatcctttcggactcgtgt

SEQ ID NO: 292857 - DNA, 55 bp, Artificial
  Synthetic oligonucleotide
ccgtcgtctaggatcaagtgaagtccgacgttcgtgtagtctagcgtgcgagggt

SEQ ID NO: 292858 - DNA, 52 bp, Artificial
  Synthetic oligonucleotide
cccgcaacctaaatacgaaatgttacacatacaccgtaaaatattaaatccc

SEQ ID NO: 292859 - DNA, 54 bp, Artificial
  Synthetic oligonucleotide
ccgtctagacgccttcgttaaatcgatcattttccctcgccctaaaattgccac

SEQ ID NO: 292860 - DNA, 55 bp, Artificial
  Synthetic oligonucleotide
cattatcgccggcgcgccaacgagcggaatgggaaggatcacccatacaacgagg

SEQ ID NO: 292861 - DNA, 56 bp, Artificial
  Synthetic oligonucleotide
cgagttaacatgctctaccgcctaaacgatattattaccgtacaagccgttagcaa

SEQ ID NO: 292862 - DNA, 55 bp, Artificial
  Synthetic oligonucleotide
ccgagtcagtaaaagtaccagtctccgtggccactatcaaccacaccgctaatgc

SEQ ID NO: 292863 - DNA, 55 bp, Artificial
  Synthetic oligonucleotide
cattagtaacagatggcacgaacaaaccttatcgatgtaaaataaaagcccctgg

SEQ ID NO: 292864 - DNA, 55 bp, Artificial
  Synthetic oligonucleotide
cattagacgacaatacgactttaatgcgtcagcaacaacggagaatgaagagcaa

SEQ ID NO: 292865 - DNA, 55 bp, Artificial
  Synthetic oligonucleotide
cccgagatacgcacatttggagaggcttgtggttgcagtgaagcgacgggtgtga

SEQ ID NO: 292866 - DNA, 55 bp, Artificial
  Synthetic oligonucleotide
cattactacgtcttgtgccaactgctggggttagagcggtcgcaggtggactccc

SEQ ID NO: 292867 - DNA, 55 bp, Artificial
  Synthetic oligonucleotide
ccgatgcgtaggggtgaaatactcccaatagtggtgagcacctcgtcatgcggcc

SEQ ID NO: 292868 - DNA, 55 bp, Artificial
  Synthetic oligonucleotide
cccatcacatggaaggttagtgtcaaggaaggacagaggccgacgcctctgcacg

SEQ ID NO: 292869 - DNA, 55 bp, Artificial
  Synthetic oligonucleotide
ccgatacccgcgaagcgtcggtattacgttgaagaagccgcatgtgcccaacgac

SEQ ID NO: 292870 - DNA, 55 bp, Artificial
  Synthetic oligonucleotide
cccgatccgtgaggcgttgaagtttgtaaggagggttgcgatggatgcccgcacg

SEQ ID NO: 292871 - DNA, 55 bp, Artificial
  Synthetic oligonucleotide
ccgatgaatctctccgaatttcctctcgtctcaacattcctatcattaaccgtct

SEQ ID NO: 292872 - DNA, 60 bp, Artificial
  Synthetic oligonucleotide
tgccaaatgctcacacaaagagactaacgaacatgttagtgttatgcgtgcaaacccaaa

SEQ ID NO: 292873 - DNA, 55 bp, Artificial
  Synthetic oligonucleotide
ccgatcgccacactggagacgatctgcaaagtacccctgacgggctcacctaacg

SEQ ID NO: 292874 - DNA, 55 bp, Artificial
  Synthetic oligonucleotide
cccgagatgagtgttgctccctcggaatcagtgggaaacgtgcgttaactcagtg

SEQ ID NO: 292875 - DNA, 55 bp, Artificial
  Synthetic oligonucleotide
cattaagtactagtctgatggtgttaaatccagaaacacaagcctctcgtcaccc

SEQ ID NO: 292876 - DNA, 55 bp, Artificial
  Synthetic oligonucleotide
cccatcttggttgtcacgctgcgagaggagagcgagttgtcgcgggtgtacaacg

SEQ ID NO: 292877 - DNA, 55 bp, Artificial
  Synthetic oligonucleotide
ccgtcgaacgtggtactgcgtatcaagccgaagggtgctgctttatccgaggcct

SEQ ID NO: 292878 - DNA, 55 bp, Artificial
  Synthetic oligonucleotide
ccccttgagcacacaaactcgaaaggcacatgtaccccgtgtacccgcaacgcct

SEQ ID NO: 292879 - DNA, 55 bp, Artificial
  Synthetic oligonucleotide
ccgtcgactgggattccatgagcggcgctaccttgcgcggtactacgccggtaaa

SEQ ID NO: 292880 - DNA, 55 bp, Artificial
  Synthetic oligonucleotide
cccaggtctggtgcatgaaattcactacctgcttcgggtaacctgcctggatgcc

SEQ ID NO: 292881 - DNA, 55 bp, Artificial
  Synthetic oligonucleotide
cccgccacgagcatcagagggttttgacctatggctcaggaacgatcacccggca

SEQ ID NO: 292882 - DNA, 55 bp, Artificial
  Synthetic oligonucleotide
ccgcaggagagtagggcttcactagcgtgcccctcaagtgccttccttcgctctg

SEQ ID NO: 292883 - DNA, 60 bp, Artificial
  Synthetic oligonucleotide
gcgcagccgtttaatagctttatcacgcttgcttcctttagctgacaatacgtcttctct

SEQ ID NO: 292884 - DNA, 55 bp, Artificial
  Synthetic oligonucleotide
cccatgtgaactggtcgtaggaacgtatgatgggaagctctacgggttcctgttg

SEQ ID NO: 292885 - DNA, 55 bp, Artificial
  Synthetic oligonucleotide
cccgcatgagctgggagtatcgcatacagtgccccatatcgatgtacacatagac

SEQ ID NO: 292886 - DNA, 55 bp, Artificial
  Synthetic oligonucleotide
ccgagctgacgcgtccgtgtgcgtatgtccatgagcttgggtcgttgtggacgac

SEQ ID NO: 292887 - DNA, 54 bp, Artificial
  Synthetic oligonucleotide
cattgcaagccttaaaaccgtgggaaaatgtcctaggccggtcaaaagtgacca

SEQ ID NO: 292888 - DNA, 55 bp, Artificial
  Synthetic oligonucleotide
cccagtaaaacatgcatagacgcgctacactcataattatacgcgcaagcgcctc

SEQ ID NO: 292889 - DNA, 55 bp, Artificial
  Synthetic oligonucleotide
cattctgctcgtgatacccgacatatggcctgactttctctcttgagggaagggg

SEQ ID NO: 292890 - DNA, 55 bp, Artificial
  Synthetic oligonucleotide
cattcgaatgcctttgagcgcagtgcctcggggaccgggagcaagggcgtattca

SEQ ID NO: 292891 - DNA, 55 bp, Artificial
  Synthetic oligonucleotide
ccgcaggacacagcacgcacatacacggcgagagatggcatgagaatcaagaggc

SEQ ID NO: 292892 - DNA, 55 bp, Artificial
  Synthetic oligonucleotide
ccgtcgcaaggcgtccgttgtagcactcgtgtgtccaacacagcgtgggtctctg

SEQ ID NO: 292893 - DNA, 55 bp, Artificial
  Synthetic oligonucleotide
ccgtcgctctctacctgctgctagtctcgatttctgcgagccataaccgcgctcc

SEQ ID NO: 292894 - DNA, 57 bp, Artificial
  Synthetic oligonucleotide
tggtattaaaatttaatgcttgaataaggtttaataggtatgagagttctcatatta

SEQ ID NO: 292895 - DNA, 54 bp, Artificial
  Synthetic oligonucleotide
cccagtgtgtgagttggtatctaacgagaccgtgtcgtctaaaacgtaaggccc

SEQ ID NO: 292896 - DNA, 55 bp, Artificial
  Synthetic oligonucleotide
ccgaggggtagtgggactaacggatacgtccagcgcagtttggctgtgatgcctg

SEQ ID NO: 292897 - DNA, 55 bp, Artificial
  Synthetic oligonucleotide
cccatacacgggagcgagcctatgaacccaccagacagacgacttggaggacacg

SEQ ID NO: 292898 - DNA, 55 bp, Artificial
  Synthetic oligonucleotide
ccgcagcgctaccatgtaagcagtcgccgcaggtgaaagactcgaataccccacg

SEQ ID NO: 292899 - DNA, 55 bp, Artificial
  Synthetic oligonucleotide
cccctttcatcctccctatctgccctgttcgtgttgtcgggtgcaacggctatgc

SEQ ID NO: 292900 - DNA, 54 bp, Artificial
  Synthetic oligonucleotide
ccgaggttccgcctcttggaggagtgattttgtgattactcccaaacccttgag

SEQ ID NO: 292901 - DNA, 55 bp, Artificial
  Synthetic oligonucleotide
cccatggtagtatccttagtaccaggtacatctgtagccgtgggagcaagcaccg

SEQ ID NO: 292902 - DNA, 55 bp, Artificial
  Synthetic oligonucleotide
cccatgggtatacctatgtgacccatctaaagtgaccctgttcctatagccctta

SEQ ID NO: 292903 - DNA, 55 bp, Artificial
  Synthetic oligonucleotide
cccatatcacgtaaatcacgtcaagcttgcaggtgtctgtgtccacgtgccacac

SEQ ID NO: 292904 - DNA, 52 bp, Artificial
  Synthetic oligonucleotide
cattccatcccggagcttcttttgtgtttcctaaattaggtttaagttctcc

SEQ ID NO: 292905 - DNA, 59 bp, Artificial
  Synthetic oligonucleotide
tgatcccaggctggtaataaatgtaaacttttagcccaatagaatagaaacagatgtca

SEQ ID NO: 292906 - DNA, 55 bp, Artificial
  Synthetic oligonucleotide
ccgagtacacctcagcgcacgcgccatactttgtacagggaacccctcccttcct

SEQ ID NO: 292907 - DNA, 53 bp, Artificial
  Synthetic oligonucleotide
cccatcaacttattttacctccggtggccccagtcgtagaccgtcctcctctc

SEQ ID NO: 292908 - DNA, 55 bp, Artificial
  Synthetic oligonucleotide
ccaagggccgtacgcggctttcgcgtcccctcgcacacgcttgctggaatgcata

SEQ ID NO: 292909 - DNA, 55 bp, Artificial
  Synthetic oligonucleotide
ccaaggggccctggaccaaggaggaagatgagattctccgataaatggtagagac

SEQ ID NO: 292910 - DNA, 55 bp, Artificial
  Synthetic oligonucleotide
ccgacgctctggcgaggagcaaaatcgcgcgcggggaaaatactacggcgcattg

SEQ ID NO: 292911 - DNA, 55 bp, Artificial
  Synthetic oligonucleotide
cccgggaggtagtgaggcatataatcaggcagtggatttcatatagcgcatgggg

SEQ ID NO: 292912 - DNA, 55 bp, Artificial
  Synthetic oligonucleotide
cccctctgcgtgcagtgcttgatgcgtctacgctgctttggccctcagcgaccaa

SEQ ID NO: 292913 - DNA, 55 bp, Artificial
  Synthetic oligonucleotide
cccacaagattaaaaccgtctgcagaaaagatagggccatcctgattagtgacgt

SEQ ID NO: 292914 - DNA, 55 bp, Artificial
  Synthetic oligonucleotide
cccggggaatgcgacccacaataacagaaacgtgaaactgcggaatcagttcctc

SEQ ID NO: 292915 - DNA, 55 bp, Artificial
  Synthetic oligonucleotide
ccaagtatgagcgggcacgcgtgctgggtacgcgcgcgctgcagattagcatgaa

SEQ ID NO: 292916 - DNA, 58 bp, Artificial
  Synthetic oligonucleotide
tggtagatcacatccagtaactccttggggaagaatcgctttaggacaacgtacaaga

SEQ ID NO: 292917 - DNA, 55 bp, Artificial
  Synthetic oligonucleotide
ccaagtgttgccctctcacaagctcaaaatggcgtctcgtctagtgcagaccggg

SEQ ID NO: 292918 - DNA, 55 bp, Artificial
  Synthetic oligonucleotide
ccccaaatagcgtacacgttcttgcgattgaggcaaaggcgatttgggaaggcat

SEQ ID NO: 292919 - DNA, 55 bp, Artificial
  Synthetic oligonucleotide
ccaactgtgcgggttttattcactcgcagtctattggcctacagcgttccctgcc

SEQ ID NO: 292920 - DNA, 54 bp, Artificial
  Synthetic oligonucleotide
cccggacacccctttctaacacccatacaacattattctaacacccatacaaca

SEQ ID NO: 292921 - DNA, 55 bp, Artificial
  Synthetic oligonucleotide
ccgtaatgtaaagactgaatcgtattacgggctgagagtctgtaccgtggtcccg

SEQ ID NO: 292922 - DNA, 55 bp, Artificial
  Synthetic oligonucleotide
ccgtattggtttcctgactgcgtgtaccccgtgcgtggcggcacacttgaatgcg

SEQ ID NO: 292923 - DNA, 54 bp, Artificial
  Synthetic oligonucleotide
cccggtgaacaaaggccagtctaaaccggtagtccaactagtagcaagacacac

SEQ ID NO: 292924 - DNA, 55 bp, Artificial
  Synthetic oligonucleotide
cccctgcatacactagaggttggtatgttcagccaagaaagtttagtgctcatga

SEQ ID NO: 292925 - DNA, 55 bp, Artificial
  Synthetic oligonucleotide
ccgtaagggttgatgctgacacgcgaccgaagacacgctagctgtagtgattgct

SEQ ID NO: 292926 - DNA, 52 bp, Artificial
  Synthetic oligonucleotide
cccggaatctgacttctaacacccctaagacgttattccaacacccctacaa

SEQ ID NO: 292927 - DNA, 60 bp, Artificial
  Synthetic oligonucleotide
tgatccgtgagcgtgttgctgtgcatcgagtctacgtagagagacgtgggggactgccgc

SEQ ID NO: 292928 - DNA, 55 bp, Artificial
  Synthetic oligonucleotide
ccaatactattgctgacgctagccgcacaacaaccccatttacgtcacggtggag

SEQ ID NO: 292929 - DNA, 53 bp, Artificial
  Synthetic oligonucleotide
cccggaatctaattccctgcatcccacaaccttattcggacacccctacaacg

SEQ ID NO: 292930 - DNA, 55 bp, Artificial
  Synthetic oligonucleotide
cccacatacaccgtaaaatattgaatcccgcaacctacatgcgaaatcttacaca

SEQ ID NO: 292931 - DNA, 55 bp, Artificial
  Synthetic oligonucleotide
ccgtacgggtccgcatctttgttcgatagcagataatcacgcagacggtgtagca

SEQ ID NO: 292932 - DNA, 55 bp, Artificial
  Synthetic oligonucleotide
ccaagctcttatccaccgctctatcgctgcacctacccacgatcactagcacgcg

SEQ ID NO: 292933 - DNA, 55 bp, Artificial
  Synthetic oligonucleotide
ccgccttgcttcccgagctttgcctaagacacacgaaaagagaggggtatacacc

SEQ ID NO: 292934 - DNA, 55 bp, Artificial
  Synthetic oligonucleotide
ccgacctacttaaacgcgagactctgaaaggattggtcgagacggacaccgagct

SEQ ID NO: 292935 - DNA, 55 bp, Artificial
  Synthetic oligonucleotide
ccgcctttcggctctcacatgctttagggtgcccatactcgtcgtggcgcgtgtc

SEQ ID NO: 292936 - DNA, 55 bp, Artificial
  Synthetic oligonucleotide
cccggccttgccatacaagggacgttgccagtttatggctggaggcggtgtgcgt

SEQ ID NO: 292937 - DNA, 55 bp, Artificial
  Synthetic oligonucleotide
cccacatgtcgagaggaatagttccgttaaacggcagtggattgcgcccggtatc

SEQ ID NO: 292938 - DNA, 59 bp, Artificial
  Synthetic oligonucleotide
tgatcgacttcctaaattttatatgtctacagatttactattttagatagtagaacata

SEQ ID NO: 292939 - DNA, 55 bp, Artificial
  Synthetic oligonucleotide
ccaagcagtaaggctggaaactagtacgtggtggtgacacgcgcacacatcgcct

SEQ ID NO: 292940 - DNA, 55 bp, Artificial
  Synthetic oligonucleotide
cccaccacccagtctctcgtcgagtccgcaacgacgcacctctgtgcactccata

SEQ ID NO: 292941 - DNA, 54 bp, Artificial
  Synthetic oligonucleotide
ccgccttcttttccctacgcctcaacttacctaacggacgtcgcctctgctctc

SEQ ID NO: 292942 - DNA, 54 bp, Artificial
  Synthetic oligonucleotide
ccgtacctttggtttcccaggagccgacgaaatggcttcaatgtttgaatacta

SEQ ID NO: 292943 - DNA, 55 bp, Artificial
  Synthetic oligonucleotide
ccgtacaccatgatccctggcaggacgagtagcaacggaatagcccaccacctga

SEQ ID NO: 292944 - DNA, 55 bp, Artificial
  Synthetic oligonucleotide
cccacccactcgcttccacacgcacgcatacacagagagcgaacgaggcacgcat

SEQ ID NO: 292945 - DNA, 55 bp, Artificial
  Synthetic oligonucleotide
ccaaggacacaaacctcagcgagattaggaaggcaatgcggacgagcaactcgac

SEQ ID NO: 292946 - DNA, 55 bp, Artificial
  Synthetic oligonucleotide
ccaagactataactactattgcaacaacggacgctgttatagcattggaataagt

SEQ ID NO: 292947 - DNA, 55 bp, Artificial
  Synthetic oligonucleotide
ccaaggacctgcagctagcattgcgcctccgtggagagcgcacgtgaagagagct

SEQ ID NO: 292948 - DNA, 55 bp, Artificial
  Synthetic oligonucleotide
cccggagagacgtacacaaggagcacaagtgccgccgatccgtttgcacgtgagc

SEQ ID NO: 292949 - DNA, 58 bp, Artificial
  Synthetic oligonucleotide
ataaatggtagcgccggtttcccgggtatccaatccagtgctccattcaaggcataga

SEQ ID NO: 292950 - DNA, 55 bp, Artificial
  Synthetic oligonucleotide
ccgtatccacactcgcaactctctggagagagactcacgtacactacggtagcgc

SEQ ID NO: 292951 - DNA, 55 bp, Artificial
  Synthetic oligonucleotide
ccaaggccacactacaatgtggcgctgccacgagtataccgttaatcatggggag

SEQ ID NO: 292952 - DNA, 55 bp, Artificial
  Synthetic oligonucleotide
cccggctcaattatggcatcaaggagacacatgtgatccgttttcagagcgcaat

SEQ ID NO: 292953 - DNA, 55 bp, Artificial
  Synthetic oligonucleotide
ccgcgatgacggctacttcagcggcgagaacaactacgtggacacgtcaatctac

SEQ ID NO: 292954 - DNA, 55 bp, Artificial
  Synthetic oligonucleotide
cccctctcctttcgcttaaagatgcctggacagtcgaaagcaataggtcgtcata

SEQ ID NO: 292955 - DNA, 55 bp, Artificial
  Synthetic oligonucleotide
cccgctgtgcgcgtcgttaccgttgctcttagtctttggtctcgtgttatccgcc

SEQ ID NO: 292956 - DNA, 55 bp, Artificial
  Synthetic oligonucleotide
ccaatgaaatcgctatgatctcatgcattattcactagaatgtacagcaagatgg

SEQ ID NO: 292957 - DNA, 55 bp, Artificial
  Synthetic oligonucleotide
ccaatgacgcatgcagcgctggtaatcatatgacgggttctctacggaacctcgt

SEQ ID NO: 292958 - DNA, 55 bp, Artificial
  Synthetic oligonucleotide
ccgcctcaacacgatcattgggcccatctgagatataactaagcgcccaacaagc

SEQ ID NO: 292959 - DNA, 55 bp, Artificial
  Synthetic oligonucleotide
ccaacgtagggttgtttatagtacatccaacttcttcgtatatttcagatgaccc

SEQ ID NO: 292960 - DNA, 55 bp, Artificial
  Synthetic oligonucleotide
gctgttggtttaagccctttattaccatacaagagatcgcgtactttggaccgaa

SEQ ID NO: 292961 - DNA, 48 bp, Artificial
  Synthetic oligonucleotide
cgattttggttctttattcaatcgaaaggtttggaaactttaaaaacc

SEQ ID NO: 292962 - DNA, 55 bp, Artificial
  Synthetic oligonucleotide
cccgctctcggtaccttttcccgcagatgctcacaacggcaaataccgtagccga

SEQ ID NO: 292963 - DNA, 55 bp, Artificial
  Synthetic oligonucleotide
cccgcttagtgcacgtgcgagtcttcccctttgtctcgtgggacgtagcgtctcc

SEQ ID NO: 292964 - DNA, 55 bp, Artificial
  Synthetic oligonucleotide
ccgtcactttccggtagatgtctgtcgtagagttacacgcattcgattctcattg

SEQ ID NO: 292965 - DNA, 53 bp, Artificial
  Synthetic oligonucleotide
ccgtaaagggagagaaaggcgtaaatcgggatgctttcgcaaccggcgtgggc

SEQ ID NO: 292966 - DNA, 55 bp, Artificial
  Synthetic oligonucleotide
ccaacgtagagcagatgagtcggggatacgtatgtgacgcagggtggtgtgtgcg

SEQ ID NO: 292967 - DNA, 55 bp, Artificial
  Synthetic oligonucleotide
cccctgctaccggagttgccgtgggagacgctatcgaagtgaagacactaagcgg

SEQ ID NO: 292968 - DNA, 53 bp, Artificial
  Synthetic oligonucleotide
ccgtaagcacacgaaataattctaaacccttgatcctttccgtaggctaacat

SEQ ID NO: 292969 - DNA, 55 bp, Artificial
  Synthetic oligonucleotide
cccaccgggctaagctacgtacatttcgcgcctacgcagtagtttagcagaacga

SEQ ID NO: 292970 - DNA, 54 bp, Artificial
  Synthetic oligonucleotide
atccttcgctttacgccacggctccatgagcgtagctgtccgcgtggtgcgctt

SEQ ID NO: 292971 - DNA, 54 bp, Artificial
  Synthetic oligonucleotide
gtaacatgacttccggttgtagcataactggttaatgtgttagttttgggaact

SEQ ID NO: 292972 - DNA, 60 bp, Artificial
  Synthetic oligonucleotide
tgggtgcaactttactatatggtgcatatgggtgcaactttactatatggtgcatatggg

SEQ ID NO: 292973 - DNA, 54 bp, Artificial
  Synthetic oligonucleotide
cctgctgtcgtcttcccgttgtccttttatgtgcaccttcgctctccggtgaat

SEQ ID NO: 292974 - DNA, 54 bp, Artificial
  Synthetic oligonucleotide
atcgtctctccaatgtgtagtgttccctcttgcactaagattaaggtggtgatg

SEQ ID NO: 292975 - DNA, 54 bp, Artificial
  Synthetic oligonucleotide
gtctaacgacatttctgagggtgcaaactgcgtctatcacttcgtgtgagtgct

SEQ ID NO: 292976 - DNA, 54 bp, Artificial
  Synthetic oligonucleotide
acaaaggtttgcttagactaaagcgccgcattcaaagacacgactcgggcggcc

SEQ ID NO: 292977 - DNA, 54 bp, Artificial
  Synthetic oligonucleotide
gaccgtctaaggaggtggatggggtcattgctgcttagcggtgccgttcctatg

SEQ ID NO: 292978 - DNA, 54 bp, Artificial
  Synthetic oligonucleotide
gacgggtaaggcggagcggcgtgtgctgtggacgagcgggtacgtcaacactgc

SEQ ID NO: 292979 - DNA, 54 bp, Artificial
  Synthetic oligonucleotide
accacctcgcctttcactcggcttcgctccgcggcatgactgggatttcccatc

SEQ ID NO: 292980 - DNA, 54 bp, Artificial
  Synthetic oligonucleotide
ggtgcagctgcctgaagcgatcgacgttaactacctcaagtccgactgcgacgt

SEQ ID NO: 292981 - DNA, 54 bp, Artificial
  Synthetic oligonucleotide
taacaccgggcgtactctgcgtggacggattgtagtcgctgctcatgtaactcg

SEQ ID NO: 292982 - DNA, 54 bp, Artificial
  Synthetic oligonucleotide
aagctgtacaagatcatgtctgtgcgggaatcagccaatcccttccgtgcggta

SEQ ID NO: 292983 - DNA, 57 bp, Artificial
  Synthetic oligonucleotide
agccgccaaaaataatataacgatattattaccgtacaagccgttagcaagacatga

SEQ ID NO: 292984 - DNA, 54 bp, Artificial
  Synthetic oligonucleotide
ggtcgagagcacaacggtcgtgtgagttattgcctcttcttcgttgctctgtcg

SEQ ID NO: 292985 - DNA, 54 bp, Artificial
  Synthetic oligonucleotide
gtcccactctcaccagcggaagacctttatttcgctgcagttcagcatgcctgt

SEQ ID NO: 292986 - DNA, 54 bp, Artificial
  Synthetic oligonucleotide
acgaaataaggcgagatgtatcctcgatccaattccatgccttcggtaaaatca

SEQ ID NO: 292987 - DNA, 54 bp, Artificial
  Synthetic oligonucleotide
aattctttcgatctttcctcggtggtagatatcccagcattatctgccaggcat

SEQ ID NO: 292988 - DNA, 54 bp, Artificial
  Synthetic oligonucleotide
aattgcgacctatacgaaaagcgtagcatttgtttactaatcgggcgacaagca

SEQ ID NO: 292989 - DNA, 54 bp, Artificial
  Synthetic oligonucleotide
ctgtcttagcctgctccgtgaattcgctcatcgtatttgtgtaatcttccacga

SEQ ID NO: 292990 - DNA, 54 bp, Artificial
  Synthetic oligonucleotide
gtttatgtaaattctccctgttgtggtcaccatctaggtagtatgccccaacga

SEQ ID NO: 292991 - DNA, 54 bp, Artificial
  Synthetic oligonucleotide
acaggcaaagtgtgggctgtaactgcgtgaggcccaagtggcaacgtacccgac

SEQ ID NO: 292992 - DNA, 54 bp, Artificial
  Synthetic oligonucleotide
gtttccaccttctaatttggtttgtgggttctcgcttggcggtgacacatctgg

SEQ ID NO: 292993 - DNA, 54 bp, Artificial
  Synthetic oligonucleotide
gtttcttatatcttgaacggaattagctacacaactattgctttcgcatgattc

SEQ ID NO: 292994 - DNA, 60 bp, Artificial
  Synthetic oligonucleotide
cgatgtctactttgaggatattagatcaaattcatatttcgatagtaaatatttgcattg

SEQ ID NO: 292995 - DNA, 54 bp, Artificial
  Synthetic oligonucleotide
cccatgagcaaaagttcttggttgtcgacaagacacaagtcagcgaacgatggg

SEQ ID NO: 292996 - DNA, 54 bp, Artificial
  Synthetic oligonucleotide
ggagcattagaatatacaattgtcgtagtatcaacagcatcagatgcagcacca

SEQ ID NO: 292997 - DNA, 54 bp, Artificial
  Synthetic oligonucleotide
ccttcgttggactatgatttcctagtgcctgaaagttgaatgcagtaaccctta

SEQ ID NO: 292998 - DNA, 54 bp, Artificial
  Synthetic oligonucleotide
cgacacggaacaccctgtctcttgtgtctctccgtcctgtttggtatcctgtgg

SEQ ID NO: 292999 - DNA, 54 bp, Artificial
  Synthetic oligonucleotide
aaggaagacaaagcacttcgccccgtccgtttgccgcagaccctgcctcgcccc

SEQ ID NO: 293000 - DNA, 54 bp, Artificial
  Synthetic oligonucleotide
gtaaggtccactccgcgctgaatagctcgatggagatgaggacccgtggctcac

SEQ ID NO: 293001 - DNA, 54 bp, Artificial
  Synthetic oligonucleotide
taaaattgcttgacgtttgtgtgcccaccctcctcagcacgcacccatttgcgg

SEQ ID NO: 293002 - DNA, 54 bp, Artificial
  Synthetic oligonucleotide
ggtatgaccaccacatgtgttgtattaccacgaaccagtgtttatcgaacactt

SEQ ID NO: 293003 - DNA, 54 bp, Artificial
  Synthetic oligonucleotide
ggtcactaggcttgagtgtcctcctcatggagtccctatgcatcagttgaatta

SEQ ID NO: 293004 - DNA, 52 bp, Artificial
  Synthetic oligonucleotide
tacaaacaccctcaaccggaacaacacaaccttgggtaaggggccgtagaca

SEQ ID NO: 293005 - DNA, 60 bp, Artificial
  Synthetic oligonucleotide
tgggggccacgtacttgctcattacagctgccgtgagaggaacgctaagcgaagcagaga

SEQ ID NO: 293006 - DNA, 54 bp, Artificial
  Synthetic oligonucleotide
gagaagggtaagtgtagctatgcacataaagcgcgcacacgagagcaaccagtg

SEQ ID NO: 293007 - DNA, 54 bp, Artificial
  Synthetic oligonucleotide
cgaaattattagtaaacagcacagcacccacatggcaattaagaatgaagagtg

SEQ ID NO: 293008 - DNA, 54 bp, Artificial
  Synthetic oligonucleotide
ggaggacgttgcccacagaaaccgtgacgagcatgcgtcatctacaggacccaa

SEQ ID NO: 293009 - DNA, 52 bp, Artificial
  Synthetic oligonucleotide
ggggacaacgcagccgttaacctcggctccccgacgacaggactaacccagg

SEQ ID NO: 293010 - DNA, 54 bp, Artificial
  Synthetic oligonucleotide
accagcagcgctagggtgatccgccttcggtgctgttctaggcgccacacggcc

SEQ ID NO: 293011 - DNA, 54 bp, Artificial
  Synthetic oligonucleotide
acgaccgcgtttacgacgagtccggattacacgacggcccgtattgctgcgcat

SEQ ID NO: 293012 - DNA, 54 bp, Artificial
  Synthetic oligonucleotide
acatgaacggacagtgctgtggccgtctcttgtgtaccacgattagtgcttgtg

SEQ ID NO: 293013 - DNA, 54 bp, Artificial
  Synthetic oligonucleotide
cacatcgagtccaagattcaaatcgaccacagagcgagcccctccagttccgca

SEQ ID NO: 293014 - DNA, 54 bp, Artificial
  Synthetic oligonucleotide
cgacactgcagcggaagggagcttgtgtggatcaagacacctgggtagtgcaaa

SEQ ID NO: 293015 - DNA, 54 bp, Artificial
  Synthetic oligonucleotide
gagacttgaacgcatgtcggcgggagcttgaggtgtcgaaggatgaggtatcct

SEQ ID NO: 293016 - DNA, 57 bp, Artificial
  Synthetic oligonucleotide
gcgcccgctctcacggggggacgagtggcgttacggcgttcgccttctcgtctctgc

SEQ ID NO: 293017 - DNA, 54 bp, Artificial
  Synthetic oligonucleotide
cgccgttgcacgtacttggcgcacacgcgcacaggacacggcaaaagtgtcgaa

SEQ ID NO: 293018 - DNA, 54 bp, Artificial
  Synthetic oligonucleotide
ccgcaattctcagaacagcgggagaggtgtaggattccggggcaattaccgggg

SEQ ID NO: 293019 - DNA, 54 bp, Artificial
  Synthetic oligonucleotide
gacgacgcgaagcaacgcgtggacatcctctgcaaggttaaccagctgcctctg

SEQ ID NO: 293020 - DNA, 54 bp, Artificial
  Synthetic oligonucleotide
gggcatgggtctagttccctttattcactgctctacattcctggtccgtgtaca

SEQ ID NO: 293021 - DNA, 54 bp, Artificial
  Synthetic oligonucleotide
cccaaggttgcttgatgtgtagggtttacgccccgtccaatgaaagtggcgccc

SEQ ID NO: 293022 - DNA, 54 bp, Artificial
  Synthetic oligonucleotide
ggtgaagaagagctgtgagcgtatccgtgcgactgcaaagggcgcgcgagtcag

SEQ ID NO: 293023 - DNA, 54 bp, Artificial
  Synthetic oligonucleotide
gaaaggaaggatcaaagtgtacgagtattgtccaggatcagataagatgatctt

SEQ ID NO: 293024 - DNA, 54 bp, Artificial
  Synthetic oligonucleotide
ccttgaggccataatcatcattcttggaatcccacataacagcattacccttag

SEQ ID NO: 293025 - DNA, 54 bp, Artificial
  Synthetic oligonucleotide
taaggtgtagggcaatacttccttggaagtgttaagtgcgttcctctgctatgt

SEQ ID NO: 293026 - DNA, 54 bp, Artificial
  Synthetic oligonucleotide
atgcgtcgacgtacgcttgctcgatctcccctggcgtggcactctgagtactag

SEQ ID NO: 293027 - DNA, 52 bp, Artificial
  Synthetic oligonucleotide
gcaaaaagctggtactgaaagactttttggtaatagacctaaagtaagaggt

SEQ ID NO: 293028 - DNA, 54 bp, Artificial
  Synthetic oligonucleotide
cacagcgacgtacatgttcgtttctcgtgatcacaaagtgaatcgtctcctgat

SEQ ID NO: 293029 - DNA, 54 bp, Artificial
  Synthetic oligonucleotide
ccgcgccccgttctgggtgcatgcattggtctgttcaccttgctccaccggcaa

SEQ ID NO: 293030 - DNA, 50 bp, Artificial
  Synthetic oligonucleotide
ctggtcctacggcagccccgaaagaggcttccttatccccgaaaggggtt

SEQ ID NO: 293031 - DNA, 54 bp, Artificial
  Synthetic oligonucleotide
acgttctgtggctaggatgcgccttcacggtgctggggttcgatcgccattgga

SEQ ID NO: 293032 - DNA, 54 bp, Artificial
  Synthetic oligonucleotide
taatgtagatctcctgctggaagtacgtctctggtaggagcatgctcagctgcg

SEQ ID NO: 293033 - DNA, 54 bp, Artificial
  Synthetic oligonucleotide
gaacattgttcctagcaaggggctgtctcgtttcttctcacatacgtggcgctc

SEQ ID NO: 293034 - DNA, 54 bp, Artificial
  Synthetic oligonucleotide
cgcctgtatttacactctgcgaagaggggtgggcaaaagcaaacgcgtgcttag

SEQ ID NO: 293035 - DNA, 54 bp, Artificial
  Synthetic oligonucleotide
ggggaagcgagcaatgtaacaacgcagctatcgacagcaaacgacatcaacgga

SEQ ID NO: 293036 - DNA, 54 bp, Artificial
  Synthetic oligonucleotide
acgttttctgtccgacaccggagcttcgtttgctctccggcgagtgcctccgaa

SEQ ID NO: 293037 - DNA, 54 bp, Artificial
  Synthetic oligonucleotide
gaggatatggacgaaggagacatagttgggtagggaatcggctaaaggagtgtt

SEQ ID NO: 293038 - DNA, 59 bp, Artificial
  Synthetic oligonucleotide
tgattaccgacaacatgatctaccactaaaaagtcaactggtggtaggagtgaattgat

SEQ ID NO: 293039 - DNA, 54 bp, Artificial
  Synthetic oligonucleotide
ctgcttacagaacagttacttggacaacatgcatggcgaacccattacggcccg

SEQ ID NO: 293040 - DNA, 54 bp, Artificial
  Synthetic oligonucleotide
ggttgacgccacgtatcgacagcaaggcacacatcttctgccgtcgtactcttg

SEQ ID NO: 293041 - DNA, 54 bp, Artificial
  Synthetic oligonucleotide
gaaatgggtaacaggtggtgcgaaatcgctaaacttctaccaggaagaacagac

SEQ ID NO: 293042 - DNA, 54 bp, Artificial
  Synthetic oligonucleotide
atgcgtatgtatcaccagtgcgtgtaggggagaccggtaggcgtcttgggtagt

SEQ ID NO: 293043 - DNA, 54 bp, Artificial
  Synthetic oligonucleotide
ctgggggagtgtgggagtcctatggacccttcgtgcatcgaccgggaagaagac

SEQ ID NO: 293044 - DNA, 54 bp, Artificial
  Synthetic oligonucleotide
aagctaacgtcgtgaagcacgtacgagagagcttcttcgcgccaatcccacgtt

SEQ ID NO: 293045 - DNA, 54 bp, Artificial
  Synthetic oligonucleotide
acctgttgcattatcgcatgctgtgcgtctgcgtctgatggagaggcctgagaa

SEQ ID NO: 293046 - DNA, 54 bp, Artificial
  Synthetic oligonucleotide
cacaggggaaggatggggccagaggtgccggcttggataatctgagcgtacgta

SEQ ID NO: 293047 - DNA, 54 bp, Artificial
  Synthetic oligonucleotide
ctggggagttgggcgaaatagcgggcatatgctcagtggcgggtgaattagtga

SEQ ID NO: 293048 - DNA, 54 bp, Artificial
  Synthetic oligonucleotide
aagcgtacgtgtgtacccctatacatccattagccctctctgctctccgatctt

SEQ ID NO: 293049 - DNA, 55 bp, Artificial
  Synthetic oligonucleotide
tgggataattgtagtacaccttgattggtttaactatttttggtacatagaagta

SEQ ID NO: 293050 - DNA, 54 bp, Artificial
  Synthetic oligonucleotide
gggtatcgcacgtcgagcttcagtagttgccaacctaattgcaggtatggccac

SEQ ID NO: 293051 - DNA, 54 bp, Artificial
  Synthetic oligonucleotide
aataggggcagtagggtaaaaccaacgaggcgcagtgcaggggtgaagagaaaa

SEQ ID NO: 293052 - DNA, 54 bp, Artificial
  Synthetic oligonucleotide
gaagaataccgatctagtgcttcgtagcgcacccgtccacttttcgagttgtcg

SEQ ID NO: 293053 - DNA, 54 bp, Artificial
  Synthetic oligonucleotide
caacagtttaaaacgtagaaaatgtgaatattttgatcaaaacgctcaagagaa

SEQ ID NO: 293054 - DNA, 54 bp, Artificial
  Synthetic oligonucleotide
caacatggtctacagaatagattacacttccagccgcaaaacagggtaccaccc

SEQ ID NO: 293055 - DNA, 54 bp, Artificial
  Synthetic oligonucleotide
cttcgctatccattcgtggcgcatgtatctgaaagtgtgctgtgcgggactgac

SEQ ID NO: 293056 - DNA, 54 bp, Artificial
  Synthetic oligonucleotide
gtgggcgtcaccccactgtcgtgcgtatttccttcagcactcgtggccctcaaa

SEQ ID NO: 293057 - DNA, 54 bp, Artificial
  Synthetic oligonucleotide
cctcgtgttgacttcattcgcctcaagtgataaagggagacgcactcgaaactt

SEQ ID NO: 293058 - DNA, 54 bp, Artificial
  Synthetic oligonucleotide
cgaagtgctatatatgactgaacccatcgacgagtattgtgtacaacagcttaa

SEQ ID NO: 293059 - DNA, 54 bp, Artificial
  Synthetic oligonucleotide
gtgcacgagacacgaggtcgtgtgggatccacagagggccggagacgacgtaaa

SEQ ID NO: 293060 - DNA, 58 bp, Artificial
  Synthetic oligonucleotide
ataaactatacctcctcatcaaagttagcagtgtcttacgtttgaatccaacagacgc

SEQ ID NO: 293061 - DNA, 54 bp, Artificial
  Synthetic oligonucleotide
gtgatatagatcgtcataaagaagagcgtgaacgaggtatcactatagtcgcta

SEQ ID NO: 293062 - DNA, 54 bp, Artificial
  Synthetic oligonucleotide
gggtgcacgacagtgtcccgcacgcagttgagggccccgagaggcgacgtggct

SEQ ID NO: 293063 - DNA, 54 bp, Artificial
  Synthetic oligonucleotide
acggcacagagggtttgcgagcgtccgctcatccgatcgcggtgctgagagaga

SEQ ID NO: 293064 - DNA, 54 bp, Artificial
  Synthetic oligonucleotide
ggggcccttccacgctgtcccgcccgacacctactccgctcccacccatggaat

SEQ ID NO: 293065 - DNA, 54 bp, Artificial
  Synthetic oligonucleotide
ggccggacgtaagggtgtgctacttcgagacatggcaggtctttccgacccacg

SEQ ID NO: 293066 - DNA, 54 bp, Artificial
  Synthetic oligonucleotide
cctggagtgtctgtcggcaagaagccacaccgcaccctcttgtaccaccccatg

SEQ ID NO: 293067 - DNA, 54 bp, Artificial
  Synthetic oligonucleotide
gaatgcctttcttaaatctgaaggaaacgatagccatgcttgtattaccggttc

SEQ ID NO: 293068 - DNA, 54 bp, Artificial
  Synthetic oligonucleotide
ggggcacatcacttcgtgtccctgggcgtcagtgtagcgcagcgtgatgcaaga

SEQ ID NO: 293069 - DNA, 54 bp, Artificial
  Synthetic oligonucleotide
cttcccgagagcactacgcgcaacagcaccactcggcctacatcacatcgcctc

SEQ ID NO: 293070 - DNA, 54 bp, Artificial
  Synthetic oligonucleotide
cacaaactcgctgagaccctcgataaggcacggaaggccctcctcgatgcacgt

SEQ ID NO: 293071 - DNA, 57 bp, Artificial
  Synthetic oligonucleotide
ccaccctctaactgctccgctgggcccagtgatgagaaccttttccgatggaccgcc

SEQ ID NO: 293072 - DNA, 56 bp, Artificial
  Synthetic oligonucleotide
aaatagattggtaaggtatagcgtttactatcgaatgaaactatgtgttccaccgc

SEQ ID NO: 293073 - DNA, 54 bp, Artificial
  Synthetic oligonucleotide
acactggctgtgtctacggcgacccgttgacttgtgtcgtgtatggtcgaggga

SEQ ID NO: 293074 - DNA, 54 bp, Artificial
  Synthetic oligonucleotide
ggccctccaggaaactgttctccaaatatgtaccagctccactcccgccactac

SEQ ID NO: 293075 - DNA, 54 bp, Artificial
  Synthetic oligonucleotide
atgacatatcctgtagtacaacgtatatataagatcgagaacaaaagggtatcg

SEQ ID NO: 293076 - DNA, 54 bp, Artificial
  Synthetic oligonucleotide
acggcttatttgcagggagcgcaccgtgccttaggaatgacaggctgcaagagg

SEQ ID NO: 293077 - DNA, 53 bp, Artificial
  Synthetic oligonucleotide
aatcgtcacccctacggttggcaaaattccctacccctttgagcccatgtgtc

SEQ ID NO: 293078 - DNA, 54 bp, Artificial
  Synthetic oligonucleotide
gaagagttgcgcacacggcttgcagcacagcggactgcaagtgcgtgtagtcgt

SEQ ID NO: 293079 - DNA, 54 bp, Artificial
  Synthetic oligonucleotide
gtatctgccacgcacgtctacaactcaccgtgcgctcccgtgcgtctctttgcc

SEQ ID NO: 293080 - DNA, 54 bp, Artificial
  Synthetic oligonucleotide
caaatcgtgtccgcgtgcaaggacgttccgaccgctgcggaggtggtagagcgc

SEQ ID NO: 293081 - DNA, 54 bp, Artificial
  Synthetic oligonucleotide
cctctgtagcggaactgcagttggcggtgggcatgtatcgacatcggggagacg

SEQ ID NO: 293082 - DNA, 54 bp, Artificial
  Synthetic oligonucleotide
gtatcgctgctggctatcgtgcattatccgtcaccgagacaggatggatgatgc

SEQ ID NO: 293083 - DNA, 54 bp, Artificial
  Synthetic oligonucleotide
tgggataatagtagtacaccttaattggtttcactttatttggtttatagatat

SEQ ID NO: 293084 - DNA, 54 bp, Artificial
  Synthetic oligonucleotide
aatctgattcctgaacccggaatctaattccctgcatcccacaaccttattcgg

SEQ ID NO: 293085 - DNA, 54 bp, Artificial
  Synthetic oligonucleotide
gactgcctcgtgtgtcgccaaagcgagtcgaggacgaatgaagagaatgcgcag

SEQ ID NO: 293086 - DNA, 52 bp, Artificial
  Synthetic oligonucleotide
gggggtttggataccccctttataatacccgccatcctcagcagggccaacg

SEQ ID NO: 293087 - DNA, 54 bp, Artificial
  Synthetic oligonucleotide
gtgctacccgcccatcatcacacgcacagtatgagtattgatgcattctactgc

SEQ ID NO: 293088 - DNA, 54 bp, Artificial
  Synthetic oligonucleotide
aatgactagtcccgtcagaggcaaggcgcacaagcacacacaaagcaacgctaa

SEQ ID NO: 293089 - DNA, 54 bp, Artificial
  Synthetic oligonucleotide
gaaggggctcacacggacatacgcggagcttaatcggcttgtctcacaggaacg

SEQ ID NO: 293090 - DNA, 54 bp, Artificial
  Synthetic oligonucleotide
gtgcccatgtacagagcgcagcacagctccgtcgtgctggcgtggtgattgaca

SEQ ID NO: 293091 - DNA, 54 bp, Artificial
  Synthetic oligonucleotide
aatcccacaggtactccagccattaataaaataccgataagcttactaggaact

SEQ ID NO: 293092 - DNA, 54 bp, Artificial
  Synthetic oligonucleotide
gtatcaaacgtaacatgacttccggttgtagcataactggttaatgtgttagtt

SEQ ID NO: 293093 - DNA, 54 bp, Artificial
  Synthetic oligonucleotide
ccgctaactctctacagcgaggaccaccacaaaagcatggaactcgcacaaaca

SEQ ID NO: 293094 - DNA, 55 bp, Artificial
  Synthetic oligonucleotide
tgggagaccctccaaaatcgactttcagcagaaaatcacaatcgacctttttaaa

SEQ ID NO: 293095 - DNA, 54 bp, Artificial
  Synthetic oligonucleotide
gaagagaagaggtgcctagcacaagtacacagcgaagcaacatcaccgtagcgc

SEQ ID NO: 293096 - DNA, 54 bp, Artificial
  Synthetic oligonucleotide
accgtgtcaacagcgctcgccgtacgaacgctagtatttgggtaagcatgcact

SEQ ID NO: 293097 - DNA, 54 bp, Artificial
  Synthetic oligonucleotide
ggcggtctgatgtctttgagagctgcctcgccgctacacacgcgacgctctcag

SEQ ID NO: 293098 - DNA, 54 bp, Artificial
  Synthetic oligonucleotide
gaagtacgttagtcgaagtatgagctatgttagtcaacttaagacctaagtgag

SEQ ID NO: 293099 - DNA, 54 bp, Artificial
  Synthetic oligonucleotide
acgctatatcagattatgcccttgtaggattcccaatactacgcaaatttgatc

SEQ ID NO: 293100 - DNA, 54 bp, Artificial
  Synthetic oligonucleotide
cgaacttgcttcgcaaacttgtgcatatatggcagctacccacaatgatttctc

SEQ ID NO: 293101 - DNA, 54 bp, Artificial
  Synthetic oligonucleotide
gtattgtttcaggacaacagtccatgtgggaagttttgcagacgaaagggacaa

SEQ ID NO: 293102 - DNA, 54 bp, Artificial
  Synthetic oligonucleotide
gggaatcccaatagatttacagtctaccgctttaaccattcagccaccacctcg

SEQ ID NO: 293103 - DNA, 52 bp, Artificial
  Synthetic oligonucleotide
cctggccccttgtctggcccgtgggtcccctggaaatatcaggccgggaacc

SEQ ID NO: 293104 - DNA, 54 bp, Artificial
  Synthetic oligonucleotide
ctgttctcgttcaggtttcttggtgttcgactttcaaatgtctgtaggacagtc

SEQ ID NO: 293105 - DNA, 60 bp, Artificial
  Synthetic oligonucleotide
tggcgggccgtgtgatttgtttgggcgggaatgtagacgcggcggtcatgtgcgtataga

SEQ ID NO: 293106 - DNA, 54 bp, Artificial
  Synthetic oligonucleotide
atctgttcgaaaaccagccacaggtgtcaactgccaacgtcagagcatcagata

SEQ ID NO: 293107 - DNA, 54 bp, Artificial
  Synthetic oligonucleotide
gaacgttatcttctgcattcgatccctgttcgcatgatgtctttgtgtagttac

SEQ ID NO: 293108 - DNA, 54 bp, Artificial
  Synthetic oligonucleotide
gtgaattcgggcctcttgtgcaagtgcctggagtatggattgatatattacgct

SEQ ID NO: 293109 - DNA, 54 bp, Artificial
  Synthetic oligonucleotide
gtaccctatctacgggcaagacaagcttacggcattctcttgcgctgcagtcat

SEQ ID NO: 293110 - DNA, 54 bp, Artificial
  Synthetic oligonucleotide
ctttcgtggaatatcatcgtcaagtaccgaccaggcgatcttagtgatatctcc

SEQ ID NO: 293111 - DNA, 54 bp, Artificial
  Synthetic oligonucleotide
ctttcgtgtccactcccaggcggcagtagcacgcgttgctcgaagtacgagaaa

SEQ ID NO: 293112 - DNA, 54 bp, Artificial
  Synthetic oligonucleotide
gtaccaggatgggcttgtggtgagataccatgtggtgcattttgcaaaggttgg

SEQ ID NO: 293113 - DNA, 54 bp, Artificial
  Synthetic oligonucleotide
attgtctgtgtcgtgtttaggttctcatgggccagtagcaccgcatgccgtcta

SEQ ID NO: 293114 - DNA, 54 bp, Artificial
  Synthetic oligonucleotide
gagagcttactttcgggttcgcgatttccatctgcgactcgtgcaacacgctcc

SEQ ID NO: 293115 - DNA, 54 bp, Artificial
  Synthetic oligonucleotide
acctctccatgacatctaacttctgcatcgcagcgcggacaacgaccgtgcgcg

SEQ ID NO: 293116 - DNA, 60 bp, Artificial
  Synthetic oligonucleotide
tggcgctcttcgaggcacacgtagaggtcctccagtgtaggtgcggtctcaaagagcgtg

SEQ ID NO: 293117 - DNA, 54 bp, Artificial
  Synthetic oligonucleotide
cctttaataaatgaatcatcgaagtactttgcgccactgggatcccatatcatg

SEQ ID NO: 293118 - DNA, 54 bp, Artificial
  Synthetic oligonucleotide
gtacaggtatgcgagtgtaggcctatcgctggaactgcgcacgtgtgttttgtg

SEQ ID NO: 293119 - DNA, 54 bp, Artificial
  Synthetic oligonucleotide
gtctgttcggagtgtcataaatccttgtgttccctgatatattacacccttcgt

SEQ ID NO: 293120 - DNA, 54 bp, Artificial
  Synthetic oligonucleotide
gttgcatggggtcaggagtgtggcacacctcaaggtcggtgcatgtatgcgtac

SEQ ID NO: 293121 - DNA, 54 bp, Artificial
  Synthetic oligonucleotide
gtctgtgtttacacactcgacagcgtcgtctagttgcgctagacgtcttacttg

SEQ ID NO: 293122 - DNA, 54 bp, Artificial
  Synthetic oligonucleotide
ccccaatagtatgcctctgcgtgtattctctgtccgtgcttctgggtggctggc

SEQ ID NO: 293123 - DNA, 54 bp, Artificial
  Synthetic oligonucleotide
gttgccccgtgccttggaggactcgcgactcttgtgtggctgcgacttccgtcc

SEQ ID NO: 293124 - DNA, 54 bp, Artificial
  Synthetic oligonucleotide
cgaaccctctggcgggtctcgtagccacaggcaggccctagacgccttgggtcc

SEQ ID NO: 293125 - DNA, 54 bp, Artificial
  Synthetic oligonucleotide
acgtatgcgtgccctgtggcgttgccgagacggtagtcaagcaaaccgccgctg

SEQ ID NO: 293126 - DNA, 54 bp, Artificial
  Synthetic oligonucleotide
ggcacccttgtacttggtgcgaaagtaccccacaacggtgtgcccaaaacgctc

SEQ ID NO: 293127 - DNA, 54 bp, Artificial
  Synthetic oligonucleotide
tggcgaggggggggggctatgcgggggtggaggtttggccttgtggcagagaac

SEQ ID NO: 293128 - DNA, 54 bp, Artificial
  Synthetic oligonucleotide
acgtccagagaagcgcgctcacgcgaccctccaacagcccactggcgctagggc

SEQ ID NO: 293129 - DNA, 54 bp, Artificial
  Synthetic oligonucleotide
atctacattacttcggtgtgacttatactggatattaaagaatctcaaaccaag

SEQ ID NO: 293130 - DNA, 54 bp, Artificial
  Synthetic oligonucleotide
ccgaagttggacttaaaatagttcacagacttggcagtcctcagaacgcacgtg

SEQ ID NO: 293131 - DNA, 54 bp, Artificial
  Synthetic oligonucleotide
gtaggaacaccacttcagaactcactgcaggaattgtggtcacttatgcatttc

SEQ ID NO: 293132 - DNA, 54 bp, Artificial
  Synthetic oligonucleotide
gtgaggtccttagagcccattatgtcggaacgtcaaccccagaggtggcgaggg

SEQ ID NO: 293133 - DNA, 54 bp, Artificial
  Synthetic oligonucleotide
gtgactcgttacccgtgttgaatgcctctctccttgcatactcctcatgccaga

SEQ ID NO: 293134 - DNA, 54 bp, Artificial
  Synthetic oligonucleotide
gtgacgctacttctctgttgggtcgccctactgatcctgacgaagggtctcgct

SEQ ID NO: 293135 - DNA, 54 bp, Artificial
  Synthetic oligonucleotide
cttcacatagccaaacacatttcgatctgtctcatatatagtgatgcttatgcg

SEQ ID NO: 293136 - DNA, 54 bp, Artificial
  Synthetic oligonucleotide
gtcaccttgctttccctctccgcacgcagcctcaattctcgcatgtggcgcgct

SEQ ID NO: 293137 - DNA, 54 bp, Artificial
  Synthetic oligonucleotide
gtgtgtcgtgaatgtaatcgtactcttctactaagggacagtcgagttctaaaa

SEQ ID NO: 293138 - DNA, 50 bp, Artificial
  Synthetic oligonucleotide
gattgtaagcttagtaaagttaaaatccccgttttgtttaaaagtgtcaa

SEQ ID NO: 293139 - DNA, 53 bp, Artificial
  Synthetic oligonucleotide
cttattcgaacacccttgaaactttattgcgacacccctacaaccgtatacta

SEQ ID NO: 293140 - DNA, 54 bp, Artificial
  Synthetic oligonucleotide
acgggaccggtcctgtttgtgtgagaaacactgtcgtggtgtacacaacgtggt

SEQ ID NO: 293141 - DNA, 54 bp, Artificial
  Synthetic oligonucleotide
acagacaccatgctgcggcccactctccatttcgacacgtagatttgtacccca

SEQ ID NO: 293142 - DNA, 54 bp, Artificial
  Synthetic oligonucleotide
atggtgcaagggcggatgacccttctaatgaatcaaaggataaccctacctctt

SEQ ID NO: 293143 - DNA, 54 bp, Artificial
  Synthetic oligonucleotide
acagacgcaaagcgacctgtgaacgacacagaagtgccgggctgaacgctagag

SEQ ID NO: 293144 - DNA, 54 bp, Artificial
  Synthetic oligonucleotide
atgcgaatgacctgcaacagtaacgaaaagagctgcgcatattcgcgactcgtt

SEQ ID NO: 293145 - DNA, 54 bp, Artificial
  Synthetic oligonucleotide
atggatcttaagttttctgattttcgtacaaccatatagaagccatctaatata

SEQ ID NO: 293146 - DNA, 54 bp, Artificial
  Synthetic oligonucleotide
gttacggctacaatattgacgccatcacacgcatcggaaactacttccatatgg

SEQ ID NO: 293147 - DNA, 54 bp, Artificial
  Synthetic oligonucleotide
caaccgcctgcactcgcgttggccacaccacaacgacaaacacggtctcggcta

SEQ ID NO: 293148 - DNA, 54 bp, Artificial
  Synthetic oligonucleotide
cccagagcttcgtcgagccttctgggacgacattgttgactacaacccgtctct

SEQ ID NO: 293149 - DNA, 55 bp, Artificial
  Synthetic oligonucleotide
aaatgccaaactattcaaacgctattactttcttattaatggaagcgctggtacc

SEQ ID NO: 293150 - DNA, 53 bp, Artificial
  Synthetic oligonucleotide
gaattagttatccccaaacgagccataaagggtaatacgtacataccttgtcg

SEQ ID NO: 293151 - DNA, 54 bp, Artificial
  Synthetic oligonucleotide
gtcagcgagaccgcaacagtgtaaacaggaaatatgcgacaccacagtacgtat

SEQ ID NO: 293152 - DNA, 54 bp, Artificial
  Synthetic oligonucleotide
gacgtgtatgttggtgtttgcactctgctcgatgggttgcagaccggcctacac

SEQ ID NO: 293153 - DNA, 54 bp, Artificial
  Synthetic oligonucleotide
acagcacgcgctactcaacttcctatgaaacggtgtgggcggcttgtcctaacc

SEQ ID NO: 293154 - DNA, 54 bp, Artificial
  Synthetic oligonucleotide
gtgacactggcacagctgagctaccttatcgagaatgtgcacgatccgttggcc

SEQ ID NO: 293155 - DNA, 54 bp, Artificial
  Synthetic oligonucleotide
gttatgagcacactccaataagagatccatccctattaaacctaacagcccata

SEQ ID NO: 293156 - DNA, 54 bp, Artificial
  Synthetic oligonucleotide
cctggacaggcataatctactaagtctccactaacaatgatttctctggacctc

SEQ ID NO: 293157 - DNA, 54 bp, Artificial
  Synthetic oligonucleotide
gtcatacgataacacacaaaggatagtcagtgatggagtaatcggtggaagggg

SEQ ID NO: 293158 - DNA, 54 bp, Artificial
  Synthetic oligonucleotide
cgagtagatccgataggggccacaatgcttgcgttagtaagtacagttgccatt

SEQ ID NO: 293159 - DNA, 54 bp, Artificial
  Synthetic oligonucleotide
tgcttcgagaagccgaacttaccggtggtgatcacagacgtagcgacggaatgg

SEQ ID NO: 293160 - DNA, 57 bp, Artificial
  Synthetic oligonucleotide
gattggtaaggtatagcgtttactatcgaatgaaacaatgtgttccaccgctagtgt

SEQ ID NO: 293161 - DNA, 54 bp, Artificial
  Synthetic oligonucleotide
ctaaccaaattccgagattacaggaacgtctcgtatcacgcttttcaatgggac

SEQ ID NO: 293162 - DNA, 54 bp, Artificial
  Synthetic oligonucleotide
caggagattcgaatccaggagcctgctgatcaagtaccgacaggtaatgtacct

SEQ ID NO: 293163 - DNA, 54 bp, Artificial
  Synthetic oligonucleotide
tgctcgtcagcctcccttcgactttgtggctcgcccctccagtgggtagttgtg

SEQ ID NO: 293164 - DNA, 54 bp, Artificial
  Synthetic oligonucleotide
agtgagaaggaacatggagtgtgacgaatgtgagggctctcaacacatccagtg

SEQ ID NO: 293165 - DNA, 54 bp, Artificial
  Synthetic oligonucleotide
tgctcacggcgcacaacagtagagatcggctactaggcatggtccttcaagttg

SEQ ID NO: 293166 - DNA, 54 bp, Artificial
  Synthetic oligonucleotide
gcaaactctccaactgtcggaggcgtgtcccctcaccttcaacggttcacgtcg

SEQ ID NO: 293167 - DNA, 54 bp, Artificial
  Synthetic oligonucleotide
cctacagctaagcctggatggcctcagacacagtagcttcacccctccgcccat

SEQ ID NO: 293168 - DNA, 54 bp, Artificial
  Synthetic oligonucleotide
gcggtcgtgaactttcgagtgtcccaacatatttagattacgtccctcaatttt

SEQ ID NO: 293169 - DNA, 54 bp, Artificial
  Synthetic oligonucleotide
tgcgcaattttttgagtcgcacgaacggaactaccttctaaaatattgcgtccg

SEQ ID NO: 293170 - DNA, 54 bp, Artificial
  Synthetic oligonucleotide
tgccctcatgagcagcgcgcgtatgtactgcactagcgcactgaagctcgctgg

SEQ ID NO: 293171 - DNA, 60 bp, Artificial
  Synthetic oligonucleotide
agcgccggtttcccgggtatccaatccagtgctccattcaaggcatagagactcagccta

SEQ ID NO: 293172 - DNA, 54 bp, Artificial
  Synthetic oligonucleotide
ctaccaaagatctccaacgtgttggaggcttgtaatgaggcatattggaatcct

SEQ ID NO: 293173 - DNA, 54 bp, Artificial
  Synthetic oligonucleotide
tgcccgcttataggccctcataaacacgtggtgtggaaggcgtgtctacacgga

SEQ ID NO: 293174 - DNA, 54 bp, Artificial
  Synthetic oligonucleotide
agcactcattcgaagggctgcaagggccaatccgtacaccgcaagcatcttggg

SEQ ID NO: 293175 - DNA, 54 bp, Artificial
  Synthetic oligonucleotide
agcacctgccgaacgacgcgcaggaaaggataagctccctttttcccgcctcgg

SEQ ID NO: 293176 - DNA, 54 bp, Artificial
  Synthetic oligonucleotide
agcaagtgatcttagacaatggtgtatgcaatgatgatgccgtacggtgacgct

SEQ ID NO: 293177 - DNA, 54 bp, Artificial
  Synthetic oligonucleotide
cccgtatactagcaacgctgaatgcttgactgcgtatccttcctccctcgaaaa

SEQ ID NO: 293178 - DNA, 54 bp, Artificial
  Synthetic oligonucleotide
aaagggaagtcagcaacggtatgaattcaaatccttacattgggtgataggcta

SEQ ID NO: 293179 - DNA, 54 bp, Artificial
  Synthetic oligonucleotide
gcaatcaagttggaaacccatagtccactcagtaacttttccggaattacgtgg

SEQ ID NO: 293180 - DNA, 54 bp, Artificial
  Synthetic oligonucleotide
tgtactgcgggactgtgacgtgttcgctctcccgaatagatttcgcttacatag

SEQ ID NO: 293181 - DNA, 54 bp, Artificial
  Synthetic oligonucleotide
ccgttgaacggcatggaacaactgcggacactcattgcatcggtacaacagggg

SEQ ID NO: 293182 - DNA, 58 bp, Artificial
  Synthetic oligonucleotide
tacagctcccgcccctatttacaccgctcctgccccagttgtcactcaatccgtagtc

SEQ ID NO: 293183 - DNA, 57 bp, Artificial
  Synthetic oligonucleotide
tgcaacccaagtacatttagggaaacttcgatcgagattcctaatgttacgtggcaa

SEQ ID NO: 293184 - DNA, 54 bp, Artificial
  Synthetic oligonucleotide
cccctcttaccccttctcacgtgcgtgtgcgtgtacgctggacagcttcgtcgc

SEQ ID NO: 293185 - DNA, 54 bp, Artificial
  Synthetic oligonucleotide
tggtgcctggctttctgggtaccctcgtgtggggtggagtctccgcagtggtgc

SEQ ID NO: 293186 - DNA, 54 bp, Artificial
  Synthetic oligonucleotide
ccgttgggcaggcttgcgtgttcgctcgtacacctgtagcagtgccggctctct

SEQ ID NO: 293187 - DNA, 54 bp, Artificial
  Synthetic oligonucleotide
gcaacttgagtactagacgataacgtcgtgcgtgcgtaagtcaagcaagcatat

SEQ ID NO: 293188 - DNA, 54 bp, Artificial
  Synthetic oligonucleotide
tgggttggagcatgttatcacactccttgcaaaagcgcatacctctgaatgcca

SEQ ID NO: 293189 - DNA, 54 bp, Artificial
  Synthetic oligonucleotide
cgttcctcactaccacggctcagagcacactcgtcccaaccacccacactcccc

SEQ ID NO: 293190 - DNA, 54 bp, Artificial
  Synthetic oligonucleotide
tgggtggtagcatgcacacccacacctaagggtcgctctatatgttgcttgaag

SEQ ID NO: 293191 - DNA, 54 bp, Artificial
  Synthetic oligonucleotide
cgagtgctgtgtttcgtgttcgcttactctaacgccatcccgccactgaagttc

SEQ ID NO: 293192 - DNA, 54 bp, Artificial
  Synthetic oligonucleotide
tgggcaccgcccttgtcgattgtgagccgtcactcgtccttacgatggccgcac

SEQ ID NO: 293193 - DNA, 54 bp, Artificial
  Synthetic oligonucleotide
tgggataagaaactagcagtgcctcatagcattgacatcccggtcactcttctc

SEQ ID NO: 293194 - DNA, 58 bp, Artificial
  Synthetic oligonucleotide
aaatgtcacacgcctttgctagcgtacaacatattattagagaggtgtccttcggttg

SEQ ID NO: 293195 - DNA, 54 bp, Artificial
  Synthetic oligonucleotide
aaatcattggtttcacaacagatcgaagcatttcatagggacactggtataccg

SEQ ID NO: 293196 - DNA, 54 bp, Artificial
  Synthetic oligonucleotide
gcgctcgagtaccacggtgttctgggcactccgtaaggcaagatgaagggtgca

SEQ ID NO: 293197 - DNA, 54 bp, Artificial
  Synthetic oligonucleotide
agtctgcttttggttacgtcaaccatggcatgtgccacaggaggtgtttctagt

SEQ ID NO: 293198 - DNA, 54 bp, Artificial
  Synthetic oligonucleotide
cgtttggggctctacatgttatggctttccatacttgatcgcggttagccgtcc

SEQ ID NO: 293199 - DNA, 54 bp, Artificial
  Synthetic oligonucleotide
agccacagtccgcctatgcctctgctgcgccatggcttaaccccgggttgtcta

SEQ ID NO: 293200 - DNA, 54 bp, Artificial
  Synthetic oligonucleotide
tcttgttgcaccacgaacttctgccgacttcttctccacaccctccgcaccccg

SEQ ID NO: 293201 - DNA, 54 bp, Artificial
  Synthetic oligonucleotide
ctatcgtttttcctctacgcccattagatttagtatgttgccctcgagtcttta

SEQ ID NO: 293202 - DNA, 54 bp, Artificial
  Synthetic oligonucleotide
aacccggggcacaaacgtgaaaggcttgtatgttaccaactacaccacaatgga

SEQ ID NO: 293203 - DNA, 54 bp, Artificial
  Synthetic oligonucleotide
cggcccgagagagcgccacggcgcgagatgcgtcggaatcgtttctcgatgcgt

SEQ ID NO: 293204 - DNA, 54 bp, Artificial
  Synthetic oligonucleotide
gctaagagcaccggccactgtccttttgcccttgtgaaggatttcatccccgtt

SEQ ID NO: 293205 - DNA, 56 bp, Artificial
  Synthetic oligonucleotide
aaatgttctgctagaactttaacaactgctggttgaacttttattacaccattcag

SEQ ID NO: 293206 - DNA, 54 bp, Artificial
  Synthetic oligonucleotide
tctgcggaaatgcgagaaaagggatgccaagggtttcctgtattacggtcctca

SEQ ID NO: 293207 - DNA, 54 bp, Artificial
  Synthetic oligonucleotide
ccaccttctacgtagtactcctgctgcctggttacacaccctctcttatcaccg

SEQ ID NO: 293208 - DNA, 54 bp, Artificial
  Synthetic oligonucleotide
tctgcagctactgcaaatgttctacgagacggacgtgggcatctttcggtgggc

SEQ ID NO: 293209 - DNA, 54 bp, Artificial
  Synthetic oligonucleotide
ccacgacgactccaatccttcttggtggctagcgattgtcgcgctcctcgaatg

SEQ ID NO: 293210 - DNA, 54 bp, Artificial
  Synthetic oligonucleotide
tctgaatttgtccgcatttctctaacacagcattaatgcagtagctgcaacgct

SEQ ID NO: 293211 - DNA, 54 bp, Artificial
  Synthetic oligonucleotide
tctcttcgggtatgcagtggagctggtgtgctgttttcgttctgtactgccttc

SEQ ID NO: 293212 - DNA, 54 bp, Artificial
  Synthetic oligonucleotide
tctcgtagcctcgtcgctattcgtcctctggcacgtgcatctcatgtacggcca

SEQ ID NO: 293213 - DNA, 54 bp, Artificial
  Synthetic oligonucleotide
cgcagggcagctagcgcagtggtgcagtgggcgctcctcttaaggctccaccac

SEQ ID NO: 293214 - DNA, 54 bp, Artificial
  Synthetic oligonucleotide
agttctagcagaatacttcaaacgtaactcgtctagcacagtggttgtaggatg

SEQ ID NO: 293215 - DNA, 54 bp, Artificial
  Synthetic oligonucleotide
gatgactcaactggagtccgttgtgccagctgtgtagtgggcgtcaaaagaggt

SEQ ID NO: 293216 - DNA, 60 bp, Artificial
  Synthetic oligonucleotide
cgagaaataatatcaaacgcttcagatgcactcgataaaatacgttatcaatctcttacg

SEQ ID NO: 293217 - DNA, 54 bp, Artificial
  Synthetic oligonucleotide
ctcaccggagactaatcccgtcaatgggtcttcgtcgtatagttccacaacata

SEQ ID NO: 293218 - DNA, 54 bp, Artificial
  Synthetic oligonucleotide
tctccgtgtgcacgtggctctgcgtttgtatgaacccttctccaccgctgattg

SEQ ID NO: 293219 - DNA, 54 bp, Artificial
  Synthetic oligonucleotide
gctatccttggattgatctgtggattcttctatttccaagaatcaatgtttggt

SEQ ID NO: 293220 - DNA, 54 bp, Artificial
  Synthetic oligonucleotide
ctcacgtcgtggcgccgatccctatcacctttcagcgccgcaactgccttgagc

SEQ ID NO: 293221 - DNA, 54 bp, Artificial
  Synthetic oligonucleotide
tgcagtgaattcgcagaatggatctcgtgaggtaaataacatcatttatggcac

SEQ ID NO: 293222 - DNA, 54 bp, Artificial
  Synthetic oligonucleotide
agtgctacgggacaccgagctgccaaggtgcctgtacagcggcatctggtccat

SEQ ID NO: 293223 - DNA, 54 bp, Artificial
  Synthetic oligonucleotide
ctagatatactagtgaaatgtcacatgcctttgctagtgtacaacatattattc

SEQ ID NO: 293224 - DNA, 54 bp, Artificial
  Synthetic oligonucleotide
tgcaaacatgttaaatttgttcgtgctggacatctgggaatgatagtcgcactg

SEQ ID NO: 293225 - DNA, 54 bp, Artificial
  Synthetic oligonucleotide
gattcatcgttcgcctggatggggaggtagccctccgacacggagctcagagca

SEQ ID NO: 293226 - DNA, 54 bp, Artificial
  Synthetic oligonucleotide
agataatcctctcttgaccagctttatgttgacgagtgcaatattgtatttggg

SEQ ID NO: 293227 - DNA, 60 bp, Artificial
  Synthetic oligonucleotide
tgcaatctattatcaccaatcccataccttgtaacatggttactaggaggtttctatgta

SEQ ID NO: 293228 - DNA, 54 bp, Artificial
  Synthetic oligonucleotide
aacattggattgctacttgagcatgttccatagctaattcgcgtgttttctcaa

SEQ ID NO: 293229 - DNA, 54 bp, Artificial
  Synthetic oligonucleotide
tgagcgcccctctcacggagcacaacctcttcagtgccctccgcgagtacacct

SEQ ID NO: 293230 - DNA, 54 bp, Artificial
  Synthetic oligonucleotide
tgagagaaggggcgtgtcccaagtgccgtgggagcggcacgtggcatcctcctt

SEQ ID NO: 293231 - DNA, 54 bp, Artificial
  Synthetic oligonucleotide
tgacggatgcatgctgatatggagcgctttctataggcagcagtctcgaccacc

SEQ ID NO: 293232 - DNA, 54 bp, Artificial
  Synthetic oligonucleotide
ctagtatactagcactgctgcaagcgtgaacccgagtggaatactgcacgctcg

SEQ ID NO: 293233 - DNA, 54 bp, Artificial
  Synthetic oligonucleotide
gattatatccaaagggatcaaagcagttgcgtctggaataaatcctcttgctct

SEQ ID NO: 293234 - DNA, 54 bp, Artificial
  Synthetic oligonucleotide
tgacagggtgaggcgccgacgacgtggggaggtccgagcgacgtatcggtacgg

SEQ ID NO: 293235 - DNA, 54 bp, Artificial
  Synthetic oligonucleotide
tgacagctacaaggactactgaggtgcagtcccggtcacatgcgcacagagggg

SEQ ID NO: 293236 - DNA, 54 bp, Artificial
  Synthetic oligonucleotide
tgacactttcgtgttagaaagagcgcacgtagactcgcatctgttgctacgcgg

SEQ ID NO: 293237 - DNA, 54 bp, Artificial
  Synthetic oligonucleotide
cgagctgtgccgattgctgcaccgtacgtgaatgcgtactctcgttctctccct

SEQ ID NO: 293238 - DNA, 59 bp, Artificial
  Synthetic oligonucleotide
ttgtcgtcaaatcgatctagggcgtttgcaataattgtaagatactcgtcccaagacaa

SEQ ID NO: 293239 - DNA, 54 bp, Artificial
  Synthetic oligonucleotide
tgaactcgtttatgtttattatgtctcaagtgagatctcatatacaatcatacc

SEQ ID NO: 293240 - DNA, 53 bp, Artificial
  Synthetic oligonucleotide
cccgtctacgtttgcatcgaaacaccgtgacccgccccaaccacccacctcat

SEQ ID NO: 293241 - DNA, 54 bp, Artificial
  Synthetic oligonucleotide
tttaccgcctcgcacgaggcctaacgacgccacaaccgccatgaacatgacgta

SEQ ID NO: 293242 - DNA, 54 bp, Artificial
  Synthetic oligonucleotide
cggtggtgtctgtaggagcgcactagcactttacagagtgtacacgcgcatata

SEQ ID NO: 293243 - DNA, 54 bp, Artificial
  Synthetic oligonucleotide
aggcgtctactccagaacacaggggtgcgctaaacgacggcagtgtgaggaatc

SEQ ID NO: 293244 - DNA, 54 bp, Artificial
  Synthetic oligonucleotide
cgtattagtagagttagaatcgggatgagaaacccaattcacaccttcttcgga

SEQ ID NO: 293245 - DNA, 54 bp, Artificial
  Synthetic oligonucleotide
cggtggtcatggtactacacctcagggtcctgttggtactccagccggcggtca

SEQ ID NO: 293246 - DNA, 54 bp, Artificial
  Synthetic oligonucleotide
gccacgactcacctgcattcgtcctcaccacggcacacgcttacgcgacgctga

SEQ ID NO: 293247 - DNA, 54 bp, Artificial
  Synthetic oligonucleotide
cgtcaacacgtagtctagcgagccgccacttacgtactccattataatctgaat

SEQ ID NO: 293248 - DNA, 54 bp, Artificial
  Synthetic oligonucleotide
ttgtagcacactgatacacctgtcgccgattagagtgctttcttctctacgtca

SEQ ID NO: 293249 - DNA, 60 bp, Artificial
  Synthetic oligonucleotide
cctatatcaggcgcattaacagcattatacggtagtatagttgcatcatttcagtctgat

SEQ ID NO: 293250 - DNA, 54 bp, Artificial
  Synthetic oligonucleotide
gcactgggtgacagtccggctagccgcctgtgcccgggtagcaccagtgtcgtc

SEQ ID NO: 293251 - DNA, 54 bp, Artificial
  Synthetic oligonucleotide
ttgcttgaatatccccaaccataccggagactggattgtctctgttcgccgctt

SEQ ID NO: 293252 - DNA, 54 bp, Artificial
  Synthetic oligonucleotide
cgtcattatagccatatactcgaaacaggacatatatagttcacattattctgt

SEQ ID NO: 293253 - DNA, 54 bp, Artificial
  Synthetic oligonucleotide
ttgctgttcgcaacgtcggcacatgcgtctctcgttggtgcggtaaagcgcagc

SEQ ID NO: 293254 - DNA, 54 bp, Artificial
  Synthetic oligonucleotide
aaaccccaacatatcgcgaatattgccctcactatagacgatgctcaaataagg

SEQ ID NO: 293255 - DNA, 54 bp, Artificial
  Synthetic oligonucleotide
gccattcattatccccttagcacaccccagcaacaggcagtgccttccgtatcg

SEQ ID NO: 293256 - DNA, 54 bp, Artificial
  Synthetic oligonucleotide
ttgctactcttaactatggggtaggagtgcctctgtgcttgtccatattcgtgg

SEQ ID NO: 293257 - DNA, 54 bp, Artificial
  Synthetic oligonucleotide
ttgactaccatgctgttcagttctcttatcggagttaggagcgcatcggcactg

SEQ ID NO: 293258 - DNA, 54 bp, Artificial
  Synthetic oligonucleotide
ttgacctgttactccttctctgcgtttcgcgtgttgtaggtgtgttgcgagggt

SEQ ID NO: 293259 - DNA, 54 bp, Artificial
  Synthetic oligonucleotide
ttctgccgttcacaaacgaagccctactccacacttgagaatggggttatcatc

SEQ ID NO: 293260 - DNA, 59 bp, Artificial
  Synthetic oligonucleotide
ttgtcgggggtggctgcgttctcctgcaaagaattcatagacaaacgcacaggaaacaa

SEQ ID NO: 293261 - DNA, 54 bp, Artificial
  Synthetic oligonucleotide
ttctatgcttgttgaaccaacgcggctcgatttaaccatggaattcggcatgcc

SEQ ID NO: 293262 - DNA, 54 bp, Artificial
  Synthetic oligonucleotide
cgatgcttgcctgccgaggatggctttcccaggacgattgaagggcatgtgttg

SEQ ID NO: 293263 - DNA, 54 bp, Artificial
  Synthetic oligonucleotide
cgcaagaggcacgtcggctcaatggataccactcccagacacaaggcccgacaa

SEQ ID NO: 293264 - DNA, 54 bp, Artificial
  Synthetic oligonucleotide
gcaggctcatcttcgcgggctcatggaaccgtgctggaacttccacagcgaatg

SEQ ID NO: 293265 - DNA, 54 bp, Artificial
  Synthetic oligonucleotide
catgtgcgtggcgctgccataccttgtcatgaactacatgggatatcagcgttt

SEQ ID NO: 293266 - DNA, 54 bp, Artificial
  Synthetic oligonucleotide
aaaaccctggcactgagttgcacctggaatagtgatgaatgggccgcgggcggc

SEQ ID NO: 293267 - DNA, 54 bp, Artificial
  Synthetic oligonucleotide
gcagtgtgatgtgggcgtagtagagggcgcattggtagccaaaagcgtaactcc

SEQ ID NO: 293268 - DNA, 54 bp, Artificial
  Synthetic oligonucleotide
cggttggaccatatcacaatgggagttggctaggtaggggttcacactgttata

SEQ ID NO: 293269 - DNA, 53 bp, Artificial
  Synthetic oligonucleotide
aaaacgacgtcacttttattcgcttttatatgggttcgtgcggcgtatcctcg

SEQ ID NO: 293270 - DNA, 54 bp, Artificial
  Synthetic oligonucleotide
tttgctaagacagttcaccgttgcgagcaccagagaagttgtgtcgtggcgagt

SEQ ID NO: 293271 - DNA, 60 bp, Artificial
  Synthetic oligonucleotide
atagagcataggataatgcaaagtatccctgactggattctgcaaaaactaattttttga

SEQ ID NO: 293272 - DNA, 54 bp, Artificial
  Synthetic oligonucleotide
tttgcacgcctcaccgtacacgtcacgcacacctcgggagacagacacactgca

SEQ ID NO: 293273 - DNA, 54 bp, Artificial
  Synthetic oligonucleotide
gcatattctggaggaccatttatacgtgccttcaacgtgtaaatttgcgggatc

SEQ ID NO: 293274 - DNA, 54 bp, Artificial
  Synthetic oligonucleotide
tttctgggcacggatcttcagctaatacggactgctctatgcgccccgtgctcc

SEQ ID NO: 293275 - DNA, 54 bp, Artificial
  Synthetic oligonucleotide
gcatctacctctgctgcgtacaccccgcggagtaaccacaccagtgaaggttcc

SEQ ID NO: 293276 - DNA, 54 bp, Artificial
  Synthetic oligonucleotide
aaaagacccactcacacttttatagttcagtgactgcgtccgcgtggtgagtcg

SEQ ID NO: 293277 - DNA, 53 bp, Artificial
  Synthetic oligonucleotide
tttcgtttctttaccggtgttgcttgccccgcttcccttgacgtctccccaga

SEQ ID NO: 293278 - DNA, 54 bp, Artificial
  Synthetic oligonucleotide
tttccgcactaaatagaggatggcgtcttctaaccatataatactgagaaggtg

SEQ ID NO: 293279 - DNA, 54 bp, Artificial
  Synthetic oligonucleotide
cgtagggaattaagaaagtcgtgtgttcatgactcacaccagaccagaacgtca

SEQ ID NO: 293280 - DNA, 54 bp, Artificial
  Synthetic oligonucleotide
catgcatcagagaacactaaccgcgcatcctctgctaccgctaacgtgacgcgt

SEQ ID NO: 293281 - DNA, 54 bp, Artificial
  Synthetic oligonucleotide
cgtagttgttcctggggcgatgacaattccaggatcgtgctaccgtgtgtgcgt

SEQ ID NO: 293282 - DNA, 58 bp, Artificial
  Synthetic oligonucleotide
atagacttagctttgaataggaagcttgatatactgggacggtaagaccctgtgcacc

SEQ ID NO: 293283 - DNA, 54 bp, Artificial
  Synthetic oligonucleotide
aaaaggaagtcccggagtcgttatttagctgcgggaaatcttgcatagcgacgg

SEQ ID NO: 293284 - DNA, 54 bp, Artificial
  Synthetic oligonucleotide
agtacatccacggcatgccgcacaacatgggccagctctactcgtatcaccgcc

SEQ ID NO: 293285 - DNA, 53 bp, Artificial
  Synthetic oligonucleotide
gccgttggccctgctgaggatggcgggtattataaagggggtatccaaacccc

SEQ ID NO: 293286 - DNA, 54 bp, Artificial
  Synthetic oligonucleotide
ttacatcaaactgctcacgctctaccacactcagcgacatgtaggtcgcacgtg

SEQ ID NO: 293287 - DNA, 54 bp, Artificial
  Synthetic oligonucleotide
ttacacttatggttattaagagcacatgtagaagcacctacagcgggatcggta

SEQ ID NO: 293288 - DNA, 54 bp, Artificial
  Synthetic oligonucleotide
ttacactctacctggacgcccgcgagacacgagagtgcctcgtgccactgaaaa

SEQ ID NO: 293289 - DNA, 54 bp, Artificial
  Synthetic oligonucleotide
ccgtgtggatccctgcacaattctcacaaatggatacattagctaatacaacca

SEQ ID NO: 293290 - DNA, 54 bp, Artificial
  Synthetic oligonucleotide
cagttaggctatcgcgtccatcgtgggatttcttacgggatcattatcgcagtg

SEQ ID NO: 293291 - DNA, 54 bp, Artificial
  Synthetic oligonucleotide
ttaaatgaagtacggcggtggtttgacgaatacatgcctcacgtaaaactaaag

SEQ ID NO: 293292 - DNA, 54 bp, Artificial
  Synthetic oligonucleotide
tgttaactcggtatgccacgagcagctttacctagaggagctggttaagttgct

SEQ ID NO: 293293 - DNA, 56 bp, Artificial
  Synthetic oligonucleotide
gagacgtgattcgtgaaagtacctttagtggttatcacacgaaaaaggtgcaacaa

SEQ ID NO: 293294 - DNA, 57 bp, Artificial
  Synthetic oligonucleotide
aaacaaagtaagtgcctgagtgttcaaaaggagtggcctgtagatccatagactagt

SEQ ID NO: 293295 - DNA, 52 bp, Artificial
  Synthetic oligonucleotide
agtcaactaaagctaaccccggaacctaaatcatgacccatagaaccttatt

SEQ ID NO: 293296 - DNA, 54 bp, Artificial
  Synthetic oligonucleotide
cccgcgtgtattgtcacttttacactgagtgcgctgctttcatttgtgagtctg

SEQ ID NO: 293297 - DNA, 54 bp, Artificial
  Synthetic oligonucleotide
tgtgcggcccactgtgggagtgccaccgtgtctgcagtaagcaacaagtgatgt

SEQ ID NO: 293298 - DNA, 54 bp, Artificial
  Synthetic oligonucleotide
tgtgcgctccgatcgccttgtcctgtcggtagacaagaccgaccacgtgtacgt

SEQ ID NO: 293299 - DNA, 54 bp, Artificial
  Synthetic oligonucleotide
agcggaggcctgcctccgtcttgacttgaacgggtggcgtgactagggtgttgc

SEQ ID NO: 293300 - DNA, 54 bp, Artificial
  Synthetic oligonucleotide
tgtgagagctctgcacaccgtatctccgtttcttcatgtgactcctgctcgcaa

SEQ ID NO: 293301 - DNA, 54 bp, Artificial
  Synthetic oligonucleotide
agcgccttcaaagacactggaggtgccgtggaaaggccccgcggacttgcgacg

SEQ ID NO: 293302 - DNA, 54 bp, Artificial
  Synthetic oligonucleotide
cagtccgtctgatttgaggctacgatgaagtgaattcgagtggggaggtacgtt

SEQ ID NO: 293303 - DNA, 54 bp, Artificial
  Synthetic oligonucleotide
tgtgaaagcccagccaaaatttcacttgccactatctgtccagcgatggatgga

SEQ ID NO: 293304 - DNA, 54 bp, Artificial
  Synthetic oligonucleotide
tgtctaagcggacttaagtctcaggtagctcgtgactttgtctcggaaaggcaa

SEQ ID NO: 293305 - DNA, 60 bp, Artificial
  Synthetic oligonucleotide
ccgggcagatgtcatacactatacctcctcatcaaagttagcagtgtcttatgtttgaat

SEQ ID NO: 293306 - DNA, 54 bp, Artificial
  Synthetic oligonucleotide
ttctaagaaccccatgcaagtcgaacatggatgggaaccggtgccgacgtgtct

SEQ ID NO: 293307 - DNA, 54 bp, Artificial
  Synthetic oligonucleotide
ttcgtgttcctgtgatggacggtgtgagaaggatggtgcccgcacacaccacac

SEQ ID NO: 293308 - DNA, 54 bp, Artificial
  Synthetic oligonucleotide
gcacgtggcagtatcacatggctggaaggaaataggcgcgagctactggtgggg

SEQ ID NO: 293309 - DNA, 54 bp, Artificial
  Synthetic oligonucleotide
catcaaacgagaaacctgttacgttgggatctagctccaaatccataggaggga

SEQ ID NO: 293310 - DNA, 54 bp, Artificial
  Synthetic oligonucleotide
cattgtgagggaggtaaacagtagaggcactgtattacgtgtgcacatggatcc

SEQ ID NO: 293311 - DNA, 54 bp, Artificial
  Synthetic oligonucleotide
cggtacaattagtttacactagcttacttggaagagcagcatgtacatttggcg

SEQ ID NO: 293312 - DNA, 54 bp, Artificial
  Synthetic oligonucleotide
catttcgagaatagcaaattcgttaacgtcttggtctgataccccaacgatgag

SEQ ID NO: 293313 - DNA, 54 bp, Artificial
  Synthetic oligonucleotide
gccctccactttagcaccaccggctgtccccaagtggtttcaggacgtgacgtc

SEQ ID NO: 293314 - DNA, 54 bp, Artificial
  Synthetic oligonucleotide
gccgccggtcaattagtcgtttaacaagatttattactctcctttgggccattg

SEQ ID NO: 293315 - DNA, 54 bp, Artificial
  Synthetic oligonucleotide
ttcatgagataccacgctgatgtgtctccggtcatcaggggcgagaggggagga

SEQ ID NO: 293316 - DNA, 56 bp, Artificial
  Synthetic oligonucleotide
aaacacttatagcttaattggatagagttttgagcttcgaactcaaatgtgtaagt

SEQ ID NO: 293317 - DNA, 54 bp, Artificial
  Synthetic oligonucleotide
cgtgaagggcatgggatgcgaccggccaacagacaatggcccctctttcacaac

SEQ ID NO: 293318 - DNA, 54 bp, Artificial
  Synthetic oligonucleotide
aaactagctatgcacctctagctcggtggtatctcattccggactctgtatgct

SEQ ID NO: 293319 - DNA, 54 bp, Artificial
  Synthetic oligonucleotide
aggttctttgtgtgccagtccgtcgtcaacttcaaatggtctagcaggcggcca

SEQ ID NO: 293320 - DNA, 54 bp, Artificial
  Synthetic oligonucleotide
agcttaagttggaagagcatgtggctacggaccacaatagtgtgggttcaattc

SEQ ID NO: 293321 - DNA, 54 bp, Artificial
  Synthetic oligonucleotide
gccgtacgagcgttaactgaggttgtacccttctggctttgagaggggaacgag

SEQ ID NO: 293322 - DNA, 54 bp, Artificial
  Synthetic oligonucleotide
ttcaaagaaatacataacatttgttcagtatcgcacaatggagtgtctattagc

SEQ ID NO: 293323 - DNA, 54 bp, Artificial
  Synthetic oligonucleotide
ttatctgcatgtgctagatccatcgaagaagctaccgctaaattaattgctgcc

SEQ ID NO: 293324 - DNA, 54 bp, Artificial
  Synthetic oligonucleotide
ttatcgtacccctccgtcctgtactcatcctcgtgcaccgtccaggccatttcg

SEQ ID NO: 293325 - DNA, 54 bp, Artificial
  Synthetic oligonucleotide
ttatcggtgcgagggaaacaagtagtgcgcgctctgacgaggtaacgagacacc

SEQ ID NO: 293326 - DNA, 54 bp, Artificial
  Synthetic oligonucleotide
gccgtaggagccagtcccaatgagcttcctcttcacgtacttgagatctccagt

SEQ ID NO: 293327 - DNA, 57 bp, Artificial
  Synthetic oligonucleotide
ttggtatgctctaagctttatcttcctatttactctaggtggtactactggagtagt

SEQ ID NO: 293328 - DNA, 54 bp, Artificial
  Synthetic oligonucleotide
gccgtagtgtcgcgtgcgccgaagtctgacactccaccgtcttcacttgcgcac

SEQ ID NO: 293329 - DNA, 54 bp, Artificial
  Synthetic oligonucleotide
ctgagaaacgtcaaaaaaacctatgctgtaggggaggtctatggtcatatccag

SEQ ID NO: 293330 - DNA, 54 bp, Artificial
  Synthetic oligonucleotide
gagtggagtggaacaccgcagcacctgtccagcacgagtcacacgcttgtgcgg

SEQ ID NO: 293331 - DNA, 54 bp, Artificial
  Synthetic oligonucleotide
tatgcacgggtctgaacgctttgatgacaggtatccagggagagcggtcccgtt

SEQ ID NO: 293332 - DNA, 54 bp, Artificial
  Synthetic oligonucleotide
aagaagaaggggcacgatagactcccgcactcgcgcactgtcgtcctgcacgca

SEQ ID NO: 293333 - DNA, 54 bp, Artificial
  Synthetic oligonucleotide
actgcgcgacgcatcgaaaccccacgcgatcccacttgatgtgtgtgcaccgcc

SEQ ID NO: 293334 - DNA, 54 bp, Artificial
  Synthetic oligonucleotide
cggaaggatatgcaatgtagggcatgttccttcagtcctccgctgtacgcgtgt

SEQ ID NO: 293335 - DNA, 54 bp, Artificial
  Synthetic oligonucleotide
ctcttctctgttggagttgtcggtagatgtccatgtgcactgaggtagcaagtg

SEQ ID NO: 293336 - DNA, 54 bp, Artificial
  Synthetic oligonucleotide
tagcctcctcatggaagggaacccttacatacacgtgccgagaactcgtaacgg

SEQ ID NO: 293337 - DNA, 54 bp, Artificial
  Synthetic oligonucleotide
atactgtgagtgatcctacaataaaacgattttttgtactacattttatcttac

SEQ ID NO: 293338 - DNA, 59 bp, Artificial
  Synthetic oligonucleotide
tcttccgcagtacgcgattttaagatcaattccacataaattaggtggtgttgttgcaa

SEQ ID NO: 293339 - DNA, 54 bp, Artificial
  Synthetic oligonucleotide
cacgtccttgagagcaaactcaccctccacaccggtggcttcctcgctcgttgt

SEQ ID NO: 293340 - DNA, 54 bp, Artificial
  Synthetic oligonucleotide
tccaggacttgtatcatggatttgtggtggatatcttgttagtgacccaacatt

SEQ ID NO: 293341 - DNA, 54 bp, Artificial
  Synthetic oligonucleotide
tccatccttgaaatccaacaataagtttctgtgaaatcgaagtagtcagaaccg

SEQ ID NO: 293342 - DNA, 54 bp, Artificial
  Synthetic oligonucleotide
agacacaaactgggtgcgagagagtccatcagcgccgccccacggactacacgg

SEQ ID NO: 293343 - DNA, 54 bp, Artificial
  Synthetic oligonucleotide
cacgaacgaacacaaagcacggtacagctcttaaaggaacacactactggggta

SEQ ID NO: 293344 - DNA, 53 bp, Artificial
  Synthetic oligonucleotide
tccccaagaactgctttcccgactattaagtcgttcgcggtaatccccttaca

SEQ ID NO: 293345 - DNA, 54 bp, Artificial
  Synthetic oligonucleotide
tccccacaacgaataatatccgttaacgacgcttagattgtcagtgatgcgaaa

SEQ ID NO: 293346 - DNA, 54 bp, Artificial
  Synthetic oligonucleotide
gaggtagaacttacgacgtactttaggcgcggcagtgatcagaggggtgagctt

SEQ ID NO: 293347 - DNA, 54 bp, Artificial
  Synthetic oligonucleotide
gagtcaatacaagcgaccagagacccggtcgtgcccgcaaatgtggtggtccaa

SEQ ID NO: 293348 - DNA, 54 bp, Artificial
  Synthetic oligonucleotide
tccccacgtcaggatccgtgcaaatgtgacgcttgtcacccaaaacgcgataaa

SEQ ID NO: 293349 - DNA, 57 bp, Artificial
  Synthetic oligonucleotide
ccggccaattagtcccacctcttgcgtctccaaacttatgcggcacatggcgttaac

SEQ ID NO: 293350 - DNA, 54 bp, Artificial
  Synthetic oligonucleotide
taggccgtttcgaggacaccccgtgtgtacgcgctgagttgcactcggtctggc

SEQ ID NO: 293351 - DNA, 54 bp, Artificial
  Synthetic oligonucleotide
aacgctcttgtagccaacgttggaccgtgggtatacgggcagtccctcccacag

SEQ ID NO: 293352 - DNA, 54 bp, Artificial
  Synthetic oligonucleotide
ccccctagcataccatatgaagtagaagtgttaagcatagggttttattaatgt

SEQ ID NO: 293353 - DNA, 54 bp, Artificial
  Synthetic oligonucleotide
ggaccctccttgcagaatccactgcccttgcacaaagttaccgcggacccactc

SEQ ID NO: 293354 - DNA, 54 bp, Artificial
  Synthetic oligonucleotide
actgtgggttctgtaattttggctggtgtattactaaaattaggtacatacggc

SEQ ID NO: 293355 - DNA, 54 bp, Artificial
  Synthetic oligonucleotide
aactctcctacgggatatgcccctgtagaaaggaactcctcatgcagagtcccc

SEQ ID NO: 293356 - DNA, 54 bp, Artificial
  Synthetic oligonucleotide
tcctcatgacgggatggggcggaggggacacctcagcgcggtatccagggacca

SEQ ID NO: 293357 - DNA, 54 bp, Artificial
  Synthetic oligonucleotide
tcctctgacgcacatcaggtcaatgtaatcccagaagtgacgcgggcactcgtc

SEQ ID NO: 293358 - DNA, 54 bp, Artificial
  Synthetic oligonucleotide
atcactcgcctgccagcatcggagagtgtgactgcgacgccgtttgcatggaat

SEQ ID NO: 293359 - DNA, 54 bp, Artificial
  Synthetic oligonucleotide
tattgatgcggtatatcacccgccctgagtccgtcttgagagtggagtagccgt

SEQ ID NO: 293360 - DNA, 60 bp, Artificial
  Synthetic oligonucleotide
tcttcggcccattcctcgaaccagcgaagatactgcggcacgtagtcaaaatatgtggga

SEQ ID NO: 293361 - DNA, 54 bp, Artificial
  Synthetic oligonucleotide
gcttactctttctccgcgtcaactcacccgatcttagcactgcgcggcagatgt

SEQ ID NO: 293362 - DNA, 54 bp, Artificial
  Synthetic oligonucleotide
ggaacactcgttgttatataatctagtaccctcaatagacaatccctcgtggat

SEQ ID NO: 293363 - DNA, 54 bp, Artificial
  Synthetic oligonucleotide
tagagcccacgacttgggctgagaggtgtctcctttgctgcgtgtggggccagt

SEQ ID NO: 293364 - DNA, 54 bp, Artificial
  Synthetic oligonucleotide
tcaaaccgcaacatgtgggtgtagtagaaatccagcacattactctcgagtcca

SEQ ID NO: 293365 - DNA, 54 bp, Artificial
  Synthetic oligonucleotide
tagactttgcctaattgagttattgaaatcagcgatacccgattaccatattgg

SEQ ID NO: 293366 - DNA, 54 bp, Artificial
  Synthetic oligonucleotide
tattcctgtttgtcggccacagtgacggtatggtaacgcggtgcgagctgaacc

SEQ ID NO: 293367 - DNA, 54 bp, Artificial
  Synthetic oligonucleotide
aacgtgaagctagcgctcccgttgtgctgaagtacggcgctgttctgaagcatc

SEQ ID NO: 293368 - DNA, 54 bp, Artificial
  Synthetic oligonucleotide
tagacctggaacgaaatggatgtcaagtgtttaccaatcaaaatgctgggactg

SEQ ID NO: 293369 - DNA, 54 bp, Artificial
  Synthetic oligonucleotide
tcacacggaagcggtgggaacgcacaggtgcggtaagtactcgaaatacgaacg

SEQ ID NO: 293370 - DNA, 54 bp, Artificial
  Synthetic oligonucleotide
aacgtcgtctctcatgacgtttggtacgacttgtccactgagactcacatctcc

SEQ ID NO: 293371 - DNA, 57 bp, Artificial
  Synthetic oligonucleotide
atagacaattttctaactttaccataagatgtacatgtctttataaactgaccgcaa

SEQ ID NO: 293372 - DNA, 54 bp, Artificial
  Synthetic oligonucleotide
actgctcccaacaagaagtaacacgcctacgttccgccgacccatcacccgaca

SEQ ID NO: 293373 - DNA, 54 bp, Artificial
  Synthetic oligonucleotide
atagatggaggcggtcgcgtgattggcacgagtgtgcgtttactccgtcgagtt

SEQ ID NO: 293374 - DNA, 53 bp, Artificial
  Synthetic oligonucleotide
ccccgcactaaacaaattattccatccgtttcttacggcgatgattggtattt

SEQ ID NO: 293375 - DNA, 54 bp, Artificial
  Synthetic oligonucleotide
cggaaaagccagtgcagaaatccaggctaatccgacacaaaggtgtaggacggc

SEQ ID NO: 293376 - DNA, 54 bp, Artificial
  Synthetic oligonucleotide
ccccgcaaggcatatacccacaggtgggctcattcatgcaccaacgactgatac

SEQ ID NO: 293377 - DNA, 54 bp, Artificial
  Synthetic oligonucleotide
tcagacatctatcacacccgtcacctactgtgaccgagtgcgggagggctcggt

SEQ ID NO: 293378 - DNA, 54 bp, Artificial
  Synthetic oligonucleotide
tactgtgtccagattactaagcacactaagtagcatccattactactccacatc

SEQ ID NO: 293379 - DNA, 54 bp, Artificial
  Synthetic oligonucleotide
tcagcggctctacagtcgatcaggacgaccacacttccgtgactctatctgtca

SEQ ID NO: 293380 - DNA, 54 bp, Artificial
  Synthetic oligonucleotide
tatgggcatgatatctgtcacctgccccggctgcattctgctcttcgcgagcat

SEQ ID NO: 293381 - DNA, 54 bp, Artificial
  Synthetic oligonucleotide
atagagtggaaccagctaaaacgaatatagtggcttctgcattataggtatcac

SEQ ID NO: 293382 - DNA, 59 bp, Artificial
  Synthetic oligonucleotide
aaaccactatttgtgctattagcttgtccacagtttgctcgatatacaccccatactct

SEQ ID NO: 293383 - DNA, 54 bp, Artificial
  Synthetic oligonucleotide
aactactgcgactagcactacgtctgtttctccagtagtcagttttcgctcccc

SEQ ID NO: 293384 - DNA, 54 bp, Artificial
  Synthetic oligonucleotide
aagagcgactctgcgaatttaaggcatcctccttacatttaggattaccgagcg

SEQ ID NO: 293385 - DNA, 54 bp, Artificial
  Synthetic oligonucleotide
agaagttaaatagtaacagcctaatactacatcttgaccaggcgttaaaatagg

SEQ ID NO: 293386 - DNA, 54 bp, Artificial
  Synthetic oligonucleotide
cgagagcgatcagaccgcgaagaggctcgcgtcttccccgacggggcaagcaac

SEQ ID NO: 293387 - DNA, 54 bp, Artificial
  Synthetic oligonucleotide
tccaagccgcccgatgtctctcgtgcaacgcacatcaagtgaccttcgagggat

SEQ ID NO: 293388 - DNA, 54 bp, Artificial
  Synthetic oligonucleotide
cacgtcatagacaaactagtacatcacgagtgttaagcgaatctgacccatata

SEQ ID NO: 293389 - DNA, 54 bp, Artificial
  Synthetic oligonucleotide
agacgtgcatttcgaactattcaacccaatgtaccaagagtggctgttaataaa

SEQ ID NO: 293390 - DNA, 54 bp, Artificial
  Synthetic oligonucleotide
tcgcttgtagtgtacaagaggagatgagagcgcgcagggtcttatgaagtcaag

SEQ ID NO: 293391 - DNA, 54 bp, Artificial
  Synthetic oligonucleotide
tacccggtacggatgagacagtgtgtgcgaagacgtggtccacactcgagtcag

SEQ ID NO: 293392 - DNA, 54 bp, Artificial
  Synthetic oligonucleotide
acttcgtggttatatacgagaacgtgttgacctttggcgtcaatgggctcaacc

SEQ ID NO: 293393 - DNA, 59 bp, Artificial
  Synthetic oligonucleotide
ttgctagtatcagctatccatagttaactgattccgttttgaccggtcattttctttgc

SEQ ID NO: 293394 - DNA, 54 bp, Artificial
  Synthetic oligonucleotide
gcttggaattggtactctagctatacctttggcgtatgcagctaatggtttatt

SEQ ID NO: 293395 - DNA, 54 bp, Artificial
  Synthetic oligonucleotide
tagttgtccaacccgaagtggaccgtccagatcgctccggagaagaaagtcatt

SEQ ID NO: 293396 - DNA, 54 bp, Artificial
  Synthetic oligonucleotide
atccgtcctgctcgccagtggttcacctcactttctctctgtgaaggcggcgaa

SEQ ID NO: 293397 - DNA, 54 bp, Artificial
  Synthetic oligonucleotide
tcggcaggcgcaagtgaacccactgatgccacacaacagtgatagggaaaccac

SEQ ID NO: 293398 - DNA, 54 bp, Artificial
  Synthetic oligonucleotide
tcggtaatgcaggagcctccgtgcccgccattttcattctgaccgtgatctccg

SEQ ID NO: 293399 - DNA, 54 bp, Artificial
  Synthetic oligonucleotide
cacgaggacatgttggcgttatcatcagcgcctctcgcgctccgcccactatcg

SEQ ID NO: 293400 - DNA, 54 bp, Artificial
  Synthetic oligonucleotide
atcaactatacatactacgtggtactacatggtgtccacatcacacatgtcgtg

SEQ ID NO: 293401 - DNA, 54 bp, Artificial
  Synthetic oligonucleotide
aactgcggaggcgcttggtcttcttctaataggccttgacccctcgtagtccaa

SEQ ID NO: 293402 - DNA, 54 bp, Artificial
  Synthetic oligonucleotide
tagttgacaccgctcgagtgtcccaccagcgtgtgcaggcaaatgacgtcagac

SEQ ID NO: 293403 - DNA, 54 bp, Artificial
  Synthetic oligonucleotide
agactcccgcggcgacagacagtaagggatgatgctaccacacgaaagtggtct

SEQ ID NO: 293404 - DNA, 55 bp, Artificial
  Synthetic oligonucleotide
cggcatatgccgtaaaagttgatccgaattttattccactggttataacaaagcc

SEQ ID NO: 293405 - DNA, 60 bp, Artificial
  Synthetic oligonucleotide
ttgcgtgaccaaatgtataccaaccacgtgggctacttctgaatacaccgtctgattcta

SEQ ID NO: 293406 - DNA, 53 bp, Artificial
  Synthetic oligonucleotide
ataaaagattagatacagtttctccgttattaagtgttttatttcgtcaacta

SEQ ID NO: 293407 - DNA, 54 bp, Artificial
  Synthetic oligonucleotide
agactgtgtccgttttgcacgaacgagtcgcttgactaggcacttgaactgggg

SEQ ID NO: 293408 - DNA, 54 bp, Artificial
  Synthetic oligonucleotide
cgcattaaatggttggaatatgatctgttctattggatcaactatgactctatt

SEQ ID NO: 293409 - DNA, 54 bp, Artificial
  Synthetic oligonucleotide
tagtgtgggtatgggcgttacctgtggacacacgcgcacacaatgagccacagc

SEQ ID NO: 293410 - DNA, 54 bp, Artificial
  Synthetic oligonucleotide
ctctgaaaggcgcaccagatacgttggcgtgatcaggcgagcgtagccggacca

SEQ ID NO: 293411 - DNA, 54 bp, Artificial
  Synthetic oligonucleotide
tcgtgcctaatgaaggactacggaacattgtgataatacgtatgtacacgcgca

SEQ ID NO: 293412 - DNA, 54 bp, Artificial
  Synthetic oligonucleotide
tcgtgggcctccgttcttctcacgcttctttgttgcatgcgagaaacggacgac

SEQ ID NO: 293413 - DNA, 54 bp, Artificial
  Synthetic oligonucleotide
tcgttactactccagggctccgggagaatcaatatggcctggcgaacagtctcg

SEQ ID NO: 293414 - DNA, 54 bp, Artificial
  Synthetic oligonucleotide
tctacggaagcagtatgcatggcacacggagcagtagtgcggagtagcggcagg

SEQ ID NO: 293415 - DNA, 54 bp, Artificial
  Synthetic oligonucleotide
ccccattgtcaacatatggattccaccttttagaaggtcgagcatgctctattg

SEQ ID NO: 293416 - DNA, 58 bp, Artificial
  Synthetic oligonucleotide
atagaaaagtaattgcgacacaaagaaagcactatatgcgagaaattacttcagcgtt

SEQ ID NO: 293417 - DNA, 54 bp, Artificial
  Synthetic oligonucleotide
tcctgtccaaagtacttcagtgtcgcaatgccggaaatgccatccttcgtgggg

SEQ ID NO: 293418 - DNA, 54 bp, Artificial
  Synthetic oligonucleotide
actctgcgagattcatagtgtaaaataaaacttgcgtgtgtaatgcatttgatt

SEQ ID NO: 293419 - DNA, 54 bp, Artificial
  Synthetic oligonucleotide
tccttgtttggtccccgctcagacttggttagtggcgaggcatcggagcttagc

SEQ ID NO: 293420 - DNA, 54 bp, Artificial
  Synthetic oligonucleotide
ccactacaccatactgacgcagagacgtatccgacgttgtatgcaagtcagcga

SEQ ID NO: 293421 - DNA, 54 bp, Artificial
  Synthetic oligonucleotide
tcgacaacgaagcatgatttgttggcagaagtatgtatggcagcaaaatacgaa

SEQ ID NO: 293422 - DNA, 54 bp, Artificial
  Synthetic oligonucleotide
actcagtcgctgcgacaagcctcttgtgaggcgaatgcctagcggcggctaggg

SEQ ID NO: 293423 - DNA, 54 bp, Artificial
  Synthetic oligonucleotide
gctctgtatgttgatgcacacacggtagcggcagtacacgtatgtcttcgctgt

SEQ ID NO: 293424 - DNA, 54 bp, Artificial
  Synthetic oligonucleotide
tacgcgcgggcatacatagagaagagcgagaccgactcgcactgtgttgtcacc

SEQ ID NO: 293425 - DNA, 54 bp, Artificial
  Synthetic oligonucleotide
aagcaaccacccacgctaagtaggagcaaacgcagcgggaggataagagggacg

SEQ ID NO: 293426 - DNA, 54 bp, Artificial
  Synthetic oligonucleotide
ggacggtctttacgagtcgcctgaggcggcacttctctcttcgtgttcctacgt

SEQ ID NO: 293427 - DNA, 60 bp, Artificial
  Synthetic oligonucleotide
cgcagagtagtctaaggatatcatgaataacctgttcaaccaactcgatagcagagcggc

SEQ ID NO: 293428 - DNA, 54 bp, Artificial
  Synthetic oligonucleotide
taccgaaggtaatgctggcgcttcgttctattgacaccggcactcctgcgatcg

SEQ ID NO: 293429 - DNA, 54 bp, Artificial
  Synthetic oligonucleotide
atacgagcagggaggagctcaacctatgtaggcgtgaattaacggtttagaagc

SEQ ID NO: 293430 - DNA, 54 bp, Artificial
  Synthetic oligonucleotide
gctcgtgagggcgcactgccctcttgcctatacactccttttcgtggccggagg

SEQ ID NO: 293431 - DNA, 54 bp, Artificial
  Synthetic oligonucleotide
cgagcaagcataggccagagcattctgctccccagcgagactgaagcagggagt

SEQ ID NO: 293432 - DNA, 54 bp, Artificial
  Synthetic oligonucleotide
taccctgtgcctgtggctctacggtcgttttcagtccttaacctggtgcgaact

SEQ ID NO: 293433 - DNA, 54 bp, Artificial
  Synthetic oligonucleotide
ctgcctctccataacgaggtagaggcagtatcgtcacccaaacccatcgcacgt

SEQ ID NO: 293434 - DNA, 54 bp, Artificial
  Synthetic oligonucleotide
tacatcctccgctctaagggcatgtacgacagggtcaagtatggcccgcgggac

SEQ ID NO: 293435 - DNA, 54 bp, Artificial
  Synthetic oligonucleotide
cactagcaaacgtagtgctgtctaggctccctcatgaggcgctgccgagtcttc

SEQ ID NO: 293436 - DNA, 54 bp, Artificial
  Synthetic oligonucleotide
agacgcccatccgtggggtatcgacgagacaggggtaattgccagacatcgaca

SEQ ID NO: 293437 - DNA, 54 bp, Artificial
  Synthetic oligonucleotide
cgagcctgacgtgactttaacagaatactttcacttgctgatagagtgaggtag

SEQ ID NO: 293438 - DNA, 60 bp, Artificial
  Synthetic oligonucleotide
aggcacagacacctcataaggtagagcttaaatagtgtctaacatcaatgctgtgtaagc

SEQ ID NO: 293439 - DNA, 54 bp, Artificial
  Synthetic oligonucleotide
aacgacgccaacacaagagcaataaacgaaggctacggctctctccaacacccc

SEQ ID NO: 293440 - DNA, 53 bp, Artificial
  Synthetic oligonucleotide
ggagtgtgagtctaagtgtgaggatctgcgagcatgttggctgctttgtcttt

SEQ ID NO: 293441 - DNA, 53 bp, Artificial
  Synthetic oligonucleotide
gaggttggtgagacaacactgacggtgagtatagagagtggcgacacacgatg

SEQ ID NO: 293442 - DNA, 53 bp, Artificial
  Synthetic oligonucleotide
atcaaaaccgcaatgggtagtcacagtaacagaacgctaccatgacatctgcc

SEQ ID NO: 293443 - DNA, 53 bp, Artificial
  Synthetic oligonucleotide
agctgagggagcgattcagcggtgtgttttactgtccgatgcaagcatagggg

SEQ ID NO: 293444 - DNA, 53 bp, Artificial
  Synthetic oligonucleotide
ccctcctttctcgttccgtcctcctgcaccctgatgacaggaatatctcagcg

SEQ ID NO: 293445 - DNA, 53 bp, Artificial
  Synthetic oligonucleotide
gcacgtcttactggcacagccgaggtcctgtgaggcctcaagcgcgttgcggt

SEQ ID NO: 293446 - DNA, 53 bp, Artificial
  Synthetic oligonucleotide
aggagaaagaccgccttcgtgagaaacaggtagagtggaggcgcgcttgtacc

SEQ ID NO: 293447 - DNA, 53 bp, Artificial
  Synthetic oligonucleotide
atggtcgacggtgttcaacgatgagatatcgctgcgggttggatggtgagaca

SEQ ID NO: 293448 - DNA, 53 bp, Artificial
  Synthetic oligonucleotide
atgtaggcgtgtatttcaaggtaattctgtctcaccagcacccctttgctatc

SEQ ID NO: 293449 - DNA, 58 bp, Artificial
  Synthetic oligonucleotide
ttgcctaatcttctcaaacatgaactcgtttttcgcctaacatgaatttactatactc

SEQ ID NO: 293450 - DNA, 53 bp, Artificial
  Synthetic oligonucleotide
aggtgttccattaccctcggtacattgaacccatctaataccagttgacggaa

SEQ ID NO: 293451 - DNA, 53 bp, Artificial
  Synthetic oligonucleotide
ccgagcaccccgtttgtcttccgttctgttgtttcagcagacgtgcgtcccta

SEQ ID NO: 293452 - DNA, 53 bp, Artificial
  Synthetic oligonucleotide
acgtgtccacacgcagagaaatatgcgcgttgccgtacttacacctgacagcg

SEQ ID NO: 293453 - DNA, 53 bp, Artificial
  Synthetic oligonucleotide
acttagtcgtcatcgggcatgtcgatagtggtaaatccacaactactggtcac

SEQ ID NO: 293454 - DNA, 53 bp, Artificial
  Synthetic oligonucleotide
gctttaccctctgccgcgtcacaccgtagcattccataacatgagatggtgac

SEQ ID NO: 293455 - DNA, 53 bp, Artificial
  Synthetic oligonucleotide
gcagacgtgctcgtgagtgtgtgcctgacctgtcgtcccgtcgtatcgccgct

SEQ ID NO: 293456 - DNA, 53 bp, Artificial
  Synthetic oligonucleotide
gcattttagggtgtacgcttcagggtgtatgctttcggttctagggtgacagg

SEQ ID NO: 293457 - DNA, 53 bp, Artificial
  Synthetic oligonucleotide
atgtgtgccacggcagggacagtagtggcggcgatcatgagagcgtgccgcac

SEQ ID NO: 293458 - DNA, 53 bp, Artificial
  Synthetic oligonucleotide
agggaccatcccagagtcacgagctacttgaggttctagacccgtgccgacga

SEQ ID NO: 293459 - DNA, 53 bp, Artificial
  Synthetic oligonucleotide
ggaggtgcagctcgtgtggtgcgccgtgaatcgcgaggctcgtgaaggtgcac

SEQ ID NO: 293460 - DNA, 60 bp, Artificial
  Synthetic oligonucleotide
gatacaggttgaccaaataatgttgagttttccaaaatttctgtgcatgacaatacgcga

SEQ ID NO: 293461 - DNA, 53 bp, Artificial
  Synthetic oligonucleotide
ggtgaaacgattattaaggcagacccacacatcggtctcctacatcgtggaac

SEQ ID NO: 293462 - DNA, 53 bp, Artificial
  Synthetic oligonucleotide
gcatggcgcggtctatggctgtcagttgcggtattgcagggatgcgcttgaaa

SEQ ID NO: 293463 - DNA, 53 bp, Artificial
  Synthetic oligonucleotide
attacatgcacgcagaaatatctctcgcacacgcagataaagagaagccctaa

SEQ ID NO: 293464 - DNA, 53 bp, Artificial
  Synthetic oligonucleotide
gagggagcttggggttatatctatgaattaaccatcgagtcctctgccgaaaa

SEQ ID NO: 293465 - DNA, 53 bp, Artificial
  Synthetic oligonucleotide
agggttcagtcgcaccagagagtcagttctagaggccgcaagactacgctgtg

SEQ ID NO: 293466 - DNA, 53 bp, Artificial
  Synthetic oligonucleotide
ccgataagggtacattgctttctgcgtaagtctgagggttatttcacttatac

SEQ ID NO: 293467 - DNA, 53 bp, Artificial
  Synthetic oligonucleotide
gcatactgagatgcccaatccatcaaacctcctgtgccagtaaactcgtcagg

SEQ ID NO: 293468 - DNA, 53 bp, Artificial
  Synthetic oligonucleotide
atccgccgagactgacacctctgctcaacctgctaaacccaaccagcctgcat

SEQ ID NO: 293469 - DNA, 53 bp, Artificial
  Synthetic oligonucleotide
actcatctcgtacaactctgtggaactcacgtaccaaatcggattccgtgttc

SEQ ID NO: 293470 - DNA, 53 bp, Artificial
  Synthetic oligonucleotide
cgccagatttggaagaaccctgaagttacttgaactccttggaatcccccacc

SEQ ID NO: 293471 - DNA, 56 bp, Artificial
  Synthetic oligonucleotide
tctttataaactacgctattggattcaacgtccaggacttcctgacgcttaataac

SEQ ID NO: 293472 - DNA, 53 bp, Artificial
  Synthetic oligonucleotide
cccgagtgatgtacgcgatggactcagtaccagcagaggcgtaataggatagt

SEQ ID NO: 293473 - DNA, 53 bp, Artificial
  Synthetic oligonucleotide
actcaagccaaaggatcgcatcgggacgtccactcgccgaagcaagttcgtgt

SEQ ID NO: 293474 - DNA, 53 bp, Artificial
  Synthetic oligonucleotide
agggggaattgtgataaagttggaggatacgtttaatgtaatcgcgtaaatgg

SEQ ID NO: 293475 - DNA, 53 bp, Artificial
  Synthetic oligonucleotide
gcagtaggtttagccagcccgttgtcaatagctatcagttcatatatatgcag

SEQ ID NO: 293476 - DNA, 53 bp, Artificial
  Synthetic oligonucleotide
aggggttttctgtggagagggtacagtcactaccactagattgggatgtacac

SEQ ID NO: 293477 - DNA, 52 bp, Artificial
  Synthetic oligonucleotide
gcccctccctctcactgtcggaaaggggtcacggtggggagggtcggatggg

SEQ ID NO: 293478 - DNA, 53 bp, Artificial
  Synthetic oligonucleotide
aggaggcactctctggtagcgcttacttcaacgaatcgcctgtcttgtgcccc

SEQ ID NO: 293479 - DNA, 53 bp, Artificial
  Synthetic oligonucleotide
cgacggtggtgcatgcttctgacggatacgagtggaatcgtgtacaatctagc

SEQ ID NO: 293480 - DNA, 53 bp, Artificial
  Synthetic oligonucleotide
actgcttctgtgtgcacctcattgggcagtacgggcgttgggtcgtttcctgc

SEQ ID NO: 293481 - DNA, 53 bp, Artificial
  Synthetic oligonucleotide
aggagtggcgctgtgacccggccctatttgtcatgagcatatcttcggtggat

SEQ ID NO: 293482 - DNA, 60 bp, Artificial
  Synthetic oligonucleotide
gccatgtggcgtgacgaaaacgatgcgtgccgagacatccgtgaactcaatctttcgctc

SEQ ID NO: 293483 - DNA, 53 bp, Artificial
  Synthetic oligonucleotide
ggaaggttacctcagtcacgcagcgagacccgcagtgggcataaaattgcacg

SEQ ID NO: 293484 - DNA, 53 bp, Artificial
  Synthetic oligonucleotide
gcactgcggggagttggcccctcgtcataatggtgtatatacgacaaaccaca

SEQ ID NO: 293485 - DNA, 53 bp, Artificial
  Synthetic oligonucleotide
ggtatacgcacaaatcaaggatacacttcattttggtggggttataatgccag

SEQ ID NO: 293486 - DNA, 53 bp, Artificial
  Synthetic oligonucleotide
cccgcatccttaccaggacttataagacatgccgctttgaattattcaagacc

SEQ ID NO: 293487 - DNA, 53 bp, Artificial
  Synthetic oligonucleotide
gccactaccccgactgcatggactggttacagaggcacctgtttagcgactct

SEQ ID NO: 293488 - DNA, 53 bp, Artificial
  Synthetic oligonucleotide
ggtcccctccaagagcgcccattcgctttcgcagatccacgaaatccgctgta

SEQ ID NO: 293489 - DNA, 53 bp, Artificial
  Synthetic oligonucleotide
gcacttctgttgtaggtagtgcaggtttacaacgtgtagttggttccacagac

SEQ ID NO: 293490 - DNA, 53 bp, Artificial
  Synthetic oligonucleotide
ggaatacccatcacgtgtcttcgtgcagactgatcgaaaggtagggacaccta

SEQ ID NO: 293491 - DNA, 53 bp, Artificial
  Synthetic oligonucleotide
actacccgctatcacggaagctaggtgacgcgcgttggaggcaggcacgagtg

SEQ ID NO: 293492 - DNA, 53 bp, Artificial
  Synthetic oligonucleotide
aggcgcatacgcccgatcggactcctcagagaactacgcgtgaacctcaacgt

SEQ ID NO: 293493 - DNA, 51 bp, Artificial
  Synthetic oligonucleotide
ttgacaagttgtaggggtttttatcccgattcgaagggattcgaagggaaa

SEQ ID NO: 293494 - DNA, 53 bp, Artificial
  Synthetic oligonucleotide
ggacaatcgatagaggatcaatcgacaaatgatcaatcgatagaggatcaatc

SEQ ID NO: 293495 - DNA, 53 bp, Artificial
  Synthetic oligonucleotide
aggcgcccacccgtgggctataggactacgtggtcctcagcactggctcacat

SEQ ID NO: 293496 - DNA, 53 bp, Artificial
  Synthetic oligonucleotide
atgtgcggtgcctcgacgcgtggttggcacatcgcatggtaacgtcgtgcccc

SEQ ID NO: 293497 - DNA, 53 bp, Artificial
  Synthetic oligonucleotide
ggaccacacaagggtgacccacagggagcggtttgacggaatctcaccagcgt

SEQ ID NO: 293498 - DNA, 53 bp, Artificial
  Synthetic oligonucleotide
aggtcttaacctgactaacacacgtcttaacctgactaacataggtcttaact

SEQ ID NO: 293499 - DNA, 53 bp, Artificial
  Synthetic oligonucleotide
atcgctaatgcgctaaatcaatttgatgacgagtaataaaataacccccagct

SEQ ID NO: 293500 - DNA, 53 bp, Artificial
  Synthetic oligonucleotide
gcgtgcaactcacgaaacaagtggcaaccagcactctctcgacaacagccctc

SEQ ID NO: 293501 - DNA, 53 bp, Artificial
  Synthetic oligonucleotide
atgcgcgtacctacggctgcttcacacactacacgatgaccctgtggcagttc

SEQ ID NO: 293502 - DNA, 53 bp, Artificial
  Synthetic oligonucleotide
gcgtctacggacgcctacacgacgacatccagaacacatcaccggccatacct

SEQ ID NO: 293503 - DNA, 53 bp, Artificial
  Synthetic oligonucleotide
agcaaactcatgttgaatggtgtaagacggaaagaaaatacggcggataatct

SEQ ID NO: 293504 - DNA, 60 bp, Artificial
  Synthetic oligonucleotide
ttgaaattcaatcttgtagaagttattgtgtatatatcatggggcggtccattaggtata

SEQ ID NO: 293505 - DNA, 53 bp, Artificial
  Synthetic oligonucleotide
atgactcgtggaatggcgtgcaggacgggagcgggccacatatcagcatgtgt

SEQ ID NO: 293506 - DNA, 53 bp, Artificial
  Synthetic oligonucleotide
atgcgggcaaagaggtgcgaggcacattccggtacatggccccggaggtctac

SEQ ID NO: 293507 - DNA, 53 bp, Artificial
  Synthetic oligonucleotide
atactcctatgaggggtgataacattggtcaacctagttacctgggaatggtc

SEQ ID NO: 293508 - DNA, 53 bp, Artificial
  Synthetic oligonucleotide
agtgcggatgccgtcacttacacgtgggtctttcgcgctctgggcaagtacta

SEQ ID NO: 293509 - DNA, 53 bp, Artificial
  Synthetic oligonucleotide
cgaagtttgaagcgcctccggaaggttaaggtgtcctcgttgcagtaatgggg

SEQ ID NO: 293510 - DNA, 53 bp, Artificial
  Synthetic oligonucleotide
acgagctacttgaggttctagacccgtgccgacgagaggcctttctgggcgta

SEQ ID NO: 293511 - DNA, 53 bp, Artificial
  Synthetic oligonucleotide
gcggtggtgaatcgagtcgatcgtccaggactggatagagaagccaggccatc

SEQ ID NO: 293512 - DNA, 53 bp, Artificial
  Synthetic oligonucleotide
gagcgcagtcgctctccacgcagggcggaactcaacggtacggcgcggctact

SEQ ID NO: 293513 - DNA, 53 bp, Artificial
  Synthetic oligonucleotide
atactcgcatagcgcatgtgctcttgccagaatgcgacgcggtcgaagtggag

SEQ ID NO: 293514 - DNA, 53 bp, Artificial
  Synthetic oligonucleotide
acgactcctccctgacatatcctacaggcagcaacggagctgtgatgcagcac

SEQ ID NO: 293515 - DNA, 59 bp, Artificial
  Synthetic oligonucleotide
ggacacaatctttcatagaactttacgtatcatcttccatacaaagatataacggtaga

SEQ ID NO: 293516 - DNA, 55 bp, Artificial
  Synthetic oligonucleotide
ttcttatttaccttatggtagattctataatagaattaatggtaattatggtact

SEQ ID NO: 293517 - DNA, 53 bp, Artificial
  Synthetic oligonucleotide
agtgatgcaggcgaacagcaactactacctctcctccgacagccctgaggcac

SEQ ID NO: 293518 - DNA, 53 bp, Artificial
  Synthetic oligonucleotide
agcaggtagtgaacctagatgaatatcgaatgacgcagctgccaagtaacccc

SEQ ID NO: 293519 - DNA, 53 bp, Artificial
  Synthetic oligonucleotide
atgctgaatcgactgtatatggccgagaaggccttatctatacttcgcagtgg

SEQ ID NO: 293520 - DNA, 53 bp, Artificial
  Synthetic oligonucleotide
agaatttgggtagaccattcaccgaagaagattggaccttcattgacgaaact

SEQ ID NO: 293521 - DNA, 53 bp, Artificial
  Synthetic oligonucleotide
gcggcttcatgtactgtcgcatcgatggcaacaccagtggctacgacagagat

SEQ ID NO: 293522 - DNA, 53 bp, Artificial
  Synthetic oligonucleotide
gctgcatcgctccccgtttgtgccggaagacaactttcccccgtggcttccgc

SEQ ID NO: 293523 - DNA, 53 bp, Artificial
  Synthetic oligonucleotide
atgctgctgtgggcagtagagtgggcaacgtgactgccagggatcctgaaggc

SEQ ID NO: 293524 - DNA, 53 bp, Artificial
  Synthetic oligonucleotide
acgggaacgaagtcatgatacaatgtttttttacgtttgaagctaataaagga

SEQ ID NO: 293525 - DNA, 53 bp, Artificial
  Synthetic oligonucleotide
agcaggttgaattcgggtgtcctcaggagagacagccccatgctggtcaaacc

SEQ ID NO: 293526 - DNA, 53 bp, Artificial
  Synthetic oligonucleotide
atgctgggaggcccgactggctgccacattctgtgcccctgaacaagttactt

SEQ ID NO: 293527 - DNA, 54 bp, Artificial
  Synthetic oligonucleotide
gatacctccaacctattttacaataaatcttctacggcatacaaaacgtttcgc

SEQ ID NO: 293528 - DNA, 53 bp, Artificial
  Synthetic oligonucleotide
agagaccgtgataccacccgagtatatatcgataggagcgttgtggagctgca

SEQ ID NO: 293529 - DNA, 53 bp, Artificial
  Synthetic oligonucleotide
ggctcttagtggggcgcggggcacaatgcgtgacttcttgagtgagaccgttt

SEQ ID NO: 293530 - DNA, 53 bp, Artificial
  Synthetic oligonucleotide
gagcaaaggcacgttgtttgcatatcacgcctgggaagtggagtgaagcgtcg

SEQ ID NO: 293531 - DNA, 53 bp, Artificial
  Synthetic oligonucleotide
agttgcatgtccgtctcgtacagcgcgcaaatgtctaccaccactgtgatcaa

SEQ ID NO: 293532 - DNA, 53 bp, Artificial
  Synthetic oligonucleotide
gctagatcctgcagcggaggcgagtcttgttgcaggcttccgacgtaggcgtg

SEQ ID NO: 293533 - DNA, 53 bp, Artificial
  Synthetic oligonucleotide
agtttcacctggtttgctactaactgcagctttgcctcctttacccgttttag

SEQ ID NO: 293534 - DNA, 53 bp, Artificial
  Synthetic oligonucleotide
agttagctgcgctcttcatctaataggctaggatgttgctctttcacggcaaa

SEQ ID NO: 293535 - DNA, 53 bp, Artificial
  Synthetic oligonucleotide
cccctcacgggactggcctgcacacctcagctgctcacctcagatttcgcggc

SEQ ID NO: 293536 - DNA, 53 bp, Artificial
  Synthetic oligonucleotide
cccctcatgttcacactcgtgcctccggagttacagcaataagccaggcaacc

SEQ ID NO: 293537 - DNA, 53 bp, Artificial
  Synthetic oligonucleotide
agactacgtgaatgaccccttgcgcgggctactatgagaatgggtgtcggtgc

SEQ ID NO: 293538 - DNA, 50 bp, Artificial
  Synthetic oligonucleotide
tttttcctcgacgttaggggaaaagtgtcggttgtgggtaattctaagaa

SEQ ID NO: 293539 - DNA, 53 bp, Artificial
  Synthetic oligonucleotide
gagccaacatggggttgacgcatatatcattagttcaagcgaccctcatatgt

SEQ ID NO: 293540 - DNA, 53 bp, Artificial
  Synthetic oligonucleotide
gggacgatttgggttgtgctcttgtccgaactggggtgcgactgacactgtgt

SEQ ID NO: 293541 - DNA, 53 bp, Artificial
  Synthetic oligonucleotide
gctaagaatatgttacaaatgtccatagagatccgattatcaataaattctta

SEQ ID NO: 293542 - DNA, 53 bp, Artificial
  Synthetic oligonucleotide
agtggtcacacgatccccgtctaacaatctcgggagttatacgcacatcttta

SEQ ID NO: 293543 - DNA, 53 bp, Artificial
  Synthetic oligonucleotide
gggagcgtgtcttgacgtgagcaaagcgctaacagtcctgtacgagccccagc

SEQ ID NO: 293544 - DNA, 53 bp, Artificial
  Synthetic oligonucleotide
gctaaatatactattgatggtacttttgcacattggctaggtactgttgcagc

SEQ ID NO: 293545 - DNA, 53 bp, Artificial
  Synthetic oligonucleotide
agaggtgcgtccaaccgtgtcaacactttacgtcattgtcgcatccctcctgc

SEQ ID NO: 293546 - DNA, 53 bp, Artificial
  Synthetic oligonucleotide
gagccacccgtaccggtcggaggatacgaattctatatctacaaacgaaacga

SEQ ID NO: 293547 - DNA, 53 bp, Artificial
  Synthetic oligonucleotide
cgaaccgcatctgtgcagtccggacatggtccccggctaggttggtatttccc

SEQ ID NO: 293548 - DNA, 53 bp, Artificial
  Synthetic oligonucleotide
acgatttatatgtggatcatgacccatataactaatagaatatacatgaacaa

SEQ ID NO: 293549 - DNA, 57 bp, Artificial
  Synthetic oligonucleotide
tttttcaggagaaatccgtatatcgatgtctttataaactacgctattggattcaac

SEQ ID NO: 293550 - DNA, 53 bp, Artificial
  Synthetic oligonucleotide
ggcgagagcaattcgtatcgcggcacttgtacttgagagtatcggataagcta

SEQ ID NO: 293551 - DNA, 53 bp, Artificial
  Synthetic oligonucleotide
cgaacatccagtgcgacaggtttcacgagcactcaactgcaaacaagtcggtc

SEQ ID NO: 293552 - DNA, 53 bp, Artificial
  Synthetic oligonucleotide
gcgacaattgaaagtgtcaagagtgtaggagatgtatatactcctgttagtgg

SEQ ID NO: 293553 - DNA, 53 bp, Artificial
  Synthetic oligonucleotide
ggggtacgtagaagcagaacggtaagcaagcgaggagagcacaacaccatgtt

SEQ ID NO: 293554 - DNA, 53 bp, Artificial
  Synthetic oligonucleotide
gcgaaacgtagcagcgaagccgagagaggagcgaaggctgtgcgagagcggag

SEQ ID NO: 293555 - DNA, 53 bp, Artificial
  Synthetic oligonucleotide
ggcaccccacccttctccggttcgcgccgtcatcacaggcgtatgttaacggc

SEQ ID NO: 293556 - DNA, 53 bp, Artificial
  Synthetic oligonucleotide
ccttttaaagtgtctgctaccgctagtatactcgagtcctgcaatgccttagg

SEQ ID NO: 293557 - DNA, 53 bp, Artificial
  Synthetic oligonucleotide
gcctgccatcagattgagggccatgccacgcatccgtgctattcactgtggca

SEQ ID NO: 293558 - DNA, 53 bp, Artificial
  Synthetic oligonucleotide
agcgtctctcgcaagtactgcagcacacgcctcttttgatcggtgtactgcgc

SEQ ID NO: 293559 - DNA, 53 bp, Artificial
  Synthetic oligonucleotide
gcctctaatacggataagtccagcacgcgtccaaatacttacaacatgaagaa

SEQ ID NO: 293560 - DNA, 54 bp, Artificial
  Synthetic oligonucleotide
tctgagctggctccacggtagacctttctcccccccttttgaaaaggttggata

SEQ ID NO: 293561 - DNA, 53 bp, Artificial
  Synthetic oligonucleotide
atctcccaagaggtgtccatcgacgactgccaaggcgtggcaagcgcccataa

SEQ ID NO: 293562 - DNA, 51 bp, Artificial
  Synthetic oligonucleotide
atggcgtttcgttctccgggcccctcgaaccaaaagacgaggcccgtagtg

SEQ ID NO: 293563 - DNA, 53 bp, Artificial
  Synthetic oligonucleotide
acttggagcgattgacctagagagtttatcataaagcattggatccttagaca

SEQ ID NO: 293564 - DNA, 53 bp, Artificial
  Synthetic oligonucleotide
agtatggatcctccgatagcggttcaaccgtgcacaattcaatacccgacctt

SEQ ID NO: 293565 - DNA, 53 bp, Artificial
  Synthetic oligonucleotide
gcaccatcgcatcagcgcgcctcgcttgccccatcagcgcaacagctgtacaa

SEQ ID NO: 293566 - DNA, 53 bp, Artificial
  Synthetic oligonucleotide
gcctacggcttctcggatctcaagtgcggtgcaagtacttctcacgacgcgta

SEQ ID NO: 293567 - DNA, 53 bp, Artificial
  Synthetic oligonucleotide
accgtgaataccttcggcccaaaatacccatatactacacttggagagactca

SEQ ID NO: 293568 - DNA, 53 bp, Artificial
  Synthetic oligonucleotide
gactcttcccaccctcctgacaagtgatgacgagtcgcgcatgcacagagagc

SEQ ID NO: 293569 - DNA, 53 bp, Artificial
  Synthetic oligonucleotide
agctcaactcctccactgaatatccggcctgcctctcgggccctatcgcgggg

SEQ ID NO: 293570 - DNA, 53 bp, Artificial
  Synthetic oligonucleotide
accgcttccatgagagatcctgtcgatgaatgggcccttatacgccggagaaa

SEQ ID NO: 293571 - DNA, 58 bp, Artificial
  Synthetic oligonucleotide
tctgagttaaatgaggattggatcacggataaaatacgtttttcatatgactctttta

SEQ ID NO: 293572 - DNA, 53 bp, Artificial
  Synthetic oligonucleotide
acttcgagtgcgaagaagatgcacgaatctcatccctagaagtcttgcgctct

SEQ ID NO: 293573 - DNA, 53 bp, Artificial
  Synthetic oligonucleotide
cgacaacgcactgcacagatgcatcatcgcacgcgtgtataagctcgtggagc

SEQ ID NO: 293574 - DNA, 53 bp, Artificial
  Synthetic oligonucleotide
agctcctctacgccgtaacgtggcagggcgcgaaggggtgcatgggacacatg

SEQ ID NO: 293575 - DNA, 53 bp, Artificial
  Synthetic oligonucleotide
gggtgcggggtataatatctacacacatgggtaaccacagagggagggtgggg

SEQ ID NO: 293576 - DNA, 53 bp, Artificial
  Synthetic oligonucleotide
gccgttcaccggacagtgtgtcttcggttttgtagtgggcctcgacataggga

SEQ ID NO: 293577 - DNA, 53 bp, Artificial
  Synthetic oligonucleotide
atagaagagccgagtgttatccatccataccaggcgtaaaaagcgttcgttct

SEQ ID NO: 293578 - DNA, 53 bp, Artificial
  Synthetic oligonucleotide
atagacacgcatttgcctccctaaacgtaactacatgtcctgtggacgatact

SEQ ID NO: 293579 - DNA, 53 bp, Artificial
  Synthetic oligonucleotide
gcgctcgcctggtgcatcatgagatggtggtgagtcacgtggtgtccgccata

SEQ ID NO: 293580 - DNA, 53 bp, Artificial
  Synthetic oligonucleotide
ggggaggcagcacgcacgcgccatgccagcgggatgaatgtgagggtctacgc

SEQ ID NO: 293581 - DNA, 53 bp, Artificial
  Synthetic oligonucleotide
agaagagcgtgcaacgcgtcgtgaaacgcaactgtagccgcggggtagtacaa

SEQ ID NO: 293582 - DNA, 56 bp, Artificial
  Synthetic oligonucleotide
ttttcctcccggttaacctcctgcgcgcacccattcatagcatcccggtggggata

SEQ ID NO: 293583 - DNA, 53 bp, Artificial
  Synthetic oligonucleotide
cccggctaggcttgggagtagggtctagactcgcatatgattgacctaacagg

SEQ ID NO: 293584 - DNA, 53 bp, Artificial
  Synthetic oligonucleotide
agcccgcagtgcgagctgtaggtaggagttcaggccttggtccggtctgggga

SEQ ID NO: 293585 - DNA, 53 bp, Artificial
  Synthetic oligonucleotide
agccctcctaacatccccaatgcccccagtcccccaagtatacccggctcacc

SEQ ID NO: 293586 - DNA, 53 bp, Artificial
  Synthetic oligonucleotide
agccgcaacctcctcatcagtgcagcgccgctacacacaccagcagaggtcgt

SEQ ID NO: 293587 - DNA, 53 bp, Artificial
  Synthetic oligonucleotide
ggcaggtgtctgcttgcgctcaacgtgtacagggagacgattggtcgcggagg

SEQ ID NO: 293588 - DNA, 53 bp, Artificial
  Synthetic oligonucleotide
gagctaccatcgacggttttgcggagctgtttgatgcgagccacatcgagtac

SEQ ID NO: 293589 - DNA, 53 bp, Artificial
  Synthetic oligonucleotide
atagccaagaggacaatacgccctcaggaacaccagaaacgcatgcagtaaaa

SEQ ID NO: 293590 - DNA, 53 bp, Artificial
  Synthetic oligonucleotide
cgcacgagcgtgtttcttgtcgtggataactcgtataaactcgtgcgttgaca

SEQ ID NO: 293591 - DNA, 53 bp, Artificial
  Synthetic oligonucleotide
agtcggggataaaacaagcattattggacctcctttaccaactggtggctgtg

SEQ ID NO: 293592 - DNA, 53 bp, Artificial
  Synthetic oligonucleotide
cgaatgagtcgttagtcagccagttcgctcgcttttcgtgtgagccagacgac

SEQ ID NO: 293593 - DNA, 56 bp, Artificial
  Synthetic oligonucleotide
ccgtgagcggtactttaaatcaaagttgcacgaaaattcaaaatgggatgcgtggc

SEQ ID NO: 293594 - DNA, 53 bp, Artificial
  Synthetic oligonucleotide
gagttaagcactagcatcgacttcttggaaacgcctgtatctgggtgtacctg

SEQ ID NO: 293595 - DNA, 53 bp, Artificial
  Synthetic oligonucleotide
gagttaactacttctgcggaaaagagttctcatatggagtcaactctatcaag

SEQ ID NO: 293596 - DNA, 53 bp, Artificial
  Synthetic oligonucleotide
ccctacgacgtcttctgtgcgagcacgttgcaacatccaccctttgccctcca

SEQ ID NO: 293597 - DNA, 53 bp, Artificial
  Synthetic oligonucleotide
gcgagtcgagcacgtttctgttggcggtagatatagatagcgagagaccacac

SEQ ID NO: 293598 - DNA, 53 bp, Artificial
  Synthetic oligonucleotide
ggggcggacagcaacgagttgttgcaaaaggacgtgcgtagcttgctgtccga

SEQ ID NO: 293599 - DNA, 53 bp, Artificial
  Synthetic oligonucleotide
gcgactaaaggcggaaaaaggaatgagcgcacggcagacgtgcaccggagcta

SEQ ID NO: 293600 - DNA, 53 bp, Artificial
  Synthetic oligonucleotide
acctatacacacggcacgcgagcagacacaagacgacgatgcgggagtgccgc

SEQ ID NO: 293601 - DNA, 53 bp, Artificial
  Synthetic oligonucleotide
ccccgtcgtctggggagcggaatactttcctgacagtgccacagtcgaacacc

SEQ ID NO: 293602 - DNA, 53 bp, Artificial
  Synthetic oligonucleotide
tacgtgcgctacgccttccacccatcccacaagggccgctactggacgatgca

SEQ ID NO: 293603 - DNA, 53 bp, Artificial
  Synthetic oligonucleotide
tacgtgcacacgcctctctgtgtgcgcctgccacctttacccaacgagaggaa

SEQ ID NO: 293604 - DNA, 60 bp, Artificial
  Synthetic oligonucleotide
ttttaccaaggcgaagattagtagctgccttgagaggggaaacagccacatagagattga

SEQ ID NO: 293605 - DNA, 53 bp, Artificial
  Synthetic oligonucleotide
ccaggcactttcacttgtacgcgtgcctcactgcatatgttgacgttcatacg

SEQ ID NO: 293606 - DNA, 53 bp, Artificial
  Synthetic oligonucleotide
tacgtgaccacacgcacacctcaactaggggagtgtgcagtcgtacatcatga

SEQ ID NO: 293607 - DNA, 53 bp, Artificial
  Synthetic oligonucleotide
tacggctggctagcacgtaacgccccctggcggttatcacttctgcggtaata

SEQ ID NO: 293608 - DNA, 53 bp, Artificial
  Synthetic oligonucleotide
aagatattcgcagaagactgggtcataagcaaattaccagaggcattttatca

SEQ ID NO: 293609 - DNA, 53 bp, Artificial
  Synthetic oligonucleotide
tacctctccgtgcatcctcctccacggttgcacgtcggatacaaagtgcacgc

SEQ ID NO: 293610 - DNA, 53 bp, Artificial
  Synthetic oligonucleotide
tacctcaaccctctttactccaagctgagggcgcactggaacgcagagctggg

SEQ ID NO: 293611 - DNA, 53 bp, Artificial
  Synthetic oligonucleotide
cgctgctccgcggcgctcctattcgcgctagcaacggcgcaggaagttatggg

SEQ ID NO: 293612 - DNA, 53 bp, Artificial
  Synthetic oligonucleotide
taccggtcaatttgcatgcaggcttaaaccccacatttgggcggtatgtgatc

SEQ ID NO: 293613 - DNA, 53 bp, Artificial
  Synthetic oligonucleotide
taccctgtcgaagcacaaatgtgtcatcgtgcaaggaaaacgcatagggaaag

SEQ ID NO: 293614 - DNA, 53 bp, Artificial
  Synthetic oligonucleotide
tacccgcattaagcgggaaaccctcgcaagaggaaccccatacctcagagacc

SEQ ID NO: 293615 - DNA, 53 bp, Artificial
  Synthetic oligonucleotide
gagttggcttgacccaaaaaattctcgtattgaagcctgtatgggttttgggt

SEQ ID NO: 293616 - DNA, 53 bp, Artificial
  Synthetic oligonucleotide
cgggctatgttgacaataacgaaaatggtacattaccagaaggctactgtggc

SEQ ID NO: 293617 - DNA, 53 bp, Artificial
  Synthetic oligonucleotide
tgtacgcgaatctacccgagcatttcataatacgggcactcggtaccattaca

SEQ ID NO: 293618 - DNA, 53 bp, Artificial
  Synthetic oligonucleotide
tgtacgtgcttgaaggcatcacttaggtgcgtcaacaacatcgagtgatgggg

SEQ ID NO: 293619 - DNA, 53 bp, Artificial
  Synthetic oligonucleotide
taccacaactcgtggcaacgcgggtgctaaggatcgaggtaatgcacacgcga

SEQ ID NO: 293620 - DNA, 53 bp, Artificial
  Synthetic oligonucleotide
tacaggcaagcacgagacgtcgaaggtatcagagttcagcgctggcgtgggta

SEQ ID NO: 293621 - DNA, 53 bp, Artificial
  Synthetic oligonucleotide
tacacggagcccgtctccctcacgtacctctgctactacatctgggcaaacct

SEQ ID NO: 293622 - DNA, 53 bp, Artificial
  Synthetic oligonucleotide
aagccctaatgtagctaaataggcttaaaaggctctagtactcccaaatacct

SEQ ID NO: 293623 - DNA, 53 bp, Artificial
  Synthetic oligonucleotide
tacacaatgatcagacacatagagcctcctcccctcataaccgcccattttcc

SEQ ID NO: 293624 - DNA, 53 bp, Artificial
  Synthetic oligonucleotide
taattcgtctaagggcttcctgtgcagttatagtcataaaatcagcttcgtcc

SEQ ID NO: 293625 - DNA, 53 bp, Artificial
  Synthetic oligonucleotide
tagctcagccagtgcgtgtgtgcctcagtcgattcttaactaaggggccctct

SEQ ID NO: 293626 - DNA, 60 bp, Artificial
  Synthetic oligonucleotide
cattctcaggtccggtccgattatataatcttccagttagataaattagatcacatgtct

SEQ ID NO: 293627 - DNA, 49 bp, Artificial
  Synthetic oligonucleotide
aaaaccttcgatcgaaaattttacttgcgaatttcgggaaaataaaata

SEQ ID NO: 293628 - DNA, 53 bp, Artificial
  Synthetic oligonucleotide
cgctttgtgtatcgactgaaagtatcttctaaagagccgtccccttgctcgaa

SEQ ID NO: 293629 - DNA, 53 bp, Artificial
  Synthetic oligonucleotide
cagggatccctctcggctccggcgctattagccaagttgtgcagtgccgtcta

SEQ ID NO: 293630 - DNA, 53 bp, Artificial
  Synthetic oligonucleotide
tagccagctgacccgcccatgcatttaccgtgatttctcttacgttgtgacag

SEQ ID NO: 293631 - DNA, 53 bp, Artificial
  Synthetic oligonucleotide
cgggcaagatcaccactcaacgccgtacacaaggccagcgcaccttgggagtg

SEQ ID NO: 293632 - DNA, 53 bp, Artificial
  Synthetic oligonucleotide
cgctttgctgctacggtttagctgggtgcgaatgagcaaaagcgtacatatgt

SEQ ID NO: 293633 - DNA, 53 bp, Artificial
  Synthetic oligonucleotide
tagcatgcagtggcccaaaggttgcaatctcctggaacgggagtcaaggagcg

SEQ ID NO: 293634 - DNA, 53 bp, Artificial
  Synthetic oligonucleotide
aaatattgtggtgcttggtacggttgggcatgacttttctcgagattgtctcc

SEQ ID NO: 293635 - DNA, 53 bp, Artificial
  Synthetic oligonucleotide
ccaggaggctcacaggtccatgtcctgcattcacccacttggtcccccagctg

SEQ ID NO: 293636 - DNA, 53 bp, Artificial
  Synthetic oligonucleotide
ccaagctagcggccgactgtggaaatgacgcacggatatcgtccacacgtctc

SEQ ID NO: 293637 - DNA, 53 bp, Artificial
  Synthetic oligonucleotide
cgggccctgatgagattaccatctcggaagtgaaacacatggacatgttaaaa

SEQ ID NO: 293638 - DNA, 60 bp, Artificial
  Synthetic oligonucleotide
ccgtcccacgcggtgcagtctccccgtgacactgctgttatcctcgcactgtaccacagc

SEQ ID NO: 293639 - DNA, 53 bp, Artificial
  Synthetic oligonucleotide
tgggcatgaatataccattcgaggcccatctatacacgtggtctctctcccaa

SEQ ID NO: 293640 - DNA, 53 bp, Artificial
  Synthetic oligonucleotide
cgcttctgccctcaaaccttctgcgcgcgagtggaagtctctagtgacgcatc

SEQ ID NO: 293641 - DNA, 53 bp, Artificial
  Synthetic oligonucleotide
aagagacacgagggtagtagatatgaaactaaagagacacgagggtagtagat

SEQ ID NO: 293642 - DNA, 53 bp, Artificial
  Synthetic oligonucleotide
tgggcttaccgaaagtgcgaagaacctttcgatagcattgtcagttcgatttc

SEQ ID NO: 293643 - DNA, 53 bp, Artificial
  Synthetic oligonucleotide
tacttggcgcaccgctgtgtacctctgggtgcgtgggtacgcgtctcgcgttg

SEQ ID NO: 293644 - DNA, 53 bp, Artificial
  Synthetic oligonucleotide
aagaggattgaaggtaccataatagttaccaaggatggaactcttggaggcag

SEQ ID NO: 293645 - DNA, 53 bp, Artificial
  Synthetic oligonucleotide
tggtagagacggacgctacgatctctaagagtacccacgcgcacccgcccaca

SEQ ID NO: 293646 - DNA, 53 bp, Artificial
  Synthetic oligonucleotide
tggtgcacagtcggcaccacagacaacgcgctcataggaggagcgaggaccat

SEQ ID NO: 293647 - DNA, 53 bp, Artificial
  Synthetic oligonucleotide
tacgtgtgtcgtttcatctgcgtgcagtcacgtgtgcgtaaaccttctgggat

SEQ ID NO: 293648 - DNA, 53 bp, Artificial
  Synthetic oligonucleotide
aaggcatagagactcagcctgtgttcaactttgtagggtattatttataatat

SEQ ID NO: 293649 - DNA, 60 bp, Artificial
  Synthetic oligonucleotide
gcatagtctaataacacaagctacttcgatgcaaagagtcaattgaattaatccgcagat

SEQ ID NO: 293650 - DNA, 53 bp, Artificial
  Synthetic oligonucleotide
gttgcgtggacggtgggaacggacccgcgcgggatgtgtctgctggacgagga

SEQ ID NO: 293651 - DNA, 53 bp, Artificial
  Synthetic oligonucleotide
gttgcgagtcggttggtgcatcggggtccttgcagatgtagccgctgatagcc

SEQ ID NO: 293652 - DNA, 53 bp, Artificial
  Synthetic oligonucleotide
gttcttttcatacacaccggaagcaccactaaggcaggccaactggcgttacg

SEQ ID NO: 293653 - DNA, 53 bp, Artificial
  Synthetic oligonucleotide
gttctaccttacaccagagagggagcgagcgggaaaagtaaagtgcggcgagg

SEQ ID NO: 293654 - DNA, 53 bp, Artificial
  Synthetic oligonucleotide
aaggctgccacatcgccactcctcagaagaaacgcgtacggggcatcctcgcg

SEQ ID NO: 293655 - DNA, 53 bp, Artificial
  Synthetic oligonucleotide
ctgttcgcaccatcatgtatagagaaacacgcacaggtgtgatgcctcctttg

SEQ ID NO: 293656 - DNA, 53 bp, Artificial
  Synthetic oligonucleotide
cgtggggtcgatgcacactctcacgtgagaatcgccaatgcacatggaggggt

SEQ ID NO: 293657 - DNA, 53 bp, Artificial
  Synthetic oligonucleotide
aagggattgagacggtgcgacgcgatcagtgccccgccacggcgctacttgta

SEQ ID NO: 293658 - DNA, 53 bp, Artificial
  Synthetic oligonucleotide
tgtgtttgctggcctaaagggtcctggatccaccaacaaggggcttactctat

SEQ ID NO: 293659 - DNA, 53 bp, Artificial
  Synthetic oligonucleotide
gttatgtatgcgcgtgttcttgtgtgttagcgtccgcccgccatgtactgcgg

SEQ ID NO: 293660 - DNA, 58 bp, Artificial
  Synthetic oligonucleotide
gcattaataaaaacgtacttatcttaggtgctattcgtgctccgcatttaacactagc

SEQ ID NO: 293661 - DNA, 53 bp, Artificial
  Synthetic oligonucleotide
gttatcctgagggcctcgtcctatctatgcaagtccccagcgtgtgttcctgt

SEQ ID NO: 293662 - DNA, 53 bp, Artificial
  Synthetic oligonucleotide
aaggggagcagacaattttatggattcgccaaatgtaggaaggtgcagacgaa

SEQ ID NO: 293663 - DNA, 53 bp, Artificial
  Synthetic oligonucleotide
gttagcccttcccaatgactctgcgtttcaaagcgtaatcgtaggatgctgat

SEQ ID NO: 293664 - DNA, 53 bp, Artificial
  Synthetic oligonucleotide
gtgtttcttgcgagcccattgctggattgagcgccagaggcgatcgtacgtct

SEQ ID NO: 293665 - DNA, 53 bp, Artificial
  Synthetic oligonucleotide
ccaacggccgtgctcaatcacaagacagcggatcacactcagcagacacaagg

SEQ ID NO: 293666 - DNA, 53 bp, Artificial
  Synthetic oligonucleotide
cacaagtcgaggaccggccaaacacaggcgcactagactggtaagtggctccg

SEQ ID NO: 293667 - DNA, 53 bp, Artificial
  Synthetic oligonucleotide
cttcagcagagcactctgcagtaccaatacccgccctttgaccggatcgctgt

SEQ ID NO: 293668 - DNA, 53 bp, Artificial
  Synthetic oligonucleotide
cctcggctgtgttccatcgagtatctcgtgaccgccgcaacgtgtctgggaac

SEQ ID NO: 293669 - DNA, 53 bp, Artificial
  Synthetic oligonucleotide
gtgtacggtggcgtaggaagctgataagaccccatagacgggttgcgggctgt

SEQ ID NO: 293670 - DNA, 53 bp, Artificial
  Synthetic oligonucleotide
taatgtgcgttcgtggggcccatacagtgttggctgcgcacgtggactggcac

SEQ ID NO: 293671 - DNA, 54 bp, Artificial
  Synthetic oligonucleotide
tttgcatggtaaggtttagcgtttactttcgaatgaaactttgtgctccaccgt

SEQ ID NO: 293672 - DNA, 53 bp, Artificial
  Synthetic oligonucleotide
aagcgacaattggcccggatagtagtgaggcgggggactgccaaggggagcta

SEQ ID NO: 293673 - DNA, 53 bp, Artificial
  Synthetic oligonucleotide
ccagtattctcgtaccctttgttgtgcccacgaacgaaaacgtttgtgcatac

SEQ ID NO: 293674 - DNA, 53 bp, Artificial
  Synthetic oligonucleotide
ctggaagtattcgactttgcgcatgtgaagcgagcggagcgacaattcgaatg

SEQ ID NO: 293675 - DNA, 53 bp, Artificial
  Synthetic oligonucleotide
cacattccggtacatggccccggaggtctacaagggtgacccccactcactga

SEQ ID NO: 293676 - DNA, 53 bp, Artificial
  Synthetic oligonucleotide
taagtccgatgagcgcttacgtcctgaagcagataagatctcacttcctatag

SEQ ID NO: 293677 - DNA, 53 bp, Artificial
  Synthetic oligonucleotide
cagtagcgaacttgggtgtccgctgacatctcgggcacgtcagagggcatggc

SEQ ID NO: 293678 - DNA, 53 bp, Artificial
  Synthetic oligonucleotide
tgtccaatggcccacaacataaaccaactggacccctccgtgaagttctctag

SEQ ID NO: 293679 - DNA, 53 bp, Artificial
  Synthetic oligonucleotide
taaggcagggaacggagaggggtgatgtacaatagtgcgtgcctccggtgtac

SEQ ID NO: 293680 - DNA, 53 bp, Artificial
  Synthetic oligonucleotide
taaggaagctcatcgttaggcgcaaaaaacattaccgtgggcgcaaggtctgg

SEQ ID NO: 293681 - DNA, 53 bp, Artificial
  Synthetic oligonucleotide
ctggcttagttaggcacatgggttttaggccggtagttcgtggtattgctaaa

SEQ ID NO: 293682 - DNA, 60 bp, Artificial
  Synthetic oligonucleotide
gcatagggagaatcggacggacctatgatggaggcggtccatcggaaaaggttctcatca

SEQ ID NO: 293683 - DNA, 53 bp, Artificial
  Synthetic oligonucleotide
cacagctacttgcactctctttgcggatctcgagctagttatttgcgaaaacc

SEQ ID NO: 293684 - DNA, 53 bp, Artificial
  Synthetic oligonucleotide
aagctggacgcatacttgcgcacagcgtactggtcgagaccagggttcgcttc

SEQ ID NO: 293685 - DNA, 53 bp, Artificial
  Synthetic oligonucleotide
ctgtaagcgggtgccatgcgcgccggttgagacgagggtcgaacagaaacatt

SEQ ID NO: 293686 - DNA, 53 bp, Artificial
  Synthetic oligonucleotide
aaaggagcaccgagtgaagaaaagagttaggcatgtgcttgcgggaggagggg

SEQ ID NO: 293687 - DNA, 53 bp, Artificial
  Synthetic oligonucleotide
cacagatgcctcatttggcgacgacctttgcgtaggtttctcctcttgtgttg

SEQ ID NO: 293688 - DNA, 53 bp, Artificial
  Synthetic oligonucleotide
taaaccgattctggacgttgtgacgcttctgatggagctctcgaggcacggag

SEQ ID NO: 293689 - DNA, 53 bp, Artificial
  Synthetic oligonucleotide
gttttgattgtcgcttgtgggaggatcccaataattattaaactcgcgcaagc

SEQ ID NO: 293690 - DNA, 53 bp, Artificial
  Synthetic oligonucleotide
cagtgaggcctacagtgtagtctggcgttcattatgattacgtgggatgtgat

SEQ ID NO: 293691 - DNA, 53 bp, Artificial
  Synthetic oligonucleotide
aaagcgatttgtgcatcgagatgcgaacaattgagagcaatgttcacttgggg

SEQ ID NO: 293692 - DNA, 53 bp, Artificial
  Synthetic oligonucleotide
tctaggtgaagtacgatcacttactagtgtagtaaacttacgccaacaattct

SEQ ID NO: 293693 - DNA, 58 bp, Artificial
  Synthetic oligonucleotide
tttctctttcgtcacgtgtttcaaccttgacttacgctcgcgcgctgggctcgattta

SEQ ID NO: 293694 - DNA, 53 bp, Artificial
  Synthetic oligonucleotide
cggatctccgaaggttgtcgatgccagcaaacccgtgtgagagccgccgaggc

SEQ ID NO: 293695 - DNA, 53 bp, Artificial
  Synthetic oligonucleotide
ctactcgttaacatcggggagggtgagtcccgaaaatggtggcgtcggtagcg

SEQ ID NO: 293696 - DNA, 53 bp, Artificial
  Synthetic oligonucleotide
tcgtcctttggttcgcctccctccttcggcgcttcatcggttaaccgtcaaga

SEQ ID NO: 293697 - DNA, 53 bp, Artificial
  Synthetic oligonucleotide
tgcatcctataacggcgcggtgccagctgcacgagaagcactcagcggcttgt

SEQ ID NO: 293698 - DNA, 53 bp, Artificial
  Synthetic oligonucleotide
tcgtcaagcattgaggccgtcgtgctgttggttcgatcggttagtgcgatgac

SEQ ID NO: 293699 - DNA, 53 bp, Artificial
  Synthetic oligonucleotide
ctccaagtagacgccgctcctgagaacgtcgaggcagatggggagaccgagca

SEQ ID NO: 293700 - DNA, 53 bp, Artificial
  Synthetic oligonucleotide
ctccacactgctcaaggtaactgtgaagctctaaatcctctgtacgtagcagc

SEQ ID NO: 293701 - DNA, 53 bp, Artificial
  Synthetic oligonucleotide
ctccacgtgtcgagcgcctctgtttgggtagtgcagcgaataatgcacatcga

SEQ ID NO: 293702 - DNA, 53 bp, Artificial
  Synthetic oligonucleotide
tcgtaatttccattctgcgttatgtatctcacccatggaagagcttgatatcc

SEQ ID NO: 293703 - DNA, 53 bp, Artificial
  Synthetic oligonucleotide
cggagtttgatccgtaagagtttttcatttatatggcggttcatttagaaaac

SEQ ID NO: 293704 - DNA, 55 bp, Artificial
  Synthetic oligonucleotide
agggctaaaattcgtggcattaaataggttccaatggtttggctcgcgccaactg

SEQ ID NO: 293705 - DNA, 53 bp, Artificial
  Synthetic oligonucleotide
tgcatctacagataacccgcggacctctaaagtggtcgactcaggcgcagagc

SEQ ID NO: 293706 - DNA, 53 bp, Artificial
  Synthetic oligonucleotide
tcggctgaaagctaacggcattcgggacggacctctgccccagtgtagagcga

SEQ ID NO: 293707 - DNA, 53 bp, Artificial
  Synthetic oligonucleotide
tcgcttgcagctgtcggcggttccacgagcttggtaacctgtgccgtgagggg

SEQ ID NO: 293708 - DNA, 53 bp, Artificial
  Synthetic oligonucleotide
tcgccagttaaataagtattgtggctcgaagctatccagtagtgtgaaatagg

SEQ ID NO: 293709 - DNA, 53 bp, Artificial
  Synthetic oligonucleotide
cactagacgacgatatcttagcgtaagatcagagcgtgaatgctaggaacgcg

SEQ ID NO: 293710 - DNA, 53 bp, Artificial
  Synthetic oligonucleotide
ctacgatatgtacctacgtggggaggagatctgcagcggtgcacagcgtgtcc

SEQ ID NO: 293711 - DNA, 53 bp, Artificial
  Synthetic oligonucleotide
tcgcacaaccatacagtcaacgccacctactacgtgaaccgcagtaactacat

SEQ ID NO: 293712 - DNA, 53 bp, Artificial
  Synthetic oligonucleotide
cagcgcggacacacaaagcgagcatgtttgcgtgccagtggcaaacaaggggc

SEQ ID NO: 293713 - DNA, 53 bp, Artificial
  Synthetic oligonucleotide
tcgagctctagtaatgagtagctatacctatctaagtctgacatggattactg

SEQ ID NO: 293714 - DNA, 53 bp, Artificial
  Synthetic oligonucleotide
cagctgaatgggagacagtccgacaggaatttcggtacgcggtggggaaggca

SEQ ID NO: 293715 - DNA, 58 bp, Artificial
  Synthetic oligonucleotide
gcattttgtagaagctatctggttagtaattcactttactttctatactctataagaa

SEQ ID NO: 293716 - DNA, 53 bp, Artificial
  Synthetic oligonucleotide
tgaaaccgccggtgggtcaggaaacgactcgacacgaagttgcatgtcgggtg

SEQ ID NO: 293717 - DNA, 53 bp, Artificial
  Synthetic oligonucleotide
tctttgggcttgtgtacagctatcttggcgtcgggtagggccgttgtttgtcg

SEQ ID NO: 293718 - DNA, 53 bp, Artificial
  Synthetic oligonucleotide
tctttcttcgcgggctgcttgggtggcccactacaaatgctacgcttttgctg

SEQ ID NO: 293719 - DNA, 53 bp, Artificial
  Synthetic oligonucleotide
tgaagatcaggagcttcaattgacgagtattgactgcgatcccattcggaagc

SEQ ID NO: 293720 - DNA, 53 bp, Artificial
  Synthetic oligonucleotide
cagacgccaatcctgagagggcatccggcgtgttcatccctccatacgatagc

SEQ ID NO: 293721 - DNA, 53 bp, Artificial
  Synthetic oligonucleotide
tctgcgggaaaagacccgactggagaaatctgagcttaccaccgcaaccgcca

SEQ ID NO: 293722 - DNA, 53 bp, Artificial
  Synthetic oligonucleotide
cagaagactctctctccctgtggcccaaccgcgtaggagaagttgcgcggaga

SEQ ID NO: 293723 - DNA, 53 bp, Artificial
  Synthetic oligonucleotide
tgaccacatcactactgtgcgtgcgcaacgatgacagaacggctacggtggga

SEQ ID NO: 293724 - DNA, 53 bp, Artificial
  Synthetic oligonucleotide
cagaacagcgggagaggtgtaggattccggggcaattaccggggaaatggcgg

SEQ ID NO: 293725 - DNA, 53 bp, Artificial
  Synthetic oligonucleotide
tgataggtcgaacttagacaagctgaagaacgtacgtagctcgtcgttgtgtg

SEQ ID NO: 293726 - DNA, 59 bp, Artificial
  Synthetic oligonucleotide
gagttgttgattcctcagggacgacaataacttatacatgcacaaccacccccgacatg

SEQ ID NO: 293727 - DNA, 53 bp, Artificial
  Synthetic oligonucleotide
tctcgttctctcgtacgcgcacatacgcacttgcttcacacaaggaaacccac

SEQ ID NO: 293728 - DNA, 53 bp, Artificial
  Synthetic oligonucleotide
ctcaatgacatagtgctgccgctccgtcttggatgtggcagaggaccgaatga

SEQ ID NO: 293729 - DNA, 53 bp, Artificial
  Synthetic oligonucleotide
ccacagacccatcaatctttagacggtcagggagagattaattggctttctca

SEQ ID NO: 293730 - DNA, 53 bp, Artificial
  Synthetic oligonucleotide
ctagatcgtagcacaaacaggatccagtacaactcaacatatctcacagggtc

SEQ ID NO: 293731 - DNA, 53 bp, Artificial
  Synthetic oligonucleotide
tctcctgcattcgttgcctacaggctatccgcggaggattgacaaccaaagtc

SEQ ID NO: 293732 - DNA, 53 bp, Artificial
  Synthetic oligonucleotide
tctcctatacagcgtaagtctcctattcagtgaagactaagtggccaattact

SEQ ID NO: 293733 - DNA, 52 bp, Artificial
  Synthetic oligonucleotide
aaccgcgtcttcaccctttcaagcgaaaccacctcccttgcccacttttggc

SEQ ID NO: 293734 - DNA, 53 bp, Artificial
  Synthetic oligonucleotide
tgcaacaacacgaaaagaaagttcccggtgcgcgagggttcatctgcgacatg

SEQ ID NO: 293735 - DNA, 53 bp, Artificial
  Synthetic oligonucleotide
tctccgacctcgacgacaatcaaagagtcctcgtatgccccatctgctccaac

SEQ ID NO: 293736 - DNA, 53 bp, Artificial
  Synthetic oligonucleotide
ctcacgtgaatgtgtacgtctgtgtcgattcctagcaacgacgtggaggagcg

SEQ ID NO: 293737 - DNA, 52 bp, Artificial
  Synthetic oligonucleotide
cggtggttttggtaattactttttaccaatactatgtggttcttctgaacta

SEQ ID NO: 293738 - DNA, 54 bp, Artificial
  Synthetic oligonucleotide
gcataaatggaaagaacccctattaatcctgcgttttgtccttcgggcgtttca

SEQ ID NO: 293739 - DNA, 53 bp, Artificial
  Synthetic oligonucleotide
cctacactctgatgctgggaggcccgactggctgccacattctgtgcccctga

SEQ ID NO: 293740 - DNA, 53 bp, Artificial
  Synthetic oligonucleotide
aacgttattagtattctagcgtataactagacctaggggaggtgcgtagtcgc

SEQ ID NO: 293741 - DNA, 53 bp, Artificial
  Synthetic oligonucleotide
ctcgtcatgtctctctacagacgacaataccagcccgtccatgacacggggaa

SEQ ID NO: 293742 - DNA, 53 bp, Artificial
  Synthetic oligonucleotide
tattcactgttgtagtgtacacagaaagcctgtttgcgctagtcacgatgttt

SEQ ID NO: 293743 - DNA, 53 bp, Artificial
  Synthetic oligonucleotide
tatgtcaccgccaccacacgttggctcctctggtcgcgtaaggatgtaaaacg

SEQ ID NO: 293744 - DNA, 53 bp, Artificial
  Synthetic oligonucleotide
cacgcctctcaatgctccgagacgcagtgggatgcacgtgaaacacgttgggg

SEQ ID NO: 293745 - DNA, 53 bp, Artificial
  Synthetic oligonucleotide
tatgctgtcgagcctaccaaagctgaagcgtgtacgagaagagggcacaggtg

SEQ ID NO: 293746 - DNA, 53 bp, Artificial
  Synthetic oligonucleotide
tatgctgcgcaccatgcacgtagcctcccactccttgttcgcgcgcttggatg

SEQ ID NO: 293747 - DNA, 53 bp, Artificial
  Synthetic oligonucleotide
ctaaacaagctggtcggaatctaccgccgtcattcttatacatgctgctactc

SEQ ID NO: 293748 - DNA, 53 bp, Artificial
  Synthetic oligonucleotide
aactatattaaagttggtatgaggtgtttcagacgtgccaccttcgatcttac

SEQ ID NO: 293749 - DNA, 54 bp, Artificial
  Synthetic oligonucleotide
tttatgagagaccgttcagaaatttaatgttttaaccgctggctagaacttaag

SEQ ID NO: 293750 - DNA, 53 bp, Artificial
  Synthetic oligonucleotide
tatgatacaaatggatttacagtccatcgcttttgaccactcagccacctccc

SEQ ID NO: 293751 - DNA, 53 bp, Artificial
  Synthetic oligonucleotide
tatgaggacgcattcgaggtcgatttctcctctgcagtctatctccgcgccag

SEQ ID NO: 293752 - DNA, 53 bp, Artificial
  Synthetic oligonucleotide
tatccccttgtcaggatcctctcgtagcttagcacacatcctgagcaccgctg

SEQ ID NO: 293753 - DNA, 53 bp, Artificial
  Synthetic oligonucleotide
tatacttgtttgcgtctgcgagtaaggactgcactgtggcgctctggcgtgtg

SEQ ID NO: 293754 - DNA, 53 bp, Artificial
  Synthetic oligonucleotide
tagtgatgaggagtgcacagcacagtggccgtctaaactgagactgaccaatt

SEQ ID NO: 293755 - DNA, 53 bp, Artificial
  Synthetic oligonucleotide
ctctctggatcatgaatgtcgctgggcggtcgtcgcgcctgtattcgcctcca

SEQ ID NO: 293756 - DNA, 53 bp, Artificial
  Synthetic oligonucleotide
tagtcgatgtcgtatcgagtgtagagagttgggatacgtctcaggagccggtc

SEQ ID NO: 293757 - DNA, 53 bp, Artificial
  Synthetic oligonucleotide
taggtacccagccttcttacattgccatagacatactccgatcagtagagtgg

SEQ ID NO: 293758 - DNA, 53 bp, Artificial
  Synthetic oligonucleotide
cacgagatacgaatcggggaagtacacctgcgataggtggtaccagtactcga

SEQ ID NO: 293759 - DNA, 53 bp, Artificial
  Synthetic oligonucleotide
aacttgtcatggagatgggtctggatggtgcactcacgggcaaggcgacccca

SEQ ID NO: 293760 - DNA, 60 bp, Artificial
  Synthetic oligonucleotide
tttagattcctacacgctactggagcatcatgtgttttcctatgcctattccttcatatt

SEQ ID NO: 293761 - DNA, 53 bp, Artificial
  Synthetic oligonucleotide
tccgtccacgttcgtgtcgtggattgtaaaggagcgggagtgcaaggcgcgac

SEQ ID NO: 293762 - DNA, 53 bp, Artificial
  Synthetic oligonucleotide
tgcgtagcggcagctcgctgacaaaccagaatagcggcccgtgtgcccctggc

SEQ ID NO: 293763 - DNA, 53 bp, Artificial
  Synthetic oligonucleotide
tccctgcacgggttaactttatatcacaccaaggggattctgtagacacgcat

SEQ ID NO: 293764 - DNA, 53 bp, Artificial
  Synthetic oligonucleotide
tccccaccacattcggccacacaggcaggacgcactgactgcgtatcggtcgc

SEQ ID NO: 293765 - DNA, 53 bp, Artificial
  Synthetic oligonucleotide
tcccaaagaagatcacgagagtatacaaactcactaccggtcgggatgtctgt

SEQ ID NO: 293766 - DNA, 53 bp, Artificial
  Synthetic oligonucleotide
ctcgaggcctcgctcactcacgagcttcagacgttgggctcacggtgtgactt

SEQ ID NO: 293767 - DNA, 53 bp, Artificial
  Synthetic oligonucleotide
tccaatccagtgctccattcaaggcatagagactcagcctatgttcaactttg

SEQ ID NO: 293768 - DNA, 53 bp, Artificial
  Synthetic oligonucleotide
ctcgagttgcttctcgtaggggacggatggggttgatgcagacgcagcgtcac

SEQ ID NO: 293769 - DNA, 53 bp, Artificial
  Synthetic oligonucleotide
cacgtaggcaatgtggttatacaggtcggcgaagaagtctctccggaagttat

SEQ ID NO: 293770 - DNA, 53 bp, Artificial
  Synthetic oligonucleotide
tcatgccacggcgggttcgtctacccttgttctctgtcatgcagctgtctcga

SEQ ID NO: 293771 - DNA, 59 bp, Artificial
  Synthetic oligonucleotide
gccaagttaccgttcgatcccaaatcactgcagtagctgttcaccagcccacggtctcc

SEQ ID NO: 293772 - DNA, 53 bp, Artificial
  Synthetic oligonucleotide
tcatcgtctgctgcggctagcttcacgcacttgcgcggctgatgcccacaccg

SEQ ID NO: 293773 - DNA, 53 bp, Artificial
  Synthetic oligonucleotide
tcagctccgaaaggttgtaggcggaggcaaaggccacatttacgttgttgaga

SEQ ID NO: 293774 - DNA, 53 bp, Artificial
  Synthetic oligonucleotide
ctcgcaccaggtatgagtgccattgggccctctcgtatgtggtcccacagcga

SEQ ID NO: 293775 - DNA, 53 bp, Artificial
  Synthetic oligonucleotide
tcacgcgtactgcagcatcacgggtatcagcggaccaatgcaaatcgcgggtc

SEQ ID NO: 293776 - DNA, 53 bp, Artificial
  Synthetic oligonucleotide
aacgtcagcgaggatgctgctgtgggcagtagagtgggcaacgtgactgccag

SEQ ID NO: 293777 - DNA, 53 bp, Artificial
  Synthetic oligonucleotide
tgctatggaagttcgaagggaagcatctgtggcgacagaaccccaaccagcga

SEQ ID NO: 293778 - DNA, 53 bp, Artificial
  Synthetic oligonucleotide
tcaacgaaagtgactggtccgcggtcagtgctgtgacggcaatttaattaagt

SEQ ID NO: 293779 - DNA, 53 bp, Artificial
  Synthetic oligonucleotide
aacaacgctgatacgactgggtcaacgcacatgcatcgttgtactgcgtatag

SEQ ID NO: 293780 - DNA, 53 bp, Artificial
  Synthetic oligonucleotide
tcaaagtttctaaggtgtcctcgacattcaaaatccgatcctgtaattgcctt

SEQ ID NO: 293781 - DNA, 53 bp, Artificial
  Synthetic oligonucleotide
ctaagccgttcgcggtgccactcatttgggtgttcctccactgccgattggtc

SEQ ID NO: 293782 - DNA, 60 bp, Artificial
  Synthetic oligonucleotide
tttactatatggtgcatatgggtgcaactttactatatggtgcatatgggtgcaacttta

SEQ ID NO: 293783 - DNA, 53 bp, Artificial
  Synthetic oligonucleotide
ctaagcacacgtgctatcccctcccttgtatgcctcgcgataaagccctcccc

SEQ ID NO: 293784 - DNA, 53 bp, Artificial
  Synthetic oligonucleotide
gaaatgggagcgcaacggccaagcttggggtcagaaaacacggcggtgacttt

SEQ ID NO: 293785 - DNA, 53 bp, Artificial
  Synthetic oligonucleotide
aaacgagggtcgaggtctgaagcaaggaggccttaagtggcagataaaggcct

SEQ ID NO: 293786 - DNA, 53 bp, Artificial
  Synthetic oligonucleotide
gtcgaatacagttggaacgtactcggatgggaattcgttcctggcatagacaa

SEQ ID NO: 293787 - DNA, 53 bp, Artificial
  Synthetic oligonucleotide
caagaaaacggagcggtccatgaagaggcgtccttggtgtacacagaggttgt

SEQ ID NO: 293788 - DNA, 53 bp, Artificial
  Synthetic oligonucleotide
cggtacgctgcctgcggagtggagctcttggaaatcactagtgaacgtctttc

SEQ ID NO: 293789 - DNA, 53 bp, Artificial
  Synthetic oligonucleotide
ttcgcacaatgaagaagggcggtgcgatgggactgacggcatagggcacgact

SEQ ID NO: 293790 - DNA, 53 bp, Artificial
  Synthetic oligonucleotide
cgtagatcgcggacgctagcttggagcggtacgggttccatacgcggaactcg

SEQ ID NO: 293791 - DNA, 53 bp, Artificial
  Synthetic oligonucleotide
ggtttccgagattccatctgaccacgagaccgttgagcctacagtctctgatc

SEQ ID NO: 293792 - DNA, 53 bp, Artificial
  Synthetic oligonucleotide
catttagggctgcggttgattcattctgttgagtcaaaagctgtgagtgaacg

SEQ ID NO: 293793 - DNA, 57 bp, Artificial
  Synthetic oligonucleotide
tttaatgacctgggctgttatccctattggtgataatttggtatttgttgatcttaa

SEQ ID NO: 293794 - DNA, 53 bp, Artificial
  Synthetic oligonucleotide
acaagcgcgtccatcaaggacgggtagccgctcgtgtaatacatgttggatcg

SEQ ID NO: 293795 - DNA, 53 bp, Artificial
  Synthetic oligonucleotide
acaacggtgccacagcctaggtatccgggagtctttgtcccgcatcctctttt

SEQ ID NO: 293796 - DNA, 53 bp, Artificial
  Synthetic oligonucleotide
ttcctattcgacctacattaggacctcctgttatgatacacagactccctact

SEQ ID NO: 293797 - DNA, 53 bp, Artificial
  Synthetic oligonucleotide
gtcggcccatccacctcagtcaatccgacgtccggcgtgtgtgtaggcggtcg

SEQ ID NO: 293798 - DNA, 53 bp, Artificial
  Synthetic oligonucleotide
caagacccttttacgcacacgtagaggaaggcggacatgcactgagacatcga

SEQ ID NO: 293799 - DNA, 53 bp, Artificial
  Synthetic oligonucleotide
ttccgtgtgtgtcacatgcaaagtgtatgacttgttcaggttaaaataagcgc

SEQ ID NO: 293800 - DNA, 53 bp, Artificial
  Synthetic oligonucleotide
caagagtggttctggcaagtcgaaacataaggcatccaaaaggcgaattagag

SEQ ID NO: 293801 - DNA, 53 bp, Artificial
  Synthetic oligonucleotide
ggttcttcggtactgcagaggggtgccagtacggagacaagtgccactacatg

SEQ ID NO: 293802 - DNA, 53 bp, Artificial
  Synthetic oligonucleotide
gtgaaggaacgtgtggagagaaccgggaggaaggctgccagtgtgtggataag

SEQ ID NO: 293803 - DNA, 53 bp, Artificial
  Synthetic oligonucleotide
aatgtgcgtcttgcactctgccaacgagagtacaaacacatacacgtagtacg

SEQ ID NO: 293804 - DNA, 59 bp, Artificial
  Synthetic oligonucleotide
gataaattagatcacatgtcttctagtgctttgagattagactcaatttttacaaaaac

SEQ ID NO: 293805 - DNA, 53 bp, Artificial
  Synthetic oligonucleotide
ttccaccgcagggtcatgagtggtgcgcttgggctggtgagaaacggaccgtg

SEQ ID NO: 293806 - DNA, 53 bp, Artificial
  Synthetic oligonucleotide
gtctgatgccctaccctaatggtatttaaagataacctctacagcggtagggc

SEQ ID NO: 293807 - DNA, 53 bp, Artificial
  Synthetic oligonucleotide
caagccacagctaaggaagtacgagaacaactctctagggctattgacgagac

SEQ ID NO: 293808 - DNA, 53 bp, Artificial
  Synthetic oligonucleotide
ttccctgttcgcgcctcgttggcgagcacaggtgcgcagaggcaagccgagac

SEQ ID NO: 293809 - DNA, 53 bp, Artificial
  Synthetic oligonucleotide
ttcccttcatggagagccgtggacaattaaccgccaatcaatccgtgtgacgg

SEQ ID NO: 293810 - DNA, 53 bp, Artificial
  Synthetic oligonucleotide
gtctagtcgcccgtgttttctgtgtggaccattgggaacacttgatcgtcacg

SEQ ID NO: 293811 - DNA, 53 bp, Artificial
  Synthetic oligonucleotide
gaaacccttctgtcttactctcgccaatcacccgcggagcattgccctttaca

SEQ ID NO: 293812 - DNA, 53 bp, Artificial
  Synthetic oligonucleotide
catcttcagcttccttctcggaggaaccccttccgaagtgaaaccaatcaccg

SEQ ID NO: 293813 - DNA, 53 bp, Artificial
  Synthetic oligonucleotide
ttttaggcggagccgctccactccatcgcattacttcagctaccccttcccat

SEQ ID NO: 293814 - DNA, 53 bp, Artificial
  Synthetic oligonucleotide
gacattctcctcgcgtagcgtctttacacagcttaggaagtgccggggtgggc

SEQ ID NO: 293815 - DNA, 59 bp, Artificial
  Synthetic oligonucleotide
ccggtcattaaaaataactgtgttgtaatagagcataggataatgcaaagtatccctga

SEQ ID NO: 293816 - DNA, 53 bp, Artificial
  Synthetic oligonucleotide
caaagtagctgaggaggaggacgtactggccgaaggactgggcgcacacacgg

SEQ ID NO: 293817 - DNA, 53 bp, Artificial
  Synthetic oligonucleotide
acataacgcttgtcataactggatcgatatcagacatcggacgcgtcggaaga

SEQ ID NO: 293818 - DNA, 53 bp, Artificial
  Synthetic oligonucleotide
ccgccgcaacgtgtgtgggaacgatgctttacgggtttgcagtgctgcagtcg

SEQ ID NO: 293819 - DNA, 53 bp, Artificial
  Synthetic oligonucleotide
acagcaccgcagccctgtacacgagctcactaatgcaaggaatcattccaacg

SEQ ID NO: 293820 - DNA, 53 bp, Artificial
  Synthetic oligonucleotide
ttgcatatgctaccgcgagtgatagtgagatcctccacaagagtccccgcatc

SEQ ID NO: 293821 - DNA, 53 bp, Artificial
  Synthetic oligonucleotide
acacccgtgtaactgactgactcaccgccacgccccatcttccccctgttgga

SEQ ID NO: 293822 - DNA, 53 bp, Artificial
  Synthetic oligonucleotide
aaaagcttcgttgggctcctcataacaaataacgtctgaatgtggggaatctt

SEQ ID NO: 293823 - DNA, 53 bp, Artificial
  Synthetic oligonucleotide
gtcacgccaactcctaactttccgcctcactgtcacgtacgacaacatggcaa

SEQ ID NO: 293824 - DNA, 53 bp, Artificial
  Synthetic oligonucleotide
acaggaagagtagtacaagtcaacggaagcttgttcataagggtgctaattat

SEQ ID NO: 293825 - DNA, 53 bp, Artificial
  Synthetic oligonucleotide
gaactcgaatgcgtagttactcaccaaggtcgtactgccgacagtgggcatta

SEQ ID NO: 293826 - DNA, 59 bp, Artificial
  Synthetic oligonucleotide
ttgtcttgtggtgggtcaatagtacactatagtgcctaagtaatgtgtgtaactcctat

SEQ ID NO: 293827 - DNA, 53 bp, Artificial
  Synthetic oligonucleotide
ttgccgtctctcgctaccgcggatgcgactgaaacaaccgctcaagccgaggg

SEQ ID NO: 293828 - DNA, 53 bp, Artificial
  Synthetic oligonucleotide
gtatcgcacactgacgcatcaggtgccgtgccgcctcttaacgcagctcaaat

SEQ ID NO: 293829 - DNA, 53 bp, Artificial
  Synthetic oligonucleotide
aaaccccaccgagagaaaagccacggaatcagcaagcagcaatcacgaacaaa

SEQ ID NO: 293830 - DNA, 53 bp, Artificial
  Synthetic oligonucleotide
aaaagacagaaagcactaaaggcgtccgccccaccctcggcagagcacgaaac

SEQ ID NO: 293831 - DNA, 53 bp, Artificial
  Synthetic oligonucleotide
catgcgtgcctcgtgtccgaaaatggcagtcaagagaaatctgtaacagctat

SEQ ID NO: 293832 - DNA, 53 bp, Artificial
  Synthetic oligonucleotide
acacgggacgctctcgatcagagaccaagcggcgtcgtacccagtcctcgcgt

SEQ ID NO: 293833 - DNA, 53 bp, Artificial
  Synthetic oligonucleotide
tttcgatcttcctgggcaaattgagctctatactcattgcagcttaattagag

SEQ ID NO: 293834 - DNA, 53 bp, Artificial
  Synthetic oligonucleotide
aaacagatgccaggccaataactcaaatagagctatgacgctatcaattttta

SEQ ID NO: 293835 - DNA, 53 bp, Artificial
  Synthetic oligonucleotide
acaatcttcaaaggggtgacaatcttcaaaggggtgacaatcttcaaaggggt

SEQ ID NO: 293836 - DNA, 53 bp, Artificial
  Synthetic oligonucleotide
gtcctgcctgtacagcgtaaaagcattcgctgtgtgccatgcgatcttgcccg

SEQ ID NO: 293837 - DNA, 60 bp, Artificial
  Synthetic oligonucleotide
tctgtggctggcttattggttcggtatgatagggttttatatgagtgtgctgattagaac

SEQ ID NO: 293838 - DNA, 53 bp, Artificial
  Synthetic oligonucleotide
ggtttgttcaaggtacggcagagactgattatatgtggaggatctgaatttgg

SEQ ID NO: 293839 - DNA, 53 bp, Artificial
  Synthetic oligonucleotide
cgtagattggggcaacgtagatatagagggcagctgggaatctcagttgtact

SEQ ID NO: 293840 - DNA, 53 bp, Artificial
  Synthetic oligonucleotide
gtccgtacatgtgtgggtaagtggacggtaaagggttccgatggcgctgtgct

SEQ ID NO: 293841 - DNA, 53 bp, Artificial
  Synthetic oligonucleotide
catcatcgggtccttcgaggcaacgtacctcgcagacaagtcgagatacagtc

SEQ ID NO: 293842 - DNA, 53 bp, Artificial
  Synthetic oligonucleotide
gaacagagtgatctgtcgccggttcacggtagtcttgcagcgtccacacttcc

SEQ ID NO: 293843 - DNA, 53 bp, Artificial
  Synthetic oligonucleotide
acagtagttataccctttacgtggatacttagttaccgcttgaccaagcaccg

SEQ ID NO: 293844 - DNA, 53 bp, Artificial
  Synthetic oligonucleotide
acacagtgagaaaaggagcgctcgtgtggtctttggcgcgctccgtccgtctg

SEQ ID NO: 293845 - DNA, 53 bp, Artificial
  Synthetic oligonucleotide
ttctaccacacaggatccaactccaccttccgattattccaaaatgtatcaac

SEQ ID NO: 293846 - DNA, 53 bp, Artificial
  Synthetic oligonucleotide
ttgattgttcaggtcgccacagacgatgtgcgactgatgcgagcgatctgcgt

SEQ ID NO: 293847 - DNA, 53 bp, Artificial
  Synthetic oligonucleotide
acacatccctacgcacacatgcacgccaactcactcagaatcgccagatgagg

SEQ ID NO: 293848 - DNA, 55 bp, Artificial
  Synthetic oligonucleotide
gttaatccggttggggtacgcttaaattattcgctaacatgggccgattcatgaa

SEQ ID NO: 293849 - DNA, 58 bp, Artificial
  Synthetic oligonucleotide
cctatacttccagctggtcttagaatatattcatttgataataggagacaacccgtta

SEQ ID NO: 293850 - DNA, 53 bp, Artificial
  Synthetic oligonucleotide
gtaaacgtttccgatgtacgatgcacctgactacctcctttcgcgacatgggg

SEQ ID NO: 293851 - DNA, 53 bp, Artificial
  Synthetic oligonucleotide
cgtagccgacaagaggggctacgtgtgctggaatcgctgagagaagagcgaat

SEQ ID NO: 293852 - DNA, 53 bp, Artificial
  Synthetic oligonucleotide
gtccctcgctccggatgcctttacgtttgtatgtgcttgcggggttctcttgc

SEQ ID NO: 293853 - DNA, 53 bp, Artificial
  Synthetic oligonucleotide
acaggggcacagatgtctcagcacgcatttagcgcctcatccatcgagtcttt

SEQ ID NO: 293854 - DNA, 53 bp, Artificial
  Synthetic oligonucleotide
acaccaacagctgtccatttaaagctagctgggtaacggattagatacacacc

SEQ ID NO: 293855 - DNA, 53 bp, Artificial
  Synthetic oligonucleotide
caatacaacttcgccggcccatcgcgactgacaaccgtgccaatggcctgctt

SEQ ID NO: 293856 - DNA, 53 bp, Artificial
  Synthetic oligonucleotide
gaaggcgtgtgtgctatctttggaagggcaggtgtcactgactacgcagtttt

SEQ ID NO: 293857 - DNA, 53 bp, Artificial
  Synthetic oligonucleotide
aaaagtttgcacaccacggatccctcctcggaggcaaacatcatacactgcag

SEQ ID NO: 293858 - DNA, 53 bp, Artificial
  Synthetic oligonucleotide
cataagtaacctttgtgaaagtgatagcgagatgggaattgtgccttctatag

SEQ ID NO: 293859 - DNA, 53 bp, Artificial
  Synthetic oligonucleotide
ggtgttgcttaaggcctgtactccgtgaggcgactggatcttactttgcaccg

SEQ ID NO: 293860 - DNA, 60 bp, Artificial
  Synthetic oligonucleotide
gatagagcctatcatccagatgaagttgcctcttctaaaggcaaagtacaacttgacaat

SEQ ID NO: 293861 - DNA, 53 bp, Artificial
  Synthetic oligonucleotide
cttgaaatctccctctagtagtacaatatcctacacctgattgtggatcacac

SEQ ID NO: 293862 - DNA, 53 bp, Artificial
  Synthetic oligonucleotide
gtaggtatgggcgcgcgtgtggggaacagagtgtttgtggaccttttctggca

SEQ ID NO: 293863 - DNA, 53 bp, Artificial
  Synthetic oligonucleotide
ttttcgcagtcttcggtctgataaactgccccgacgcagcgcgaacggatgtc

SEQ ID NO: 293864 - DNA, 53 bp, Artificial
  Synthetic oligonucleotide
cgtaatgaggggacacatgcgggctaacctagaccacaaaggcccacatcggc

SEQ ID NO: 293865 - DNA, 53 bp, Artificial
  Synthetic oligonucleotide
ttacgagtcagatgacgtcactcctagttgggcacttgcagaacctggataac

SEQ ID NO: 293866 - DNA, 53 bp, Artificial
  Synthetic oligonucleotide
aaagaggcgacgtcgcggacagacacgagaatggacgcctggatgaatcgcac

SEQ ID NO: 293867 - DNA, 53 bp, Artificial
  Synthetic oligonucleotide
gtggagaatggggctataacccaaggctactattaagtattaatagccactta

SEQ ID NO: 293868 - DNA, 53 bp, Artificial
  Synthetic oligonucleotide
cttctggacgggcatcccggacgcaggcatgacgacaggggagcacagtgtcg

SEQ ID NO: 293869 - DNA, 53 bp, Artificial
  Synthetic oligonucleotide
gaccgcccgacgtcggtgtatctgaactactcctttgttctggaccctgagac

SEQ ID NO: 293870 - DNA, 53 bp, Artificial
  Synthetic oligonucleotide
aataattgacccgtaacgactgaatcgaaagatgagatttgttttctgaaaga

SEQ ID NO: 293871 - DNA, 60 bp, Artificial
  Synthetic oligonucleotide
agccagacatcgcctagctcaggcttaactcgagcagtatagcttaatcccgccgcccct

SEQ ID NO: 293872 - DNA, 53 bp, Artificial
  Synthetic oligonucleotide
gtagcgcaatcaatcgtctattaattgtagacaagtatgaatggggtaaccaa

SEQ ID NO: 293873 - DNA, 53 bp, Artificial
  Synthetic oligonucleotide
cgtgctcagtgtattgcctctcttgaatgccccgcaaaggagttaaatcttaa

SEQ ID NO: 293874 - DNA, 53 bp, Artificial
  Synthetic oligonucleotide
ttttgactcacgaagggacactggcaagtccgacactggacacagctatttca

SEQ ID NO: 293875 - DNA, 53 bp, Artificial
  Synthetic oligonucleotide
ccatcgttttacacacggtgcagtcgcttagccctattatgcgaggtgcgtgt

SEQ ID NO: 293876 - DNA, 53 bp, Artificial
  Synthetic oligonucleotide
ccttctgatgaaggcactttaatctcgtccgccctgtaagagtttagtttgtc

SEQ ID NO: 293877 - DNA, 53 bp, Artificial
  Synthetic oligonucleotide
gaatggatgcttagcacagcgtcacaatcgcacatacgactaggtatgcgtag

SEQ ID NO: 293878 - DNA, 53 bp, Artificial
  Synthetic oligonucleotide
cgctactgcattacgcagatccaacgtcgtccgctggagtcttacggtctgca

SEQ ID NO: 293879 - DNA, 53 bp, Artificial
  Synthetic oligonucleotide
catgaccactagttcctgaacctcttgcagttctaagccccactccattatac

SEQ ID NO: 293880 - DNA, 53 bp, Artificial
  Synthetic oligonucleotide
gtggtggtgactctccgacacatgcacgaaaggcagcgagggagggcggtctg

SEQ ID NO: 293881 - DNA, 53 bp, Artificial
  Synthetic oligonucleotide
ggtgtcgtgggtttagagcaggatccaaattattatctgccgctgttacgtta

SEQ ID NO: 293882 - DNA, 58 bp, Artificial
  Synthetic oligonucleotide
gatagcaagggctattcaaagacaaacagtgataaaaaatatagagtgttgttggtgt

SEQ ID NO: 293883 - DNA, 53 bp, Artificial
  Synthetic oligonucleotide
cttcgactcttcttacctggatgcgtgcatgacactaccatcgcgcatcaacg

SEQ ID NO: 293884 - DNA, 53 bp, Artificial
  Synthetic oligonucleotide
aataaaatcgggcaagagtctaacataacgcacatcaatgaagatggcggctg

SEQ ID NO: 293885 - DNA, 53 bp, Artificial
  Synthetic oligonucleotide
catgtgggaggtatgaatatcgtcctgatattgtggccgtcgctatgcgttgg

SEQ ID NO: 293886 - DNA, 53 bp, Artificial
  Synthetic oligonucleotide
caatgcgagttagcagcacaggcacagacgacagacctgaacgtagtgcggac

SEQ ID NO: 293887 - DNA, 53 bp, Artificial
  Synthetic oligonucleotide
ttgtgtacgacacgtctatgctagatcacgtttctccggatgctggagacttc

SEQ ID NO: 293888 - DNA, 53 bp, Artificial
  Synthetic oligonucleotide
cgggtgcagtgccaccctcgggcgttttcagctaccatgcgctccgcgtcccc

SEQ ID NO: 293889 - DNA, 53 bp, Artificial
  Synthetic oligonucleotide
gtgggagttcatctactgcaatgtgacgggtgtgtatgtacggggaatcagtc

SEQ ID NO: 293890 - DNA, 53 bp, Artificial
  Synthetic oligonucleotide
catgtagaaagcgaagcacatgatagccgcatcaagcctacgcggacacacgc

SEQ ID NO: 293891 - DNA, 53 bp, Artificial
  Synthetic oligonucleotide
ctttccacagggtgcacagcgcacctcgttgggcctgcctcgttcaccgtact

SEQ ID NO: 293892 - DNA, 53 bp, Artificial
  Synthetic oligonucleotide
gtataatttctataggccgcgcttggtaaatcacggcattcataattttggtg

SEQ ID NO: 293893 - DNA, 56 bp, Artificial
  Synthetic oligonucleotide
gcacgtatgagtaatcggttcaaatccggtcacctccaaaatttgacaagtgggta

SEQ ID NO: 293894 - DNA, 53 bp, Artificial
  Synthetic oligonucleotide
ctttatctctgcaaacttagagtcgtcagtaggcttccaaacagggatattat

SEQ ID NO: 293895 - DNA, 53 bp, Artificial
  Synthetic oligonucleotide
tttaggaatatatatcgtaatgagggcttgagagggtttacgaggggcatgag

SEQ ID NO: 293896 - DNA, 53 bp, Artificial
  Synthetic oligonucleotide
ttgtgcagcgacaccgtgctttacggagcacggcagctcagcagttgtcgtgc

SEQ ID NO: 293897 - DNA, 53 bp, Artificial
  Synthetic oligonucleotide
aatggcttaatcggcgagaggtcaatatcggactgttttgtgtgatttgtaga

SEQ ID NO: 293898 - DNA, 53 bp, Artificial
  Synthetic oligonucleotide
ttcacgtttgtgatttcacaggacgacaagcggtgccaggtgaacgcgtcgga

SEQ ID NO: 293899 - DNA, 53 bp, Artificial
  Synthetic oligonucleotide
caaagacgccagagcggattcgcatcgtggccccgagtgaacagacccgcctt

SEQ ID NO: 293900 - DNA, 53 bp, Artificial
  Synthetic oligonucleotide
aatgcgggatgttaataatggttggttgattagatattgccacgctaatggag

SEQ ID NO: 293901 - DNA, 53 bp, Artificial
  Synthetic oligonucleotide
cctgtttgtgggaccaccatatactggtaaatcggtttagctttcacgcggtt

SEQ ID NO: 293902 - DNA, 53 bp, Artificial
  Synthetic oligonucleotide
cgtacgtgagtaataataccgatgtttggtacaattctaatatcagcgatgcg

SEQ ID NO: 293903 - DNA, 53 bp, Artificial
  Synthetic oligonucleotide
caagtacgttctacgtaaggagggcagcgcgacgtacggtgactaatgccaga

SEQ ID NO: 293904 - DNA, 60 bp, Artificial
  Synthetic oligonucleotide
ttcgagccttgtgcggtgtggttcgttttcgccgaaggatcacagagtgtgcgcgcacca

SEQ ID NO: 293905 - DNA, 53 bp, Artificial
  Synthetic oligonucleotide
cttgtgagtccatattggtagtatatttaccaagggcataacaaacgcctgta

SEQ ID NO: 293906 - DNA, 53 bp, Artificial
  Synthetic oligonucleotide
gaccataagtagcgctccaacatactggactggaagcataacttggtcacccc

SEQ ID NO: 293907 - DNA, 53 bp, Artificial
  Synthetic oligonucleotide
ccaaagacaagtgggcacagacacccagcgcctcctaccgtctacccccaagc

SEQ ID NO: 293908 - DNA, 53 bp, Artificial
  Synthetic oligonucleotide
cccactcacgattcgaaagtgcagacgccaaaccccttctctgtattagatct

SEQ ID NO: 293909 - DNA, 53 bp, Artificial
  Synthetic oligonucleotide
caaactttagggcctatcgtctaacggatcaggacagaaaccttctaagtttc

SEQ ID NO: 293910 - DNA, 53 bp, Artificial
  Synthetic oligonucleotide
cattaattcactcatgtaaattgctctacagccccaccaagtcgtcttgaata

SEQ ID NO: 293911 - DNA, 53 bp, Artificial
  Synthetic oligonucleotide
gtgcggctgaagcccgggaccgctatcgagaccgccattcaagcaggcgtcta

SEQ ID NO: 293912 - DNA, 53 bp, Artificial
  Synthetic oligonucleotide
aatcgcggacacaccgtacctgccagcagactacagcacgacaacgcggtggg

SEQ ID NO: 293913 - DNA, 53 bp, Artificial
  Synthetic oligonucleotide
cctctgctcgttcgccacgtgcacctgaatctcactctggtgaagcccgacga

SEQ ID NO: 293914 - DNA, 53 bp, Artificial
  Synthetic oligonucleotide
aaaaggagcagcctcaaccgcaggtgcaaatgcgccctgagaggggttccccg

SEQ ID NO: 293915 - DNA, 54 bp, Artificial
  Synthetic oligonucleotide
cctgcggcgttaattataatgttaaaagttcaacgcttatctaagaagttgtat

SEQ ID NO: 293916 - DNA, 53 bp, Artificial
  Synthetic oligonucleotide
acatgtactgcagacagcgactactctttcagagcacccacaggaagcatcgg

SEQ ID NO: 293917 - DNA, 53 bp, Artificial
  Synthetic oligonucleotide
acactaaagtcaccaaagcgggaagcctgtcctcatcgacaccgactgatgac

SEQ ID NO: 293918 - DNA, 53 bp, Artificial
  Synthetic oligonucleotide
ggttagtagcgcgctttgtgatgcaccacgtcgagtttctctcgcttacaatg

SEQ ID NO: 293919 - DNA, 53 bp, Artificial
  Synthetic oligonucleotide
gacccaatcagtttgcacaaacactcgggtacgtttcctacgaaagcagtcgc

SEQ ID NO: 293920 - DNA, 53 bp, Artificial
  Synthetic oligonucleotide
cggtaatatactgtggaaatcaccagtacaaagttgcggtaggcgatgtcatt

SEQ ID NO: 293921 - DNA, 53 bp, Artificial
  Synthetic oligonucleotide
gtgcctttccaaaacgcaagaccaaaggaggtagtgagctcattctttaccac

SEQ ID NO: 293922 - DNA, 53 bp, Artificial
  Synthetic oligonucleotide
acagagccctaatgtagtgtaccacctggttgtatgcttggatggatacagtg

SEQ ID NO: 293923 - DNA, 53 bp, Artificial
  Synthetic oligonucleotide
cctgacacggactgcgccgcatgtgatttgtccacgtgcatacgggcatccgt

SEQ ID NO: 293924 - DNA, 52 bp, Artificial
  Synthetic oligonucleotide
aacacgtggggctctcgtacttggtgtgctgatctttgcgtgtgcctggttc

SEQ ID NO: 293925 - DNA, 52 bp, Artificial
  Synthetic oligonucleotide
gcggtccacgtaccctcgcagtaacctaccacgcccgctcgttacgcagatt

SEQ ID NO: 293926 - DNA, 58 bp, Artificial
  Synthetic oligonucleotide
ttcgacccagggggtcgtagggcatgccactctcatcggtagtgtaaggacgaggcga

SEQ ID NO: 293927 - DNA, 52 bp, Artificial
  Synthetic oligonucleotide
aggctctgctcgcgtgtgcccgtagcgatgtctctctctttccgttgctcgt

SEQ ID NO: 293928 - DNA, 52 bp, Artificial
  Synthetic oligonucleotide
aaaaggagtaagtgccgttgccattatgcggacgcatccgtaaatttcaatg

SEQ ID NO: 293929 - DNA, 52 bp, Artificial
  Synthetic oligonucleotide
cgaggtggggtctacacggcgcgtgggacgactgccgagtgctgtcgcctct

SEQ ID NO: 293930 - DNA, 52 bp, Artificial
  Synthetic oligonucleotide
aaaaagatctctaataattcaagggttagaatatatgactgttaatcatatt

SEQ ID NO: 293931 - DNA, 52 bp, Artificial
  Synthetic oligonucleotide
ttttcgtcttttgtcgcggcgggagacaggtacatgtctagaggcgttgccc

SEQ ID NO: 293932 - DNA, 52 bp, Artificial
  Synthetic oligonucleotide
aacccatgttgcctgtacgatgttgtgattcagatcgtttcgtagctctaaa

SEQ ID NO: 293933 - DNA, 52 bp, Artificial
  Synthetic oligonucleotide
gcgtgtctgctcgtgttgggaattcaccaaatctctgactaagcatgcgtct

SEQ ID NO: 293934 - DNA, 52 bp, Artificial
  Synthetic oligonucleotide
tgagtgcaaacggccttattgttcaatgcgggcgtcagactctcacctgcgt

SEQ ID NO: 293935 - DNA, 50 bp, Artificial
  Synthetic oligonucleotide
ttttccgtttcgcttatccgtctcccttacccaggaaacgcctttaaatg

SEQ ID NO: 293936 - DNA, 52 bp, Artificial
  Synthetic oligonucleotide
gcgtggttctgtcgcctatccctgccctcgcgccttccctcgctgctcgata

SEQ ID NO: 293937 - DNA, 57 bp, Artificial
  Synthetic oligonucleotide
aggtgttatcccttacgcaaaaatgggatactgggatgctgattacgttatcaaaga

SEQ ID NO: 293938 - DNA, 52 bp, Artificial
  Synthetic oligonucleotide
tgatcaacatcggttctacttctattggttgtagagttactggaatcaaaac

SEQ ID NO: 293939 - DNA, 52 bp, Artificial
  Synthetic oligonucleotide
tgatctgcctaaatgttcctgggtgaaagaactctcgtagtacccttaaatc

SEQ ID NO: 293940 - DNA, 52 bp, Artificial
  Synthetic oligonucleotide
tgattaagcgaatgagtaaatgtaggatttccctcccgatgacacagctcgc

SEQ ID NO: 293941 - DNA, 52 bp, Artificial
  Synthetic oligonucleotide
ttttccaaggttgatactcggtgcgcattaggggctgcccttgtcgctcgcc

SEQ ID NO: 293942 - DNA, 52 bp, Artificial
  Synthetic oligonucleotide
ttttagtctcccttgtgtgttgtggctgttgtattcggcgtcctttcgcccc

SEQ ID NO: 293943 - DNA, 52 bp, Artificial
  Synthetic oligonucleotide
agatgtggtagtctgacataaccactgtgcttttgccgcccatccgaaaggg

SEQ ID NO: 293944 - DNA, 52 bp, Artificial
  Synthetic oligonucleotide
agcaaacggccgtgctgcagtacctcttgcatagcgcgacaaccacccatca

SEQ ID NO: 293945 - DNA, 52 bp, Artificial
  Synthetic oligonucleotide
tgcaccagcacgagttcgtactgttatgcacccgtcgtatgtccctgctaga

SEQ ID NO: 293946 - DNA, 52 bp, Artificial
  Synthetic oligonucleotide
aacagcagcctgacgctttggaggggtttgctttcagaacgatatcaggagc

SEQ ID NO: 293947 - DNA, 52 bp, Artificial
  Synthetic oligonucleotide
tttggtcgccagggcgccgactatatgtggctatgtttcgtcatcatccctg

SEQ ID NO: 293948 - DNA, 54 bp, Artificial
  Synthetic oligonucleotide
aggttaaaggtcaaaaagatccttgtctagctcaagaaacgaccgcatttacag

SEQ ID NO: 293949 - DNA, 52 bp, Artificial
  Synthetic oligonucleotide
aacagagacggtatggcacaatccggagaagcattcttagatcgtgcgtacg

SEQ ID NO: 293950 - DNA, 52 bp, Artificial
  Synthetic oligonucleotide
tgcatctcaacagaggctcgacgttctttgtcaggtgcgtgacccggagatg

SEQ ID NO: 293951 - DNA, 52 bp, Artificial
  Synthetic oligonucleotide
tgcatgtctctgtgcttgtcattggaagtgatcgcagtgaagcgtaaacaca

SEQ ID NO: 293952 - DNA, 52 bp, Artificial
  Synthetic oligonucleotide
tttcacgagaagcgcacgcatagccaccagcgatactcacggtcatttgggc

SEQ ID NO: 293953 - DNA, 52 bp, Artificial
  Synthetic oligonucleotide
tgcccacaaccgccgaaacgatggactgcacatcctgtgaagccagctggta

SEQ ID NO: 293954 - DNA, 52 bp, Artificial
  Synthetic oligonucleotide
ttaggtgtgatctcgttcgctctgaccgctcgaaatggaacaacagacgatt

SEQ ID NO: 293955 - DNA, 52 bp, Artificial
  Synthetic oligonucleotide
ttatcagtggcgattatgcgtgcttagaaaccgtgggttgttgtgagtgagc

SEQ ID NO: 293956 - DNA, 52 bp, Artificial
  Synthetic oligonucleotide
gcgactgtgacgagtccaacccgtcaacgtaccgtgagcacctagactccgt

SEQ ID NO: 293957 - DNA, 52 bp, Artificial
  Synthetic oligonucleotide
tgtctcgactaacgcgcttccctaacttctcacactcggtgtagtaaaagga

SEQ ID NO: 293958 - DNA, 52 bp, Artificial
  Synthetic oligonucleotide
tgtcgggtgtaaccacgaatcacggaagacacctcctgatgactctggcccc

SEQ ID NO: 293959 - DNA, 60 bp, Artificial
  Synthetic oligonucleotide
gcttcagcatttgatgacgcggtgaatggacccaacgtctcactaccctgttgtttccat

SEQ ID NO: 293960 - DNA, 54 bp, Artificial
  Synthetic oligonucleotide
gttaagttttggtaaggtctctttacatactatttcggctccagttgactattg

SEQ ID NO: 293961 - DNA, 57 bp, Artificial
  Synthetic oligonucleotide
ttcctgccctaggaataaagattgactgcgttcctggaagggccacacaccatactt

SEQ ID NO: 293962 - DNA, 52 bp, Artificial
  Synthetic oligonucleotide
ttcaaagttacttagagtatcagcagcgtccctagacttgaaaatgccggtt

SEQ ID NO: 293963 - DNA, 52 bp, Artificial
  Synthetic oligonucleotide
agcgaggcataacagaacaaaggtatactcgaataaagtgcccacgctcatc

SEQ ID NO: 293964 - DNA, 52 bp, Artificial
  Synthetic oligonucleotide
gccggcggtgcccctagtggtgccgttacaaccaccccatctagtagtggta

SEQ ID NO: 293965 - DNA, 52 bp, Artificial
  Synthetic oligonucleotide
aaactcagaacgacattatcacacccggcttcggtttcactacagcctcccc

SEQ ID NO: 293966 - DNA, 52 bp, Artificial
  Synthetic oligonucleotide
tgtagcgtgtagatgggtaaggagcggctacgctcctccgagtcactcgcga

SEQ ID NO: 293967 - DNA, 52 bp, Artificial
  Synthetic oligonucleotide
gcgcaaaactgccgacagtgcctctgtcgcatgaccttgatcgtccatcggt

SEQ ID NO: 293968 - DNA, 52 bp, Artificial
  Synthetic oligonucleotide
tgtagaatggtggctcgcgtacacaccgcgaagcctgactcgggctctgaac

SEQ ID NO: 293969 - DNA, 52 bp, Artificial
  Synthetic oligonucleotide
ttcagtagcaaatcgtatccttttctgttcagtggcgctgtcctccgtctgt

SEQ ID NO: 293970 - DNA, 52 bp, Artificial
  Synthetic oligonucleotide
agcgaaacggggcaagtcgcatcctgtgcgtccttcgctctgcgtcgagttt

SEQ ID NO: 293971 - DNA, 52 bp, Artificial
  Synthetic oligonucleotide
tgtactagcactgctcctctcgttttgttttatcgcagctgaggcctctatg

SEQ ID NO: 293972 - DNA, 56 bp, Artificial
  Synthetic oligonucleotide
cctggacgttgaatccaatagcgtaatttttaaagacatcgatatacggatttctc

SEQ ID NO: 293973 - DNA, 52 bp, Artificial
  Synthetic oligonucleotide
agcttgttgatatttaccacgttcgcaatgttggcgagattagggaggtggg

SEQ ID NO: 293974 - DNA, 52 bp, Artificial
  Synthetic oligonucleotide
agcctcgctcacgcactctcatccaatcggccgtgccttgcctacacaaggg

SEQ ID NO: 293975 - DNA, 52 bp, Artificial
  Synthetic oligonucleotide
tgtttgtgcaggcaccgcctgaggcaccaaataactcaaatttgtataggcc

SEQ ID NO: 293976 - DNA, 52 bp, Artificial
  Synthetic oligonucleotide
tgtttgcctgattccatatgctcattcggatgatgcgaatcgcacaactctc

SEQ ID NO: 293977 - DNA, 52 bp, Artificial
  Synthetic oligonucleotide
tgttggacttaccgtcactaggaaaggtggtaccttgccacggcgccaagtt

SEQ ID NO: 293978 - DNA, 52 bp, Artificial
  Synthetic oligonucleotide
tgttgagagtccgggtgttaataaccgtttggtttgctgcgattttgttgct

SEQ ID NO: 293979 - DNA, 52 bp, Artificial
  Synthetic oligonucleotide
cgatcgcactgtactttgcttggacgcatgcctaggacagagtatcggcctt

SEQ ID NO: 293980 - DNA, 52 bp, Artificial
  Synthetic oligonucleotide
aaagatacacttccaagcaccctaggaagaattgttgactccaatggctaag

SEQ ID NO: 293981 - DNA, 52 bp, Artificial
  Synthetic oligonucleotide
ttaaggttgccacaatctccgcgcatgttaattatggaccatactagtttaa

SEQ ID NO: 293982 - DNA, 52 bp, Artificial
  Synthetic oligonucleotide
cgatatgcgagccacagtcgttcgcgaggtgtcgtgtctaggaatagcaatg

SEQ ID NO: 293983 - DNA, 52 bp, Artificial
  Synthetic oligonucleotide
aggttgttgaacgagaagaaaacaccgttaacaactagagtggacctagatt

SEQ ID NO: 293984 - DNA, 52 bp, Artificial
  Synthetic oligonucleotide
gccgtttgacggcgcacgatgctcgttggagactaggcttgtatggtgatga

SEQ ID NO: 293985 - DNA, 52 bp, Artificial
  Synthetic oligonucleotide
tgtgtgcgtgcttcttacttttaacccgttgctgctgcagtgaagcaggagg

SEQ ID NO: 293986 - DNA, 52 bp, Artificial
  Synthetic oligonucleotide
aaagagcgaacgtcgttaagaaaacctgcacagggccgcctttcctgaaagg

SEQ ID NO: 293987 - DNA, 52 bp, Artificial
  Synthetic oligonucleotide
tgtggtctgcgctactgttgccgatagctttcatgttggccgtgcacatgcg

SEQ ID NO: 293988 - DNA, 52 bp, Artificial
  Synthetic oligonucleotide
tgtggtagaccgggccaccgttgtttgttcgaagagcaactagtgtacgatg

SEQ ID NO: 293989 - DNA, 52 bp, Artificial
  Synthetic oligonucleotide
gcctttgccctctggtgactcgatcgtcttggctattcggtgccgtgtgtga

SEQ ID NO: 293990 - DNA, 52 bp, Artificial
  Synthetic oligonucleotide
ttactggtgtacagttccgtctgccattgccgttgatatacgtgcatctacg

SEQ ID NO: 293991 - DNA, 52 bp, Artificial
  Synthetic oligonucleotide
tgtgcacataagcgcaagcagaagcacccgatgctcttctcacgcatctagt

SEQ ID NO: 293992 - DNA, 52 bp, Artificial
  Synthetic oligonucleotide
aaagctttgatatgcttccactgtaaacagaagttaacttcgttttttttcg

SEQ ID NO: 293993 - DNA, 52 bp, Artificial
  Synthetic oligonucleotide
aaattcatgatagttccgtgcaccgcttccactggagtagagccacctgatc

SEQ ID NO: 293994 - DNA, 56 bp, Artificial
  Synthetic oligonucleotide
ttccatatctactttcgagttcatcgacccccccgaaatgtctgaacttcagttcc

SEQ ID NO: 293995 - DNA, 52 bp, Artificial
  Synthetic oligonucleotide
ttgcgtcacgatcaggggaggctgataacaagcagccacaccacgaggcctg

SEQ ID NO: 293996 - DNA, 52 bp, Artificial
  Synthetic oligonucleotide
ttgctgctagcgtggtcctcaattgctgtccccgtggttcagcttggactgc

SEQ ID NO: 293997 - DNA, 52 bp, Artificial
  Synthetic oligonucleotide
ttggaacgcctggtagactactcgcacttgttaaggccaagcaccttaatat

SEQ ID NO: 293998 - DNA, 52 bp, Artificial
  Synthetic oligonucleotide
ttggaataggggtttcaaaagttatctccgcaggattggcctactcacttgg

SEQ ID NO: 293999 - DNA, 52 bp, Artificial
  Synthetic oligonucleotide
cgatgtgggtgaaccctcgtccttaagtgaaagtgtaccgaggagaaacggt

SEQ ID NO: 294000 - DNA, 52 bp, Artificial
  Synthetic oligonucleotide
aaatttagtaggcccaagtaatgctcgtccaaacttcgcaggcccaagccat

SEQ ID NO: 294001 - DNA, 52 bp, Artificial
  Synthetic oligonucleotide
tggaaggacacgcgtgcgtgggcggtaccgctcattgggtgccacgatgcat

SEQ ID NO: 294002 - DNA, 52 bp, Artificial
  Synthetic oligonucleotide
gccactctcatgacaggggagacctcagcgcggggcacctaggtccggcacc

SEQ ID NO: 294003 - DNA, 52 bp, Artificial
  Synthetic oligonucleotide
gcggcctgtcctccacgaacaaccgcccgcttctgcgcggtgtgtacaaggg

SEQ ID NO: 294004 - DNA, 52 bp, Artificial
  Synthetic oligonucleotide
ttggtgctatgaatagtggcgatggtatcgctgtaggctggctaggccatcc

SEQ ID NO: 294005 - DNA, 59 bp, Artificial
  Synthetic oligonucleotide
agtacaattatatatcgtgtatgaagcaagtttaatcccaatggtaataatgataggag

SEQ ID NO: 294006 - DNA, 52 bp, Artificial
  Synthetic oligonucleotide
tgctcctttcgagaagctcgccagagctcgtgagttcctgtgaaggcacact

SEQ ID NO: 294007 - DNA, 52 bp, Artificial
  Synthetic oligonucleotide
ttgtgagaatgaccaaccacatcgagattgaaagaaagctcgaacttaaatt

SEQ ID NO: 294008 - DNA, 52 bp, Artificial
  Synthetic oligonucleotide
tgctacaactctatctcctttgtatgaggcttcacttgtagaaatagacgct

SEQ ID NO: 294009 - DNA, 52 bp, Artificial
  Synthetic oligonucleotide
tgctaactccatacgcatataacagataaggctatccagctaaaccagcacc

SEQ ID NO: 294010 - DNA, 52 bp, Artificial
  Synthetic oligonucleotide
tgcgtgtatgcgcctcggtgactgctagaatagtgtgaggagaacggagggg

SEQ ID NO: 294011 - DNA, 50 bp, Artificial
  Synthetic oligonucleotide
aaaagggaagtaaaggtgctcagggtcttaccgtcgggccatagggttcc

SEQ ID NO: 294012 - DNA, 52 bp, Artificial
  Synthetic oligonucleotide
aaaggtgagcgagacgcgagtgtctggtgtctttcacgtttcatggccatac

SEQ ID NO: 294013 - DNA, 52 bp, Artificial
  Synthetic oligonucleotide
agccgttctgaagtagttagtgatagaaagactgcttcgcgtctgcactttt

SEQ ID NO: 294014 - DNA, 52 bp, Artificial
  Synthetic oligonucleotide
agccggcttacccgcgtgagagcttctacacggtgtcgcctcaccagtacac

SEQ ID NO: 294015 - DNA, 52 bp, Artificial
  Synthetic oligonucleotide
tggtggggttagtcgcacgggtaacggggagtagtctaggcgtctgctgagg

SEQ ID NO: 294016 - DNA, 60 bp, Artificial
  Synthetic oligonucleotide
ttcattcacccgacgtagtgcgatggcaagacatgaccgtctctacctgcacgcatgcga

SEQ ID NO: 294017 - DNA, 52 bp, Artificial
  Synthetic oligonucleotide
gcgccagaaaccccgaacaagcttctggcacgaaggtgagtccatccgctgt

SEQ ID NO: 294018 - DNA, 52 bp, Artificial
  Synthetic oligonucleotide
gcgccagtcgatagtgtgggaggcacgcacagagacttccagtcgttcgtgt

SEQ ID NO: 294019 - DNA, 52 bp, Artificial
  Synthetic oligonucleotide
tggtcatcgatactaggtcagaactactttagctcacctagaaatcagtcgt

SEQ ID NO: 294020 - DNA, 52 bp, Artificial
  Synthetic oligonucleotide
ttcctcgccagatccagataacactgcagtacgcagtcgtacaggtaccgac

SEQ ID NO: 294021 - DNA, 52 bp, Artificial
  Synthetic oligonucleotide
ttctacatgacgtcctggcttccgtcgactgtagcggttctgaagcactcga

SEQ ID NO: 294022 - DNA, 52 bp, Artificial
  Synthetic oligonucleotide
ccgttttagtaacatattgtgaccatgtcgcataccataaaccgccgaccag

SEQ ID NO: 294023 - DNA, 52 bp, Artificial
  Synthetic oligonucleotide
tggcacgacagtgacgaagttgcgcagagtagatatgctgcatagaaaaggc

SEQ ID NO: 294024 - DNA, 52 bp, Artificial
  Synthetic oligonucleotide
tggcacattcatcccggaagactacccgatttgcaatgtagcgccggaggaa

SEQ ID NO: 294025 - DNA, 52 bp, Artificial
  Synthetic oligonucleotide
gcgcttattcggaacctacttgagtctggatatgttgacttaggggcctttt

SEQ ID NO: 294026 - DNA, 52 bp, Artificial
  Synthetic oligonucleotide
gcggacaaacgggcacgaccgcgtttacgacgagtccggattacacgacggc

SEQ ID NO: 294027 - DNA, 60 bp, Artificial
  Synthetic oligonucleotide
ccgcagcaaccatccatatgtgttcgatgtcccaatgcggaattggcgacttcacctgct

SEQ ID NO: 294028 - DNA, 52 bp, Artificial
  Synthetic oligonucleotide
gccccacataaaagagagatccgttgtgtcatcgacctcatagcctgtgctc

SEQ ID NO: 294029 - DNA, 52 bp, Artificial
  Synthetic oligonucleotide
aatccggctactagcccggtagacaccttggttcgtcagccatacgggaaac

SEQ ID NO: 294030 - DNA, 52 bp, Artificial
  Synthetic oligonucleotide
aatccgtaagctgcctagagttgatgcacgagttaaagggccatgaatcgtg

SEQ ID NO: 294031 - DNA, 52 bp, Artificial
  Synthetic oligonucleotide
gtgcgacgctttgccaagagtgtaggtgcagccctaaatatgacgttccgtg

SEQ ID NO: 294032 - DNA, 52 bp, Artificial
  Synthetic oligonucleotide
gggaaatagctgaacgttttgatcctcacattggtttattacatagaggtag

SEQ ID NO: 294033 - DNA, 52 bp, Artificial
  Synthetic oligonucleotide
gggaactacgcactcgcacaaagaaaagggtcagtcgcgcgaagtaggcagt

SEQ ID NO: 294034 - DNA, 52 bp, Artificial
  Synthetic oligonucleotide
gtgcactcgcgcacgcatgtcggtgtgcacggttgggtggttgcaaccgcac

SEQ ID NO: 294035 - DNA, 52 bp, Artificial
  Synthetic oligonucleotide
acgcagaggaggcacacccaattcgccatcgtctagccctaattccaacccg

SEQ ID NO: 294036 - DNA, 52 bp, Artificial
  Synthetic oligonucleotide
cgaaccgggtttattatgcctgagagccttacgcccagaacaactacgattc

SEQ ID NO: 294037 - DNA, 52 bp, Artificial
  Synthetic oligonucleotide
aatggtcggaatgaaggggagccaaacgtgtccagagaacacttcattgtga

SEQ ID NO: 294038 - DNA, 59 bp, Artificial
  Synthetic oligonucleotide
agtacatatatgttcggtattgcatgcctggtgttttgtattaagacgctaacttcctg

SEQ ID NO: 294039 - DNA, 52 bp, Artificial
  Synthetic oligonucleotide
gtctgtgagcttcacatatactccgaccagtgctcaagcttctcctaacgct

SEQ ID NO: 294040 - DNA, 52 bp, Artificial
  Synthetic oligonucleotide
aattgacatcgattggtacattactgcctagatcctcccaccaatcactcgt

SEQ ID NO: 294041 - DNA, 52 bp, Artificial
  Synthetic oligonucleotide
cgaacaggtaaatggggtaagagaaccgcttataggatgtacgatcgggaga

SEQ ID NO: 294042 - DNA, 52 bp, Artificial
  Synthetic oligonucleotide
gtcgttacagaccaggtactgttgccctgagagaaattcgtcgttttcagcg

SEQ ID NO: 294043 - DNA, 52 bp, Artificial
  Synthetic oligonucleotide
gtcggaccagagcaggtcataagtaatatggttcttggaaatctttcaactc

SEQ ID NO: 294044 - DNA, 52 bp, Artificial
  Synthetic oligonucleotide
acgagccccttatcgtgctttgcctcctgcttgtggagcgactctcgcggcc

SEQ ID NO: 294045 - DNA, 52 bp, Artificial
  Synthetic oligonucleotide
gtcgattcttgccgtgcgtacgctcaagcgggtgcttttctactcactggac

SEQ ID NO: 294046 - DNA, 52 bp, Artificial
  Synthetic oligonucleotide
acgagaggcgagagaacaccgccgatgcacttggatgtgtcgtcgagacaca

SEQ ID NO: 294047 - DNA, 52 bp, Artificial
  Synthetic oligonucleotide
gggccgcacagtgaggcgcccagaaaacccttctaccacaccgttacacgtg

SEQ ID NO: 294048 - DNA, 52 bp, Artificial
  Synthetic oligonucleotide
gggcgactcccactcgctcgtcaagtccagctccgagtacgtgtgcatatca

SEQ ID NO: 294049 - DNA, 52 bp, Artificial
  Synthetic oligonucleotide
ccttaaatctcgtaaccatgccaacacataagaactttttagggaagttaag

SEQ ID NO: 294050 - DNA, 52 bp, Artificial
  Synthetic oligonucleotide
gggcttgaagcacaggcacggggctcctctgcagaccctttgtggactcagt

SEQ ID NO: 294051 - DNA, 52 bp, Artificial
  Synthetic oligonucleotide
acacacgaaatgctcgttttcctctctacgtcctgttgatctagaagttacc

SEQ ID NO: 294052 - DNA, 52 bp, Artificial
  Synthetic oligonucleotide
acctttacaagtaatccaccagtcccaactgaatcgagagatggctcgctca

SEQ ID NO: 294053 - DNA, 52 bp, Artificial
  Synthetic oligonucleotide
gttgtccgtctaccgagtggccgtcgttgtgcaccacaccaccaggcagcga

SEQ ID NO: 294054 - DNA, 52 bp, Artificial
  Synthetic oligonucleotide
gttgtcagagttcgtcaaggatgagttctgatagcctctcatgccaaccagg

SEQ ID NO: 294055 - DNA, 52 bp, Artificial
  Synthetic oligonucleotide
gttcagtgccactcaaactagaagtgtcgaaagtttaagtgtaatatccttc

SEQ ID NO: 294056 - DNA, 52 bp, Artificial
  Synthetic oligonucleotide
ggcagcaagtagagacgctctctggtctagtgtgcgagtcggacaagaagcc

SEQ ID NO: 294057 - DNA, 52 bp, Artificial
  Synthetic oligonucleotide
aagggcaagagcagcgaagaccacaccattgagtccaatcacaagaagacgc

SEQ ID NO: 294058 - DNA, 52 bp, Artificial
  Synthetic oligonucleotide
ggcatccctatgttctcgtctccaatgtttagcatctcgagttcagatggcc

SEQ ID NO: 294059 - DNA, 52 bp, Artificial
  Synthetic oligonucleotide
cctcgctaaaaccctccggatgtctgtcgataagattattcatggttccgca

SEQ ID NO: 294060 - DNA, 57 bp, Artificial
  Synthetic oligonucleotide
ttcaacgtccaggacttcctgacgcttaataacgatttctacttccagcagccattt

SEQ ID NO: 294061 - DNA, 52 bp, Artificial
  Synthetic oligonucleotide
ccgctgcgtaggtgcggcgtagatccgccattgtgtcttctgtcgctgcaat

SEQ ID NO: 294062 - DNA, 52 bp, Artificial
  Synthetic oligonucleotide
ggcccctcccaccggtagcccgacgaggctgacagaaacacttgagaggcgc

SEQ ID NO: 294063 - DNA, 52 bp, Artificial
  Synthetic oligonucleotide
aagtggggcaggacgccgtcatggaacctgttctgaccttcgtgaaacagtg

SEQ ID NO: 294064 - DNA, 52 bp, Artificial
  Synthetic oligonucleotide
ggccctggcattcccccgtaccggggcatataaagttagcaagcccaatggg

SEQ ID NO: 294065 - DNA, 52 bp, Artificial
  Synthetic oligonucleotide
gtggtttcgccttcaacatccatggcaatgagctcggcacagtgtgcgccaa

SEQ ID NO: 294066 - DNA, 52 bp, Artificial
  Synthetic oligonucleotide
gtggttatcgctacatccaagaactatcgttacgtgactgcatcgagctcct

SEQ ID NO: 294067 - DNA, 52 bp, Artificial
  Synthetic oligonucleotide
ggccgtgtgttcaccccagctcactcttcacgtctgaggacggtgaactttc

SEQ ID NO: 294068 - DNA, 52 bp, Artificial
  Synthetic oligonucleotide
ggcgctcgggtccagggatgaacagtccgagggaacttggtgcctggctgat

SEQ ID NO: 294069 - DNA, 52 bp, Artificial
  Synthetic oligonucleotide
ggcggaagcgatagcaggaaatcccgcgaaggatccagcagattacgtacac

SEQ ID NO: 294070 - DNA, 52 bp, Artificial
  Synthetic oligonucleotide
ggcgggagtccataatgaggaggggtggccttgtgactggccccgagccact

SEQ ID NO: 294071 - DNA, 56 bp, Artificial
  Synthetic oligonucleotide
cattccacttgcttataactgtatggacgtaacctccaggcaaagaaaatgaccgg

SEQ ID NO: 294072 - DNA, 54 bp, Artificial
  Synthetic oligonucleotide
ttcaaaaagtaaatttcaatatagaactgtaggtaaatacagtagtttaactca

SEQ ID NO: 294073 - DNA, 52 bp, Artificial
  Synthetic oligonucleotide
aatccagaaccatccgtgcacgcgtgaaatcgttaggggtcacatgtaacgc

SEQ ID NO: 294074 - DNA, 52 bp, Artificial
  Synthetic oligonucleotide
acgctaaagcatggccacgtctgagataatgcggcagcattgggatgagcat

SEQ ID NO: 294075 - DNA, 52 bp, Artificial
  Synthetic oligonucleotide
gtgctgcctaaacccacctttggcgtgtgtggctcggtggcaggtgtcacac

SEQ ID NO: 294076 - DNA, 52 bp, Artificial
  Synthetic oligonucleotide
acgcgcgtcacacgagagaaatttgcagaatcggaaaactcactttgtgggc

SEQ ID NO: 294077 - DNA, 52 bp, Artificial
  Synthetic oligonucleotide
ggctcatgacctagtggttaaggtggttcgactcccctctctgcaatatagg

SEQ ID NO: 294078 - DNA, 52 bp, Artificial
  Synthetic oligonucleotide
gtacgcgcaaatggcacatttgttcgtgcgctgataatacgttcgcggtgcc

SEQ ID NO: 294079 - DNA, 52 bp, Artificial
  Synthetic oligonucleotide
gtacattactttcagtattaattagacttgaactaagttcctctggattacg

SEQ ID NO: 294080 - DNA, 52 bp, Artificial
  Synthetic oligonucleotide
gtacatgtgtgatgtcaccaataagacgtcgcattaggagaagccagctgga

SEQ ID NO: 294081 - DNA, 52 bp, Artificial
  Synthetic oligonucleotide
ggtacacatgtgttcctatggtaaacacgggaggaaggtatgggattggagg

SEQ ID NO: 294082 - DNA, 52 bp, Artificial
  Synthetic oligonucleotide
cctttaaattctcccatccctctgacaaaccatgaccttgtaaatctatacc

SEQ ID NO: 294083 - DNA, 60 bp, Artificial
  Synthetic oligonucleotide
ttatttggacatacgtttgaaataaggctgtatgtgtagtctcgggatgcacatgagata

SEQ ID NO: 294084 - DNA, 52 bp, Artificial
  Synthetic oligonucleotide
gtacaagaacatgcatattgtttaggaattgaaaatttattaggtactacaa

SEQ ID NO: 294085 - DNA, 52 bp, Artificial
  Synthetic oligonucleotide
gtaacgttcccctcagatcatagtttccctactcctcagtcatattaccgtc

SEQ ID NO: 294086 - DNA, 52 bp, Artificial
  Synthetic oligonucleotide
accccacccacttcgcgttgtgatagccgtgtgcattcgttgatagaggcga

SEQ ID NO: 294087 - DNA, 52 bp, Artificial
  Synthetic oligonucleotide
acagtccattcgattggcaatcttagatgcgggcaagtgccctcaagagcca

SEQ ID NO: 294088 - DNA, 48 bp, Artificial
  Synthetic oligonucleotide
acccattttaaacccttcgtctaatggtaggacgttaacctttcacgt

SEQ ID NO: 294089 - DNA, 52 bp, Artificial
  Synthetic oligonucleotide
acataccaaaggatacttcacagccgccgcacataaccatgagcgcccttca

SEQ ID NO: 294090 - DNA, 52 bp, Artificial
  Synthetic oligonucleotide
acccacctacgttaccctcccctggtcgcgattaagaacgacctcataatac

SEQ ID NO: 294091 - DNA, 52 bp, Artificial
  Synthetic oligonucleotide
ggtcttgtcggctttcccctcccttctgcggtcttgtactagcacccaccgc

SEQ ID NO: 294092 - DNA, 52 bp, Artificial
  Synthetic oligonucleotide
ccttactcgtcgggcacactgcacgttgggctacacacctgcgagtgacctg

SEQ ID NO: 294093 - DNA, 52 bp, Artificial
  Synthetic oligonucleotide
ggttaaactatggaagactcgagttgtatccctacagatccggcgtgaaaag

SEQ ID NO: 294094 - DNA, 56 bp, Artificial
  Synthetic oligonucleotide
ttattaccgtacaaaccgttagcaagacatgacagggagttggcaagtcaaagaag

SEQ ID NO: 294095 - DNA, 52 bp, Artificial
  Synthetic oligonucleotide
acatgtagcatggccgacgtctcacagtccagtcagttatcagaaggattcc

SEQ ID NO: 294096 - DNA, 52 bp, Artificial
  Synthetic oligonucleotide
acatgttacggagcgggacatgtctaagctttaccggcaatacctgcgcgtc

SEQ ID NO: 294097 - DNA, 52 bp, Artificial
  Synthetic oligonucleotide
ggtgagtgagatcatagccctgtgggttgaggtgcagtttacatggcagtac

SEQ ID NO: 294098 - DNA, 52 bp, Artificial
  Synthetic oligonucleotide
acatgtttccgcatgctgcgcttagacttcggcaccccagcttgtgggggct

SEQ ID NO: 294099 - DNA, 52 bp, Artificial
  Synthetic oligonucleotide
acattgagcgtggaagaggtgtagtggagtttattagccgtgacgatatgct

SEQ ID NO: 294100 - DNA, 52 bp, Artificial
  Synthetic oligonucleotide
ggtgctccaggtcaatacggcgctccacaacaaccatacggcgctccaggtc

SEQ ID NO: 294101 - DNA, 52 bp, Artificial
  Synthetic oligonucleotide
ggggaagtttcatgcctccctccctgcgcaccgctgtcccttgtcttgcgtg

SEQ ID NO: 294102 - DNA, 52 bp, Artificial
  Synthetic oligonucleotide
accttagcttgtgagcctttccatcgcgttgtctcgactgacagtgctgggg

SEQ ID NO: 294103 - DNA, 52 bp, Artificial
  Synthetic oligonucleotide
gtcccacccaaggacgcacgcgaagagaagctgtttgtgtacagtgactccg

SEQ ID NO: 294104 - DNA, 52 bp, Artificial
  Synthetic oligonucleotide
gtcacatcggcccttcactcaatttcattgaggttctaaattctgatccctc

SEQ ID NO: 294105 - DNA, 59 bp, Artificial
  Synthetic oligonucleotide
ttatgtgttggcatggttacgagattaaaggatcaaaccttgataatcgactcgtgagg

SEQ ID NO: 294106 - DNA, 52 bp, Artificial
  Synthetic oligonucleotide
ggggcaccgggcaaagaggacgacgcactgcggtggttcttcgcgtacgggg

SEQ ID NO: 294107 - DNA, 52 bp, Artificial
  Synthetic oligonucleotide
ggggcataggagaagcagcgacacgtgacacacacgcaacggtgcgccaaaa

SEQ ID NO: 294108 - DNA, 52 bp, Artificial
  Synthetic oligonucleotide
acacggcgccctcactccatcacttgatcggtctcttctgcccttcttcgtt

SEQ ID NO: 294109 - DNA, 52 bp, Artificial
  Synthetic oligonucleotide
gtattcttgtcgctccatgcgctacccatggacagcataggtgtcagtccaa

SEQ ID NO: 294110 - DNA, 52 bp, Artificial
  Synthetic oligonucleotide
gtatgtgctaatatttatccacccctcaaccgcttgaatcacttatcccgtc

SEQ ID NO: 294111 - DNA, 52 bp, Artificial
  Synthetic oligonucleotide
gtatgcgagacactctttattatcgcataggtcgcatcacctatccgacacc

SEQ ID NO: 294112 - DNA, 52 bp, Artificial
  Synthetic oligonucleotide
gtatgaaagtacggggatcgataaggattagtttccctagtagtccgtactg

SEQ ID NO: 294113 - DNA, 52 bp, Artificial
  Synthetic oligonucleotide
acctaactagtgacaacgtgctctcctacatcagtgaccttttacctaacaa

SEQ ID NO: 294114 - DNA, 52 bp, Artificial
  Synthetic oligonucleotide
accgttttgcttgtagcggcggagctcagcccatgagtcaccacgttgtcga

SEQ ID NO: 294115 - DNA, 52 bp, Artificial
  Synthetic oligonucleotide
gtatataatgattactgtatccagattttttatgtcttactatgattctacc

SEQ ID NO: 294116 - DNA, 60 bp, Artificial
  Synthetic oligonucleotide
ttatgaaagtacacatggtaatgataactgtactaacattatcttatccttaatgactgc

SEQ ID NO: 294117 - DNA, 52 bp, Artificial
  Synthetic oligonucleotide
gtataagtcagttggtggattcatgacacgaagcgagagagcggatccttac

SEQ ID NO: 294118 - DNA, 52 bp, Artificial
  Synthetic oligonucleotide
gtagttgttacgtgggtgtggatcatcagtccactcaacgttcatcgcccaa

SEQ ID NO: 294119 - DNA, 52 bp, Artificial
  Synthetic oligonucleotide
gggtgattacaataatgatcagcaacctacaaatgaagaggagggtacagct

SEQ ID NO: 294120 - DNA, 52 bp, Artificial
  Synthetic oligonucleotide
gtaggctgaaacaatcacggagggatgattaaacaatacgcttaacgacggg

SEQ ID NO: 294121 - DNA, 52 bp, Artificial
  Synthetic oligonucleotide
gtagctcgtctgatttagcattcggcaactagctgattcaagtcagccgtat

SEQ ID NO: 294122 - DNA, 52 bp, Artificial
  Synthetic oligonucleotide
gggtgttacgggtgttattctagctaacgctggcttagatgttgccctacac

SEQ ID NO: 294123 - DNA, 52 bp, Artificial
  Synthetic oligonucleotide
accgcctctcgacatctcccgctgtcccgtggcctgttacgaatccctccct

SEQ ID NO: 294124 - DNA, 52 bp, Artificial
  Synthetic oligonucleotide
accgccgcaacgttggtcatcacgtatgcctacatgggcatctctctgatgg

SEQ ID NO: 294125 - DNA, 52 bp, Artificial
  Synthetic oligonucleotide
gtacgttctataacttccattgccttatgaaaactatgtattaatgagggtc

SEQ ID NO: 294126 - DNA, 52 bp, Artificial
  Synthetic oligonucleotide
tcggaagtagctcaacacccgacctatcggacccgaccgttcacaacggcga

SEQ ID NO: 294127 - DNA, 59 bp, Artificial
  Synthetic oligonucleotide
ttatactacttatggattgcttctgtatttggtttctatggtttcatcttatctgttat

SEQ ID NO: 294128 - DNA, 52 bp, Artificial
  Synthetic oligonucleotide
gctcctgtctcccgtaagtgaaggaaggttgggaggcacggggtgaggtggt

SEQ ID NO: 294129 - DNA, 52 bp, Artificial
  Synthetic oligonucleotide
tcgcacgtgacgagccccttatcgtgctttgcctcctgcttgtggagcgact

SEQ ID NO: 294130 - DNA, 52 bp, Artificial
  Synthetic oligonucleotide
aacgagtttaagcacattgactctagcgctgctattaatgcttaagattatc

SEQ ID NO: 294131 - DNA, 52 bp, Artificial
  Synthetic oligonucleotide
aacgatgtctatggttcctattaaagccgaaaggtcggctaggaggtgcccc

SEQ ID NO: 294132 - DNA, 52 bp, Artificial
  Synthetic oligonucleotide
tcgacgttagaagactctccgctacacaagtggtctacacagtccagatgcc

SEQ ID NO: 294133 - DNA, 52 bp, Artificial
  Synthetic oligonucleotide
tcctgagacacacggacttattcgtggcatgagtcaatatcaccagagagcg

SEQ ID NO: 294134 - DNA, 52 bp, Artificial
  Synthetic oligonucleotide
cgagagtctgaatggtttagttttgtggattgcaattccagttgccacatat

SEQ ID NO: 294135 - DNA, 52 bp, Artificial
  Synthetic oligonucleotide
tcctagcgggcatgcgaatgagtaattgcgtttgcaatcttgtttatctaaa

SEQ ID NO: 294136 - DNA, 52 bp, Artificial
  Synthetic oligonucleotide
agacaaccacagaggaaagttgcggcgtctgactctcgtcccctaccccacg

SEQ ID NO: 294137 - DNA, 52 bp, Artificial
  Synthetic oligonucleotide
tcaggtgttataccttatgcgaaaatgggctattgggatgcggactatagca

SEQ ID NO: 294138 - DNA, 59 bp, Artificial
  Synthetic oligonucleotide
ttaggttcttttcagatacgattgctttgtaataaatgcgatattggctctaattgtaa

SEQ ID NO: 294139 - DNA, 52 bp, Artificial
  Synthetic oligonucleotide
tcacgcgtgcatgcgctcaccctttggggtctttccgtttgtttgttagcgg

SEQ ID NO: 294140 - DNA, 52 bp, Artificial
  Synthetic oligonucleotide
tcaccgcaagtttgccgtataataatatggctcgcacaagtgtcccattcca

SEQ ID NO: 294141 - DNA, 52 bp, Artificial
  Synthetic oligonucleotide
tcaactactgcgggcgtgtcggggatgtatcgcaccacgttgacaccgcaaa

SEQ ID NO: 294142 - DNA, 52 bp, Artificial
  Synthetic oligonucleotide
agaacagaaacgtccagacaccgacgcatttcgtgcgtgcacaaagggtgaa

SEQ ID NO: 294143 - DNA, 52 bp, Artificial
  Synthetic oligonucleotide
tcaaacccgtgggtgtcgaaaggcacaggagttcgattctccctccggagcg

SEQ ID NO: 294144 - DNA, 52 bp, Artificial
  Synthetic oligonucleotide
tcaaacccatttatccctaggtccacgcccatttagccccatggcccagcct

SEQ ID NO: 294145 - DNA, 52 bp, Artificial
  Synthetic oligonucleotide
agaaacgctgctaattagcacacaaaacggacctcaccatagttaccccatt

SEQ ID NO: 294146 - DNA, 52 bp, Artificial
  Synthetic oligonucleotide
tcaaacccacgcgcctccatcattcctggccgctacaaggggcccaactcaa

SEQ ID NO: 294147 - DNA, 52 bp, Artificial
  Synthetic oligonucleotide
tattgcgcccccattcggcatcggtacatgggtgcatactgctgcgtgaact

SEQ ID NO: 294148 - DNA, 52 bp, Artificial
  Synthetic oligonucleotide
tattcctttgcgacggctggcgagaaacgtcgtctcgtgcctctgccgttgc

SEQ ID NO: 294149 - DNA, 53 bp, Artificial
  Synthetic oligonucleotide
ttctagggtttttcgcgttttttcaggagaaatccgtatatcgatgtttttca

SEQ ID NO: 294150 - DNA, 52 bp, Artificial
  Synthetic oligonucleotide
aactaagtggaattaaagacttacacgctggagacgcgacttcttagacgcc

SEQ ID NO: 294151 - DNA, 52 bp, Artificial
  Synthetic oligonucleotide
tgaaaagcatgccggcgttaaaccgcgtctgggagacgtggcgagtgctgcc

SEQ ID NO: 294152 - DNA, 52 bp, Artificial
  Synthetic oligonucleotide
tcttctatgagcaaatgcacggcaggaaaagcacaacgttgacggcggcagt

SEQ ID NO: 294153 - DNA, 52 bp, Artificial
  Synthetic oligonucleotide
agagctgtcaccgaatctggtcgtcccctccgttgatggggccgtcttgtcc

SEQ ID NO: 294154 - DNA, 52 bp, Artificial
  Synthetic oligonucleotide
aacccgcctgccgattacacgaactttgaagccccaaatgccgggaaccaca

SEQ ID NO: 294155 - DNA, 52 bp, Artificial
  Synthetic oligonucleotide
tctggatgcagggttagctgctaggcaaagtcactgtgttgatataccgttg

SEQ ID NO: 294156 - DNA, 52 bp, Artificial
  Synthetic oligonucleotide
gctaatatggtcgattatctcaaacgtggaggagactacctggtaagcgtac

SEQ ID NO: 294157 - DNA, 52 bp, Artificial
  Synthetic oligonucleotide
aaccctttaacaacaatcggaactttgcatatctggctgtgcgcatgtacgc

SEQ ID NO: 294158 - DNA, 52 bp, Artificial
  Synthetic oligonucleotide
aacccttttcggagctgaactgtctctcttccgtttcccgttggcgaaagag

SEQ ID NO: 294159 - DNA, 52 bp, Artificial
  Synthetic oligonucleotide
gctacagcgcgttggtatttcgttcatgcacgcagctgccggtggaaagagc

SEQ ID NO: 294160 - DNA, 57 bp, Artificial
  Synthetic oligonucleotide
ttcgtaagaataatttagttacgtgttaatctatcagattggcttacgattaataga

SEQ ID NO: 294161 - DNA, 52 bp, Artificial
  Synthetic oligonucleotide
agagcgggtgtattcttttcgcacgtcgcacacccgtagagtgggatagacg

SEQ ID NO: 294162 - DNA, 52 bp, Artificial
  Synthetic oligonucleotide
agagcgccactagcagcgctgtggtcgagagagaagacgccatgatatgctg

SEQ ID NO: 294163 - DNA, 52 bp, Artificial
  Synthetic oligonucleotide
tctcgtcgtccgtctgcagggtggtgtaaaccgcgaagagatagcgctcaat

SEQ ID NO: 294164 - DNA, 52 bp, Artificial
  Synthetic oligonucleotide
tctcgactccatcagctggacgtagctcactaggcgctgaatttcgtgactg

SEQ ID NO: 294165 - DNA, 52 bp, Artificial
  Synthetic oligonucleotide
cgagcgggccatcagtcggcggaggggcaagctgcaatctgcaccgtcgccg

SEQ ID NO: 294166 - DNA, 52 bp, Artificial
  Synthetic oligonucleotide
tctccgactgagggaaggcactcgtactcacttgacttccactcatactgct

SEQ ID NO: 294167 - DNA, 52 bp, Artificial
  Synthetic oligonucleotide
tctccacgcaccttgacgagtacccgtcgccgttcatacttcgcatggcgct

SEQ ID NO: 294168 - DNA, 52 bp, Artificial
  Synthetic oligonucleotide
tctcatcacacaggggtcgtcatcctccgtgcgtgacggacgagtccgaggc

SEQ ID NO: 294169 - DNA, 52 bp, Artificial
  Synthetic oligonucleotide
tctatccgcgcacaaattctgaccacaacgtctagtctacagggcgagtaga

SEQ ID NO: 294170 - DNA, 52 bp, Artificial
  Synthetic oligonucleotide
tctactccaaatccgtgtgttcgtaaagaccagagtggtactcatatcgtga

SEQ ID NO: 294171 - DNA, 57 bp, Artificial
  Synthetic oligonucleotide
cctgatttatcgtaggtgacgtaatagcgtttatctaatttgttagcatcggcccac

SEQ ID NO: 294172 - DNA, 52 bp, Artificial
  Synthetic oligonucleotide
cctataaggaccttttgacccaactgactcctttactgagtcaaagtagctc

SEQ ID NO: 294173 - DNA, 52 bp, Artificial
  Synthetic oligonucleotide
cgagccccatgagcgctctccacaacgctagacaggattgcagcggagtcga

SEQ ID NO: 294174 - DNA, 52 bp, Artificial
  Synthetic oligonucleotide
agacttcatgtctgggagtggtgattgacccatgacctaaagagtgcactgc

SEQ ID NO: 294175 - DNA, 52 bp, Artificial
  Synthetic oligonucleotide
gctccccttggcagtcccccgcctcactactatccgggccaattcccgcttg

SEQ ID NO: 294176 - DNA, 52 bp, Artificial
  Synthetic oligonucleotide
ggacgcgcgagagtaaacgacaaacaacaaggttcggcacaatgcaacgaca

SEQ ID NO: 294177 - DNA, 52 bp, Artificial
  Synthetic oligonucleotide
taccaggctttccttccctcgaacagaggggtgactcacggtcactgcgact

SEQ ID NO: 294178 - DNA, 52 bp, Artificial
  Synthetic oligonucleotide
aagcagggacgctctaattcaggtcgcataacctctaggttccgtggaggca

SEQ ID NO: 294179 - DNA, 52 bp, Artificial
  Synthetic oligonucleotide
taccacaccatcgcagccaccagtgaccgaaatcgacgttggtgggcaatag

SEQ ID NO: 294180 - DNA, 52 bp, Artificial
  Synthetic oligonucleotide
taccaaatatgattagagacgacactagcgaaacctctcaacactcgcagca

SEQ ID NO: 294181 - DNA, 52 bp, Artificial
  Synthetic oligonucleotide
tacacgatgccttgacccatgggagactgtagaagcatctcaaacgactttt

SEQ ID NO: 294182 - DNA, 60 bp, Artificial
  Synthetic oligonucleotide
gtgttttgtgcttcatacattccacccgacgtgttttgtgcttgatatgttccacctgac

SEQ ID NO: 294183 - DNA, 60 bp, Artificial
  Synthetic oligonucleotide
tctttggatacttgatcgatttaaagtcatagcatcttctatgtcgtgtcctcggtaaga

SEQ ID NO: 294184 - DNA, 52 bp, Artificial
  Synthetic oligonucleotide
ggagccggttgcacatacgcaaacgactccgaaaaggcggtccaggaccaca

SEQ ID NO: 294185 - DNA, 52 bp, Artificial
  Synthetic oligonucleotide
ggagctcccttctgcacccgtagcatctgaaacagcgggtcggctgaggaac

SEQ ID NO: 294186 - DNA, 52 bp, Artificial
  Synthetic oligonucleotide
ggaggctcagcttgcgaggacgagctaggtaccacgagccgttgcacacaag

SEQ ID NO: 294187 - DNA, 52 bp, Artificial
  Synthetic oligonucleotide
taatctgctgtagcactctgcccttccacaccgaggcccacacttgcctgat

SEQ ID NO: 294188 - DNA, 52 bp, Artificial
  Synthetic oligonucleotide
taagggcgaccatttccgtagatgaagacctgcttaatgaacgggctctttg

SEQ ID NO: 294189 - DNA, 52 bp, Artificial
  Synthetic oligonucleotide
aagcgcggataaaaggagagtagacccaaactgggttcaacacgaacgagct

SEQ ID NO: 294190 - DNA, 52 bp, Artificial
  Synthetic oligonucleotide
ggagtgaatcggcacagggtgaataggaatcgtttattcgggcattgcgatc

SEQ ID NO: 294191 - DNA, 52 bp, Artificial
  Synthetic oligonucleotide
aagctccgcgttccgctgctgctctattacaaccgcatgcctgtctacgcca

SEQ ID NO: 294192 - DNA, 52 bp, Artificial
  Synthetic oligonucleotide
taactagctggtctccctaaggctagtaacagtacggacagcctgtaaggaa

SEQ ID NO: 294193 - DNA, 52 bp, Artificial
  Synthetic oligonucleotide
taacgtgttgtgttccgttggtttcggttgttacagaaagtggagaactagg

SEQ ID NO: 294194 - DNA, 58 bp, Artificial
  Synthetic oligonucleotide
atactctgttcaacaagatgattctgtcgtgctttaaatacttagtcaaaaccctgta

SEQ ID NO: 294195 - DNA, 52 bp, Artificial
  Synthetic oligonucleotide
acgttctatgaggatgtccctggtattgttagggaggagtttgatcgtgtga

SEQ ID NO: 294196 - DNA, 52 bp, Artificial
  Synthetic oligonucleotide
ggatcgcagagagacatgtgctagcgcactcagatctctaggcttgacctcc

SEQ ID NO: 294197 - DNA, 52 bp, Artificial
  Synthetic oligonucleotide
aagctttcaaataattcggattctaccgtaatatttaacgacgtaatgagac

SEQ ID NO: 294198 - DNA, 52 bp, Artificial
  Synthetic oligonucleotide
ggcaattgagtttttcctccaaaaggattattactctgtatccattctgttc

SEQ ID NO: 294199 - DNA, 52 bp, Artificial
  Synthetic oligonucleotide
ccggaagcaaacagatcaggcgggtacacgatatggactgttgcgtcgtcga

SEQ ID NO: 294200 - DNA, 52 bp, Artificial
  Synthetic oligonucleotide
gtttgagttagatttgtatttaattgttggttatacattttagattgtatag

SEQ ID NO: 294201 - DNA, 52 bp, Artificial
  Synthetic oligonucleotide
gttgttacgggcggggacgtgaacgagggataaacgtgcggcatgctcatat

SEQ ID NO: 294202 - DNA, 52 bp, Artificial
  Synthetic oligonucleotide
aactagtagccgctcacttgggatgatgcaggttgacgggtttgtggactgc

SEQ ID NO: 294203 - DNA, 52 bp, Artificial
  Synthetic oligonucleotide
tatccagatctacttactttagttgcggtatcaagaagtcccaatcttcctg

SEQ ID NO: 294204 - DNA, 52 bp, Artificial
  Synthetic oligonucleotide
tagttcgaatagcttcattggcgggggccatatttggccggcgtgtttggga

SEQ ID NO: 294205 - DNA, 60 bp, Artificial
  Synthetic oligonucleotide
gccccacctgaaagaaagtactcagtctggattggaggcagtgtcctcgcgagccttgca

SEQ ID NO: 294206 - DNA, 52 bp, Artificial
  Synthetic oligonucleotide
taggtacgtggatgctttggaggtctccgtccatgcgtctaggcttgcgggg

SEQ ID NO: 294207 - DNA, 52 bp, Artificial
  Synthetic oligonucleotide
gctttaaaatcaagtgattgtagtaaacataaacaaactgaagaatctttcg

SEQ ID NO: 294208 - DNA, 52 bp, Artificial
  Synthetic oligonucleotide
taggggagccccttagtcctgtggtggctcaatgacccagggtaggggaatg

SEQ ID NO: 294209 - DNA, 52 bp, Artificial
  Synthetic oligonucleotide
taggaggcacttgaaatcgagggacgctgaggaagcaaggcatgcgtctgcg

SEQ ID NO: 294210 - DNA, 52 bp, Artificial
  Synthetic oligonucleotide
ccctcctgacaagaccctccctggctgccctactgtggcctttctctaagcg

SEQ ID NO: 294211 - DNA, 52 bp, Artificial
  Synthetic oligonucleotide
tagcccagtttactctttacacgaaccaatggtcaaccaatgtggtgatcaa

SEQ ID NO: 294212 - DNA, 52 bp, Artificial
  Synthetic oligonucleotide
ggaaatgcatagccctggaagcgcaagacgccttgctgttgcatgatcgtaa

SEQ ID NO: 294213 - DNA, 52 bp, Artificial
  Synthetic oligonucleotide
ggaacagcttgcgtatgcatttttgatcccattaaacttctacacatgtcgt

SEQ ID NO: 294214 - DNA, 52 bp, Artificial
  Synthetic oligonucleotide
tagataatgcaccgaattatatcaagcctttggtacattgttctggccctcg

SEQ ID NO: 294215 - DNA, 52 bp, Artificial
  Synthetic oligonucleotide
aagactgagacttgagtggctagctgtccattcttcgtacatatctggcccc

SEQ ID NO: 294216 - DNA, 58 bp, Artificial
  Synthetic oligonucleotide
gtaatttcgttcctatcgatttatgtgtagatccgacggttttgatatcaactatgta

SEQ ID NO: 294217 - DNA, 52 bp, Artificial
  Synthetic oligonucleotide
ggaagggccccgcacacgcttccgtagcaggacaccagtacctccacagtgc

SEQ ID NO: 294218 - DNA, 52 bp, Artificial
  Synthetic oligonucleotide
aagagacgcccgaggcatctctccgtcgtgccttcgtggaaagtgccgcagt

SEQ ID NO: 294219 - DNA, 52 bp, Artificial
  Synthetic oligonucleotide
tactcaaatgcttcctgccgatcctactacacttccggctttaggttacagt

SEQ ID NO: 294220 - DNA, 52 bp, Artificial
  Synthetic oligonucleotide
tacgtttggcatacaatggagatgtgggtgattcacttgtgaggctttcccc

SEQ ID NO: 294221 - DNA, 52 bp, Artificial
  Synthetic oligonucleotide
cctcatcacctgtgtataggcgtctgtcacttgctgcagtttcgcctgtagc

SEQ ID NO: 294222 - DNA, 52 bp, Artificial
  Synthetic oligonucleotide
aagatgcctggacagtcgaaagcaataggtcgtcatatacatcatttgactc

SEQ ID NO: 294223 - DNA, 52 bp, Artificial
  Synthetic oligonucleotide
tacgctacgcacactctcgagcctgctcaaagcccgctccaagagcgagaat

SEQ ID NO: 294224 - DNA, 52 bp, Artificial
  Synthetic oligonucleotide
tacgaagctaaaaccctggcaagggctgccgtatccccgaccgggaagacac

SEQ ID NO: 294225 - DNA, 52 bp, Artificial
  Synthetic oligonucleotide
ggacgatggggattctaagttgacaccttctcatgatatcaacttagacctt

SEQ ID NO: 294226 - DNA, 52 bp, Artificial
  Synthetic oligonucleotide
actcggcagaggtaaagtacggactgtagctcgtacaggtgagaaaggttgg

SEQ ID NO: 294227 - DNA, 52 bp, Artificial
  Synthetic oligonucleotide
gagaccccttttttcgaggggtggcacctaaaaccaggtgccagcacctggt

SEQ ID NO: 294228 - DNA, 52 bp, Artificial
  Synthetic oligonucleotide
ccacgcggacacaatgagcatcgaccgaaaacaagcagtgagagaaacggga

SEQ ID NO: 294229 - DNA, 52 bp, Artificial
  Synthetic oligonucleotide
ctgcaataagaaccaggcccaaaatagtgtcgaaacccaaccgagtgatgaa

SEQ ID NO: 294230 - DNA, 52 bp, Artificial
  Synthetic oligonucleotide
ctcacagtgggtaacacattaactcagcgacagtacacaacaacccatagaa

SEQ ID NO: 294231 - DNA, 52 bp, Artificial
  Synthetic oligonucleotide
ctctcgctcgcacttcccaccatgccaacagtgttgcgggccctctcgtcac

SEQ ID NO: 294232 - DNA, 52 bp, Artificial
  Synthetic oligonucleotide
atgacgcacatctagcttaagtggtcgcactctattgtattttcgtcgagag

SEQ ID NO: 294233 - DNA, 52 bp, Artificial
  Synthetic oligonucleotide
gacgaggctggggtatgggccagtggacagactgtcggtctagcacacactg

SEQ ID NO: 294234 - DNA, 52 bp, Artificial
  Synthetic oligonucleotide
cagaaaacacgatgtcagagaagggaaccatagaagaccgatccagcaccta

SEQ ID NO: 294235 - DNA, 52 bp, Artificial
  Synthetic oligonucleotide
caagtctagcccgtattgcaccctaatacatgcaaaggataattatacgttg

SEQ ID NO: 294236 - DNA, 52 bp, Artificial
  Synthetic oligonucleotide
cgggaacagcgcgcgtggtcagtaccgttttaatgcaccgaatgagccgctc

SEQ ID NO: 294237 - DNA, 52 bp, Artificial
  Synthetic oligonucleotide
cgcacgagtgtggcacagcggaacgcacgactttacccttcgctggtccact

SEQ ID NO: 294238 - DNA, 59 bp, Artificial
  Synthetic oligonucleotide
gttcatagattaaaacaagttgacggtcataattgtactatttgtctaaaatatcatgc

SEQ ID NO: 294239 - DNA, 52 bp, Artificial
  Synthetic oligonucleotide
ctctcggtatcctcttttgaacgtgccaagctctctatcgcctgcatcgtct

SEQ ID NO: 294240 - DNA, 52 bp, Artificial
  Synthetic oligonucleotide
ccaaagtcaagcgacaattggcccggatagtagtgaggcgggggactaccaa

SEQ ID NO: 294241 - DNA, 52 bp, Artificial
  Synthetic oligonucleotide
cagacagcaagatatgcttgcttcctacctcacagctatagcaacccctgtg

SEQ ID NO: 294242 - DNA, 52 bp, Artificial
  Synthetic oligonucleotide
gaaagaggatgtatgggtggcccgctgcgtccttttcacggcacgagacgca

SEQ ID NO: 294243 - DNA, 52 bp, Artificial
  Synthetic oligonucleotide
ccaggccacctcaccgctgcattacacagtggagaactcctccgagctgggg

SEQ ID NO: 294244 - DNA, 52 bp, Artificial
  Synthetic oligonucleotide
gcaacgatagcttcgaggtgggtgcgaggtcgtctgcatcctcgctgacttc

SEQ ID NO: 294245 - DNA, 52 bp, Artificial
  Synthetic oligonucleotide
cgtcgctgatgtaaaacaccagcttttgagggcgcgccacaaagaagaggtg

SEQ ID NO: 294246 - DNA, 52 bp, Artificial
  Synthetic oligonucleotide
ctgatcttaaaccacctaaaaaggcgtattttgaattacttgaccaaccaga

SEQ ID NO: 294247 - DNA, 52 bp, Artificial
  Synthetic oligonucleotide
cacgagtgataagctcgtaggctccttgcgtcacctcagcggcgggtatgtt

SEQ ID NO: 294248 - DNA, 52 bp, Artificial
  Synthetic oligonucleotide
cgtgcataaggaagtcaccgatttgcgacgccgccttgatacaaagactgtg

SEQ ID NO: 294249 - DNA, 57 bp, Artificial
  Synthetic oligonucleotide
catatagtcgaataaggcgctttttacggtgagggcatagcaacctacgtagcccca

SEQ ID NO: 294250 - DNA, 52 bp, Artificial
  Synthetic oligonucleotide
agtaagtcagtgtgttttgggtcgaggctggtgtatctaaaatagtactcta

SEQ ID NO: 294251 - DNA, 52 bp, Artificial
  Synthetic oligonucleotide
ctgttacacttctaacgcgaacagttctcgagtgaatagcgcatgaaacgca

SEQ ID NO: 294252 - DNA, 52 bp, Artificial
  Synthetic oligonucleotide
cggccgtgtgcgcacagagacgtagaggagggtgcgagggagtgtgcgagta

SEQ ID NO: 294253 - DNA, 52 bp, Artificial
  Synthetic oligonucleotide
cccagagtgcagagagaagcaacagtggtgccgcctagagctgttcttgcac

SEQ ID NO: 294254 - DNA, 52 bp, Artificial
  Synthetic oligonucleotide
gacctcgtcagcatgaaacggagtccgcccagtggcatgaacattaatctta

SEQ ID NO: 294255 - DNA, 52 bp, Artificial
  Synthetic oligonucleotide
ctctctgtgacaacgtcaaggtcctaccagtacacggcaagagagctcaggt

SEQ ID NO: 294256 - DNA, 52 bp, Artificial
  Synthetic oligonucleotide
cggctttcagccatttgaggatacgaggagcaaatttaatgtgaggtattat

SEQ ID NO: 294257 - DNA, 52 bp, Artificial
  Synthetic oligonucleotide
cgtcggaaccaagagtgctcttgaacctcgcgtccgaggagcaatgtgggtc

SEQ ID NO: 294258 - DNA, 52 bp, Artificial
  Synthetic oligonucleotide
cttagacatgggacctgcgacggtggcagttgcggctttgcgaagaacacac

SEQ ID NO: 294259 - DNA, 52 bp, Artificial
  Synthetic oligonucleotide
ccccaccactctaccctacgcgcgcccacacagcagtattagcgtaagcagc

SEQ ID NO: 294260 - DNA, 59 bp, Artificial
  Synthetic oligonucleotide
caggtatacaggcgcatgtggggtgatcaggaactcaccatcgccgtgtggagccgtat

SEQ ID NO: 294261 - DNA, 52 bp, Artificial
  Synthetic oligonucleotide
atgtgatggagtcacctccctctccacacccgtgtctcttcgcgtcttcgca

SEQ ID NO: 294262 - DNA, 52 bp, Artificial
  Synthetic oligonucleotide
ctcatgaaccgagagagaggacgtggtggcaaatgtctaagcacaactgacg

SEQ ID NO: 294263 - DNA, 52 bp, Artificial
  Synthetic oligonucleotide
ccagttccacaacagaataatggctcagattgtggggtattcacatgtatgt

SEQ ID NO: 294264 - DNA, 52 bp, Artificial
  Synthetic oligonucleotide
cttgaccaccaactgcctgtggtgacttcgacccctccgtggtgccttgtga

SEQ ID NO: 294265 - DNA, 52 bp, Artificial
  Synthetic oligonucleotide
ccatgggacacgccctgcgaagtgatgaaggcgtgccgcactctccaacaca

SEQ ID NO: 294266 - DNA, 52 bp, Artificial
  Synthetic oligonucleotide
gcaaattctggcgggaagaattggcgctttcctcacgaaggaaacgatcagt

SEQ ID NO: 294267 - DNA, 52 bp, Artificial
  Synthetic oligonucleotide
cggatgacaacccctgcaatgtaaacatcctgcactgtgttgcgtccacaat

SEQ ID NO: 294268 - DNA, 52 bp, Artificial
  Synthetic oligonucleotide
cgcgggaagaggtgcacatgacggctgtcagcgcggggtcaaatacgtctaa

SEQ ID NO: 294269 - DNA, 52 bp, Artificial
  Synthetic oligonucleotide
agtgacctggtgacacgggacgctctcgatcagagaccaagcggcgtcgtac

SEQ ID NO: 294270 - DNA, 52 bp, Artificial
  Synthetic oligonucleotide
atgatctcatgcattattcactagaatgtacagcaagatggaccgaccactc

SEQ ID NO: 294271 - DNA, 59 bp, Artificial
  Synthetic oligonucleotide
taccagggttacaagctcgcacaccactccctccgcttttacctagagtcgagcatgct

SEQ ID NO: 294272 - DNA, 52 bp, Artificial
  Synthetic oligonucleotide
ccatggtaaggcagaggtgctttacatgggtaagcaccaatgggaggagggg

SEQ ID NO: 294273 - DNA, 52 bp, Artificial
  Synthetic oligonucleotide
ctcagatggctggaccggggcaatgctgtactgacgcgtgtctctacggcca

SEQ ID NO: 294274 - DNA, 52 bp, Artificial
  Synthetic oligonucleotide
caactgttgctccacgtgaagcgcatgaggaagcgtgagtgacatctggtgt

SEQ ID NO: 294275 - DNA, 52 bp, Artificial
  Synthetic oligonucleotide
ccatcctgctcccgtttagtattattcctacgaattgtagaacctagcatac

SEQ ID NO: 294276 - DNA, 52 bp, Artificial
  Synthetic oligonucleotide
ctctaggactatgtgattatctgcgtattggttgcactgcaggaaattgtgg

SEQ ID NO: 294277 - DNA, 52 bp, Artificial
  Synthetic oligonucleotide
gcacgtttgatctgagcgggtacacgcatcgcgtggacaagggactggagtg

SEQ ID NO: 294278 - DNA, 52 bp, Artificial
  Synthetic oligonucleotide
gcacgtgtgttactcgtagcatacttttccttaggacgtaagggatttgcaa

SEQ ID NO: 294279 - DNA, 52 bp, Artificial
  Synthetic oligonucleotide
ctaaagcaggttacggagtattaggaagagtagtttctccattaggagaatg

SEQ ID NO: 294280 - DNA, 52 bp, Artificial
  Synthetic oligonucleotide
ccccgtgacgtgacggacgaaatttgccctgcgtgggtcgctgagtatgtac

SEQ ID NO: 294281 - DNA, 52 bp, Artificial
  Synthetic oligonucleotide
gagccgccacaattctgcggttcgggtagagtgtcacgcgcgacgtgtattg

SEQ ID NO: 294282 - DNA, 57 bp, Artificial
  Synthetic oligonucleotide
tttcaaaacaagcgacccatgaagggcgatacctgcagacacgcccggcccctattg

SEQ ID NO: 294283 - DNA, 52 bp, Artificial
  Synthetic oligonucleotide
ctggggaagcattggctgtaactcgattggacgtggtaacctcagcagggaa

SEQ ID NO: 294284 - DNA, 52 bp, Artificial
  Synthetic oligonucleotide
caagaaatgctagtacgattgtgtcccctgagtcttcacgggctgtggccac

SEQ ID NO: 294285 - DNA, 52 bp, Artificial
  Synthetic oligonucleotide
cttgcgttcctacagtgtcgcagagacggcactcactctggccacacgaatt

SEQ ID NO: 294286 - DNA, 52 bp, Artificial
  Synthetic oligonucleotide
caggatctgctaatttatgggtcccaagtgttaaatgtacaactgcaggatg

SEQ ID NO: 294287 - DNA, 52 bp, Artificial
  Synthetic oligonucleotide
atgttacacaatgctcggaaagctcagaatctccactacataagccttcttc

SEQ ID NO: 294288 - DNA, 52 bp, Artificial
  Synthetic oligonucleotide
ctaggcataattattggatctcctgttgccggcgataaaaaattgtaaggag

SEQ ID NO: 294289 - DNA, 52 bp, Artificial
  Synthetic oligonucleotide
attccctcctggctttgatgccacgagacagacggctgggcctctcccaccg

SEQ ID NO: 294290 - DNA, 52 bp, Artificial
  Synthetic oligonucleotide
cggcgtcaggtcacccatccgttgaatggcaccgatgcacaccgtctccgtg

SEQ ID NO: 294291 - DNA, 52 bp, Artificial
  Synthetic oligonucleotide
cccctgctgtggaatagagatgcatacttgtgcttgtctgcctgtgcgtgcg

SEQ ID NO: 294292 - DNA, 52 bp, Artificial
  Synthetic oligonucleotide
ctacgcatgatagtatcacattggtgttgtacagcattagatacggttttcc

SEQ ID NO: 294293 - DNA, 60 bp, Artificial
  Synthetic oligonucleotide
gtgttgtgtggttgtgcgccttgcctctgtgacagaggtgagcgcacagagggagcctga

SEQ ID NO: 294294 - DNA, 53 bp, Artificial
  Synthetic oligonucleotide
ctcaaagtcaccgtccaataagcttaaaggttactagtttagaatatgtgttt

SEQ ID NO: 294295 - DNA, 52 bp, Artificial
  Synthetic oligonucleotide
ctctttcaagcctattcgacccctgcagtcacgcatgcgattacactcctgt

SEQ ID NO: 294296 - DNA, 52 bp, Artificial
  Synthetic oligonucleotide
ctgtgcggatgtgattacaccattggggttcacggcgtagggatagtaaacg

SEQ ID NO: 294297 - DNA, 52 bp, Artificial
  Synthetic oligonucleotide
cgctcacttgatgctgaggcaatccgttagtcattggggtacgagtagtgtg

SEQ ID NO: 294298 - DNA, 52 bp, Artificial
  Synthetic oligonucleotide
gaggtcgtacgccatgtgtgcaccggtaagcggcgacgcacagtgtcacgga

SEQ ID NO: 294299 - DNA, 52 bp, Artificial
  Synthetic oligonucleotide
cgctttctgctacctctcctccgtgtcttttgcgtcgtctcgtcttttatga

SEQ ID NO: 294300 - DNA, 52 bp, Artificial
  Synthetic oligonucleotide
cacctgcgagtgacctggtgacacgggacgctctcgatcagagaccaagcgg

SEQ ID NO: 294301 - DNA, 52 bp, Artificial
  Synthetic oligonucleotide
attcgccatgttctaagaggaccagcgcgagtgtcatgaggtgaggtggtac

SEQ ID NO: 294302 - DNA, 52 bp, Artificial
  Synthetic oligonucleotide
gagggagggtgggttcaggattcgactccgggcggccacgtatatgcggcca

SEQ ID NO: 294303 - DNA, 52 bp, Artificial
  Synthetic oligonucleotide
cggcgtttgcaagaccgcaacaggtatgttcgcgtacggcagcagtgactcc

SEQ ID NO: 294304 - DNA, 52 bp, Artificial
  Synthetic oligonucleotide
atcccgccgctgcatcgctttcacggactgcctctatgggcttcgctttcct

SEQ ID NO: 294305 - DNA, 59 bp, Artificial
  Synthetic oligonucleotide
cgtgaggctagagcgcagacgagggatacggtgcgttgcgtacatgatccaagtacgct

SEQ ID NO: 294306 - DNA, 52 bp, Artificial
  Synthetic oligonucleotide
ctgtcacgttgtgcgttgtctgggcggccgtagcggtgacctaccacgtaga

SEQ ID NO: 294307 - DNA, 52 bp, Artificial
  Synthetic oligonucleotide
gacaggtgtgggcaccggagcaaccggaagcgttgtgtgcaagatgcacgtc

SEQ ID NO: 294308 - DNA, 52 bp, Artificial
  Synthetic oligonucleotide
cgtgaaggacgaacaacagcaaaggtcagacgaacctattcctacataaacg

SEQ ID NO: 294309 - DNA, 52 bp, Artificial
  Synthetic oligonucleotide
cgtgaatgggacaactaatcagattcaaacaagtagtgctccaatgagtact

SEQ ID NO: 294310 - DNA, 52 bp, Artificial
  Synthetic oligonucleotide
ctactggctgtgcttcatgttaggtatggtgtctccgcgcaaggtacttgtg

SEQ ID NO: 294311 - DNA, 52 bp, Artificial
  Synthetic oligonucleotide
gcaatggtcgttaatcgagttggtgatatcggagttgttttagcaatgctaa

SEQ ID NO: 294312 - DNA, 52 bp, Artificial
  Synthetic oligonucleotide
cgcaccgcccagagagaaaagaacgtgcagccagcaaagtcctgaacttacg

SEQ ID NO: 294313 - DNA, 52 bp, Artificial
  Synthetic oligonucleotide
gcaattgccactgaggtgtcgagcgagtctgcttgtggcatctccacgcttg

SEQ ID NO: 294314 - DNA, 52 bp, Artificial
  Synthetic oligonucleotide
gcacaaaacatgagttacgccaaagcgacacggggaccagtaaacacggcgt

SEQ ID NO: 294315 - DNA, 52 bp, Artificial
  Synthetic oligonucleotide
gacagtcgtctgtaacgcagcgaagaactatatctgttgttaaacccgcgtt

SEQ ID NO: 294316 - DNA, 55 bp, Artificial
  Synthetic oligonucleotide
tacctaccgagcttaccaggagtactacactggcgggcgtccctctgtttttgac

SEQ ID NO: 294317 - DNA, 52 bp, Artificial
  Synthetic oligonucleotide
atccatgccggacctctcgcggttcgagagactggacgcggtgaacttatca

SEQ ID NO: 294318 - DNA, 52 bp, Artificial
  Synthetic oligonucleotide
cataacggcgctcctaaaatagtagcactccaggtcatccatatagctcaac

SEQ ID NO: 294319 - DNA, 52 bp, Artificial
  Synthetic oligonucleotide
attatgactgtcgccccacgtcatgagcacagcaagtaacgcgttcgtttgc

SEQ ID NO: 294320 - DNA, 52 bp, Artificial
  Synthetic oligonucleotide
ctacaaggtgcctcagtgagctagcaggtccgaagtgtatacaccgtcagtc

SEQ ID NO: 294321 - DNA, 52 bp, Artificial
  Synthetic oligonucleotide
cgtctaacgaaagaaatggttcgcggggtcgagataactcgagtagtgcacc

SEQ ID NO: 294322 - DNA, 52 bp, Artificial
  Synthetic oligonucleotide
atcaacacaattcccgccttttgtactaaacggggtggcgcctttggggcgc

SEQ ID NO: 294323 - DNA, 52 bp, Artificial
  Synthetic oligonucleotide
cataattccggacgcggcctatcagcctagcctgagtcgaaataacacgtgt

SEQ ID NO: 294324 - DNA, 52 bp, Artificial
  Synthetic oligonucleotide
ctataatgttataaacttagctaaagcacatctaatatactacccttgccct

SEQ ID NO: 294325 - DNA, 52 bp, Artificial
  Synthetic oligonucleotide
cgcctgaattagatgcactgttaaaattgttggttggcgccaaggggttata

SEQ ID NO: 294326 - DNA, 52 bp, Artificial
  Synthetic oligonucleotide
ctctgacggagctataggtgtcattagtggtctccccggatcagagtatgag

SEQ ID NO: 294327 - DNA, 59 bp, Artificial
  Synthetic oligonucleotide
cggcaggatagcacgccagcattgttgcactgcatactcagcgagtcatcgagggccac

SEQ ID NO: 294328 - DNA, 52 bp, Artificial
  Synthetic oligonucleotide
ctgtgtctagtcatgacccacatatgttctagcgtcccattttcgattgtac

SEQ ID NO: 294329 - DNA, 52 bp, Artificial
  Synthetic oligonucleotide
ccacataatggcgggccgtgtgatttgtttgggcgggaatgtagacgcggcg

SEQ ID NO: 294330 - DNA, 52 bp, Artificial
  Synthetic oligonucleotide
atcgtcgtcgtaccagctatcattggacgagagtggtcgagtcggtgtgcag

SEQ ID NO: 294331 - DNA, 52 bp, Artificial
  Synthetic oligonucleotide
ccatagtggtgccctgcggcggaagagatgcgtatgacagacacaaaagacg

SEQ ID NO: 294332 - DNA, 52 bp, Artificial
  Synthetic oligonucleotide
ctagtcaatttaatgccattaacatatcaatgtatgttaataggaacattag

SEQ ID NO: 294333 - DNA, 52 bp, Artificial
  Synthetic oligonucleotide
gacaagtcgacaacatacaaacaactattggcacccatatccagagacggta

SEQ ID NO: 294334 - DNA, 52 bp, Artificial
  Synthetic oligonucleotide
agtcgggtatgtccggcagtttagcggcagggggaacggtgtacgcgctggg

SEQ ID NO: 294335 - DNA, 52 bp, Artificial
  Synthetic oligonucleotide
attcagtggggtgaaatcagcatacaaccgtcagtagagcagtttgttaggc

SEQ ID NO: 294336 - DNA, 52 bp, Artificial
  Synthetic oligonucleotide
gaggaggacctggccctcaaaggagtagtggcacgagatgtcccaccaccag

SEQ ID NO: 294337 - DNA, 52 bp, Artificial
  Synthetic oligonucleotide
atcacctctagtggcgacagggccaagtatctaggacgcagaggaggttaga

SEQ ID NO: 294338 - DNA, 55 bp, Artificial
  Synthetic oligonucleotide
aatgttgttaatgatccatatacaattccaattactcccatagtaaaaactaacg

SEQ ID NO: 294339 - DNA, 52 bp, Artificial
  Synthetic oligonucleotide
gacccatcggacactccgtagtacccgagcgtctctagctcgttgtctagcg

SEQ ID NO: 294340 - DNA, 52 bp, Artificial
  Synthetic oligonucleotide
gaggttaccaccaaccgttgcaggttcagtgaccgcgccggggactaccact

SEQ ID NO: 294341 - DNA, 52 bp, Artificial
  Synthetic oligonucleotide
ccacagcgaacgacctgccacgagctaaggatgcccgcacaggggacatcgt

SEQ ID NO: 294342 - DNA, 52 bp, Artificial
  Synthetic oligonucleotide
gacactcggacgctcagacgtgttgtgtgcagcatatcatgttaccgtattg

SEQ ID NO: 294343 - DNA, 52 bp, Artificial
  Synthetic oligonucleotide
cagatgttgagttactaagaggattctcttcacacttcaattcgtacttcca

SEQ ID NO: 294344 - DNA, 52 bp, Artificial
  Synthetic oligonucleotide
ctacacctttgggaatcggcacaattacaattggttcgacatgtgggcatgt

SEQ ID NO: 294345 - DNA, 52 bp, Artificial
  Synthetic oligonucleotide
atcagcatgcagtggcatgtagaactcacactaagtgtgtaacaagccccaa

SEQ ID NO: 294346 - DNA, 52 bp, Artificial
  Synthetic oligonucleotide
gaggatgcacgcagcctcacgggctgtccgcgattggttaaacggcagactc

SEQ ID NO: 294347 - DNA, 52 bp, Artificial
  Synthetic oligonucleotide
attcccagtcgctacctcttctactgcgacgacatgcccctcggcaatgaga

SEQ ID NO: 294348 - DNA, 52 bp, Artificial
  Synthetic oligonucleotide
caagcaatactgtactgtaattcgtgctctgtgccacactcaggttagcaag

SEQ ID NO: 294349 - DNA, 59 bp, Artificial
  Synthetic oligonucleotide
cggtacgcaattatgctaagtgggatgtgcacggagcgacacatgacgtcggcaacgta

SEQ ID NO: 294350 - DNA, 52 bp, Artificial
  Synthetic oligonucleotide
catgcgtggcgagttgcgatgccgcggaaacgagcgagcctgttccgcgact

SEQ ID NO: 294351 - DNA, 52 bp, Artificial
  Synthetic oligonucleotide
cacgttacaacactactaacgcaccgttacatgtgctccagctccctgccac

SEQ ID NO: 294352 - DNA, 52 bp, Artificial
  Synthetic oligonucleotide
ctgcttggatttgaacaaaggagatatagggaaagccgacgaactcgggtta

SEQ ID NO: 294353 - DNA, 52 bp, Artificial
  Synthetic oligonucleotide
gaagggagcgtaaggaagtgttctcatacttatcaaaccaaagctgtgtcgg

SEQ ID NO: 294354 - DNA, 52 bp, Artificial
  Synthetic oligonucleotide
gagactcgtgcgtgcaaacggaccctccgtcggcattgtaatcgcagccaca

SEQ ID NO: 294355 - DNA, 52 bp, Artificial
  Synthetic oligonucleotide
cggagaagtggtagtccatttgggtctctcccttcatggttgggaggagacc

SEQ ID NO: 294356 - DNA, 52 bp, Artificial
  Synthetic oligonucleotide
gagagaacggttgctgatgaacagacggagaagactgttccccagctccagt

SEQ ID NO: 294357 - DNA, 52 bp, Artificial
  Synthetic oligonucleotide
cagggtagaaaagcgttaacagggtgggagcggtctaccgtggcaccagtgg

SEQ ID NO: 294358 - DNA, 52 bp, Artificial
  Synthetic oligonucleotide
caccatagagggtcacggcaccatattgtagaatgccgtggcttgaagtgac

SEQ ID NO: 294359 - DNA, 52 bp, Artificial
  Synthetic oligonucleotide
atgcgtactacaccacgtgtttcaagcgcacagaccacgtcgtgatatgcgg

SEQ ID NO: 294360 - DNA, 57 bp, Artificial
  Synthetic oligonucleotide
gcacttggaccttttggtaaatgcgatattaccaaagcatcaggaacacccctgtgt

SEQ ID NO: 294361 - DNA, 50 bp, Artificial
  Synthetic oligonucleotide
cttcggggaaaaggagcccccgttgggggttagtggtgtgtacaagcacc

SEQ ID NO: 294362 - DNA, 52 bp, Artificial
  Synthetic oligonucleotide
aggtccagagtggcagggagagcgaaacaccccagaagctcactctacaaaa

SEQ ID NO: 294363 - DNA, 52 bp, Artificial
  Synthetic oligonucleotide
ccaacggtggacgaggactccatagggagcagcgaaagctcgtgaagaatgc

SEQ ID NO: 294364 - DNA, 52 bp, Artificial
  Synthetic oligonucleotide
atgtagacagtacagatcattcttccgggatttaaagtggatacagtatccc

SEQ ID NO: 294365 - DNA, 52 bp, Artificial
  Synthetic oligonucleotide
gagagctgcctttcgcctccactgaatgtgcccgctcctctcccactccccg

SEQ ID NO: 294366 - DNA, 52 bp, Artificial
  Synthetic oligonucleotide
cattcccgcacccttttctattgctagggattctgttgggttactgcgggcc

SEQ ID NO: 294367 - DNA, 52 bp, Artificial
  Synthetic oligonucleotide
atacctagatgatagcccagaatagtcgtcatacgactcttgtccgaccaat

SEQ ID NO: 294368 - DNA, 52 bp, Artificial
  Synthetic oligonucleotide
cacccaaggctgaggttccgtgatttcgaacacgtctcttgcgcagtccttg

SEQ ID NO: 294369 - DNA, 51 bp, Artificial
  Synthetic oligonucleotide
atacctccctttcaaggaggtacttgtcaagattaagcccgttgtaaaagg

SEQ ID NO: 294370 - DNA, 52 bp, Artificial
  Synthetic oligonucleotide
cttctgagacctgtgcgtctccacgactaccgtgctcactgccggcccacta

SEQ ID NO: 294371 - DNA, 59 bp, Artificial
  Synthetic oligonucleotide
tttctgccacagtactactcgcgtgcgtgtcggctgttgcttggtcaggtggagcaggc

SEQ ID NO: 294372 - DNA, 52 bp, Artificial
  Synthetic oligonucleotide
cgtaaacttccccgcagtgtcactgacgcgctagcgtcgccaccaatgacac

SEQ ID NO: 294373 - DNA, 52 bp, Artificial
  Synthetic oligonucleotide
ccaacgtgaccatctacgaggaaacgcgctgggagtggctggcgtctatcta

SEQ ID NO: 294374 - DNA, 52 bp, Artificial
  Synthetic oligonucleotide
gaacgttcgtaaacgtcttccattgtcgcacctgtaacgtttaagtaagaac

SEQ ID NO: 294375 - DNA, 52 bp, Artificial
  Synthetic oligonucleotide
agtggagtgcgggtatgcgcacacacatgcatcgactggccactcacttacg

SEQ ID NO: 294376 - DNA, 52 bp, Artificial
  Synthetic oligonucleotide
catgtttgcgttgaagtcttgaagcgacacacctttgcgcgcatgcccgggg

SEQ ID NO: 294377 - DNA, 52 bp, Artificial
  Synthetic oligonucleotide
atggccccgcgtgcctgatgccctcgacgcaactactcgcgccagtgaagag

SEQ ID NO: 294378 - DNA, 52 bp, Artificial
  Synthetic oligonucleotide
cacaaatagacgggcgaaagtatccgagaaacatcataacccagagggagtc

SEQ ID NO: 294379 - DNA, 52 bp, Artificial
  Synthetic oligonucleotide
caacgattatcccttggacgagatcctagatttcctagctcggtttcagctc

SEQ ID NO: 294380 - DNA, 52 bp, Artificial
  Synthetic oligonucleotide
gcagcgaaatgtcgctcatcctgcaggcttctcacgctaagtggtcgagtga

SEQ ID NO: 294381 - DNA, 52 bp, Artificial
  Synthetic oligonucleotide
caccacacgtatgcacccgagaaatgaggtatgcgccttggtcgcacaccag

SEQ ID NO: 294382 - DNA, 59 bp, Artificial
  Synthetic oligonucleotide
attgtagcagcgtgcgccaacgagtctgcggctctgcagtacatctcaccttacgttgg

SEQ ID NO: 294383 - DNA, 52 bp, Artificial
  Synthetic oligonucleotide
cccctccaatggcgcacttcctacgtctccacggaagaccacaccagcgttc

SEQ ID NO: 294384 - DNA, 52 bp, Artificial
  Synthetic oligonucleotide
atggctctcttgcgggagggtgcttggtgtccgcagagataaaaggtctgac

SEQ ID NO: 294385 - DNA, 52 bp, Artificial
  Synthetic oligonucleotide
cgctactgtcaggagcagggaacgatgtggaaacataaagcgggatccaatg

SEQ ID NO: 294386 - DNA, 52 bp, Artificial
  Synthetic oligonucleotide
ctgcgtccacggactatgaatggtgcaccacccttgctcggtactgctcatt

SEQ ID NO: 294387 - DNA, 52 bp, Artificial
  Synthetic oligonucleotide
gacttttgagccgagaagagcgccgcactgcaccccgtactcactagactgg

SEQ ID NO: 294388 - DNA, 52 bp, Artificial
  Synthetic oligonucleotide
catggcgctgaaatgtgtctactattttagttccctataaggcgagatattg

SEQ ID NO: 294389 - DNA, 52 bp, Artificial
  Synthetic oligonucleotide
ccccaacggatcacagagtgcgggtctgacaagtgtcgagcggcaaagagag

SEQ ID NO: 294390 - DNA, 52 bp, Artificial
  Synthetic oligonucleotide
ccaagaacatacgaacgatgttacccacttttccgaacaagttcgataactc

SEQ ID NO: 294391 - DNA, 52 bp, Artificial
  Synthetic oligonucleotide
ctcgagtataagtccttgtaactctccctttcccgctacacacgcacgcacc

SEQ ID NO: 294392 - DNA, 52 bp, Artificial
  Synthetic oligonucleotide
cccacgagtgatagcgtccttctctcggttagaacagaattttgccgacccc

SEQ ID NO: 294393 - DNA, 56 bp, Artificial
  Synthetic oligonucleotide
ttagttgattaggtactatgtatggaggaagtattagattaaaagtacctatgtat

SEQ ID NO: 294394 - DNA, 52 bp, Artificial
  Synthetic oligonucleotide
gattcttacgaaccaaaacgttcgtgccgtcgagtctgtacaatgaggcgtc

SEQ ID NO: 294395 - DNA, 52 bp, Artificial
  Synthetic oligonucleotide
ctcctcgtcacgtgttgtgttcgctcttctgccgcccacacggaagggcgca

SEQ ID NO: 294396 - DNA, 52 bp, Artificial
  Synthetic oligonucleotide
cgcggatggaaggccgattgcagtgcgcgtgcaccaccctcgtttaccttcc

SEQ ID NO: 294397 - DNA, 52 bp, Artificial
  Synthetic oligonucleotide
cacgctttcttttccttgcgccactcagtaggctcgacgctagctgtctggc

SEQ ID NO: 294398 - DNA, 52 bp, Artificial
  Synthetic oligonucleotide
gcactgtggaggtactggtgtcctgctacggaagcgtgtgcggggcccttcc

SEQ ID NO: 294399 - DNA, 52 bp, Artificial
  Synthetic oligonucleotide
cttctgtcccttcgtcccacagccgagttgtccctctcgccccaacgtgggc

SEQ ID NO: 294400 - DNA, 52 bp, Artificial
  Synthetic oligonucleotide
catcttgtctgggcgcctgccgtcagtccctttctcgttcgcggaccgactg

SEQ ID NO: 294401 - DNA, 52 bp, Artificial
  Synthetic oligonucleotide
atacgttttatgtacatatacacgcgggcaagatgcagcatgctacctcccc

SEQ ID NO: 294402 - DNA, 52 bp, Artificial
  Synthetic oligonucleotide
gagatctccttgtgaagtagatcctagatggtaaagggtagctgaagttgga

SEQ ID NO: 294403 - DNA, 52 bp, Artificial
  Synthetic oligonucleotide
cactcccggaagatttgctgattccgctgagccgtcgcagcatccactacat

SEQ ID NO: 294404 - DNA, 60 bp, Artificial
  Synthetic oligonucleotide
gtgttcttgagaggtcacactcgcacacctcagctgcaggtcgcgtagcatcgtccagtc

SEQ ID NO: 294405 - DNA, 55 bp, Artificial
  Synthetic oligonucleotide
gtacgtcttaccttcactaacataggtcttactttcactaacatagtacataact

SEQ ID NO: 294406 - DNA, 52 bp, Artificial
  Synthetic oligonucleotide
ctgcatcagcggatgtgtagtcgagcaagttccattaatctccgctgttact

SEQ ID NO: 294407 - DNA, 52 bp, Artificial
  Synthetic oligonucleotide
atagaagcgagcatagagaccatagtagagattcagatcaccacaatagaga

SEQ ID NO: 294408 - DNA, 52 bp, Artificial
  Synthetic oligonucleotide
caaactgaggtaattatgcttcgagacaaatgtccttacccactgacccatc

SEQ ID NO: 294409 - DNA, 52 bp, Artificial
  Synthetic oligonucleotide
gcaaagagctccggctacggtgcacccgctcaatgctgcggcgtcacgtgcg

SEQ ID NO: 294410 - DNA, 52 bp, Artificial
  Synthetic oligonucleotide
catctctccccgtttgattcgacagctagaaagacatgagaccctccctacc

SEQ ID NO: 294411 - DNA, 52 bp, Artificial
  Synthetic oligonucleotide
gagagtacgtgggcagaaccgtccacgtggcagacatgctcaggaggcggcg

SEQ ID NO: 294412 - DNA, 51 bp, Artificial
  Synthetic oligonucleotide
gtacaacctctgcttctatggtatcatcaatatgtctaggtgtaattagta

SEQ ID NO: 294413 - DNA, 51 bp, Artificial
  Synthetic oligonucleotide
cggctggtacactaccacccgtgtccctcccgctcacactgcaagtggagc

SEQ ID NO: 294414 - DNA, 51 bp, Artificial
  Synthetic oligonucleotide
tgtagctgaagcacgcacgacacagtcgcctccacgtaatcgcgcaccgga

SEQ ID NO: 294415 - DNA, 51 bp, Artificial
  Synthetic oligonucleotide
agaggggtagccacagcggggttgaagacaccaccgctaatcgggccacac

SEQ ID NO: 294416 - DNA, 53 bp, Artificial
  Synthetic oligonucleotide
gcgcaaaacccggagcttttattttacaacggtaaggtctattagtgccatcc

SEQ ID NO: 294417 - DNA, 51 bp, Artificial
  Synthetic oligonucleotide
ggaaggagctgcctaacagtcgcgtaagtgcctctcgcacatcctctggcc

SEQ ID NO: 294418 - DNA, 51 bp, Artificial
  Synthetic oligonucleotide
agtgtggaggcagcagcgtacatagagcaaagctgcgatgagcccggctct

SEQ ID NO: 294419 - DNA, 51 bp, Artificial
  Synthetic oligonucleotide
agtgtggcgaggtactggtagggaggcgaccgctgttacagcccgtgtctg

SEQ ID NO: 294420 - DNA, 51 bp, Artificial
  Synthetic oligonucleotide
ccacaaattgccttcctttacgtttgttgtgtgataacacacgaagataac

SEQ ID NO: 294421 - DNA, 51 bp, Artificial
  Synthetic oligonucleotide
agagcccggcgggacaatcaaaagtttctcgaacgccttcgagccccattt

SEQ ID NO: 294422 - DNA, 51 bp, Artificial
  Synthetic oligonucleotide
aagatggattcgtctgaagtgcgctagcatccctaaatccttgttgccagt

SEQ ID NO: 294423 - DNA, 51 bp, Artificial
  Synthetic oligonucleotide
tgcccatgcgccctcgacaggcgtccctttcctcgtgagctcactgggata

SEQ ID NO: 294424 - DNA, 51 bp, Artificial
  Synthetic oligonucleotide
gaagagcgactcgacagaagtctcggcacctcgcttggcttccacgacgcg

SEQ ID NO: 294425 - DNA, 51 bp, Artificial
  Synthetic oligonucleotide
cgctgtcaaggttactgccatgggtcccgcacagacgcacgttggcactcc

SEQ ID NO: 294426 - DNA, 51 bp, Artificial
  Synthetic oligonucleotide
ggacccgggacattttcagtccatctcatagggtgtgctctgtctatttga

SEQ ID NO: 294427 - DNA, 59 bp, Artificial
  Synthetic oligonucleotide
tacgtcggctcaactcacgaaggcgcacgtgaccggaggtgtgaccgtctacactcatc

SEQ ID NO: 294428 - DNA, 51 bp, Artificial
  Synthetic oligonucleotide
acagaaaccggaaggcatgatcgaaactgccactcccctccaagcatgctc

SEQ ID NO: 294429 - DNA, 51 bp, Artificial
  Synthetic oligonucleotide
caaacaggacacacgtctagcattcgtcccgccgcaggccttttgcacgta

SEQ ID NO: 294430 - DNA, 51 bp, Artificial
  Synthetic oligonucleotide
tgccgaggtagcgctgagcagccgccgtagtgggccccagatactcgcgag

SEQ ID NO: 294431 - DNA, 51 bp, Artificial
  Synthetic oligonucleotide
gatacgcaatgcctcgctgtagcgcgatggacgtacgccgtcaagggctgc

SEQ ID NO: 294432 - DNA, 51 bp, Artificial
  Synthetic oligonucleotide
agaggtcatgtgcatgattaacccagccgtcagcttggttatagtagcaac

SEQ ID NO: 294433 - DNA, 51 bp, Artificial
  Synthetic oligonucleotide
agttgtagcatgcgatgtggaccgtccaagcgccgccctgagtgaaacgtg

SEQ ID NO: 294434 - DNA, 51 bp, Artificial
  Synthetic oligonucleotide
gtatgctcggcagagtgtcagtgtggctcgagcgtgtgtcacccggcacaa

SEQ ID NO: 294435 - DNA, 51 bp, Artificial
  Synthetic oligonucleotide
tgccttctctttccacgctttgcaactctctctgctcttttcacgacacac

SEQ ID NO: 294436 - DNA, 51 bp, Artificial
  Synthetic oligonucleotide
gagtcatgtaatatatgctccgaagggaacaaacatatccagaacaaattg

SEQ ID NO: 294437 - DNA, 51 bp, Artificial
  Synthetic oligonucleotide
gatctactactttagtgagtacccctccagtgccctgcgagagtgccagga

SEQ ID NO: 294438 - DNA, 58 bp, Artificial
  Synthetic oligonucleotide
tactagttatagaccacatggtaaatgaggtgattttttagcttgtataataccatta

SEQ ID NO: 294439 - DNA, 51 bp, Artificial
  Synthetic oligonucleotide
agacttttgtaggcctccacaaccattcgctcagtggtgcactttcctcac

SEQ ID NO: 294440 - DNA, 51 bp, Artificial
  Synthetic oligonucleotide
ccgccttagtttgcctttcgtttgaactatggacggaaagcacttgggcgg

SEQ ID NO: 294441 - DNA, 51 bp, Artificial
  Synthetic oligonucleotide
gatcctctcaatcggccgtacagcacaacctgctcttcccactcaacgaga

SEQ ID NO: 294442 - DNA, 51 bp, Artificial
  Synthetic oligonucleotide
ggaaacgatggttgttggtgcggctccttcgctattactgttgcgcacccc

SEQ ID NO: 294443 - DNA, 51 bp, Artificial
  Synthetic oligonucleotide
tgcgacgcacgtcgttgccaagggtagagcgcagctgataccgcggaccca

SEQ ID NO: 294444 - DNA, 51 bp, Artificial
  Synthetic oligonucleotide
ccccgaggcgtgggtaccaaagatgaaacgagtaagaagaatggattgctc

SEQ ID NO: 294445 - DNA, 51 bp, Artificial
  Synthetic oligonucleotide
tagaagggtttgcctacggaacgtagcacagtttggtagtgtagctgcttt

SEQ ID NO: 294446 - DNA, 51 bp, Artificial
  Synthetic oligonucleotide
tggcaagacgactctcgtgtgcgcatcaccagcactgtgggagacgccacg

SEQ ID NO: 294447 - DNA, 51 bp, Artificial
  Synthetic oligonucleotide
tgcaggtattttcgaatatccagacttaatcgccatattaacattggtaaa

SEQ ID NO: 294448 - DNA, 51 bp, Artificial
  Synthetic oligonucleotide
ctactgaatgctggacatccttaaatgggacggacacgagaaccaatgatc

SEQ ID NO: 294449 - DNA, 59 bp, Artificial
  Synthetic oligonucleotide
gacacatggagcgcatctgaagccaccgcgagacgcagtggtagtgatacacgtgcccg

SEQ ID NO: 294450 - DNA, 51 bp, Artificial
  Synthetic oligonucleotide
agtgggtactagctaatggcccttctgcggtcccgctcccctggtgtcctc

SEQ ID NO: 294451 - DNA, 51 bp, Artificial
  Synthetic oligonucleotide
actgactgactcaccgccacgccccatcttccccctgttggagttgcgcgc

SEQ ID NO: 294452 - DNA, 51 bp, Artificial
  Synthetic oligonucleotide
ggacaggaacacccagcactttcggaccaacggtgacactgatgccctgga

SEQ ID NO: 294453 - DNA, 51 bp, Artificial
  Synthetic oligonucleotide
gtaagaccttgtgcagaggtgcctgctagagggacgggactgcaatacaga

SEQ ID NO: 294454 - DNA, 51 bp, Artificial
  Synthetic oligonucleotide
ctactcgctcgtcccacccaacggccacccgtcttattagttccgcgtccc

SEQ ID NO: 294455 - DNA, 51 bp, Artificial
  Synthetic oligonucleotide
gataataacaagacgtggcacatatggaatcaaaatttggatccacgttcg

SEQ ID NO: 294456 - DNA, 51 bp, Artificial
  Synthetic oligonucleotide
gtcaccgtctttgcagcttcccctgccgacggatatgcgacagcggaggac

SEQ ID NO: 294457 - DNA, 51 bp, Artificial
  Synthetic oligonucleotide
atcattgatatttgtcctgtaggagctttgactgcaaaacctacggctttt

SEQ ID NO: 294458 - DNA, 51 bp, Artificial
  Synthetic oligonucleotide
gctgctgtcgtgcgccaatagtttcctgtttattcgctatcacgattagtc

SEQ ID NO: 294459 - DNA, 51 bp, Artificial
  Synthetic oligonucleotide
acacgccacaaccaacagctgcgaacgacggcttttgagaatgtctacagc

SEQ ID NO: 294460 - DNA, 51 bp, Artificial
  Synthetic oligonucleotide
gaaaaccgtacttaaaaccaacaatggtaaatgggtagagtatactaagac

SEQ ID NO: 294461 - DNA, 51 bp, Artificial
  Synthetic oligonucleotide
tacacacacagcgcgtatcttacgtctgaaagatgagaggggtagttggcc

SEQ ID NO: 294462 - DNA, 51 bp, Artificial
  Synthetic oligonucleotide
cagtactagtaatccaagagcagaaacgttcccataaacttgcgctttcgc

SEQ ID NO: 294463 - DNA, 51 bp, Artificial
  Synthetic oligonucleotide
gtaatacatcagacagcgcactttcgaggaggaaccacacctacgcatgtg

SEQ ID NO: 294464 - DNA, 51 bp, Artificial
  Synthetic oligonucleotide
ctgcgttcaatcagtagtgaaggaagccatgacacacatatcgatggcagt

SEQ ID NO: 294465 - DNA, 51 bp, Artificial
  Synthetic oligonucleotide
gctggagaatgtagagagccaaagagttgtatccgtatctgatgcatgcct

SEQ ID NO: 294466 - DNA, 51 bp, Artificial
  Synthetic oligonucleotide
ggaatgcggagccagtggaggctggcctcttttcgtgcgtgcgtggcttct

SEQ ID NO: 294467 - DNA, 51 bp, Artificial
  Synthetic oligonucleotide
tgtaagggtgccaactttgactccaagagcttgcgcctggctacctcttca

SEQ ID NO: 294468 - DNA, 51 bp, Artificial
  Synthetic oligonucleotide
gtagctcgcactatcccggttgccttcaacaggtatgcgaagcagctcgca

SEQ ID NO: 294469 - DNA, 51 bp, Artificial
  Synthetic oligonucleotide
taccttcacccgcatccatgtgtttcttgtgatatgatagagccacacgtc

SEQ ID NO: 294470 - DNA, 51 bp, Artificial
  Synthetic oligonucleotide
aagcccagtgcggagtccctcctgcaacctcacgaaatctactcggccagc

SEQ ID NO: 294471 - DNA, 55 bp, Artificial
  Synthetic oligonucleotide
gacgtactggtagaataccagccacccccccctcccaccttatcctgtggcgtgc

SEQ ID NO: 294472 - DNA, 51 bp, Artificial
  Synthetic oligonucleotide
tacacgagcacgacgccctcctactcatcgaaacctaggcttcgtctcgat

SEQ ID NO: 294473 - DNA, 51 bp, Artificial
  Synthetic oligonucleotide
atcatagaaacgtatcacacactgggtacaaccacaagctccgcgtcttgg

SEQ ID NO: 294474 - DNA, 51 bp, Artificial
  Synthetic oligonucleotide
gctgcgatagttagggtcctcgtagtcacacttgatggatgagagtcggtc

SEQ ID NO: 294475 - DNA, 51 bp, Artificial
  Synthetic oligonucleotide
gacagagacgccggtcatttacgtgcaaccgctccgcagaagctcacccga

SEQ ID NO: 294476 - DNA, 51 bp, Artificial
  Synthetic oligonucleotide
atagcactaccagaacgcttgacacacctcacaacacgcaggtgactcgcc

SEQ ID NO: 294477 - DNA, 51 bp, Artificial
  Synthetic oligonucleotide
tgctctgagacgggcttggaccgtcgcaaccagtagtcagctgacactcca

SEQ ID NO: 294478 - DNA, 51 bp, Artificial
  Synthetic oligonucleotide
cagggacttccacgacagccggcctgtgtctgagcgacgcatgtatctcgc

SEQ ID NO: 294479 - DNA, 51 bp, Artificial
  Synthetic oligonucleotide
acagatgccacgcaagacgagatccggagacagtactacaaactcgcacga

SEQ ID NO: 294480 - DNA, 51 bp, Artificial
  Synthetic oligonucleotide
gtactctcctcctgggtaatgcggtagacctcccaacgcgccccgagtgta

SEQ ID NO: 294481 - DNA, 51 bp, Artificial
  Synthetic oligonucleotide
atatccgatcaagtggctatgccatgccgcaggcgaccccaagaccatact

SEQ ID NO: 294482 - DNA, 59 bp, Artificial
  Synthetic oligonucleotide
cagtaatgcatctacgtgcaaaaggattaacacttggtatattaagtgtatctacatgg

SEQ ID NO: 294483 - DNA, 51 bp, Artificial
  Synthetic oligonucleotide
cggctttcagctaatcgggacgagaggatgctttcccgactgcccatcaaa

SEQ ID NO: 294484 - DNA, 51 bp, Artificial
  Synthetic oligonucleotide
gtataggggatttgttgggatcatttcccaatcctattggattcataacag

SEQ ID NO: 294485 - DNA, 51 bp, Artificial
  Synthetic oligonucleotide
gaagggtgtcatagaccgaaccagagcggtagcataggaaagccctgaaca

SEQ ID NO: 294486 - DNA, 51 bp, Artificial
  Synthetic oligonucleotide
cgcgatcagtggggataccggtttgatttactcttccacggcaataggaaa

SEQ ID NO: 294487 - DNA, 51 bp, Artificial
  Synthetic oligonucleotide
gcttcgactgttgtgccactcaacattgcgtgttgataagacccggggccg

SEQ ID NO: 294488 - DNA, 51 bp, Artificial
  Synthetic oligonucleotide
caggcaactcatcagcgtgtgcagagcgcacaggagcggcatgtacgtagg

SEQ ID NO: 294489 - DNA, 51 bp, Artificial
  Synthetic oligonucleotide
gtagagcatcctatacaagatgatgcctagaccccacatatcgattttggg

SEQ ID NO: 294490 - DNA, 51 bp, Artificial
  Synthetic oligonucleotide
agacgggaaaggctggagccctgggcacaaggcaaaggtgtgcaaagagcg

SEQ ID NO: 294491 - DNA, 51 bp, Artificial
  Synthetic oligonucleotide
caaagtcacgagatcattagctccaccaagatatcatgccaagtccgtcat

SEQ ID NO: 294492 - DNA, 51 bp, Artificial
  Synthetic oligonucleotide
acttgctctatatcaacacaccgaatgatttgatgcagcattcggagatcg

SEQ ID NO: 294493 - DNA, 57 bp, Artificial
  Synthetic oligonucleotide
agtagaagtatgacctaagttagaagaagtatgatctcagttagtgaacttaggacc

SEQ ID NO: 294494 - DNA, 51 bp, Artificial
  Synthetic oligonucleotide
gtactaaaacgacactggtaaactagtaaattactgcggcgatggattaac

SEQ ID NO: 294495 - DNA, 51 bp, Artificial
  Synthetic oligonucleotide
agaccttccggccgactcatgctacagccacgggacaccgacgccataaat

SEQ ID NO: 294496 - DNA, 51 bp, Artificial
  Synthetic oligonucleotide
ctgcaagtctcgcatcagctaatatccctggcgatcacttctggttggacg

SEQ ID NO: 294497 - DNA, 51 bp, Artificial
  Synthetic oligonucleotide
gaagttgtggatcccagtacggtacaacgtagtgcccttgaagtagctagt

SEQ ID NO: 294498 - DNA, 51 bp, Artificial
  Synthetic oligonucleotide
tggctggtgacgatgctcggtgtgtggacgcaggagatgataggagtaacc

SEQ ID NO: 294499 - DNA, 51 bp, Artificial
  Synthetic oligonucleotide
gctcgtttgtgaactttcgctctggactgagctttgcaactactccctcgt

SEQ ID NO: 294500 - DNA, 51 bp, Artificial
  Synthetic oligonucleotide
agacgattaaatacacccttaggtagagaagggaaaatggcgaagcctaga

SEQ ID NO: 294501 - DNA, 51 bp, Artificial
  Synthetic oligonucleotide
tgcttagagtacgtatcttgggagaacaaaggttcgctatggtactcggct

SEQ ID NO: 294502 - DNA, 51 bp, Artificial
  Synthetic oligonucleotide
aacaacacgcaggctccccttgaggagtcaacgctagacttcctacagtat

SEQ ID NO: 294503 - DNA, 51 bp, Artificial
  Synthetic oligonucleotide
gagttcgcagtgtctgtacacctgaggcaaccgagaaagacgagagagtca

SEQ ID NO: 294504 - DNA, 59 bp, Artificial
  Synthetic oligonucleotide
aggagtttcgcgtagtctggtctccaagtcagccaccatcgccatctaaggccatgtgc

SEQ ID NO: 294505 - DNA, 51 bp, Artificial
  Synthetic oligonucleotide
tgctgcctacacgctccgctcctccccttgcgttcctactaagaaagctca

SEQ ID NO: 294506 - DNA, 51 bp, Artificial
  Synthetic oligonucleotide
cgcatgctgcgcttagacttcggcaccccagcttgtgggggctcatagggg

SEQ ID NO: 294507 - DNA, 51 bp, Artificial
  Synthetic oligonucleotide
caaagataatctccttactaaaggttcaggggataccttatctcccgatca

SEQ ID NO: 294508 - DNA, 51 bp, Artificial
  Synthetic oligonucleotide
ccagggtgggggcttcgtggctctgagtcccagactggccagctgtgtaga

SEQ ID NO: 294509 - DNA, 51 bp, Artificial
  Synthetic oligonucleotide
aagcactgctcgcacttgtgttggacaccctactgttgcgtgccgcgttgg

SEQ ID NO: 294510 - DNA, 51 bp, Artificial
  Synthetic oligonucleotide
cgactcgtcgcgcaagtttgccgcgaggctgcaaccggaggattctcttgc

SEQ ID NO: 294511 - DNA, 51 bp, Artificial
  Synthetic oligonucleotide
atataagctgaggataaggttccgatattcgagtaaccattccggaaatgc

SEQ ID NO: 294512 - DNA, 51 bp, Artificial
  Synthetic oligonucleotide
aaagtgtgagaaggaaggttggataaggactggggatatttgtcagcttct

SEQ ID NO: 294513 - DNA, 51 bp, Artificial
  Synthetic oligonucleotide
tacgttctacggcttcacaactggtcacgcgtgggtctccgcctacggtaa

SEQ ID NO: 294514 - DNA, 51 bp, Artificial
  Synthetic oligonucleotide
gacaaccctcgcgaagcgaataaacgcgaaaacgcacccgcattgtgagca

SEQ ID NO: 294515 - DNA, 54 bp, Artificial
  Synthetic oligonucleotide
aaggtttagcgtgtactttcgaatgaaactttgtgctccaccgttagtctctta

SEQ ID NO: 294516 - DNA, 56 bp, Artificial
  Synthetic oligonucleotide
gctgcagggaccttcccggtgtaaggcatacttgcattcggggtgtttcggacttc

SEQ ID NO: 294517 - DNA, 51 bp, Artificial
  Synthetic oligonucleotide
ccccgttcgaactgcatctcctgagtctgtctcgcgtgcgtccgctccacc

SEQ ID NO: 294518 - DNA, 51 bp, Artificial
  Synthetic oligonucleotide
gagtcgcaactgaggtgaagttagaaatgagcaacgaagcggagcaggacg

SEQ ID NO: 294519 - DNA, 51 bp, Artificial
  Synthetic oligonucleotide
gtaggaacaggggttgagccaaagaaacgtagagtgtggcagctcttggaa

SEQ ID NO: 294520 - DNA, 51 bp, Artificial
  Synthetic oligonucleotide
ccaggcgacgaaacgtaggggcacacccaaacattccgccttcacgtacct

SEQ ID NO: 294521 - DNA, 51 bp, Artificial
  Synthetic oligonucleotide
atcacacgcgtagggacaaagaggatgtcggcaagacacatctgtgcacga

SEQ ID NO: 294522 - DNA, 51 bp, Artificial
  Synthetic oligonucleotide
ataacgaacttatgacaggtgcattgatgactggcaattccctccttagtg

SEQ ID NO: 294523 - DNA, 51 bp, Artificial
  Synthetic oligonucleotide
acttagattggagacttaattctgatacgcgtgttgagactgatgagatgc

SEQ ID NO: 294524 - DNA, 51 bp, Artificial
  Synthetic oligonucleotide
tactagccaggatacccacagcgaacgacctgccacgagctaaggatgccc

SEQ ID NO: 294525 - DNA, 51 bp, Artificial
  Synthetic oligonucleotide
cgcttcaccgacataaccgtggcgagtgaactctgcaacatcttcgtgagt

SEQ ID NO: 294526 - DNA, 51 bp, Artificial
  Synthetic oligonucleotide
ataacagccctctcactctgtacgctcaataaagacgattaatgctagcta

SEQ ID NO: 294527 - DNA, 57 bp, Artificial
  Synthetic oligonucleotide
tagagccgtgcggtagagcctttttcgtctggtactggaagaacattgaggcctggg

SEQ ID NO: 294528 - DNA, 51 bp, Artificial
  Synthetic oligonucleotide
aaatttcccattatttcgactttcgtatcaaactcaaagtgcgtcggacgt

SEQ ID NO: 294529 - DNA, 51 bp, Artificial
  Synthetic oligonucleotide
tgcgcacatcatatttctgaccttccctccgcaagagggtgaatgcggtgt

SEQ ID NO: 294530 - DNA, 51 bp, Artificial
  Synthetic oligonucleotide
cgagcacataaatccgcagtgtacctccatcgtcaccgctgtccaccatcg

SEQ ID NO: 294531 - DNA, 51 bp, Artificial
  Synthetic oligonucleotide
gaagggtgcgagacacgcgcgttgttctacgacattgacctccacgaacca

SEQ ID NO: 294532 - DNA, 51 bp, Artificial
  Synthetic oligonucleotide
cgagaagagcactttgtgccctgactcgaggagagcgtcgcacactcgctt

SEQ ID NO: 294533 - DNA, 51 bp, Artificial
  Synthetic oligonucleotide
gctcgaaatgcaccaacgatccaagtataggtccatccatctcaaagaatg

SEQ ID NO: 294534 - DNA, 51 bp, Artificial
  Synthetic oligonucleotide
cgagaagtgttgcggataaaggggagttagcgatgtagtcgtgggtcgcag

SEQ ID NO: 294535 - DNA, 51 bp, Artificial
  Synthetic oligonucleotide
gtacgtggggtgtgcagaagcccgttggatacgccgcatagcgaagagggg

SEQ ID NO: 294536 - DNA, 51 bp, Artificial
  Synthetic oligonucleotide
gtacgtgaacgtgagctcagctaccaccacgcaccctcaacaagggacgac

SEQ ID NO: 294537 - DNA, 51 bp, Artificial
  Synthetic oligonucleotide
cagcttagtgagatcatactttgtggaagtgatctcggtccactcataata

SEQ ID NO: 294538 - DNA, 59 bp, Artificial
  Synthetic oligonucleotide
tgtcgcacacgctgcagtgcttgcagcctacctgtacaaatcgccgacagaagacacac

SEQ ID NO: 294539 - DNA, 51 bp, Artificial
  Synthetic oligonucleotide
gcttctaaccaacctggtaaccagatgttgctgctcgcgtttgcagctaca

SEQ ID NO: 294540 - DNA, 51 bp, Artificial
  Synthetic oligonucleotide
tggccctctaactactttgcccgtggcatcatactggctaccgtgacatgg

SEQ ID NO: 294541 - DNA, 51 bp, Artificial
  Synthetic oligonucleotide
atactaactcgtcagccagtcgaaggtagatctcgatacggaggccttcgt

SEQ ID NO: 294542 - DNA, 51 bp, Artificial
  Synthetic oligonucleotide
agacaccatactagattagtaaaatattatagaggaatgacagtaactatg

SEQ ID NO: 294543 - DNA, 51 bp, Artificial
  Synthetic oligonucleotide
atttgggcggccattttcttcatcgactcagtaagctcgttgtgactcgac

SEQ ID NO: 294544 - DNA, 51 bp, Artificial
  Synthetic oligonucleotide
tacctgcatgcaagtgcaaagcgaacgaggggtagacttcacatatgtgcg

SEQ ID NO: 294545 - DNA, 51 bp, Artificial
  Synthetic oligonucleotide
tgcgtacgagtcctccatgcatctgcaacatctatgcgtatctagcatggg

SEQ ID NO: 294546 - DNA, 51 bp, Artificial
  Synthetic oligonucleotide
ctacaagttcaacacactctttcacgagtgcatggaggcggatcacgtgaa

SEQ ID NO: 294547 - DNA, 51 bp, Artificial
  Synthetic oligonucleotide
aaagttgcgacagaccttccggccgactcatgctacagccacgggacaccg

SEQ ID NO: 294548 - DNA, 51 bp, Artificial
  Synthetic oligonucleotide
ctgagtagagggacaacacaccaaagagacaggtagaaaacgcacctatca

SEQ ID NO: 294549 - DNA, 57 bp, Artificial
  Synthetic oligonucleotide
ggtggtacagaccccctgaggtactcgggatgggatccaatcagtacacgagcgcgg

SEQ ID NO: 294550 - DNA, 51 bp, Artificial
  Synthetic oligonucleotide
acgcctccctgttgcctcgcagtgagctactaggaaaggctgcaccgtgag

SEQ ID NO: 294551 - DNA, 51 bp, Artificial
  Synthetic oligonucleotide
cactcattcatagggaggacagcaccgatatgtcgagctgcgccctgtgct

SEQ ID NO: 294552 - DNA, 51 bp, Artificial
  Synthetic oligonucleotide
tcaacacagcgaaggggtgcgacgctgaaagagaggatgacgaccacacgt

SEQ ID NO: 294553 - DNA, 51 bp, Artificial
  Synthetic oligonucleotide
cacggaatgtggtccacggctgctcgtacttcctccctagcaagtaatcgt

SEQ ID NO: 294554 - DNA, 51 bp, Artificial
  Synthetic oligonucleotide
aacgacctcgtctgacgacatctacgttgcactaggacagccgctagcaga

SEQ ID NO: 294555 - DNA, 51 bp, Artificial
  Synthetic oligonucleotide
acgccatgcggcactcatcggggctctgcagggagtcgatctggcccaccg

SEQ ID NO: 294556 - DNA, 51 bp, Artificial
  Synthetic oligonucleotide
ccgaaggccgatcgggtacgaatgactctcgcactattcgccacgtgttga

SEQ ID NO: 294557 - DNA, 51 bp, Artificial
  Synthetic oligonucleotide
cacggataaaatctccaggatgaaagaattcccctttcagtgaattgacta

SEQ ID NO: 294558 - DNA, 51 bp, Artificial
  Synthetic oligonucleotide
atgccaggcgaagatgtcagcctgtcatcaggagcatacgcaacgaagtag

SEQ ID NO: 294559 - DNA, 51 bp, Artificial
  Synthetic oligonucleotide
ccccaatttgtgagcacttctcccatgcgtggttagggcactcgcagggtt

SEQ ID NO: 294560 - DNA, 58 bp, Artificial
  Synthetic oligonucleotide
gacctatgttagtcatgttaagacctatgttagtcatgttaagaccttagttagtcaa

SEQ ID NO: 294561 - DNA, 51 bp, Artificial
  Synthetic oligonucleotide
acgcatccatgtctgcgtgtcctttccatatgttgctcatgtgttgtgggg

SEQ ID NO: 294562 - DNA, 51 bp, Artificial
  Synthetic oligonucleotide
cactcaccatggacactgcacgacaactgcaagcagttctatagctgggat

SEQ ID NO: 294563 - DNA, 51 bp, Artificial
  Synthetic oligonucleotide
atgtcagctcgtatgtgcgtggatggcgtacctagatcgggtcactgccaa

SEQ ID NO: 294564 - DNA, 51 bp, Artificial
  Synthetic oligonucleotide
gagaggcgtacaggacccatccaacgcaccactagggtgcttcagtccccg

SEQ ID NO: 294565 - DNA, 51 bp, Artificial
  Synthetic oligonucleotide
gggagagggctgcgacaccgtctatcacgatgcacggtaccctatcctcgg

SEQ ID NO: 294566 - DNA, 51 bp, Artificial
  Synthetic oligonucleotide
tcgcacacctcagctgcaggtcgcgtagcatcgtccagtcttggtaacgga

SEQ ID NO: 294567 - DNA, 51 bp, Artificial
  Synthetic oligonucleotide
ggtaatacaacacatgtggtggtcataccacacatttagtgcacctatggt

SEQ ID NO: 294568 - DNA, 51 bp, Artificial
  Synthetic oligonucleotide
tcgcaagcgttgcagcattctgtctgttccgtattatcacataacgtgcac

SEQ ID NO: 294569 - DNA, 51 bp, Artificial
  Synthetic oligonucleotide
cacgggcttatgtaatcgctaacgcaaatgacggagagaggccatgcaccg

SEQ ID NO: 294570 - DNA, 51 bp, Artificial
  Synthetic oligonucleotide
gggaggccttctgcaatcccgcacggacactaacgaaggacgaaattgcag

SEQ ID NO: 294571 - DNA, 59 bp, Artificial
  Synthetic oligonucleotide
cgtatatgttgtcctcgtgactcaggaatagcaacatgaattaaatgacctgtccaagc

SEQ ID NO: 294572 - DNA, 51 bp, Artificial
  Synthetic oligonucleotide
cggactcgtgcagcgaacgcccccggtgatgccctaccgcgtcataggggc

SEQ ID NO: 294573 - DNA, 51 bp, Artificial
  Synthetic oligonucleotide
acgcacaaatggtagctcgccctgtccaagtgtccaggcgtgttgcacacg

SEQ ID NO: 294574 - DNA, 51 bp, Artificial
  Synthetic oligonucleotide
tcacggactctaaagggtcactcttgtgcatgcctgtcagaatgcctatca

SEQ ID NO: 294575 - DNA, 51 bp, Artificial
  Synthetic oligonucleotide
acgctctttaatggtactttagttactggtggtcgtgatcaagaaacaaca

SEQ ID NO: 294576 - DNA, 51 bp, Artificial
  Synthetic oligonucleotide
tctaccctgtcacccgttgagatgtaacagtagatgtgcgcatctatctat

SEQ ID NO: 294577 - DNA, 51 bp, Artificial
  Synthetic oligonucleotide
ctctactttggtgcgcgcctattcaaccttttgttctccccgttcattcaa

SEQ ID NO: 294578 - DNA, 51 bp, Artificial
  Synthetic oligonucleotide
aacctagtgccactcctgcgtctgcgctgtcgcccaccgttgctgcaacat

SEQ ID NO: 294579 - DNA, 51 bp, Artificial
  Synthetic oligonucleotide
tcgtttatgtctgatctcatagtcgttctccgcggacacattgactttaca

SEQ ID NO: 294580 - DNA, 51 bp, Artificial
  Synthetic oligonucleotide
acgcgttgtacgcgccacctttccacgggatcatgtcaccagtggtgtagt

SEQ ID NO: 294581 - DNA, 51 bp, Artificial
  Synthetic oligonucleotide
ggcggttaacgtgagcggtcaatgtgatgggtcaatgcgagcggttaactg

SEQ ID NO: 294582 - DNA, 59 bp, Artificial
  Synthetic oligonucleotide
cactattcatagagacaactaatggcatctctctcgatttccagatgttgagttactaa

SEQ ID NO: 294583 - DNA, 51 bp, Artificial
  Synthetic oligonucleotide
aactaagcctacaggtggcacagtagacggcgtacacatcaagagatacac

SEQ ID NO: 294584 - DNA, 51 bp, Artificial
  Synthetic oligonucleotide
ggtccactaacgcactcgtgtagggtgttatatgcgcactgataagcgcgc

SEQ ID NO: 294585 - DNA, 51 bp, Artificial
  Synthetic oligonucleotide
ggcgtgtgtacctgctcacgttacctcccgtcaaccgaaatacctggaaca

SEQ ID NO: 294586 - DNA, 51 bp, Artificial
  Synthetic oligonucleotide
cggatccttcagtctcttgtgaccacaaactacaggttttcgagtcggttg

SEQ ID NO: 294587 - DNA, 51 bp, Artificial
  Synthetic oligonucleotide
ggctaagggtccgacgctgggaatgccatgtacctccgcctggacttgggc

SEQ ID NO: 294588 - DNA, 51 bp, Artificial
  Synthetic oligonucleotide
atgcacccctgatattgcatgcattatgcggagacaagacatactcccgca

SEQ ID NO: 294589 - DNA, 51 bp, Artificial
  Synthetic oligonucleotide
tcgtactacggtgatgctttcagtgtcgctcttattattgcatagtggagg

SEQ ID NO: 294590 - DNA, 51 bp, Artificial
  Synthetic oligonucleotide
gagcacacttttctgtgactgtcgatgatctcaaccctgtgctctagcccc

SEQ ID NO: 294591 - DNA, 51 bp, Artificial
  Synthetic oligonucleotide
cactcctcgcggtctgcggtgatgtgaacgtgcatgggcattgcagcgtcc

SEQ ID NO: 294592 - DNA, 51 bp, Artificial
  Synthetic oligonucleotide
cggacaagcacgaggcgagcacggacagtggtaacaatgccaacgtgtacg

SEQ ID NO: 294593 - DNA, 58 bp, Artificial
  Synthetic oligonucleotide
gtattacaagtggagggtaccatatttgaggtgtgatatacgttttaataagatcaca

SEQ ID NO: 294594 - DNA, 51 bp, Artificial
  Synthetic oligonucleotide
aaccttacgtgataatggtggacatatggaacaaacggttggtgtcttgtt

SEQ ID NO: 294595 - DNA, 51 bp, Artificial
  Synthetic oligonucleotide
ggtatatgacgaatccctggagtgccttatagcctagtcgcctggctttgt

SEQ ID NO: 294596 - DNA, 51 bp, Artificial
  Synthetic oligonucleotide
ccttgtgaaacaaatcgcgcgctccctctgtctctaacatgtgcgcatccc

SEQ ID NO: 294597 - DNA, 51 bp, Artificial
  Synthetic oligonucleotide
tcggcctgtgcgtagacatatacacgggcatagcacgcctgcgccatccac

SEQ ID NO: 294598 - DNA, 51 bp, Artificial
  Synthetic oligonucleotide
ccgaggcatctctccgtcgtgccttcgtggaaagtgccgcagttgagacgt

SEQ ID NO: 294599 - DNA, 51 bp, Artificial
  Synthetic oligonucleotide
ggctgctcttgtcatgctcccggcacccgtgcctcatcaacccgcaccttg

SEQ ID NO: 294600 - DNA, 51 bp, Artificial
  Synthetic oligonucleotide
ccgaccccaagcagctatgccagagcgcattgagggaagtgtcgtgtgcag

SEQ ID NO: 294601 - DNA, 51 bp, Artificial
  Synthetic oligonucleotide
acctgtgcgtggcggccgctaacgcggttgtcttgtacatggagcacgtaa

SEQ ID NO: 294602 - DNA, 51 bp, Artificial
  Synthetic oligonucleotide
ggggaccagctgtctaggacatgcgtccagagttcatccttcactacgtgt

SEQ ID NO: 294603 - DNA, 51 bp, Artificial
  Synthetic oligonucleotide
aacgcgcgagacagaatcccatataggggcactggcctctccgcacggtct

SEQ ID NO: 294604 - DNA, 59 bp, Artificial
  Synthetic oligonucleotide
atggcccacactcgtaaggctatgttccggcgtgaccattattggacgagctcccacta

SEQ ID NO: 294605 - DNA, 51 bp, Artificial
  Synthetic oligonucleotide
tccacgccaacgttcatcgcgatagactcaggaccgaagcacgtctcgcgg

SEQ ID NO: 294606 - DNA, 51 bp, Artificial
  Synthetic oligonucleotide
tccacgcgaacgaatccaaccgaaaaggtgagcgtgcaatacatacattat

SEQ ID NO: 294607 - DNA, 51 bp, Artificial
  Synthetic oligonucleotide
ggggagatgtatttacaacgtccaccgttcgaggtgtactagcaagcggag

SEQ ID NO: 294608 - DNA, 51 bp, Artificial
  Synthetic oligonucleotide
ggggaggtaatactgggatgggaattttaggtggatgtaatggagcttata

SEQ ID NO: 294609 - DNA, 51 bp, Artificial
  Synthetic oligonucleotide
ggggttcgagccacgttgtccccacttcgccgcttttccacgtctatgtgc

SEQ ID NO: 294610 - DNA, 51 bp, Artificial
  Synthetic oligonucleotide
ggggagtgtccgggtcaccgcgagggggatggaccaggtggcgactggcac

SEQ ID NO: 294611 - DNA, 51 bp, Artificial
  Synthetic oligonucleotide
accgttcataccgtcgtgccaccagagagaagggcgggggctaagggggac

SEQ ID NO: 294612 - DNA, 51 bp, Artificial
  Synthetic oligonucleotide
ggggatgccgtgaagggatgacctttctgtgcgcggcacattcggggagaa

SEQ ID NO: 294613 - DNA, 51 bp, Artificial
  Synthetic oligonucleotide
gacttcggcaccccagcttgtgggggctcataggggcgcggtcccctcggc

SEQ ID NO: 294614 - DNA, 51 bp, Artificial
  Synthetic oligonucleotide
accgttcccatatacgaaggctatgtattaccccatgccataaacagaatt

SEQ ID NO: 294615 - DNA, 59 bp, Artificial
  Synthetic oligonucleotide
ttgggctgcccacagccaaaccgcagccttttgggctgcccagatcctaccagcctacc

SEQ ID NO: 294616 - DNA, 51 bp, Artificial
  Synthetic oligonucleotide
ctcgacagaagtctcggcacctcgcttggcttccacgacgcgtttcggtgc

SEQ ID NO: 294617 - DNA, 51 bp, Artificial
  Synthetic oligonucleotide
aacgctacggtgtgcgtgtggttcccatgtcgctgctttggtggaccacct

SEQ ID NO: 294618 - DNA, 51 bp, Artificial
  Synthetic oligonucleotide
atggcgaggcacgccgttgttgcgccaccacgagaggtctcagtacttcct

SEQ ID NO: 294619 - DNA, 51 bp, Artificial
  Synthetic oligonucleotide
ggggtattcatctactcaccctgcctcacagtacgctcgcttgctactgca

SEQ ID NO: 294620 - DNA, 51 bp, Artificial
  Synthetic oligonucleotide
gactgtccggtccgtcttcttgtctgcgtgcagcatacacacaggcagctc

SEQ ID NO: 294621 - DNA, 51 bp, Artificial
  Synthetic oligonucleotide
ggggctagtgatattgggagctgctgttgcaagcaccgttacgggatacct

SEQ ID NO: 294622 - DNA, 51 bp, Artificial
  Synthetic oligonucleotide
aacggaattgaaccgattaccttcggagcatgaatccgacgaactttcctt

SEQ ID NO: 294623 - DNA, 51 bp, Artificial
  Synthetic oligonucleotide
gactgtgctgcggcagacgaatcagtaacaccaccttcgctacgttggcca

SEQ ID NO: 294624 - DNA, 51 bp, Artificial
  Synthetic oligonucleotide
tcccaatgtaaatcgaaccgcatctgtgcagtccggacatggtccccggct

SEQ ID NO: 294625 - DNA, 51 bp, Artificial
  Synthetic oligonucleotide
acctcaagaagctagccgcgagtacatattctggactgaggacgccgtaaa

SEQ ID NO: 294626 - DNA, 60 bp, Artificial
  Synthetic oligonucleotide
actgactaacatcgctggtaacctctggtttagatcattgtaaaatgcaagagctgagcg

SEQ ID NO: 294627 - DNA, 53 bp, Artificial
  Synthetic oligonucleotide
gacctaagttagtaaccttaagacccaagtatgtaatgttaggacctataata

SEQ ID NO: 294628 - DNA, 51 bp, Artificial
  Synthetic oligonucleotide
aacggggctgctcaaggtcctctgtgtgacaaggcaactgcatcgtcgatt

SEQ ID NO: 294629 - DNA, 51 bp, Artificial
  Synthetic oligonucleotide
tcgaccacaattctgctcacccacttcgtcattactctacacgcacgctac

SEQ ID NO: 294630 - DNA, 51 bp, Artificial
  Synthetic oligonucleotide
gactaggcagcgaggaggcactaacgggccgaagaagatcctggcagccct

SEQ ID NO: 294631 - DNA, 51 bp, Artificial
  Synthetic oligonucleotide
acgagctcgataaaagtgggaagacaaatcgagagacgattcaccaattgg

SEQ ID NO: 294632 - DNA, 51 bp, Artificial
  Synthetic oligonucleotide
tcaggttcctttgagcgatactaacaacgctgtttcgtttcgtgacacttt

SEQ ID NO: 294633 - DNA, 51 bp, Artificial
  Synthetic oligonucleotide
atgcgtgtgaaggacgtgtgggtccaagtcgcatccgcctacgcggagctt

SEQ ID NO: 294634 - DNA, 51 bp, Artificial
  Synthetic oligonucleotide
gagacgtctgagaggggcgcctgacagtgacacggacgtcggtgagtgggg

SEQ ID NO: 294635 - DNA, 51 bp, Artificial
  Synthetic oligonucleotide
gactcagcgcactgcccgcagaaggtcaaacatacgtcgccgtttcctccg

SEQ ID NO: 294636 - DNA, 51 bp, Artificial
  Synthetic oligonucleotide
ccactcgtgttggtgcgcgagtaagacgccgacgctgtgtgacgcagatag

SEQ ID NO: 294637 - DNA, 51 bp, Artificial
  Synthetic oligonucleotide
gggtgagtctactttactgatacgttgtccctgggcgtggaggttaccacg

SEQ ID NO: 294638 - DNA, 58 bp, Artificial
  Synthetic oligonucleotide
ccctcgtcgcaccggccaattagtcccacctcttgcgtctccaaacttatgcggcaca

SEQ ID NO: 294639 - DNA, 51 bp, Artificial
  Synthetic oligonucleotide
aacgggatgtcgcgtagcttggttcatcgtatccgttttgggaatggaatt

SEQ ID NO: 294640 - DNA, 51 bp, Artificial
  Synthetic oligonucleotide
acgaccaaacaaatatatgtctgaattttaacgacatatatttgagtatca

SEQ ID NO: 294641 - DNA, 51 bp, Artificial
  Synthetic oligonucleotide
gggcgtactgtccacagttgtgttccaatgctcacgcacgtcttgtgggtg

SEQ ID NO: 294642 - DNA, 51 bp, Artificial
  Synthetic oligonucleotide
tcatgaactctgtacactacaagcctggcgacgagtaaagtccaaagtggc

SEQ ID NO: 294643 - DNA, 51 bp, Artificial
  Synthetic oligonucleotide
gggtcgtaacttttgttgtccaacatgacacgccttccattgacgaagctg

SEQ ID NO: 294644 - DNA, 51 bp, Artificial
  Synthetic oligonucleotide
acgaatttgattgttttattggattcgaaaacggagaagtaattttattcg

SEQ ID NO: 294645 - DNA, 51 bp, Artificial
  Synthetic oligonucleotide
gggtcacatgggctcgggagctaagcccccacattctaggcatgactggtg

SEQ ID NO: 294646 - DNA, 51 bp, Artificial
  Synthetic oligonucleotide
gggcttgcaacaacactgttggatgggtcagaggacgctagctcccttata

SEQ ID NO: 294647 - DNA, 51 bp, Artificial
  Synthetic oligonucleotide
tcattgcctcccctacactctgatgctgggaggcccgactggctgccacat

SEQ ID NO: 294648 - DNA, 51 bp, Artificial
  Synthetic oligonucleotide
accttccacggcacgtaccacctccccgcaaagctttagcagttccctgcg

SEQ ID NO: 294649 - DNA, 57 bp, Artificial
  Synthetic oligonucleotide
gtatttataggtcgttgaacgtgtattatcctacaggacttcgttcagtatcttaca

SEQ ID NO: 294650 - DNA, 51 bp, Artificial
  Synthetic oligonucleotide
ggaggcgcaatgcggggcatgaggtggcttccgagatggggtttggatagt

SEQ ID NO: 294651 - DNA, 51 bp, Artificial
  Synthetic oligonucleotide
aacattagacacacgggcaccacgacggagcgtctttcgcacaccagcctc

SEQ ID NO: 294652 - DNA, 51 bp, Artificial
  Synthetic oligonucleotide
tagcgacatttaaagacacccgctccaacgttaacaacttcagcaccacga

SEQ ID NO: 294653 - DNA, 51 bp, Artificial
  Synthetic oligonucleotide
ctcttacctccgccctctctgtacgcgtgagcaactgcgtgtctgcgcgat

SEQ ID NO: 294654 - DNA, 51 bp, Artificial
  Synthetic oligonucleotide
ctctgtgcctccctcttgtgaggggcacggctacgtaaaggcaatcatcgt

SEQ ID NO: 294655 - DNA, 51 bp, Artificial
  Synthetic oligonucleotide
cgacagcaccgatggtggggagccctagaggccagcggcacacaaacactc

SEQ ID NO: 294656 - DNA, 51 bp, Artificial
  Synthetic oligonucleotide
actacccgtcacactcgacaaactccatgtgttgcgaacccagcactttcg

SEQ ID NO: 294657 - DNA, 51 bp, Artificial
  Synthetic oligonucleotide
tgagcgtggaacgctacacaggccctaatctaagggctagtataaggtctg

SEQ ID NO: 294658 - DNA, 51 bp, Artificial
  Synthetic oligonucleotide
gaccatggggtccgtcaaccacgccaatagcacctccatttccagcccggt

SEQ ID NO: 294659 - DNA, 51 bp, Artificial
  Synthetic oligonucleotide
actacacactcgcagtcccctatgacacgaagcctagggtctggcaataaa

SEQ ID NO: 294660 - DNA, 59 bp, Artificial
  Synthetic oligonucleotide
cttgtgccccatggttggtgtggggaatcatgaggggatctgccaatgcagcgataggg

SEQ ID NO: 294661 - DNA, 51 bp, Artificial
  Synthetic oligonucleotide
taggagaaatatacacattggggtaaaagcgtcctgctctatgattgtgcg

SEQ ID NO: 294662 - DNA, 51 bp, Artificial
  Synthetic oligonucleotide
ccccagattacccctgtcgcctgcacgaatgaaaatcgcccttttgtcccc

SEQ ID NO: 294663 - DNA, 51 bp, Artificial
  Synthetic oligonucleotide
ctagggtggcgtgtgtgtctttgtcgtggctcgctgaaggcagcgtgaggt

SEQ ID NO: 294664 - DNA, 51 bp, Artificial
  Synthetic oligonucleotide
cggaacattcccaactgttatgggtaggtccccagttcagcagtgcatttt

SEQ ID NO: 294665 - DNA, 51 bp, Artificial
  Synthetic oligonucleotide
tgacgcgtgggatgctctacgtggacatcgacatcttgccggacttcgatt

SEQ ID NO: 294666 - DNA, 51 bp, Artificial
  Synthetic oligonucleotide
gacccgttgggcacgcatgaccaacaacgaacaagtgacaaccatttcccc

SEQ ID NO: 294667 - DNA, 51 bp, Artificial
  Synthetic oligonucleotide
tagggaaacttcgatcgagattcctaatgttacgtggcaagatataggagg

SEQ ID NO: 294668 - DNA, 51 bp, Artificial
  Synthetic oligonucleotide
ccggggaggcccgagccaggtgtacttgctctcatccggcttactgggatg

SEQ ID NO: 294669 - DNA, 51 bp, Artificial
  Synthetic oligonucleotide
gaccgaatgactgcgtgttgctcgcgacttcccggccccacaccactctta

SEQ ID NO: 294670 - DNA, 51 bp, Artificial
  Synthetic oligonucleotide
tgacagtcgtgacaagggtaatgacgcagatagcggcaaagcaagagctgg

SEQ ID NO: 294671 - DNA, 54 bp, Artificial
  Synthetic oligonucleotide
ctttaggaagcccgtgaatcgcctagtctctaaagagcagtttactcctaagtt

SEQ ID NO: 294672 - DNA, 51 bp, Artificial
  Synthetic oligonucleotide
ggtgtggtgtttctctccgtcacgcattaacgcatgttgtgtgactgcact

SEQ ID NO: 294673 - DNA, 51 bp, Artificial
  Synthetic oligonucleotide
gaccgcgtgcgacaaacttcgccaccttggtctccttcggggagctctcag

SEQ ID NO: 294674 - DNA, 51 bp, Artificial
  Synthetic oligonucleotide
cacgacctcattatcagttaggggcagctcaatacatccccgccatttcgt

SEQ ID NO: 294675 - DNA, 51 bp, Artificial
  Synthetic oligonucleotide
ccttcatcactccacgcacacacaaaggcttcagtggacaccgctcaccct

SEQ ID NO: 294676 - DNA, 51 bp, Artificial
  Synthetic oligonucleotide
atcgtctgagttggaacacgaataggaatcaagttccgtgccgcctcctct

SEQ ID NO: 294677 - DNA, 51 bp, Artificial
  Synthetic oligonucleotide
tgcagccacgcacatacaagcacacgcatgccgacgcaaatacgcgatgaa

SEQ ID NO: 294678 - DNA, 51 bp, Artificial
  Synthetic oligonucleotide
actcttttctttcgagggcacacacctgttgcgctgaggttctgactatct

SEQ ID NO: 294679 - DNA, 51 bp, Artificial
  Synthetic oligonucleotide
caccgtcgacgaattagtggacttggaccaggaggattcgaccgtgatcga

SEQ ID NO: 294680 - DNA, 51 bp, Artificial
  Synthetic oligonucleotide
atcccaaggggccctgcttcttccgacatctccgcgaagtagtggtcccac

SEQ ID NO: 294681 - DNA, 51 bp, Artificial
  Synthetic oligonucleotide
gacataggaccgggggtagccacgtgagactcatacccgaaggggctacgc

SEQ ID NO: 294682 - DNA, 59 bp, Artificial
  Synthetic oligonucleotide
aaagttaatgattcacggtatccgcatgtcacactacctatcgcggtttgctgcgttcg

SEQ ID NO: 294683 - DNA, 51 bp, Artificial
  Synthetic oligonucleotide
ccctgagcatgaaattccaagcatcaaggttcagcgcctcgggacgtaaag

SEQ ID NO: 294684 - DNA, 51 bp, Artificial
  Synthetic oligonucleotide
gaggggtatacgcacgcatacaggaacacgtgaggtgtgccttggtggggc

SEQ ID NO: 294685 - DNA, 51 bp, Artificial
  Synthetic oligonucleotide
gacatgccacacagtgtagaagacccattcttgtataacgaaataccttta

SEQ ID NO: 294686 - DNA, 51 bp, Artificial
  Synthetic oligonucleotide
acagtcgacatgcagccgcactacatttattcgccgcgtgaactgacgcgg

SEQ ID NO: 294687 - DNA, 51 bp, Artificial
  Synthetic oligonucleotide
tgcaagctcttctaggccggccacgcggttgttgagtcgccgctcctcgta

SEQ ID NO: 294688 - DNA, 51 bp, Artificial
  Synthetic oligonucleotide
gagggctcactagctcccatccgacacttagaggaagcctccctgcaccga

SEQ ID NO: 294689 - DNA, 51 bp, Artificial
  Synthetic oligonucleotide
atcccatgagggctgatcccacggcgcctccacagcttcgtgcacaggggc

SEQ ID NO: 294690 - DNA, 51 bp, Artificial
  Synthetic oligonucleotide
ggactggaccttgtgctgcacatgaacaactccgccctgccgtcgtttgcc

SEQ ID NO: 294691 - DNA, 51 bp, Artificial
  Synthetic oligonucleotide
tagatagcagataatttgcggcgtgcgtaagatgatcaagagggagcaccc

SEQ ID NO: 294692 - DNA, 51 bp, Artificial
  Synthetic oligonucleotide
actccctctccttgtgctccgacagtatacagaaaagcggctcacagacac

SEQ ID NO: 294693 - DNA, 59 bp, Artificial
  Synthetic oligonucleotide
catgcagctcgagaccctcaggcttctcggtggggagcggtccgtccagcataggaagc

SEQ ID NO: 294694 - DNA, 51 bp, Artificial
  Synthetic oligonucleotide
actcatattgttaagtcgaggaaataccatatctggaaacccagccataac

SEQ ID NO: 294695 - DNA, 50 bp, Artificial
  Synthetic oligonucleotide
ccctggaaaacgcggggaaataacaccgacgggtgtgtgagggtcgggga

SEQ ID NO: 294696 - DNA, 51 bp, Artificial
  Synthetic oligonucleotide
aacatcgtcccacctggcccttattaacctcggccaacactgggctccccc

SEQ ID NO: 294697 - DNA, 51 bp, Artificial
  Synthetic oligonucleotide
aacatgcacgtgcacgtaggtaatcccataaccgaaaatgtggagcctgac

SEQ ID NO: 294698 - DNA, 51 bp, Artificial
  Synthetic oligonucleotide
atcgaacggaaggctaagggtgactgcgaaaaaccctgccactgcgctgga

SEQ ID NO: 294699 - DNA, 51 bp, Artificial
  Synthetic oligonucleotide
cacctgtggtagtagtcgtacagtggaagtgctacgcgatgtgaccagttt

SEQ ID NO: 294700 - DNA, 51 bp, Artificial
  Synthetic oligonucleotide
attccgcatgcgacttgccgcagaactagcgtagtgttcacggcgaccact

SEQ ID NO: 294701 - DNA, 51 bp, Artificial
  Synthetic oligonucleotide
gagctaacattcatccaaggtccatgagaagttaagagcaccgggtatctc

SEQ ID NO: 294702 - DNA, 51 bp, Artificial
  Synthetic oligonucleotide
attacgagctcattatcgaagagtaagacaattaaacatgaataattcgaa

SEQ ID NO: 294703 - DNA, 51 bp, Artificial
  Synthetic oligonucleotide
ggcattgcacacgtacgcacgcgtgggtgctccccagcgcatttggttgcg

SEQ ID NO: 294704 - DNA, 59 bp, Artificial
  Synthetic oligonucleotide
ctttactgaataacataatagaatacagagacactcatgcaatatccgaattggaaggg

SEQ ID NO: 294705 - DNA, 51 bp, Artificial
  Synthetic oligonucleotide
ccccaccgctgtaggacccgccccgtgagagcgccatgagaagagagtgcg

SEQ ID NO: 294706 - DNA, 51 bp, Artificial
  Synthetic oligonucleotide
aactgagtcattatcacgtgttttttctgacttactaggttcctggttagg

SEQ ID NO: 294707 - DNA, 51 bp, Artificial
  Synthetic oligonucleotide
ctattgggtaagtaataggaatcgaacccatgacctttagatccacaatct

SEQ ID NO: 294708 - DNA, 51 bp, Artificial
  Synthetic oligonucleotide
tctgagtagcatacagagggagagagcggctcctacagatgcgcaggtgtg

SEQ ID NO: 294709 - DNA, 51 bp, Artificial
  Synthetic oligonucleotide
gagcggggtagaggggatctggactcatgttctatggcagagaatgcgcac

SEQ ID NO: 294710 - DNA, 51 bp, Artificial
  Synthetic oligonucleotide
ggccactcaaccctccgcttttgtcagccttcacatgacctgggcatctgg

SEQ ID NO: 294711 - DNA, 51 bp, Artificial
  Synthetic oligonucleotide
ccggtcatttacgtgcaaccgctccgcagaagctcacccgagtcgctgcca

SEQ ID NO: 294712 - DNA, 51 bp, Artificial
  Synthetic oligonucleotide
ggtgacatgtgtgatttcaccggacggaagataggcgaatttcaccatccc

SEQ ID NO: 294713 - DNA, 51 bp, Artificial
  Synthetic oligonucleotide
tctctcaacgaggacaaggctcacgtgctccaccgcggacgctgagaagac

SEQ ID NO: 294714 - DNA, 51 bp, Artificial
  Synthetic oligonucleotide
cactttgacctcacagcgatgggtccctcactcgtctcccctgtgcatgac

SEQ ID NO: 294715 - DNA, 59 bp, Artificial
  Synthetic oligonucleotide
agtgcacgctctcacttcacgccatcaacaaccgattggttcggacatgtaccgtcgct

SEQ ID NO: 294716 - DNA, 51 bp, Artificial
  Synthetic oligonucleotide
ccacgcaggtgggatatggctgaggagtatgttctggttttagggaaagta

SEQ ID NO: 294717 - DNA, 51 bp, Artificial
  Synthetic oligonucleotide
accattatatttgaccccacagtcgggacatacttggcaatattccgatcg

SEQ ID NO: 294718 - DNA, 51 bp, Artificial
  Synthetic oligonucleotide
cggatgtgaaagcgtatgggtgggtgtgcacatatgctgcttcgcgtaaaa

SEQ ID NO: 294719 - DNA, 51 bp, Artificial
  Synthetic oligonucleotide
cacttaccaactagtgaacacgtccaacgtgaattactaaacgtcaacttt

SEQ ID NO: 294720 - DNA, 51 bp, Artificial
  Synthetic oligonucleotide
cctatctagttgtttacctgtatccgtgtcgcttgcggctcctcttggtgt

SEQ ID NO: 294721 - DNA, 51 bp, Artificial
  Synthetic oligonucleotide
ccttgctcccggtccccgaggcactgcgctcaaaggccgttgtgctttgcg

SEQ ID NO: 294722 - DNA, 51 bp, Artificial
  Synthetic oligonucleotide
cggatggaacaaatgagattttgggacagcctgaatctaacgccagtaaga

SEQ ID NO: 294723 - DNA, 51 bp, Artificial
  Synthetic oligonucleotide
tctcacgcgtggaaacacgacaaaggcagccggcaaagctcgaaagtatcc

SEQ ID NO: 294724 - DNA, 51 bp, Artificial
  Synthetic oligonucleotide
atgtgctacgcccaagagagcagcaacggtcgcttccgcgtgcgtggcacg

SEQ ID NO: 294725 - DNA, 51 bp, Artificial
  Synthetic oligonucleotide
cactggtaataacaccagatgggttgcaagatccagactcacaactttggc

SEQ ID NO: 294726 - DNA, 59 bp, Artificial
  Synthetic oligonucleotide
ccggagcgcttgctcaaacagtcattgtagcagcgtgcgccaacgagtctgcggctctg

SEQ ID NO: 294727 - DNA, 51 bp, Artificial
  Synthetic oligonucleotide
cagaggtgcgacacacttcttgcggacatggccttactccgagcttctttt

SEQ ID NO: 294728 - DNA, 51 bp, Artificial
  Synthetic oligonucleotide
ggatttcggattaaacagtttgactcgaagctccgaagtactaaataaagg

SEQ ID NO: 294729 - DNA, 51 bp, Artificial
  Synthetic oligonucleotide
aaccccacctgtattcactgcaggggaacctcccccgtagtaaggggcctg

SEQ ID NO: 294730 - DNA, 51 bp, Artificial
  Synthetic oligonucleotide
ctatactagctaaggttaaattcgacacgcataattccgtttggcttgttt

SEQ ID NO: 294731 - DNA, 51 bp, Artificial
  Synthetic oligonucleotide
accaaacgcactcgcaaatggcgaagggcggacagcttcagctctcttcgc

SEQ ID NO: 294732 - DNA, 51 bp, Artificial
  Synthetic oligonucleotide
gaccggggacaacactctctgggacagcagagctccagcgcagtgcagcca

SEQ ID NO: 294733 - DNA, 51 bp, Artificial
  Synthetic oligonucleotide
aactgtgtgttgggaagcgaagcactgtagttgccttggacaacttctagt

SEQ ID NO: 294734 - DNA, 51 bp, Artificial
  Synthetic oligonucleotide
ggtggcttcgctttgggcgcgtctgcagagcatccggtcacagccgcgtga

SEQ ID NO: 294735 - DNA, 51 bp, Artificial
  Synthetic oligonucleotide
accaatatgaccatttcattattgattaactaaaactcatgttgaatcacc

SEQ ID NO: 294736 - DNA, 51 bp, Artificial
  Synthetic oligonucleotide
attagtcaaatgaccaccggatttaataaaaatggtgtcgttttacttaac

SEQ ID NO: 294737 - DNA, 58 bp, Artificial
  Synthetic oligonucleotide
gtgttcacggaggtacgcctggcacgcagttgccaaggagcttggaacggataaggga

SEQ ID NO: 294738 - DNA, 55 bp, Artificial
  Synthetic oligonucleotide
caacacgggtattgctaagttattcactcgtaaactactaaagatgagaattacc

SEQ ID NO: 294739 - DNA, 51 bp, Artificial
  Synthetic oligonucleotide
ggcacgcagttagcgttctgctcttcagcgattaggaaggtcaggcatgag

SEQ ID NO: 294740 - DNA, 51 bp, Artificial
  Synthetic oligonucleotide
gagctccgtctcatacacagggtactcgaacatgctgtccgacagaatcgt

SEQ ID NO: 294741 - DNA, 50 bp, Artificial
  Synthetic oligonucleotide
tcttccgttagcctctggggtgtttcaaccccgttccgggggattcccac

SEQ ID NO: 294742 - DNA, 51 bp, Artificial
  Synthetic oligonucleotide
acgtaaacagttagtgccactttacaagtgctcgtttggatgacccgccta

SEQ ID NO: 294743 - DNA, 51 bp, Artificial
  Synthetic oligonucleotide
atctggtttcacttgtacttgggcccatcatgcaatgatcgagggtaaaag

SEQ ID NO: 294744 - DNA, 51 bp, Artificial
  Synthetic oligonucleotide
atcttaggaatactggcaattctaagattgactaaactttgattcgagcga

SEQ ID NO: 294745 - DNA, 51 bp, Artificial
  Synthetic oligonucleotide
acggtgcgtgcgatatttctgaaacccatcggaagaggactgcagccgcct

SEQ ID NO: 294746 - DNA, 51 bp, Artificial
  Synthetic oligonucleotide
ggtgcgggttgatgaggcacgggtgccgggagcatgacaagagcagcctcg

SEQ ID NO: 294747 - DNA, 51 bp, Artificial
  Synthetic oligonucleotide
tagtggggtcctgctcagttgcggtcactacttccacgccgcctgcattga

SEQ ID NO: 294748 - DNA, 51 bp, Artificial
  Synthetic oligonucleotide
ctctctccaacaggacgggtgcgtgacgttatgctggtgcactggtgtact

SEQ ID NO: 294749 - DNA, 59 bp, Artificial
  Synthetic oligonucleotide
ctctctgcaacgccaggtactcacaatggcctttacgtattcgtgcaacgtattgccac

SEQ ID NO: 294750 - DNA, 51 bp, Artificial
  Synthetic oligonucleotide
atgaactccaaccttgttttacaaagggaaggtccaatatcgaacaccaaa

SEQ ID NO: 294751 - DNA, 51 bp, Artificial
  Synthetic oligonucleotide
ggcatccgtccacaaaagtggtcttgatgtggtagcggcggtgtttgtgga

SEQ ID NO: 294752 - DNA, 51 bp, Artificial
  Synthetic oligonucleotide
tctgctacactgttaggctggttaattcgctttcccgtgaagtacgatctt

SEQ ID NO: 294753 - DNA, 51 bp, Artificial
  Synthetic oligonucleotide
tctgcgtgggggagccaggcgtcctcttaacccctttcgatgtcaagccac

SEQ ID NO: 294754 - DNA, 51 bp, Artificial
  Synthetic oligonucleotide
ggcatcgtgcccctacctcgaaacattatgtgtgacagcatgccggtttgt

SEQ ID NO: 294755 - DNA, 51 bp, Artificial
  Synthetic oligonucleotide
aatcaaagacacagatgttatgcgtcattattatacaccacgtgtgttagt

SEQ ID NO: 294756 - DNA, 51 bp, Artificial
  Synthetic oligonucleotide
cggtgagattgctgaaagatttgatcctcacattggtttattacatagagg

SEQ ID NO: 294757 - DNA, 51 bp, Artificial
  Synthetic oligonucleotide
acaagacacacatgcgccagcttcgtcatgctgcacgctctgtggtgtgcc

SEQ ID NO: 294758 - DNA, 51 bp, Artificial
  Synthetic oligonucleotide
gtcgccttttcctctgacattggtgccacattcggctctactgttttctga

SEQ ID NO: 294759 - DNA, 51 bp, Artificial
  Synthetic oligonucleotide
ttaatgggatcattcttggttatccctagtttagaactaccaggtggatcc

SEQ ID NO: 294760 - DNA, 59 bp, Artificial
  Synthetic oligonucleotide
cacgagtaacacaagccccctgactgagagactatcatgcaccactctgaggttgcgag

SEQ ID NO: 294761 - DNA, 51 bp, Artificial
  Synthetic oligonucleotide
cgtgccccatgaagaactcggcaacttcacaaaagaacccgtttaggttat

SEQ ID NO: 294762 - DNA, 51 bp, Artificial
  Synthetic oligonucleotide
gcgatacgtcgaactggcctcccacacgccgtaggtacctggccctatcag

SEQ ID NO: 294763 - DNA, 51 bp, Artificial
  Synthetic oligonucleotide
agcccccattggatttagtagcccggcatccatgtttggtagcccagccgc

SEQ ID NO: 294764 - DNA, 51 bp, Artificial
  Synthetic oligonucleotide
ccgcggcgtagcgacgacaagcacgtttggccacacaggatggacactcgc

SEQ ID NO: 294765 - DNA, 51 bp, Artificial
  Synthetic oligonucleotide
cacacccgcatattctacctcacgcgaatcctcagatacgcatcctaacta

SEQ ID NO: 294766 - DNA, 51 bp, Artificial
  Synthetic oligonucleotide
cgggtgctagtgcacgaggcaccgatgaacttgtatgatgaggtgaacagc

SEQ ID NO: 294767 - DNA, 51 bp, Artificial
  Synthetic oligonucleotide
ttgttgaagacctctggatagttttcttcttgctctcgcgggtaaaatttt

SEQ ID NO: 294768 - DNA, 51 bp, Artificial
  Synthetic oligonucleotide
acaacgcatgtgcgggggcatgtacggaggcgccctactctttttctgtgc

SEQ ID NO: 294769 - DNA, 51 bp, Artificial
  Synthetic oligonucleotide
gaaagaggagatggtatgaaagcgggagctgtacacgctaagcgcgcgcaa

SEQ ID NO: 294770 - DNA, 51 bp, Artificial
  Synthetic oligonucleotide
cacagcgctctccacgccggcaaatcagtcttcgtagctaccagctcgggg

SEQ ID NO: 294771 - DNA, 58 bp, Artificial
  Synthetic oligonucleotide
agcgcagacgagggatacggtgcgttgcgtacatgatccaagtacgctttggggtctt

SEQ ID NO: 294772 - DNA, 51 bp, Artificial
  Synthetic oligonucleotide
ccatactttaccaccttagatgacgccccgttgctgggtagctatcaacgg

SEQ ID NO: 294773 - DNA, 51 bp, Artificial
  Synthetic oligonucleotide
ctggtattggcgcctcatgcagtggctactcatcgatcgcccgtactttcc

SEQ ID NO: 294774 - DNA, 51 bp, Artificial
  Synthetic oligonucleotide
agccgaacggtagacggagccgcccgataactgaggagctctccaatgagc

SEQ ID NO: 294775 - DNA, 51 bp, Artificial
  Synthetic oligonucleotide
cgtccactgttggggatgcagcagtatgattcagcggttgctcccttcggc

SEQ ID NO: 294776 - DNA, 51 bp, Artificial
  Synthetic oligonucleotide
catatgggttgacacatttgctcccaaatatcataggaacgtctggatgtc

SEQ ID NO: 294777 - DNA, 51 bp, Artificial
  Synthetic oligonucleotide
gcccaacaatttccaacaagttatataggcccaaattatagacgacgacta

SEQ ID NO: 294778 - DNA, 51 bp, Artificial
  Synthetic oligonucleotide
cctctcctcactttaagcgagcgagggcatgcggtttgatggggcggtcgg

SEQ ID NO: 294779 - DNA, 51 bp, Artificial
  Synthetic oligonucleotide
ctggttgtggttggaagcggcaaatgcggacaacttatttaagccccgcgg

SEQ ID NO: 294780 - DNA, 51 bp, Artificial
  Synthetic oligonucleotide
cgtcttaccagtggaataaatgcttgtgtatgtattttatcctatagcggc

SEQ ID NO: 294781 - DNA, 51 bp, Artificial
  Synthetic oligonucleotide
aataaggggcatcgggtcggagcagaggccccaggagcgcgagtatccatc

SEQ ID NO: 294782 - DNA, 57 bp, Artificial
  Synthetic oligonucleotide
acgagcgccgcttggcacaaacggcttggcgttgaggtttagagttgttccgcgcga

SEQ ID NO: 294783 - DNA, 51 bp, Artificial
  Synthetic oligonucleotide
gtcctctggactctaaactccacgcgcagagctaggacatctgccacgctg

SEQ ID NO: 294784 - DNA, 51 bp, Artificial
  Synthetic oligonucleotide
gttgtttccatccttcctgtgcggcgctaacgacatcaaagcgccaccccg

SEQ ID NO: 294785 - DNA, 51 bp, Artificial
  Synthetic oligonucleotide
aagggctgcgttcacgtcgcggcaaaagtcacgggctcgtatcactgaggg

SEQ ID NO: 294786 - DNA, 51 bp, Artificial
  Synthetic oligonucleotide
gcaaatacgactgttgcacgctcttcggtacaaacgcactgtgtgcgcggt

SEQ ID NO: 294787 - DNA, 51 bp, Artificial
  Synthetic oligonucleotide
tttagtaggacgttatgaatcagagctgttgggttgtttggataaattagc

SEQ ID NO: 294788 - DNA, 51 bp, Artificial
  Synthetic oligonucleotide
cgcgttgggtagtggctcagcaggtgttgtgggcggtggaagcgggatcgg

SEQ ID NO: 294789 - DNA, 51 bp, Artificial
  Synthetic oligonucleotide
ttgccttgcacaagatgctgcggttcgtcttgcttgcccggctctcctcgc

SEQ ID NO: 294790 - DNA, 51 bp, Artificial
  Synthetic oligonucleotide
gcgagctgtaggtaggagttcaggccttggtccggtctggggagaggaggt

SEQ ID NO: 294791 - DNA, 51 bp, Artificial
  Synthetic oligonucleotide
caactctaattagtccagttgaagggctagttagcatatccaacagggggc

SEQ ID NO: 294792 - DNA, 51 bp, Artificial
  Synthetic oligonucleotide
gcctagttttcttagcaaagggattgtcatgtaaagtatgagttctaaaga

SEQ ID NO: 294793 - DNA, 50 bp, Artificial
  Synthetic oligonucleotide
tttacacccgcctcggttaacaaatggtccgatggggaaactacaccccc

SEQ ID NO: 294794 - DNA, 51 bp, Artificial
  Synthetic oligonucleotide
gcgaggagagccgggcaagcaagacgaaccgcagcatcttgtgcaaggcaa

SEQ ID NO: 294795 - DNA, 51 bp, Artificial
  Synthetic oligonucleotide
ttcgtgcgtgtgtggagatgacgcaagcgcgcgcgtatacactcgcactcg

SEQ ID NO: 294796 - DNA, 51 bp, Artificial
  Synthetic oligonucleotide
taagataaagtgcctctaaaatcccctcgaagcatttacactccagcccag

SEQ ID NO: 294797 - DNA, 51 bp, Artificial
  Synthetic oligonucleotide
caagggtaagaacggcgaaactagggctcaggttcgcgtacgtaaatattc

SEQ ID NO: 294798 - DNA, 51 bp, Artificial
  Synthetic oligonucleotide
ccattccggtgagactctccgccctctgaaatcaccccgccgggaaatagt

SEQ ID NO: 294799 - DNA, 51 bp, Artificial
  Synthetic oligonucleotide
taagacctatgttagtaacagaaggacctcacttagtgaacgtaagaccta

SEQ ID NO: 294800 - DNA, 51 bp, Artificial
  Synthetic oligonucleotide
agccacagcggggttgaagacaccaccgctaatcgggccacacgtcaagcc

SEQ ID NO: 294801 - DNA, 51 bp, Artificial
  Synthetic oligonucleotide
cacacgcacaggcataggagcacgtggctgtgcgttgctgcgcagtgtaag

SEQ ID NO: 294802 - DNA, 51 bp, Artificial
  Synthetic oligonucleotide
catctccggacgcgccgagagacaaactttattcgacgtgtgcgttgcatg

SEQ ID NO: 294803 - DNA, 51 bp, Artificial
  Synthetic oligonucleotide
catcacgagactgtgcagcacaagcagcggtcggtaccgcacgaagcactg

SEQ ID NO: 294804 - DNA, 59 bp, Artificial
  Synthetic oligonucleotide
catattagcatggagttcattcataccttcagattggttttcactacctattaaagcac

SEQ ID NO: 294805 - DNA, 51 bp, Artificial
  Synthetic oligonucleotide
gcagaagtcacgcgatgcgagtgcagcagaccgcgcgtccactggttccgt

SEQ ID NO: 294806 - DNA, 51 bp, Artificial
  Synthetic oligonucleotide
cgcacgatcgccttactcgaacaaagaccatgtagcatgtgttcggggcct

SEQ ID NO: 294807 - DNA, 51 bp, Artificial
  Synthetic oligonucleotide
gcccaaggacatagtgttggtgacagagtgttactggacgcacataaacac

SEQ ID NO: 294808 - DNA, 51 bp, Artificial
  Synthetic oligonucleotide
catgcaaccgagattggtgctgcccagctcgcagcctctacggatctcagc

SEQ ID NO: 294809 - DNA, 51 bp, Artificial
  Synthetic oligonucleotide
cacaaggcaccacggaggggtcgaagtcaccacaggcagttggtggtcaag

SEQ ID NO: 294810 - DNA, 51 bp, Artificial
  Synthetic oligonucleotide
agcggatcaacgctacggtgtgcgtgtggttcccatgtcgctgctttggtg

SEQ ID NO: 294811 - DNA, 51 bp, Artificial
  Synthetic oligonucleotide
gtgtgtgtctcttcaactagggcgcctttatccaaacagacccacgcgcac

SEQ ID NO: 294812 - DNA, 51 bp, Artificial
  Synthetic oligonucleotide
gtgagattatagctgtcttggaagtcattacgtgtagtaaactcctgaatg

SEQ ID NO: 294813 - DNA, 51 bp, Artificial
  Synthetic oligonucleotide
ccatcccgacatggggttacgggcaaatctgattaggagcctagttaaaca

SEQ ID NO: 294814 - DNA, 51 bp, Artificial
  Synthetic oligonucleotide
gcacgtcgtgcactaactcgagggaccgaatgaaggccggcagtaagctct

SEQ ID NO: 294815 - DNA, 54 bp, Artificial
  Synthetic oligonucleotide
taattcccgccttatcccacgtttggttcgacccgcaaattagagtggacagcc

SEQ ID NO: 294816 - DNA, 51 bp, Artificial
  Synthetic oligonucleotide
ttataaattcatcgacagtaaaccgatgtgaattgggcaaataataagaaa

SEQ ID NO: 294817 - DNA, 51 bp, Artificial
  Synthetic oligonucleotide
aggcccagcagtaggctagtagcttaggaggtaggacgcacccaggacgcc

SEQ ID NO: 294818 - DNA, 51 bp, Artificial
  Synthetic oligonucleotide
cacacctccgcgtccctctcgtggcgtaagccgctccgctaccgttcgatt

SEQ ID NO: 294819 - DNA, 51 bp, Artificial
  Synthetic oligonucleotide
cgatacaggataactatggacccagtataactgcctaggtcgcactatacg

SEQ ID NO: 294820 - DNA, 51 bp, Artificial
  Synthetic oligonucleotide
gtgacattgtcgatatggtggagtcatcgttgcttagcatgcgaagggtat

SEQ ID NO: 294821 - DNA, 51 bp, Artificial
  Synthetic oligonucleotide
ttatcacgacaccatctagctaatgtagtgttagatgtgaaaccagcagta

SEQ ID NO: 294822 - DNA, 49 bp, Artificial
  Synthetic oligonucleotide
cccggaaccaacttttatccttaacccggaatctacgtgatccttaacc

SEQ ID NO: 294823 - DNA, 51 bp, Artificial
  Synthetic oligonucleotide
ccgtcgctctggatgcagaggcttggcagggcggatgtctgtcgtcgtctc

SEQ ID NO: 294824 - DNA, 51 bp, Artificial
  Synthetic oligonucleotide
aatttggggcctaattctacagatgatagtccaactgtttcttcgttagga

SEQ ID NO: 294825 - DNA, 51 bp, Artificial
  Synthetic oligonucleotide
cattgagatgggcgcgtgatccctatcaggccagcaatgtccgagcggagt

SEQ ID NO: 294826 - DNA, 59 bp, Artificial
  Synthetic oligonucleotide
cctggttgtaatgggatcctagctcaaaaaactctgccaattcgaacccatgctgatta

SEQ ID NO: 294827 - DNA, 51 bp, Artificial
  Synthetic oligonucleotide
aatccacagctcggctgaggccgattaagcgagacaaggagaagtgcggga

SEQ ID NO: 294828 - DNA, 51 bp, Artificial
  Synthetic oligonucleotide
agtcgcgcatgtgcgtcatgcgcgctgtcaagtcgtactcagggtcgaacg

SEQ ID NO: 294829 - DNA, 51 bp, Artificial
  Synthetic oligonucleotide
aggccacggtgcaagccactccacatccacgcacctggcggaagcctacac

SEQ ID NO: 294830 - DNA, 51 bp, Artificial
  Synthetic oligonucleotide
agcggcgcacttagcagcacctctccgtgcggatcaatgtccccgatcgct

SEQ ID NO: 294831 - DNA, 51 bp, Artificial
  Synthetic oligonucleotide
agtcatctcctaaggtattataattcgcttcatcggcattatgtctacgac

SEQ ID NO: 294832 - DNA, 51 bp, Artificial
  Synthetic oligonucleotide
ccatgcgcgtgccatatgtactagaacggtctcaggctgaattttatgatc

SEQ ID NO: 294833 - DNA, 51 bp, Artificial
  Synthetic oligonucleotide
caatagggctaataccttgctgcatcttcctcgcttaagtgcgtcagacac

SEQ ID NO: 294834 - DNA, 51 bp, Artificial
  Synthetic oligonucleotide
ccccttgtcgttgtctggcaccgtcaggccaatgatggaaaccgccgcaac

SEQ ID NO: 294835 - DNA, 51 bp, Artificial
  Synthetic oligonucleotide
caagcatcctggcgcagagggacttgaccgacccctcggttgtttgtagtc

SEQ ID NO: 294836 - DNA, 51 bp, Artificial
  Synthetic oligonucleotide
ttatgcgagatgagaacagtaacagggagaagacatcaactgaggttacat

SEQ ID NO: 294837 - DNA, 58 bp, Artificial
  Synthetic oligonucleotide
ctcggcagtccagccgcggtattccgggtacacgttgctactctccgccacagtctta

SEQ ID NO: 294838 - DNA, 51 bp, Artificial
  Synthetic oligonucleotide
catctccgatgattctggaccagaagcggaacgtgacagctgtaccgtcgc

SEQ ID NO: 294839 - DNA, 51 bp, Artificial
  Synthetic oligonucleotide
ctgtgcgtcaaacgctcgtgacctaattgcttggaggttcactgctccacc

SEQ ID NO: 294840 - DNA, 51 bp, Artificial
  Synthetic oligonucleotide
agtcgacatacctcttttgggtctctgcgcacctacttaaccatttctaaa

SEQ ID NO: 294841 - DNA, 51 bp, Artificial
  Synthetic oligonucleotide
gtttgcagaccctgtgccgccgaacgaggggtgcacctgatccgctgctat

SEQ ID NO: 294842 - DNA, 51 bp, Artificial
  Synthetic oligonucleotide
cgtctgtcccgggcaaccttgacaaatcgcggtccatctgctaccgctcac

SEQ ID NO: 294843 - DNA, 51 bp, Artificial
  Synthetic oligonucleotide
aaacaccgccgctaccacatcaagaccgcttttgtggacggatgcctcgag

SEQ ID NO: 294844 - DNA, 51 bp, Artificial
  Synthetic oligonucleotide
gtctcctgaaataggtctgttccccttcgtggctctacacctttccgtttt

SEQ ID NO: 294845 - DNA, 51 bp, Artificial
  Synthetic oligonucleotide
ttcctagctcaaacggatagagcattagccttctaagctactagttaaagg

SEQ ID NO: 294846 - DNA, 51 bp, Artificial
  Synthetic oligonucleotide
cccctgctaggtcggtgccgtcacagccacactctaccgtgcggagcgtcc

SEQ ID NO: 294847 - DNA, 51 bp, Artificial
  Synthetic oligonucleotide
agtctattgccagcatccgagtcgtaaatgtggaccactattgagccatga

SEQ ID NO: 294848 - DNA, 52 bp, Artificial
  Synthetic oligonucleotide
ggaccattaaaaacaatgtgctgttttctaaggtttggtaaaaaagttcatc

SEQ ID NO: 294849 - DNA, 58 bp, Artificial
  Synthetic oligonucleotide
gtaggtcttaacttgagtaacatagatcctaacatcagtaatgtaggtcttaacttga

SEQ ID NO: 294850 - DNA, 51 bp, Artificial
  Synthetic oligonucleotide
agtctagcacctacgatacctttacgttcagttaaatggacaactcggact

SEQ ID NO: 294851 - DNA, 51 bp, Artificial
  Synthetic oligonucleotide
gtctgccccgtcgcacatggcagcgcgctacgaacacaacttccaccgtgg

SEQ ID NO: 294852 - DNA, 51 bp, Artificial
  Synthetic oligonucleotide
aaaatccttgcatatattatcgacacacacccattcggttgtcgcgcgctt

SEQ ID NO: 294853 - DNA, 51 bp, Artificial
  Synthetic oligonucleotide
ttagacttcacagcctatcattgctcggcagagcgagagggacgggcgaaa

SEQ ID NO: 294854 - DNA, 51 bp, Artificial
  Synthetic oligonucleotide
taacaatctacgggcgcggcactcacccccatcacgcaatcgcacatctcc

SEQ ID NO: 294855 - DNA, 51 bp, Artificial
  Synthetic oligonucleotide
gcgccctaaaatttctactagttatagaccacacggtaaatgaggtgattt

SEQ ID NO: 294856 - DNA, 51 bp, Artificial
  Synthetic oligonucleotide
gcgcccgtgtacggcacaacccgccacaccaccccttctctcccacgtggg

SEQ ID NO: 294857 - DNA, 51 bp, Artificial
  Synthetic oligonucleotide
aagctgtctcaccaccacgtcacaccacgttgtccgctctcgaccttttgt

SEQ ID NO: 294858 - DNA, 51 bp, Artificial
  Synthetic oligonucleotide
cgctctccactgatccccgctttacactccagcagattagggtcgcaaggg

SEQ ID NO: 294859 - DNA, 51 bp, Artificial
  Synthetic oligonucleotide
cccaacacgtaacaaaaaaattatgcgccactatgtagtacacatgaaatt

SEQ ID NO: 294860 - DNA, 58 bp, Artificial
  Synthetic oligonucleotide
ctaacttactgctacattactacggcatcattactacttctacaatacttcgttagta

SEQ ID NO: 294861 - DNA, 51 bp, Artificial
  Synthetic oligonucleotide
aagtaagcaggcctctcacctgtccatgacttagttatgcgagcatgcaag

SEQ ID NO: 294862 - DNA, 51 bp, Artificial
  Synthetic oligonucleotide
ttcgactatgcctcagtatggcgctcgtctccttgcacacgctttccaaat

SEQ ID NO: 294863 - DNA, 51 bp, Artificial
  Synthetic oligonucleotide
gtcgtggtatacagacgacttctagcgaggcgtgggccaagctgtcttctc

SEQ ID NO: 294864 - DNA, 51 bp, Artificial
  Synthetic oligonucleotide
ttcaccacgaccctcatacctcccacgacttcgtctactaaacacaaaatc

SEQ ID NO: 294865 - DNA, 51 bp, Artificial
  Synthetic oligonucleotide
aaggtgtgccgccgttgtgtcacgttaaggagggtggcgggcgacatcccc

SEQ ID NO: 294866 - DNA, 51 bp, Artificial
  Synthetic oligonucleotide
agcggtaggcctgaagacgttggccatttatggaggcgcagggataggtga

SEQ ID NO: 294867 - DNA, 51 bp, Artificial
  Synthetic oligonucleotide
cgattaagacgacacaggcgagtgcaaacaccgtctcaaatggcaagagta

SEQ ID NO: 294868 - DNA, 51 bp, Artificial
  Synthetic oligonucleotide
ccgtgactcgcgccgttaggtgtgcggctgcgctctcttgcccgctggctc

SEQ ID NO: 294869 - DNA, 51 bp, Artificial
  Synthetic oligonucleotide
catttgttggagtggtagtatgttcattatgagtaggttcattcgttgtgg

SEQ ID NO: 294870 - DNA, 51 bp, Artificial
  Synthetic oligonucleotide
cccaaccggatgggtatcgcgctagcctttgcgtctggagagacgccatgc

SEQ ID NO: 294871 - DNA, 54 bp, Artificial
  Synthetic oligonucleotide
gtaactagtatagatcttaactacagaaacgtaggtcttaaggtaactagtata

SEQ ID NO: 294872 - DNA, 51 bp, Artificial
  Synthetic oligonucleotide
gtgacggagctggggaggtggtacaccgggcctgagcaagggagggcggcg

SEQ ID NO: 294873 - DNA, 51 bp, Artificial
  Synthetic oligonucleotide
ttcgacatcatgtatagtgcgcagctctcgtccccgtcagcccctttcgac

SEQ ID NO: 294874 - DNA, 51 bp, Artificial
  Synthetic oligonucleotide
gaaaacccttcgagagctaaatttaggtcactaaaaaaagacaacaagacg

SEQ ID NO: 294875 - DNA, 51 bp, Artificial
  Synthetic oligonucleotide
gtctctagacatccgtcgattcatcctttccctctagctggcacggtgcga

SEQ ID NO: 294876 - DNA, 51 bp, Artificial
  Synthetic oligonucleotide
gccactgtccttcgcgttgtacgacttactgcagctacccctcgcctcgtg

SEQ ID NO: 294877 - DNA, 51 bp, Artificial
  Synthetic oligonucleotide
gtggactgaactcatgtgccttttgcaagactgctatgggtgagcaggagt

SEQ ID NO: 294878 - DNA, 51 bp, Artificial
  Synthetic oligonucleotide
ttagtatactcgaatctcgattattacttatgctggctatggactctctgg

SEQ ID NO: 294879 - DNA, 51 bp, Artificial
  Synthetic oligonucleotide
gtgacgccgtctatcgctatacggattcaaaagatatgtgccactactcgc

SEQ ID NO: 294880 - DNA, 51 bp, Artificial
  Synthetic oligonucleotide
caaggcgctctcccgtgtgtgtcgtcgcccgccgtccttcccaagtgctca

SEQ ID NO: 294881 - DNA, 51 bp, Artificial
  Synthetic oligonucleotide
caagtatagaaatgcgagaagatagccctacaagagataataccatcactc

SEQ ID NO: 294882 - DNA, 59 bp, Artificial
  Synthetic oligonucleotide
gtggcaaatgacgtgtgccccgagaggatgactgaagctcctcggctatgcatgccgtg

SEQ ID NO: 294883 - DNA, 51 bp, Artificial
  Synthetic oligonucleotide
aggttcattcgcagtcagacgtgcttgggaagattaagtcacaccttccgg

SEQ ID NO: 294884 - DNA, 51 bp, Artificial
  Synthetic oligonucleotide
aagggcccgtcactggactgtgcggatgaagcacacgtcacagggctactg

SEQ ID NO: 294885 - DNA, 51 bp, Artificial
  Synthetic oligonucleotide
cctcgggagcgtgtacggagactgcacagggtttctaaagggactcgaaag

SEQ ID NO: 294886 - DNA, 51 bp, Artificial
  Synthetic oligonucleotide
cagtatgtcgttgtgatctgtatgacgctctgtccacattcgatccgcatc

SEQ ID NO: 294887 - DNA, 51 bp, Artificial
  Synthetic oligonucleotide
gttacaatactttttgatcccaggctggtaataaatgtaaacttttagccc

SEQ ID NO: 294888 - DNA, 51 bp, Artificial
  Synthetic oligonucleotide
gccgtatgtgcagtgaggtgccacctgacgcaacgctgtgctcagtgcgtg

SEQ ID NO: 294889 - DNA, 51 bp, Artificial
  Synthetic oligonucleotide
gtgtctcgctacgtgcgtggggtggggataagctgtagtgctgtgttcgtg

SEQ ID NO: 294890 - DNA, 51 bp, Artificial
  Synthetic oligonucleotide
tgtcgtcatctgctcgactaaagtacttgcgttagtgttagtacggtacac

SEQ ID NO: 294891 - DNA, 51 bp, Artificial
  Synthetic oligonucleotide
tttgtgaagtgtgtcgtgccatcctcgaagggcaaggatgacgggtacgac

SEQ ID NO: 294892 - DNA, 51 bp, Artificial
  Synthetic oligonucleotide
gattctacgagctaagcatggatctttgatgcattcgacatcaaccaagaa

SEQ ID NO: 294893 - DNA, 51 bp, Artificial
  Synthetic oligonucleotide
aaagtacggcgctttttacagctttacgggtagcaacacttcttgaaaaaa

SEQ ID NO: 294894 - DNA, 51 bp, Artificial
  Synthetic oligonucleotide
gttgtgcaagcgattcaccaagcgggttcccacctcttactagttcttttg

SEQ ID NO: 294895 - DNA, 51 bp, Artificial
  Synthetic oligonucleotide
cgtgtgacaaggcggggcgagtgctgcaaaccaacagtacacacgcgctac

SEQ ID NO: 294896 - DNA, 51 bp, Artificial
  Synthetic oligonucleotide
gtggtggatttacaaacgccttgagtatcttaccctcaacatattttacat

SEQ ID NO: 294897 - DNA, 51 bp, Artificial
  Synthetic oligonucleotide
cacatttctcatgtgatggacgcgcccatgtcgtcccgtgtgctatcgcta

SEQ ID NO: 294898 - DNA, 51 bp, Artificial
  Synthetic oligonucleotide
ttctgtggagcagcacaacatccgtgacactctcgagagacagcgctgacg

SEQ ID NO: 294899 - DNA, 51 bp, Artificial
  Synthetic oligonucleotide
cacattggtgctcaagccctttgattccatacactaagcaggagagcagag

SEQ ID NO: 294900 - DNA, 51 bp, Artificial
  Synthetic oligonucleotide
tgtctccccttcaccatacctcattccaacgcggaagtcgatgtcacaagg

SEQ ID NO: 294901 - DNA, 51 bp, Artificial
  Synthetic oligonucleotide
tttggtttgcggggctcgtaaatcgagtgccagcattccctaaagacgacc

SEQ ID NO: 294902 - DNA, 51 bp, Artificial
  Synthetic oligonucleotide
cacaacgagttctaggagtgtcttgctagctgctcgtgtcgtttcggtgtg

SEQ ID NO: 294903 - DNA, 51 bp, Artificial
  Synthetic oligonucleotide
gtgcaactcgaggctgctcttgtcatgctcccggcacccgtgcctcatcaa

SEQ ID NO: 294904 - DNA, 54 bp, Artificial
  Synthetic oligonucleotide
gaccttagttactgacgttaagacctatgttagtcatgttaagaccttagttag

SEQ ID NO: 294905 - DNA, 51 bp, Artificial
  Synthetic oligonucleotide
cctgcttgtggagcgactctcgcggcccaaagacgcatgcgcacacttttg

SEQ ID NO: 294906 - DNA, 51 bp, Artificial
  Synthetic oligonucleotide
agggcgtcgaagggattttgtctctagcctctcccgtctcgtctgcgctgc

SEQ ID NO: 294907 - DNA, 51 bp, Artificial
  Synthetic oligonucleotide
catggccgatttggtttacctcgcgtagactgagcagccgttcacttggcc

SEQ ID NO: 294908 - DNA, 51 bp, Artificial
  Synthetic oligonucleotide
cttcagagggctcatagcctgtgtccggttgaacttcgagaactactgaca

SEQ ID NO: 294909 - DNA, 51 bp, Artificial
  Synthetic oligonucleotide
gcactcctccgtaacggggcaggctctgtactcgatggagctcaagtctgt

SEQ ID NO: 294910 - DNA, 51 bp, Artificial
  Synthetic oligonucleotide
cccctgctcattgtggtcgctcagcgcggggattctactaccgctggatgg

SEQ ID NO: 294911 - DNA, 51 bp, Artificial
  Synthetic oligonucleotide
gtgatttgagtgaagttgacacaaggtactagtagaggaatctgccggtgg

SEQ ID NO: 294912 - DNA, 51 bp, Artificial
  Synthetic oligonucleotide
gtgcccctcctcgctgcctactgttaccgtgccgtggttcttgcgtgggca

SEQ ID NO: 294913 - DNA, 51 bp, Artificial
  Synthetic oligonucleotide
agcaagcaacgccggtgtcctttggggcagcctaccgggttcctgacacca

SEQ ID NO: 294914 - DNA, 51 bp, Artificial
  Synthetic oligonucleotide
gcgacggggcgaacggaggttctaccgctggtcaccactgcgcaggactcc

SEQ ID NO: 294915 - DNA, 54 bp, Artificial
  Synthetic oligonucleotide
cgtatttaggttgcgggatttaatattttacggtgtatgtgtaagatttcgcat

SEQ ID NO: 294916 - DNA, 51 bp, Artificial
  Synthetic oligonucleotide
ttttggcacctgggacgagacacggtgcgccccacacagcttttccatcga

SEQ ID NO: 294917 - DNA, 51 bp, Artificial
  Synthetic oligonucleotide
ttttgcaccatccccaatctcttacgcgccctctcgaaggagactcgcttc

SEQ ID NO: 294918 - DNA, 51 bp, Artificial
  Synthetic oligonucleotide
gcagctagctgcttttagtcacccgcacaaccagttaccgctaattgtgaa

SEQ ID NO: 294919 - DNA, 51 bp, Artificial
  Synthetic oligonucleotide
gtgcgtcagtgcgcgtctgtacatagagaccgaagagcacacacttgcctc

SEQ ID NO: 294920 - DNA, 51 bp, Artificial
  Synthetic oligonucleotide
ctgttagttgccaaaataacgaccggtgctaaattggattctaaggttcgg

SEQ ID NO: 294921 - DNA, 51 bp, Artificial
  Synthetic oligonucleotide
agctgggatgggatgataccggtctcctgtctgctccacgttcctggggag

SEQ ID NO: 294922 - DNA, 51 bp, Artificial
  Synthetic oligonucleotide
ttttctcaacttgcacccttgagcgttttaggagagacgtgtatcaccatt

SEQ ID NO: 294923 - DNA, 51 bp, Artificial
  Synthetic oligonucleotide
ttgaacttattttgtacacaggatagcaagttcaattgattagtgtagtgc

SEQ ID NO: 294924 - DNA, 51 bp, Artificial
  Synthetic oligonucleotide
gttcaggcagaaataggcaacagtgtagcacaaccttgccgttcagaccac

SEQ ID NO: 294925 - DNA, 51 bp, Artificial
  Synthetic oligonucleotide
ttttcgttgcgtcaaaactgtggactgattctgttatatccggtggtgcga

SEQ ID NO: 294926 - DNA, 59 bp, Artificial
  Synthetic oligonucleotide
agcacgttgaatctttgcagtttatttatggggacttcgagtatatagatgaggaacat

SEQ ID NO: 294927 - DNA, 51 bp, Artificial
  Synthetic oligonucleotide
ctgttgacacaactaacaaaggagatgatgtggcaattggaataaaccctg

SEQ ID NO: 294928 - DNA, 51 bp, Artificial
  Synthetic oligonucleotide
acacctggtagtaaacattggtgagccatttctcttagaacgtgtctagat

SEQ ID NO: 294929 - DNA, 51 bp, Artificial
  Synthetic oligonucleotide
cgtgaacaatgggcacacgccacagtgatcggaggcactcgtcgggtgggg

SEQ ID NO: 294930 - DNA, 51 bp, Artificial
  Synthetic oligonucleotide
cgtacaacggcgggctgcttgtcatctcgcacgacgagtacttcattacgt

SEQ ID NO: 294931 - DNA, 51 bp, Artificial
  Synthetic oligonucleotide
caagtccacatccgacttgtcgaagtcccgacccacgttgtcccccgcgta

SEQ ID NO: 294932 - DNA, 51 bp, Artificial
  Synthetic oligonucleotide
gtcatctacgtgaccactaccctaagtcggctattctttgcaattgcgttg

SEQ ID NO: 294933 - DNA, 51 bp, Artificial
  Synthetic oligonucleotide
agatacgctggctctactcccaacggtatctttgttaacgatcctactgac

SEQ ID NO: 294934 - DNA, 51 bp, Artificial
  Synthetic oligonucleotide
gtgtccatattggacaccatgtaaataagtggaattctgaaacaggacctt

SEQ ID NO: 294935 - DNA, 51 bp, Artificial
  Synthetic oligonucleotide
gccggagaggtagagagcaaacgccccgtgcatatgaacgtgtgacagggg

SEQ ID NO: 294936 - DNA, 51 bp, Artificial
  Synthetic oligonucleotide
aagtgtgcgcacaccgtcggtgctcacgggacacttgcttcgcagttgtcg

SEQ ID NO: 294937 - DNA, 55 bp, Artificial
  Synthetic oligonucleotide
tcgttctttatcaaaaggtcctttcattaatagccgtcttataggtagaattgaa

SEQ ID NO: 294938 - DNA, 51 bp, Artificial
  Synthetic oligonucleotide
gtgccaaaggtcgctgaggagactcaacagagctctctactcaatattgag

SEQ ID NO: 294939 - DNA, 51 bp, Artificial
  Synthetic oligonucleotide
agggggacatagggctagtgtcgggggctgagcagggactgtaaaggcgta

SEQ ID NO: 294940 - DNA, 51 bp, Artificial
  Synthetic oligonucleotide
agatcaggagtgggctcgacccgttgggagccttctgcagatctccactgg

SEQ ID NO: 294941 - DNA, 51 bp, Artificial
  Synthetic oligonucleotide
ttgaggggttcacggggcgtaccaaggcggcttcctaccccaacaaactca

SEQ ID NO: 294942 - DNA, 51 bp, Artificial
  Synthetic oligonucleotide
cttgcatcgtgagtgttgtgtgcatccggcggaagtgggggcctcccgctc

SEQ ID NO: 294943 - DNA, 51 bp, Artificial
  Synthetic oligonucleotide
agatccttgtctagctcaagaaacgaccgcatttacaggagtaactatata

SEQ ID NO: 294944 - DNA, 51 bp, Artificial
  Synthetic oligonucleotide
cgaggagataaatgcaccagatccgaggtaccgcggcacaagaggagccgg

SEQ ID NO: 294945 - DNA, 51 bp, Artificial
  Synthetic oligonucleotide
aagtgccaccgatgtgcgaggactacgctacgaggtggctgattcgataca

SEQ ID NO: 294946 - DNA, 51 bp, Artificial
  Synthetic oligonucleotide
gattcctatagtcttgtcctcatcgcgtagagtgaaccttcctagctgagg

SEQ ID NO: 294947 - DNA, 51 bp, Artificial
  Synthetic oligonucleotide
cccgcccgtttcgcgctttactcgcgctcccacacttctgagcgtgtgtgc

SEQ ID NO: 294948 - DNA, 59 bp, Artificial
  Synthetic oligonucleotide
tccttcatattgactatgctgacttgagtaacggaaatctactagattcagctatccat

SEQ ID NO: 294949 - DNA, 51 bp, Artificial
  Synthetic oligonucleotide
cttccccctggcgaatgatcggcgtaccccgacctgatggaggggcatgct

SEQ ID NO: 294950 - DNA, 51 bp, Artificial
  Synthetic oligonucleotide
ccgcgtttcgcagcgcccggactgctagccaaatagagccaagtccttgga

SEQ ID NO: 294951 - DNA, 51 bp, Artificial
  Synthetic oligonucleotide
cgcgtttgacggaggaccagttccactatcagagttgaatcggctctcacg

SEQ ID NO: 294952 - DNA, 51 bp, Artificial
  Synthetic oligonucleotide
gtgaacagtccttggcaggaggtagtgttctgcaggacgcttcagggtagg

SEQ ID NO: 294953 - DNA, 51 bp, Artificial
  Synthetic oligonucleotide
cgtcgtgagtttctctgcttgtcgctgatatagggtcacactccagactga

SEQ ID NO: 294954 - DNA, 51 bp, Artificial
  Synthetic oligonucleotide
cgtggtaggcttgatcactctgctgcaatacacggcttctccagtgtaccc

SEQ ID NO: 294955 - DNA, 51 bp, Artificial
  Synthetic oligonucleotide
cgtagctgcagtgagaggcaaagcgaatgaaaaggggccggcaactcgtgt

SEQ ID NO: 294956 - DNA, 51 bp, Artificial
  Synthetic oligonucleotide
tttcgtgtacatgtagacaaacttcttctgcgcgactgccgtcatgctgtg

SEQ ID NO: 294957 - DNA, 51 bp, Artificial
  Synthetic oligonucleotide
gtggggtgcaagcggcatccaaacagagcgacactcttgactttctctccg

SEQ ID NO: 294958 - DNA, 51 bp, Artificial
  Synthetic oligonucleotide
cccaatcgtgttagattctgtgccgcctcacttctctcggagttctccgcc

SEQ ID NO: 294959 - DNA, 60 bp, Artificial
  Synthetic oligonucleotide
aagtatgatagcacaatgcctccactaccaactaatctaacaggataatcatttgaatgc

SEQ ID NO: 294960 - DNA, 59 bp, Artificial
  Synthetic oligonucleotide
tctccaacgtgctgtgcgcgatgaacatgacagagttcagctccctggctatgcagctg

SEQ ID NO: 294961 - DNA, 51 bp, Artificial
  Synthetic oligonucleotide
gcacaccagactgcgatagattgctgagaccggtacttcgagcacacacgg

SEQ ID NO: 294962 - DNA, 51 bp, Artificial
  Synthetic oligonucleotide
catgcgtcttgggacgagcgagccacaggcagggatgcatgccctctgcct

SEQ ID NO: 294963 - DNA, 51 bp, Artificial
  Synthetic oligonucleotide
agtgccacctcccttcatgcacgcgcatatgtagggcttcccctatctgcc

SEQ ID NO: 294964 - DNA, 51 bp, Artificial
  Synthetic oligonucleotide
ttcgtttgaaccccacggtgggttacctctgtcacgtgcacctcaaagcta

SEQ ID NO: 294965 - DNA, 51 bp, Artificial
  Synthetic oligonucleotide
gcatgatcccagtcagtggccgaccgagggcatgaccaagtggaatgccat

SEQ ID NO: 294966 - DNA, 51 bp, Artificial
  Synthetic oligonucleotide
aatggtggtaccgacgacagacgtgccgcggctgctatctcgcctctacga

SEQ ID NO: 294967 - DNA, 51 bp, Artificial
  Synthetic oligonucleotide
cacatgccatcccccaccgctgtaggacccgccccgtgagagcgccatgag

SEQ ID NO: 294968 - DNA, 51 bp, Artificial
  Synthetic oligonucleotide
cgtccgttaacgcacacaattgctgcgccacctttgcgtcacgtcccaaaa

SEQ ID NO: 294969 - DNA, 51 bp, Artificial
  Synthetic oligonucleotide
catgcgatgtggaccgtccaagcgccgccctgagtgaaacgtgtccgtcca

SEQ ID NO: 294970 - DNA, 51 bp, Artificial
  Synthetic oligonucleotide
tgtgtatgggcggctcagatgaaccttgcggaggctcacatgcgcgtggaa

SEQ ID NO: 294971 - DNA, 59 bp, Artificial
  Synthetic oligonucleotide
gcgctctaggtgtatatctggggagatgcggacttcttggtcaggtgtgaaccaggggg

SEQ ID NO: 294972 - DNA, 51 bp, Artificial
  Synthetic oligonucleotide
gcagagcttacttcggccctgcagagtcagcgagccctcatggcaagcatc

SEQ ID NO: 294973 - DNA, 51 bp, Artificial
  Synthetic oligonucleotide
aataagaggctcagacgagagtgacaagtacagtgctccaatagctggtct

SEQ ID NO: 294974 - DNA, 51 bp, Artificial
  Synthetic oligonucleotide
agtataggagaactgcgagcctattatcttgtatccacctcctaagtctat

SEQ ID NO: 294975 - DNA, 51 bp, Artificial
  Synthetic oligonucleotide
gcgggaggtggttgtcgcacaggtgccctacgtgatcacttcgctggggcg

SEQ ID NO: 294976 - DNA, 51 bp, Artificial
  Synthetic oligonucleotide
catgcattggatgtacacaatgtgtccgagcatgtcctacggatgtactag

SEQ ID NO: 294977 - DNA, 51 bp, Artificial
  Synthetic oligonucleotide
catcagctgttttaggttttggaggtatttaccactcaattttaggacctg

SEQ ID NO: 294978 - DNA, 51 bp, Artificial
  Synthetic oligonucleotide
agcagggtgcagcacagctgcgtaactgaaaagccaaaacgacgcacacgc

SEQ ID NO: 294979 - DNA, 51 bp, Artificial
  Synthetic oligonucleotide
aggtcaatgtaactgtttgtcaaacagttggatgcgggttcaagccccgcc

SEQ ID NO: 294980 - DNA, 51 bp, Artificial
  Synthetic oligonucleotide
aagtcctcgctcggggcttctgttgacttgaggcaatcgtggctcgcctgg

SEQ ID NO: 294981 - DNA, 51 bp, Artificial
  Synthetic oligonucleotide
cgatcccacatccacacccaaaggctttccgcctccgtctctacgactgcg

SEQ ID NO: 294982 - DNA, 59 bp, Artificial
  Synthetic oligonucleotide
tgagtcggtaatgttgctctactctcacgcgagttttctccgtcggctggaggggccaa

SEQ ID NO: 294983 - DNA, 51 bp, Artificial
  Synthetic oligonucleotide
aaaactcctcacgttgacttctggcatatgaggacgtgcatcggtggcagc

SEQ ID NO: 294984 - DNA, 51 bp, Artificial
  Synthetic oligonucleotide
taagtagcagatgcgggcccgtacacggtcgctgcgactcataactccgca

SEQ ID NO: 294985 - DNA, 51 bp, Artificial
  Synthetic oligonucleotide
gttaacctttccttttccttacgtactctagctatgaacacaattgtctat

SEQ ID NO: 294986 - DNA, 51 bp, Artificial
  Synthetic oligonucleotide
gtcccagtcgtccctactctgccgcctcccgctgtgattcgcttggagatt

SEQ ID NO: 294987 - DNA, 51 bp, Artificial
  Synthetic oligonucleotide
taagtcgcccctagtgcgcccaaagggaaaaattcgccacaccaggggagt

SEQ ID NO: 294988 - DNA, 51 bp, Artificial
  Synthetic oligonucleotide
gtgatccttgaaagcaaacatatatcttatcacgcgcatcacgtagggaac

SEQ ID NO: 294989 - DNA, 51 bp, Artificial
  Synthetic oligonucleotide
cggttcactgtggagccggaacaatagcgtgtagctaccaacctgagtgca

SEQ ID NO: 294990 - DNA, 51 bp, Artificial
  Synthetic oligonucleotide
ttcattcgaggactatgagaattatgtgatgggtctaaacgaggagataac

SEQ ID NO: 294991 - DNA, 51 bp, Artificial
  Synthetic oligonucleotide
gtctgttctacgccgtacatcagcacgcacattcgctctgtgtctacttcg

SEQ ID NO: 294992 - DNA, 51 bp, Artificial
  Synthetic oligonucleotide
tgtgccttccccgttttataagcagcgttgctcgtttgtgcttcccctcac

SEQ ID NO: 294993 - DNA, 59 bp, Artificial
  Synthetic oligonucleotide
tccctttccggagatcatattggcgtattcaatttatcgttgaaaggtcatgctacctg

SEQ ID NO: 294994 - DNA, 51 bp, Artificial
  Synthetic oligonucleotide
tgtgccccagtttccgtacgagaacagcgatgtgaagagccggtttctgtt

SEQ ID NO: 294995 - DNA, 51 bp, Artificial
  Synthetic oligonucleotide
agggcggagattgacaaccgctatcgttgcccagaggaactcacagtagga

SEQ ID NO: 294996 - DNA, 51 bp, Artificial
  Synthetic oligonucleotide
tttgctcttgcgccgaggaagcgtatgattaccgcgttgtttccgttacgt

SEQ ID NO: 294997 - DNA, 51 bp, Artificial
  Synthetic oligonucleotide
cacaccatcccagagatggctgcccgtaccacgacataccgaaagcccgga

SEQ ID NO: 294998 - DNA, 51 bp, Artificial
  Synthetic oligonucleotide
tgtgatcactaaccccgctctaaacagcagagagggagctagcgagtcgcg

SEQ ID NO: 294999 - DNA, 51 bp, Artificial
  Synthetic oligonucleotide
taatcacgcacctcggcagctcgaggaggttactttgcctcgaagcggtgt

SEQ ID NO: 295000 - DNA, 51 bp, Artificial
  Synthetic oligonucleotide
gattttgatgaatactcaagatgaataaaaagaagtcctggggaagtatta

SEQ ID NO: 295001 - DNA, 51 bp, Artificial
  Synthetic oligonucleotide
taagtacggagcggagtgcgagagatgtacgaggatgctagcattctggac

SEQ ID NO: 295002 - DNA, 51 bp, Artificial
  Synthetic oligonucleotide
cgtcctgttcaggtttcatttggtcatattccgaaacgtcactgctgttac

SEQ ID NO: 295003 - DNA, 51 bp, Artificial
  Synthetic oligonucleotide
gcaccgaaacacacgcgcatacgggtgctatgcgtacatgcggtgttgcgt

SEQ ID NO: 295004 - DNA, 56 bp, Artificial
  Synthetic oligonucleotide
aaccgtgtataacatgcgcgttcgcggaatggtattgcctttattcgtatggtcgg

SEQ ID NO: 295005 - DNA, 51 bp, Artificial
  Synthetic oligonucleotide
caactaaatctcaatttcatcaagtccctcaattcaattcttgaaaggccc

SEQ ID NO: 295006 - DNA, 51 bp, Artificial
  Synthetic oligonucleotide
agctcccgcttgcgtcgtgcactgccagctcggtgtgtcacgcagcccaag

SEQ ID NO: 295007 - DNA, 51 bp, Artificial
  Synthetic oligonucleotide
ttcattcctagtactagaggatcctagggtttattaatattatcgggacct

SEQ ID NO: 295008 - DNA, 51 bp, Artificial
  Synthetic oligonucleotide
gaaccacagcaggcaacggcatgcgagttctcctctgtgaaggaatgttta

SEQ ID NO: 295009 - DNA, 51 bp, Artificial
  Synthetic oligonucleotide
tgtggctgcttgttagttaggcttttgtaagaaggcataacgctaggatta

SEQ ID NO: 295010 - DNA, 51 bp, Artificial
  Synthetic oligonucleotide
aagttggttgctcgtgggccagggaacggtatggacagcgtagcacaagtc

SEQ ID NO: 295011 - DNA, 50 bp, Artificial
  Synthetic oligonucleotide
aagggtcagtgtgcgtgctttgacggtggggaggctgtccagggatagcc

SEQ ID NO: 295012 - DNA, 50 bp, Artificial
  Synthetic oligonucleotide
aactacatacgcaccaccgttgcgtctgagtcggggaccggggctctggt

SEQ ID NO: 295013 - DNA, 50 bp, Artificial
  Synthetic oligonucleotide
cacgcctcgtcatcactcctctcacagagcgcgccttcttgacgtgcacg

SEQ ID NO: 295014 - DNA, 50 bp, Artificial
  Synthetic oligonucleotide
tatggggacatcatatgtatactacaggtccagaagtagatactagagct

SEQ ID NO: 295015 - DNA, 59 bp, Artificial
  Synthetic oligonucleotide
tgcaaagaagagtaggtcctcattacgttggttatagaggtagattgcaatatatagct

SEQ ID NO: 295016 - DNA, 50 bp, Artificial
  Synthetic oligonucleotide
aactaccgtccaccgacgccttagaaacctgccggaggggccacggatag

SEQ ID NO: 295017 - DNA, 50 bp, Artificial
  Synthetic oligonucleotide
aactaccactacaccgcacctccgcatgagcgcaagagtctgccgaggcg

SEQ ID NO: 295018 - DNA, 50 bp, Artificial
  Synthetic oligonucleotide
cacgcgagggctgtccggttgggaggcacctcaggtgggagtagatctgt

SEQ ID NO: 295019 - DNA, 50 bp, Artificial
  Synthetic oligonucleotide
aactacctggtggcaacggttcagtgctgaatccactcgctgaggatagc

SEQ ID NO: 295020 - DNA, 50 bp, Artificial
  Synthetic oligonucleotide
aaggggttgcagcaagcaaaacgcatgtgtcccgtcgcggactacccggt

SEQ ID NO: 295021 - DNA, 50 bp, Artificial
  Synthetic oligonucleotide
cacgcgagagttgctctccgccgtgcagtacctacaccgcacctgtggac

SEQ ID NO: 295022 - DNA, 50 bp, Artificial
  Synthetic oligonucleotide
tatcctgcggatatgcggacgagcgacagttgcacacatggggtgggcag

SEQ ID NO: 295023 - DNA, 50 bp, Artificial
  Synthetic oligonucleotide
aaggggacccaagagagcgcttgagcggcaggctacggtcggtgcctatt

SEQ ID NO: 295024 - DNA, 50 bp, Artificial
  Synthetic oligonucleotide
ccggggccatcgacagtaccgtcctcaggcgggaacgctcgtgaagtaac

SEQ ID NO: 295025 - DNA, 50 bp, Artificial
  Synthetic oligonucleotide
aagggcgtgtcagtaacgccgtcccatgaagtggataggccgactgccct

SEQ ID NO: 295026 - DNA, 59 bp, Artificial
  Synthetic oligonucleotide
cgcgccgttaggtgtgcggctgcgctctcttgcccgctggctcgagtgtcagtgaaaag

SEQ ID NO: 295027 - DNA, 50 bp, Artificial
  Synthetic oligonucleotide
ctctcgcagctccttccgcagtctgcactccctaacgtgtgtgtgcccaa

SEQ ID NO: 295028 - DNA, 50 bp, Artificial
  Synthetic oligonucleotide
cctcgccccacgagggagtccaacgcgagatccacatcccccgccggttt

SEQ ID NO: 295029 - DNA, 50 bp, Artificial
  Synthetic oligonucleotide
aagggcgcctcacattggtgtcgggtgagagtggaggctacacgtccaca

SEQ ID NO: 295030 - DNA, 50 bp, Artificial
  Synthetic oligonucleotide
cacacattggaattctcgggcgcccttcaaagagggccccttgaccacga

SEQ ID NO: 295031 - DNA, 50 bp, Artificial
  Synthetic oligonucleotide
aactctcccgtgttcttgtcgggctgtacgaggaacccgaccgacctccc

SEQ ID NO: 295032 - DNA, 50 bp, Artificial
  Synthetic oligonucleotide
ccagcacgggggcccttccacgctgtcccgcccgacacctactccgctcc

SEQ ID NO: 295033 - DNA, 50 bp, Artificial
  Synthetic oligonucleotide
aactctcgctcacgcctgccagtccattcgtccgtgactctccatcggcg

SEQ ID NO: 295034 - DNA, 50 bp, Artificial
  Synthetic oligonucleotide
aagggccgtcgcctctaccttcagtgttgccggttcgtctctgagcgtgg

SEQ ID NO: 295035 - DNA, 50 bp, Artificial
  Synthetic oligonucleotide
aagggccgctagccgcgtgacccctctttcttgttgcgcttctccgtgtc

SEQ ID NO: 295036 - DNA, 50 bp, Artificial
  Synthetic oligonucleotide
ctgttggggcgcttcgtgcagtggggaattagaggcaggtcgggagttgg

SEQ ID NO: 295037 - DNA, 59 bp, Artificial
  Synthetic oligonucleotide
tagggcaaacaggagactggggcatgctaatctctggaattatcgtgacttttctcgag

SEQ ID NO: 295038 - DNA, 50 bp, Artificial
  Synthetic oligonucleotide
tatatgccagattggacgcgcaacacgaaagggacaagcgggggcgctta

SEQ ID NO: 295039 - DNA, 50 bp, Artificial
  Synthetic oligonucleotide
aactctgtgaccgcccaagagggccacaagcgagtgttcgccaattcgca

SEQ ID NO: 295040 - DNA, 50 bp, Artificial
  Synthetic oligonucleotide
aactgacgcgggacgcccgaaccgcatacaccatacagctcgtgcataga

SEQ ID NO: 295041 - DNA, 50 bp, Artificial
  Synthetic oligonucleotide
aactgagcatcgcctccgcttttcccggacaaaggtccacacgcggggta

SEQ ID NO: 295042 - DNA, 50 bp, Artificial
  Synthetic oligonucleotide
aagggcccaagtgagctaatgccgcctgagaagcagtcccctttggaccg

SEQ ID NO: 295043 - DNA, 50 bp, Artificial
  Synthetic oligonucleotide
tatagcaaatttagacaattagatgctatgtacccggaaataaatgtatc

SEQ ID NO: 295044 - DNA, 50 bp, Artificial
  Synthetic oligonucleotide
aagggcacacgtaaagaggggtcccaaaggagtcgcgcgtccgtatgcag

SEQ ID NO: 295045 - DNA, 50 bp, Artificial
  Synthetic oligonucleotide
aactgattcgtccaggagcctcagtctgtccacatggcgcccgcggaacc

SEQ ID NO: 295046 - DNA, 50 bp, Artificial
  Synthetic oligonucleotide
ctgttgaatggaaccgaagcaccgggccgaagcagtgtgttcgcacgtcg

SEQ ID NO: 295047 - DNA, 50 bp, Artificial
  Synthetic oligonucleotide
aactgcaccactgcgcgtcacagggatgggcaggttagctccgcctaaca

SEQ ID NO: 295048 - DNA, 59 bp, Artificial
  Synthetic oligonucleotide
gctccaacaatatttactgcagtgattacaatattactgctatcagataacaatactcg

SEQ ID NO: 295049 - DNA, 50 bp, Artificial
  Synthetic oligonucleotide
aactacgaagcgccctcgacttagcatcgcggatcggggcctcacaagtg

SEQ ID NO: 295050 - DNA, 50 bp, Artificial
  Synthetic oligonucleotide
tatgccaatttagagattgtaatggagcttcgagaggttgattgtcttgc

SEQ ID NO: 295051 - DNA, 50 bp, Artificial
  Synthetic oligonucleotide
aaggggtgaagaaccacgtgccgggccacgcagaagagcgaactgggcca

SEQ ID NO: 295052 - DNA, 50 bp, Artificial
  Synthetic oligonucleotide
cacgccggccccacgtacagacagcccattgcgttgccacttgggtggag

SEQ ID NO: 295053 - DNA, 50 bp, Artificial
  Synthetic oligonucleotide
tatgcagcgacgttaatgaagctatactagcagtagagaatgtaagcagt

SEQ ID NO: 295054 - DNA, 50 bp, Artificial
  Synthetic oligonucleotide
cacgcccagtcgaacggtgctctgctagaaaggaatgtgcgggcgcctca

SEQ ID NO: 295055 - DNA, 50 bp, Artificial
  Synthetic oligonucleotide
cacgcagggccacacacaatcctcttgcgaacttttccgccagctggggc

SEQ ID NO: 295056 - DNA, 50 bp, Artificial
  Synthetic oligonucleotide
aagggggtggcagcttcgcgagggttggatgcgctacagctgtctggatt

SEQ ID NO: 295057 - DNA, 50 bp, Artificial
  Synthetic oligonucleotide
aactcatctgctcgaggttcctgccgcgctgcccctgtgtactcgtgtca

SEQ ID NO: 295058 - DNA, 50 bp, Artificial
  Synthetic oligonucleotide
aactcccggatgcatagctgcccacgccagcacaggtctccggaggctgc

SEQ ID NO: 295059 - DNA, 58 bp, Artificial
  Synthetic oligonucleotide
tatattacctatcggtggctctggacctagtgagactttttgcacttgggtgaaagta

SEQ ID NO: 295060 - DNA, 50 bp, Artificial
  Synthetic oligonucleotide
aactccgccaaggccacatcacacaacctggggcgcgcgagaacgcgggt

SEQ ID NO: 295061 - DNA, 50 bp, Artificial
  Synthetic oligonucleotide
ctctccggacgcacgtacctctcttgggcgagagtgtagtgtgggcccgg

SEQ ID NO: 295062 - DNA, 50 bp, Artificial
  Synthetic oligonucleotide
aaggggcgagacggacccgacgagcagagactgtctcctcggagactccc

SEQ ID NO: 295063 - DNA, 50 bp, Artificial
  Synthetic oligonucleotide
cacgcagctgatcgtacgtgccgccccttagcgccgcctcctaacgccgc

SEQ ID NO: 295064 - DNA, 50 bp, Artificial
  Synthetic oligonucleotide
aactccgtcattacgcccgcgcgaataacgcaacgcgtgtatgggttgcc

SEQ ID NO: 295065 - DNA, 50 bp, Artificial
  Synthetic oligonucleotide
aactcctgttgctctcgagcccgagttgcagatgcctcacgctccaaccg

SEQ ID NO: 295066 - DNA, 50 bp, Artificial
  Synthetic oligonucleotide
aaggggcacagtagggctctgcactgagttggcgcttcacctggtttgcg

SEQ ID NO: 295067 - DNA, 50 bp, Artificial
  Synthetic oligonucleotide
cttacggagcttgcaaatctctcagacgaaatgatcggtatggtaattac

SEQ ID NO: 295068 - DNA, 50 bp, Artificial
  Synthetic oligonucleotide
ccgctgtggttgcaccctccccctttcgccgtctacgtgtcgtccccgcg

SEQ ID NO: 295069 - DNA, 50 bp, Artificial
  Synthetic oligonucleotide
cacacacgtctgtgcatgcgtagcgacttgcggctgtgcggatgccctcc

SEQ ID NO: 295070 - DNA, 60 bp, Artificial
  Synthetic oligonucleotide
taatagtccctctaattcgataatagataaccagaatcgctaaacctatagctgattctg

SEQ ID NO: 295071 - DNA, 53 bp, Artificial
  Synthetic oligonucleotide
atgtggaatactacggcccgacggtaagaccctgagcaccttaacttccctaa

SEQ ID NO: 295072 - DNA, 59 bp, Artificial
  Synthetic oligonucleotide
cgcacacgtctacagcaggcggtgatctgtgcatgttgtctatttcgcgggaaactggg

SEQ ID NO: 295073 - DNA, 50 bp, Artificial
  Synthetic oligonucleotide
gttataaaactggcgtatatatacttaaaattgaatttggaacaaaacca

SEQ ID NO: 295074 - DNA, 50 bp, Artificial
  Synthetic oligonucleotide
aactcgcagaggtggcgggcgcacccctttaaaaggtagttccacccact

SEQ ID NO: 295075 - DNA, 50 bp, Artificial
  Synthetic oligonucleotide
aactcgcgaggaagatgcctctgtcgccacggacttcgaaaccgcttgcg

SEQ ID NO: 295076 - DNA, 50 bp, Artificial
  Synthetic oligonucleotide
aactcggaaaggggagcgcatgtgaacacgcgaaagcccacagacgtggc

SEQ ID NO: 295077 - DNA, 50 bp, Artificial
  Synthetic oligonucleotide
aacggcggtgcagccaaccgcttacactcgcaacacacgttaggggatta

SEQ ID NO: 295078 - DNA, 50 bp, Artificial
  Synthetic oligonucleotide
cacaagcgcccacgcctgtcatcattcagcgttggctcgcccttcttcga

SEQ ID NO: 295079 - DNA, 50 bp, Artificial
  Synthetic oligonucleotide
aacggcttcgcagacgcgcaaagtttcgtcgccagggtgtctgtacacct

SEQ ID NO: 295080 - DNA, 50 bp, Artificial
  Synthetic oligonucleotide
aagtcgactgggttgtccctgtccgctcgctcgatgctcactaccgggtg

SEQ ID NO: 295081 - DNA, 50 bp, Artificial
  Synthetic oligonucleotide
cacgtaccgctccacaagttgctcggcaagctagtcaccgcaggcggacc

SEQ ID NO: 295082 - DNA, 50 bp, Artificial
  Synthetic oligonucleotide
aagtcgaagcgacaacagccgcagacacgaccacgggtaaaccagggccg

SEQ ID NO: 295083 - DNA, 59 bp, Artificial
  Synthetic oligonucleotide
gcgcgttcaaggggtggacctagatgctcaagagccccgcatcctagactccaaaccat

SEQ ID NO: 295084 - DNA, 50 bp, Artificial
  Synthetic oligonucleotide
aacgggaaaatgcggaggggtggtcgacgcaagttctgtgctacgcctta

SEQ ID NO: 295085 - DNA, 50 bp, Artificial
  Synthetic oligonucleotide
aacgggacagagggacgcgcacgtgagtcgcctccacaacgcgttgcact

SEQ ID NO: 295086 - DNA, 50 bp, Artificial
  Synthetic oligonucleotide
aacgggaggggcaccaccgacgggagaggcagcatcgatggaagtgattc

SEQ ID NO: 295087 - DNA, 50 bp, Artificial
  Synthetic oligonucleotide
aagtcctgggaccacccaccactccgtgccgcagtagagcgtgcccttgt

SEQ ID NO: 295088 - DNA, 50 bp, Artificial
  Synthetic oligonucleotide
aacgggcaggagagtacaggcgccaccgtgagagaccaggtgatgtgccg

SEQ ID NO: 295089 - DNA, 50 bp, Artificial
  Synthetic oligonucleotide
aacgggcccagtatgcggcccatactacgcacaccaacacgacgcgctac

SEQ ID NO: 295090 - DNA, 50 bp, Artificial
  Synthetic oligonucleotide
aacgggctccaccctcttcgcagcagagctccccctaggctcgatcgatt

SEQ ID NO: 295091 - DNA, 50 bp, Artificial
  Synthetic oligonucleotide
aacgggctctcgcggccaagttctggcgtatgggcagagcacacgcgtcg

SEQ ID NO: 295092 - DNA, 50 bp, Artificial
  Synthetic oligonucleotide
gtgtgcaggtggtggcgaggtatgttggcaatgcgactgagaacgcacgc

SEQ ID NO: 295093 - DNA, 50 bp, Artificial
  Synthetic oligonucleotide
cacggtcaacgccactaccgctgcttggggcgactgcactggatgcaccc

SEQ ID NO: 295094 - DNA, 57 bp, Artificial
  Synthetic oligonucleotide
ataagaacgaacgcttttaacgcatgacatggatggataatactcggcttttccaaa

SEQ ID NO: 295095 - DNA, 50 bp, Artificial
  Synthetic oligonucleotide
ctcgcacttttccccgctcgggagtggagcgcggctgacagccttataga

SEQ ID NO: 295096 - DNA, 50 bp, Artificial
  Synthetic oligonucleotide
aacggggaaggtagatgcgaggggaggacatacgttccagcggaggggaa

SEQ ID NO: 295097 - DNA, 50 bp, Artificial
  Synthetic oligonucleotide
ctcgcgaaacgcttcacggtgctaagggcacactcgcgtcatgcgtgctg

SEQ ID NO: 295098 - DNA, 50 bp, Artificial
  Synthetic oligonucleotide
aagtccctccacgtactcattggggtcgccacgaagtcacatgctggccc

SEQ ID NO: 295099 - DNA, 50 bp, Artificial
  Synthetic oligonucleotide
aagtccccacaccctgccgtagcgggtaacctcctaccgtacctccttgg

SEQ ID NO: 295100 - DNA, 50 bp, Artificial
  Synthetic oligonucleotide
aacggggtcatgggagtggccaactgcgcacagtgtcaggcaccacagag

SEQ ID NO: 295101 - DNA, 50 bp, Artificial
  Synthetic oligonucleotide
aacggggtctccggcgcctcaccctcgggcgctgcaacgcaggtctcgcc

SEQ ID NO: 295102 - DNA, 50 bp, Artificial
  Synthetic oligonucleotide
aacggtaaggcagcggtgaatcttgaagggggcgcgtcctacgggcagtt

SEQ ID NO: 295103 - DNA, 50 bp, Artificial
  Synthetic oligonucleotide
aacggtctaggcacaccccagcgcatgcctcctcgacaccaatcgtcccg

SEQ ID NO: 295104 - DNA, 50 bp, Artificial
  Synthetic oligonucleotide
tcacgtcgcggcaaaagtcacgggctcgtatcactgagggcagcatgcat

SEQ ID NO: 295105 - DNA, 59 bp, Artificial
  Synthetic oligonucleotide
tcgccaggtcaacccacagtacgatgcgctgcgacaggagatcacggatgtgcacatgg

SEQ ID NO: 295106 - DNA, 50 bp, Artificial
  Synthetic oligonucleotide
aacggtggggcggcacttgttaggcgtaaaaacgtgcgctcggatgtcca

SEQ ID NO: 295107 - DNA, 50 bp, Artificial
  Synthetic oligonucleotide
cacaagcgttgcgtcgcttcccccgtgttgagcgaggggcatgtgtgctc

SEQ ID NO: 295108 - DNA, 50 bp, Artificial
  Synthetic oligonucleotide
aacgtaaaccgacggcaccggttaattccagccggcaggctcgtacccaa

SEQ ID NO: 295109 - DNA, 50 bp, Artificial
  Synthetic oligonucleotide
aagtggccccgctgcgcacctgagggtaagatggtgcggtcaacgcagta

SEQ ID NO: 295110 - DNA, 50 bp, Artificial
  Synthetic oligonucleotide
aagtggcatctcggcgcgagtggtgctatcgagggtctgttgcgattcgc

SEQ ID NO: 295111 - DNA, 50 bp, Artificial
  Synthetic oligonucleotide
aacggacggcacacaacgcattggtcacctttggtcgtacccacgacgga

SEQ ID NO: 295112 - DNA, 50 bp, Artificial
  Synthetic oligonucleotide
ccactgacacgcgatgagtgtgtccagggggagcattggcgatgtcgtga

SEQ ID NO: 295113 - DNA, 50 bp, Artificial
  Synthetic oligonucleotide
aacggacggcgttccaatcgaggcacccgcgcaagtggacaggacgcgtg

SEQ ID NO: 295114 - DNA, 50 bp, Artificial
  Synthetic oligonucleotide
aagtggcactgcggaagtgcgtccctgaggaaatgcgccactgcggaaat

SEQ ID NO: 295115 - DNA, 50 bp, Artificial
  Synthetic oligonucleotide
tccatactcatacgcaagcccagtgcgaagtccctcctgcaacctcacga

SEQ ID NO: 295116 - DNA, 59 bp, Artificial
  Synthetic oligonucleotide
tcctggtacgggagctaagttcggggagttgcagctattgttgctctgagcgtcccatc

SEQ ID NO: 295117 - DNA, 50 bp, Artificial
  Synthetic oligonucleotide
tccagggatgaacagtccgagggaacttggtgcctggctgatggtcctcg

SEQ ID NO: 295118 - DNA, 50 bp, Artificial
  Synthetic oligonucleotide
aacggacgttgctggtcctgtcatggggcaaggctccccgggaaaacgca

SEQ ID NO: 295119 - DNA, 50 bp, Artificial
  Synthetic oligonucleotide
aagtgcgtgatagcgactcgttctccattgccgagcacgccctctcccga

SEQ ID NO: 295120 - DNA, 50 bp, Artificial
  Synthetic oligonucleotide
ccacttctcgttaacggccgagttgtccgcgcccgttccatgctcggtga

SEQ ID NO: 295121 - DNA, 50 bp, Artificial
  Synthetic oligonucleotide
aagtgcgctctactcgcggatgtgcgacaccagacaggccgatgaacctg

SEQ ID NO: 295122 - DNA, 50 bp, Artificial
  Synthetic oligonucleotide
cctcggttacggtaacagaggccacggggtaggggcgagagatcgagctc

SEQ ID NO: 295123 - DNA, 50 bp, Artificial
  Synthetic oligonucleotide
aacggactgccgtccccatagggacgccctcaatgattgtgcccacgagg

SEQ ID NO: 295124 - DNA, 50 bp, Artificial
  Synthetic oligonucleotide
aagtgatgcgcaacacctctttcgctacaccgcgggcgttgacaaggcaa

SEQ ID NO: 295125 - DNA, 50 bp, Artificial
  Synthetic oligonucleotide
aagtgaccggcgcagaagccccctgtagttgcatcactccatcctccggt

SEQ ID NO: 295126 - DNA, 50 bp, Artificial
  Synthetic oligonucleotide
tcatgtagatcaagtaggaaatccacgtgagagtgagagtaaaccaagcg

SEQ ID NO: 295127 - DNA, 59 bp, Artificial
  Synthetic oligonucleotide
tcacaggtaatctgagacgagtgaagcagtgcagctgctattaccttttgtcgctgcac

SEQ ID NO: 295128 - DNA, 50 bp, Artificial
  Synthetic oligonucleotide
aacggcgcaatcattgttggctgcagcgcaagtcggaaggcttgccaaga

SEQ ID NO: 295129 - DNA, 50 bp, Artificial
  Synthetic oligonucleotide
aacggcgacggtaaccgcgagagtgttggaccaggagggagtgtggcaac

SEQ ID NO: 295130 - DNA, 50 bp, Artificial
  Synthetic oligonucleotide
aacggcctgcgctcgagcaaccgcgttccaagttcagtaatgtacggggc

SEQ ID NO: 295131 - DNA, 50 bp, Artificial
  Synthetic oligonucleotide
aacggccgtacccatttctccgatgccggccatcgctgccaaactctgaa

SEQ ID NO: 295132 - DNA, 50 bp, Artificial
  Synthetic oligonucleotide
aacggccgctggcaccccatgcacgccgaaatgctcgcctcatccaccca

SEQ ID NO: 295133 - DNA, 50 bp, Artificial
  Synthetic oligonucleotide
cacgtattggggtcagtcggcacttagaaaagcgaataacgtccggagtg

SEQ ID NO: 295134 - DNA, 50 bp, Artificial
  Synthetic oligonucleotide
aacggccacagcatcctcgagcaaaaaccgtacccagcaggttgcagcta

SEQ ID NO: 295135 - DNA, 50 bp, Artificial
  Synthetic oligonucleotide
aacggcagacagcgctcttgaacgcgacacacggtacatcgctcccctgg

SEQ ID NO: 295136 - DNA, 50 bp, Artificial
  Synthetic oligonucleotide
aacggcaagtcactccgagtctttccccttccgctgcgtggacctcgtct

SEQ ID NO: 295137 - DNA, 50 bp, Artificial
  Synthetic oligonucleotide
aacggcaaagggtcagaccgtgggagttcccctgcttctggtccacacac

SEQ ID NO: 295138 - DNA, 59 bp, Artificial
  Synthetic oligonucleotide
cgatggctgaatgagctgtcgaattagcattacttattgtatactatagaataatagga

SEQ ID NO: 295139 - DNA, 50 bp, Artificial
  Synthetic oligonucleotide
aagtctccgaggggcgttgtgaccacccagtgattcggtctgtgcacccc

SEQ ID NO: 295140 - DNA, 50 bp, Artificial
  Synthetic oligonucleotide
aacggatgatgtcggagtcaccggggtccgtgacagcgaggcaactcaca

SEQ ID NO: 295141 - DNA, 50 bp, Artificial
  Synthetic oligonucleotide
aacggagggtaaggcgggtgctcgtagtcaggtgcgccaattctcggttc

SEQ ID NO: 295142 - DNA, 50 bp, Artificial
  Synthetic oligonucleotide
aacggagcgtcaagccctaaaagcacgcaccaaatgtgcttgcggcgcat

SEQ ID NO: 295143 - DNA, 50 bp, Artificial
  Synthetic oligonucleotide
aacggagcagccctctacggagaaagttgtgccctgtgagagcctcgcgg

SEQ ID NO: 295144 - DNA, 50 bp, Artificial
  Synthetic oligonucleotide
aagtctcgtagggggtcgcaaagagagcgcagtcggtacgggcagttgca

SEQ ID NO: 295145 - DNA, 50 bp, Artificial
  Synthetic oligonucleotide
aacgtgcggttgggtcattaaatggggaggccgttgcctcgggcggaggt

SEQ ID NO: 295146 - DNA, 50 bp, Artificial
  Synthetic oligonucleotide
aacgtggtcatcgataggaccgacggggtcagcatttggcgccgaggaaa

SEQ ID NO: 295147 - DNA, 50 bp, Artificial
  Synthetic oligonucleotide
aacgtggtggcaaccgcagccccgggtgtgagactgcttctagtgacggg

SEQ ID NO: 295148 - DNA, 50 bp, Artificial
  Synthetic oligonucleotide
aaggtgtagccgtggttcggggctgcgctttttggtcccatgacaccaca

SEQ ID NO: 295149 - DNA, 59 bp, Artificial
  Synthetic oligonucleotide
gataaaccctctcattccagactctcatcacattaaacataatatcgtcaatcctatat

SEQ ID NO: 295150 - DNA, 50 bp, Artificial
  Synthetic oligonucleotide
aaggtgggtcaacgatcgcgcggatacgaacgtgtggctgccttccgaat

SEQ ID NO: 295151 - DNA, 50 bp, Artificial
  Synthetic oligonucleotide
aaggtgggccacccccgtcacttgatggacggtcgcttggtaagagacga

SEQ ID NO: 295152 - DNA, 50 bp, Artificial
  Synthetic oligonucleotide
aaggtggcgtaaaggcgacgcagaggtgacggtaggacccccaaagtgca

SEQ ID NO: 295153 - DNA, 50 bp, Artificial
  Synthetic oligonucleotide
cacgcttggcctacttgctctacccctctgtggagagacaatcgcgcccc

SEQ ID NO: 295154 - DNA, 50 bp, Artificial
  Synthetic oligonucleotide
ccagacggcagccaccactgtcgcgtatgtgagcgctgcgtgtttgacat

SEQ ID NO: 295155 - DNA, 50 bp, Artificial
  Synthetic oligonucleotide
aaggtgcgcggtaggaagcggctgacgctgagggggcagcacaagcggac

SEQ ID NO: 295156 - DNA, 50 bp, Artificial
  Synthetic oligonucleotide
aacgtgtggccacccactggacaccccgcaaatcacgcgatgcgcccatt

SEQ ID NO: 295157 - DNA, 50 bp, Artificial
  Synthetic oligonucleotide
ccgctgtgaactaccgggagagactgacgccccttggggcacgtgcgcgg

SEQ ID NO: 295158 - DNA, 50 bp, Artificial
  Synthetic oligonucleotide
tattttgtctttggtagcgtgcgtggcacattcgccgcacagtcaagtgc

SEQ ID NO: 295159 - DNA, 50 bp, Artificial
  Synthetic oligonucleotide
ctcggtcgagtgagcaagcagtgcagtgccaaaacgcagtcggaagcgct

SEQ ID NO: 295160 - DNA, 54 bp, Artificial
  Synthetic oligonucleotide
ggacctatgttagtaaagttaagacctatataagtcgaagtgtgaccttagtta

SEQ ID NO: 295161 - DNA, 50 bp, Artificial
  Synthetic oligonucleotide
aacgttcaccctggactgcgtcgcaccggcggtcattttggtcggcagca

SEQ ID NO: 295162 - DNA, 50 bp, Artificial
  Synthetic oligonucleotide
aacgttcagtgcccccaccctgtgtgaggacgtcagagggatgtaccgct

SEQ ID NO: 295163 - DNA, 50 bp, Artificial
  Synthetic oligonucleotide
cacgcggtagcttctctgcggaccccaccaagcggcaagaggtcataggc

SEQ ID NO: 295164 - DNA, 50 bp, Artificial
  Synthetic oligonucleotide
aactaaacacgtctactccgcgactcgcccgaaccgcgtgcatgcagcta

SEQ ID NO: 295165 - DNA, 50 bp, Artificial
  Synthetic oligonucleotide
aagggtggcatatacatctggcgggcctcgtgcgtcctgtgcccacgtcg

SEQ ID NO: 295166 - DNA, 50 bp, Artificial
  Synthetic oligonucleotide
aacgttctccgcaacagccgcgcactctacaacgctctcatgacgcccct

SEQ ID NO: 295167 - DNA, 50 bp, Artificial
  Synthetic oligonucleotide
aagggttcgcttgttcccgtaagggctgtctgtactcggacccgggccaa

SEQ ID NO: 295168 - DNA, 50 bp, Artificial
  Synthetic oligonucleotide
ctcgtgtgatcgaaaacatatacgaaaccctagaacgctcgatcattcaa

SEQ ID NO: 295169 - DNA, 50 bp, Artificial
  Synthetic oligonucleotide
ctcgtcgggggtagtgtcccggagcagtactatgccgtaactccggtcgg

SEQ ID NO: 295170 - DNA, 50 bp, Artificial
  Synthetic oligonucleotide
cacgctcccccaccctttcgatggcttgaagcgcgcacggcagtagtaaa

SEQ ID NO: 295171 - DNA, 58 bp, Artificial
  Synthetic oligonucleotide
gaggcattataaacgacattaagaatcttagtacctttagtgatagattgagatgccc

SEQ ID NO: 295172 - DNA, 50 bp, Artificial
  Synthetic oligonucleotide
aacgttcgcacaacggtcggcgatgacagctgtggtcactcccgctcttt

SEQ ID NO: 295173 - DNA, 50 bp, Artificial
  Synthetic oligonucleotide
aaggtaaccgccgaggtgcgtctaagtctcgcctcgccgctccgtgtggg

SEQ ID NO: 295174 - DNA, 50 bp, Artificial
  Synthetic oligonucleotide
aaggtccacgtaggcacattcccggacatcccgactgcttccggcacttg

SEQ ID NO: 295175 - DNA, 50 bp, Artificial
  Synthetic oligonucleotide
ctcggttgggtgggacgtcggacattcgtctgtggcttaaccgtcggacc

SEQ ID NO: 295176 - DNA, 50 bp, Artificial
  Synthetic oligonucleotide
aaggtccggcagctgagtcgtcgcatgcctcagggcaagtacctcacacg

SEQ ID NO: 295177 - DNA, 50 bp, Artificial
  Synthetic oligonucleotide
ctcggtggttgtaacggaatgaacgctctttgcgaccgcggtgccagctg

SEQ ID NO: 295178 - DNA, 50 bp, Artificial
  Synthetic oligonucleotide
aacgttcgcaagtctcggaggcggaacgggtacgctcttgagcaatcggc

SEQ ID NO: 295179 - DNA, 50 bp, Artificial
  Synthetic oligonucleotide
aacgttcccgactcccccaccatccgagtggccaaagtgcacgcaatgga

SEQ ID NO: 295180 - DNA, 50 bp, Artificial
  Synthetic oligonucleotide
cctcgctctacactgccagtgtgcccattgcgctcccacattcgttcgct

SEQ ID NO: 295181 - DNA, 50 bp, Artificial
  Synthetic oligonucleotide
gtgtgtcgctgcgtcgcgcaatgacggacctctgcagtaccgtgctaagc

SEQ ID NO: 295182 - DNA, 60 bp, Artificial
  Synthetic oligonucleotide
catgttcgttatgccattcatggctcgaatcggcgtaacagattcttggggcggttggag

SEQ ID NO: 295183 - DNA, 56 bp, Artificial
  Synthetic oligonucleotide
gcaaaccttatcaacctttggagacaacatttcgttttaaatgaagatatgtccga

SEQ ID NO: 295184 - DNA, 50 bp, Artificial
  Synthetic oligonucleotide
aagtcacggcgtcaagttgcagtgccagtcgttgatgggcgggccaccat

SEQ ID NO: 295185 - DNA, 50 bp, Artificial
  Synthetic oligonucleotide
cacgggggcgccgtgcatgtatgcctcctctttcgcgttaggcgggcagg

SEQ ID NO: 295186 - DNA, 50 bp, Artificial
  Synthetic oligonucleotide
aagtcacgactgtaagcctgagctgccttccgctcaccccgcacgagctc

SEQ ID NO: 295187 - DNA, 50 bp, Artificial
  Synthetic oligonucleotide
ccatcgcacaacggtggcttacggagtctagctccgacggttcttcggga

SEQ ID NO: 295188 - DNA, 50 bp, Artificial
  Synthetic oligonucleotide
aagtatcgtcacgggaaactacgcgcacatgcagaggcgcacatccgcct

SEQ ID NO: 295189 - DNA, 50 bp, Artificial
  Synthetic oligonucleotide
aacgtagagatgatgggggagggtgcgataggtaccaatgcggggcggta

SEQ ID NO: 295190 - DNA, 50 bp, Artificial
  Synthetic oligonucleotide
aagtagtggccaagccgaccctaatggtgcgttgagcccgaagggtaggg

SEQ ID NO: 295191 - DNA, 50 bp, Artificial
  Synthetic oligonucleotide
aacgtatcctcctgacaaaacgctccagtaggcgggtcgcgaggcttgcg

SEQ ID NO: 295192 - DNA, 50 bp, Artificial
  Synthetic oligonucleotide
tcacctgtttcaatgcgagtcgttgacagggcgccaccatcaggggccaa

SEQ ID NO: 295193 - DNA, 50 bp, Artificial
  Synthetic oligonucleotide
tcaccggggcctacccccttcgaacaaagtagggcatcgcgcagatcatt

SEQ ID NO: 295194 - DNA, 58 bp, Artificial
  Synthetic oligonucleotide
ctagtgcatcaatcgttggtcatagagggtgtggttcgagtacagctggtggtatatc

SEQ ID NO: 295195 - DNA, 50 bp, Artificial
  Synthetic oligonucleotide
aagtacccatccccctgatgccttctcaccgctcgtccctcggtacaggc

SEQ ID NO: 295196 - DNA, 50 bp, Artificial
  Synthetic oligonucleotide
aacgtcactaccacgcccacttgcctgcagctgactccgttttcgctggc

SEQ ID NO: 295197 - DNA, 50 bp, Artificial
  Synthetic oligonucleotide
cacggcgcgcgtagagtggcgcatgaggaggatagaggggcatatcagcg

SEQ ID NO: 295198 - DNA, 50 bp, Artificial
  Synthetic oligonucleotide
aacgtgccaccgctgggagggtcccactaaaggataaccgtgctgccacg

SEQ ID NO: 295199 - DNA, 50 bp, Artificial
  Synthetic oligonucleotide
aacgtgcaaatggcgtcgaatagacagcgcgtggcggcttatgtgtgccg

SEQ ID NO: 295200 - DNA, 50 bp, Artificial
  Synthetic oligonucleotide
ctcggagggaccaacgcccaagggaagagatctgcagcgaccctgggaca

SEQ ID NO: 295201 - DNA, 50 bp, Artificial
  Synthetic oligonucleotide
aacgtgacgctgctccctatgctccccatgcgaccagtacgccctatcct

SEQ ID NO: 295202 - DNA, 50 bp, Artificial
  Synthetic oligonucleotide
aacgtgaaggcgcaaaacttctgggaactggggttcgggacgccctaccc

SEQ ID NO: 295203 - DNA, 50 bp, Artificial
  Synthetic oligonucleotide
cacggagcgacgcacctgcgcgcaacacacactgacataaagtggcaacg

SEQ ID NO: 295204 - DNA, 50 bp, Artificial
  Synthetic oligonucleotide
aacgtctctcggatgttcgcctctgcatgcgtcgctgccccgggcctctt

SEQ ID NO: 295205 - DNA, 58 bp, Artificial
  Synthetic oligonucleotide
cagtgaatgtaagaccttagttagtcaagattagacttatgttagtagacgtatgacc

SEQ ID NO: 295206 - DNA, 50 bp, Artificial
  Synthetic oligonucleotide
aacgtctcgggactttaaccgccgcgttcccacgcccacgtcagtagacg

SEQ ID NO: 295207 - DNA, 50 bp, Artificial
  Synthetic oligonucleotide
aacgtctcctttttctcgcgacagggtggccagcgtgcatgcagcgttcg

SEQ ID NO: 295208 - DNA, 50 bp, Artificial
  Synthetic oligonucleotide
ctcgctgatacactcattcttcggaactcgccacatagagggacacggaa

SEQ ID NO: 295209 - DNA, 50 bp, Artificial
  Synthetic oligonucleotide
aacgtcgtgatggccggagacacagggggactgcctcttcgcgatacgcc

SEQ ID NO: 295210 - DNA, 50 bp, Artificial
  Synthetic oligonucleotide
aacgtcgcgtgcgggaatcttgacgacgcctcacacgctggctggttcga

SEQ ID NO: 295211 - DNA, 50 bp, Artificial
  Synthetic oligonucleotide
cctatatgaactacgtcgaggataatctatacgatcattatttcgatagg

SEQ ID NO: 295212 - DNA, 50 bp, Artificial
  Synthetic oligonucleotide
cctcgcgttgatgggttcgcggccggttgcatccttccttactgagggcc

SEQ ID NO: 295213 - DNA, 50 bp, Artificial
  Synthetic oligonucleotide
aacgtccagggaggggctactgacccttgtgaggagcacccaggggaacc

SEQ ID NO: 295214 - DNA, 50 bp, Artificial
  Synthetic oligonucleotide
aagcaacatcgcgtccgcacgtcgcgagaacggctgtgcaactctcgggt

SEQ ID NO: 295215 - DNA, 50 bp, Artificial
  Synthetic oligonucleotide
tacgacttccactcgtgccatggtgtgctacgcttgtgtgttagctaagt

SEQ ID NO: 295216 - DNA, 57 bp, Artificial
  Synthetic oligonucleotide
gaagttaagaccttagctagttatgttgagacctatattagttatgttgagacctac

SEQ ID NO: 295217 - DNA, 50 bp, Artificial
  Synthetic oligonucleotide
cctccaatggatggccctacagaggaggcgtgatctgcctgtgcagcagg

SEQ ID NO: 295218 - DNA, 50 bp, Artificial
  Synthetic oligonucleotide
ctgggacctttggccaagatgaggcacggggtagccatccgcgtaagcat

SEQ ID NO: 295219 - DNA, 50 bp, Artificial
  Synthetic oligonucleotide
tacgcgatagtgtcgtgcgggggtcacgtgggggttacgtttatgccgcg

SEQ ID NO: 295220 - DNA, 50 bp, Artificial
  Synthetic oligonucleotide
aagcggtagcatccagggtgtcgctaactgcgcaagctgcgatcctccaa

SEQ ID NO: 295221 - DNA, 50 bp, Artificial
  Synthetic oligonucleotide
aagattcacacttgctgcaggagacgggtggagagggccgcatggggctg

SEQ ID NO: 295222 - DNA, 50 bp, Artificial
  Synthetic oligonucleotide
ccaggcgcaatctccagctgagggattcggtcagacgtggttggtgggag

SEQ ID NO: 295223 - DNA, 50 bp, Artificial
  Synthetic oligonucleotide
aagcggtccctgtatcaccggcggcctctgcggagcttgtctgtgcaggc

SEQ ID NO: 295224 - DNA, 50 bp, Artificial
  Synthetic oligonucleotide
taagattttttcacagacaccaccaaaatcagggaaatattgtgaggtgc

SEQ ID NO: 295225 - DNA, 50 bp, Artificial
  Synthetic oligonucleotide
cacagttcgggccgcgtggtgttagcggctctagtcggacccccggcaac

SEQ ID NO: 295226 - DNA, 50 bp, Artificial
  Synthetic oligonucleotide
cctccctcgttgctaacaagaacggtgagtcgtctggtgccgaggtggga

SEQ ID NO: 295227 - DNA, 58 bp, Artificial
  Synthetic oligonucleotide
cgcgtcctagctcggcagtccagccgcggtattccgggtacacgttgctactctccgc

SEQ ID NO: 295228 - DNA, 50 bp, Artificial
  Synthetic oligonucleotide
tacggaaaagggctctgagcagtcgggtgtgtcactgcagcagggcacat

SEQ ID NO: 295229 - DNA, 50 bp, Artificial
  Synthetic oligonucleotide
aagcgtggatggcgactcacacacgaaggatgaaacgcacaagcgcgcac

SEQ ID NO: 295230 - DNA, 50 bp, Artificial
  Synthetic oligonucleotide
tacggactgagcgtgggcggtaacgcagggttgacctacagcttcgcggg

SEQ ID NO: 295231 - DNA, 50 bp, Artificial
  Synthetic oligonucleotide
aagatgcgacgctcttcgtcagtctgtcggcgcgaggtgtgcagatgtgg

SEQ ID NO: 295232 - DNA, 50 bp, Artificial
  Synthetic oligonucleotide
aagcgtgtgtcggtgttgagggaacgttgcgcatgatgcagcgagtgcat

SEQ ID NO: 295233 - DNA, 50 bp, Artificial
  Synthetic oligonucleotide
aagcacagcaatacaggggaggggagtagcatgagcagccggcgcgttat

SEQ ID NO: 295234 - DNA, 50 bp, Artificial
  Synthetic oligonucleotide
aagcacacgccttgcaccatcccgctcgagtgcctgaacggattgtggag

SEQ ID NO: 295235 - DNA, 50 bp, Artificial
  Synthetic oligonucleotide
ccagggtcggattcctctcctgtcgccctagatcaggacggcatttggga

SEQ ID NO: 295236 - DNA, 50 bp, Artificial
  Synthetic oligonucleotide
cctccactctcgcccgctcgcgctactgtgcggcgcaggccttgcatcac

SEQ ID NO: 295237 - DNA, 50 bp, Artificial
  Synthetic oligonucleotide
cacatggactgcgaaaggagatgccgggcagcagtgtcacagcgtgtgga

SEQ ID NO: 295238 - DNA, 58 bp, Artificial
  Synthetic oligonucleotide
gtcaattgtctatataagtgtctagaaatcgaaattgatggggtgttcaagagtttgt

SEQ ID NO: 295239 - DNA, 50 bp, Artificial
  Synthetic oligonucleotide
ctgccaagtaagtgcgtattcgccctgtgcatgcgtgccctcggggacag

SEQ ID NO: 295240 - DNA, 50 bp, Artificial
  Synthetic oligonucleotide
aagcaacgtactgctacgcgggtggggttaaagcggcgtccctattggca

SEQ ID NO: 295241 - DNA, 50 bp, Artificial
  Synthetic oligonucleotide
aagcggaagaccatcgcacctactccgccttttgggttgtgcgactcggg

SEQ ID NO: 295242 - DNA, 50 bp, Artificial
  Synthetic oligonucleotide
aagcggagaaagggtgtagcaacgatggggagcccccaaaggggagtgct

SEQ ID NO: 295243 - DNA, 50 bp, Artificial
  Synthetic oligonucleotide
cacatgacacgaaacgtgacgtgtggagcagccgcattactcctacctct

SEQ ID NO: 295244 - DNA, 50 bp, Artificial
  Synthetic oligonucleotide
aagcaacgcggtacataccagctgtagcccgctctcatacggcggccttc

SEQ ID NO: 295245 - DNA, 50 bp, Artificial
  Synthetic oligonucleotide
aagcggagacgcaacgcaggtcgtggctgaaactgccgacagctctaggg

SEQ ID NO: 295246 - DNA, 50 bp, Artificial
  Synthetic oligonucleotide
aagcggagccgaggttgcggtatgtagtgagtactccctgttgcggcgta

SEQ ID NO: 295247 - DNA, 50 bp, Artificial
  Synthetic oligonucleotide
taaggagagggtatagcgcatgcctatcaattgtactggatagatataag

SEQ ID NO: 295248 - DNA, 50 bp, Artificial
  Synthetic oligonucleotide
ctggcggtttgccacacttggcggagtgttggtcacatgcgctgcacttg

SEQ ID NO: 295249 - DNA, 58 bp, Artificial
  Synthetic oligonucleotide
agtcgaccgtgcagatactcgcccccacctgattagtgcgaggaatgcccatgtactc

SEQ ID NO: 295250 - DNA, 50 bp, Artificial
  Synthetic oligonucleotide
aagcggagcgcggcgtcacgttttcaccttaactcagcaagtgcaggccc

SEQ ID NO: 295251 - DNA, 50 bp, Artificial
  Synthetic oligonucleotide
ctgcagtgacgcgggcgttcgtgaaacacgcagaggagccctactatcga

SEQ ID NO: 295252 - DNA, 50 bp, Artificial
  Synthetic oligonucleotide
aagcggagtcgtgacaggacgcttcgtggagcaaatggcataccgcgctg

SEQ ID NO: 295253 - DNA, 50 bp, Artificial
  Synthetic oligonucleotide
caccgagctcgtgacagttgcagacgtaatgtgcgcagtgcacggcttgg

SEQ ID NO: 295254 - DNA, 50 bp, Artificial
  Synthetic oligonucleotide
tacgtgtcccaggcctgccaatggacagtaacaagttgcctaggaagacc

SEQ ID NO: 295255 - DNA, 50 bp, Artificial
  Synthetic oligonucleotide
aagctggtgatatcaacacgctggcgttcgcaactgtgccactcccacgc

SEQ ID NO: 295256 - DNA, 50 bp, Artificial
  Synthetic oligonucleotide
aagctgtacaacactagatgtcatgccaacccacagattggcaggacgag

SEQ ID NO: 295257 - DNA, 50 bp, Artificial
  Synthetic oligonucleotide
aagagtacagccgcgatggagcacactagatccgccttattgccccgcgg

SEQ ID NO: 295258 - DNA, 50 bp, Artificial
  Synthetic oligonucleotide
cacagcacgtgccagggcgcacttcgtcggtcggaggagaagatgtgtgc

SEQ ID NO: 295259 - DNA, 50 bp, Artificial
  Synthetic oligonucleotide
cgcttacaccgagaggggcacaccggtcggaacaaagtgcgtccaccata

SEQ ID NO: 295260 - DNA, 58 bp, Artificial
  Synthetic oligonucleotide
ccaccgacttctcgcacacacatgtagggatagcgtcactatctagatctgtttgtag

SEQ ID NO: 295261 - DNA, 50 bp, Artificial
  Synthetic oligonucleotide
tactaaggccttactgctagcacgaacaacctttcacactagaaagtcaa

SEQ ID NO: 295262 - DNA, 50 bp, Artificial
  Synthetic oligonucleotide
cacagactggtgttatcagctctgctgtcgttcgagataatcgatggaaa

SEQ ID NO: 295263 - DNA, 50 bp, Artificial
  Synthetic oligonucleotide
ctgagatcgctcacttgtataagactgacaggtcgaagtatgagcaaacc

SEQ ID NO: 295264 - DNA, 50 bp, Artificial
  Synthetic oligonucleotide
aagagggacagcggccacgtttctcgtcgtttgcgagaggcgccttcgtg

SEQ ID NO: 295265 - DNA, 50 bp, Artificial
  Synthetic oligonucleotide
aaggaactcccccgtttgtctcacccgcgtatcagctccaccgcggatgc

SEQ ID NO: 295266 - DNA, 50 bp, Artificial
  Synthetic oligonucleotide
aagaggcggagtaggacgaccgtcgaattggcgcgtatagcggtgctgcg

SEQ ID NO: 295267 - DNA, 50 bp, Artificial
  Synthetic oligonucleotide
ccatcactcccgttgcgtactccagtgaggtccgtggttggaaccctcac

SEQ ID NO: 295268 - DNA, 50 bp, Artificial
  Synthetic oligonucleotide
aagaggccgagtcagcagtgcatgcgcctccaaaggcttcgagtctccga

SEQ ID NO: 295269 - DNA, 50 bp, Artificial
  Synthetic oligonucleotide
ccatccaatgaccactaaacgcgggtgtgtgctcccaaacaccccgccat

SEQ ID NO: 295270 - DNA, 50 bp, Artificial
  Synthetic oligonucleotide
aagctacgggcgtttgtccaacccgtctcacggctcctcggtcgctgatg

SEQ ID NO: 295271 - DNA, 58 bp, Artificial
  Synthetic oligonucleotide
tttgattattacttcgtccttcgaatcatcataatcctgcatccaataaaacgaaatt

SEQ ID NO: 295272 - DNA, 50 bp, Artificial
  Synthetic oligonucleotide
cacccttctgtacagctgcggcgtggctcacaactgcgttgaatgaggcc

SEQ ID NO: 295273 - DNA, 50 bp, Artificial
  Synthetic oligonucleotide
aagagtggagctcgcactcaaggtaggctggggcaggcgacgagtcgggg

SEQ ID NO: 295274 - DNA, 50 bp, Artificial
  Synthetic oligonucleotide
cacagctgatgcggtgtgccaacaacgggaagggctctccccacggagga

SEQ ID NO: 295275 - DNA, 50 bp, Artificial
  Synthetic oligonucleotide
aagctcggatggtacgctgaggccactctcacaggggctactctgcggta

SEQ ID NO: 295276 - DNA, 50 bp, Artificial
  Synthetic oligonucleotide
tacggtgcagagtgggtccaggcttacactccacatcaccgcaacgcagt

SEQ ID NO: 295277 - DNA, 50 bp, Artificial
  Synthetic oligonucleotide
aagctctgcgtgcatgcgttctcgcgcaaggaggctaatgaggtcccggt

SEQ ID NO: 295278 - DNA, 50 bp, Artificial
  Synthetic oligonucleotide
aagctgacgtgcggcgagagacacggaaaacacccggggttcgatggtcc

SEQ ID NO: 295279 - DNA, 50 bp, Artificial
  Synthetic oligonucleotide
aagagtgctttgctccgctatgtcccacgccgtaggccgtttgcttgggt

SEQ ID NO: 295280 - DNA, 50 bp, Artificial
  Synthetic oligonucleotide
ctgcaaagcagctgtagacacacgcgttgcagtaagacaccaaggcagtc

SEQ ID NO: 295281 - DNA, 50 bp, Artificial
  Synthetic oligonucleotide
cacccttttgcgcgtaggcgacccgtggctgtacatgcggatcgagaggg

SEQ ID NO: 295282 - DNA, 54 bp, Artificial
  Synthetic oligonucleotide
gtcgatactttcctaacagctaaggaattaattagagaaacaaactacgactta

SEQ ID NO: 295283 - DNA, 50 bp, Artificial
  Synthetic oligonucleotide
taactgtcaacatgtacgacacacgtccacaaacttatacaagcgctcgc

SEQ ID NO: 295284 - DNA, 50 bp, Artificial
  Synthetic oligonucleotide
tacgtgaaaactccactgtgcaagaggcgctaccgctaaagggcgccgag

SEQ ID NO: 295285 - DNA, 50 bp, Artificial
  Synthetic oligonucleotide
aagctgcaggggaaaaacgcacacgcagtccccaacggggcgcgtcagta

SEQ ID NO: 295286 - DNA, 50 bp, Artificial
  Synthetic oligonucleotide
ctgggtactacttagactactagtactttggacactagtactgtggatac

SEQ ID NO: 295287 - DNA, 50 bp, Artificial
  Synthetic oligonucleotide
aagctggacctactgcccccttggagggtcccagaaaggtcgtcctgtgc

SEQ ID NO: 295288 - DNA, 50 bp, Artificial
  Synthetic oligonucleotide
aagctggccgctcgagactcatcgtggaccctgctcatgcgggctgcaga

SEQ ID NO: 295289 - DNA, 50 bp, Artificial
  Synthetic oligonucleotide
aagcgaaacaggtgcgcaggagacgcactggcgaccgcgatggcactgtt

SEQ ID NO: 295290 - DNA, 50 bp, Artificial
  Synthetic oligonucleotide
aagcccgcggcgtaaatgccctcctgctctccatccgttttgccgctaga

SEQ ID NO: 295291 - DNA, 50 bp, Artificial
  Synthetic oligonucleotide
aagcgaacagtcccacgcacttagtgtagtggcagcgctagggcgtacgc

SEQ ID NO: 295292 - DNA, 50 bp, Artificial
  Synthetic oligonucleotide
aagccatgtcgaggtgtcatgcgcgcagagaattgcatctttccgccccg

SEQ ID NO: 295293 - DNA, 55 bp, Artificial
  Synthetic oligonucleotide
cgtaaccatgcgaacacataagaactttatagggaagtaaaggtgctcagggtct

SEQ ID NO: 295294 - DNA, 58 bp, Artificial
  Synthetic oligonucleotide
ggctgcaagtcaaagcgcagcttcgtcggcagtttccgtgctaagatccgttggtgga

SEQ ID NO: 295295 - DNA, 50 bp, Artificial
  Synthetic oligonucleotide
ctgcgtgggttggtcctgggctacctcagtagacgaggcagtggcagaca

SEQ ID NO: 295296 - DNA, 50 bp, Artificial
  Synthetic oligonucleotide
aagccagaggggcacgagcgatgggcggaaaaggtgcgcagcgatgcata

SEQ ID NO: 295297 - DNA, 50 bp, Artificial
  Synthetic oligonucleotide
caccagaggaagcgcgaagacgtcaatcccccgtggcgatgggccccctc

SEQ ID NO: 295298 - DNA, 50 bp, Artificial
  Synthetic oligonucleotide
tacacgtcgcactcgcataacaatcgtgacttagtagttggtgtatggtt

SEQ ID NO: 295299 - DNA, 50 bp, Artificial
  Synthetic oligonucleotide
aagccacgaacggcgggactctgtccacaacaacagcaccaaactcgcta

SEQ ID NO: 295300 - DNA, 50 bp, Artificial
  Synthetic oligonucleotide
aagccaccccaatggacgtaccgacagcgctccacatgctgaacccgtgg

SEQ ID NO: 295301 - DNA, 50 bp, Artificial
  Synthetic oligonucleotide
aagccaagggcacatggttttgttgcggtgccgtcggaacacgctacccc

SEQ ID NO: 295302 - DNA, 50 bp, Artificial
  Synthetic oligonucleotide
aagccaaggcgtcattccgcgagtcgcccagcagaggcgcgaccagagga

SEQ ID NO: 295303 - DNA, 50 bp, Artificial
  Synthetic oligonucleotide
aagcatgggggtacgcctcgaaaggcatgggggtacacctcgagacgcat

SEQ ID NO: 295304 - DNA, 50 bp, Artificial
  Synthetic oligonucleotide
aagcatgccccctggagccaggaagtacctggactcgtggcaagagaagg

SEQ ID NO: 295305 - DNA, 58 bp, Artificial
  Synthetic oligonucleotide
ggtcggaagttgtactccgttctccgcacttcccagtcaagacatgagaccagcccta

SEQ ID NO: 295306 - DNA, 50 bp, Artificial
  Synthetic oligonucleotide
caccaaagagggggattccaacgcgggcacaaactccggggagaactcca

SEQ ID NO: 295307 - DNA, 50 bp, Artificial
  Synthetic oligonucleotide
tacagtggccaccagctggcgactatgctcctggagaacgccgatcacag

SEQ ID NO: 295308 - DNA, 50 bp, Artificial
  Synthetic oligonucleotide
aagcatgcagcctagcccaaaaccctgctatgcgccgaaagccgacactc

SEQ ID NO: 295309 - DNA, 50 bp, Artificial
  Synthetic oligonucleotide
aagccgtcgcgttccctccctcggcttcacctgcctctccgagttctctt

SEQ ID NO: 295310 - DNA, 50 bp, Artificial
  Synthetic oligonucleotide
aagccgtcaggagccgcaggggttggtggagccgttttcggagtatgcac

SEQ ID NO: 295311 - DNA, 50 bp, Artificial
  Synthetic oligonucleotide
aagccgctgcactcgctcaacgcagcgcaatatcacgcgaaaggcaacaa

SEQ ID NO: 295312 - DNA, 50 bp, Artificial
  Synthetic oligonucleotide
aagcctacgacggcgaagcgtgagttgggcccccgcgaaagtacccagtg

SEQ ID NO: 295313 - DNA, 50 bp, Artificial
  Synthetic oligonucleotide
aagcctcagcgcctgctgtagagatttgctcggaaaggtctgtgcccggg

SEQ ID NO: 295314 - DNA, 50 bp, Artificial
  Synthetic oligonucleotide
aagccgcgacgatacggggtctgaagtacctgatacgctgccagccacga

SEQ ID NO: 295315 - DNA, 50 bp, Artificial
  Synthetic oligonucleotide
aagcctcatggcgcagaacgttgcaccgaacgcactggaacagcgagcca

SEQ ID NO: 295316 - DNA, 58 bp, Artificial
  Synthetic oligonucleotide
ctgaattacgagtagccattaggattgacctatggagctttgtcataccagcgggtgc

SEQ ID NO: 295317 - DNA, 50 bp, Artificial
  Synthetic oligonucleotide
aagccgcagaacgcagcacgcgcatacccgctgtctccgtcatgtctgcc

SEQ ID NO: 295318 - DNA, 50 bp, Artificial
  Synthetic oligonucleotide
aagcctccagcccgctgaattcgctctctctcgatttccgccgtcggttt

SEQ ID NO: 295319 - DNA, 50 bp, Artificial
  Synthetic oligonucleotide
caccacgcgatggggtgcctgtgacagacccggtagagtggagcctagcg

SEQ ID NO: 295320 - DNA, 50 bp, Artificial
  Synthetic oligonucleotide
cgctgcatcccatagcatggtgcaagggctcttcacattggggtccggtg

SEQ ID NO: 295321 - DNA, 50 bp, Artificial
  Synthetic oligonucleotide
aagccgacgtgctgccacaagatgcgtcgggggcgttacctatcgcagaa

SEQ ID NO: 295322 - DNA, 50 bp, Artificial
  Synthetic oligonucleotide
aagcctcgggtgtgggggcagccgtacaggagggtctcggggactgttgg

SEQ ID NO: 295323 - DNA, 50 bp, Artificial
  Synthetic oligonucleotide
aagcctgcgctcagtacacggtcacatgtgagagtaaactcccggggccc

SEQ ID NO: 295324 - DNA, 50 bp, Artificial
  Synthetic oligonucleotide
cgctgccgctggcacgtacagcatacacgtacctagccaaacggaggccg

SEQ ID NO: 295325 - DNA, 50 bp, Artificial
  Synthetic oligonucleotide
aagcctggagtcggagttttccttcccccagactgtcagccgaggcagct

SEQ ID NO: 295326 - DNA, 50 bp, Artificial
  Synthetic oligonucleotide
aagcctgggggacagcccgtacagcgattgtggcatagagagtcgcggta

SEQ ID NO: 295327 - DNA, 58 bp, Artificial
  Synthetic oligonucleotide
caccgtgtattctactgctgcaggatatatacatcaagaggcacgtacacgtgaatgc

SEQ ID NO: 295328 - DNA, 50 bp, Artificial
  Synthetic oligonucleotide
aagcccgtcctttgctacgatgacgaatgtggggcgatgggggcgtgtcg

SEQ ID NO: 295329 - DNA, 50 bp, Artificial
  Synthetic oligonucleotide
cgctgcgctcggaaacggggctccaacaaagcgagttctgcggtgcctca

SEQ ID NO: 295330 - DNA, 50 bp, Artificial
  Synthetic oligonucleotide
aagcagagtgcgagggatcgtctgcccgcggagtcatctcaggcgtcaaa

SEQ ID NO: 295331 - DNA, 50 bp, Artificial
  Synthetic oligonucleotide
ctggacgtggcttctttggagcacgtggcttgcgctcgtgattggccgtg

SEQ ID NO: 295332 - DNA, 50 bp, Artificial
  Synthetic oligonucleotide
taccccatacatggccacatgaaagcgtcgctgcacgagtgcttgcttgt

SEQ ID NO: 295333 - DNA, 50 bp, Artificial
  Synthetic oligonucleotide
aagcgccgcgagagaaacaagtgcgtgtctctcacattcccgagctccgc

SEQ ID NO: 295334 - DNA, 50 bp, Artificial
  Synthetic oligonucleotide
aagcacgcgccaacgggctcccgcgaaaccagaggtcccccagcgactct

SEQ ID NO: 295335 - DNA, 50 bp, Artificial
  Synthetic oligonucleotide
aagcgcctctgcttgcgaggggtctttatcagtgtacgggtgctcgacgc

SEQ ID NO: 295336 - DNA, 50 bp, Artificial
  Synthetic oligonucleotide
aagcgcgacttttccgcagcagcccagctatgtgcacgggctcaaaatcg

SEQ ID NO: 295337 - DNA, 50 bp, Artificial
  Synthetic oligonucleotide
cacatgtgggcgcacaatagggtatccactgctggggcttcaccgcgctt

SEQ ID NO: 295338 - DNA, 58 bp, Artificial
  Synthetic oligonucleotide
gcgttctccatgctgattgtattacttggattgagaactctctaaattcattataacg

SEQ ID NO: 295339 - DNA, 50 bp, Artificial
  Synthetic oligonucleotide
cacccccgtgggatatccctttctgcgatagcggcacctagcagacgtgg

SEQ ID NO: 295340 - DNA, 50 bp, Artificial
  Synthetic oligonucleotide
cacccctcggttggcagcgtcacccctccgttggaatcgccacaattggt

SEQ ID NO: 295341 - DNA, 50 bp, Artificial
  Synthetic oligonucleotide
aagcgcgcggcatatccagaggccttctcgtctctctccacgcgtcaggt

SEQ ID NO: 295342 - DNA, 50 bp, Artificial
  Synthetic oligonucleotide
ctgccgacacgctcagtctgtcgcgtacaccagacgcttgcacctgtggg

SEQ ID NO: 295343 - DNA, 50 bp, Artificial
  Synthetic oligonucleotide
taagggcttacagtgtatgggttaggatggcttacccagagtgggcttgt

SEQ ID NO: 295344 - DNA, 50 bp, Artificial
  Synthetic oligonucleotide
aagcaccgaggcggttaactggtagcgcatccacaacggagggtgtaggg

SEQ ID NO: 295345 - DNA, 50 bp, Artificial
  Synthetic oligonucleotide
ctgccctgtagggatagtgtggctcaggggtgtgccgctcgccaaaacgg

SEQ ID NO: 295346 - DNA, 50 bp, Artificial
  Synthetic oligonucleotide
aagcacccgcgttgccatagctgcacactgctccgtctcgcccatcttaa

SEQ ID NO: 295347 - DNA, 50 bp, Artificial
  Synthetic oligonucleotide
caccaggcatcgctctgcaggtgggaccctccctcggcgaccccgctacg

SEQ ID NO: 295348 - DNA, 50 bp, Artificial
  Synthetic oligonucleotide
aagcatcagtggccgtgcggaacgtgcaccttcttgaacccaatcggtcg

SEQ ID NO: 295349 - DNA, 58 bp, Artificial
  Synthetic oligonucleotide
taagcacttgtggtccaatggtatgacgtatccctgccacggatgagaccccgggttc

SEQ ID NO: 295350 - DNA, 50 bp, Artificial
  Synthetic oligonucleotide
ccggaggttagaccgccaatatggttcgcgcagatcggaaccgcccgtta

SEQ ID NO: 295351 - DNA, 50 bp, Artificial
  Synthetic oligonucleotide
cctccagtgggtgctacgccaccctctcgtcgcatgtacaacggcagaga

SEQ ID NO: 295352 - DNA, 50 bp, Artificial
  Synthetic oligonucleotide
aagcaggggccgtcttggcattatcctctgactgccagtggagctgcgaa

SEQ ID NO: 295353 - DNA, 50 bp, Artificial
  Synthetic oligonucleotide
caccaggcgtggcaccaagggagccgagttcaagtcacgcaccacgctta

SEQ ID NO: 295354 - DNA, 50 bp, Artificial
  Synthetic oligonucleotide
ctgcgcggctccagttaaactgggttaacctcttgcgggtacgccacggg

SEQ ID NO: 295355 - DNA, 50 bp, Artificial
  Synthetic oligonucleotide
aagcgactcgccaggtggtatgtcacgggcgttctgccaagaccgccagc

SEQ ID NO: 295356 - DNA, 50 bp, Artificial
  Synthetic oligonucleotide
aagcgagcatcacctggctccttgtcagcaggtgggagatcccgccaccc

SEQ ID NO: 295357 - DNA, 50 bp, Artificial
  Synthetic oligonucleotide
caccaggtggtaaacaaagctgaggccgtcgttccggccacacccaatga

SEQ ID NO: 295358 - DNA, 50 bp, Artificial
  Synthetic oligonucleotide
aagcgcagccccatcgctattccgaagcccaaaggagacagcgttgtgga

SEQ ID NO: 295359 - DNA, 50 bp, Artificial
  Synthetic oligonucleotide
aagcgccacgtcataatgccacgcggcctcgtcacaatcccgctcacttt

SEQ ID NO: 295360 - DNA, 58 bp, Artificial
  Synthetic oligonucleotide
tggcgcgccgtacgtagcgaaagggtacgcatcactagacccgagatgtagtctggat

SEQ ID NO: 295361 - DNA, 50 bp, Artificial
  Synthetic oligonucleotide
aagcgccaggtccaaaggcttgtctccggaacccactcgccgcctcggag

SEQ ID NO: 295362 - DNA, 50 bp, Artificial
  Synthetic oligonucleotide
aagcagcggagcatcgaccaggagcagtcccaaaagggtatggcagcgga

SEQ ID NO: 295363 - DNA, 50 bp, Artificial
  Synthetic oligonucleotide
aagcgcccagaggttccagtaactcgcccgatccccggtgttgtttctcc

SEQ ID NO: 295364 - DNA, 50 bp, Artificial
  Synthetic oligonucleotide
taagttcgtaccgaggtggaaagttacaaatgcgaggagttacacgcgca

SEQ ID NO: 295365 - DNA, 50 bp, Artificial
  Synthetic oligonucleotide
aagcgccgcattacaagctacgaccccagtacgcagctctcccctgagcg

SEQ ID NO: 295366 - DNA, 50 bp, Artificial
  Synthetic oligonucleotide
aagcagatcgcgaacccccgcctccgcgttttccgcacaggtcacggaac

SEQ ID NO: 295367 - DNA, 50 bp, Artificial
  Synthetic oligonucleotide
aagaaaagccgagaacgcgtgaactcctctgcgctccgtccccgcatcag

SEQ ID NO: 295368 - DNA, 50 bp, Artificial
  Synthetic oligonucleotide
aaggcggagtccagactttgcgttgtcgctcggtagggtgcgggaggctt

SEQ ID NO: 295369 - DNA, 50 bp, Artificial
  Synthetic oligonucleotide
aaggcgggtccaaaccaagacggccaggagagcgaggctatccttcgagc

SEQ ID NO: 295370 - DNA, 50 bp, Artificial
  Synthetic oligonucleotide
aaggcggtccgatcccctaggctttgaatacgccgcagcagtcccccttt

SEQ ID NO: 295371 - DNA, 58 bp, Artificial
  Synthetic oligonucleotide
gatttaagcgcccaggaatagcatcacattttacacctaatgatggtattgcccaact

SEQ ID NO: 295372 - DNA, 50 bp, Artificial
  Synthetic oligonucleotide
aactttcgccccattggaagaaggcggccgtcccgtaaaagagccaggta

SEQ ID NO: 295373 - DNA, 50 bp, Artificial
  Synthetic oligonucleotide
cacgaccgcaacagtctgcgcccgacatatccgcctcaaggtcgtctaga

SEQ ID NO: 295374 - DNA, 50 bp, Artificial
  Synthetic oligonucleotide
aaggcggtcgcttttccactaggtgcctcggcactcggagactcacttga

SEQ ID NO: 295375 - DNA, 50 bp, Artificial
  Synthetic oligonucleotide
aaggcggttttgcgaggagccagcgacgggaacgtttaggctgcgaattc

SEQ ID NO: 295376 - DNA, 50 bp, Artificial
  Synthetic oligonucleotide
aaggcgtcggcacctctgcgtgaaattatcaccctcccggatccggtagc

SEQ ID NO: 295377 - DNA, 50 bp, Artificial
  Synthetic oligonucleotide
aaggcgtcgtcagagctcttccctgtgtgaaggcgtccccgcaattgcga

SEQ ID NO: 295378 - DNA, 50 bp, Artificial
  Synthetic oligonucleotide
aacttgggtgctctcttcaccgtacagcgggtagtagggaggcggctcgg

SEQ ID NO: 295379 - DNA, 50 bp, Artificial
  Synthetic oligonucleotide
aacttgcgacgggggaggcaaagtaggtgggggatacttggcactgcacg

SEQ ID NO: 295380 - DNA, 50 bp, Artificial
  Synthetic oligonucleotide
cacgagcttcgagcgaggtgggcggactcagtgatgcggaggaaacgtca

SEQ ID NO: 295381 - DNA, 50 bp, Artificial
  Synthetic oligonucleotide
aaggctcatcggagcagtcggtccaagaacaccagcggacgcgccctcgc

SEQ ID NO: 295382 - DNA, 58 bp, Artificial
  Synthetic oligonucleotide
tggcgacttttcgatatcagtcaactttgctttaactacatctgtttaagttgcaacc

SEQ ID NO: 295383 - DNA, 50 bp, Artificial
  Synthetic oligonucleotide
aaggctcttcccccgggaaacgcgtctctctcgagtgccgtgttctccca

SEQ ID NO: 295384 - DNA, 50 bp, Artificial
  Synthetic oligonucleotide
aacttcgactccagggtgaacatgtgggggtccctgctgacgtccgggaa

SEQ ID NO: 295385 - DNA, 50 bp, Artificial
  Synthetic oligonucleotide
aaggctgacctggagctgtaaccgctcaccaggacccaagcggccccgcg

SEQ ID NO: 295386 - DNA, 50 bp, Artificial
  Synthetic oligonucleotide
aacttcacaaggctccagcaagacggtgcatgagtcggggaggcctggaa

SEQ ID NO: 295387 - DNA, 50 bp, Artificial
  Synthetic oligonucleotide
cacgaataggatcggcgaaagacgtgccacccgaaacaaggacgcggcct

SEQ ID NO: 295388 - DNA, 50 bp, Artificial
  Synthetic oligonucleotide
aagaacgtgtgtggggccgcagcgaagatgtaccggaggctctcgccggc

SEQ ID NO: 295389 - DNA, 50 bp, Artificial
  Synthetic oligonucleotide
aagaacgcagggacgaacctgcaggagagagtggcgcatctgtggagcac

SEQ ID NO: 295390 - DNA, 50 bp, Artificial
  Synthetic oligonucleotide
aaggccccaccgcgagggaccttaccaactcgtgaggtctcgcacagctc

SEQ ID NO: 295391 - DNA, 50 bp, Artificial
  Synthetic oligonucleotide
cacacctctccaagggcgtgtgcctgcctcgttgctgctacctagtctgg

SEQ ID NO: 295392 - DNA, 50 bp, Artificial
  Synthetic oligonucleotide
aaggccgtgacacaaggtggcaggcgatccctgagaagagcgcacgccca

SEQ ID NO: 295393 - DNA, 58 bp, Artificial
  Synthetic oligonucleotide
tgtgtcgctgagcgctgaaaacatctggtgtaccgtttggcgtaatgcgaaacgacca

SEQ ID NO: 295394 - DNA, 50 bp, Artificial
  Synthetic oligonucleotide
taggaaagccgttcgcttgatgagcggtgcacactctacaagtacgcgca

SEQ ID NO: 295395 - DNA, 50 bp, Artificial
  Synthetic oligonucleotide
aaggcctcttcgacacagcctgtacgcttccccgaccttgggttcccgct

SEQ ID NO: 295396 - DNA, 50 bp, Artificial
  Synthetic oligonucleotide
aagaacctcgaggaaacactggcacgattgccttgcacgcgcggcaaact

SEQ ID NO: 295397 - DNA, 50 bp, Artificial
  Synthetic oligonucleotide
cacgacaacaccactttcgtcatgagtccccgggaggtcggctcgttcga

SEQ ID NO: 295398 - DNA, 50 bp, Artificial
  Synthetic oligonucleotide
taggatttgcgagcatatcataaggtggcaatacatcgcgccagcactat

SEQ ID NO: 295399 - DNA, 50 bp, Artificial
  Synthetic oligonucleotide
cacaccgcaccaggagggtttgcgcgggagctcattttaccgagcccagt

SEQ ID NO: 295400 - DNA, 50 bp, Artificial
  Synthetic oligonucleotide
aaggcgaactctcggggaatcgggacggtgcctggtccgacgctccagaa

SEQ ID NO: 295401 - DNA, 50 bp, Artificial
  Synthetic oligonucleotide
aaggcgaccccgggccatctgacttttaggggcaacgactgacatggcga

SEQ ID NO: 295402 - DNA, 50 bp, Artificial
  Synthetic oligonucleotide
aaggcgagcgaggtctagctttgtcgttaagctgtgggcgctgagagccg

SEQ ID NO: 295403 - DNA, 50 bp, Artificial
  Synthetic oligonucleotide
aagaaagcagtcgacaaagctcgccggggtttgcgggagtgagtggccga

SEQ ID NO: 295404 - DNA, 60 bp, Artificial
  Synthetic oligonucleotide
aagtcgaaccactctcacgatcctcccagctctcgttcccactcttgaggctctccctgc

SEQ ID NO: 295405 - DNA, 57 bp, Artificial
  Synthetic oligonucleotide
gtggatatggtaattatttcttaccaatttatctaggagcttctgaggtagcttttc

SEQ ID NO: 295406 - DNA, 50 bp, Artificial
  Synthetic oligonucleotide
taggctctcctcggggttcctgcgaggtggacaccgtgattaggccatta

SEQ ID NO: 295407 - DNA, 50 bp, Artificial
  Synthetic oligonucleotide
aaggcgcactaggaacgggacccaagttggcctgatggtagctgcgtacc

SEQ ID NO: 295408 - DNA, 50 bp, Artificial
  Synthetic oligonucleotide
cacaccccgctttcgcgaccgtactctcaaactgcggtacctcgtggctc

SEQ ID NO: 295409 - DNA, 50 bp, Artificial
  Synthetic oligonucleotide
aactggacgcacaccttgcggagacccgctgttccacccacttggctcca

SEQ ID NO: 295410 - DNA, 50 bp, Artificial
  Synthetic oligonucleotide
aactgcttgctctcagtgcctgagctgagacaagggggtggacagaggcg

SEQ ID NO: 295411 - DNA, 50 bp, Artificial
  Synthetic oligonucleotide
tagtgcagtttccaaccacctgctctgcatttgcttcccccgaggcctga

SEQ ID NO: 295412 - DNA, 50 bp, Artificial
  Synthetic oligonucleotide
aagggagcgccagttcctaacgtaaagccagtgacgcccgcatcccggtt

SEQ ID NO: 295413 - DNA, 50 bp, Artificial
  Synthetic oligonucleotide
aactgcttcggtgcccgtttctgcaacggtttcagcgggagtgagcgcta

SEQ ID NO: 295414 - DNA, 50 bp, Artificial
  Synthetic oligonucleotide
gttccacttcctcatgtgtgtgtcccctctggcaatacttaccaggttgc

SEQ ID NO: 295415 - DNA, 50 bp, Artificial
  Synthetic oligonucleotide
aactgcttagcggcggagagatgaacgaggagccgcctgggtagggtccc

SEQ ID NO: 295416 - DNA, 56 bp, Artificial
  Synthetic oligonucleotide
cgttcagaagactttcgagtacaacttaacccacatattacttcttaccatatgta

SEQ ID NO: 295417 - DNA, 50 bp, Artificial
  Synthetic oligonucleotide
aactgctctacctctcacggcgttcccgtgtggccaacttccgccacgcg

SEQ ID NO: 295418 - DNA, 50 bp, Artificial
  Synthetic oligonucleotide
aagggaggaggtccggagcgacccttgggcatctccctgacaggaggaag

SEQ ID NO: 295419 - DNA, 50 bp, Artificial
  Synthetic oligonucleotide
cacgagtggtactggtagggcagacgttacgcgggtgcaacgtccgttga

SEQ ID NO: 295420 - DNA, 50 bp, Artificial
  Synthetic oligonucleotide
aactgctcgcttcccgccgagtgggttcctgttggtaacaacacccgcct

SEQ ID NO: 295421 - DNA, 50 bp, Artificial
  Synthetic oligonucleotide
aactgcgtcggcagttatgtgggcgcgtgtgatgagtgctcttgggcgta

SEQ ID NO: 295422 - DNA, 50 bp, Artificial
  Synthetic oligonucleotide
cacgatgggtgcgttggtaacccccacagtgcaggtcgggatgccatctc

SEQ ID NO: 295423 - DNA, 50 bp, Artificial
  Synthetic oligonucleotide
cacgcacaaggaggggcgcaagtgacgagaaaacgagcagcgacgttgtg

SEQ ID NO: 295424 - DNA, 50 bp, Artificial
  Synthetic oligonucleotide
aagggatggcagacccgctgacggaatgggagagaccaacgacgcacgtt

SEQ ID NO: 295425 - DNA, 50 bp, Artificial
  Synthetic oligonucleotide
cacacccatttgtgcgtggcgataggggcaacggacggcacacaacgcat

SEQ ID NO: 295426 - DNA, 50 bp, Artificial
  Synthetic oligonucleotide
aactgccgcaactcacgccgaaaaacgagcatcctgtggcgggcatcccg

SEQ ID NO: 295427 - DNA, 53 bp, Artificial
  Synthetic oligonucleotide
gagaacccgctcaggggtttctatcggtgtccgtttaggggtggttctactgc

SEQ ID NO: 295428 - DNA, 50 bp, Artificial
  Synthetic oligonucleotide
taggtggaagcatttgcgtgtcgccggtggactcctctaccctaccacgc

SEQ ID NO: 295429 - DNA, 50 bp, Artificial
  Synthetic oligonucleotide
aacttatttctgccgagggggagcggcgagcggagtgtcacgtgtgcgcg

SEQ ID NO: 295430 - DNA, 50 bp, Artificial
  Synthetic oligonucleotide
ctgtgtggggcctcgactggagaggaataaggggcatcgggtcggagcag

SEQ ID NO: 295431 - DNA, 50 bp, Artificial
  Synthetic oligonucleotide
aactgttgagcgcacattttgttctgacgggggagcaggggtcgccttgg

SEQ ID NO: 295432 - DNA, 50 bp, Artificial
  Synthetic oligonucleotide
aactgttcgtgggctgaaagcatgtacccggggcccctctgatgggagtg

SEQ ID NO: 295433 - DNA, 50 bp, Artificial
  Synthetic oligonucleotide
aactgtggtagaggctgcccaaactgcacacacgaagagggttattcccc

SEQ ID NO: 295434 - DNA, 50 bp, Artificial
  Synthetic oligonucleotide
aactgtggccactcgggctctctgtcatggagctccaatcggctccaggg

SEQ ID NO: 295435 - DNA, 50 bp, Artificial
  Synthetic oligonucleotide
aactgtctggagcctgacgtgactccccagccgcgtgtagctgcttgtgg

SEQ ID NO: 295436 - DNA, 50 bp, Artificial
  Synthetic oligonucleotide
aaggctttcgtctggtcgtgccgttatcggtctgagggcgtcctgtgcaa

SEQ ID NO: 295437 - DNA, 50 bp, Artificial
  Synthetic oligonucleotide
aactgtaagcgtgcggacgcgcctatgttgccagcacacgcaaactcgtg

SEQ ID NO: 295438 - DNA, 56 bp, Artificial
  Synthetic oligonucleotide
gagcggaataccatccgtgaactctaatattgatacaaatcttctaacccttttaa

SEQ ID NO: 295439 - DNA, 50 bp, Artificial
  Synthetic oligonucleotide
aagggaaacgacggtggtgggccgcgatatcttcacagcggctcttgacg

SEQ ID NO: 295440 - DNA, 50 bp, Artificial
  Synthetic oligonucleotide
aactggtaggctcgccacacagcgcccgcgtgaatctacacaagactgga

SEQ ID NO: 295441 - DNA, 50 bp, Artificial
  Synthetic oligonucleotide
tagtcactaggcttccgatgttggcgctttgtcctaacttacgtacctca

SEQ ID NO: 295442 - DNA, 50 bp, Artificial
  Synthetic oligonucleotide
aactggcgagggtgccggtaacaattacgtagcatctgggccgaccgcgg

SEQ ID NO: 295443 - DNA, 50 bp, Artificial
  Synthetic oligonucleotide
cacgaggggtgcggcaccgcaaaaagacagaaagcactaaaggcgtccgc

SEQ ID NO: 295444 - DNA, 50 bp, Artificial
  Synthetic oligonucleotide
aactggagacgtctctcaacgggcagaggcgcttcactgggtccccgcga

SEQ ID NO: 295445 - DNA, 50 bp, Artificial
  Synthetic oligonucleotide
aagggaaacgccccactcttagaacagtcgcgcgcaaggacgcgtcggtc

SEQ ID NO: 295446 - DNA, 50 bp, Artificial
  Synthetic oligonucleotide
aagggaccccgcctacagcgtgccctggcgatgagacatgtcaaccaccg

SEQ ID NO: 295447 - DNA, 50 bp, Artificial
  Synthetic oligonucleotide
aaggaccccctcgagtgcgccaaagcggacccgtccaaccaccccgctga

SEQ ID NO: 295448 - DNA, 50 bp, Artificial
  Synthetic oligonucleotide
aaggacgacagggctgcacgaagacgggggatcgactcaccaacgggtgc

SEQ ID NO: 295449 - DNA, 58 bp, Artificial
  Synthetic oligonucleotide
ccgtaagaggctgcactccagctttcctggacatcgttccgcatcctcacggaatgcg

SEQ ID NO: 295450 - DNA, 50 bp, Artificial
  Synthetic oligonucleotide
ccatccgaagaaagcctccacacgtgagcagagcacgagggatgcacgga

SEQ ID NO: 295451 - DNA, 50 bp, Artificial
  Synthetic oligonucleotide
caccgccccgtctgttgagcgccccctcaccttattaccacagcgacaca

SEQ ID NO: 295452 - DNA, 50 bp, Artificial
  Synthetic oligonucleotide
aaggacgcgctccccacgcagagttcacaattcggggactgcacctctca

SEQ ID NO: 295453 - DNA, 50 bp, Artificial
  Synthetic oligonucleotide
ccaggatgcactggtacgcgctgcgctatggtgtctcggagaatacggcc

SEQ ID NO: 295454 - DNA, 50 bp, Artificial
  Synthetic oligonucleotide
caccgcccttctttccgctgacgcagtgctttcctggcacaatcgcacac

SEQ ID NO: 295455 - DNA, 50 bp, Artificial
  Synthetic oligonucleotide
caccgctcgtcgggggttagtcgctctctgtcagtagctgccacatgcga

SEQ ID NO: 295456 - DNA, 50 bp, Artificial
  Synthetic oligonucleotide
aagagacagccaaaggagcagccgcgcaggcacaccgccacatcgatagc

SEQ ID NO: 295457 - DNA, 50 bp, Artificial
  Synthetic oligonucleotide
caccgctgcgtccgtgtgggctgagagcaagaacagtctgaatgtgcccc

SEQ ID NO: 295458 - DNA, 50 bp, Artificial
  Synthetic oligonucleotide
cctcacccctctgcggcacagcgcaacgcacacacaagtcaatcagccga

SEQ ID NO: 295459 - DNA, 50 bp, Artificial
  Synthetic oligonucleotide
aaggacgctgctggctagtcccacttgtgaagggttactgcaggcgaggg

SEQ ID NO: 295460 - DNA, 55 bp, Artificial
  Synthetic oligonucleotide
gtgaagtagaaggtacataaagtgaagtagaaggtacataaagtgaagtagaagg

SEQ ID NO: 295461 - DNA, 50 bp, Artificial
  Synthetic oligonucleotide
aaggagagccaacccgcaggcataagacatctgcgaagttgcggcccccg

SEQ ID NO: 295462 - DNA, 50 bp, Artificial
  Synthetic oligonucleotide
caccggctcccctcccatggatgtacacacgcgcacgggtgtctctcacc

SEQ ID NO: 295463 - DNA, 50 bp, Artificial
  Synthetic oligonucleotide
aagactccacgcgctcggtctgctttcgtgcaatgagcggggctccacgt

SEQ ID NO: 295464 - DNA, 50 bp, Artificial
  Synthetic oligonucleotide
aagacgtgaggatacgactgcgggcttccaagggctcgctgcgttagcat

SEQ ID NO: 295465 - DNA, 50 bp, Artificial
  Synthetic oligonucleotide
cacacgcgcgcatctcttcgcatgtcggctcgcaagacggagcgatacgg

SEQ ID NO: 295466 - DNA, 50 bp, Artificial
  Synthetic oligonucleotide
aaggagatgatcatggagcaaacgcggaagagcccccgctccacacggga

SEQ ID NO: 295467 - DNA, 50 bp, Artificial
  Synthetic oligonucleotide
aagaggcaagagcgacacgaaaccagaaacgcggggcgaatgccagtggg

SEQ ID NO: 295468 - DNA, 50 bp, Artificial
  Synthetic oligonucleotide
caccgcaaaaagacagaaagcactaaaggcgtccgccccaccctcggcag

SEQ ID NO: 295469 - DNA, 50 bp, Artificial
  Synthetic oligonucleotide
aagaggagcccttcttgcaagagcatcacacgcccctacggcgtcagctt

SEQ ID NO: 295470 - DNA, 50 bp, Artificial
  Synthetic oligonucleotide
aagaggactagtgtagtgcccccggcagacggagaagtccgggcacgtgt

SEQ ID NO: 295471 - DNA, 58 bp, Artificial
  Synthetic oligonucleotide
gaaaagcgggagggcctgcacgtactccagtgggagacgcgccagcagtgtcggtgcc

SEQ ID NO: 295472 - DNA, 50 bp, Artificial
  Synthetic oligonucleotide
aagaggacgtgcgcttgcgtaggccatggcagaccgccggaactgtggtg

SEQ ID NO: 295473 - DNA, 50 bp, Artificial
  Synthetic oligonucleotide
tactcttactgctacgacaggcaatgtatcgatgccgctacaagattctg

SEQ ID NO: 295474 - DNA, 50 bp, Artificial
  Synthetic oligonucleotide
taaaacgggaagattcaataatcgcgccgtatgtacgagtgtgccagggg

SEQ ID NO: 295475 - DNA, 50 bp, Artificial
  Synthetic oligonucleotide
aaggaaggaacagcgcgcgagtgagcgggtgggtggccccatcattctgg

SEQ ID NO: 295476 - DNA, 50 bp, Artificial
  Synthetic oligonucleotide
caccgcaatgcgttccttcggtatctctcgcataccgccctgccggccta

SEQ ID NO: 295477 - DNA, 50 bp, Artificial
  Synthetic oligonucleotide
aagagcctagctggcaagtcgcgtcgtcacgacacccacatgaaccgacg

SEQ ID NO: 295478 - DNA, 50 bp, Artificial
  Synthetic oligonucleotide
aaggaagttggggcgggtaccttttccgaggcggaactccgcgggctgta

SEQ ID NO: 295479 - DNA, 50 bp, Artificial
  Synthetic oligonucleotide
aagagccccgaacccacttgggtaacggcagagcagttgcgcgaaacgta

SEQ ID NO: 295480 - DNA, 50 bp, Artificial
  Synthetic oligonucleotide
aagagccagtgacagaaggcgaactctcggggaatcgggacggtgcctgg

SEQ ID NO: 295481 - DNA, 50 bp, Artificial
  Synthetic oligonucleotide
aagagcaggggacccgagcatcccacctagtcagccaccaaggtcgtgtc

SEQ ID NO: 295482 - DNA, 58 bp, Artificial
  Synthetic oligonucleotide
gtggagcaggcaaaccactacgctgcctccctctatggcactttcatggagtccgtca

SEQ ID NO: 295483 - DNA, 50 bp, Artificial
  Synthetic oligonucleotide
aaggacagcgaaaccacgtctgaagaggggcgtgtggaggatgcagcgag

SEQ ID NO: 295484 - DNA, 50 bp, Artificial
  Synthetic oligonucleotide
aagagcagcatcggtgtctagatgcatgatctcccgaggcagggggcacc

SEQ ID NO: 295485 - DNA, 50 bp, Artificial
  Synthetic oligonucleotide
aaggaccaagcggagtgtgcgtcggtaagggtccgctgatcggcacacaa

SEQ ID NO: 295486 - DNA, 50 bp, Artificial
  Synthetic oligonucleotide
caccgcagaggcaaccgcacagagaggtggggccgtcgagaagtggtgag

SEQ ID NO: 295487 - DNA, 50 bp, Artificial
  Synthetic oligonucleotide
aaggagtgcgtacgtgcgcttacgtgtgctcacatatgctccgtgccgcg

SEQ ID NO: 295488 - DNA, 50 bp, Artificial
  Synthetic oligonucleotide
aagaccctcgcggcaacaccctcgggcgcggaacctgcgtgacattgcat

SEQ ID NO: 295489 - DNA, 50 bp, Artificial
  Synthetic oligonucleotide
aagaccacgaagagagcgtagcggcagtagacagcatcggccgccagcta

SEQ ID NO: 295490 - DNA, 50 bp, Artificial
  Synthetic oligonucleotide
aaggatgccccaccagcgtggagagttggggctgcgctagatcattcacg

SEQ ID NO: 295491 - DNA, 50 bp, Artificial
  Synthetic oligonucleotide
cgcttgtgccattcatgcgattaggccgagtgcccgcctgactcgagtgt

SEQ ID NO: 295492 - DNA, 50 bp, Artificial
  Synthetic oligonucleotide
aagacagggtgacacagcgtctgagcatggcaagcagcgagggacggttt

SEQ ID NO: 295493 - DNA, 58 bp, Artificial
  Synthetic oligonucleotide
caagtcatggtatgagcaataatacaagtcatggtatgagcaataatacaagtcatgg

SEQ ID NO: 295494 - DNA, 50 bp, Artificial
  Synthetic oligonucleotide
ccagctgcacttacgcgagtgggcgtgtgtgccctatcagccctgtccgg

SEQ ID NO: 295495 - DNA, 50 bp, Artificial
  Synthetic oligonucleotide
cacaccttccacgacgcagactcctctccgtgcagctgtggaacgaaggc

SEQ ID NO: 295496 - DNA, 50 bp, Artificial
  Synthetic oligonucleotide
aaggatggacttggcaagtggagggtttgcgtcggaaggttccaagccgc

SEQ ID NO: 295497 - DNA, 50 bp, Artificial
  Synthetic oligonucleotide
aagaagggcaacgcacacgtctgtgagtgccgcagggacggaaccctgat

SEQ ID NO: 295498 - DNA, 50 bp, Artificial
  Synthetic oligonucleotide
aaggcacaacgtcgtccgcgagagctgcctacgctgccgagcccccggaa

SEQ ID NO: 295499 - DNA, 50 bp, Artificial
  Synthetic oligonucleotide
aaggcatgcctccacagcgcgtacgagacacgtttcgtatcgccctcgcg

SEQ ID NO: 295500 - DNA, 50 bp, Artificial
  Synthetic oligonucleotide
aagaagacttgcccgtggccaaaggatggctgggccgacttgggtaggtg

SEQ ID NO: 295501 - DNA, 50 bp, Artificial
  Synthetic oligonucleotide
ctcttggatgctgttattggttgatctttgtagtgacactgtagatgccc

SEQ ID NO: 295502 - DNA, 50 bp, Artificial
  Synthetic oligonucleotide
cacgaaagcgaacccacagactcaccggttagcctcgctcccgccatgtt

SEQ ID NO: 295503 - DNA, 50 bp, Artificial
  Synthetic oligonucleotide
gttgctgccgggttatggtgtgcagtttccggttcccctgccatccggtt

SEQ ID NO: 295504 - DNA, 58 bp, Artificial
  Synthetic oligonucleotide
gattcaatgattcacgagtccgcggaatcctggtctatgcgcgtatcatcgcatgtcg

SEQ ID NO: 295505 - DNA, 50 bp, Artificial
  Synthetic oligonucleotide
aaggccatcttgcttatccgcccagcagcacccgttcgtgtagcgccaga

SEQ ID NO: 295506 - DNA, 50 bp, Artificial
  Synthetic oligonucleotide
cacacgcctccacatgtggcgcacgcgctcactgggtactgcatcaatgc

SEQ ID NO: 295507 - DNA, 50 bp, Artificial
  Synthetic oligonucleotide
cacctcgcagctcccctctgcgctgctacgcacacgtgtcctcgcttgat

SEQ ID NO: 295508 - DNA, 50 bp, Artificial
  Synthetic oligonucleotide
aagacgtcaatcccccgtggcgatgggccccctccataccccgtggcgat

SEQ ID NO: 295509 - DNA, 50 bp, Artificial
  Synthetic oligonucleotide
aaggagcctagaagggagccgaagtgaaacaggacccgggtcggaacgcg

SEQ ID NO: 295510 - DNA, 50 bp, Artificial
  Synthetic oligonucleotide
aaggagcgaaacgaacagcataaccaattacgtatacaccagctggcaca

SEQ ID NO: 295511 - DNA, 50 bp, Artificial
  Synthetic oligonucleotide
ccaggagcgccagagaaccgcgcacgtcaggtctgtcctggctgttcttg

SEQ ID NO: 295512 - DNA, 50 bp, Artificial
  Synthetic oligonucleotide
ccggcggcttatgacggaccggcgcaccttacagtttcttctccgctacg

SEQ ID NO: 295513 - DNA, 50 bp, Artificial
  Synthetic oligonucleotide
aagacggcgaacgacggccgcactacaaggcgtgaaacgaagcagcgacg

SEQ ID NO: 295514 - DNA, 50 bp, Artificial
  Synthetic oligonucleotide
aaggaggcagcgcagtgcacacttccttttgtggcccgaacgcaatcgaa

SEQ ID NO: 295515 - DNA, 57 bp, Artificial
  Synthetic oligonucleotide
attaacaccgatcgttttgtcgattggtctaattccagatatcttagttggtttgca

SEQ ID NO: 295516 - DNA, 58 bp, Artificial
  Synthetic oligonucleotide
gcgtcgatagttttacagcgtaagatgaatctatgctacttgtctcttctgaggttac

SEQ ID NO: 295517 - DNA, 50 bp, Artificial
  Synthetic oligonucleotide
ccatccgatggctccaccactgacgtgcctgcagcccacaacgcgtgtag

SEQ ID NO: 295518 - DNA, 50 bp, Artificial
  Synthetic oligonucleotide
aaggaggcgacgttagcctgcgccaggagtgtacgcaatgccacatcgaa

SEQ ID NO: 295519 - DNA, 50 bp, Artificial
  Synthetic oligonucleotide
aaggagtcgcgcgtccgtatgcaggccttacaggctgattcgccgagcat

SEQ ID NO: 295520 - DNA, 50 bp, Artificial
  Synthetic oligonucleotide
aagacgccaacactgaaccccacaggcccagacgagtcctcctggatgct

SEQ ID NO: 295521 - DNA, 50 bp, Artificial
  Synthetic oligonucleotide
aagacgcagagccctaggtatggcgttctctggctttccgcccggagacg

SEQ ID NO: 295522 - DNA, 50 bp, Artificial
  Synthetic oligonucleotide
aagacgcaccgcaaggccccctctgtctcgtacagggcgcagaacgtgtg

SEQ ID NO: 295523 - DNA, 50 bp, Artificial
  Synthetic oligonucleotide
cgcttgtgccatctctacagtggggcagagtgtccgcgcaaaacacagat

SEQ ID NO: 295524 - DNA, 50 bp, Artificial
  Synthetic oligonucleotide
aagacgcaagtttgcacagtccatcagcccctctgcggcttgcttccggt

SEQ ID NO: 295525 - DNA, 50 bp, Artificial
  Synthetic oligonucleotide
aagacgagtcgctgtcaaggttactgccatgggtcccgcacagacgcacg

SEQ ID NO: 295526 - DNA, 50 bp, Artificial
  Synthetic oligonucleotide
aagacgaagttccagctcgtcgcctctgccctcgtcggggacggaacgaa

SEQ ID NO: 295527 - DNA, 58 bp, Artificial
  Synthetic oligonucleotide
gagctacaaatctatcattacgatggattattcaatattcgaaacaacgtgttggaag

SEQ ID NO: 295528 - DNA, 50 bp, Artificial
  Synthetic oligonucleotide
cgtggggacggcctctcgagtgcagtctggtgagttgctctctgctaccc

SEQ ID NO: 295529 - DNA, 50 bp, Artificial
  Synthetic oligonucleotide
ccaacggagagcagagcgtccaagaaggtggcgaagcaggtacgtggcac

SEQ ID NO: 295530 - DNA, 50 bp, Artificial
  Synthetic oligonucleotide
aaagcatgagtacactgcggggaccgacaacggccgggctatggtgtcag

SEQ ID NO: 295531 - DNA, 50 bp, Artificial
  Synthetic oligonucleotide
aaagcagggccctacctgacgaccccgagtgagctctcggaccaagccca

SEQ ID NO: 295532 - DNA, 50 bp, Artificial
  Synthetic oligonucleotide
aaagcagctgtcggttccctacgaggccacggactcacccaccacgcgga

SEQ ID NO: 295533 - DNA, 50 bp, Artificial
  Synthetic oligonucleotide
cagtgctcccacgagtcaggcaatggccgctggacacgcgaaatcgctaa

SEQ ID NO: 295534 - DNA, 50 bp, Artificial
  Synthetic oligonucleotide
aaagcagcggccaagtctcttcagcgccggacaaagagtgcagcgacctg

SEQ ID NO: 295535 - DNA, 50 bp, Artificial
  Synthetic oligonucleotide
aaagcagcgaggggattcacgctcccgccactgagtccttcgtcacacat

SEQ ID NO: 295536 - DNA, 50 bp, Artificial
  Synthetic oligonucleotide
ccgtgtttcttcgtgcgtcggacacgcctgcggtctctctcctggccaga

SEQ ID NO: 295537 - DNA, 50 bp, Artificial
  Synthetic oligonucleotide
cagtgggcggatctggagcgagcatgtgtcttcgacgtttgggaggccac

SEQ ID NO: 295538 - DNA, 58 bp, Artificial
  Synthetic oligonucleotide
gcaccgaagactccgcgtaggaggcggcttggcccattgcaagtgtgggtgcgtgcac

SEQ ID NO: 295539 - DNA, 50 bp, Artificial
  Synthetic oligonucleotide
aaagcagaccaggcttgggagcacacatggtccctccagagtaggccgga

SEQ ID NO: 295540 - DNA, 50 bp, Artificial
  Synthetic oligonucleotide
aaagcacgggagtggcggcgtgtatgcggtcaggcaaggactaaacgcag

SEQ ID NO: 295541 - DNA, 50 bp, Artificial
  Synthetic oligonucleotide
cagtgggtctcgctgtctcccatgagtgttgctgaggggtgcaacgccat

SEQ ID NO: 295542 - DNA, 50 bp, Artificial
  Synthetic oligonucleotide
cgtggcatacaaatcgccggctccgcagatgagggggccgcttctgagag

SEQ ID NO: 295543 - DNA, 50 bp, Artificial
  Synthetic oligonucleotide
aaagcaccgatccgacgtggcatggttcgaggatgctcccgagacccttc

SEQ ID NO: 295544 - DNA, 50 bp, Artificial
  Synthetic oligonucleotide
aaagcaccccgcaagcacaccaaaagtgacgagagcctcgcagcgttccc

SEQ ID NO: 295545 - DNA, 50 bp, Artificial
  Synthetic oligonucleotide
ccaacacagccaggaggccatccaccgcttctccagtacttgtccgctct

SEQ ID NO: 295546 - DNA, 50 bp, Artificial
  Synthetic oligonucleotide
aaagatgccgccaagcccccgaggcagaacaaaggactcgggacagccga

SEQ ID NO: 295547 - DNA, 50 bp, Artificial
  Synthetic oligonucleotide
aaagatcccaactgctggccccctgcaacgcacgcatttcccgagcttcc

SEQ ID NO: 295548 - DNA, 50 bp, Artificial
  Synthetic oligonucleotide
ccgtcatacggttcgtttgaaaaaacctcgggtgacgcatagtgaggaga

SEQ ID NO: 295549 - DNA, 58 bp, Artificial
  Synthetic oligonucleotide
gtgaacccactgctcgtggtcactcacatgtcgcacgtagtgccgacggtgcccctag

SEQ ID NO: 295550 - DNA, 50 bp, Artificial
  Synthetic oligonucleotide
ccaacacaacgcgggaacggagccgcatacgacctcggtaaccacttgct

SEQ ID NO: 295551 - DNA, 50 bp, Artificial
  Synthetic oligonucleotide
ccaaatgatgaagacactgaggtggtggggcgtcgcaggaggctggagcg

SEQ ID NO: 295552 - DNA, 50 bp, Artificial
  Synthetic oligonucleotide
aaagagttgcctcgggcaagtacggtgtcttgtcggccctccaggctcct

SEQ ID NO: 295553 - DNA, 50 bp, Artificial
  Synthetic oligonucleotide
aaagcgtcctcgccttttcgtcgccagagggcgtcccatcgctctcaggc

SEQ ID NO: 295554 - DNA, 50 bp, Artificial
  Synthetic oligonucleotide
tgtgctgcaagtctgcggacacattcttgctggcgcactacgctccccgc

SEQ ID NO: 295555 - DNA, 50 bp, Artificial
  Synthetic oligonucleotide
aaagcggttctcaagtctacgcaccgtgtcaaggcggggtgtgctcgcca

SEQ ID NO: 295556 - DNA, 50 bp, Artificial
  Synthetic oligonucleotide
aaagcgggtctagcggctgggtgggtcgcctggaactagctcgaggcatt

SEQ ID NO: 295557 - DNA, 50 bp, Artificial
  Synthetic oligonucleotide
aaagcggagtggctcctcttcggacgggtggtcgggacacagttgccgtt

SEQ ID NO: 295558 - DNA, 50 bp, Artificial
  Synthetic oligonucleotide
cgtggtccggcaaacggcaaagcttacgggacttacggcacttccgacct

SEQ ID NO: 295559 - DNA, 50 bp, Artificial
  Synthetic oligonucleotide
aaagcgagcggactcccgccgacttgcgtcaactgtcccagccgcggaag

SEQ ID NO: 295560 - DNA, 58 bp, Artificial
  Synthetic oligonucleotide
ccgctgcacatatgcgtctgggaaaacttcgtggagggtgcgaagctgctactggacg

SEQ ID NO: 295561 - DNA, 50 bp, Artificial
  Synthetic oligonucleotide
aaagcgactccctgggggaatgaactgtaggggcgctagacgccgacgtg

SEQ ID NO: 295562 - DNA, 50 bp, Artificial
  Synthetic oligonucleotide
aaagccgttcccttgggggagtgtggaccacaaaacgacgtgcctacgct

SEQ ID NO: 295563 - DNA, 50 bp, Artificial
  Synthetic oligonucleotide
aaagccgtgggggaggttcccgcaaggggatggtgaaagaggcaatcgcg

SEQ ID NO: 295564 - DNA, 50 bp, Artificial
  Synthetic oligonucleotide
cggggtcatcagatcaaccttttctgacgctccctcgtgacgggaggccg

SEQ ID NO: 295565 - DNA, 50 bp, Artificial
  Synthetic oligonucleotide
aaagccgggaagacagagcgagaagccggcagtggagcaacgacgtgtag

SEQ ID NO: 295566 - DNA, 50 bp, Artificial
  Synthetic oligonucleotide
tgtgtatggacacatatacacgacataacaacgcacagactcgcccacat

SEQ ID NO: 295567 - DNA, 50 bp, Artificial
  Synthetic oligonucleotide
aaagccggctagggacgagcccatagcagaccccaagcctgtagaggtga

SEQ ID NO: 295568 - DNA, 50 bp, Artificial
  Synthetic oligonucleotide
aaagccggccaccgatttggttttggtgtctacttggcggaccatcccgg

SEQ ID NO: 295569 - DNA, 50 bp, Artificial
  Synthetic oligonucleotide
aaagcccgttagtccgggtctctggatcactcgtggcatcggccggagag

SEQ ID NO: 295570 - DNA, 50 bp, Artificial
  Synthetic oligonucleotide
aaagcccgcaccgcagtcagagaccggagtgcatgtacgtgtgtcccaca

SEQ ID NO: 295571 - DNA, 58 bp, Artificial
  Synthetic oligonucleotide
ttgcagtcccttgaggtgcctcgcctaagaacccactgtcccccttgaccagggatca

SEQ ID NO: 295572 - DNA, 50 bp, Artificial
  Synthetic oligonucleotide
cagtgccgttagcagctcggtgtagtttatcaaccctgttggagtgtgta

SEQ ID NO: 295573 - DNA, 50 bp, Artificial
  Synthetic oligonucleotide
aaagcccgacgcaccctaggccgcagtggaggccatccagctaccgacta

SEQ ID NO: 295574 - DNA, 50 bp, Artificial
  Synthetic oligonucleotide
aaagccccggcagaccccgagtctggaggtgtgataactcaagagcgggt

SEQ ID NO: 295575 - DNA, 50 bp, Artificial
  Synthetic oligonucleotide
aaagcccccatatgggccagctatggcagacccttccctaatcgccgcta

SEQ ID NO: 295576 - DNA, 50 bp, Artificial
  Synthetic oligonucleotide
aaagcccaccttggacgtcggtaggtccgcgaggaaggatgcgtcgagtc

SEQ ID NO: 295577 - DNA, 50 bp, Artificial
  Synthetic oligonucleotide
aaagaagacgcatgttggaacgcagctgtgcgtggcttcccttcgagcgc

SEQ ID NO: 295578 - DNA, 50 bp, Artificial
  Synthetic oligonucleotide
aaagaacgtggcgaagaaagggccaacgggacacgacagacggccgctca

SEQ ID NO: 295579 - DNA, 50 bp, Artificial
  Synthetic oligonucleotide
aaagaaacggtgtgcggggtggtagacacgcagcgggggtttgacgaggc

SEQ ID NO: 295580 - DNA, 50 bp, Artificial
  Synthetic oligonucleotide
aaacttgacgccgaagcactcccccagcggggtcaacggccatcccttgt

SEQ ID NO: 295581 - DNA, 50 bp, Artificial
  Synthetic oligonucleotide
aaacttccgcccgagcggggagacctccgtgagagtctgggacgaccgag

SEQ ID NO: 295582 - DNA, 56 bp, Artificial
  Synthetic oligonucleotide
cgctagtttcaacaactctcgttctttacacttcttcttagctttatggccagtag

SEQ ID NO: 295583 - DNA, 50 bp, Artificial
  Synthetic oligonucleotide
aaactgtggggcaggtcgacgcataagcggagggcggctacgcaaacagg

SEQ ID NO: 295584 - DNA, 50 bp, Artificial
  Synthetic oligonucleotide
ttatacgtctgcaagtctatgtaagcgtgttgtatatgcttgtgtgttcc

SEQ ID NO: 295585 - DNA, 50 bp, Artificial
  Synthetic oligonucleotide
aaactggggcattacgggacggacgcgcacagtgtcgcaaggacgatcga

SEQ ID NO: 295586 - DNA, 50 bp, Artificial
  Synthetic oligonucleotide
aaactgcctctgacgagcgtgaaacgtaagcgtaggccaccccgcggcgc

SEQ ID NO: 295587 - DNA, 50 bp, Artificial
  Synthetic oligonucleotide
catacccgcagctgttgcctcgcaaggtgccgtttcatccagccccgtgt

SEQ ID NO: 295588 - DNA, 50 bp, Artificial
  Synthetic oligonucleotide
aaactgcaccaaagagacaccccacaacccgcggttcctacccgcgtggg

SEQ ID NO: 295589 - DNA, 50 bp, Artificial
  Synthetic oligonucleotide
ccgtgggtgtcaaaccgaggtgggacgagagcacaagagagggggcgaca

SEQ ID NO: 295590 - DNA, 50 bp, Artificial
  Synthetic oligonucleotide
ttatcgctgagatgtgcggtgttgtcttaccctgtaccgaccccttgtct

SEQ ID NO: 295591 - DNA, 50 bp, Artificial
  Synthetic oligonucleotide
catacggaggcggtgctttcgagggctcttccttcggtttgcctgcacgc

SEQ ID NO: 295592 - DNA, 50 bp, Artificial
  Synthetic oligonucleotide
catacggaggggcagaggcacccaaccgtgctgaaccaaccatgcacatc

SEQ ID NO: 295593 - DNA, 58 bp, Artificial
  Synthetic oligonucleotide
agtgggctcgacccgttgggagccttctgcagatctccactggattaatacagagcgg

SEQ ID NO: 295594 - DNA, 50 bp, Artificial
  Synthetic oligonucleotide
cgggttgtagactctccgctgtgtgtgcgccttccctttcgacccgcact

SEQ ID NO: 295595 - DNA, 50 bp, Artificial
  Synthetic oligonucleotide
aaactgacgaggcccaaacgccgcctcctcgcaacgctgcgatcgtccgc

SEQ ID NO: 295596 - DNA, 50 bp, Artificial
  Synthetic oligonucleotide
aaactgaacgcaccggcgtaagcatgagagggggcacgagcactgtctgg

SEQ ID NO: 295597 - DNA, 50 bp, Artificial
  Synthetic oligonucleotide
aaactgaaagatgggctgaccgtctggtgtttgggccccgggttttggga

SEQ ID NO: 295598 - DNA, 50 bp, Artificial
  Synthetic oligonucleotide
aaactcgggagcgggtcactgcatgcttcgcaggggcggtgtcccaagtc

SEQ ID NO: 295599 - DNA, 50 bp, Artificial
  Synthetic oligonucleotide
aaactcgggacgccagatggcgaggacagaaaagcacgctgtgcgggata

SEQ ID NO: 295600 - DNA, 50 bp, Artificial
  Synthetic oligonucleotide
aaactcggcgctgctgacaacgggacgagcctccctcgggccaggaagac

SEQ ID NO: 295601 - DNA, 50 bp, Artificial
  Synthetic oligonucleotide
aaactcgcccaagcagaacggtgtgaaccctgtcctgcgggtaggcgttc

SEQ ID NO: 295602 - DNA, 50 bp, Artificial
  Synthetic oligonucleotide
catttgcccgccgcagcgctcgtgggttctaccgtggctcaaagcataat

SEQ ID NO: 295603 - DNA, 50 bp, Artificial
  Synthetic oligonucleotide
aaagagttgcagacatgcgtactcacgccgcagccaagcgacacatcggc

SEQ ID NO: 295604 - DNA, 58 bp, Artificial
  Synthetic oligonucleotide
tccgtatatagttaaggattccataaaggccaatgacaataatagagtaccacgaatc

SEQ ID NO: 295605 - DNA, 50 bp, Artificial
  Synthetic oligonucleotide
aaagagtgcctgggcgtgtccgttttggtctctaggggacaggcggggga

SEQ ID NO: 295606 - DNA, 50 bp, Artificial
  Synthetic oligonucleotide
cgtgccaccagagagaagggcgggggctaagggggacccgcgcagactca

SEQ ID NO: 295607 - DNA, 50 bp, Artificial
  Synthetic oligonucleotide
aaagaggtgattgggggctggctgtcgcgtctccgctaatcgtccagaga

SEQ ID NO: 295608 - DNA, 50 bp, Artificial
  Synthetic oligonucleotide
aaagaggggtcccaaaggagtcgcgcgtccgtatgcaggccttacaggct

SEQ ID NO: 295609 - DNA, 50 bp, Artificial
  Synthetic oligonucleotide
aaagaggggcgctgccgagacttacaagcgcactggtcccacctatccga

SEQ ID NO: 295610 - DNA, 50 bp, Artificial
  Synthetic oligonucleotide
aaagaggggcagtgtgcctctacttgcccggctgtgtgtgcgcccagaca

SEQ ID NO: 295611 - DNA, 50 bp, Artificial
  Synthetic oligonucleotide
aaagaggcgcaccgacccatcggcacccacggttgaaaagacctcccgat

SEQ ID NO: 295612 - DNA, 50 bp, Artificial
  Synthetic oligonucleotide
aaagaggcctacatcccacccgtggagaagcgccaaaggagagctcccct

SEQ ID NO: 295613 - DNA, 50 bp, Artificial
  Synthetic oligonucleotide
aaagagcggtttgtcgttcgaaggcgcggcctcctgtcgcgtctgtgcgg

SEQ ID NO: 295614 - DNA, 50 bp, Artificial
  Synthetic oligonucleotide
aaagagcgggtgacacgcagagcgacgtggctgaaggagggtccgtccct

SEQ ID NO: 295615 - DNA, 58 bp, Artificial
  Synthetic oligonucleotide
gacgacagcaactcagacttctctacactcgtagtacctataagtacaggtctaccta

SEQ ID NO: 295616 - DNA, 50 bp, Artificial
  Synthetic oligonucleotide
aaagagcggagcggagagtggggactccttacacgtccccagctgttggg

SEQ ID NO: 295617 - DNA, 50 bp, Artificial
  Synthetic oligonucleotide
ttacggtggggcggatgaaaggggttccgaccctatggtctgcagtccta

SEQ ID NO: 295618 - DNA, 50 bp, Artificial
  Synthetic oligonucleotide
aaagacgggagcgcaggtagaccgctgagccggtggtacaaagcgacttc

SEQ ID NO: 295619 - DNA, 50 bp, Artificial
  Synthetic oligonucleotide
aaagacggaaagcgcgggaaaaccgacacgtggaccgcctcggttctgaa

SEQ ID NO: 295620 - DNA, 50 bp, Artificial
  Synthetic oligonucleotide
aaagacgcgccaccacaccgcacgtagggaatccgcacgctccactgcgg

SEQ ID NO: 295621 - DNA, 50 bp, Artificial
  Synthetic oligonucleotide
aaagacgcacagcggtatctcccgtagcgaggcaccttctgcgctacacc

SEQ ID NO: 295622 - DNA, 50 bp, Artificial
  Synthetic oligonucleotide
aaagacgatgtctagcccgaagagtcctcaggcaacgccgcatccgctga

SEQ ID NO: 295623 - DNA, 50 bp, Artificial
  Synthetic oligonucleotide
aaagacaggcgaccggctgtagactcgcccagggacgattgggagacaga

SEQ ID NO: 295624 - DNA, 50 bp, Artificial
  Synthetic oligonucleotide
aaagacagcgggggagaaaggaagctacccgagatcgctcgacgcgcgaa

SEQ ID NO: 295625 - DNA, 50 bp, Artificial
  Synthetic oligonucleotide
ttagcaacttgttatactcctgaaatatcctatgcatattacagtataca

SEQ ID NO: 295626 - DNA, 56 bp, Artificial
  Synthetic oligonucleotide
ggacgattgaatggtattgaaatggcacgaagcgagtgggttagggaaggacgaat

SEQ ID NO: 295627 - DNA, 58 bp, Artificial
  Synthetic oligonucleotide
tcgcccagagtattgcgtgcatcaagaacccgacacgattcggagatcacggaaccgg

SEQ ID NO: 295628 - DNA, 50 bp, Artificial
  Synthetic oligonucleotide
aaagaaggagcaacgcgcactaggccaaccatggctcgactgcccaccta

SEQ ID NO: 295629 - DNA, 50 bp, Artificial
  Synthetic oligonucleotide
ttaggacctatactagttaccttaagacctacgttagtgtagataggagc

SEQ ID NO: 295630 - DNA, 50 bp, Artificial
  Synthetic oligonucleotide
aaagaagctccggcaccgctgagcatccctggagggcggtctagagcgta

SEQ ID NO: 295631 - DNA, 50 bp, Artificial
  Synthetic oligonucleotide
tggtacacacgcctgcgcctcgtttcccaagaaagcgattaccagtaagt

SEQ ID NO: 295632 - DNA, 50 bp, Artificial
  Synthetic oligonucleotide
tggtactattacccgaggttaacgatcctaggtttagtaagttggtcgaa

SEQ ID NO: 295633 - DNA, 50 bp, Artificial
  Synthetic oligonucleotide
ccaagaagcaccccaggagggagggcagacactgccgcttaccactcctc

SEQ ID NO: 295634 - DNA, 50 bp, Artificial
  Synthetic oligonucleotide
aaagtggaacggttacgctgggcagacacgtttggcccgcacgagtccat

SEQ ID NO: 295635 - DNA, 50 bp, Artificial
  Synthetic oligonucleotide
aaagtgcggcctatccgtcgccggggatcaaagaacgagaactgcgctga

SEQ ID NO: 295636 - DNA, 50 bp, Artificial
  Synthetic oligonucleotide
cgttccacgtcctttccactcacgcatttcgttcaacacaaattgtcatt

SEQ ID NO: 295637 - DNA, 50 bp, Artificial
  Synthetic oligonucleotide
aaagtgcatgtccgagcgggggttggcgtatgcagccctgagggggtgcc

SEQ ID NO: 295638 - DNA, 56 bp, Artificial
  Synthetic oligonucleotide
gatccacgtgccaagtacctatagaagtaagagcctttaggggaacttatctagcg

SEQ ID NO: 295639 - DNA, 50 bp, Artificial
  Synthetic oligonucleotide
aaagtgcacggggtcagctgagttccacgcaaacgcccctaattcagcgg

SEQ ID NO: 295640 - DNA, 50 bp, Artificial
  Synthetic oligonucleotide
aaagtgcacgccgtgggagtcgaaccagggacctcccgatggctagacgg

SEQ ID NO: 295641 - DNA, 50 bp, Artificial
  Synthetic oligonucleotide
cgggcgacaccgaaccgcgacaggtgggataagggcagaaatgtggcaga

SEQ ID NO: 295642 - DNA, 50 bp, Artificial
  Synthetic oligonucleotide
aaagtaccccggggccgcctcggtgcatacgccatctccgtcggaactta

SEQ ID NO: 295643 - DNA, 50 bp, Artificial
  Synthetic oligonucleotide
ccgttggcaaaagggccgacgcgaacccgaggggcgttctgcgcagatgc

SEQ ID NO: 295644 - DNA, 50 bp, Artificial
  Synthetic oligonucleotide
aaagtaaccgcgcaagccccgcacatacaacgctgacgtgcaaaggcgat

SEQ ID NO: 295645 - DNA, 50 bp, Artificial
  Synthetic oligonucleotide
caggtgggaaggcgagcgtacccgtggcagaggagcatacccatggcaga

SEQ ID NO: 295646 - DNA, 50 bp, Artificial
  Synthetic oligonucleotide
caggtggggacgcacacgcgcataatcacagacgggcacaatgtcgctgt

SEQ ID NO: 295647 - DNA, 50 bp, Artificial
  Synthetic oligonucleotide
aaaggtggaccacgagtgcacggatggcgcatgtgagagcttagccgcct

SEQ ID NO: 295648 - DNA, 50 bp, Artificial
  Synthetic oligonucleotide
cgggcgggggtgtgcagcactcgagcgatacgaccgacctccgtgtccac

SEQ ID NO: 295649 - DNA, 58 bp, Artificial
  Synthetic oligonucleotide
tactcgggagtgcgccgcgtctctgctataaagggcctcaagcgcataagtaaacctg

SEQ ID NO: 295650 - DNA, 50 bp, Artificial
  Synthetic oligonucleotide
aaaggtgcacaagacggcacccctgtgctcgggacgaggtgtacgctcga

SEQ ID NO: 295651 - DNA, 50 bp, Artificial
  Synthetic oligonucleotide
caggtgtgacgttgctcccgccttccgtggcgttgtggtgtagcccctct

SEQ ID NO: 295652 - DNA, 50 bp, Artificial
  Synthetic oligonucleotide
ccaactacgcacacagtgaaagtaacttggctcggcagttcaccaattgg

SEQ ID NO: 295653 - DNA, 50 bp, Artificial
  Synthetic oligonucleotide
caggtttctgggacgctgccgcctgagtggagctcgatgacagcgctcac

SEQ ID NO: 295654 - DNA, 50 bp, Artificial
  Synthetic oligonucleotide
aaagggtcataccacctcgacccgccaacgccaggcagtcatgcggcgat

SEQ ID NO: 295655 - DNA, 50 bp, Artificial
  Synthetic oligonucleotide
ccgttattttgttcgtgtgcatggcgaggaggcaggaacaccggggcacg

SEQ ID NO: 295656 - DNA, 50 bp, Artificial
  Synthetic oligonucleotide
ccgtacaggagggtctcggggactgttgggaggaggatgccacgcgtgtt

SEQ ID NO: 295657 - DNA, 50 bp, Artificial
  Synthetic oligonucleotide
aaatcgcaacggttgggagcgacttggcagacgcgttactgggctgccta

SEQ ID NO: 295658 - DNA, 50 bp, Artificial
  Synthetic oligonucleotide
aaatccggccgatggggcgtctcgagggttacttgccatggggtaggact

SEQ ID NO: 295659 - DNA, 50 bp, Artificial
  Synthetic oligonucleotide
aaatccgctcgagacgactggctcagacaagcgaagttaccagggcggga

SEQ ID NO: 295660 - DNA, 53 bp, Artificial
  Synthetic oligonucleotide
cagcggaatacgtagtaagacgattaaaagaacgattagaattaacgaaacga

SEQ ID NO: 295661 - DNA, 50 bp, Artificial
  Synthetic oligonucleotide
cagggatgagttcagcagcgtatgagggtggtcactctggggccagtcgc

SEQ ID NO: 295662 - DNA, 50 bp, Artificial
  Synthetic oligonucleotide
aaatccctggcccgcacgccttccgagcctccctctcaccttttctgacg

SEQ ID NO: 295663 - DNA, 50 bp, Artificial
  Synthetic oligonucleotide
tggcttatatgggttatttagtttgaggtcaccatatgtatttagttggg

SEQ ID NO: 295664 - DNA, 50 bp, Artificial
  Synthetic oligonucleotide
tggcttccatcatgattctttgggtttagctgagttagatctatacagcg

SEQ ID NO: 295665 - DNA, 50 bp, Artificial
  Synthetic oligonucleotide
tgggacagaggcgttagatttcagtttcgctcgcattcgtcaccatgtac

SEQ ID NO: 295666 - DNA, 50 bp, Artificial
  Synthetic oligonucleotide
aaatccagcttggcagtatgcggccctgatacggctttcgccgaacagga

SEQ ID NO: 295667 - DNA, 50 bp, Artificial
  Synthetic oligonucleotide
aaatccacgcctgggacagaggttcacgcatgcacgcaagccaactcgct

SEQ ID NO: 295668 - DNA, 50 bp, Artificial
  Synthetic oligonucleotide
cagggccggatttcccaaatgccgtcctgatctagggcgacaggagagga

SEQ ID NO: 295669 - DNA, 50 bp, Artificial
  Synthetic oligonucleotide
cagggcgcatcttctctcctcttcgggggacccacctcacggacacatgt

SEQ ID NO: 295670 - DNA, 50 bp, Artificial
  Synthetic oligonucleotide
cgttgcgctaaccgttccgtgagatggcggctttaccgtacctgggggag

SEQ ID NO: 295671 - DNA, 58 bp, Artificial
  Synthetic oligonucleotide
caagagctggtctaaaagctgtacgttatcgagcgcatagtttagttggaatacgaca

SEQ ID NO: 295672 - DNA, 50 bp, Artificial
  Synthetic oligonucleotide
aaatagagagccatctggtgggacaccggcgcgactgacggagtgacgcg

SEQ ID NO: 295673 - DNA, 50 bp, Artificial
  Synthetic oligonucleotide
caggggcgctgtgacctgccgtgtgatacttgcgccacgggtgctgctag

SEQ ID NO: 295674 - DNA, 50 bp, Artificial
  Synthetic oligonucleotide
aaatacgtgcctcacgcagccaacctccgggtgttcttccaagccccgcc

SEQ ID NO: 295675 - DNA, 50 bp, Artificial
  Synthetic oligonucleotide
cgttcgttgcatttcatttacaccatccacgatttccaaattatgtcctc

SEQ ID NO: 295676 - DNA, 50 bp, Artificial
  Synthetic oligonucleotide
aaagttgtcggtgtggaggcgaaggtccgcacaggccctcttgtgtgccc

SEQ ID NO: 295677 - DNA, 50 bp, Artificial
  Synthetic oligonucleotide
aaagttggtggggctcaactcgggccactcgaagctccaaacgcttccca

SEQ ID NO: 295678 - DNA, 50 bp, Artificial
  Synthetic oligonucleotide
aaagttggaaaggtcactctagagctcacccccaacccgtgggggacggc

SEQ ID NO: 295679 - DNA, 50 bp, Artificial
  Synthetic oligonucleotide
cgttcgaagggagggggccagaagagtgcgggtactcctctcaccgcggc

SEQ ID NO: 295680 - DNA, 50 bp, Artificial
  Synthetic oligonucleotide
aaagtgtccaagcagtcgcctcaggacgaaaggcgttcccatccgcctga

SEQ ID NO: 295681 - DNA, 50 bp, Artificial
  Synthetic oligonucleotide
cagggtcttaccgtcgggccgtagtattccacatattcatggatagttct

SEQ ID NO: 295682 - DNA, 58 bp, Artificial
  Synthetic oligonucleotide
acggagagcgcccgccgtgtcttgatgcccagtgcgcacatggaaggataggagtcca

SEQ ID NO: 295683 - DNA, 50 bp, Artificial
  Synthetic oligonucleotide
ccgtagaaccgtttgacggacacggcgttctctgccctttctgccgcata

SEQ ID NO: 295684 - DNA, 50 bp, Artificial
  Synthetic oligonucleotide
tgtcgagaatgcaaggatcggatatgatcagagcgaggtgggaatgcaaa

SEQ ID NO: 295685 - DNA, 50 bp, Artificial
  Synthetic oligonucleotide
aaaggccgggagccctgtagggagcgcgtcgagaggcaaacagcagtccc

SEQ ID NO: 295686 - DNA, 50 bp, Artificial
  Synthetic oligonucleotide
aaaggccctccctggagccaacggttgcaataggaacgcaatgcgcctta

SEQ ID NO: 295687 - DNA, 50 bp, Artificial
  Synthetic oligonucleotide
aaaggcccgcctgctaggaaacgaggagcaaacgccccttgcgtccattt

SEQ ID NO: 295688 - DNA, 50 bp, Artificial
  Synthetic oligonucleotide
aaaggcccaaacaggcttcgcgctcccgacctgtgcgtcttcgcgccctg

SEQ ID NO: 295689 - DNA, 50 bp, Artificial
  Synthetic oligonucleotide
aaaggcatcgcgcatgccataagccgggtgtccctgtcaggttccacgag

SEQ ID NO: 295690 - DNA, 50 bp, Artificial
  Synthetic oligonucleotide
aaaggcagcactggtcatgctcgatttgggggccaggtgcttgcaggact

SEQ ID NO: 295691 - DNA, 50 bp, Artificial
  Synthetic oligonucleotide
tgtcgtccttcgtctgcgcctttgcctcgtgagtcgccgctagttcgcac

SEQ ID NO: 295692 - DNA, 50 bp, Artificial
  Synthetic oligonucleotide
aaaggcaagacccctcggccaacgcttgtgcgggtgtaactgaacggtgc

SEQ ID NO: 295693 - DNA, 58 bp, Artificial
  Synthetic oligonucleotide
tgcgcatgcagacaaagtctgtataggcagacgcaccgatgccgctcgtctggggtag

SEQ ID NO: 295694 - DNA, 50 bp, Artificial
  Synthetic oligonucleotide
aaaggaggaacgcagcgatgcatggcagttagccggacgccgcaaatgga

SEQ ID NO: 295695 - DNA, 50 bp, Artificial
  Synthetic oligonucleotide
cagtcactcgcgtgcttggcacaaacgtgcagaggtcgccccatcagcct

SEQ ID NO: 295696 - DNA, 50 bp, Artificial
  Synthetic oligonucleotide
cggggcgctcccccttctgtgcgtccgtatctaggacgcccttctcacgc

SEQ ID NO: 295697 - DNA, 50 bp, Artificial
  Synthetic oligonucleotide
aaaggactatgaggcgtcgccgcgtaagacaggctttggtgcgacagccg

SEQ ID NO: 295698 - DNA, 50 bp, Artificial
  Synthetic oligonucleotide
aaaggacggagccttttgcgaaccgagtgctccgcgaaccagggaagtct

SEQ ID NO: 295699 - DNA, 50 bp, Artificial
  Synthetic oligonucleotide
aaaggacgccccgctccactctcccacctgcgacgaaggcaagacaaaac

SEQ ID NO: 295700 - DNA, 50 bp, Artificial
  Synthetic oligonucleotide
cggggctgcgcaagtgggtacgaggatagctcggatcaacagggggaagg

SEQ ID NO: 295701 - DNA, 50 bp, Artificial
  Synthetic oligonucleotide
aaaggaaggcgcctcgaacccagtagggctcgcctggtcgcagcccgata

SEQ ID NO: 295702 - DNA, 50 bp, Artificial
  Synthetic oligonucleotide
cgggggcagtttgtgggatctgtgttgcaactccgtaggggaggagggga

SEQ ID NO: 295703 - DNA, 50 bp, Artificial
  Synthetic oligonucleotide
aaaggaagcggacgcacgtaatggctagcgaggaagggccggcagcctgc

SEQ ID NO: 295704 - DNA, 58 bp, Artificial
  Synthetic oligonucleotide
ctccctcaaaggggatacaatataggcaacacacttgagatccctcaatacagaattc

SEQ ID NO: 295705 - DNA, 50 bp, Artificial
  Synthetic oligonucleotide
tgtgagtcttgtatggcaaccatagagggaaggcatgctacagggacctc

SEQ ID NO: 295706 - DNA, 50 bp, Artificial
  Synthetic oligonucleotide
cgggggcatgtacggaggcgccctactctttttctgtgcaatccgctcct

SEQ ID NO: 295707 - DNA, 50 bp, Artificial
  Synthetic oligonucleotide
aaagcttatcgtgatccacgagaactctcccgacacgcggtgccccaggc

SEQ ID NO: 295708 - DNA, 50 bp, Artificial
  Synthetic oligonucleotide
cagtgcatacgtgcctccacacccgcacatgggcgcattcggggtatttt

SEQ ID NO: 295709 - DNA, 50 bp, Artificial
  Synthetic oligonucleotide
aaagctgtctctgcggaagagggccgtacagacgcccagtgcatgcgcct

SEQ ID NO: 295710 - DNA, 50 bp, Artificial
  Synthetic oligonucleotide
aaagcgttcacgtgtagagtaatcctgtcggtgggcgcacgcgcggaaga

SEQ ID NO: 295711 - DNA, 50 bp, Artificial
  Synthetic oligonucleotide
aaagggggcggcagttcagcgcacatcggagaaagccgtgcgtctgtgtg

SEQ ID NO: 295712 - DNA, 50 bp, Artificial
  Synthetic oligonucleotide
aaaggggaccgaaggatggccgtaaggtcgtgttaccccaggtagcggta

SEQ ID NO: 295713 - DNA, 50 bp, Artificial
  Synthetic oligonucleotide
cagtacggagcgcagggggaagtgagtggagagtacgccgacgcacttct

SEQ ID NO: 295714 - DNA, 50 bp, Artificial
  Synthetic oligonucleotide
aaaggggaacatgtcccaacttgtgcggtaactcgacgcaagcgcgtggg

SEQ ID NO: 295715 - DNA, 54 bp, Artificial
  Synthetic oligonucleotide
aaactgtgtttctgtaacaagtctagaaagactttcaaaagctccttctttaca

SEQ ID NO: 295716 - DNA, 50 bp, Artificial
  Synthetic oligonucleotide
cgtgtttccccatatgttgtctgtaaaccccgttttgcctctaaattcgc

SEQ ID NO: 295717 - DNA, 50 bp, Artificial
  Synthetic oligonucleotide
cgtgtttagatgcgagtagcgaggggagagcgtgcgagagtgaaagagat

SEQ ID NO: 295718 - DNA, 50 bp, Artificial
  Synthetic oligonucleotide
aaaggggaacagggatcgctcagcgggggacaatgactacacagtggcgc

SEQ ID NO: 295719 - DNA, 50 bp, Artificial
  Synthetic oligonucleotide
aaagggcggcgctcgacaactggaggtgtatggacagtcggccaatgggg

SEQ ID NO: 295720 - DNA, 50 bp, Artificial
  Synthetic oligonucleotide
cggggaaaggctcactgctcgtgtcggggaccgcagttttgcctgctaca

SEQ ID NO: 295721 - DNA, 50 bp, Artificial
  Synthetic oligonucleotide
aaagggcgaagcgcctgttaggagccgagtctgccgaaggttctcgacgc

SEQ ID NO: 295722 - DNA, 50 bp, Artificial
  Synthetic oligonucleotide
cgtgtggatagggcgaaggggagagcgtctcgggacagtcggtgacacaa

SEQ ID NO: 295723 - DNA, 50 bp, Artificial
  Synthetic oligonucleotide
aaagggatgcatgcgctgaagcggggacagagcgcgacaggcaacgtagg

SEQ ID NO: 295724 - DNA, 50 bp, Artificial
  Synthetic oligonucleotide
aaagggagacgcacccgtggcgggaaaaactgccaagtggatgagcagca

SEQ ID NO: 295725 - DNA, 50 bp, Artificial
  Synthetic oligonucleotide
aaagggagaacggcgactcacgcggctcctgtcgtgcctctcttccgggg

SEQ ID NO: 295726 - DNA, 58 bp, Artificial
  Synthetic oligonucleotide
caaaccgccgtcatagtggccgtgatgaggagttatgaccatggatgaccgccaacga

SEQ ID NO: 295727 - DNA, 50 bp, Artificial
  Synthetic oligonucleotide
aaagggacacgcgtgcggaacgaacagtacctgacctcgcttgtgccgtt

SEQ ID NO: 295728 - DNA, 50 bp, Artificial
  Synthetic oligonucleotide
ccaacgtaggagaatgtgccgctataccccgtatgttagtaccattcacg

SEQ ID NO: 295729 - DNA, 50 bp, Artificial
  Synthetic oligonucleotide
aaaggctgccaggaccggtctctgtccgggactccacactgtccggaaga

SEQ ID NO: 295730 - DNA, 50 bp, Artificial
  Synthetic oligonucleotide
aaaggctcggcatgggagtctctgatgagcgatgggctccacccaaaccg

SEQ ID NO: 295731 - DNA, 50 bp, Artificial
  Synthetic oligonucleotide
aaaggctactgggcagattgctcggttcacaggtcagggaggcgcgtgga

SEQ ID NO: 295732 - DNA, 50 bp, Artificial
  Synthetic oligonucleotide
aaaggctacaaggggacccgcgagagctgggctcccatgcccacacaata

SEQ ID NO: 295733 - DNA, 50 bp, Artificial
  Synthetic oligonucleotide
cggggatttactgtcctcgctggagcctaaacgggcttcccgtggcacta

SEQ ID NO: 295734 - DNA, 50 bp, Artificial
  Synthetic oligonucleotide
aaaggcggacctgtgcgtggaggcagcggggtgtgcatcgacactatata

SEQ ID NO: 295735 - DNA, 50 bp, Artificial
  Synthetic oligonucleotide
aaaggcgcacctgggaagcagatgagacctctaaacccgccggtcggctc

SEQ ID NO: 295736 - DNA, 50 bp, Artificial
  Synthetic oligonucleotide
aaaggcgacggagcaagccaagaaaccggagtgggatgctgacggggtga

SEQ ID NO: 295737 - DNA, 52 bp, Artificial
  Synthetic oligonucleotide
ggacggatcaaataccggaccctaccctagcggtggggagaggctagtttcc

SEQ ID NO: 295738 - DNA, 58 bp, Artificial
  Synthetic oligonucleotide
tgtgctcaagtgctcgtcgcagttcagcagctacgtgccacgcttgacgcatcttgcc

SEQ ID NO: 295739 - DNA, 50 bp, Artificial
  Synthetic oligonucleotide
tgtcctccatatgcctcttgcgcaggtgagcgtacgggtccgtgcgtagc

SEQ ID NO: 295740 - DNA, 50 bp, Artificial
  Synthetic oligonucleotide
aaacagccggtgagggtagagtggcgggcgctcttggtccatactcgaca

SEQ ID NO: 295741 - DNA, 50 bp, Artificial
  Synthetic oligonucleotide
aaacagcccaaacccgaaaagcgacactcggcgacatgcctaccgacggg

SEQ ID NO: 295742 - DNA, 50 bp, Artificial
  Synthetic oligonucleotide
aaacacggggaaggcgagctcatctacgctaacggggaccgcttcaaggg

SEQ ID NO: 295743 - DNA, 50 bp, Artificial
  Synthetic oligonucleotide
aaacacggcccacacggggaacgcgtgtctgcctcatgcatgtgtagtcg

SEQ ID NO: 295744 - DNA, 50 bp, Artificial
  Synthetic oligonucleotide
ttgtaactactgtactacatttaagagctaaaggattatctttaggtgtt

SEQ ID NO: 295745 - DNA, 50 bp, Artificial
  Synthetic oligonucleotide
aaacacagacaagggctcacccaagcgcaagctacccgtgcggcgtggtt

SEQ ID NO: 295746 - DNA, 50 bp, Artificial
  Synthetic oligonucleotide
catctgcacgcagctctccgcacggccggttcacatgtcacgacactgaa

SEQ ID NO: 295747 - DNA, 50 bp, Artificial
  Synthetic oligonucleotide
cggtgggcagattaccgctgggttggttgacggcgcgatgctggtacgct

SEQ ID NO: 295748 - DNA, 50 bp, Artificial
  Synthetic oligonucleotide
cgtcaagacacccaacgtgacgggtgccgacgtgtgtggcgtgacgttct

SEQ ID NO: 295749 - DNA, 56 bp, Artificial
  Synthetic oligonucleotide
aaccaagtacatattgttcgaacaactctattttatacgcagccttaaatgtcacc

SEQ ID NO: 295750 - DNA, 50 bp, Artificial
  Synthetic oligonucleotide
aaacaaccgcagacttcgacgggactgggattccgagactggggccggac

SEQ ID NO: 295751 - DNA, 50 bp, Artificial
  Synthetic oligonucleotide
aaacaaagcgcggagcggagacaagagcgacgaccgctgttcgtgggtgc

SEQ ID NO: 295752 - DNA, 50 bp, Artificial
  Synthetic oligonucleotide
aaacaaaacattacgcacacgcgtccccttggcccaccggccacgataga

SEQ ID NO: 295753 - DNA, 50 bp, Artificial
  Synthetic oligonucleotide
aaaatttcgtcctctcacaagcggaccgcccccaaaccctgcgaggcatc

SEQ ID NO: 295754 - DNA, 50 bp, Artificial
  Synthetic oligonucleotide
aaaatggcggttagaagacgccccggtaatgacccctcggcgcgtcgcaa

SEQ ID NO: 295755 - DNA, 50 bp, Artificial
  Synthetic oligonucleotide
catgacagatgcagcacacagaaccttgcgctgcttcgcacgcgtctgcg

SEQ ID NO: 295756 - DNA, 50 bp, Artificial
  Synthetic oligonucleotide
aaaatgcgcgcactggacgcacgcgctgtcagagatagccggtacagtgt

SEQ ID NO: 295757 - DNA, 50 bp, Artificial
  Synthetic oligonucleotide
ttgtgccggaagtgggtactagctaatggcccttctgcggtcccgctccc

SEQ ID NO: 295758 - DNA, 50 bp, Artificial
  Synthetic oligonucleotide
aaaatgcccaccctgcgagtgaccgcactactaccgtatcgccgcctacc

SEQ ID NO: 295759 - DNA, 50 bp, Artificial
  Synthetic oligonucleotide
cgtatgcgtcgttggcgtcggacaaaacgccaccatagtgcgtgggtgca

SEQ ID NO: 295760 - DNA, 56 bp, Artificial
  Synthetic oligonucleotide
gcggttaatctttcctattccttacgtactctggctataacatttatacacttgaa

SEQ ID NO: 295761 - DNA, 50 bp, Artificial
  Synthetic oligonucleotide
cgtatctgcctctcgcgttgaagggtcaaattcgtctgtttcggcatcgt

SEQ ID NO: 295762 - DNA, 50 bp, Artificial
  Synthetic oligonucleotide
aaaagtgtgttgcggcgagcaaagtctggtgggatgcacctacccgtggg

SEQ ID NO: 295763 - DNA, 50 bp, Artificial
  Synthetic oligonucleotide
aaaagtgtccgcatctggcgtgtggctcgtgggcctctctctcaggggga

SEQ ID NO: 295764 - DNA, 50 bp, Artificial
  Synthetic oligonucleotide
aaaagtgcctcgcaggcctacacgagaacccataacgcacggcgggaagg

SEQ ID NO: 295765 - DNA, 50 bp, Artificial
  Synthetic oligonucleotide
aaaaggtccccggtactggcgttgatgtagggtggtgcaatgaacaggtc

SEQ ID NO: 295766 - DNA, 50 bp, Artificial
  Synthetic oligonucleotide
aaaccgagtgctggcgcctgaacatgacagaactgcgtggattggcacgg

SEQ ID NO: 295767 - DNA, 50 bp, Artificial
  Synthetic oligonucleotide
aaaccgaggagcgcacaggaagcactgacggcgcatgggaagtcagtaga

SEQ ID NO: 295768 - DNA, 50 bp, Artificial
  Synthetic oligonucleotide
aaacccgcagaggttcgatcccaagccccggcatctgatctcaccctccc

SEQ ID NO: 295769 - DNA, 50 bp, Artificial
  Synthetic oligonucleotide
cggtctcgtgccttcgctcgcgcactccgctttctgtggatgcctaccct

SEQ ID NO: 295770 - DNA, 50 bp, Artificial
  Synthetic oligonucleotide
aaacccgaaaagcgacactcggcgacatgcctaccgacgggtcccttcca

SEQ ID NO: 295771 - DNA, 57 bp, Artificial
  Synthetic oligonucleotide
ccttcaggttggggatgtagtcgaaatcggggacagcgcaagcctcaagcctggtaa

SEQ ID NO: 295772 - DNA, 50 bp, Artificial
  Synthetic oligonucleotide
catcgcgtacagaggttggcctgccggagtgtgcccctcgcttggcggag

SEQ ID NO: 295773 - DNA, 50 bp, Artificial
  Synthetic oligonucleotide
aaaccccctggcgactaggttcctaggccgaggctctcccgttggcacct

SEQ ID NO: 295774 - DNA, 50 bp, Artificial
  Synthetic oligonucleotide
aaacccacctgtctgcgctgagtctcgcacagcgaaggggccagctagaa

SEQ ID NO: 295775 - DNA, 50 bp, Artificial
  Synthetic oligonucleotide
cattgcccccattgaggggtcacgcgacgtcagtctgtgaggggacgcgg

SEQ ID NO: 295776 - DNA, 50 bp, Artificial
  Synthetic oligonucleotide
aaaccagggaagagttccgtgtttgcatgagccgcacccgtgagtgggct

SEQ ID NO: 295777 - DNA, 50 bp, Artificial
  Synthetic oligonucleotide
cgtcagccctccgcctgaattcctcggctgcgcacagcaggtaatcacga

SEQ ID NO: 295778 - DNA, 50 bp, Artificial
  Synthetic oligonucleotide
aaaccactgcggacgtttgcgttgaccctggtttggtggtgcagggagtc

SEQ ID NO: 295779 - DNA, 50 bp, Artificial
  Synthetic oligonucleotide
aaaccactgacggtacgccagtcctcgcaacgagacggcggaaactgggg

SEQ ID NO: 295780 - DNA, 50 bp, Artificial
  Synthetic oligonucleotide
aaaccactccattaggcgagcgcaatgtatggggctccgacaccgggtga

SEQ ID NO: 295781 - DNA, 50 bp, Artificial
  Synthetic oligonucleotide
aaaccacgactgtgctgtcgtctgatcgtagcaacccgagccgcgggaag

SEQ ID NO: 295782 - DNA, 56 bp, Artificial
  Synthetic oligonucleotide
atatggactttctagaataatgtttacagaattagcttcagaagggttaatacctg

SEQ ID NO: 295783 - DNA, 50 bp, Artificial
  Synthetic oligonucleotide
aaaccaagctgctcaaaagggcggggaatgccccttcggtgagagcccac

SEQ ID NO: 295784 - DNA, 50 bp, Artificial
  Synthetic oligonucleotide
aaaccaacaagggggtcgtgacgcagaagtgaagggtgcgcgcttcaggc

SEQ ID NO: 295785 - DNA, 50 bp, Artificial
  Synthetic oligonucleotide
aaacatgcgcctcaacccgggcataaactcggctagcacacgcgcacgta

SEQ ID NO: 295786 - DNA, 50 bp, Artificial
  Synthetic oligonucleotide
aaacatcctacgcgcaagcgcaccgcaacacgagaataccagcagtccgc

SEQ ID NO: 295787 - DNA, 50 bp, Artificial
  Synthetic oligonucleotide
aaacagttgcgctcgcacgggtcagggcagatgggtctaagcggtcgaaa

SEQ ID NO: 295788 - DNA, 50 bp, Artificial
  Synthetic oligonucleotide
aaacagggcggtgtggagtgggcgcttagagctacgctgattgcgcggtc

SEQ ID NO: 295789 - DNA, 50 bp, Artificial
  Synthetic oligonucleotide
aaacaggctacaggttcgagtgcggcggattcttcgtacgcgttgcgggg

SEQ ID NO: 295790 - DNA, 50 bp, Artificial
  Synthetic oligonucleotide
aaacaggcacggcccaatcaggcttccacgacccatcgcaagcttggaca

SEQ ID NO: 295791 - DNA, 50 bp, Artificial
  Synthetic oligonucleotide
aaacagctcccgcgtgtgcctggagtaacgccttccgcggttccccacca

SEQ ID NO: 295792 - DNA, 50 bp, Artificial
  Synthetic oligonucleotide
cgtagatcggcgtagcccctatgaacgtcgcagttgtcacgtcgtgcggc

SEQ ID NO: 295793 - DNA, 58 bp, Artificial
  Synthetic oligonucleotide
aggaggggcacacgcgagaagcgcgagagagggaacgcagactatgtcctatcggcag

SEQ ID NO: 295794 - DNA, 50 bp, Artificial
  Synthetic oligonucleotide
aaaactcgccagcttgccctagcaccccggttatagatccgcgtgctgca

SEQ ID NO: 295795 - DNA, 50 bp, Artificial
  Synthetic oligonucleotide
aaaactccgacggggcgggcacaacgaccggttgcgtgtcaatgggacac

SEQ ID NO: 295796 - DNA, 50 bp, Artificial
  Synthetic oligonucleotide
aaaacgtcaatgactggcccgacaacttgggcgttgcacactctgcccgg

SEQ ID NO: 295797 - DNA, 50 bp, Artificial
  Synthetic oligonucleotide
aaaacgggtgatgcgcagagtcggcaagcattcaacaatgcagcgtgcgt

SEQ ID NO: 295798 - DNA, 50 bp, Artificial
  Synthetic oligonucleotide
aaaacggctccaaattgttgggcggctgcaatgacctgagggtggggcgt

SEQ ID NO: 295799 - DNA, 50 bp, Artificial
  Synthetic oligonucleotide
aaaacggaggtcccttcttgtgggctactcaccctgggcccctccacagc

SEQ ID NO: 295800 - DNA, 50 bp, Artificial
  Synthetic oligonucleotide
aaaacgcgtctgtgtctaacccgtccgaatcccccgtatggagcgcacgg

SEQ ID NO: 295801 - DNA, 50 bp, Artificial
  Synthetic oligonucleotide
catggcgtgccgcttaccctcgtccgccacagttactgacacattgcgga

SEQ ID NO: 295802 - DNA, 50 bp, Artificial
  Synthetic oligonucleotide
aaaacgacgcaccccaatcggcagccacggaggtcgtcagaggctctgaa

SEQ ID NO: 295803 - DNA, 50 bp, Artificial
  Synthetic oligonucleotide
aaaaccttccgtggcaaccgcagggggaacggagtcctgtgtcgtcacag

SEQ ID NO: 295804 - DNA, 52 bp, Artificial
  Synthetic oligonucleotide
agggccggtagattcggcacaaagtaccccgttggctccgtaaccactttca

SEQ ID NO: 295805 - DNA, 50 bp, Artificial
  Synthetic oligonucleotide
aaaaccgtcctctggcaagcgatcatacgctgcctccgcccccatccacg

SEQ ID NO: 295806 - DNA, 50 bp, Artificial
  Synthetic oligonucleotide
catggtgaaagttcctctcatgggtggcgtgagtcggttgggcaaggcgc

SEQ ID NO: 295807 - DNA, 50 bp, Artificial
  Synthetic oligonucleotide
catgtctgcgtcgcgggcccatgcttcgtgttcgtatggcggagctttac

SEQ ID NO: 295808 - DNA, 50 bp, Artificial
  Synthetic oligonucleotide
aaaaccgaacggagaggagccctgacgtgttctgctgacaacgcgcggat

SEQ ID NO: 295809 - DNA, 50 bp, Artificial
  Synthetic oligonucleotide
cgtacccaacacagccatacccgcagctgttgcctcgcaaggtgccgttt

SEQ ID NO: 295810 - DNA, 50 bp, Artificial
  Synthetic oligonucleotide
aaaacccaaacgggcatgcctgcgacagcgcttgctgtgaacaggagggg

SEQ ID NO: 295811 - DNA, 50 bp, Artificial
  Synthetic oligonucleotide
catgtctgctctgcagtgcttacgtataattcgcaggtgccgtgggctct

SEQ ID NO: 295812 - DNA, 50 bp, Artificial
  Synthetic oligonucleotide
cggttgttcgtctgcgactctgtcagcggcaccggacacgagaagttgcg

SEQ ID NO: 295813 - DNA, 50 bp, Artificial
  Synthetic oligonucleotide
aaaacatcgcggaggggcttctccggtttccgaaggtgagcgacagctcg

SEQ ID NO: 295814 - DNA, 50 bp, Artificial
  Synthetic oligonucleotide
aaaacagcggactcgattcccctcgccatcgcgctcttacgcccccacat

SEQ ID NO: 295815 - DNA, 58 bp, Artificial
  Synthetic oligonucleotide
tcactgcaaccccagagacagaccgacaggaccaactcaagattttcgtcgcctgcac

SEQ ID NO: 295816 - DNA, 50 bp, Artificial
  Synthetic oligonucleotide
catgtgttcataaaacttcgatcacagtctgctattcgggtgcacggttt

SEQ ID NO: 295817 - DNA, 50 bp, Artificial
  Synthetic oligonucleotide
aaaacacgcagaccagaaatgccccaccgagagagctcgaccactgcccc

SEQ ID NO: 295818 - DNA, 50 bp, Artificial
  Synthetic oligonucleotide
tttaatgccgcccatttaccgctctgctacagcccaccacatcttgagga

SEQ ID NO: 295819 - DNA, 50 bp, Artificial
  Synthetic oligonucleotide
cattcctcaggccactgccggctaggctttgcggtgcgttgtacggagcc

SEQ ID NO: 295820 - DNA, 50 bp, Artificial
  Synthetic oligonucleotide
aaaaggcgtccaaacgcacatccttgcggtccaaacggggcagtcagagc

SEQ ID NO: 295821 - DNA, 50 bp, Artificial
  Synthetic oligonucleotide
aaaaggcccgactggggcggtttcacaagtgctcgcgtttggagtggtta

SEQ ID NO: 295822 - DNA, 50 bp, Artificial
  Synthetic oligonucleotide
aaaaggcaggccacatccatgacaattcgacacgtccgcgtcgtgcaccc

SEQ ID NO: 295823 - DNA, 50 bp, Artificial
  Synthetic oligonucleotide
cggtgtaactcccgcgtcgtccattgacacgcactgggccttctcgagtg

SEQ ID NO: 295824 - DNA, 50 bp, Artificial
  Synthetic oligonucleotide
aaaaggacgctgaggccatggacagacacctcactgccggccgagcttgc

SEQ ID NO: 295825 - DNA, 50 bp, Artificial
  Synthetic oligonucleotide
catgcactggttttagctgaagccctatttcctgtccaatcctccatgtt

SEQ ID NO: 295826 - DNA, 57 bp, Artificial
  Synthetic oligonucleotide
gcgaaactatagaaatagttggcctgagagaaactaggacaaccacaataacagggc

SEQ ID NO: 295827 - DNA, 50 bp, Artificial
  Synthetic oligonucleotide
aaaagctcgcttccctagcaggaaacggctgcctaccgctcgcagtgcgt

SEQ ID NO: 295828 - DNA, 50 bp, Artificial
  Synthetic oligonucleotide
cattccactggtcccgcatttgtcgccgctaaccgcttcccctcgtcact

SEQ ID NO: 295829 - DNA, 50 bp, Artificial
  Synthetic oligonucleotide
aaaagcgtctgtgtcgatacacttgcatgcgggtgccctctgcagtgccc

SEQ ID NO: 295830 - DNA, 50 bp, Artificial
  Synthetic oligonucleotide
aaaagcggaaggccctccaggtgctgacaagcgtgtgacgcctcctgtcc

SEQ ID NO: 295831 - DNA, 50 bp, Artificial
  Synthetic oligonucleotide
cattcatgcgattaggccgagtgcccgcctgactcgagtgtgtctcgccc

SEQ ID NO: 295832 - DNA, 50 bp, Artificial
  Synthetic oligonucleotide
aaaagcgagggcatgagaccaaaatcggccccgaggttgaccaaagcgcc

SEQ ID NO: 295833 - DNA, 50 bp, Artificial
  Synthetic oligonucleotide
aaaagccgcacggtgcgtcagcgaggtcactttttctcggtgcgttggaa

SEQ ID NO: 295834 - DNA, 50 bp, Artificial
  Synthetic oligonucleotide
aaaagccaccacgtcccgcggaggcgacccctcatttgcttctcatctcc

SEQ ID NO: 295835 - DNA, 50 bp, Artificial
  Synthetic oligonucleotide
aaaagcagcggatgtcacgcgcaagaagagcccgacagttccgttcgtgc

SEQ ID NO: 295836 - DNA, 50 bp, Artificial
  Synthetic oligonucleotide
aaaagcacgcccctgcctgtcgcctctgtcttccctccacggttgacctc

SEQ ID NO: 295837 - DNA, 58 bp, Artificial
  Synthetic oligonucleotide
tcttattaatggaagcgctggtacctgggtatccaatccagtgctcctcattcggcat

SEQ ID NO: 295838 - DNA, 50 bp, Artificial
  Synthetic oligonucleotide
aaaagagtggggatgttgaggcggccagacgtgaggagccgggaccacac

SEQ ID NO: 295839 - DNA, 50 bp, Artificial
  Synthetic oligonucleotide
cgtagcgcgagggggctgtgtgcagatacttctggccgacgttgggtgaa

SEQ ID NO: 295840 - DNA, 50 bp, Artificial
  Synthetic oligonucleotide
aaaagaccacgggcgtctgagtcccctggagaacacagcggcaggacata

SEQ ID NO: 295841 - DNA, 50 bp, Artificial
  Synthetic oligonucleotide
catgctggataatccaccaccggcggaggatgtcgcgttatgcgagcggc

SEQ ID NO: 295842 - DNA, 50 bp, Artificial
  Synthetic oligonucleotide
ccgtctggggagccctgttcggctagcactacggcattgagcgtccgtaa

SEQ ID NO: 295843 - DNA, 50 bp, Artificial
  Synthetic oligonucleotide
aaaactgacttcggcctccgctggctgggagctggaggtttggcgcacga

SEQ ID NO: 295844 - DNA, 50 bp, Artificial
  Synthetic oligonucleotide
aaacgggcgtgtacgaatgcgcatgtgtccttgcgtgtgcgtcgagaagc

SEQ ID NO: 295845 - DNA, 50 bp, Artificial
  Synthetic oligonucleotide
cggtaatgcacgcaaatctgtattaaaaggattcgcggcaacaaacttag

SEQ ID NO: 295846 - DNA, 50 bp, Artificial
  Synthetic oligonucleotide
aaacgggccgagggcccacgagcagtaacgcatggtgtcgtggattctcg

SEQ ID NO: 295847 - DNA, 50 bp, Artificial
  Synthetic oligonucleotide
aaacggctgcagggaagtctccgttctgtcgctgcccaacgaggcctctt

SEQ ID NO: 295848 - DNA, 59 bp, Artificial
  Synthetic oligonucleotide
attaatatgtggtttcttctattatcaagattcaatgtttggttatacagctaatatat

SEQ ID NO: 295849 - DNA, 58 bp, Artificial
  Synthetic oligonucleotide
atgcatacaaacaataatgagtttaatagattaaattcaagaagtggatacaactttg

SEQ ID NO: 295850 - DNA, 50 bp, Artificial
  Synthetic oligonucleotide
ccgtcctgtcatattcgcagtcgctagcccgacgtggctcatccaagcga

SEQ ID NO: 295851 - DNA, 50 bp, Artificial
  Synthetic oligonucleotide
aaacggccagatgggtacagtcagagcttctgccgcagagcacacgcctc

SEQ ID NO: 295852 - DNA, 50 bp, Artificial
  Synthetic oligonucleotide
aaacggatgttgagaggccacgggggtgctcgcgtctgcagggtgcaacg

SEQ ID NO: 295853 - DNA, 50 bp, Artificial
  Synthetic oligonucleotide
cgtctctgtgtgacctcccacgattacaacggaacccctgctgctagtta

SEQ ID NO: 295854 - DNA, 50 bp, Artificial
  Synthetic oligonucleotide
ttcctcgctgttgctggttgattaactccgctagcgtagccttgcagacg

SEQ ID NO: 295855 - DNA, 50 bp, Artificial
  Synthetic oligonucleotide
aaacggatcggcacaacaccctccggcagggctcacgtaagtcacttggc

SEQ ID NO: 295856 - DNA, 50 bp, Artificial
  Synthetic oligonucleotide
aaacggaaccgttactcgtgacacaacgggactgcacgacgcccgcctag

SEQ ID NO: 295857 - DNA, 50 bp, Artificial
  Synthetic oligonucleotide
aaacgcttgaccatgtaagcgctttgcctcgaacgtccgtggcccgtgca

SEQ ID NO: 295858 - DNA, 50 bp, Artificial
  Synthetic oligonucleotide
aaacgctggtctacacggccaatcgggcaccgcacaactgtgttgcagcc

SEQ ID NO: 295859 - DNA, 50 bp, Artificial
  Synthetic oligonucleotide
aaacgctccgtctgggatgcatcaaagccctcgagatggctcggcgggca

SEQ ID NO: 295860 - DNA, 58 bp, Artificial
  Synthetic oligonucleotide
ccatatagtgcgtccgcatcagacccacgtcctgactgaagtggtgccatgctcctta

SEQ ID NO: 295861 - DNA, 50 bp, Artificial
  Synthetic oligonucleotide
aaacgctcagtgcagttcttccgcctttattcggcggttccctcggggct

SEQ ID NO: 295862 - DNA, 50 bp, Artificial
  Synthetic oligonucleotide
aaacgctaggggagcggcgtgactctgtgcagtgcgtgggttgctgtgtg

SEQ ID NO: 295863 - DNA, 50 bp, Artificial
  Synthetic oligonucleotide
aaacgctacggggcgggcgcacagttgcaaggaggcggacaacgttgttg

SEQ ID NO: 295864 - DNA, 50 bp, Artificial
  Synthetic oligonucleotide
aaacgctacgacgcaccattcgcggcacctgaggttgccttccgggaggt

SEQ ID NO: 295865 - DNA, 50 bp, Artificial
  Synthetic oligonucleotide
aaacgcgtgggactcgaggcgaaacatttttccgcgtgggcaggctacgg

SEQ ID NO: 295866 - DNA, 50 bp, Artificial
  Synthetic oligonucleotide
aaacgcgagacccactgcttgctcgcggaggatagggtggacaacaccac

SEQ ID NO: 295867 - DNA, 50 bp, Artificial
  Synthetic oligonucleotide
aaacgcgacagaccaatcgcgtgcagtcttgcgggcacaggaatcgggga

SEQ ID NO: 295868 - DNA, 50 bp, Artificial
  Synthetic oligonucleotide
aaacgcctcgacacccttccgacctccggagcccgcgcaaaacgcgatcc

SEQ ID NO: 295869 - DNA, 50 bp, Artificial
  Synthetic oligonucleotide
aaacgcctcagggataattttcgacggggcaaactccgcgggggagaccg

SEQ ID NO: 295870 - DNA, 50 bp, Artificial
  Synthetic oligonucleotide
aaacgcccacaagcgtggtgctgacaccagagtccgtcccgccgatggtc

SEQ ID NO: 295871 - DNA, 58 bp, Artificial
  Synthetic oligonucleotide
gcagcattggctcacgaacgcgaatcctgtccagtgggcaattctattaagcggccta

SEQ ID NO: 295872 - DNA, 50 bp, Artificial
  Synthetic oligonucleotide
cgtgaggatgtttagcagtcctcgagtctccccaccccgtcgccccacgc

SEQ ID NO: 295873 - DNA, 50 bp, Artificial
  Synthetic oligonucleotide
aaactccgtgtaggtcttcgcggcacccggcttagtgagcaccatacccc

SEQ ID NO: 295874 - DNA, 50 bp, Artificial
  Synthetic oligonucleotide
aaactccgggagacggaaagccacagatcggggtctcaaggcaccgcacc

SEQ ID NO: 295875 - DNA, 50 bp, Artificial
  Synthetic oligonucleotide
aaactccgcgctgatacgacggaaatgaggtgcccatggcgtgcctagcg

SEQ ID NO: 295876 - DNA, 50 bp, Artificial
  Synthetic oligonucleotide
aaactcccacctggcaacgcataggaaggcgctgcgaagccgcactccat

SEQ ID NO: 295877 - DNA, 50 bp, Artificial
  Synthetic oligonucleotide
aaactcaggcagtctcgcgggctccaaatcgtgatcccgacacgtcgaga

SEQ ID NO: 295878 - DNA, 50 bp, Artificial
  Synthetic oligonucleotide
catttgacgcagttgctgagttgttggcgggccagggtggatgacgcgtt

SEQ ID NO: 295879 - DNA, 50 bp, Artificial
  Synthetic oligonucleotide
cgtgacgggagccttagtagcatgagccgcgctgtcacatcccatgaggg

SEQ ID NO: 295880 - DNA, 50 bp, Artificial
  Synthetic oligonucleotide
aaactcaagggcgactgctcctccttggagcgccaaaccaagctgtgcga

SEQ ID NO: 295881 - DNA, 50 bp, Artificial
  Synthetic oligonucleotide
aaacgttgtggcaccatgcaagataccaggccgagtttaggtggggcgcg

SEQ ID NO: 295882 - DNA, 57 bp, Artificial
  Synthetic oligonucleotide
ccctgcacccgccatacttgttggtcttggtgtactcccttagcagtggcaaagcgt

SEQ ID NO: 295883 - DNA, 50 bp, Artificial
  Synthetic oligonucleotide
cgtgaagggcgcgacggacgttctatacacctagcagcgtgcacccgaaa

SEQ ID NO: 295884 - DNA, 50 bp, Artificial
  Synthetic oligonucleotide
aaacgttctcgcaggtcacacatggaggccccggctaggaaaagagccgc

SEQ ID NO: 295885 - DNA, 50 bp, Artificial
  Synthetic oligonucleotide
aaacgttcatctcggttacctcgggggctgtgcggcaacagactgtgcgc

SEQ ID NO: 295886 - DNA, 50 bp, Artificial
  Synthetic oligonucleotide
aaacgtggctgcccccgtgagtgccgctaacaggaggtcagggtcgttaa

SEQ ID NO: 295887 - DNA, 50 bp, Artificial
  Synthetic oligonucleotide
aaacgtgccaacaccgtcgcagcctctttcccgctgcattcgcgctcctt

SEQ ID NO: 295888 - DNA, 50 bp, Artificial
  Synthetic oligonucleotide
aaacgtgcacccaggatccctcccgcgttcggaatgcaacgccaacttgt

SEQ ID NO: 295889 - DNA, 50 bp, Artificial
  Synthetic oligonucleotide
aaacgtctccactgcccgcgagcttcctagcacctgcgtcctgagacaca

SEQ ID NO: 295890 - DNA, 50 bp, Artificial
  Synthetic oligonucleotide
aaacgtcgtgagagagcgggccagtgcgctcactaccttgtctgcatgcg

SEQ ID NO: 295891 - DNA, 50 bp, Artificial
  Synthetic oligonucleotide
ccgtggacgggagtgctgccacagttgggagtggcattcagaccgatcat

SEQ ID NO: 295892 - DNA, 50 bp, Artificial
  Synthetic oligonucleotide
aaacgtattcgcctcactgccgtgtcgctgcaacgggcccttagcgcgtg

SEQ ID NO: 295893 - DNA, 58 bp, Artificial
  Synthetic oligonucleotide
cctgcatctaaattgcctagtaaagcagatttcttatataacttaaaagactcgcacg

SEQ ID NO: 295894 - DNA, 50 bp, Artificial
  Synthetic oligonucleotide
aaacgtagcccgccccaaagcgagactcgtggtgcgaagcagaggagtgc

SEQ ID NO: 295895 - DNA, 50 bp, Artificial
  Synthetic oligonucleotide
aaacgtactgaaacgcgggcgggctgtaacacggaagtgaggacggcgca

SEQ ID NO: 295896 - DNA, 50 bp, Artificial
  Synthetic oligonucleotide
aaacgggtctgctcggaccggggctagtgagggctcgtcgaatcgtgcgc

SEQ ID NO: 295897 - DNA, 50 bp, Artificial
  Synthetic oligonucleotide
aaacggggcacggaacactacagcgtcgttgcaagccgcgggacacgtag

SEQ ID NO: 295898 - DNA, 50 bp, Artificial
  Synthetic oligonucleotide
ttctttccagcgtccataggtgtcgttcgacgcatcgaccgatccacatc

SEQ ID NO: 295899 - DNA, 50 bp, Artificial
  Synthetic oligonucleotide
aaacctggtcggctcttgtcgctgcaagccttgttgtcgctcccgaggcc

SEQ ID NO: 295900 - DNA, 50 bp, Artificial
  Synthetic oligonucleotide
aaacctccacgggagacgggaccagtgcctgggaaaccgcggatttctga

SEQ ID NO: 295901 - DNA, 50 bp, Artificial
  Synthetic oligonucleotide
aaacctcattaaggacctcagcccgcgccgtttggacagcccagtgccgc

SEQ ID NO: 295902 - DNA, 50 bp, Artificial
  Synthetic oligonucleotide
cattgcctggatccctggccgtacttcttcgggtgaacgttctgaatgca

SEQ ID NO: 295903 - DNA, 50 bp, Artificial
  Synthetic oligonucleotide
catcgaatgcccggtagacatgtggactgctagccgacgaggctagacca

SEQ ID NO: 295904 - DNA, 57 bp, Artificial
  Synthetic oligonucleotide
cactaatgatatgctcccaattaaacgcctttcgtgaaaataacatgttcgaaaatc

SEQ ID NO: 295905 - DNA, 50 bp, Artificial
  Synthetic oligonucleotide
aaacctcagtcccgtcctttccaaggccgccacccctaggcatccaacga

SEQ ID NO: 295906 - DNA, 50 bp, Artificial
  Synthetic oligonucleotide
aaacctcaagtcgacgtccagcggggacacgaaagcgtgggttgacgcgt

SEQ ID NO: 295907 - DNA, 50 bp, Artificial
  Synthetic oligonucleotide
aaaccgttcccccgcagctggcaattccccaaaccagtgccgacacaagg

SEQ ID NO: 295908 - DNA, 50 bp, Artificial
  Synthetic oligonucleotide
ccgtgatggcatggggctgagttttccatgagtgccggatgcgaggccaa

SEQ ID NO: 295909 - DNA, 50 bp, Artificial
  Synthetic oligonucleotide
cggtcgtggctgcacatgcgcgtcgttgcctagcgcggttctctttttgg

SEQ ID NO: 295910 - DNA, 50 bp, Artificial
  Synthetic oligonucleotide
aaaccgtctggggtgtggagcaagctacggttctggtagggcgatcgctg

SEQ ID NO: 295911 - DNA, 50 bp, Artificial
  Synthetic oligonucleotide
aaaccgtccccacggtcccgaggtccgctagacactccaaacccacagac

SEQ ID NO: 295912 - DNA, 50 bp, Artificial
  Synthetic oligonucleotide
aaaccggggagggcgggatgaccgaagcgacctgttgtcaacagctcttt

SEQ ID NO: 295913 - DNA, 50 bp, Artificial
  Synthetic oligonucleotide
aaaccgggccgtgatttcgaggttgatcccaccggctgccccgctattgt

SEQ ID NO: 295914 - DNA, 50 bp, Artificial
  Synthetic oligonucleotide
catcgcaagttgcctggcagccgctcccattgggcaggtccccatccggt

SEQ ID NO: 295915 - DNA, 58 bp, Artificial
  Synthetic oligonucleotide
gagagcacacgtgtgagaaggttcgttggacgcacagcgcacaagttgcgccccactg

SEQ ID NO: 295916 - DNA, 50 bp, Artificial
  Synthetic oligonucleotide
aaaccggcggtaatggcttgcaaccgagtgcactacaatcgggtcgcacg

SEQ ID NO: 295917 - DNA, 50 bp, Artificial
  Synthetic oligonucleotide
aaaccgcggaacgtccttcctgtacccgcgtcgaagtccaacaatcgcgc

SEQ ID NO: 295918 - DNA, 50 bp, Artificial
  Synthetic oligonucleotide
aaaccgcacgaggacagtctgccaatagcgccaaaggagcgcatctccgg

SEQ ID NO: 295919 - DNA, 50 bp, Artificial
  Synthetic oligonucleotide
ttgccgcacacatagtggcgttgataagagcctcgagagtagacagtgtg

SEQ ID NO: 295920 - DNA, 50 bp, Artificial
  Synthetic oligonucleotide
aaaccgattcaagcctcgggagcacgtacggtcgagttgccgctacgggc

SEQ ID NO: 295921 - DNA, 50 bp, Artificial
  Synthetic oligonucleotide
aaaccgatgggtcggtgttctccgcctccgtcctcgaaccacccgttgac

SEQ ID NO: 295922 - DNA, 50 bp, Artificial
  Synthetic oligonucleotide
aaaccgatagccacgtcgctcgcatcggcctgaaccacatagcgtctgga

SEQ ID NO: 295923 - DNA, 50 bp, Artificial
  Synthetic oligonucleotide
aaacgcagcatgctactccctgatcttcacgcgcccgagagagtccgccc

SEQ ID NO: 295924 - DNA, 50 bp, Artificial
  Synthetic oligonucleotide
aaacgcacggctcaacctgtcgtgatggctcacgatccaggcaccctagc

SEQ ID NO: 295925 - DNA, 50 bp, Artificial
  Synthetic oligonucleotide
aaacgcacaatggtcactcccgcagccgtgtgagctctccctggacggcc

SEQ ID NO: 295926 - DNA, 58 bp, Artificial
  Synthetic oligonucleotide
gcgcaaagaccgcccacacacacatcaggtggcgcttttctgcagctcgcacggccct

SEQ ID NO: 295927 - DNA, 50 bp, Artificial
  Synthetic oligonucleotide
aaacgattcgacacttctcgaaggcctgccaggatacgccccgcccatcc

SEQ ID NO: 295928 - DNA, 50 bp, Artificial
  Synthetic oligonucleotide
aaacgatccagcgtgttactgcgcacaccgacccacctgccaaccgcact

SEQ ID NO: 295929 - DNA, 50 bp, Artificial
  Synthetic oligonucleotide
aaacgatcacagcgcagtgtagcaacgggagggatggtctaacccgccgc

SEQ ID NO: 295930 - DNA, 50 bp, Artificial
  Synthetic oligonucleotide
ttcggtttgcagctcaggtgttcaccataccgtgctcatgtagcatgcaa

SEQ ID NO: 295931 - DNA, 50 bp, Artificial
  Synthetic oligonucleotide
aaacgaggggcgtagaaggtgggaacgcgcgcctggacaacataaaacgc

SEQ ID NO: 295932 - DNA, 50 bp, Artificial
  Synthetic oligonucleotide
aaacgagacggcgtcaagccctccacctcgagatactggcgacaggtcgc

SEQ ID NO: 295933 - DNA, 50 bp, Artificial
  Synthetic oligonucleotide
aaacgagacgcgtgacgcaaatcacagctcggcgcggtctgtagctccac

SEQ ID NO: 295934 - DNA, 50 bp, Artificial
  Synthetic oligonucleotide
cgtcggtggcaggaccgcaggagttccctcgccggccccacaccagtatc

SEQ ID NO: 295935 - DNA, 50 bp, Artificial
  Synthetic oligonucleotide
aaacgacgtgcctacgctagccgtcgctggccgggtctcgctccacggaa

SEQ ID NO: 295936 - DNA, 50 bp, Artificial
  Synthetic oligonucleotide
aaacgacgggaccactttccaggtagcagggcgggcagagaacttccctc

SEQ ID NO: 295937 - DNA, 58 bp, Artificial
  Synthetic oligonucleotide
ggtgtgagcgcgacggctcagaggtaccagcctccttcccattacttgaagtgtctcg

SEQ ID NO: 295938 - DNA, 50 bp, Artificial
  Synthetic oligonucleotide
aaacgacgagaagcgaagggtacgccgagaggacagggagtgtgtcgccg

SEQ ID NO: 295939 - DNA, 50 bp, Artificial
  Synthetic oligonucleotide
aaacgacctgccttccgctactgtgagtgaagccctcactgcgaggggga

SEQ ID NO: 295940 - DNA, 50 bp, Artificial
  Synthetic oligonucleotide
aaacgacccatttcgttggaaacccgagggggtaacagcgcgcaatcgga

SEQ ID NO: 295941 - DNA, 50 bp, Artificial
  Synthetic oligonucleotide
ttctctttaactcgtcgttggatggccagacatacccgctgatgatccga

SEQ ID NO: 295942 - DNA, 50 bp, Artificial
  Synthetic oligonucleotide
aaacgacacgcgagacgggagccttccacggggtcttccccattccatcc

SEQ ID NO: 295943 - DNA, 50 bp, Artificial
  Synthetic oligonucleotide
cattgctgggtggcgcttggtaatgtgggcaggcgcagagtagctagggc

SEQ ID NO: 295944 - DNA, 50 bp, Artificial
  Synthetic oligonucleotide
aaacgacacccctgcgtgggcggtcggacttggaatcgctttagagcgtt

SEQ ID NO: 295945 - DNA, 50 bp, Artificial
  Synthetic oligonucleotide
aaacgacaatggcagaatgccgaggttcggtcctgcgtgaccgtacgcga

SEQ ID NO: 295946 - DNA, 50 bp, Artificial
  Synthetic oligonucleotide
aaaccttggactgcgtggagtcacaccaagccgtggcccaaacctccgcg

SEQ ID NO: 295947 - DNA, 50 bp, Artificial
  Synthetic oligonucleotide
aaaccttccggggaagggggttcgcatcgcgcgtcacttcaggggtttgc

SEQ ID NO: 295948 - DNA, 58 bp, Artificial
  Synthetic oligonucleotide
ctaatggtacacttgatgtagtccatactctatgataattcatagctgaaacagtctg

SEQ ID NO: 295949 - DNA, 50 bp, Artificial
  Synthetic oligonucleotide
cggataatctgaatgctgctacgttgagcacggtgtgatcctgcaagttc

SEQ ID NO: 295950 - DNA, 50 bp, Artificial
  Synthetic oligonucleotide
aacctgcgggacagagagggctacgccgtaaggtatggggtcacggcggt

SEQ ID NO: 295951 - DNA, 50 bp, Artificial
  Synthetic oligonucleotide
aacctgcggccggggtctgcgtagctccgcgagaaggaatatctcggggg

SEQ ID NO: 295952 - DNA, 50 bp, Artificial
  Synthetic oligonucleotide
aacctgagcgaggcaatgcaacgggcggagaggtacatcaaggggaagga

SEQ ID NO: 295953 - DNA, 50 bp, Artificial
  Synthetic oligonucleotide
aacctgagactgcaactcgaccccagcgatcccatgcgacacgttgcgag

SEQ ID NO: 295954 - DNA, 50 bp, Artificial
  Synthetic oligonucleotide
ctcagcggtgtaatatatctcaaccgggtgcatggctccgggaatcctca

SEQ ID NO: 295955 - DNA, 50 bp, Artificial
  Synthetic oligonucleotide
tcgtgcctgcctccaacgcgcgtcacctagcttccgtgatagcgggtagt

SEQ ID NO: 295956 - DNA, 50 bp, Artificial
  Synthetic oligonucleotide
aacctcgtggttatgcgcctctcgcagcccagctacgaatgtgcagcgtg

SEQ ID NO: 295957 - DNA, 50 bp, Artificial
  Synthetic oligonucleotide
aacctcgtccagcgagagtcgccgaccgacgtctccggttccgacgcaga

SEQ ID NO: 295958 - DNA, 50 bp, Artificial
  Synthetic oligonucleotide
aacctcgggcccatactcgacttcactttcgggccgcaacgcaaccaggt

SEQ ID NO: 295959 - DNA, 57 bp, Artificial
  Synthetic oligonucleotide
aagtgagtatataccctacggtaaagtgcgctagccctaccagacgcgcctgaacga

SEQ ID NO: 295960 - DNA, 58 bp, Artificial
  Synthetic oligonucleotide
cgtacggtagaggctctttccaagctggcacacgagaaggacgccatagaggaggtga

SEQ ID NO: 295961 - DNA, 50 bp, Artificial
  Synthetic oligonucleotide
aacctcgctgttgggacgcggtcgctccgtgcacaatttgacggagacac

SEQ ID NO: 295962 - DNA, 50 bp, Artificial
  Synthetic oligonucleotide
aacctccgcaaagccctggcactccggggacttggagtaagggttcagag

SEQ ID NO: 295963 - DNA, 50 bp, Artificial
  Synthetic oligonucleotide
tcgttctgcttgtccctcctcctccatgcaaaccaatgcacgcatgtgac

SEQ ID NO: 295964 - DNA, 50 bp, Artificial
  Synthetic oligonucleotide
aacctccagggcacctgcggttcgcgtgtggttcgcctgtttgggtgtct

SEQ ID NO: 295965 - DNA, 50 bp, Artificial
  Synthetic oligonucleotide
aacctccactgcggggcacctaagaagcacgaaaggcacacggcgttttc

SEQ ID NO: 295966 - DNA, 50 bp, Artificial
  Synthetic oligonucleotide
aacctcatgggcgactggccaagtctctgctttcgccaagcgcgagtgac

SEQ ID NO: 295967 - DNA, 50 bp, Artificial
  Synthetic oligonucleotide
aacctcatagaggagccgcccctcacatgtgctcacccacacgtgtgctc

SEQ ID NO: 295968 - DNA, 50 bp, Artificial
  Synthetic oligonucleotide
aacctcactgcgcgcaacggctgccacctgggattggtcaatgacgtgag

SEQ ID NO: 295969 - DNA, 50 bp, Artificial
  Synthetic oligonucleotide
aacctagccgcccaggaggtggcaacgtggcctacaatgtgccactgaac

SEQ ID NO: 295970 - DNA, 50 bp, Artificial
  Synthetic oligonucleotide
aacctagaaagcgtgtactatcgtcacatacggtggctacagagtctgca

SEQ ID NO: 295971 - DNA, 58 bp, Artificial
  Synthetic oligonucleotide
cgtcacatatattttggtcgtcacatatattttggtcgtcacatatattttggtcgtc

SEQ ID NO: 295972 - DNA, 50 bp, Artificial
  Synthetic oligonucleotide
aacctaagggggagggcaaattacgcgggttcagagggtttgcgcgggta

SEQ ID NO: 295973 - DNA, 50 bp, Artificial
  Synthetic oligonucleotide
aaccgtggagtgcggaggcgtgtgatgagagaggctacccccgtaacaca

SEQ ID NO: 295974 - DNA, 50 bp, Artificial
  Synthetic oligonucleotide
aaccgtggagacggcctctgtgacacgcaaacaaggccagaaaccgcgtc

SEQ ID NO: 295975 - DNA, 50 bp, Artificial
  Synthetic oligonucleotide
aacgacagttgcacatgcgagggggtggggagtcactgcgacattcgctt

SEQ ID NO: 295976 - DNA, 50 bp, Artificial
  Synthetic oligonucleotide
aacgacaggcaacgtgggccagatgaggtttacgcccgtacgtcacaggc

SEQ ID NO: 295977 - DNA, 50 bp, Artificial
  Synthetic oligonucleotide
aacgaagggctccacccatcctcagcgtccgcctcacgacgttgttccac

SEQ ID NO: 295978 - DNA, 50 bp, Artificial
  Synthetic oligonucleotide
aacgaaggattggtaacaggtgacagcggtgaaccggtgacgggtggccc

SEQ ID NO: 295979 - DNA, 50 bp, Artificial
  Synthetic oligonucleotide
aacgaagcggtgctgactcgaagtcatgagcggtaccatggggaggctgc

SEQ ID NO: 295980 - DNA, 50 bp, Artificial
  Synthetic oligonucleotide
aacgaagcggactgggcagaggcaaccatctccgtgcctgccaagagtct

SEQ ID NO: 295981 - DNA, 50 bp, Artificial
  Synthetic oligonucleotide
ctccccatggtggatttcccgcctcactcacctcccctagatcggagcca

SEQ ID NO: 295982 - DNA, 58 bp, Artificial
  Synthetic oligonucleotide
cataggagactttatggatcttagaattttacactggattgatagacttagttgaccg

SEQ ID NO: 295983 - DNA, 50 bp, Artificial
  Synthetic oligonucleotide
cactcagtcgaagcgtctacggcacactcgcggcaagggaggaggcacag

SEQ ID NO: 295984 - DNA, 50 bp, Artificial
  Synthetic oligonucleotide
cactcatcagttgttttacactcatcagttgttttacactcatcagttgt

SEQ ID NO: 295985 - DNA, 50 bp, Artificial
  Synthetic oligonucleotide
tcggatgcagagctgacttaggacgccgtggaaaggcagtgggggtgcga

SEQ ID NO: 295986 - DNA, 50 bp, Artificial
  Synthetic oligonucleotide
aacgaagcaagccgccgcctaggaccggagcggaatgagagcgaactgga

SEQ ID NO: 295987 - DNA, 50 bp, Artificial
  Synthetic oligonucleotide
cactcccaaactggccctccccgataacaggccccagcgcgtacttgtcc

SEQ ID NO: 295988 - DNA, 50 bp, Artificial
  Synthetic oligonucleotide
tcgggaccgaatctccagcttgcaaccacccacacgaggggatgagtcaa

SEQ ID NO: 295989 - DNA, 50 bp, Artificial
  Synthetic oligonucleotide
aacgaacgcatgccccgttacgagagaggggcgtcgagaaacgccgacta

SEQ ID NO: 295990 - DNA, 50 bp, Artificial
  Synthetic oligonucleotide
tcgggggcgggagcacttccaatgggggtacgaatggcagcgcgtctgtt

SEQ ID NO: 295991 - DNA, 50 bp, Artificial
  Synthetic oligonucleotide
aaccttcacacgcgaaacctgtcgtgcgtctcggcctacgtttccacgcg

SEQ ID NO: 295992 - DNA, 50 bp, Artificial
  Synthetic oligonucleotide
cactccggtgcagacgtgtaggtgcaacttcgccagctgaggacactggg

SEQ ID NO: 295993 - DNA, 58 bp, Artificial
  Synthetic oligonucleotide
agcggcaagggcacattatacatggacgatggaggctcactcagaggaaactggggga

SEQ ID NO: 295994 - DNA, 50 bp, Artificial
  Synthetic oligonucleotide
aacctgtccggaactatgatcgtcgacagagtggaggcggctggcggcac

SEQ ID NO: 295995 - DNA, 50 bp, Artificial
  Synthetic oligonucleotide
cactcgtcgacgcccgcactgcccaaacgacgggtgtgatcggcaagcat

SEQ ID NO: 295996 - DNA, 50 bp, Artificial
  Synthetic oligonucleotide
tcgtaccaattgggcggggcccagagtgcacgtttttctctacttggcga

SEQ ID NO: 295997 - DNA, 50 bp, Artificial
  Synthetic oligonucleotide
aacctggtgagaccggccagtgcgtccttgacaacatggtagccacgggg

SEQ ID NO: 295998 - DNA, 50 bp, Artificial
  Synthetic oligonucleotide
aacctggccagtacgcggggcccagttcctgtctcgactgtaaaccggta

SEQ ID NO: 295999 - DNA, 50 bp, Artificial
  Synthetic oligonucleotide
aacctggaggcgcaacgttttcgctctacacagcgccacgtcccgtgtgt

SEQ ID NO: 296000 - DNA, 50 bp, Artificial
  Synthetic oligonucleotide
aaccgcacgctcatctctcgccctcgccgcactgaaagggtgccgaaaca

SEQ ID NO: 296001 - DNA, 50 bp, Artificial
  Synthetic oligonucleotide
tctcgtggcgacaaagcaggccaactgaggagcgaggcaggattcgagat

SEQ ID NO: 296002 - DNA, 50 bp, Artificial
  Synthetic oligonucleotide
aaccgatcacggcaagagattctgcagtgggccgcatgcctgagcagggt

SEQ ID NO: 296003 - DNA, 50 bp, Artificial
  Synthetic oligonucleotide
aaccgaggcacgcttctaactgagcgcactgcggaccgttgcccctctcc

SEQ ID NO: 296004 - DNA, 57 bp, Artificial
  Synthetic oligonucleotide
ttaacaaactcaaggcttactatgctaactctaaagtactgaaactaagagctcctc

SEQ ID NO: 296005 - DNA, 50 bp, Artificial
  Synthetic oligonucleotide
aaccgactcaccgctttgagggaagcgaccacggcactgcggaggctggt

SEQ ID NO: 296006 - DNA, 50 bp, Artificial
  Synthetic oligonucleotide
ctcaaatgatgttggagccgttgctattccaaccgtacagcgaggcacgg

SEQ ID NO: 296007 - DNA, 50 bp, Artificial
  Synthetic oligonucleotide
cggcaccgatcgtgttgtagaagacgtatgagaagtgcgggccctccggg

SEQ ID NO: 296008 - DNA, 50 bp, Artificial
  Synthetic oligonucleotide
ccacgagtcaggcaatggccgctggacacgcgaaatcgctaacggttggg

SEQ ID NO: 296009 - DNA, 50 bp, Artificial
  Synthetic oligonucleotide
ctatttaggtcaggtaagcggggcttccaggcgcgttgcgccctctagcc

SEQ ID NO: 296010 - DNA, 50 bp, Artificial
  Synthetic oligonucleotide
aaccctgcgagaggcggtgtctcccgccctctggtccttggaagcttcgc

SEQ ID NO: 296011 - DNA, 50 bp, Artificial
  Synthetic oligonucleotide
aaccctgacagcggccactttctgacacgagcacaaatggcgcgaaacgc

SEQ ID NO: 296012 - DNA, 50 bp, Artificial
  Synthetic oligonucleotide
aaccctcttctggcggtcgctccaagaaagttaagactcccggtgcgccc

SEQ ID NO: 296013 - DNA, 50 bp, Artificial
  Synthetic oligonucleotide
aaccctcgcgaaaaggacgctgaggccatggacagacacctcactgccgg

SEQ ID NO: 296014 - DNA, 50 bp, Artificial
  Synthetic oligonucleotide
ccacctgacgaagattcggacaccctgccgccgaaaggtgacgcaacgag

SEQ ID NO: 296015 - DNA, 52 bp, Artificial
  Synthetic oligonucleotide
cggggtcgataagttttaagttttgggcctcggggcttgcatatatggtcgt

SEQ ID NO: 296016 - DNA, 50 bp, Artificial
  Synthetic oligonucleotide
aaccctcctgtgcgccagacgcactgagtcgctggcacggagttgaaaga

SEQ ID NO: 296017 - DNA, 50 bp, Artificial
  Synthetic oligonucleotide
aaccctcagcgcagcctccgacagctctacgcccatgtctgcaaatgtct

SEQ ID NO: 296018 - DNA, 50 bp, Artificial
  Synthetic oligonucleotide
cagaccccaccgagctagtgtccacgtcattccgagggaggacaggcccc

SEQ ID NO: 296019 - DNA, 50 bp, Artificial
  Synthetic oligonucleotide
tctgctgttttgactaccacgactgaagagctccgtggcgattacaacgg

SEQ ID NO: 296020 - DNA, 50 bp, Artificial
  Synthetic oligonucleotide
aaccctagcgtcgccacgatacagccgggcgcatacagtcctagcgtcgc

SEQ ID NO: 296021 - DNA, 50 bp, Artificial
  Synthetic oligonucleotide
cagaccctgtagcgctttgccactccgcacgtcgctcgccagatcgcaac

SEQ ID NO: 296022 - DNA, 50 bp, Artificial
  Synthetic oligonucleotide
aaccctagcaggtgggacaaatgaacccatgcgccggagagccacggaag

SEQ ID NO: 296023 - DNA, 50 bp, Artificial
  Synthetic oligonucleotide
aaccctacgcaggtatccgcatcagccgtggctgtctcccccactcctta

SEQ ID NO: 296024 - DNA, 50 bp, Artificial
  Synthetic oligonucleotide
tctgtacgagcacaaggtggcacatgtgagcatctacgtggctgattacc

SEQ ID NO: 296025 - DNA, 50 bp, Artificial
  Synthetic oligonucleotide
tctgtgacactgggatcgactcctccacgaaacgtttacacacgaggaac

SEQ ID NO: 296026 - DNA, 58 bp, Artificial
  Synthetic oligonucleotide
agagttccggaatcagaggtgaggtccacagtaagtggcgggacattctcgcgctctt

SEQ ID NO: 296027 - DNA, 50 bp, Artificial
  Synthetic oligonucleotide
aaccgtccctgtttcggctcaacgcgcgacgcacgaaagtagcctcacgt

SEQ ID NO: 296028 - DNA, 50 bp, Artificial
  Synthetic oligonucleotide
cactgccgagtccgccgaaacagccatctacggccatgtcctcaacacgg

SEQ ID NO: 296029 - DNA, 50 bp, Artificial
  Synthetic oligonucleotide
aaccgtccctaccgtcgacaatcaggggccacgcgccatagaggcatttc

SEQ ID NO: 296030 - DNA, 49 bp, Artificial
  Synthetic oligonucleotide
aaccgtccccttggccggagcgtcgtggaacccagacggaaccgtccct

SEQ ID NO: 296031 - DNA, 50 bp, Artificial
  Synthetic oligonucleotide
aaccgtcaagggcctttttgtcgtgtcgcggggtgtgagaaccgtgaggg

SEQ ID NO: 296032 - DNA, 50 bp, Artificial
  Synthetic oligonucleotide
aaccgtagtgtgggcgggttttaacctcgaacgggtagcacgccatggga

SEQ ID NO: 296033 - DNA, 50 bp, Artificial
  Synthetic oligonucleotide
aaccggtgagcgagcctcgtcctgcccattaacaccatgcagctctcgac

SEQ ID NO: 296034 - DNA, 50 bp, Artificial
  Synthetic oligonucleotide
aaccggtaggcagcgctcctcgttttcggtcgacgtggcgatttaccagg

SEQ ID NO: 296035 - DNA, 50 bp, Artificial
  Synthetic oligonucleotide
ctcactacccccgcacagacgaccgggttcccgtgcaagcaacctcccac

SEQ ID NO: 296036 - DNA, 50 bp, Artificial
  Synthetic oligonucleotide
aaccggtagacagcgtctgcggggaccctgtgccttgacaacagggcgag

SEQ ID NO: 296037 - DNA, 50 bp, Artificial
  Synthetic oligonucleotide
gggactaagggaacccctccggggttagtggtgtgtacaagcaccgttac

SEQ ID NO: 296038 - DNA, 50 bp, Artificial
  Synthetic oligonucleotide
cggatgccttgcgatgaatatgctggctcgctccgtggcctcgcactgca

SEQ ID NO: 296039 - DNA, 50 bp, Artificial
  Synthetic oligonucleotide
aaccgggccaactccgattacgccaccgtgccagtgactcgcgacacacg

SEQ ID NO: 296040 - DNA, 50 bp, Artificial
  Synthetic oligonucleotide
aaccgggaactacgaagcgccgagcaccagctaaaaccggcggtcaggat

SEQ ID NO: 296041 - DNA, 50 bp, Artificial
  Synthetic oligonucleotide
cactgtggcaccttggggcacaatcacaatcgagtttgccgcccgctcat

SEQ ID NO: 296042 - DNA, 50 bp, Artificial
  Synthetic oligonucleotide
aaccgggaacccaaggcgttgtgtcgcggatccttcgcacgcagctaagc

SEQ ID NO: 296043 - DNA, 50 bp, Artificial
  Synthetic oligonucleotide
aaccggcacgaaagtgcggcctgacagtacagagtgtaggcgacacctgc

SEQ ID NO: 296044 - DNA, 50 bp, Artificial
  Synthetic oligonucleotide
ccacgctgacaaagtccactgctcgcacgacggagggatgcgcgggcgta

SEQ ID NO: 296045 - DNA, 50 bp, Artificial
  Synthetic oligonucleotide
aaccgctcgttggctccgcgggttcggctgcttgttccgcagacctaact

SEQ ID NO: 296046 - DNA, 50 bp, Artificial
  Synthetic oligonucleotide
aaccgctagggcacagggaaacacggtcgctcgcagttctttctcgtgct

SEQ ID NO: 296047 - DNA, 50 bp, Artificial
  Synthetic oligonucleotide
ccacgccagttgcgaccaccctaaatcgccccctctctttgtccatcgca

SEQ ID NO: 296048 - DNA, 57 bp, Artificial
  Synthetic oligonucleotide
cacggagacggtgtgcatcggtgccattcaacggatgggtgacctgacgccgtctgc

SEQ ID NO: 296049 - DNA, 50 bp, Artificial
  Synthetic oligonucleotide
aaccgccgactccgaccagtacacgagagtgtcaagttcccgcaagcgct

SEQ ID NO: 296050 - DNA, 50 bp, Artificial
  Synthetic oligonucleotide
aaccgccccgtgatggcggtcgtccccggaaagaaacgaacggtcccagc

SEQ ID NO: 296051 - DNA, 50 bp, Artificial
  Synthetic oligonucleotide
cacttgaggcgtttgccctggttggcccgtctcgcatagttggcccgtct

SEQ ID NO: 296052 - DNA, 50 bp, Artificial
  Synthetic oligonucleotide
aaccgcagcgcagatggcacattggacttttggccaagcgtcagagctgg

SEQ ID NO: 296053 - DNA, 50 bp, Artificial
  Synthetic oligonucleotide
aacgcgccgtccttctagcgccggctcggaacactttcgcacatgttaca

SEQ ID NO: 296054 - DNA, 50 bp, Artificial
  Synthetic oligonucleotide
aacgcgcccagtccttggcagaatattcgtgacggcagagtgtccgggac

SEQ ID NO: 296055 - DNA, 50 bp, Artificial
  Synthetic oligonucleotide
cacgtggtcacagacgcctacacaggcactcgaagcagacacacgcgcca

SEQ ID NO: 296056 - DNA, 50 bp, Artificial
  Synthetic oligonucleotide
aacgcgcacaccgtttccattttcactcagaagggtggcccgcctgtccg

SEQ ID NO: 296057 - DNA, 50 bp, Artificial
  Synthetic oligonucleotide
aacgcgaggccggtgggcatgacttcattcgggagcatgtgcgtgttcga

SEQ ID NO: 296058 - DNA, 50 bp, Artificial
  Synthetic oligonucleotide
aacgcgacctgcgaggagccttcctggttcctccacacatccggttcgtt

SEQ ID NO: 296059 - DNA, 57 bp, Artificial
  Synthetic oligonucleotide
gtggatatttagaggtgcgttatgatgatatcgtaaaacaagtaatttgtgagcctg

SEQ ID NO: 296060 - DNA, 50 bp, Artificial
  Synthetic oligonucleotide
aacgcgaccgggcacgctgctcttgagtatgtctggcatcctagctgcca

SEQ ID NO: 296061 - DNA, 50 bp, Artificial
  Synthetic oligonucleotide
aacgcgaatgcggagtgcaggagaagacagctcgccacaggcagccttac

SEQ ID NO: 296062 - DNA, 50 bp, Artificial
  Synthetic oligonucleotide
ctcctgtcgccctagatcaggacggcatttgggaaatccggccctgagca

SEQ ID NO: 296063 - DNA, 50 bp, Artificial
  Synthetic oligonucleotide
aacgcgaaagttcgtcacaccgcgccgagagctgtagccctagtcggtgg

SEQ ID NO: 296064 - DNA, 50 bp, Artificial
  Synthetic oligonucleotide
aacgccttttcgaagggtggcatatacatctggcgggcctcgtgcgtcct

SEQ ID NO: 296065 - DNA, 50 bp, Artificial
  Synthetic oligonucleotide
aacgccttgcattgccagtcgtgccgcctcgcttcgtcgctgggaaacca

SEQ ID NO: 296066 - DNA, 50 bp, Artificial
  Synthetic oligonucleotide
aacgcctggtgccgaggcgacccctccacgctagagatctacctggatct

SEQ ID NO: 296067 - DNA, 50 bp, Artificial
  Synthetic oligonucleotide
aacgcctctcgcccgatttgcgtcacgcgcatatccgtccctgtacacgt

SEQ ID NO: 296068 - DNA, 50 bp, Artificial
  Synthetic oligonucleotide
aacgcctcattgtcttggcgtggtgtagcacacggctcaacagctggggc

SEQ ID NO: 296069 - DNA, 50 bp, Artificial
  Synthetic oligonucleotide
aacgccgggggagggaaacacgtcatcgcactactgcagcgattcaagcc

SEQ ID NO: 296070 - DNA, 57 bp, Artificial
  Synthetic oligonucleotide
cgtagataagcaattagtataattgtacgctgttaatgtgtatttacctaaaagtgc

SEQ ID NO: 296071 - DNA, 57 bp, Artificial
  Synthetic oligonucleotide
tatgactgcactatgccatccctcccacctggacttactggaaacacattcgagtgt

SEQ ID NO: 296072 - DNA, 50 bp, Artificial
  Synthetic oligonucleotide
ctcctgcggcgctacacagccgtgcgctcatactctttccgttctgctct

SEQ ID NO: 296073 - DNA, 50 bp, Artificial
  Synthetic oligonucleotide
aacgccgcgcaagcgttacggccatttttgccgttccttaaatgacgccc

SEQ ID NO: 296074 - DNA, 50 bp, Artificial
  Synthetic oligonucleotide
tcctcagcatcgggggcgggagcacttccaatgggggtacgaatggcagc

SEQ ID NO: 296075 - DNA, 50 bp, Artificial
  Synthetic oligonucleotide
aacgccgcctattccccgcgcggttgcttcatccgatgggtgaatctccg

SEQ ID NO: 296076 - DNA, 50 bp, Artificial
  Synthetic oligonucleotide
aacgccgaagagacacataagaggatccaaaccgcgcccccacggaggcc

SEQ ID NO: 296077 - DNA, 50 bp, Artificial
  Synthetic oligonucleotide
aacgccgaaagtctcggagtccgcctgcagtgtgagaagccgagaggaga

SEQ ID NO: 296078 - DNA, 50 bp, Artificial
  Synthetic oligonucleotide
tcctccgtggttttcgccctcttgtgtatccccaccgtgtgcctgttgct

SEQ ID NO: 296079 - DNA, 50 bp, Artificial
  Synthetic oligonucleotide
tcctcgctgggagacgccgttagagaggaatgacgataagcgacgttttc

SEQ ID NO: 296080 - DNA, 50 bp, Artificial
  Synthetic oligonucleotide
aacggacgctgtaacggcccctagctcctcccacgaaagcactgggatct

SEQ ID NO: 296081 - DNA, 50 bp, Artificial
  Synthetic oligonucleotide
aacggaatgcggggccagcactgagagtcgcctgcttcatccgtggttgg

SEQ ID NO: 296082 - DNA, 55 bp, Artificial
  Synthetic oligonucleotide
gggataatataaaccatggggataatataaaccatggggataatataaaccatgg

SEQ ID NO: 296083 - DNA, 50 bp, Artificial
  Synthetic oligonucleotide
ctcgaaacggggcaccataacctcgctgtggatgtgcgtagctgctgcta

SEQ ID NO: 296084 - DNA, 50 bp, Artificial
  Synthetic oligonucleotide
aacggaaccgcttcggtagccactcgcaacattagcgagggacggtgcaa

SEQ ID NO: 296085 - DNA, 50 bp, Artificial
  Synthetic oligonucleotide
cacgtgactagcaactgcccccgccggcacacaccgttagctggcatgcc

SEQ ID NO: 296086 - DNA, 50 bp, Artificial
  Synthetic oligonucleotide
ctccttgtgccgccatccctgcctagagcggcttctcctgtccggcaatg

SEQ ID NO: 296087 - DNA, 50 bp, Artificial
  Synthetic oligonucleotide
aacggaaaaggcacgtagccacgccaattacaagcccataggccgtggcc

SEQ ID NO: 296088 - DNA, 50 bp, Artificial
  Synthetic oligonucleotide
cacgtgctacatgaggctggagtacccgcctggcacactgtgtccccacc

SEQ ID NO: 296089 - DNA, 50 bp, Artificial
  Synthetic oligonucleotide
aacgcttgcctggagcgcgggaggtacatgcggccattgaacgcgggagg

SEQ ID NO: 296090 - DNA, 50 bp, Artificial
  Synthetic oligonucleotide
aacgcttcacaagcgacggtgcccgctctgaaataacctgtccccgtgga

SEQ ID NO: 296091 - DNA, 50 bp, Artificial
  Synthetic oligonucleotide
cacgtggaggcactagaggcaccctacgcactcgtctatggccacctgcg

SEQ ID NO: 296092 - DNA, 50 bp, Artificial
  Synthetic oligonucleotide
aacgctcgcagcgctcaattcgaccgccgtttcccgctcccttacactcg

SEQ ID NO: 296093 - DNA, 57 bp, Artificial
  Synthetic oligonucleotide
ttcacgccccaccacgtcccagaggcaaggcgcgtaggcacacacgtaacccgatcg

SEQ ID NO: 296094 - DNA, 50 bp, Artificial
  Synthetic oligonucleotide
aacgctacaaagagctcgcgcggagaggcccatcctcgtctacctgtgcc

SEQ ID NO: 296095 - DNA, 50 bp, Artificial
  Synthetic oligonucleotide
aacgcgttgcaaatgccgccagcatctagcctcccaagctacaggtctga

SEQ ID NO: 296096 - DNA, 50 bp, Artificial
  Synthetic oligonucleotide
aacgcgtggcagcgagggcgaacagaggcggaaagcggatccagacagtg

SEQ ID NO: 296097 - DNA, 50 bp, Artificial
  Synthetic oligonucleotide
tcccgtgccaagaggccctcggtgacatcttgtggggcattcagatctga

SEQ ID NO: 296098 - DNA, 50 bp, Artificial
  Synthetic oligonucleotide
aacgcggtacagttgcgttcttgtgagttagcgcgggagggtgcaaacgc

SEQ ID NO: 296099 - DNA, 50 bp, Artificial
  Synthetic oligonucleotide
aacgcgggtggacacggggctcgagacgcgtagataccgagtgaagatcg

SEQ ID NO: 296100 - DNA, 50 bp, Artificial
  Synthetic oligonucleotide
ccactgacaagacatgctcatccgcacgtggggcgtccgagaagggactc

SEQ ID NO: 296101 - DNA, 50 bp, Artificial
  Synthetic oligonucleotide
aacgcgggagctcctttgggggttcgccaccctgtttcgaatttacgccc

SEQ ID NO: 296102 - DNA, 50 bp, Artificial
  Synthetic oligonucleotide
aacgcggctggtggacccgcaaagatcgccaggagcgacgcatgcagagg

SEQ ID NO: 296103 - DNA, 50 bp, Artificial
  Synthetic oligonucleotide
aacgcggccgccgctaaaccgaaccgagtttgacgcaactttggtcaacg

SEQ ID NO: 296104 - DNA, 52 bp, Artificial
  Synthetic oligonucleotide
agcattttcgttcggatttctatcttagtacaaaataagttatcggttaaaa

SEQ ID NO: 296105 - DNA, 50 bp, Artificial
  Synthetic oligonucleotide
aacgcggcacgcggaacgaacaggaaagtacggtccggcaggcacccttg

SEQ ID NO: 296106 - DNA, 50 bp, Artificial
  Synthetic oligonucleotide
aacgcgcgtcagtagatggcaaaccgaaggatacacctgcggcagtgcgc

SEQ ID NO: 296107 - DNA, 50 bp, Artificial
  Synthetic oligonucleotide
aacgcgcggaatgcgatgcacagtcgagcgaatgcccagacaagcgtacg

SEQ ID NO: 296108 - DNA, 50 bp, Artificial
  Synthetic oligonucleotide
tcgatatctggtgagtgcacgaagcgacggctgggtagggggagggcgag

SEQ ID NO: 296109 - DNA, 50 bp, Artificial
  Synthetic oligonucleotide
aacgatggcctaacgaagtcagcctgagacgtgcgtccgctgtggtcctg

SEQ ID NO: 296110 - DNA, 50 bp, Artificial
  Synthetic oligonucleotide
aacgatcgggagggggcacccctctgtgtgtggtgtctcggagtccaatg

SEQ ID NO: 296111 - DNA, 50 bp, Artificial
  Synthetic oligonucleotide
aacgatatccgcgggtggagtggggtccgagagactcgcggcctggacgt

SEQ ID NO: 296112 - DNA, 50 bp, Artificial
  Synthetic oligonucleotide
aacgatagccggagcacgccacgacggacgacaggcactcgtagacaaca

SEQ ID NO: 296113 - DNA, 50 bp, Artificial
  Synthetic oligonucleotide
cggaggtccgtcactccgcgactcagctgccaggcgtgatccacgcttcg

SEQ ID NO: 296114 - DNA, 50 bp, Artificial
  Synthetic oligonucleotide
cggaggtcgtaactctaacgatcataaagtagcaaaattcctaggcaagt

SEQ ID NO: 296115 - DNA, 57 bp, Artificial
  Synthetic oligonucleotide
tggttgccacacccaccctattgaatggaggagtccctattgcgagcggtgagccta

SEQ ID NO: 296116 - DNA, 50 bp, Artificial
  Synthetic oligonucleotide
aacgagttgaacggacgctccacagctgacgcctcgtgacgggacacccc

SEQ ID NO: 296117 - DNA, 50 bp, Artificial
  Synthetic oligonucleotide
ccacgttagcatggcagccgttgcatcacatagacctccaggtgcgcgca

SEQ ID NO: 296118 - DNA, 50 bp, Artificial
  Synthetic oligonucleotide
aacgagggcctttcgggctctaccagtccctctaccgaccgtcctccctc

SEQ ID NO: 296119 - DNA, 50 bp, Artificial
  Synthetic oligonucleotide
tcgcacttgtgttggacaccctactgttgcgtgccgcgttggcgtatgta

SEQ ID NO: 296120 - DNA, 50 bp, Artificial
  Synthetic oligonucleotide
aacgagggacgaccgttgcgagaccacagagaagccaaaggcgacacaga

SEQ ID NO: 296121 - DNA, 50 bp, Artificial
  Synthetic oligonucleotide
aacgaggcactgtctggcgtttccccagcagcgccgattgaacgcagtac

SEQ ID NO: 296122 - DNA, 50 bp, Artificial
  Synthetic oligonucleotide
ccacgtggagctctcgccgtctctttgggccggcacttcgtagtagggaa

SEQ ID NO: 296123 - DNA, 50 bp, Artificial
  Synthetic oligonucleotide
aacgaggaggagtaacagcacacgtagggggcccggtgcttgaatggtgc

SEQ ID NO: 296124 - DNA, 50 bp, Artificial
  Synthetic oligonucleotide
aacgaggactaacgcggggaaaactcgccagcttgccctagcaccccggt

SEQ ID NO: 296125 - DNA, 50 bp, Artificial
  Synthetic oligonucleotide
aacgagcccacggacggaggtccttcctggtgcgggaagaagccgtagtc

SEQ ID NO: 296126 - DNA, 57 bp, Artificial
  Synthetic oligonucleotide
gacggtgcagccgcctactggcccatcgaggagaacccatgctgcctcgccacgggc

SEQ ID NO: 296127 - DNA, 50 bp, Artificial
  Synthetic oligonucleotide
aacgagcagtactgacctccgaggacatgatgggagggaggcaaccgggg

SEQ ID NO: 296128 - DNA, 50 bp, Artificial
  Synthetic oligonucleotide
tcgcgcggagcaactatcaacgcgagcgcacaagcggaacttctacacca

SEQ ID NO: 296129 - DNA, 50 bp, Artificial
  Synthetic oligonucleotide
aacgagcaccctaacagtagacggcctctgccaggcgagtgtgcctcgtc

SEQ ID NO: 296130 - DNA, 50 bp, Artificial
  Synthetic oligonucleotide
aacgactaggccgcggtatcccgtgcgttcagggctatttcgagtggcat

SEQ ID NO: 296131 - DNA, 50 bp, Artificial
  Synthetic oligonucleotide
aacgacgcctatccgccccctggctttttcgggctcttgcgccgatggtg

SEQ ID NO: 296132 - DNA, 50 bp, Artificial
  Synthetic oligonucleotide
aacgacgcccatttccctcgggggcggacggagtcattgtgacgacagtt

SEQ ID NO: 296133 - DNA, 50 bp, Artificial
  Synthetic oligonucleotide
cggagtacacaccccgcatccgcggaaggaaaccggtccgccgttctgtg

SEQ ID NO: 296134 - DNA, 50 bp, Artificial
  Synthetic oligonucleotide
aacgacgacgcactcgatgtcctggtctgatcccccgtctttgcttgccc

SEQ ID NO: 296135 - DNA, 50 bp, Artificial
  Synthetic oligonucleotide
aacgcccgaacttgcacctccgctctaccaattgcgccctgaagcttcct

SEQ ID NO: 296136 - DNA, 50 bp, Artificial
  Synthetic oligonucleotide
aacgcccacagacagcgcttgtgctgcccttcacggagctgtgcacgcag

SEQ ID NO: 296137 - DNA, 57 bp, Artificial
  Synthetic oligonucleotide
ggctactgacattttatctaatttagctttgtaaacttgtccaagatttgcggaagc

SEQ ID NO: 296138 - DNA, 50 bp, Artificial
  Synthetic oligonucleotide
aacgccacttgaccctcggcccgtcacaggcccttgacgttgcactcatg

SEQ ID NO: 296139 - DNA, 50 bp, Artificial
  Synthetic oligonucleotide
tcctgcggcaaatcttccgaagtgcacggggcaccttctaccttgcacgt

SEQ ID NO: 296140 - DNA, 50 bp, Artificial
  Synthetic oligonucleotide
aacgccacgcccgttgagtacgaaggctcgcagatggaagaccctgccta

SEQ ID NO: 296141 - DNA, 50 bp, Artificial
  Synthetic oligonucleotide
aacgcataggaaggcgctgcgaagccgcactccatgcactgttcgggtgt

SEQ ID NO: 296142 - DNA, 50 bp, Artificial
  Synthetic oligonucleotide
aacgcaggggcgaggtagaatgctgggtggcgagaagccgagaaaagccg

SEQ ID NO: 296143 - DNA, 50 bp, Artificial
  Synthetic oligonucleotide
ccactccgtgttcgggaaggcacgcgggaggccggggtacatggttgtgt

SEQ ID NO: 296144 - DNA, 50 bp, Artificial
  Synthetic oligonucleotide
aacgcagggatgttttaccggctagggtgcggcgagagactgcaggagcc

SEQ ID NO: 296145 - DNA, 50 bp, Artificial
  Synthetic oligonucleotide
aacgcagcgttgtaacagcgggatcggcgggaggggtgcgaatgtgcttt

SEQ ID NO: 296146 - DNA, 50 bp, Artificial
  Synthetic oligonucleotide
tccttctacggaaaccagcgcaggtatcgcgccacggtgtgttggagaga

SEQ ID NO: 296147 - DNA, 50 bp, Artificial
  Synthetic oligonucleotide
aacgcagcggccctcccctttgcgacccagatttactgccttctggccct

SEQ ID NO: 296148 - DNA, 57 bp, Artificial
  Synthetic oligonucleotide
tgatccctggtcaagggggacagtgggttcttaggcgaggcacctcaagggactgca

SEQ ID NO: 296149 - DNA, 50 bp, Artificial
  Synthetic oligonucleotide
ctccggcccggatggagttgccaacggtggtgcaagtgaccgtgagaaca

SEQ ID NO: 296150 - DNA, 50 bp, Artificial
  Synthetic oligonucleotide
ctccgcgttcaacattaccgccgccgttgtgggcaccgtgtccttcgcga

SEQ ID NO: 296151 - DNA, 50 bp, Artificial
  Synthetic oligonucleotide
tcgacactcacgctcttgttcacgatgaaggcctgcacaggcgtcctcgg

SEQ ID NO: 296152 - DNA, 50 bp, Artificial
  Synthetic oligonucleotide
aacgcacggagtagaggggatcgggcgtcgcattgcgttccaatatggga

SEQ ID NO: 296153 - DNA, 50 bp, Artificial
  Synthetic oligonucleotide
aacgcacggacacccacgtttcgacgcagcacacctcgacagaggttccc

SEQ ID NO: 296154 - DNA, 50 bp, Artificial
  Synthetic oligonucleotide
aacgcacgctagacaaatcagcgctcacgcggaggccgctctgcacagat

SEQ ID NO: 296155 - DNA, 50 bp, Artificial
  Synthetic oligonucleotide
aacgcacgccctcattgtcaagtttcacggcgccacgactacgctcacga

SEQ ID NO: 296156 - DNA, 50 bp, Artificial
  Synthetic oligonucleotide
cactaatgcggacgcctgagggtgcgtttcgccacccttgctcactttcg

SEQ ID NO: 296157 - DNA, 50 bp, Artificial
  Synthetic oligonucleotide
aacgcacacgcgtgccaagcacttcgacattgcctcctcgcgactcccag

SEQ ID NO: 296158 - DNA, 50 bp, Artificial
  Synthetic oligonucleotide
aacgcaacttcccccttgtcacctacccacaccgggctctctaggctgcc

SEQ ID NO: 296159 - DNA, 57 bp, Artificial
  Synthetic oligonucleotide
gttcaaaagttgtttatgttactcttgaacttgtaaaatgtgtgatgcgtccttggc

SEQ ID NO: 296160 - DNA, 50 bp, Artificial
  Synthetic oligonucleotide
aacgcaacattccctttctgcgtcccctccgtgtgccggcagcaacgaag

SEQ ID NO: 296161 - DNA, 50 bp, Artificial
  Synthetic oligonucleotide
cactacgacttcactcgccttcgcagcgcagtggtcgtcgcgacaggaga

SEQ ID NO: 296162 - DNA, 50 bp, Artificial
  Synthetic oligonucleotide
aacacgtcgaggacagcaggggatacggtgccccgcaggcgaaaacacgc

SEQ ID NO: 296163 - DNA, 50 bp, Artificial
  Synthetic oligonucleotide
aacacggggaagcctgcgtttcgtgtttgggggcacagcggggcacttac

SEQ ID NO: 296164 - DNA, 50 bp, Artificial
  Synthetic oligonucleotide
aacacgctctctcgtcagacctttcctttggccacgcgtgccccgaatcc

SEQ ID NO: 296165 - DNA, 50 bp, Artificial
  Synthetic oligonucleotide
aacacgcgttatccctgcctgcgtttccgcgaaaacacactacccgcggt

SEQ ID NO: 296166 - DNA, 50 bp, Artificial
  Synthetic oligonucleotide
aacacgcgtgtctacccccagtgcgtagccgctgaatcctcaacagaggg

SEQ ID NO: 296167 - DNA, 50 bp, Artificial
  Synthetic oligonucleotide
aacacgcggtgtgaaccctccccgtcgagtcggctctctgccgatgcatg

SEQ ID NO: 296168 - DNA, 50 bp, Artificial
  Synthetic oligonucleotide
ccaatttggggtgccaccactcggggcgttataccccttggagccgtccc

SEQ ID NO: 296169 - DNA, 50 bp, Artificial
  Synthetic oligonucleotide
tgcgaatgaatttcctccaaccacctaacaccaagtattgactcacgcga

SEQ ID NO: 296170 - DNA, 57 bp, Artificial
  Synthetic oligonucleotide
tgtgtcgtcgagacacatgcgaacaaaagtgcacgccgcaaacaccacattcgggat

SEQ ID NO: 296171 - DNA, 50 bp, Artificial
  Synthetic oligonucleotide
aacacgcctgcattccccctcaacagacgaaggacgaaactcgcacccct

SEQ ID NO: 296172 - DNA, 50 bp, Artificial
  Synthetic oligonucleotide
aacacgccaattgttacgtcacaacaccgggtcgtccgccaagcgcgcac

SEQ ID NO: 296173 - DNA, 50 bp, Artificial
  Synthetic oligonucleotide
aacacctcgtctgcatcgtccctgggtagactgccgcgatggtgcgtgcc

SEQ ID NO: 296174 - DNA, 50 bp, Artificial
  Synthetic oligonucleotide
cggcttcggaagtccccacaccctgccgtagcgggtaacctcctaccgta

SEQ ID NO: 296175 - DNA, 50 bp, Artificial
  Synthetic oligonucleotide
cctacctcttctggatgttaagtccactgataaagtcttatataacaccc

SEQ ID NO: 296176 - DNA, 50 bp, Artificial
  Synthetic oligonucleotide
aacaccagtcgttcccacctctccgcgtcgcgatgtctgtgtcccccatc

SEQ ID NO: 296177 - DNA, 50 bp, Artificial
  Synthetic oligonucleotide
tgcgcgaagtgtacgtaacgctatagaccgagctcgaatgcgtcaagcaa

SEQ ID NO: 296178 - DNA, 50 bp, Artificial
  Synthetic oligonucleotide
aacaccaacgtagagggacagaggcgtcaactgtgaggcccgccgactga

SEQ ID NO: 296179 - DNA, 50 bp, Artificial
  Synthetic oligonucleotide
aacacatcgctctgctcaggcgactggcccattcgagccgtctgcgtcga

SEQ ID NO: 296180 - DNA, 50 bp, Artificial
  Synthetic oligonucleotide
aacacatccacacgcgcgcaggtagagtaaacgcctcctcccgacgtgta

SEQ ID NO: 296181 - DNA, 60 bp, Artificial
  Synthetic oligonucleotide
taagtacatctctaatgtcattatcaccagtatcagtagacgttattgtaattggacttt

SEQ ID NO: 296182 - DNA, 54 bp, Artificial
  Synthetic oligonucleotide
gaccttagttagtcatgttaagaccttagttagtcatgttaagaccttagttag

SEQ ID NO: 296183 - DNA, 56 bp, Artificial
  Synthetic oligonucleotide
cctcgttctgctccaacgagaacgaaacgttctggtcccgtgaatcgccgcacgat

SEQ ID NO: 296184 - DNA, 50 bp, Artificial
  Synthetic oligonucleotide
aacacagtgaggaaagacggcgactccgctcgatccccctccaaaagcga

SEQ ID NO: 296185 - DNA, 50 bp, Artificial
  Synthetic oligonucleotide
aacacaaagtgccgagcggtcccacacgcagtcagtagagcgcgccctcg

SEQ ID NO: 296186 - DNA, 50 bp, Artificial
  Synthetic oligonucleotide
cctaccgaaaactcgcataaaccttgatgcgtatataactcgctggaaat

SEQ ID NO: 296187 - DNA, 50 bp, Artificial
  Synthetic oligonucleotide
aacaagtgcgaaggccgcgtacggaaacacggttttccccgtcccgctcc

SEQ ID NO: 296188 - DNA, 50 bp, Artificial
  Synthetic oligonucleotide
cagctggtcactcgtggccactcacgcgctcgcacaggacccattatcga

SEQ ID NO: 296189 - DNA, 50 bp, Artificial
  Synthetic oligonucleotide
aacaagcctccgcactcctgccgcgcagtcttggaagatcggcgtcacgt

SEQ ID NO: 296190 - DNA, 50 bp, Artificial
  Synthetic oligonucleotide
aacagcgcgcgtgtcgatctttccgcggatttccttcgaggctcggaagg

SEQ ID NO: 296191 - DNA, 50 bp, Artificial
  Synthetic oligonucleotide
aacagccacgctctcaagctccaccatcgggaccaagcggaaatgtgcca

SEQ ID NO: 296192 - DNA, 50 bp, Artificial
  Synthetic oligonucleotide
aacagcatcccgagagcgatctatgagtcgtgtgtgccggctagcgcacc

SEQ ID NO: 296193 - DNA, 50 bp, Artificial
  Synthetic oligonucleotide
aacagcagcggtgggcacacccgtggtactcgccccgggactcgctccgg

SEQ ID NO: 296194 - DNA, 54 bp, Artificial
  Synthetic oligonucleotide
caaagacacgtaccagagacggaaaggggaacgaacaagagaatacgaggcagg

SEQ ID NO: 296195 - DNA, 50 bp, Artificial
  Synthetic oligonucleotide
tgcagggcggacaacggttcacggagggtggacacagggtcgtccataga

SEQ ID NO: 296196 - DNA, 50 bp, Artificial
  Synthetic oligonucleotide
cagccagcttacacgtttgcctgcctcgtgcacccagagcgagggtcagt

SEQ ID NO: 296197 - DNA, 50 bp, Artificial
  Synthetic oligonucleotide
aacagatgcctgcgcgtaacgctcgggacgcacatccgcggcagcctacc

SEQ ID NO: 296198 - DNA, 50 bp, Artificial
  Synthetic oligonucleotide
aacagagggtcgggcttcccttttgcaccaggggttgactcgccgtcttg

SEQ ID NO: 296199 - DNA, 50 bp, Artificial
  Synthetic oligonucleotide
aacagagactcagggcgactctagtcagtgggctaaggtcaaaacgttcc

SEQ ID NO: 296200 - DNA, 50 bp, Artificial
  Synthetic oligonucleotide
cagccgcgtgggtcacagcactcgcttacgtcgggacagcttcgaatgtc

SEQ ID NO: 296201 - DNA, 50 bp, Artificial
  Synthetic oligonucleotide
cagccgctcccattgggcaggtccccatccggtacataaccttcggagtg

SEQ ID NO: 296202 - DNA, 50 bp, Artificial
  Synthetic oligonucleotide
ccacacacaatcctcttgcgaacttttccgccagctggggcttcagcgcc

SEQ ID NO: 296203 - DNA, 50 bp, Artificial
  Synthetic oligonucleotide
cagcctcctcgagagccgacgcgcgagggaatctgcaaacaccgcctgtg

SEQ ID NO: 296204 - DNA, 50 bp, Artificial
  Synthetic oligonucleotide
tgcatgacacaatcgtatgtgccatcggttttgagggaaagcggccgagt

SEQ ID NO: 296205 - DNA, 53 bp, Artificial
  Synthetic oligonucleotide
gaccgctaaaccacgtgtaaaacgcctttgtgtccgtcggaacgggatcacga

SEQ ID NO: 296206 - DNA, 50 bp, Artificial
  Synthetic oligonucleotide
aacagactcgcgttcttcccggctgccttgctgcccccagctatgctagg

SEQ ID NO: 296207 - DNA, 50 bp, Artificial
  Synthetic oligonucleotide
aacagacatgaaccgtccgtttgccccgtttcgctgtccccctctcagcc

SEQ ID NO: 296208 - DNA, 50 bp, Artificial
  Synthetic oligonucleotide
cagcgatactcgaccccttctcctctcctgaccaccgcctctggcaccct

SEQ ID NO: 296209 - DNA, 50 bp, Artificial
  Synthetic oligonucleotide
tgcattgcaaggagagatagcagaacaggtgtctattcacgcgaatagcc

SEQ ID NO: 296210 - DNA, 50 bp, Artificial
  Synthetic oligonucleotide
aacagacataagacgccacgtcagcacgcctccctccaaatgctgcggca

SEQ ID NO: 296211 - DNA, 50 bp, Artificial
  Synthetic oligonucleotide
aacactggctacccgtgcggcgacagtcaatctcaccacagagtggcacc

SEQ ID NO: 296212 - DNA, 50 bp, Artificial
  Synthetic oligonucleotide
aacactgaaacgaggccgtttgactgcacccgtgcccagacccgcttcgt

SEQ ID NO: 296213 - DNA, 50 bp, Artificial
  Synthetic oligonucleotide
cggctgtgacgcgcgtgtgttcgcctcgtccctaaggtgtacctcacaag

SEQ ID NO: 296214 - DNA, 50 bp, Artificial
  Synthetic oligonucleotide
cagctaagacaggtgcaagtagcggcgccaaatcccctattgacgcgggc

SEQ ID NO: 296215 - DNA, 50 bp, Artificial
  Synthetic oligonucleotide
cagctactccacgaggttgtccttcctgcagcgcgcgagtttcgaccgga

SEQ ID NO: 296216 - DNA, 56 bp, Artificial
  Synthetic oligonucleotide
cttaatgtaaacgttttccaacagaatggacgataacactttatgttctcacgatc

SEQ ID NO: 296217 - DNA, 50 bp, Artificial
  Synthetic oligonucleotide
aaattggctcttggcgcgagcatgcatgacccccacgcttggagtcgatt

SEQ ID NO: 296218 - DNA, 50 bp, Artificial
  Synthetic oligonucleotide
tggatatagttcggtctctgcaaaccataaagtcatcggtatatcctaca

SEQ ID NO: 296219 - DNA, 50 bp, Artificial
  Synthetic oligonucleotide
cgggaccgtgactctgcggtggcccgtgtttcagctggccaggaacctca

SEQ ID NO: 296220 - DNA, 50 bp, Artificial
  Synthetic oligonucleotide
ccgttttggtgcagcctgctgaagcggtgcctaccctgtcttgccctgcg

SEQ ID NO: 296221 - DNA, 50 bp, Artificial
  Synthetic oligonucleotide
tggatcgctcgtaaagtctacaaacaagcacgtgaacacactgttgctgc

SEQ ID NO: 296222 - DNA, 50 bp, Artificial
  Synthetic oligonucleotide
cgtttgtcacgcgtgccgagcgtcccattttggtcccgctgtgggacatc

SEQ ID NO: 296223 - DNA, 50 bp, Artificial
  Synthetic oligonucleotide
aaattcatgccatctcacttcgccgggacgcccaaccctaagctgctgga

SEQ ID NO: 296224 - DNA, 50 bp, Artificial
  Synthetic oligonucleotide
tggcaataggggctccgcatggacccccaatgtggagaaagacccgtgtg

SEQ ID NO: 296225 - DNA, 50 bp, Artificial
  Synthetic oligonucleotide
tggcaatcgtagtagtagatgtgcgctgtgctacttgctttgcttcgggg

SEQ ID NO: 296226 - DNA, 50 bp, Artificial
  Synthetic oligonucleotide
caggcgcatacgtgcggtgagagggtttggcctgtgtcgtccaccattcg

SEQ ID NO: 296227 - DNA, 57 bp, Artificial
  Synthetic oligonucleotide
ccgaatgtatattttagttcgtgttccccatgggcgaaattacattcgacattagca

SEQ ID NO: 296228 - DNA, 50 bp, Artificial
  Synthetic oligonucleotide
cgtttgccgctgggcgaacctgggtcgaacattaccaagccatgacggta

SEQ ID NO: 296229 - DNA, 50 bp, Artificial
  Synthetic oligonucleotide
cgggagtcgtcgaaatatgccatccctataccacagtgcgatcgttcctt

SEQ ID NO: 296230 - DNA, 50 bp, Artificial
  Synthetic oligonucleotide
aaatgtttgccggccacggattcgttcgacagatcgcaaacaccggccga

SEQ ID NO: 296231 - DNA, 50 bp, Artificial
  Synthetic oligonucleotide
tggcacgcatgtgtctgtgcgagctatgctcacacacccctgcactggac

SEQ ID NO: 296232 - DNA, 50 bp, Artificial
  Synthetic oligonucleotide
aaatgtgtttgccttgggaccagtggcggaggtgcggagcccagcgctaa

SEQ ID NO: 296233 - DNA, 50 bp, Artificial
  Synthetic oligonucleotide
aaatggggctcgtggcaccgccaaggttccggaagtcccaaccaggatga

SEQ ID NO: 296234 - DNA, 50 bp, Artificial
  Synthetic oligonucleotide
cagggacacccgaaggtttgtacccttccaagccaaacgggggacgtggc

SEQ ID NO: 296235 - DNA, 50 bp, Artificial
  Synthetic oligonucleotide
aaatggccacattaccccctgcgcccgttgccacgtacccgcaacatttc

SEQ ID NO: 296236 - DNA, 50 bp, Artificial
  Synthetic oligonucleotide
aaatggatcgatagggcgcgaagttgccagcccggtgagtggctaggtcc

SEQ ID NO: 296237 - DNA, 50 bp, Artificial
  Synthetic oligonucleotide
aaatgcctggtcgctgggaactcggtagaggcgactgagcccaacaccct

SEQ ID NO: 296238 - DNA, 57 bp, Artificial
  Synthetic oligonucleotide
acgctattaaaccaggatctgcatttatattaggaacatgcctaagtttatccgcag

SEQ ID NO: 296239 - DNA, 50 bp, Artificial
  Synthetic oligonucleotide
aaatgcacgcatgcgccggaagcaacgctcgaatcgggaaagggaaggcc

SEQ ID NO: 296240 - DNA, 50 bp, Artificial
  Synthetic oligonucleotide
aaatgagtgggagggggtctccaatcccgcgacgtgtgaagagtgccagc

SEQ ID NO: 296241 - DNA, 50 bp, Artificial
  Synthetic oligonucleotide
aaatctggcagctcctttgggccgaacgcaggagtgattggtgcgttccg

SEQ ID NO: 296242 - DNA, 50 bp, Artificial
  Synthetic oligonucleotide
cagggacgcaacgcaacgcatggtacgcgagtcgctagcgcctcatctct

SEQ ID NO: 296243 - DNA, 49 bp, Artificial
  Synthetic oligonucleotide
aacaagaacccgaactccccaagggacggaagtacccccagcgctaagg

SEQ ID NO: 296244 - DNA, 50 bp, Artificial
  Synthetic oligonucleotide
aacaactgcgacacacggaactgccgactggcctcccctcgggtgtattg

SEQ ID NO: 296245 - DNA, 50 bp, Artificial
  Synthetic oligonucleotide
aacaacggttcgcgtcgactgctgcggccacaaccacccagagcattcgt

SEQ ID NO: 296246 - DNA, 50 bp, Artificial
  Synthetic oligonucleotide
tgctataactaagggtttgactgagggtgctgctatgggtgctactgagg

SEQ ID NO: 296247 - DNA, 50 bp, Artificial
  Synthetic oligonucleotide
aacaacgggggaggacccgagcagtcgcgacccagtgtttccgcggcaca

SEQ ID NO: 296248 - DNA, 50 bp, Artificial
  Synthetic oligonucleotide
tgctatgaagagagtcaccccacacgcatgagcgcgcataggtgcttctt

SEQ ID NO: 296249 - DNA, 57 bp, Artificial
  Synthetic oligonucleotide
gttttagatatatgcatgctacaggtgcatctcttgtattcttattaacttatttac

SEQ ID NO: 296250 - DNA, 50 bp, Artificial
  Synthetic oligonucleotide
cagcttcgtcgcatttgacgcagttgctgagttgttggcgggccagggtg

SEQ ID NO: 296251 - DNA, 50 bp, Artificial
  Synthetic oligonucleotide
cagcttggcgtgtcaagcaggtcgccgcttcacagggggaagcgcatact

SEQ ID NO: 296252 - DNA, 50 bp, Artificial
  Synthetic oligonucleotide
caggaatttccacgccatgcggcactcatcggggctctgcagggagtcga

SEQ ID NO: 296253 - DNA, 50 bp, Artificial
  Synthetic oligonucleotide
ctaactgtccaggtccatggtatgtagctttgcctcccctgttaactcga

SEQ ID NO: 296254 - DNA, 50 bp, Artificial
  Synthetic oligonucleotide
aacaacccgtcctcgcacggaagtcgcgctagatccaggggcaccataac

SEQ ID NO: 296255 - DNA, 50 bp, Artificial
  Synthetic oligonucleotide
tgctgatttgagttacttcgcacagacgtgcgcttgcgatataccgtcac

SEQ ID NO: 296256 - DNA, 50 bp, Artificial
  Synthetic oligonucleotide
aacaacacggctgggaaggtgactgccggttgccagtgagcgtagcagct

SEQ ID NO: 296257 - DNA, 50 bp, Artificial
  Synthetic oligonucleotide
aacaacaagcacgtcgcctgctgttgtttgtacacggcctgccggcgatt

SEQ ID NO: 296258 - DNA, 50 bp, Artificial
  Synthetic oligonucleotide
caggagttgtgagcactaggcgcttcgacagtcgggaaacgcagcggggg

SEQ ID NO: 296259 - DNA, 50 bp, Artificial
  Synthetic oligonucleotide
aacaaatgaaaccgcacgcgtgttccgcccaacccgagtcgcacgccaac

SEQ ID NO: 296260 - DNA, 57 bp, Artificial
  Synthetic oligonucleotide
gttgtatattacactatactctgagtataatcttactccctaaaatagactcgaact

SEQ ID NO: 296261 - DNA, 50 bp, Artificial
  Synthetic oligonucleotide
tggaagacctcccttgtccagccgatggggccaatcgctatgcggcggta

SEQ ID NO: 296262 - DNA, 50 bp, Artificial
  Synthetic oligonucleotide
aacaaagtagacgcaccggatcggagttcctggagagaatgcggggcccc

SEQ ID NO: 296263 - DNA, 50 bp, Artificial
  Synthetic oligonucleotide
cgggaacctctcatggtacggtgcaggtttggtcgtggagcgcggaagag

SEQ ID NO: 296264 - DNA, 50 bp, Artificial
  Synthetic oligonucleotide
aacaaagagtggtgagcgcgggacgagagacaacgaagcaacgcgacccg

SEQ ID NO: 296265 - DNA, 50 bp, Artificial
  Synthetic oligonucleotide
cctaaaccctcacggctcgtttggggcagggttcgcagtgaatggcggaa

SEQ ID NO: 296266 - DNA, 50 bp, Artificial
  Synthetic oligonucleotide
aaatttctgcgggccacacacgtacgccagcggtatgtctgcgccgaagt

SEQ ID NO: 296267 - DNA, 50 bp, Artificial
  Synthetic oligonucleotide
ctaaacttgcccctccgatggcccttttaacgtgtggtgttaactctaac

SEQ ID NO: 296268 - DNA, 50 bp, Artificial
  Synthetic oligonucleotide
aaattgggtgtctccctacgcgcgctctacccccgagacgggctaatcgg

SEQ ID NO: 296269 - DNA, 50 bp, Artificial
  Synthetic oligonucleotide
aaattggctgtgcgcactcgcttcgcaagggaaccgaagtctcgcgggat

SEQ ID NO: 296270 - DNA, 50 bp, Artificial
  Synthetic oligonucleotide
tcttttatacctttgcgcggttacataggagattatctagatttagagac

SEQ ID NO: 296271 - DNA, 54 bp, Artificial
  Synthetic oligonucleotide
ccccaccttgaggagttcatgagtaccgcccgcctagttggactttctgtccgg

SEQ ID NO: 296272 - DNA, 50 bp, Artificial
  Synthetic oligonucleotide
aaccccctggaactcggcagcgtaggaagcaatgcggctcaggatgacca

SEQ ID NO: 296273 - DNA, 50 bp, Artificial
  Synthetic oligonucleotide
cggcgcgtgggcccgtgtgcacagaagcatcagttgtgccaggagagagg

SEQ ID NO: 296274 - DNA, 50 bp, Artificial
  Synthetic oligonucleotide
aacccccgcggtagccactttggaacgccctacgacgcttcacgcggcca

SEQ ID NO: 296275 - DNA, 50 bp, Artificial
  Synthetic oligonucleotide
aaccccacgaggaccagcggagacatcaagtgtccgaacacccgcgtaac

SEQ ID NO: 296276 - DNA, 50 bp, Artificial
  Synthetic oligonucleotide
cagaggtcaagccgcacacacagccgtccacacgttacctgtttgcccca

SEQ ID NO: 296277 - DNA, 50 bp, Artificial
  Synthetic oligonucleotide
aacccagcgtctcccattgagtttgtacttgcgcgggaggcaacggaccg

SEQ ID NO: 296278 - DNA, 50 bp, Artificial
  Synthetic oligonucleotide
aacccagacacgcaagtatgccctcgcagagagtctgtcaagcgcgcgag

SEQ ID NO: 296279 - DNA, 50 bp, Artificial
  Synthetic oligonucleotide
ccggtggtctcctcaccttctgacgatgcaggggccacctccgtgcgtcg

SEQ ID NO: 296280 - DNA, 50 bp, Artificial
  Synthetic oligonucleotide
tgaatacgcccttgctcccggtccccgaggcactgcgctcaaaggcagtt

SEQ ID NO: 296281 - DNA, 50 bp, Artificial
  Synthetic oligonucleotide
cagagtgttggcatgacgattcgcacgacgttggtgccgcgagcgccatt

SEQ ID NO: 296282 - DNA, 57 bp, Artificial
  Synthetic oligonucleotide
gctatttggcaatattgtttctttggttaataatttaaggccatctgcaagcggctg

SEQ ID NO: 296283 - DNA, 50 bp, Artificial
  Synthetic oligonucleotide
aacccacggcgcctttccatcagtcaacgcaaccacctgtccagatcccc

SEQ ID NO: 296284 - DNA, 50 bp, Artificial
  Synthetic oligonucleotide
aacccacaacgccatcgcacgcctctgggtcggcgtctctgtccgtcgct

SEQ ID NO: 296285 - DNA, 50 bp, Artificial
  Synthetic oligonucleotide
aaccatcgaacgaaacgtcgagggagcgaggtcgcaaggatggcctaggc

SEQ ID NO: 296286 - DNA, 50 bp, Artificial
  Synthetic oligonucleotide
aaccagtcccgtgtctccgctgttcggggctcagaccgttcggaggtggg

SEQ ID NO: 296287 - DNA, 50 bp, Artificial
  Synthetic oligonucleotide
cagatcacggatggacatacgagcttgtggaccttcccgccggggctgtc

SEQ ID NO: 296288 - DNA, 50 bp, Artificial
  Synthetic oligonucleotide
cggcgctgtagtttaccgcgaggcgcttgcaacacgtatgcagttgcgta

SEQ ID NO: 296289 - DNA, 50 bp, Artificial
  Synthetic oligonucleotide
aaccagggcacccagaaggacaagaggcagcgccggacacagtgtcccct

SEQ ID NO: 296290 - DNA, 50 bp, Artificial
  Synthetic oligonucleotide
tgaccctccaccgttcataccgtcgtgccaccagagagaagggcgggggc

SEQ ID NO: 296291 - DNA, 50 bp, Artificial
  Synthetic oligonucleotide
aaccaggcgctcccgtccccattggaggaaacaagctcccctgaccgaag

SEQ ID NO: 296292 - DNA, 50 bp, Artificial
  Synthetic oligonucleotide
aaccaggaccttcgacgtactagccacagggaatcccggataccccgccc

SEQ ID NO: 296293 - DNA, 56 bp, Artificial
  Synthetic oligonucleotide
cgtagatattaaggtaactaatataagtcctaactacagcaacataggcctatagg

SEQ ID NO: 296294 - DNA, 55 bp, Artificial
  Synthetic oligonucleotide
gttagtgtagttaggacctatattggttaccttaagacatacgttactgtattga

SEQ ID NO: 296295 - DNA, 50 bp, Artificial
  Synthetic oligonucleotide
aaccagcggagtagtgcccgacacacgactgtcgtctcaacccgcgagac

SEQ ID NO: 296296 - DNA, 50 bp, Artificial
  Synthetic oligonucleotide
aaccagccgcggccactgccaatggacaaccagcttgtgtcggcgaacct

SEQ ID NO: 296297 - DNA, 50 bp, Artificial
  Synthetic oligonucleotide
aaccacgttgagtcggcctggtagctatcaacggttgggtgtcggtgccc

SEQ ID NO: 296298 - DNA, 50 bp, Artificial
  Synthetic oligonucleotide
aaccctaccgagtcacatggccctgcgtgtcttgaccgttggacgctacg

SEQ ID NO: 296299 - DNA, 50 bp, Artificial
  Synthetic oligonucleotide
aacccgttggaagtgcgagtatggttcgaacgcgaggccggtgggcatga

SEQ ID NO: 296300 - DNA, 50 bp, Artificial
  Synthetic oligonucleotide
ctatggtatcctgggtataaaagtttgggtatttaacggtgaacagacac

SEQ ID NO: 296301 - DNA, 50 bp, Artificial
  Synthetic oligonucleotide
ccggtggagttgcgagaactgcggtaaaaggcacaacgtcgtccgcgaga

SEQ ID NO: 296302 - DNA, 50 bp, Artificial
  Synthetic oligonucleotide
aacccgtacgactgcatggcagatgtcgccggacacaatcgcatggctcc

SEQ ID NO: 296303 - DNA, 50 bp, Artificial
  Synthetic oligonucleotide
aacccggtagcttgcaagaaccacaccgtgctgtcgagccactccctgaa

SEQ ID NO: 296304 - DNA, 50 bp, Artificial
  Synthetic oligonucleotide
aacccgggcgcgtgccgagacaacgccgcactctgttaagcgttcccttc

SEQ ID NO: 296305 - DNA, 57 bp, Artificial
  Synthetic oligonucleotide
cctatcgctgcattggcagatcccctcatgattccccacaccaaccatggggcacaa

SEQ ID NO: 296306 - DNA, 50 bp, Artificial
  Synthetic oligonucleotide
aacccgctgccgctttacgtcggagcgtcgccgtacatgggcaagtgtga

SEQ ID NO: 296307 - DNA, 50 bp, Artificial
  Synthetic oligonucleotide
aacccgcgcctgtgtcccctcagctgtttccgaaccccgcggagtcactg

SEQ ID NO: 296308 - DNA, 50 bp, Artificial
  Synthetic oligonucleotide
ccaccgcgagggatgcaccatgggtggcgcactgctgtaacgcatgtatc

SEQ ID NO: 296309 - DNA, 50 bp, Artificial
  Synthetic oligonucleotide
aacccgccactcctgctagtgtgagcgttgctgtgaaggacagaccccct

SEQ ID NO: 296310 - DNA, 50 bp, Artificial
  Synthetic oligonucleotide
cagactctgcagctaaggcgactaaaactgagcggtacgctgcctgcgga

SEQ ID NO: 296311 - DNA, 50 bp, Artificial
  Synthetic oligonucleotide
aacccgcaatcgtcccgtcccagcagagacactgcgtcactcctcgccct

SEQ ID NO: 296312 - DNA, 50 bp, Artificial
  Synthetic oligonucleotide
aacccgcaagtcgcgaggcagctccacggtatgaagggactgatgggacg

SEQ ID NO: 296313 - DNA, 50 bp, Artificial
  Synthetic oligonucleotide
aacccgattcccttgaccctttgtccgttcccgctcgccagttgtcggcg

SEQ ID NO: 296314 - DNA, 50 bp, Artificial
  Synthetic oligonucleotide
cctagatggagttgacgtggaccaattattacactctaaaagagggccac

SEQ ID NO: 296315 - DNA, 50 bp, Artificial
  Synthetic oligonucleotide
aacccctcgcccaacacagcacacgcccatctgctacgaacgcccatgtt

SEQ ID NO: 296316 - DNA, 57 bp, Artificial
  Synthetic oligonucleotide
ggtcttcccttgacccaaacggcccagtgatgaactgccccatgtcaaaacttgcga

SEQ ID NO: 296317 - DNA, 50 bp, Artificial
  Synthetic oligonucleotide
cagagacaaggtgcaccgagggccgtagccctggcaactcttgccaaaga

SEQ ID NO: 296318 - DNA, 50 bp, Artificial
  Synthetic oligonucleotide
aaccccgttcagtgacaaaccccctggcgattaggttcctaggccgaggc

SEQ ID NO: 296319 - DNA, 50 bp, Artificial
  Synthetic oligonucleotide
cagagacgcaccccgttcctcgctggggatgcacaagtatacggacaggc

SEQ ID NO: 296320 - DNA, 50 bp, Artificial
  Synthetic oligonucleotide
aaccccgcatgcacggactcctcaacaaccacaggagcctcgcgtgagat

SEQ ID NO: 296321 - DNA, 50 bp, Artificial
  Synthetic oligonucleotide
tctttctcgtgttaaaattgtagaaagacgttcaaattttgataagtctg

SEQ ID NO: 296322 - DNA, 50 bp, Artificial
  Synthetic oligonucleotide
cagagagtcagccgcgtgggtcacagcactcgcttacgtcgggacagctt

SEQ ID NO: 296323 - DNA, 50 bp, Artificial
  Synthetic oligonucleotide
tctttcttgcgccagagccactctcaccatacgctgtggaggccactgct

SEQ ID NO: 296324 - DNA, 50 bp, Artificial
  Synthetic oligonucleotide
aacccccttcaccgccgtgactcctcgcaacagatgcgtgacgcgtaaat

SEQ ID NO: 296325 - DNA, 50 bp, Artificial
  Synthetic oligonucleotide
aacatcatgttcggccccgatgacttgtttcagggaggggcggcctagct

SEQ ID NO: 296326 - DNA, 50 bp, Artificial
  Synthetic oligonucleotide
aacatcaggcccaagcaaaagcgggcgtctcgctagaagccgcgtcgaca

SEQ ID NO: 296327 - DNA, 56 bp, Artificial
  Synthetic oligonucleotide
gatatatttggggatttagttatgttctccacaattacgagcgaaacgttatatcc

SEQ ID NO: 296328 - DNA, 50 bp, Artificial
  Synthetic oligonucleotide
aacatagtaccctgaggcggccctcgtgcactcagtggcgctcttgcagg

SEQ ID NO: 296329 - DNA, 50 bp, Artificial
  Synthetic oligonucleotide
aacatacagttccgagagggcccgacctatggcggcggggtacagtgacg

SEQ ID NO: 296330 - DNA, 50 bp, Artificial
  Synthetic oligonucleotide
aacagtcgggatgccccggggattaggtgggttgggggcatttggatgat

SEQ ID NO: 296331 - DNA, 50 bp, Artificial
  Synthetic oligonucleotide
ccacagcagcgagtcaacgcacacgcgtgccaagcacttcgacattgcct

SEQ ID NO: 296332 - DNA, 50 bp, Artificial
  Synthetic oligonucleotide
aacagtcacgagctgagacgctggcccgtccgaagtctggcggggacaag

SEQ ID NO: 296333 - DNA, 50 bp, Artificial
  Synthetic oligonucleotide
cctactggtctccgaaacgaggcccgacgcaagacggcgtaacgtgccat

SEQ ID NO: 296334 - DNA, 50 bp, Artificial
  Synthetic oligonucleotide
aacaggtgacagcggtgaaccggtgacgggtggcccagaggacgcaatcc

SEQ ID NO: 296335 - DNA, 50 bp, Artificial
  Synthetic oligonucleotide
aacaggtcggtcaaggaccccggtgagtatggcgaagccagaccgtgtgt

SEQ ID NO: 296336 - DNA, 50 bp, Artificial
  Synthetic oligonucleotide
aacaggggctacgtgtagctcggccatgccacaggggtctggcacagtta

SEQ ID NO: 296337 - DNA, 50 bp, Artificial
  Synthetic oligonucleotide
ccacacgcgtgtagtggccaacgcagccccgcacagaatcacgcaagcgc

SEQ ID NO: 296338 - DNA, 57 bp, Artificial
  Synthetic oligonucleotide
aaagccgcggtggcacccccgaggtatggcgatgcagcatttcactccactccatgg

SEQ ID NO: 296339 - DNA, 50 bp, Artificial
  Synthetic oligonucleotide
aacagggcttgacgaacaggtcacaagacactctcacgcacgcacgcccc

SEQ ID NO: 296340 - DNA, 50 bp, Artificial
  Synthetic oligonucleotide
tgcaacagtggatggacataaaactggagtgcccaacgtgtcgtggtccc

SEQ ID NO: 296341 - DNA, 50 bp, Artificial
  Synthetic oligonucleotide
aacagggacactccacgaaccctccccacggtccacccactgcatccgaa

SEQ ID NO: 296342 - DNA, 50 bp, Artificial
  Synthetic oligonucleotide
aacaggcacggtatccccggcgttttgcgcgtgcgtagttctttgtgcgc

SEQ ID NO: 296343 - DNA, 50 bp, Artificial
  Synthetic oligonucleotide
cagcatcctccaccaatgctcccccttcggtaccacccgatgcgccgagt

SEQ ID NO: 296344 - DNA, 50 bp, Artificial
  Synthetic oligonucleotide
aacaggatccgacccccgggaagcgacgttccgcgaacacgcgtgtacac

SEQ ID NO: 296345 - DNA, 50 bp, Artificial
  Synthetic oligonucleotide
aacaggaggctcacacggcgcggtcaagcgtaggcaccacagaacctgat

SEQ ID NO: 296346 - DNA, 50 bp, Artificial
  Synthetic oligonucleotide
aacaggaaggttcccatttgccacgccccgtttcgtgcagcctcagcgac

SEQ ID NO: 296347 - DNA, 50 bp, Artificial
  Synthetic oligonucleotide
aacagctcgcatgcgggttagttccgcgtccagccgtcgaatctctccac

SEQ ID NO: 296348 - DNA, 50 bp, Artificial
  Synthetic oligonucleotide
aacagctcacagtgtgcgccatctcagggtccagtgcactccccttcgtc

SEQ ID NO: 296349 - DNA, 57 bp, Artificial
  Synthetic oligonucleotide
caggtttattactagcttctagatatactagtgatatgtcaaacgccttctctagtg

SEQ ID NO: 296350 - DNA, 50 bp, Artificial
  Synthetic oligonucleotide
aacagctacaggagcgggaaactctcagctccaccaaccatgcgcgggcc

SEQ ID NO: 296351 - DNA, 50 bp, Artificial
  Synthetic oligonucleotide
aacagcggggaaaaggaagcgcggtggagacgcctggtcggacccaatga

SEQ ID NO: 296352 - DNA, 50 bp, Artificial
  Synthetic oligonucleotide
aacagcgctatgtataggggaatcagcgcgtgagttggtcggcgctccgc

SEQ ID NO: 296353 - DNA, 50 bp, Artificial
  Synthetic oligonucleotide
aaccacgtgcggtgatacctggcggtagttggctagggctgtgcgtacag

SEQ ID NO: 296354 - DNA, 50 bp, Artificial
  Synthetic oligonucleotide
aaccacgtctggttgcagagggtgaaccgcggcagcttagcgacgttgca

SEQ ID NO: 296355 - DNA, 50 bp, Artificial
  Synthetic oligonucleotide
aaccacgtctgaagaggggcgtgtggaggatgcagcgagtgcgccgctgg

SEQ ID NO: 296356 - DNA, 50 bp, Artificial
  Synthetic oligonucleotide
aaccacgcgcctgcggatgagcgttcgcagcctaatcgaggtgacgcttg

SEQ ID NO: 296357 - DNA, 50 bp, Artificial
  Synthetic oligonucleotide
aaccacgcacccaaacgaccagatgtccgcccgagagtcgtagggcgttg

SEQ ID NO: 296358 - DNA, 50 bp, Artificial
  Synthetic oligonucleotide
aaccaccccaacagacgtgggcaccctcctagacatgcctgcagggacat

SEQ ID NO: 296359 - DNA, 50 bp, Artificial
  Synthetic oligonucleotide
aaccaccaggttgtcgtttcttcgctcccctttggggcggaacggaggct

SEQ ID NO: 296360 - DNA, 57 bp, Artificial
  Synthetic oligonucleotide
cctcgattgttgtgtgcttccaataattaatcaggccaatatctgaaaggaaacatg

SEQ ID NO: 296361 - DNA, 50 bp, Artificial
  Synthetic oligonucleotide
tgagcattcttcggctacccctccaggggatcactctccgcgggggccac

SEQ ID NO: 296362 - DNA, 50 bp, Artificial
  Synthetic oligonucleotide
aaccacacgcggaacgcttggccccggcggctctctctcgtggcccaaga

SEQ ID NO: 296363 - DNA, 50 bp, Artificial
  Synthetic oligonucleotide
aaccaagtgggcgggctgcgacatgcacctctcaaggaaccggtgtctgc

SEQ ID NO: 296364 - DNA, 50 bp, Artificial
  Synthetic oligonucleotide
tgaggaaccaacatgacacggaaataggatctacacggaccagtaatctt

SEQ ID NO: 296365 - DNA, 50 bp, Artificial
  Synthetic oligonucleotide
aaccaaactgggtgggcccaaggctgtgtcagcagacggatgagggaccc

SEQ ID NO: 296366 - DNA, 50 bp, Artificial
  Synthetic oligonucleotide
aacatttgcactcgctggtttctgccgagtgtacccatgcggggacgcta

SEQ ID NO: 296367 - DNA, 50 bp, Artificial
  Synthetic oligonucleotide
aacattggacgatcaccgcttatcacgacccccgctggcctcaagcgcag

SEQ ID NO: 296368 - DNA, 50 bp, Artificial
  Synthetic oligonucleotide
cagattctgatacaactggagactttgatagtaggtcgagcggaacacta

SEQ ID NO: 296369 - DNA, 50 bp, Artificial
  Synthetic oligonucleotide
aacattcagccgtgtacccaccagacaggttcgcgtggggtagaagcggc

SEQ ID NO: 296370 - DNA, 50 bp, Artificial
  Synthetic oligonucleotide
aacattcacgagcttgactgggcatcagacacttcgcgtgccctccgccc

SEQ ID NO: 296371 - DNA, 57 bp, Artificial
  Synthetic oligonucleotide
ttgtggcacacgatcccaatcactgccagcctatctcgcacgttgagtcgcctcgtg

SEQ ID NO: 296372 - DNA, 50 bp, Artificial
  Synthetic oligonucleotide
aacatgggcgccgcacaaccttagtgtgccctatccttactggccacgct

SEQ ID NO: 296373 - DNA, 50 bp, Artificial
  Synthetic oligonucleotide
aacatggaggcgcggtcctaccgcaggattcgacggatgctcggagacag

SEQ ID NO: 296374 - DNA, 50 bp, Artificial
  Synthetic oligonucleotide
ctagctcagtgggtaagttttagcacaagcgtaggtctcatatctagtgt

SEQ ID NO: 296375 - DNA, 50 bp, Artificial
  Synthetic oligonucleotide
aacatgctcaggaaacgctacgcccatccggttcctctcatggtccggct

SEQ ID NO: 296376 - DNA, 50 bp, Artificial
  Synthetic oligonucleotide
aacatgcgccccgtgagtgcgtattgccacgaccagatctgcatggcatt

SEQ ID NO: 296377 - DNA, 50 bp, Artificial
  Synthetic oligonucleotide
aacatgccggctccctcggaccaccacgaagacaccacgtcacgcatgac

SEQ ID NO: 296378 - DNA, 50 bp, Artificial
  Synthetic oligonucleotide
ccggtgttgcctcgtgggacggaacttgctctgtttggcaagttgcacgg

SEQ ID NO: 296379 - DNA, 50 bp, Artificial
  Synthetic oligonucleotide
ccacagcatgcgcttcaccgacagatgcggtatccgcggctggccccctc

SEQ ID NO: 296380 - DNA, 50 bp, Artificial
  Synthetic oligonucleotide
ccccgtgcccattcattacggtcagagggcggcatgccaaacggacatgc

SEQ ID NO: 296381 - DNA, 50 bp, Artificial
  Synthetic oligonucleotide
agaagagccagtttgtagatgtgcagatagatgcaattgtgccaccgaac

SEQ ID NO: 296382 - DNA, 57 bp, Artificial
  Synthetic oligonucleotide
ctcggtaagacatgacgcatatacaggcgtttattcctcctgtcaacctattgtttc

SEQ ID NO: 296383 - DNA, 50 bp, Artificial
  Synthetic oligonucleotide
agaactgcggtaaaaggcacaacgtcgtccgcgagagctgcctacgctgc

SEQ ID NO: 296384 - DNA, 50 bp, Artificial
  Synthetic oligonucleotide
agaacgggaggggaggcgcatacggaaaggacgtatcacccccgcatgcg

SEQ ID NO: 296385 - DNA, 50 bp, Artificial
  Synthetic oligonucleotide
agaacgcggaagggctgtggtggaaagaggcaatgcagcgttcggggatg

SEQ ID NO: 296386 - DNA, 50 bp, Artificial
  Synthetic oligonucleotide
agaacgagtgccctcgcatgtttccccaaaatgagcgtccgccgagagga

SEQ ID NO: 296387 - DNA, 50 bp, Artificial
  Synthetic oligonucleotide
agaaccgcgcacgtcaggtctgtcctggctgttcttgagtgctgctgagc

SEQ ID NO: 296388 - DNA, 50 bp, Artificial
  Synthetic oligonucleotide
agaacatgggggccgcctcgacaagtagacaggcacgagcatacacgcac

SEQ ID NO: 296389 - DNA, 50 bp, Artificial
  Synthetic oligonucleotide
agaacagggagctgctaaaggtgcgaggcgcgagcccccaaaatggtgca

SEQ ID NO: 296390 - DNA, 50 bp, Artificial
  Synthetic oligonucleotide
atagcagctggcgcgagagccccttcattgccgcgcttatgcgtacgtgg

SEQ ID NO: 296391 - DNA, 50 bp, Artificial
  Synthetic oligonucleotide
atagcgcttcccctgtgcgagcgcgtgagagggctgcaaacccaccaagc

SEQ ID NO: 296392 - DNA, 50 bp, Artificial
  Synthetic oligonucleotide
agaaatgccctccacccacgtccacgtccgtgtgatgcgcgcgagtgttt

SEQ ID NO: 296393 - DNA, 57 bp, Artificial
  Synthetic oligonucleotide
ccaatatgaccgtttcatgtatgattaccggaattacatgtagaagttaatacggag

SEQ ID NO: 296394 - DNA, 50 bp, Artificial
  Synthetic oligonucleotide
atagctcccggcacgccgagtaccacgataaccctgtctgcgcgagttgt

SEQ ID NO: 296395 - DNA, 50 bp, Artificial
  Synthetic oligonucleotide
agaaaggcggaccggtgcgagccaaccctccatcctgtcgagtgctcaac

SEQ ID NO: 296396 - DNA, 50 bp, Artificial
  Synthetic oligonucleotide
ataggagtcgccttcacgtcctgccgacctggagtcgttggaggccctcc

SEQ ID NO: 296397 - DNA, 50 bp, Artificial
  Synthetic oligonucleotide
agaaacgcgcatccataacgagtacggaaaccgattttagtgcacaccta

SEQ ID NO: 296398 - DNA, 50 bp, Artificial
  Synthetic oligonucleotide
cgcatgcaagatcgcgacactacgggagggggagggaccaccacccacgc

SEQ ID NO: 296399 - DNA, 50 bp, Artificial
  Synthetic oligonucleotide
agaaacatgcgcgccctattcctgcccccgtgcatgtctgccgggaagac

SEQ ID NO: 296400 - DNA, 50 bp, Artificial
  Synthetic oligonucleotide
actttgccaccgctcagttggttttccgctccgtcgaagcgtccaggggg

SEQ ID NO: 296401 - DNA, 50 bp, Artificial
  Synthetic oligonucleotide
ccccgggccgcaatgtatccccctatcgtcctctcttccgcgaatccgaa

SEQ ID NO: 296402 - DNA, 50 bp, Artificial
  Synthetic oligonucleotide
actttgaatttgggctcgctccagggggtgctacccacgtcgggagggat

SEQ ID NO: 296403 - DNA, 50 bp, Artificial
  Synthetic oligonucleotide
cgcatgtggaatgcccttggtaccagccgcaccgcatcgtgtgccgctac

SEQ ID NO: 296404 - DNA, 60 bp, Artificial
  Synthetic oligonucleotide
ggactcttctgttgataaagattcttctgttgataaagattcttctgttgataaaggctc

SEQ ID NO: 296405 - DNA, 57 bp, Artificial
  Synthetic oligonucleotide
agcagtggttgccgggtctgctgaatcccaggtatgtcgtcagggaagaccgatgtg

SEQ ID NO: 296406 - DNA, 50 bp, Artificial
  Synthetic oligonucleotide
acttgttggcttgctggctcagctgacaccggtgcggacaggatggcagt

SEQ ID NO: 296407 - DNA, 50 bp, Artificial
  Synthetic oligonucleotide
cccgtggccaaaggatggctgggccgacttgggtaggtgagtaagggtgc

SEQ ID NO: 296408 - DNA, 50 bp, Artificial
  Synthetic oligonucleotide
agaccaacggacctgagagaggtgcacagcagtgtgtgcgaccaccacgc

SEQ ID NO: 296409 - DNA, 50 bp, Artificial
  Synthetic oligonucleotide
cgcatccggaagcacgcaattcaaggggcaacgagacgagggacaccaga

SEQ ID NO: 296410 - DNA, 50 bp, Artificial
  Synthetic oligonucleotide
atacggtgtgtttcctcagcatcgggggcgggagcacttccaatgggggt

SEQ ID NO: 296411 - DNA, 50 bp, Artificial
  Synthetic oligonucleotide
agacacgtcaccaaaccgtcgcagaggtgcagctctccactgcctccgcc

SEQ ID NO: 296412 - DNA, 50 bp, Artificial
  Synthetic oligonucleotide
agacacccgacggtggttcagacgcagggctcagcactactcctgtgagc

SEQ ID NO: 296413 - DNA, 50 bp, Artificial
  Synthetic oligonucleotide
gatagaattaggttaatattaaagtttgtacatttatgtattgcacttgg

SEQ ID NO: 296414 - DNA, 50 bp, Artificial
  Synthetic oligonucleotide
agacaatggccagttgtgacgcaagtgtctgggctaccagcacccccgct

SEQ ID NO: 296415 - DNA, 50 bp, Artificial
  Synthetic oligonucleotide
agacaacgggggagcgacgcaccaggtggtaaacaaagctgaggccgtcg

SEQ ID NO: 296416 - DNA, 53 bp, Artificial
  Synthetic oligonucleotide
cccgtcgttaaagtttggtactcctgcctcaattcttgtttgaggggctggta

SEQ ID NO: 296417 - DNA, 50 bp, Artificial
  Synthetic oligonucleotide
gataccacggcagtcggctcggctcactgctgcccggtggcttatacacg

SEQ ID NO: 296418 - DNA, 50 bp, Artificial
  Synthetic oligonucleotide
agaatttgcaccgcacgaccgaactggagcgagctgagttggagaggcgg

SEQ ID NO: 296419 - DNA, 50 bp, Artificial
  Synthetic oligonucleotide
agaattcttcggaagggccatagtgcggagttgagggcgggaccgggata

SEQ ID NO: 296420 - DNA, 50 bp, Artificial
  Synthetic oligonucleotide
cgcatcctttccgcccgaccccctccgccaagatctactgtgaggcacac

SEQ ID NO: 296421 - DNA, 50 bp, Artificial
  Synthetic oligonucleotide
cccgtttacaagtgcgtcgtctccgttgcgcctcttgcgctcaccaccat

SEQ ID NO: 296422 - DNA, 50 bp, Artificial
  Synthetic oligonucleotide
agaatcgcaccgtgcggccaccgacacagttgccatggctaccacctgca

SEQ ID NO: 296423 - DNA, 50 bp, Artificial
  Synthetic oligonucleotide
gataatgtacagaaggagccatgtgttgtactcttggtctagcagtgatg

SEQ ID NO: 296424 - DNA, 50 bp, Artificial
  Synthetic oligonucleotide
agaagtgccttcccgggttggctgcgcgtgaagaggcagcgaattacccc

SEQ ID NO: 296425 - DNA, 50 bp, Artificial
  Synthetic oligonucleotide
agaaggttccctcctgtagcgtgtgcgactcgttgctttccctgcgcacc

SEQ ID NO: 296426 - DNA, 50 bp, Artificial
  Synthetic oligonucleotide
agaagggcgctcgtgaaccctaatatagcgttttgtcgggagagccttag

SEQ ID NO: 296427 - DNA, 57 bp, Artificial
  Synthetic oligonucleotide
taccacgatatcgatacgatcagttaatgtatttaggatggaaatccttattaccgt

SEQ ID NO: 296428 - DNA, 50 bp, Artificial
  Synthetic oligonucleotide
agaagggacagcggttcggtgcttctctcgcgctgcggacgtttcggggt

SEQ ID NO: 296429 - DNA, 50 bp, Artificial
  Synthetic oligonucleotide
agaaggaccccggaatggccacgagaaacacgcgagtttgcaacgagccg

SEQ ID NO: 296430 - DNA, 50 bp, Artificial
  Synthetic oligonucleotide
agaagctcaacgaaacagatgcgtgacccccagaagggcaacgcagccgt

SEQ ID NO: 296431 - DNA, 50 bp, Artificial
  Synthetic oligonucleotide
agaagcatgtaccaagtgggcacccccgccggtgtagaaacgcttgcaca

SEQ ID NO: 296432 - DNA, 50 bp, Artificial
  Synthetic oligonucleotide
agaagcacaagcaagatgttggctcccccatgctgtcgcggagtgctgcg

SEQ ID NO: 296433 - DNA, 50 bp, Artificial
  Synthetic oligonucleotide
actgtgcaacctggtcattttgtccaacggcatacgcccgccatgcgcta

SEQ ID NO: 296434 - DNA, 50 bp, Artificial
  Synthetic oligonucleotide
gagtccacgatacgccatagcgctgccgagtttccgcggtgcccgtacca

SEQ ID NO: 296435 - DNA, 50 bp, Artificial
  Synthetic oligonucleotide
actgtcctgctgccctgtagggatagtgtggctcaggggtgtgccgctcg

SEQ ID NO: 296436 - DNA, 50 bp, Artificial
  Synthetic oligonucleotide
actgtcatgccagcgcgtttgtgcatgcgttgctcccactggagagccga

SEQ ID NO: 296437 - DNA, 50 bp, Artificial
  Synthetic oligonucleotide
ggaaaccacagttaggtccaccccctcacttcgcatcgccacacgcctct

SEQ ID NO: 296438 - DNA, 50 bp, Artificial
  Synthetic oligonucleotide
cctattaacgctaaagaaaatcgtcgggtagaagtaaaagctcccggtat

SEQ ID NO: 296439 - DNA, 50 bp, Artificial
  Synthetic oligonucleotide
atcacccacgtgccaactctctgtctgggcgagtgccatcatgcgtcacg

SEQ ID NO: 296440 - DNA, 50 bp, Artificial
  Synthetic oligonucleotide
gagtagtgcaggtctaacaacgcgtgatccttgcgactctggtggtctag

SEQ ID NO: 296441 - DNA, 50 bp, Artificial
  Synthetic oligonucleotide
actggtgtggccctatccagcagcgaccatacggcgtggtcctccctcgt

SEQ ID NO: 296442 - DNA, 50 bp, Artificial
  Synthetic oligonucleotide
actggggaactaaacaacggcgctcgggagctggaagcgcgtcagtgggg

SEQ ID NO: 296443 - DNA, 50 bp, Artificial
  Synthetic oligonucleotide
actgggcttcagacgaggctggggtatgggccagtggacagactgtcggt

SEQ ID NO: 296444 - DNA, 50 bp, Artificial
  Synthetic oligonucleotide
gagtacctacgtgcgaaacgcggcattgcgtcttttctgcgaagagcttt

SEQ ID NO: 296445 - DNA, 50 bp, Artificial
  Synthetic oligonucleotide
actgggcgtgccattttacgcacacccagggcccaccttgcactcgttcg

SEQ ID NO: 296446 - DNA, 50 bp, Artificial
  Synthetic oligonucleotide
ccccgccagagaggcatggcggtcactcgtcggatgtggtgtaaagagca

SEQ ID NO: 296447 - DNA, 50 bp, Artificial
  Synthetic oligonucleotide
actggcactgtcagtccagctacccaccccgtcacttgtcgcccccgcct

SEQ ID NO: 296448 - DNA, 50 bp, Artificial
  Synthetic oligonucleotide
actggagaggaataaggggcatcgggtcggagcagaggccccaggagcgc

SEQ ID NO: 296449 - DNA, 57 bp, Artificial
  Synthetic oligonucleotide
ggttgggcaagtaatactaaatatccttttatgggatctattagatcaacagctcaa

SEQ ID NO: 296450 - DNA, 50 bp, Artificial
  Synthetic oligonucleotide
actggaagcgcaagagaagccaacgcgccgccactgaagataggctcctg

SEQ ID NO: 296451 - DNA, 50 bp, Artificial
  Synthetic oligonucleotide
actgctctgtgccgtttgctcctatcggggtggtccgcttcgccgttccg

SEQ ID NO: 296452 - DNA, 50 bp, Artificial
  Synthetic oligonucleotide
atcagcgacgaaggagccttcacgggcatctaccctacgcaccagcctcc

SEQ ID NO: 296453 - DNA, 50 bp, Artificial
  Synthetic oligonucleotide
atcaggtatcgccagcaggagacccgtaggctgtgtgggccgagcgagtg

SEQ ID NO: 296454 - DNA, 50 bp, Artificial
  Synthetic oligonucleotide
actgctaccctccgaccaaggtcaccttccctccgcgtcctctgcaatcc

SEQ ID NO: 296455 - DNA, 50 bp, Artificial
  Synthetic oligonucleotide
cgacggcctccaatgaggtgaggggcggcgtctgtgggcggtacgcagac

SEQ ID NO: 296456 - DNA, 50 bp, Artificial
  Synthetic oligonucleotide
actgcgctgcataccgcggggtgtcatactgccccacgtgaaagagggga

SEQ ID NO: 296457 - DNA, 50 bp, Artificial
  Synthetic oligonucleotide
cgccaaaccacgcagggccacacacaatcctcttgcgaacttttccgcca

SEQ ID NO: 296458 - DNA, 50 bp, Artificial
  Synthetic oligonucleotide
acttgttcggccccgtctggccagcatccaagtcatggctgcgcggaacc

SEQ ID NO: 296459 - DNA, 50 bp, Artificial
  Synthetic oligonucleotide
acttgtgtaccgtctcactgcactcgcgtcgactctccctacggccccca

SEQ ID NO: 296460 - DNA, 54 bp, Artificial
  Synthetic oligonucleotide
ttggggtaaggctcccggtcaaagaggttctcactctgccccctacgttagatc

SEQ ID NO: 296461 - DNA, 50 bp, Artificial
  Synthetic oligonucleotide
atatcggcagccaaagaggctcatatgcaggcccgccttggggcaatcga

SEQ ID NO: 296462 - DNA, 50 bp, Artificial
  Synthetic oligonucleotide
atatcgggagatgcgatgcgcaacgagggagcaggcgacatgctggtagc

SEQ ID NO: 296463 - DNA, 50 bp, Artificial
  Synthetic oligonucleotide
gcttcggtcttctgtgtatccatgcgggcggtcgaaaatccgttgtgttt

SEQ ID NO: 296464 - DNA, 50 bp, Artificial
  Synthetic oligonucleotide
gcttcgtcgaaaatggtagcacttgtgcgttgagcagaggaaagagcgca

SEQ ID NO: 296465 - DNA, 50 bp, Artificial
  Synthetic oligonucleotide
acttgccacaaaagctcactgcggcctcgggtggtagcagcccgcgtcga

SEQ ID NO: 296466 - DNA, 50 bp, Artificial
  Synthetic oligonucleotide
acttgcagcggggtgcagtgtgcgcgtcctaccggcttaccttccgtgtc

SEQ ID NO: 296467 - DNA, 50 bp, Artificial
  Synthetic oligonucleotide
atatgggcgccggcacatacttgaaatcggggtgacggccagggtcctac

SEQ ID NO: 296468 - DNA, 50 bp, Artificial
  Synthetic oligonucleotide
atatgtcgtgctgtacgttacagttttgcagatatcggagacattatacg

SEQ ID NO: 296469 - DNA, 50 bp, Artificial
  Synthetic oligonucleotide
acttctcctctctcgcacggggcacagaacgccccaaacgaaggcgccac

SEQ ID NO: 296470 - DNA, 50 bp, Artificial
  Synthetic oligonucleotide
ccctccatcctgagaagggcctcgcaaagcgccacgacaggcttgtcgcc

SEQ ID NO: 296471 - DNA, 56 bp, Artificial
  Synthetic oligonucleotide
aggtttatctcctgtgggacctcctgttcgtagaggacgacgttgcctgcctcgta

SEQ ID NO: 296472 - DNA, 50 bp, Artificial
  Synthetic oligonucleotide
atatgtgcgtggcagggcctcgttccgtccgcgcgtaggtgtctgagaag

SEQ ID NO: 296473 - DNA, 50 bp, Artificial
  Synthetic oligonucleotide
acttcgcgcctctcactgcagcgggaacagagaacgcaccggcagagacc

SEQ ID NO: 296474 - DNA, 50 bp, Artificial
  Synthetic oligonucleotide
atattccaccgatacctccgaaactttttacaaactgagatccctctggc

SEQ ID NO: 296475 - DNA, 50 bp, Artificial
  Synthetic oligonucleotide
acttccgttcgtgcgttgcagcaactcgactctccgcctcttcacgcgta

SEQ ID NO: 296476 - DNA, 50 bp, Artificial
  Synthetic oligonucleotide
acttccccttcgctgcagcacacaatcacgtaagggtgcttccccctcgc

SEQ ID NO: 296477 - DNA, 50 bp, Artificial
  Synthetic oligonucleotide
acttccatggcgctcagccaacacacgagttgcgtgcggaacgtcaagcg

SEQ ID NO: 296478 - DNA, 50 bp, Artificial
  Synthetic oligonucleotide
acttccagcgcggggccacggggaaattaagccactggcgggtataccaa

SEQ ID NO: 296479 - DNA, 50 bp, Artificial
  Synthetic oligonucleotide
acttcacgtacgcccgctctcggcgctacaaagggttacggcggtggaat

SEQ ID NO: 296480 - DNA, 50 bp, Artificial
  Synthetic oligonucleotide
ccccgctccagatgctcctaggacaagaaaaccccaacgagcgcggactt

SEQ ID NO: 296481 - DNA, 50 bp, Artificial
  Synthetic oligonucleotide
cgcattcccccaacgtgtttcacgtgcatcccactgcgtctcggagcatt

SEQ ID NO: 296482 - DNA, 57 bp, Artificial
  Synthetic oligonucleotide
ctacgtgctaaaggattaactcttggtatattaagtgtatctacatggtcattagtg

SEQ ID NO: 296483 - DNA, 50 bp, Artificial
  Synthetic oligonucleotide
actgtgggcatacgcgaaagggggtaggcgtatgtgcggctcggcaacac

SEQ ID NO: 296484 - DNA, 50 bp, Artificial
  Synthetic oligonucleotide
actgtggaactgcagccgtaagcacgccgcatgaatgcagggcgaagtgc

SEQ ID NO: 296485 - DNA, 50 bp, Artificial
  Synthetic oligonucleotide
agagggcgcaacgcgcctggaagccccaccaacctgacctcatttacaat

SEQ ID NO: 296486 - DNA, 50 bp, Artificial
  Synthetic oligonucleotide
cccctccagtggggcccacgtcaactcccgaacagccctgtgatgcgaat

SEQ ID NO: 296487 - DNA, 50 bp, Artificial
  Synthetic oligonucleotide
agagggcgaatggagtggggacacgagtggtaagcacgcggcctccgtgt

SEQ ID NO: 296488 - DNA, 50 bp, Artificial
  Synthetic oligonucleotide
agagggatcgaggcagatacgtgcgcagatcccggtggtgaggagacggc

SEQ ID NO: 296489 - DNA, 50 bp, Artificial
  Synthetic oligonucleotide
agagggacaggcatcaagcacggagtggggtgctcctcgcgcacatggac

SEQ ID NO: 296490 - DNA, 50 bp, Artificial
  Synthetic oligonucleotide
agaggcggcggtagtgctccaacagggcatggtcaagagcgcccactgtg

SEQ ID NO: 296491 - DNA, 50 bp, Artificial
  Synthetic oligonucleotide
gatgggtctggatggtgcactcacgggcaaggcgaccccagtaacagacc

SEQ ID NO: 296492 - DNA, 50 bp, Artificial
  Synthetic oligonucleotide
agaggcgcttcaatgcagcctctccgcccttcagtcggagctgacttgtg

SEQ ID NO: 296493 - DNA, 57 bp, Artificial
  Synthetic oligonucleotide
gctgtaacaatgatgattgcaattcctacaggtaccaaaattttcaattggttaagt

SEQ ID NO: 296494 - DNA, 50 bp, Artificial
  Synthetic oligonucleotide
agaggccacctcgcagaaccgcaggtgggtataccaccgctgtacccacc

SEQ ID NO: 296495 - DNA, 50 bp, Artificial
  Synthetic oligonucleotide
cccgtctagcggcccagtgtccgatacgccttctccgctgtccccgaaac

SEQ ID NO: 296496 - DNA, 50 bp, Artificial
  Synthetic oligonucleotide
agaggagactgcccgacgacacgcacacacgcgctcctctccagagagtg

SEQ ID NO: 296497 - DNA, 50 bp, Artificial
  Synthetic oligonucleotide
agagctgcactacctgcccgtgcctcactcgccacaaatcggcgtgagag

SEQ ID NO: 296498 - DNA, 50 bp, Artificial
  Synthetic oligonucleotide
agtggtggcagaggacgtgtaggtgtgggtgtgctagcgaccctggtcag

SEQ ID NO: 296499 - DNA, 50 bp, Artificial
  Synthetic oligonucleotide
gatgctgtacatgccgaactatacaatgccgctgatacactttgcaagtg

SEQ ID NO: 296500 - DNA, 50 bp, Artificial
  Synthetic oligonucleotide
agtgtaggaaaggagaccgaaacgcagagcatcgctgccacactccggga

SEQ ID NO: 296501 - DNA, 50 bp, Artificial
  Synthetic oligonucleotide
gatgcgaggttagggtcgacagcgacagatggcaccactgtgacgccggc

SEQ ID NO: 296502 - DNA, 50 bp, Artificial
  Synthetic oligonucleotide
gatgcaatgatattaagtgttcgtacgtgctatgctaacacgttaggtcg

SEQ ID NO: 296503 - DNA, 50 bp, Artificial
  Synthetic oligonucleotide
agagcgcgccctaaggacggtacttcacaatgcccgttacagtggcgccc

SEQ ID NO: 296504 - DNA, 57 bp, Artificial
  Synthetic oligonucleotide
cttgccgctactccgcactactgctccgtgtgccatgcatactgcttccgtagagct

SEQ ID NO: 296505 - DNA, 50 bp, Artificial
  Synthetic oligonucleotide
agtgtgtgccggtggatggggcagagtacagcgcggaggaagagaaccac

SEQ ID NO: 296506 - DNA, 50 bp, Artificial
  Synthetic oligonucleotide
agagcctttcttagtttagcggcgtcccgagggtggttgcccgcctgggg

SEQ ID NO: 296507 - DNA, 50 bp, Artificial
  Synthetic oligonucleotide
agttctaaggagagcgggggagaacgccgctacgatgcaaacgccttcga

SEQ ID NO: 296508 - DNA, 50 bp, Artificial
  Synthetic oligonucleotide
agttctggcttggcatggcaacaccaaacgtgcctgcgtctgttccgtgc

SEQ ID NO: 296509 - DNA, 50 bp, Artificial
  Synthetic oligonucleotide
gctagcggcaatgtcggcagtaccatcgtaggcatggttggctgcgcttc

SEQ ID NO: 296510 - DNA, 50 bp, Artificial
  Synthetic oligonucleotide
agatgtgcgctgtgctacttgctttgcttcgggggtgcgtcagtgcgcac

SEQ ID NO: 296511 - DNA, 50 bp, Artificial
  Synthetic oligonucleotide
gattcgtccgcggtagtcacgtaactatggaaacttcgtttggagctctc

SEQ ID NO: 296512 - DNA, 50 bp, Artificial
  Synthetic oligonucleotide
cccgtcaccgcactatcgctctctccgtatatgcccgttgccgctccgca

SEQ ID NO: 296513 - DNA, 50 bp, Artificial
  Synthetic oligonucleotide
agatccccaaacgagagcgatgacgcgagctctcctcctctctccgggtg

SEQ ID NO: 296514 - DNA, 50 bp, Artificial
  Synthetic oligonucleotide
agtggaacccacctccccaagtagccaacgtggctgccccgaaatacagc

SEQ ID NO: 296515 - DNA, 55 bp, Artificial
  Synthetic oligonucleotide
gtgtccaggacgggcttcaaacccgtgggtgtcgaaaggcacaggagttcgattc

SEQ ID NO: 296516 - DNA, 52 bp, Artificial
  Synthetic oligonucleotide
tcctttgttgtcgcctagtccaaaaaccccgcggcagggattcgggtgtacg

SEQ ID NO: 296517 - DNA, 50 bp, Artificial
  Synthetic oligonucleotide
agataggcccgcatcaacagggcacgcacagcctacatcgccgcttcaga

SEQ ID NO: 296518 - DNA, 50 bp, Artificial
  Synthetic oligonucleotide
agatacggcctctccgtttggcgggatgaatggattggccagtggagcgg

SEQ ID NO: 296519 - DNA, 50 bp, Artificial
  Synthetic oligonucleotide
agatacgccggtgcgacggccaagcctggtagcggtttgctgggcctcat

SEQ ID NO: 296520 - DNA, 50 bp, Artificial
  Synthetic oligonucleotide
cgagcttgactgggcatcagacacttcgcgtgccctccgccctccacgat

SEQ ID NO: 296521 - DNA, 50 bp, Artificial
  Synthetic oligonucleotide
agataccgtgtcagtgccacgcagtagaccgcgcacgagtgtcgagcgag

SEQ ID NO: 296522 - DNA, 50 bp, Artificial
  Synthetic oligonucleotide
gcgtggtgttagcggctctagtcggacccccggcaacagtcggggcagct

SEQ ID NO: 296523 - DNA, 50 bp, Artificial
  Synthetic oligonucleotide
cccctccgtgatgtccccctcagtggtgctcttagttgtctccccgcgca

SEQ ID NO: 296524 - DNA, 50 bp, Artificial
  Synthetic oligonucleotide
cccctccggaggctatttctagcctggctcctcccgtatcgtatccccgc

SEQ ID NO: 296525 - DNA, 50 bp, Artificial
  Synthetic oligonucleotide
agagtgggggcactggaccctgagacaccacgctgaggtgggctccgtca

SEQ ID NO: 296526 - DNA, 50 bp, Artificial
  Synthetic oligonucleotide
agagtgggaaaacgaccccgagagtgagcctgacactccctcgcgtagcg

SEQ ID NO: 296527 - DNA, 57 bp, Artificial
  Synthetic oligonucleotide
tctcgctctggtaaacaccctccgtttaggagtgtagcaatatgtctgtctatgtcc

SEQ ID NO: 296528 - DNA, 50 bp, Artificial
  Synthetic oligonucleotide
agtggccagtgggtgggggaacgcaccagacgaaggagtgcgtgcgtcaa

SEQ ID NO: 296529 - DNA, 50 bp, Artificial
  Synthetic oligonucleotide
agagtgctgctgcgtcacatctacctgtgcctcgttgcacctacgcgagg

SEQ ID NO: 296530 - DNA, 50 bp, Artificial
  Synthetic oligonucleotide
agagtgaggacctgcgtcgtgctgagaaagcgcgtgctgcagaggcgata

SEQ ID NO: 296531 - DNA, 50 bp, Artificial
  Synthetic oligonucleotide
agagtcgccccacccgccacacagacgaacacgcaccccctgttgcgcgt

SEQ ID NO: 296532 - DNA, 50 bp, Artificial
  Synthetic oligonucleotide
agtggcgcctccaagtggcccccacagggtgcatgctgcgtcatcacttc

SEQ ID NO: 296533 - DNA, 50 bp, Artificial
  Synthetic oligonucleotide
agaggtgccatacggaggggcagaggcacccaaccgtgctgaaccaacca

SEQ ID NO: 296534 - DNA, 50 bp, Artificial
  Synthetic oligonucleotide
agtgggacagtgccgttgtcctctgatgactctagtcgcgccgcgaggga

SEQ ID NO: 296535 - DNA, 50 bp, Artificial
  Synthetic oligonucleotide
agtgggccaacgttctgctccgtcctcagcgtacacgtggttgacgcagg

SEQ ID NO: 296536 - DNA, 50 bp, Artificial
  Synthetic oligonucleotide
agtgggcgagagcagagaaacaccgaccgggcgtggggacaactcgacta

SEQ ID NO: 296537 - DNA, 50 bp, Artificial
  Synthetic oligonucleotide
agacgggcacaatgtcgctgttctctctcgctccatctgcgcccatgtga

SEQ ID NO: 296538 - DNA, 57 bp, Artificial
  Synthetic oligonucleotide
gtgcgtgactcgttgggaatgcgtccattatgcttgggctcgttggaggtgccatgc

SEQ ID NO: 296539 - DNA, 50 bp, Artificial
  Synthetic oligonucleotide
agacggagaaacgggggtgaccaaaacgagcgcccgctatcatccctacc

SEQ ID NO: 296540 - DNA, 50 bp, Artificial
  Synthetic oligonucleotide
agacgctttaaatggatggaatatgatttgttcaattggatcaacaatga

SEQ ID NO: 296541 - DNA, 50 bp, Artificial
  Synthetic oligonucleotide
agacgcgtgatgaatgtgctcctgacagagcagtcggcggctagtggcag

SEQ ID NO: 296542 - DNA, 50 bp, Artificial
  Synthetic oligonucleotide
agacgcggctacatgcgagtgttggcaggtgctccgaaaggggcaacgac

SEQ ID NO: 296543 - DNA, 50 bp, Artificial
  Synthetic oligonucleotide
cccgtggatgtaccgcgtggagtggcttaacgcagcctcactgtagccgt

SEQ ID NO: 296544 - DNA, 50 bp, Artificial
  Synthetic oligonucleotide
ataccctcgcatctgtgcggccaaacgcctcttcactcccccggaatgca

SEQ ID NO: 296545 - DNA, 50 bp, Artificial
  Synthetic oligonucleotide
agacgccacctcggccgttcgtgctactcccctgtgcgcagaagccaaat

SEQ ID NO: 296546 - DNA, 50 bp, Artificial
  Synthetic oligonucleotide
agacgcaactgcgaagggaagggcagacgactcgtcagaccggatcagcg

SEQ ID NO: 296547 - DNA, 50 bp, Artificial
  Synthetic oligonucleotide
agacgcaaacgggcgctcctcgctaccagtttgccgctcgcataccttaa

SEQ ID NO: 296548 - DNA, 50 bp, Artificial
  Synthetic oligonucleotide
gctcgtgcgacccttttatgcgtgggcatgcgggtaggacaggcgaagaa

SEQ ID NO: 296549 - DNA, 57 bp, Artificial
  Synthetic oligonucleotide
acatgatgtgcaagtccggtgcaaatctgatgatgggtcgccgaaccctcgaggcgt

SEQ ID NO: 296550 - DNA, 50 bp, Artificial
  Synthetic oligonucleotide
agacgaagttggtgcgcggtgagaatgcctgggttgcgaagggcaccgct

SEQ ID NO: 296551 - DNA, 50 bp, Artificial
  Synthetic oligonucleotide
agaccttgtaccgtggagaggacgcccatggtgagagcgccatccgttcg

SEQ ID NO: 296552 - DNA, 50 bp, Artificial
  Synthetic oligonucleotide
agacctgctccgcagtgtctgctataggaccgaagccctgagcgtgtcga

SEQ ID NO: 296553 - DNA, 50 bp, Artificial
  Synthetic oligonucleotide
agacctacagcggcgggtcgtgtgcaatgcagggttcctaggtgaggagg

SEQ ID NO: 296554 - DNA, 50 bp, Artificial
  Synthetic oligonucleotide
agaccgtggaagcctcacatgcgtgtcctcgccttcacagatgcgcgccg

SEQ ID NO: 296555 - DNA, 50 bp, Artificial
  Synthetic oligonucleotide
gctctgaaaatggccgacatttcaaactgcgggcgcccgcttgacattta

SEQ ID NO: 296556 - DNA, 50 bp, Artificial
  Synthetic oligonucleotide
agaccgcaccacggacacacgtagcacacgcgggtttcgcagctcttctt

SEQ ID NO: 296557 - DNA, 50 bp, Artificial
  Synthetic oligonucleotide
agacccgcccaccggttggcacgcccctgtcatgcttggggtacccgagg

SEQ ID NO: 296558 - DNA, 50 bp, Artificial
  Synthetic oligonucleotide
atacgctctaagagtgggaccatttgggttcgtccccctggcgactgcga

SEQ ID NO: 296559 - DNA, 50 bp, Artificial
  Synthetic oligonucleotide
atacggcaccaccgacctttcccagtgcagcccctcacacggcgtaagtg

SEQ ID NO: 296560 - DNA, 57 bp, Artificial
  Synthetic oligonucleotide
cccaacatagaatgggatcagattcgttgttaaatagaactattcagaatccatcag

SEQ ID NO: 296561 - DNA, 50 bp, Artificial
  Synthetic oligonucleotide
agacccctcgtcaccccggtggtcccaatgcgaagatatagcagcaaccc

SEQ ID NO: 296562 - DNA, 50 bp, Artificial
  Synthetic oligonucleotide
agacccactctcgtgatagagccatctggcgagtacctgtgagccccgcc

SEQ ID NO: 296563 - DNA, 50 bp, Artificial
  Synthetic oligonucleotide
gatagggaggctggcattgcacctccgacgggagtcgtagcatcggcaga

SEQ ID NO: 296564 - DNA, 50 bp, Artificial
  Synthetic oligonucleotide
cccgtgatgtttagggaggtccccgcccggtagttaaacacgatgaatgt

SEQ ID NO: 296565 - DNA, 50 bp, Artificial
  Synthetic oligonucleotide
agagcactgtgtccccgggagagtcatggtaggcgctgctctggagcacc

SEQ ID NO: 296566 - DNA, 50 bp, Artificial
  Synthetic oligonucleotide
agagcacccccgttaccccaccgcttaaccgctccactgttgcaagtgtg

SEQ ID NO: 296567 - DNA, 50 bp, Artificial
  Synthetic oligonucleotide
agagcaaccgaaagggaccctctgacttgcctctgcgacgctaagccggt

SEQ ID NO: 296568 - DNA, 50 bp, Artificial
  Synthetic oligonucleotide
agttgatggaggtgtgcgagccgcctcctctttggtgtgtggatgcctct

SEQ ID NO: 296569 - DNA, 50 bp, Artificial
  Synthetic oligonucleotide
agagatccaccctgcgccgacacacaaaggacgcacacactcaccgacaa

SEQ ID NO: 296570 - DNA, 50 bp, Artificial
  Synthetic oligonucleotide
agagatagcccaccgcagtaacagcaacgcaacccacaggcctcctccaa

SEQ ID NO: 296571 - DNA, 55 bp, Artificial
  Synthetic oligonucleotide
ctcacctaggcaaagtaagacttaagttagtaacagaaagacctcacttagtgaa

SEQ ID NO: 296572 - DNA, 50 bp, Artificial
  Synthetic oligonucleotide
agttgtactgccgagttgcacctccaggccgcactttccagggggcactc

SEQ ID NO: 296573 - DNA, 50 bp, Artificial
  Synthetic oligonucleotide
cgagcgaatcgaaaccggacagtgggcgaccgtgcgttggccccgagcat

SEQ ID NO: 296574 - DNA, 50 bp, Artificial
  Synthetic oligonucleotide
agagacgaaggacagccaaaggtgctgcgaaacaggggttggggaaggga

SEQ ID NO: 296575 - DNA, 50 bp, Artificial
  Synthetic oligonucleotide
agttgtgatgtacgccctggctagggacccctcggaaggtacctgctcga

SEQ ID NO: 296576 - DNA, 50 bp, Artificial
  Synthetic oligonucleotide
agtttcgctcgctttggcgctttgcttacgcgcgccaccctccgaagtct

SEQ ID NO: 296577 - DNA, 50 bp, Artificial
  Synthetic oligonucleotide
cccgtggatgaggtctgcgcccgtttcgacaccgactgtagaccgcgaaa

SEQ ID NO: 296578 - DNA, 50 bp, Artificial
  Synthetic oligonucleotide
gatcgagctcgtaagagtagatgaagccctcctctttactacttccttcg

SEQ ID NO: 296579 - DNA, 50 bp, Artificial
  Synthetic oligonucleotide
agactggactacattctgttgcaaggagcagtcgcaatgttcagctctct

SEQ ID NO: 296580 - DNA, 50 bp, Artificial
  Synthetic oligonucleotide
agactcagaggcggcaatccagaacagagggcgggcacacgttgaaggag

SEQ ID NO: 296581 - DNA, 50 bp, Artificial
  Synthetic oligonucleotide
cgcagttgcagtgctggcagaggcgcacaaacggcacgagaggttctgcg

SEQ ID NO: 296582 - DNA, 57 bp, Artificial
  Synthetic oligonucleotide
tctgccattaatcctcgcataccaactaattgtcgtacctgtgatatgttacctcga

SEQ ID NO: 296583 - DNA, 50 bp, Artificial
  Synthetic oligonucleotide
agactaccaacgcctgtacgccaccattcgcgctgtctggaacgcgtacg

SEQ ID NO: 296584 - DNA, 50 bp, Artificial
  Synthetic oligonucleotide
cgcatacagacgcatcctcacagtcgcgcataggcgctacccccagaggt

SEQ ID NO: 296585 - DNA, 50 bp, Artificial
  Synthetic oligonucleotide
agacggtggcacggtcaagtcgtggtggctgtcctcggaggctttccact

SEQ ID NO: 296586 - DNA, 50 bp, Artificial
  Synthetic oligonucleotide
ataccacgccaagaggaaaggtgacatggtacacaagttcgatgtcgcga

SEQ ID NO: 296587 - DNA, 50 bp, Artificial
  Synthetic oligonucleotide
agacggtgaagcaaacagcgtagggggtgccaaccaagtgggagccgcta

SEQ ID NO: 296588 - DNA, 50 bp, Artificial
  Synthetic oligonucleotide
agacggtccacccagaacaaacgtgcaggggaggggcagtaccaactgag

SEQ ID NO: 296589 - DNA, 50 bp, Artificial
  Synthetic oligonucleotide
agacgggtcctacatctgatggcgtgaacccactcgctgcagccaatccg

SEQ ID NO: 296590 - DNA, 50 bp, Artificial
  Synthetic oligonucleotide
atctccccagggtagttcctcccgctgcttccacgcgtgtacccaccata

SEQ ID NO: 296591 - DNA, 50 bp, Artificial
  Synthetic oligonucleotide
ccccactcggtgcattggccggcgtctgaaaatcgcttggtgccccacct

SEQ ID NO: 296592 - DNA, 50 bp, Artificial
  Synthetic oligonucleotide
atctgccctacttcaagctgacatccttgggggagaaccacggggcgggc

SEQ ID NO: 296593 - DNA, 57 bp, Artificial
  Synthetic oligonucleotide
atgattatcctgtagtatttatgggttgacatagtatgtcaacaacaggtcacttta

SEQ ID NO: 296594 - DNA, 50 bp, Artificial
  Synthetic oligonucleotide
acgtccactcgcaaggggagaaacagcgccgagggagacccctcccacag

SEQ ID NO: 296595 - DNA, 50 bp, Artificial
  Synthetic oligonucleotide
acgtcagcatgcacagctgcctgggttccccactccgcgtagtccctatc

SEQ ID NO: 296596 - DNA, 50 bp, Artificial
  Synthetic oligonucleotide
acgtcacagggggtcgctcttgcgctcaaagacgtacacaaggcggccgt

SEQ ID NO: 296597 - DNA, 50 bp, Artificial
  Synthetic oligonucleotide
atctgcgcaccatctttacgcctttcctgtccaccgctgagtccggaggc

SEQ ID NO: 296598 - DNA, 50 bp, Artificial
  Synthetic oligonucleotide
atctggagggtactcaggtctccggcacactgcccccgggatggagtgag

SEQ ID NO: 296599 - DNA, 50 bp, Artificial
  Synthetic oligonucleotide
acgtaggcccccgagcgtcgcgaatggagagctcctcacacaaccaggga

SEQ ID NO: 296600 - DNA, 50 bp, Artificial
  Synthetic oligonucleotide
acgtagcgctcctgaggtggttgccagtgggcttagcgcatctgagggtg

SEQ ID NO: 296601 - DNA, 50 bp, Artificial
  Synthetic oligonucleotide
acgtacgtctgtgcaatgcgcgtcgcaaccgagagactcaccttgccgca

SEQ ID NO: 296602 - DNA, 50 bp, Artificial
  Synthetic oligonucleotide
cccttctccgcacacttcagtcgctgtgctccgtcacttgcaccgagcgc

SEQ ID NO: 296603 - DNA, 50 bp, Artificial
  Synthetic oligonucleotide
ccccacgcagcacgaacgtttcggcaacgcagcgggaggtgggcacgttt

SEQ ID NO: 296604 - DNA, 54 bp, Artificial
  Synthetic oligonucleotide
aaaacccggtcatattattacaactcggaaccgactcgatgttgactctgtaaa

SEQ ID NO: 296605 - DNA, 50 bp, Artificial
  Synthetic oligonucleotide
acggtcttgtcccgattgccgggtaaggcctagcaggagtgtgagagcgg

SEQ ID NO: 296606 - DNA, 50 bp, Artificial
  Synthetic oligonucleotide
acggtctggcttcgttgtgtcgtaggtcgtgctccctccaccggctcgaa

SEQ ID NO: 296607 - DNA, 50 bp, Artificial
  Synthetic oligonucleotide
acggtccgctaacactcgtctcgactccattggtgccctctgcgagggcg

SEQ ID NO: 296608 - DNA, 50 bp, Artificial
  Synthetic oligonucleotide
cgaatgaacgtactgtgcagcggcgcatatggctggtgatagccgtggcc

SEQ ID NO: 296609 - DNA, 50 bp, Artificial
  Synthetic oligonucleotide
acgggtgtgcatccgagtgggagtcctaaccactggcgtctgttgcgtgg

SEQ ID NO: 296610 - DNA, 50 bp, Artificial
  Synthetic oligonucleotide
atcttcctctgggcagactgcggatgtgggtccaacgtgcatctccccgt

SEQ ID NO: 296611 - DNA, 50 bp, Artificial
  Synthetic oligonucleotide
acgggtgtcgcggactaggcggtgattcaccctgatacgacaggtgccac

SEQ ID NO: 296612 - DNA, 50 bp, Artificial
  Synthetic oligonucleotide
acgggtgcttgcagggttcctttcgggtgcccctccatccgttcatacgc

SEQ ID NO: 296613 - DNA, 50 bp, Artificial
  Synthetic oligonucleotide
cgaatcttgctggaacggcgacgtgtgcccagtgcatagtgtcgcgagta

SEQ ID NO: 296614 - DNA, 50 bp, Artificial
  Synthetic oligonucleotide
acgtggtcttacatctgcgggtcgcaagcaccgtgggctacggcagaagg

SEQ ID NO: 296615 - DNA, 56 bp, Artificial
  Synthetic oligonucleotide
aatcgtgcgacgattcacgggaccagaacgtttcgttctcgttggagcagaacgag

SEQ ID NO: 296616 - DNA, 50 bp, Artificial
  Synthetic oligonucleotide
acgtggggccagcgtgacagagacgtaaggtctacgtgacggagacgccc

SEQ ID NO: 296617 - DNA, 50 bp, Artificial
  Synthetic oligonucleotide
acgtgggaccccctaaacccgctgaatgtcatcgggccccattccaggtg

SEQ ID NO: 296618 - DNA, 50 bp, Artificial
  Synthetic oligonucleotide
acgtggcaggtggcacgggtagtcacgcgtgttggattgatcgacggtgc

SEQ ID NO: 296619 - DNA, 50 bp, Artificial
  Synthetic oligonucleotide
acgtggcacatgcagaacccaccacccaagtcgctgcaactggcaccctc

SEQ ID NO: 296620 - DNA, 50 bp, Artificial
  Synthetic oligonucleotide
acgtggacccccatccctaacgcacgctcgacagttggcgtcacgcccct

SEQ ID NO: 296621 - DNA, 50 bp, Artificial
  Synthetic oligonucleotide
ggattcccttcgaacgttttgggcacctcctttccgcgtgtgcacggtcc

SEQ ID NO: 296622 - DNA, 50 bp, Artificial
  Synthetic oligonucleotide
acgtgcgtacgcaatggggcacatataaatcggcttcgcccgtggggtgc

SEQ ID NO: 296623 - DNA, 50 bp, Artificial
  Synthetic oligonucleotide
acgtgcgcgcaattctgtcgcctcacagctctgctcggttcgcctcttca

SEQ ID NO: 296624 - DNA, 50 bp, Artificial
  Synthetic oligonucleotide
acgtgcagcatttgagtgcgtgcggccctctgagacgcgccggtttgttt

SEQ ID NO: 296625 - DNA, 50 bp, Artificial
  Synthetic oligonucleotide
acgtgagggtggcggataggtgagcgaggggacatcagacgttgtgccta

SEQ ID NO: 296626 - DNA, 51 bp, Artificial
  Synthetic oligonucleotide
gacctgactaaaatttttaaacgtagctcattcaaggacccgtttgggtta

SEQ ID NO: 296627 - DNA, 57 bp, Artificial
  Synthetic oligonucleotide
ggcctgcacgtactccagtgggagacgcgccagcagtgtcggtgccccctccccctc

SEQ ID NO: 296628 - DNA, 50 bp, Artificial
  Synthetic oligonucleotide
ccccacttctgttgtctgcccagtccgatggaagcaccaacgctgccgac

SEQ ID NO: 296629 - DNA, 50 bp, Artificial
  Synthetic oligonucleotide
acgtgaatgcatagtaggcacggcatgcgccaagcaaaaggggccttgcc

SEQ ID NO: 296630 - DNA, 50 bp, Artificial
  Synthetic oligonucleotide
acgtcttcataccgttcctccgcggccgctacccagagcatctcttcgcc

SEQ ID NO: 296631 - DNA, 50 bp, Artificial
  Synthetic oligonucleotide
acgtctgtggcaagcacccggtatcgagcaagtgggctgcgcggctccgt

SEQ ID NO: 296632 - DNA, 50 bp, Artificial
  Synthetic oligonucleotide
atcgtgcgtgccgtggtacgtcagatcggacatgcgtgagtcggtgtggg

SEQ ID NO: 296633 - DNA, 50 bp, Artificial
  Synthetic oligonucleotide
acgtctgcctcggcacatgcgtgggtgtgaggtggcaagtggaagaggag

SEQ ID NO: 296634 - DNA, 50 bp, Artificial
  Synthetic oligonucleotide
acgtcggcccaaagcatggaatcgcacacgcgccacagacgcaaaggaaa

SEQ ID NO: 296635 - DNA, 50 bp, Artificial
  Synthetic oligonucleotide
acgtcgatgccgcagcagagtgtgcagcggatgaggagcacatgggtgac

SEQ ID NO: 296636 - DNA, 50 bp, Artificial
  Synthetic oligonucleotide
acgtcgagtgatgtcgcgcgtgtgaagggtgcggctctcacctacctgat

SEQ ID NO: 296637 - DNA, 50 bp, Artificial
  Synthetic oligonucleotide
atcgttgagtgcccttgtgctcccgatgccgcaagtccggagctgggttt

SEQ ID NO: 296638 - DNA, 57 bp, Artificial
  Synthetic oligonucleotide
gagattacatcattcatgatgccaatgagtaccttaaacaagaagtaaacaggcaac

SEQ ID NO: 296639 - DNA, 50 bp, Artificial
  Synthetic oligonucleotide
acgtccttggggcaccaagcatgcttctttaagcggctggcgttgcaacc

SEQ ID NO: 296640 - DNA, 50 bp, Artificial
  Synthetic oligonucleotide
atctacaggaaagaaacgaagtgcgtgttccagtcgagatgcacccctgc

SEQ ID NO: 296641 - DNA, 50 bp, Artificial
  Synthetic oligonucleotide
acggctacgcagcggcaagggtgtgggcgcaaagggtggtatcctgcata

SEQ ID NO: 296642 - DNA, 50 bp, Artificial
  Synthetic oligonucleotide
ggccctatccagcagcgaccatacggcgtggtcctccctcgtagcggttg

SEQ ID NO: 296643 - DNA, 50 bp, Artificial
  Synthetic oligonucleotide
acggcgtgggagcgaagtggaaagcacagcgcgggaccaaagtggatcgc

SEQ ID NO: 296644 - DNA, 50 bp, Artificial
  Synthetic oligonucleotide
atgacgacaaatgtgagaggaccgctgcttcacgtcggtgtggcacgcct

SEQ ID NO: 296645 - DNA, 50 bp, Artificial
  Synthetic oligonucleotide
gagcgagtcgccttcaaccctgcacacgcgcctttgcatggccgtctttt

SEQ ID NO: 296646 - DNA, 50 bp, Artificial
  Synthetic oligonucleotide
acggcggggttggcattgttcactcctcacccggtggatctcactttggc

SEQ ID NO: 296647 - DNA, 50 bp, Artificial
  Synthetic oligonucleotide
ccctttgacgctgtgctacgcgttggcaactctccggtcatccttgccca

SEQ ID NO: 296648 - DNA, 50 bp, Artificial
  Synthetic oligonucleotide
atgagcagccccagcgagtcccctcaggtgtccgcagacgtcgctgcacc

SEQ ID NO: 296649 - DNA, 57 bp, Artificial
  Synthetic oligonucleotide
ctgctaatacaacaccgtaaacacctaaggacgagatagcgaatataattagaacgc

SEQ ID NO: 296650 - DNA, 50 bp, Artificial
  Synthetic oligonucleotide
acggcgccaaatggggacacccgaacgagtgccgtgagccttctgttaac

SEQ ID NO: 296651 - DNA, 50 bp, Artificial
  Synthetic oligonucleotide
acggcgcacgtactcagtgcagggtgtgcggagaggagtggccctccacc

SEQ ID NO: 296652 - DNA, 50 bp, Artificial
  Synthetic oligonucleotide
acggcctttaggctccccctccgcgcgtaccttccgtctggtctccctgc

SEQ ID NO: 296653 - DNA, 50 bp, Artificial
  Synthetic oligonucleotide
acggccgggggcctgtagtgcgtagaccccctgcacggatgtttccgcgt

SEQ ID NO: 296654 - DNA, 50 bp, Artificial
  Synthetic oligonucleotide
gagcgacggcgtcttaacctcttcaggcactgcgagtgaatggaagacat

SEQ ID NO: 296655 - DNA, 50 bp, Artificial
  Synthetic oligonucleotide
acggcagcgaaagaacggaactaacgccttgcattgccagtcgtgccgcc

SEQ ID NO: 296656 - DNA, 50 bp, Artificial
  Synthetic oligonucleotide
acggcagcacttatagctgtgcctgcgactgacggccatgtggcggtata

SEQ ID NO: 296657 - DNA, 50 bp, Artificial
  Synthetic oligonucleotide
atgagcaggcgccactagcgagacccacggactctcaccttgtgagccgg

SEQ ID NO: 296658 - DNA, 50 bp, Artificial
  Synthetic oligonucleotide
acggcacaccgccaagcagtattcaggcgaagagcaagagtggcaaccct

SEQ ID NO: 296659 - DNA, 50 bp, Artificial
  Synthetic oligonucleotide
acggcaaacgaaggcgtccccacgcccgtaagcagcatgcgaatacacaa

SEQ ID NO: 296660 - DNA, 57 bp, Artificial
  Synthetic oligonucleotide
cggaattatgagtgaaaccattgaatgtattgaactagccaaaacgtacaatacacc

SEQ ID NO: 296661 - DNA, 50 bp, Artificial
  Synthetic oligonucleotide
atgagcccggcctgtactcggcagaacaggtggaatcgtggcgcactatc

SEQ ID NO: 296662 - DNA, 50 bp, Artificial
  Synthetic oligonucleotide
acggagcgtgcagggcggacaacggttcacggagggtggacacagggtcg

SEQ ID NO: 296663 - DNA, 50 bp, Artificial
  Synthetic oligonucleotide
acggagcgcagattgtcaaaaggcgatgaggactggccatgccgaggcaa

SEQ ID NO: 296664 - DNA, 50 bp, Artificial
  Synthetic oligonucleotide
acggagcccacgaagaggcgcggcattgcaccctgttggatgcctggtga

SEQ ID NO: 296665 - DNA, 50 bp, Artificial
  Synthetic oligonucleotide
gagccggaggcgaggttgcttccaccgtccgagctcatggaagtgagagt

SEQ ID NO: 296666 - DNA, 50 bp, Artificial
  Synthetic oligonucleotide
acgggggctcgaagttgttcacttggtggccgccacttgcgttattggcg

SEQ ID NO: 296667 - DNA, 50 bp, Artificial
  Synthetic oligonucleotide
acgggggaggggctaaggagctggtagtgtgcgggcccaggtaatatcga

SEQ ID NO: 296668 - DNA, 50 bp, Artificial
  Synthetic oligonucleotide
acgggggaccgcatcggagggggtggagcatgcatttcgttcccggcgcg

SEQ ID NO: 296669 - DNA, 50 bp, Artificial
  Synthetic oligonucleotide
acgggggaagttgccacggttggaaatcccgctagggcaatccgcaaggg

SEQ ID NO: 296670 - DNA, 50 bp, Artificial
  Synthetic oligonucleotide
acggggcgcccaaacctcctcgctgtgcactcggctgctcctttcgcgtg

SEQ ID NO: 296671 - DNA, 57 bp, Artificial
  Synthetic oligonucleotide
cgcatttattaaatctgctcaattcggtgcacacatttgattaccagattctatgga

SEQ ID NO: 296672 - DNA, 50 bp, Artificial
  Synthetic oligonucleotide
acggggcgcaggagcaagagtcgacagacctttccgcactttcgtgccac

SEQ ID NO: 296673 - DNA, 50 bp, Artificial
  Synthetic oligonucleotide
acggggagaaaaggaatcatggggaacagttaacacaaaggaggaacgta

SEQ ID NO: 296674 - DNA, 50 bp, Artificial
  Synthetic oligonucleotide
acgggctcgccccattgaaaaggcgccaccgattagaaggatttgcgccg

SEQ ID NO: 296675 - DNA, 50 bp, Artificial
  Synthetic oligonucleotide
acgggcgggtaaccctgttcacttctcctctctcgcacggggcacagaac

SEQ ID NO: 296676 - DNA, 50 bp, Artificial
  Synthetic oligonucleotide
acgggcagtggaaccccaatgagggagggggatcgaaccacgcgcatttg

SEQ ID NO: 296677 - DNA, 50 bp, Artificial
  Synthetic oligonucleotide
cccttgcctactacagcggactggagagcgtccgtctgcgcggatgtcgg

SEQ ID NO: 296678 - DNA, 50 bp, Artificial
  Synthetic oligonucleotide
ggccaacggaccagtctgctgtcggtctatgggtggtgtgcggtcacgag

SEQ ID NO: 296679 - DNA, 50 bp, Artificial
  Synthetic oligonucleotide
cccttgtgcggtcgcacgctggctccacacgcggtacgaggctctggcaa

SEQ ID NO: 296680 - DNA, 50 bp, Artificial
  Synthetic oligonucleotide
acgggagacgatgcatagccaccgcaggagctaggggttggtgtggcgat

SEQ ID NO: 296681 - DNA, 50 bp, Artificial
  Synthetic oligonucleotide
ccccaccgctggttgcccttataacgcctacttgtgcgcagtccgatggg

SEQ ID NO: 296682 - DNA, 57 bp, Artificial
  Synthetic oligonucleotide
gatatggatctttagaaattactatggatagtcgagatgaaagatgtttagcttatc

SEQ ID NO: 296683 - DNA, 50 bp, Artificial
  Synthetic oligonucleotide
acgggaaggcgtgtagcactcccctgtttatgcgcgagcatacgggcact

SEQ ID NO: 296684 - DNA, 50 bp, Artificial
  Synthetic oligonucleotide
gagcgggactcgattgggcgctctgtgtgtggtttacgggggtggcacaa

SEQ ID NO: 296685 - DNA, 50 bp, Artificial
  Synthetic oligonucleotide
acggcttggcagtagcactgcgccctcacatcagtcgcgccaggtgaacg

SEQ ID NO: 296686 - DNA, 50 bp, Artificial
  Synthetic oligonucleotide
gagcggcacacagttatattcccgcctcttaacgaagaggattccccgct

SEQ ID NO: 296687 - DNA, 50 bp, Artificial
  Synthetic oligonucleotide
acggctgcttacacaaacgcacacgcgacatgcgaccacccgagtaggcc

SEQ ID NO: 296688 - DNA, 50 bp, Artificial
  Synthetic oligonucleotide
ccccacccgccgtctcagtcgggttgctcccttagtccctctacaagtgc

SEQ ID NO: 296689 - DNA, 50 bp, Artificial
  Synthetic oligonucleotide
acggctgcgcgcacgcaaaataaatgcgactccacccggtgcctcgttaa

SEQ ID NO: 296690 - DNA, 50 bp, Artificial
  Synthetic oligonucleotide
ggcccctctggacaaatgcgcacgatgcggtatcctgcggtgaagcgaag

SEQ ID NO: 296691 - DNA, 50 bp, Artificial
  Synthetic oligonucleotide
acggctgcccctgcgtgctaacaccccttaatggattcgcgggccaccta

SEQ ID NO: 296692 - DNA, 50 bp, Artificial
  Synthetic oligonucleotide
actctgatggacgctgcgtgcacacctactcccctacgcacatgcgctta

SEQ ID NO: 296693 - DNA, 56 bp, Artificial
  Synthetic oligonucleotide
tagcacggtttgctttaaaaggacgcggcgttgcacccgcagagaatctaacgacc

SEQ ID NO: 296694 - DNA, 50 bp, Artificial
  Synthetic oligonucleotide
ggacctgaattctgtgtctttgatagtacgggtgaggaaccgaaaagtgc

SEQ ID NO: 296695 - DNA, 50 bp, Artificial
  Synthetic oligonucleotide
actctcatcgaagctagagttgactgcaagaccaacgacggttacatcat

SEQ ID NO: 296696 - DNA, 50 bp, Artificial
  Synthetic oligonucleotide
actctatctgcaggcgatgagaaacacatcacgaacttacacagagaaaa

SEQ ID NO: 296697 - DNA, 50 bp, Artificial
  Synthetic oligonucleotide
gaggggtgcccgagccatcaccgagaggcgtgtctggtggagaccggcct

SEQ ID NO: 296698 - DNA, 50 bp, Artificial
  Synthetic oligonucleotide
actcggcataccggttgagctccgccccactgcatgccagggaggcgtgt

SEQ ID NO: 296699 - DNA, 50 bp, Artificial
  Synthetic oligonucleotide
atcccacccgtggagaagcgccaaaggagagctcccctaggacgaggagc

SEQ ID NO: 296700 - DNA, 50 bp, Artificial
  Synthetic oligonucleotide
ggacgcctggctttcccccacgcagagtgagggtactgaacgctgacacc

SEQ ID NO: 296701 - DNA, 50 bp, Artificial
  Synthetic oligonucleotide
gagggggtagggacttccttccggggctgcgcaagtgggtacgaggatag

SEQ ID NO: 296702 - DNA, 50 bp, Artificial
  Synthetic oligonucleotide
actcgcttacgactggaggggatgcgcatgagggggactccgccccctgg

SEQ ID NO: 296703 - DNA, 50 bp, Artificial
  Synthetic oligonucleotide
actcgcagaacagcagaagcacaccgaaggccatacacgccaacggggga

SEQ ID NO: 296704 - DNA, 55 bp, Artificial
  Synthetic oligonucleotide
ctaatacaggtcctaactacagcaacataggtttataggtaagtaatgtaggtct

SEQ ID NO: 296705 - DNA, 50 bp, Artificial
  Synthetic oligonucleotide
actcgactcaccgccaacccacgggtgtagagcgccctccgtgtttcaca

SEQ ID NO: 296706 - DNA, 50 bp, Artificial
  Synthetic oligonucleotide
actcgaacacgctcctcctcaagctccgtcgtgcgtcgtgtgacgccgcc

SEQ ID NO: 296707 - DNA, 50 bp, Artificial
  Synthetic oligonucleotide
actcctgcgggcaaatctcccctcgtagatgagcggaacggtagtggggc

SEQ ID NO: 296708 - DNA, 50 bp, Artificial
  Synthetic oligonucleotide
actccgcgtgcgggacctctctcaaggcggtagtcggatgccacagggac

SEQ ID NO: 296709 - DNA, 50 bp, Artificial
  Synthetic oligonucleotide
actccgacacagggttgacctttcagaagcccatcacggcaaccgccgga

SEQ ID NO: 296710 - DNA, 50 bp, Artificial
  Synthetic oligonucleotide
actccctccgttgtgcgaggcttctttgctcgcagtggacacgtggcgta

SEQ ID NO: 296711 - DNA, 50 bp, Artificial
  Synthetic oligonucleotide
ggagacgaataagtcaaatttcttaatctagcttcatttggcaccaaatt

SEQ ID NO: 296712 - DNA, 50 bp, Artificial
  Synthetic oligonucleotide
atcccgctggtgtgtggtgatgcacaacgaggtgtgcacgcatctcgctc

SEQ ID NO: 296713 - DNA, 50 bp, Artificial
  Synthetic oligonucleotide
actcatccgtaactgccccgaaatgtgccccaacaaagggggcgcctcat

SEQ ID NO: 296714 - DNA, 50 bp, Artificial
  Synthetic oligonucleotide
ccccatgtcctgcagaactgcgacggcaccacagtagacgcacaggcaag

SEQ ID NO: 296715 - DNA, 57 bp, Artificial
  Synthetic oligonucleotide
taggagctacgtctctcaatagggcggttgggctagaccctccgagagctttcgagc

SEQ ID NO: 296716 - DNA, 50 bp, Artificial
  Synthetic oligonucleotide
ggagcacattcgacgttgtgggacgtgcggtgggcgcacagagtggcaca

SEQ ID NO: 296717 - DNA, 50 bp, Artificial
  Synthetic oligonucleotide
ggagcacccagggggagagtgagaacgcgaccgattgctcgtgcggcact

SEQ ID NO: 296718 - DNA, 50 bp, Artificial
  Synthetic oligonucleotide
gaggtgcccgtagcttacggactgagcgtgggcggtaacgcagggttgac

SEQ ID NO: 296719 - DNA, 50 bp, Artificial
  Synthetic oligonucleotide
ggaaggttcaccatctgctctgcccacgagctcggtgctgccccggagac

SEQ ID NO: 296720 - DNA, 50 bp, Artificial
  Synthetic oligonucleotide
ggaagtgggcgcgaacacacctgttccattggagtgcactcagcgacagc

SEQ ID NO: 296721 - DNA, 50 bp, Artificial
  Synthetic oligonucleotide
actgcgcgtcctcattcagagctggactctaccgcggggcaggcatctcg

SEQ ID NO: 296722 - DNA, 50 bp, Artificial
  Synthetic oligonucleotide
actgcgccattctcgcggcagaaagtgccagagcagccgtagtgccgcat

SEQ ID NO: 296723 - DNA, 50 bp, Artificial
  Synthetic oligonucleotide
actgcgcacgacgccagtgcatatcattgtccggcacactagaggcggta

SEQ ID NO: 296724 - DNA, 50 bp, Artificial
  Synthetic oligonucleotide
actgcgatgtactgcctcaacgtgttgcacccgcgcctacgtgtcagcgc

SEQ ID NO: 296725 - DNA, 50 bp, Artificial
  Synthetic oligonucleotide
actgcgagattgtccgctggaccgctagcccgctggccgctatcccgctc

SEQ ID NO: 296726 - DNA, 57 bp, Artificial
  Synthetic oligonucleotide
cctccgttgcacagcattctttcccttctcgtggcccatctctcttcgggtcatgcc

SEQ ID NO: 296727 - DNA, 50 bp, Artificial
  Synthetic oligonucleotide
atcatgcgttttctcttcgagaattcaccatttaacccgaaaatcacgcg

SEQ ID NO: 296728 - DNA, 50 bp, Artificial
  Synthetic oligonucleotide
actgccgtgccacagacccaatttggaggacggagcacgacatgttccgg

SEQ ID NO: 296729 - DNA, 50 bp, Artificial
  Synthetic oligonucleotide
actgccgcttaccactcctctccctcccggggcatcggttcggtgggaag

SEQ ID NO: 296730 - DNA, 50 bp, Artificial
  Synthetic oligonucleotide
actgccgagttcgttgcctctggcaccacacaacattgccgtgccgcact

SEQ ID NO: 296731 - DNA, 50 bp, Artificial
  Synthetic oligonucleotide
atccaagcgtgcatccgacaacgagggactggcgccctctgattgccagc

SEQ ID NO: 296732 - DNA, 50 bp, Artificial
  Synthetic oligonucleotide
actgcaggggagagtcgagggggtgttgcgacgctcgtttgggacgaagc

SEQ ID NO: 296733 - DNA, 50 bp, Artificial
  Synthetic oligonucleotide
actgcagagtaggcgtggtggcttcctctccgtatcggcagagtgcggcc

SEQ ID NO: 296734 - DNA, 50 bp, Artificial
  Synthetic oligonucleotide
actgcactgccgtccttcccctacaacgttctctaccctggcggctccct

SEQ ID NO: 296735 - DNA, 50 bp, Artificial
  Synthetic oligonucleotide
ccctcgtttaccttcccacgcaagcacggacgcatacgcacgacgcagac

SEQ ID NO: 296736 - DNA, 50 bp, Artificial
  Synthetic oligonucleotide
actgatgctacgcctggagaagagggcccgcacaccacaccgtctgtctc

SEQ ID NO: 296737 - DNA, 57 bp, Artificial
  Synthetic oligonucleotide
ggagaaggaacttcgctctccgtcttggaatacaaacgagattcgagatagtctttc

SEQ ID NO: 296738 - DNA, 57 bp, Artificial
  Synthetic oligonucleotide
gccgctaaatccccaagcttgtgcttcgtctgcggtaacaatacctacatccaccaa

SEQ ID NO: 296739 - DNA, 50 bp, Artificial
  Synthetic oligonucleotide
ccctctaatggtatgtcagtatcatataccatagctgacggcccaaacga

SEQ ID NO: 296740 - DNA, 50 bp, Artificial
  Synthetic oligonucleotide
actgaccaccgccagtagcacaaccccgcccactcgccaacacgcgtctt

SEQ ID NO: 296741 - DNA, 50 bp, Artificial
  Synthetic oligonucleotide
atccaggtctgcggacgtcttgcgctccacaacgagggaacacacgtggc

SEQ ID NO: 296742 - DNA, 50 bp, Artificial
  Synthetic oligonucleotide
ggaccgacgcctctccttgcgtgcgatcctcaattgggccggggacgtca

SEQ ID NO: 296743 - DNA, 50 bp, Artificial
  Synthetic oligonucleotide
actgacatggacgagaggtgccagtgccatgacgtcggctgctcaggact

SEQ ID NO: 296744 - DNA, 50 bp, Artificial
  Synthetic oligonucleotide
actctttagcaatgtgacccatatgaaccgcttctcacagtaccagaatg

SEQ ID NO: 296745 - DNA, 50 bp, Artificial
  Synthetic oligonucleotide
actcttgcgtacgactgcgcggctgtcctcgcgatggtcccccacccgtc

SEQ ID NO: 296746 - DNA, 50 bp, Artificial
  Synthetic oligonucleotide
actaccaccgctgccgcggaaacgcaggaggacacactcgatccgtccgt

SEQ ID NO: 296747 - DNA, 50 bp, Artificial
  Synthetic oligonucleotide
ggagtcgagaagtgacgcgacgtcttttggatgtgtacggtaaggaggaa

SEQ ID NO: 296748 - DNA, 50 bp, Artificial
  Synthetic oligonucleotide
atcgctgagttggagaggtttcgggcggcccaacgagacgcacaggaagc

SEQ ID NO: 296749 - DNA, 56 bp, Artificial
  Synthetic oligonucleotide
ggttgcgggatataatattttagagttgtatgtgaaagatttcgcatttaggttgg

SEQ ID NO: 296750 - DNA, 50 bp, Artificial
  Synthetic oligonucleotide
ccccagtacacattcccccgacaccagcagcgaaggacggacgaccgcgt

SEQ ID NO: 296751 - DNA, 50 bp, Artificial
  Synthetic oligonucleotide
atcggatggcgagtactgtgggggtcttggggcagtcacttatgcgtggc

SEQ ID NO: 296752 - DNA, 50 bp, Artificial
  Synthetic oligonucleotide
atcgggaaagcgcaccacaggatgcgaagacggtgtcattgacgctccct

SEQ ID NO: 296753 - DNA, 50 bp, Artificial
  Synthetic oligonucleotide
atcggtcctgtgcatcacctacggaacgccccgcctgctgctaaaggagg

SEQ ID NO: 296754 - DNA, 50 bp, Artificial
  Synthetic oligonucleotide
acgtttcgcgtgcaagggctcgcaagtggccgccctaggtaacaagtcac

SEQ ID NO: 296755 - DNA, 50 bp, Artificial
  Synthetic oligonucleotide
acgttggcacgtgaggcactcgcgcagctgtttgtagcggctggccccgt

SEQ ID NO: 296756 - DNA, 50 bp, Artificial
  Synthetic oligonucleotide
acgttgccagacctgttgctccgcctctgaggagacggtgtgtgagggct

SEQ ID NO: 296757 - DNA, 50 bp, Artificial
  Synthetic oligonucleotide
acgttgcagcctggggaggcgtctaaacgtgcttctggagcgtctctgcg

SEQ ID NO: 296758 - DNA, 50 bp, Artificial
  Synthetic oligonucleotide
atcggtggtggggaatgcgcttactcgctgaagggggcctctgtgtggct

SEQ ID NO: 296759 - DNA, 50 bp, Artificial
  Synthetic oligonucleotide
acgttcggggcacatcaagggcacgtcacgcgacacgttacactccgctt

SEQ ID NO: 296760 - DNA, 57 bp, Artificial
  Synthetic oligonucleotide
ttcagattttattgcctgtcaagttcctttaatgtagttatctcacagcttaatttg

SEQ ID NO: 296761 - DNA, 50 bp, Artificial
  Synthetic oligonucleotide
acgttcgcgcctacaccacggcagggcgactgcaacaaggagccttctca

SEQ ID NO: 296762 - DNA, 50 bp, Artificial
  Synthetic oligonucleotide
acgttcgcgccacgttggcattccgcctaatctacggctggtgcagacgc

SEQ ID NO: 296763 - DNA, 50 bp, Artificial
  Synthetic oligonucleotide
atcgtcaccggactgaagggtgccgagtcgttagaacaagcggcacagcc

SEQ ID NO: 296764 - DNA, 50 bp, Artificial
  Synthetic oligonucleotide
acgttacttcacgtgccgcttccgtcgctacaccttgtagggggcagcgc

SEQ ID NO: 296765 - DNA, 50 bp, Artificial
  Synthetic oligonucleotide
ggatctactttcatgatcttaagacctataatagttatttaagacctatg

SEQ ID NO: 296766 - DNA, 50 bp, Artificial
  Synthetic oligonucleotide
acgtgtgctacgccttaccaacgcccgcccggctgtactgctaccgatcg

SEQ ID NO: 296767 - DNA, 50 bp, Artificial
  Synthetic oligonucleotide
acgtgtgcatgtgcgtcaggctacccacgtctgacaacgcaccaccaccg

SEQ ID NO: 296768 - DNA, 50 bp, Artificial
  Synthetic oligonucleotide
acgtgtgcatccccagggttaccacttcatacaacggtgcgggggctcca

SEQ ID NO: 296769 - DNA, 50 bp, Artificial
  Synthetic oligonucleotide
acgtgtcgaggtgcacacagtgggtgggctgcagtcatactacgcggcgc

SEQ ID NO: 296770 - DNA, 50 bp, Artificial
  Synthetic oligonucleotide
acgtgtccgagagggtcgcacctttcggaggtgtgagcgtgttgcatgcc

SEQ ID NO: 296771 - DNA, 57 bp, Artificial
  Synthetic oligonucleotide
ggcatacataacatgaacggtatacatgacataaacggcatacataatataaacggc

SEQ ID NO: 296772 - DNA, 50 bp, Artificial
  Synthetic oligonucleotide
ggatggccctacagaggaggcgtgatctgcctgtgcagcagggggtaagt

SEQ ID NO: 296773 - DNA, 50 bp, Artificial
  Synthetic oligonucleotide
ggagcactggtgctctcccgtgccaagaggccctcggtgacatcttgtgg

SEQ ID NO: 296774 - DNA, 50 bp, Artificial
  Synthetic oligonucleotide
actcaggcgcattttgtgtgcccacgcgccgacatgtacttccgtcgacc

SEQ ID NO: 296775 - DNA, 50 bp, Artificial
  Synthetic oligonucleotide
ccctgcgtgactgcctcccatcgcgtgcgtatttccgggtatgctcgcac

SEQ ID NO: 296776 - DNA, 50 bp, Artificial
  Synthetic oligonucleotide
atcctcctatatattgcccgaaaggctctctaatacttggtacaacgata

SEQ ID NO: 296777 - DNA, 50 bp, Artificial
  Synthetic oligonucleotide
actcactgcagcttggcgtgtcaagcaggtcgccgcttcacagggggaag

SEQ ID NO: 296778 - DNA, 50 bp, Artificial
  Synthetic oligonucleotide
cgaccgttacatacgcgcgccaaccaagcaagtcgggaaggagaagccga

SEQ ID NO: 296779 - DNA, 50 bp, Artificial
  Synthetic oligonucleotide
atcctgtcggggctccaaatagcagcgtaagcacccccgggatggttcga

SEQ ID NO: 296780 - DNA, 50 bp, Artificial
  Synthetic oligonucleotide
cgaccccctggggcgcttgtcccacgtcccagtctcgttgcagacgaccg

SEQ ID NO: 296781 - DNA, 50 bp, Artificial
  Synthetic oligonucleotide
actatgctggcaaccacgctctgtcgccctttcctccccctacgcagtgg

SEQ ID NO: 296782 - DNA, 57 bp, Artificial
  Synthetic oligonucleotide
ggtagacctggggtcggcaaaacaactattattcgtgaaattgctcgtgtcttatca

SEQ ID NO: 296783 - DNA, 50 bp, Artificial
  Synthetic oligonucleotide
actatgccccacacaagtatgcagcgaggtgggaccctgccgtaagcgcc

SEQ ID NO: 296784 - DNA, 50 bp, Artificial
  Synthetic oligonucleotide
atcgactggctcactgtatcccgccctatcgcgtctcgcccttctgccct

SEQ ID NO: 296785 - DNA, 50 bp, Artificial
  Synthetic oligonucleotide
ggaggaaagtacaagaacgatcggctctttgacggctattggtggcaagt

SEQ ID NO: 296786 - DNA, 50 bp, Artificial
  Synthetic oligonucleotide
atcgatgcgtggacgccctttgtgccccgctatcctccacaggctgcctc

SEQ ID NO: 296787 - DNA, 50 bp, Artificial
  Synthetic oligonucleotide
cgacatgctgagaagcgtttcggagggggtagggacttccttccggggct

SEQ ID NO: 296788 - DNA, 50 bp, Artificial
  Synthetic oligonucleotide
atcgccattcctgactgttgtgcccccacttactctgccacgcggacaga

SEQ ID NO: 296789 - DNA, 50 bp, Artificial
  Synthetic oligonucleotide
atcgccgctgcgttgcgtggcaccttccgtatcaccctgcacagcatctt

SEQ ID NO: 296790 - DNA, 50 bp, Artificial
  Synthetic oligonucleotide
actagggctgcgggggagcatggcctacaatgtgcccctctcttacgctg

SEQ ID NO: 296791 - DNA, 50 bp, Artificial
  Synthetic oligonucleotide
actagccgagagagtaagcgaagagagcgggtgcgcgcctgtaaggccgt

SEQ ID NO: 296792 - DNA, 50 bp, Artificial
  Synthetic oligonucleotide
actagcacgtcccacgacacggaacgtgacgagtggagcagccgccctac

SEQ ID NO: 296793 - DNA, 54 bp, Artificial
  Synthetic oligonucleotide
cactgactatttcttaccagaaagacaacaagttcccctagtaaacgatagatt

SEQ ID NO: 296794 - DNA, 50 bp, Artificial
  Synthetic oligonucleotide
atcgccggctccgcagatgagggggccgcttctgagagaagacagggtga

SEQ ID NO: 296795 - DNA, 50 bp, Artificial
  Synthetic oligonucleotide
atcgcgcgggccagtatttacagctccctgagtgagctcctgccgaacga

SEQ ID NO: 296796 - DNA, 50 bp, Artificial
  Synthetic oligonucleotide
atcgcgggatccatgtgaccagggtacgtctacccctgacaagcgccagc

SEQ ID NO: 296797 - DNA, 50 bp, Artificial
  Synthetic oligonucleotide
cgacagaggcatttagcgagagagagacgcacacatatgacggatgtggg

SEQ ID NO: 296798 - DNA, 50 bp, Artificial
  Synthetic oligonucleotide
actacccaggccgcggggagaggaaaacgcaaggtgtaaagccgcacgct

SEQ ID NO: 296799 - DNA, 50 bp, Artificial
  Synthetic oligonucleotide
gccctcacgcacaactgtgtgttggcgggtgtagcatcgcagctgtcgtg

SEQ ID NO: 296800 - DNA, 50 bp, Artificial
  Synthetic oligonucleotide
aggacgcgccaccgtttgatgagggaacgccgcgggtaatctaatgtcct

SEQ ID NO: 296801 - DNA, 50 bp, Artificial
  Synthetic oligonucleotide
aggacgaccgtcgaattggcgcgtatagcggtgctgcggggagtctcccc

SEQ ID NO: 296802 - DNA, 50 bp, Artificial
  Synthetic oligonucleotide
aggaccgctgcagctactccgtctaatgaagccaagcacgcctcccttcc

SEQ ID NO: 296803 - DNA, 50 bp, Artificial
  Synthetic oligonucleotide
aggaccgaaacacccgcaataagtcgacagagcgacgcagcacacacccg

SEQ ID NO: 296804 - DNA, 57 bp, Artificial
  Synthetic oligonucleotide
gtattgtaaagcgtgtcctatatatggagttaagtataataggggaacatatagcgc

SEQ ID NO: 296805 - DNA, 50 bp, Artificial
  Synthetic oligonucleotide
aggaccctggcagcgcaccctctggactgacgtccttgtacacagcgtgc

SEQ ID NO: 296806 - DNA, 50 bp, Artificial
  Synthetic oligonucleotide
aggaccataataagattagggatgtgtcgtcacgtgaaggtggacagtga

SEQ ID NO: 296807 - DNA, 50 bp, Artificial
  Synthetic oligonucleotide
aggaccaccgttacagtgccctccgcagcttgtcgtgcgtcctcagacta

SEQ ID NO: 296808 - DNA, 50 bp, Artificial
  Synthetic oligonucleotide
aggttaagcggtgtaactcccgcgtcgtccattgacacgcactgggcctt

SEQ ID NO: 296809 - DNA, 50 bp, Artificial
  Synthetic oligonucleotide
cccgcctgctgttaaaggagggaccgcgtctactggcacacaccctccct

SEQ ID NO: 296810 - DNA, 50 bp, Artificial
  Synthetic oligonucleotide
aggacacgccccattcaacggtgtgcgttacatgcgtagagacgggaggg

SEQ ID NO: 296811 - DNA, 50 bp, Artificial
  Synthetic oligonucleotide
gccgagcctctcacctgcgcgggtacgttacattcgtatgcgtcggggta

SEQ ID NO: 296812 - DNA, 50 bp, Artificial
  Synthetic oligonucleotide
cccgccttccgtggcgttgtggtgtagcccctcttcacttatagcgctcg

SEQ ID NO: 296813 - DNA, 50 bp, Artificial
  Synthetic oligonucleotide
aggaagttgtcccgggggtccgcgatggctcgattgtccgcggtgcttcg

SEQ ID NO: 296814 - DNA, 50 bp, Artificial
  Synthetic oligonucleotide
cccgcgctcttccccagcctctcacgtgaccgttgttgctttgtgtacgc

SEQ ID NO: 296815 - DNA, 57 bp, Artificial
  Synthetic oligonucleotide
gaaggggcaaataactgtcaacagtgaaagtagatactatgtttaacgaaatcagac

SEQ ID NO: 296816 - DNA, 50 bp, Artificial
  Synthetic oligonucleotide
aggaaggatgtgccgagcgccgagatgggaggtagcaacacatccgcgac

SEQ ID NO: 296817 - DNA, 50 bp, Artificial
  Synthetic oligonucleotide
aggaagcttcccccaggtgacggggcacgcgcacttgcgtagttaccacc

SEQ ID NO: 296818 - DNA, 50 bp, Artificial
  Synthetic oligonucleotide
gccgatgtggtgttttgcgtgcaccaatcctctgtgcacctgtacggcgg

SEQ ID NO: 296819 - DNA, 50 bp, Artificial
  Synthetic oligonucleotide
gccgattccctcaagacgttacccgcgtggggatgtgtgcgcgtgtgtcg

SEQ ID NO: 296820 - DNA, 50 bp, Artificial
  Synthetic oligonucleotide
aggaagcccctctcgtccctgtaagtggggtggagcggcatgcctggcat

SEQ ID NO: 296821 - DNA, 50 bp, Artificial
  Synthetic oligonucleotide
aggttaatccccacgcggggagacgccacctcggccgttcgtgctactcc

SEQ ID NO: 296822 - DNA, 50 bp, Artificial
  Synthetic oligonucleotide
aggaagagttgcgctcgaagggacaaccagagccgggaaaaagagggccg

SEQ ID NO: 296823 - DNA, 50 bp, Artificial
  Synthetic oligonucleotide
aggttcattagtttgggcacatcatatgatgactgtaggtttagagacag

SEQ ID NO: 296824 - DNA, 50 bp, Artificial
  Synthetic oligonucleotide
aggaactgccaggagaatcgtgcgggaagtaaagccagcccggctgcaca

SEQ ID NO: 296825 - DNA, 50 bp, Artificial
  Synthetic oligonucleotide
aggcaaacgtgccggaacagggaagcacctcatctgtacctccccctcac

SEQ ID NO: 296826 - DNA, 57 bp, Artificial
  Synthetic oligonucleotide
gtatcttttgcctttatccacagcaactgattttacgatgtgatctactgcgtcctt

SEQ ID NO: 296827 - DNA, 50 bp, Artificial
  Synthetic oligonucleotide
aggattccgcctcgccacttccgttgacgtccatcacgggactgcgtgtg

SEQ ID NO: 296828 - DNA, 50 bp, Artificial
  Synthetic oligonucleotide
aggatggtggagggacgcggcttatgcttgcctgcgtcgtgtgcgaccca

SEQ ID NO: 296829 - DNA, 50 bp, Artificial
  Synthetic oligonucleotide
aggatggccggaacgagggtaactttgtgggcagcgacagtggcacgtgg

SEQ ID NO: 296830 - DNA, 50 bp, Artificial
  Synthetic oligonucleotide
aggatggaccccgcggagagagaagcggtgaggggcatccagtctgtgtt

SEQ ID NO: 296831 - DNA, 50 bp, Artificial
  Synthetic oligonucleotide
aggatcggcagagtgtcagcgtcagtcgagtgcatctcacccggccctcg

SEQ ID NO: 296832 - DNA, 50 bp, Artificial
  Synthetic oligonucleotide
aggtgggcccgcacgggggaagcgatcacacctcgccgggttactagttg

SEQ ID NO: 296833 - DNA, 50 bp, Artificial
  Synthetic oligonucleotide
gcccatcttgtgtgcgttgattgtgtggtcgtccctccggatgggtgggt

SEQ ID NO: 296834 - DNA, 50 bp, Artificial
  Synthetic oligonucleotide
aggagttccttcgtttgggggtggtccccctcttggcggctaatcatccc

SEQ ID NO: 296835 - DNA, 50 bp, Artificial
  Synthetic oligonucleotide
gcactcctgcgaagcacaaccactagtgccgcgtcaagcggacccatacc

SEQ ID NO: 296836 - DNA, 50 bp, Artificial
  Synthetic oligonucleotide
ccccttgccgtgaaatttgtcacaccccacgctgcgcctctattggggcg

SEQ ID NO: 296837 - DNA, 57 bp, Artificial
  Synthetic oligonucleotide
caactgctaatgagtaagcatgttcctgagccatcatactcacgtaatccaatctat

SEQ ID NO: 296838 - DNA, 50 bp, Artificial
  Synthetic oligonucleotide
aggagggctactccttgattggacgcctctgtgcgtctggccaaggcttg

SEQ ID NO: 296839 - DNA, 50 bp, Artificial
  Synthetic oligonucleotide
aggtgtccctataaccactgttacccacgtgcgtgcctgcacccgctctc

SEQ ID NO: 296840 - DNA, 50 bp, Artificial
  Synthetic oligonucleotide
aggaggcacgctgcccgctcattcttgcgagcacgactacctcagcacac

SEQ ID NO: 296841 - DNA, 50 bp, Artificial
  Synthetic oligonucleotide
aggagcgtgcctgtatgagcgagcgtatagcgaggcggggaacgaagctc

SEQ ID NO: 296842 - DNA, 50 bp, Artificial
  Synthetic oligonucleotide
gcactaagggcagtgagcgtgcggcgtgtgccaaaacgccttgtgtctcg

SEQ ID NO: 296843 - DNA, 50 bp, Artificial
  Synthetic oligonucleotide
gcccctgtgtcgattccgtatattagctcgtccgaattcgttagtgtacc

SEQ ID NO: 296844 - DNA, 50 bp, Artificial
  Synthetic oligonucleotide
aggagcgggactggacgtaggagctgagcgtgtccgtcatgtagcagctg

SEQ ID NO: 296845 - DNA, 50 bp, Artificial
  Synthetic oligonucleotide
aggagcggctctgcctgggcaccctacacagtgggcactggacactgcta

SEQ ID NO: 296846 - DNA, 50 bp, Artificial
  Synthetic oligonucleotide
aggagcgacacaggccatggtctacacacaggggcgacggacaagtgcac

SEQ ID NO: 296847 - DNA, 50 bp, Artificial
  Synthetic oligonucleotide
aggagcacgtgcaggctgagatgcgctatgtgaagtgcattcgcgccaac

SEQ ID NO: 296848 - DNA, 52 bp, Artificial
  Synthetic oligonucleotide
gttttagagttttaaaaatgcgccctaaaatttctactagttatagaccaca

SEQ ID NO: 296849 - DNA, 57 bp, Artificial
  Synthetic oligonucleotide
gagtgtgcatgcacgtcactggaacggggcctcactccattcgcgggagttgcggcg

SEQ ID NO: 296850 - DNA, 50 bp, Artificial
  Synthetic oligonucleotide
aggactgctccaacccgcgtggtacgttacatcgtgtacaccgcgccgct

SEQ ID NO: 296851 - DNA, 50 bp, Artificial
  Synthetic oligonucleotide
aggactgcacggaccgcagcaactcgggtgagatgtgcatgttctcgcgc

SEQ ID NO: 296852 - DNA, 50 bp, Artificial
  Synthetic oligonucleotide
gccctatcacgtgtgtgggtgtgtcgctctcggagtagctcgctgtgggc

SEQ ID NO: 296853 - DNA, 50 bp, Artificial
  Synthetic oligonucleotide
gcaccgcagtggccatgtttagagactgcgaagacgccgcctaggcaagt

SEQ ID NO: 296854 - DNA, 50 bp, Artificial
  Synthetic oligonucleotide
agtacaggtcgctcaggtctcgggccatgggacggtaggagtactgcacg

SEQ ID NO: 296855 - DNA, 50 bp, Artificial
  Synthetic oligonucleotide
agtacgtgcggtgccccgacagttgctgggttggccaaaattccttccca

SEQ ID NO: 296856 - DNA, 50 bp, Artificial
  Synthetic oligonucleotide
agctccgactgaggtagggaaaaactcgccagcgggtgctctcacgcccc

SEQ ID NO: 296857 - DNA, 50 bp, Artificial
  Synthetic oligonucleotide
agctcccacgagcgtgcgacaacgtgcgtagttcctcccccaacgtgtta

SEQ ID NO: 296858 - DNA, 50 bp, Artificial
  Synthetic oligonucleotide
agtagcactccaagtggcctgagcaacactccaagtggcccgagcagcac

SEQ ID NO: 296859 - DNA, 50 bp, Artificial
  Synthetic oligonucleotide
agctcaatcattcttcggtctaattgaattatcacatccagataatagta

SEQ ID NO: 296860 - DNA, 57 bp, Artificial
  Synthetic oligonucleotide
ggtacactgggtatgctaccagtagttaattctttccattgaatgctatatatgttg

SEQ ID NO: 296861 - DNA, 50 bp, Artificial
  Synthetic oligonucleotide
agtagcggaggggttgctgtcgtccgcctaaaccaggcgacttaccccga

SEQ ID NO: 296862 - DNA, 50 bp, Artificial
  Synthetic oligonucleotide
agctagccgccgtcttcgttgtaaatgagcctgcgaacggggtggagtcg

SEQ ID NO: 296863 - DNA, 50 bp, Artificial
  Synthetic oligonucleotide
agctagacgcgcaggcatgagagagggaaactccgtggacgggcgggcaa

SEQ ID NO: 296864 - DNA, 50 bp, Artificial
  Synthetic oligonucleotide
agctaacccagccggtcccacgccccactaccaccatgccgaagctaatg

SEQ ID NO: 296865 - DNA, 50 bp, Artificial
  Synthetic oligonucleotide
agtatgcgatggtgtaagagggagtgcgtacgccacgctacgtctccttt

SEQ ID NO: 296866 - DNA, 50 bp, Artificial
  Synthetic oligonucleotide
agcgttggggagtgtgacccacaaccacccgttttacccccagtgaagcg

SEQ ID NO: 296867 - DNA, 50 bp, Artificial
  Synthetic oligonucleotide
cgcacatgctctcatcgcagaagggtgtgtgggctgagtgtgcgacgagg

SEQ ID NO: 296868 - DNA, 50 bp, Artificial
  Synthetic oligonucleotide
agcgttacgccgttccgtactgctacctggcctgccgcgagtatcgcaaa

SEQ ID NO: 296869 - DNA, 50 bp, Artificial
  Synthetic oligonucleotide
agcgtggccaagtagtccgcattgagcggaagagcatgtcagcaggcctc

SEQ ID NO: 296870 - DNA, 50 bp, Artificial
  Synthetic oligonucleotide
agcgtgcgtcttctcctgccgtgctacaaggcctgaaagcagcgtgacag

SEQ ID NO: 296871 - DNA, 57 bp, Artificial
  Synthetic oligonucleotide
gctaactaggatcttgaaccacatgctcgcaattgcttgccatgcactagacattgg

SEQ ID NO: 296872 - DNA, 50 bp, Artificial
  Synthetic oligonucleotide
gcctcgactggagaggaataaggggcatcgggtcggagcagaggccacaa

SEQ ID NO: 296873 - DNA, 50 bp, Artificial
  Synthetic oligonucleotide
gcacatgcgcgtcgttgcctagcgcggttctctttttggcccccgtttgc

SEQ ID NO: 296874 - DNA, 50 bp, Artificial
  Synthetic oligonucleotide
agcgtgacacctccaacccggattgtggcgcactcaaagcggtgagtagc

SEQ ID NO: 296875 - DNA, 50 bp, Artificial
  Synthetic oligonucleotide
agtcacagggaagcgaccctcgttgtgaagcggcttggccactcggtaca

SEQ ID NO: 296876 - DNA, 50 bp, Artificial
  Synthetic oligonucleotide
agcgtcccccaagtagctgtacgcccattggtgtgcaaacggacgggcac

SEQ ID NO: 296877 - DNA, 50 bp, Artificial
  Synthetic oligonucleotide
agcgtcatgcggccaaggtagcccttgcgaaagtcggtaacgaggcgcat

SEQ ID NO: 296878 - DNA, 50 bp, Artificial
  Synthetic oligonucleotide
aggaaagcgaagcccatagaggcagtccgtgaaagcgatgcagcggcggg

SEQ ID NO: 296879 - DNA, 50 bp, Artificial
  Synthetic oligonucleotide
aggaaaacgacgtcttctccccgggtggtgcataacagccgcaaccctct

SEQ ID NO: 296880 - DNA, 50 bp, Artificial
  Synthetic oligonucleotide
agcttctataattggtccaggagactctccttatagtggaggcgtatttt

SEQ ID NO: 296881 - DNA, 50 bp, Artificial
  Synthetic oligonucleotide
cccgcgtctgccgtcctgtacgccactctcgtttcctgcgctggaagagc

SEQ ID NO: 296882 - DNA, 56 bp, Artificial
  Synthetic oligonucleotide
cgccataacacatcccaaacgttaaagttagcaattcttgtatcttgttgttattc

SEQ ID NO: 296883 - DNA, 50 bp, Artificial
  Synthetic oligonucleotide
agcttccctccgcctccgttgcatgtgtcccgtctcttgcgttcagcctg

SEQ ID NO: 296884 - DNA, 50 bp, Artificial
  Synthetic oligonucleotide
agcttagctgtgacagcgcctcgagagctcatgtaccagcccacgaggga

SEQ ID NO: 296885 - DNA, 50 bp, Artificial
  Synthetic oligonucleotide
agcttagattgactgccccgggagcacactcaaacaggggccattcccct

SEQ ID NO: 296886 - DNA, 50 bp, Artificial
  Synthetic oligonucleotide
aggttgttgcagagacgcgcctatgggccgactagcccgttccctcgaaa

SEQ ID NO: 296887 - DNA, 50 bp, Artificial
  Synthetic oligonucleotide
gcacgcagtgagaccgcggcagggtagtagcgtctgttgggccagtatgg

SEQ ID NO: 296888 - DNA, 50 bp, Artificial
  Synthetic oligonucleotide
agctgtgcccctagccgctccgccctaccggctgcttcgaaacgctcgtg

SEQ ID NO: 296889 - DNA, 50 bp, Artificial
  Synthetic oligonucleotide
agctggtgcacgtaaagacgcgtgcagaggtgtcggagtgggccaaaacg

SEQ ID NO: 296890 - DNA, 50 bp, Artificial
  Synthetic oligonucleotide
agctgggcgaaagcgcgacaacgagtccaggacacagtgcctgtgcctca

SEQ ID NO: 296891 - DNA, 50 bp, Artificial
  Synthetic oligonucleotide
aggtttgtcgctcgaaaagccaggtggagggctatgggacccaccgactc

SEQ ID NO: 296892 - DNA, 50 bp, Artificial
  Synthetic oligonucleotide
agctggctcgtgtgttgtggtgggctagctaggagagcgcagtccctgat

SEQ ID NO: 296893 - DNA, 57 bp, Artificial
  Synthetic oligonucleotide
cctccaagaagagaacatatgtgtacatccaatttggaacatttagttacggataac

SEQ ID NO: 296894 - DNA, 50 bp, Artificial
  Synthetic oligonucleotide
agctgcttccgccagggacgtggcatcagatccacccaactgacaaacga

SEQ ID NO: 296895 - DNA, 50 bp, Artificial
  Synthetic oligonucleotide
cgcacaggagtactcaggtgaccctcaggggtactttgggggaccccagg

SEQ ID NO: 296896 - DNA, 50 bp, Artificial
  Synthetic oligonucleotide
gcacgaatgcgggcaaatgtaggggaggtgaactcgtgcccacgtcgctc

SEQ ID NO: 296897 - DNA, 50 bp, Artificial
  Synthetic oligonucleotide
agctgattgcagcgaacagtccagtgtacacgcagccccgtgcggctgct

SEQ ID NO: 296898 - DNA, 50 bp, Artificial
  Synthetic oligonucleotide
agctgatggggcgcaggtgtgagccctccaaacgcacgtacacccccgca

SEQ ID NO: 296899 - DNA, 50 bp, Artificial
  Synthetic oligonucleotide
agctgactcgagaggtacggagcaggggctttttgtgtggctgtcgctga

SEQ ID NO: 296900 - DNA, 50 bp, Artificial
  Synthetic oligonucleotide
cgatctgcatgcggcctgtccgcacatcgactcgcacatgcctagcacgt

SEQ ID NO: 296901 - DNA, 50 bp, Artificial
  Synthetic oligonucleotide
gccgtggtacgtcagatcggacatgcgtgagtcggtgtgggggcactgag

SEQ ID NO: 296902 - DNA, 50 bp, Artificial
  Synthetic oligonucleotide
agctcgcgcccttgaagtggactcttgtggtttgcccaccttcgcagtcg

SEQ ID NO: 296903 - DNA, 50 bp, Artificial
  Synthetic oligonucleotide
agctcgcctttgaccatcccctaaagcatccggggtgctctgtgcacagc

SEQ ID NO: 296904 - DNA, 57 bp, Artificial
  Synthetic oligonucleotide
ggtagctgtttgaatccttaacgcaagttaattgattaggcaactatgaaataccac

SEQ ID NO: 296905 - DNA, 50 bp, Artificial
  Synthetic oligonucleotide
agtacacccctctgctgtttcgtcccgtttgtgtagccccctcctggtgc

SEQ ID NO: 296906 - DNA, 50 bp, Artificial
  Synthetic oligonucleotide
aggggagatgcacatttgaggattgcccctgtgagggttgcccgtgggag

SEQ ID NO: 296907 - DNA, 50 bp, Artificial
  Synthetic oligonucleotide
aggggagagtcttctcaccgaggccctaatcgacgccacggcgcactctt

SEQ ID NO: 296908 - DNA, 50 bp, Artificial
  Synthetic oligonucleotide
agggctttccacgggattggacgaccgaaggagcgcaggtgggcatcgtg

SEQ ID NO: 296909 - DNA, 50 bp, Artificial
  Synthetic oligonucleotide
cgcaagttacagacgcgttgtggaaatgtctcgtgcctctgcgcatttgg

SEQ ID NO: 296910 - DNA, 50 bp, Artificial
  Synthetic oligonucleotide
agggctcgagtgcgtgtccgctgcgagcaaccctacagcagttctgctta

SEQ ID NO: 296911 - DNA, 50 bp, Artificial
  Synthetic oligonucleotide
agggcgggccaaataactctgcttgtggaatcgcccccatggaagcctcc

SEQ ID NO: 296912 - DNA, 50 bp, Artificial
  Synthetic oligonucleotide
agggcggataggagagtagccctccccgctgcatgcgcgagttacactgg

SEQ ID NO: 296913 - DNA, 50 bp, Artificial
  Synthetic oligonucleotide
agggcgcacacattcacgtccattcactcgcgtgtgcaactttcgcaccc

SEQ ID NO: 296914 - DNA, 50 bp, Artificial
  Synthetic oligonucleotide
cccgaccacacactagacgagcatttgtgcgcctgtgcgaagcaaggggc

SEQ ID NO: 296915 - DNA, 57 bp, Artificial
  Synthetic oligonucleotide
agcttaactttaaagcgaataaatgcaggttgtttgatcccagtgtaaatctgagta

SEQ ID NO: 296916 - DNA, 50 bp, Artificial
  Synthetic oligonucleotide
agggcgaaggggagagcgtctcgggacagtcggtgacacaacgacagtcc

SEQ ID NO: 296917 - DNA, 50 bp, Artificial
  Synthetic oligonucleotide
gcatcaatgctaccagtaacatcagtagtacgtacataaaattgtggacg

SEQ ID NO: 296918 - DNA, 50 bp, Artificial
  Synthetic oligonucleotide
agggcctcgcttacagtcctcagggccggatttcccaaatgccgtcctga

SEQ ID NO: 296919 - DNA, 50 bp, Artificial
  Synthetic oligonucleotide
agggcctcccccaccgctcccgacaattttacccttctggagatcagcgc

SEQ ID NO: 296920 - DNA, 50 bp, Artificial
  Synthetic oligonucleotide
agggccgtgttggccacgtctcccaagtaattggtgcggttgtggacgtc

SEQ ID NO: 296921 - DNA, 50 bp, Artificial
  Synthetic oligonucleotide
agggccgggtgagatgcactcgactgacgctgaaactctgccgatcctat

SEQ ID NO: 296922 - DNA, 50 bp, Artificial
  Synthetic oligonucleotide
aggtacgcgcagcgggggcgacccaacacactggtcggcaaacccatcct

SEQ ID NO: 296923 - DNA, 50 bp, Artificial
  Synthetic oligonucleotide
agggcagtccggaagccactctgcagacgtcacgatgctgcgacgtccaa

SEQ ID NO: 296924 - DNA, 50 bp, Artificial
  Synthetic oligonucleotide
aggtagccccatgacctgtgtggggcctcgactggagaggaataaggggc

SEQ ID NO: 296925 - DNA, 50 bp, Artificial
  Synthetic oligonucleotide
agggagcttaatcggaggaaagttctcaccgcggaggggcgactgttggc

SEQ ID NO: 296926 - DNA, 56 bp, Artificial
  Synthetic oligonucleotide
ggacaggtaatgtactgacttgttaatacacctgtctttaatggtgcactataatg

SEQ ID NO: 296927 - DNA, 50 bp, Artificial
  Synthetic oligonucleotide
agggagcgagaggtcagattagccgcggaatgcgcgaccgtttccatgtg

SEQ ID NO: 296928 - DNA, 50 bp, Artificial
  Synthetic oligonucleotide
cgattggagaagtatcgagcgcagcctcgttggtgcgacgtgccgtccct

SEQ ID NO: 296929 - DNA, 50 bp, Artificial
  Synthetic oligonucleotide
agggagatttggcgtgagcactacccagatcgcgagttgccgcatccgtg

SEQ ID NO: 296930 - DNA, 50 bp, Artificial
  Synthetic oligonucleotide
aggggtgacgccgtgggaaataagccgtcgtcagcgacgtttggtggctc

SEQ ID NO: 296931 - DNA, 50 bp, Artificial
  Synthetic oligonucleotide
cccgagtaaaggctgcctccactctcgcccgctcgcgctactgtgcggcg

SEQ ID NO: 296932 - DNA, 50 bp, Artificial
  Synthetic oligonucleotide
aggggtatccagcgctgctgggggtagcttcaacggaagtggggcgtggc

SEQ ID NO: 296933 - DNA, 50 bp, Artificial
  Synthetic oligonucleotide
gcagctaaatgaagtgagcgcaaccttgcacgctccctctcacagcgggc

SEQ ID NO: 296934 - DNA, 50 bp, Artificial
  Synthetic oligonucleotide
aggggtaaggcgagcagagctttctgcgtggactcctcaggacggcatca

SEQ ID NO: 296935 - DNA, 50 bp, Artificial
  Synthetic oligonucleotide
agggggttgccatttaacgtagcgctcctgaggtggttgccagtgggctt

SEQ ID NO: 296936 - DNA, 50 bp, Artificial
  Synthetic oligonucleotide
gcagcggaggtgcgagagagaaacggtctgtcaccagagtggcacacacg

SEQ ID NO: 296937 - DNA, 56 bp, Artificial
  Synthetic oligonucleotide
gacctatatcagtgaatgtaagaccttagttagtcaagttatgacccatgttagtg

SEQ ID NO: 296938 - DNA, 50 bp, Artificial
  Synthetic oligonucleotide
agggggtcatgttggttagtgacgctcagccgcaactgctacgtgtgcga

SEQ ID NO: 296939 - DNA, 50 bp, Artificial
  Synthetic oligonucleotide
agggggcggacgtgagcgcttcacaggagcagtcttcagaggcggagtag

SEQ ID NO: 296940 - DNA, 50 bp, Artificial
  Synthetic oligonucleotide
agggggccaacaaatctaggtccgttggtgcaaagagggagagcgtcgga

SEQ ID NO: 296941 - DNA, 50 bp, Artificial
  Synthetic oligonucleotide
agggggcacgccaccctttcctgaatccgcgcgtctttgacaggaggatg

SEQ ID NO: 296942 - DNA, 50 bp, Artificial
  Synthetic oligonucleotide
gcagcgcccggactgctagccaaatagagccaagtccttggagggcatgc

SEQ ID NO: 296943 - DNA, 50 bp, Artificial
  Synthetic oligonucleotide
agggtcacagcacaggtggctgcgaaaccgtcagaggctacggtgtgggg

SEQ ID NO: 296944 - DNA, 50 bp, Artificial
  Synthetic oligonucleotide
agggtcccaatcggcacgagaggctactcttcactcggcactcccttcga

SEQ ID NO: 296945 - DNA, 50 bp, Artificial
  Synthetic oligonucleotide
aggggcgacgagcgaggtcggagcagagaaacccgagccggagaacagta

SEQ ID NO: 296946 - DNA, 50 bp, Artificial
  Synthetic oligonucleotide
aggggcgacattttccctccgcagtgggggtgtccttcatcgagtctgca

SEQ ID NO: 296947 - DNA, 50 bp, Artificial
  Synthetic oligonucleotide
aggggcccgcagtgtggtgtctttgagcacattaagagggcgggaaggga

SEQ ID NO: 296948 - DNA, 56 bp, Artificial
  Synthetic oligonucleotide
cccgaaactagtgatctaatcatgagagattgaaatgagttaacaacttttggagg

SEQ ID NO: 296949 - DNA, 50 bp, Artificial
  Synthetic oligonucleotide
gcagtggtagagacgcgaaagacaggcaccagctcactcggacgacgcac

SEQ ID NO: 296950 - DNA, 50 bp, Artificial
  Synthetic oligonucleotide
gcagtggtgcctcggcctcgttggaggtgcccgtagcttacggactgagc

SEQ ID NO: 296951 - DNA, 50 bp, Artificial
  Synthetic oligonucleotide
aggggagtatgcgtccaagtggttccccactcatgtgtgcagcggccgtg

SEQ ID NO: 296952 - DNA, 50 bp, Artificial
  Synthetic oligonucleotide
aggggagcgcccgaacgaggcgtcactcgtcaatggccatcacccaaaga

SEQ ID NO: 296953 - DNA, 50 bp, Artificial
  Synthetic oligonucleotide
aggggagcgccatagggggtagtgccaaacggggaggcgcaaccaaatcg

SEQ ID NO: 296954 - DNA, 50 bp, Artificial
  Synthetic oligonucleotide
aggtgactcacaccgttgcatcccgagcccagcaagtcagcagtgatgcg

SEQ ID NO: 296955 - DNA, 50 bp, Artificial
  Synthetic oligonucleotide
aggcgatgccatactctaccggcacaacacaacgcgcgtgcgcaacagca

SEQ ID NO: 296956 - DNA, 50 bp, Artificial
  Synthetic oligonucleotide
aggcgagtaagggaagacggacccgcccctcgctgcctctatctaactcc

SEQ ID NO: 296957 - DNA, 50 bp, Artificial
  Synthetic oligonucleotide
aggcgaggcgcctttccaacgtaggtcgctaaaggagggcaattctccgc

SEQ ID NO: 296958 - DNA, 50 bp, Artificial
  Synthetic oligonucleotide
gccacgtgcacacagacagcagccttgtcgacctactcgcttctaccccg

SEQ ID NO: 296959 - DNA, 52 bp, Artificial
  Synthetic oligonucleotide
gttttaatagtgcccctaacttaagagtttgtaaaaattggagcaacatagt

SEQ ID NO: 296960 - DNA, 56 bp, Artificial
  Synthetic oligonucleotide
atgtgcatgacgtagcggagcactgccagtgcgtggaagagtaacaggtctgaggc

SEQ ID NO: 296961 - DNA, 50 bp, Artificial
  Synthetic oligonucleotide
aggtgagacgacggcagcacttatagctgtgcctgcgactgacggccatg

SEQ ID NO: 296962 - DNA, 50 bp, Artificial
  Synthetic oligonucleotide
aggcgacccgtggctgtacatgcggatcgagagggtgccagttgagaagc

SEQ ID NO: 296963 - DNA, 50 bp, Artificial
  Synthetic oligonucleotide
aggcgaatgcccgtcgcggggccaactcctctaacctgtcctgacggaaa

SEQ ID NO: 296964 - DNA, 50 bp, Artificial
  Synthetic oligonucleotide
aggccttcagcgggggtagcgggagggaaggatttagcgagaggcatcgc

SEQ ID NO: 296965 - DNA, 50 bp, Artificial
  Synthetic oligonucleotide
aggtgccccatatgccgctcgactgaggcttccacacatgcagatcgcgc

SEQ ID NO: 296966 - DNA, 50 bp, Artificial
  Synthetic oligonucleotide
aggcccgtacccgtgtcattgaggatcccgatggtgccaactttccgtgg

SEQ ID NO: 296967 - DNA, 50 bp, Artificial
  Synthetic oligonucleotide
gccacttcaccgtaccgtcatacgttcgcgccctggtgaccttcgcaacg

SEQ ID NO: 296968 - DNA, 50 bp, Artificial
  Synthetic oligonucleotide
aggccatcgcgcggacaaagctcggacttggtggtgagaactgccgaaca

SEQ ID NO: 296969 - DNA, 50 bp, Artificial
  Synthetic oligonucleotide
aggccagtcgtgtgcacgaggacagagcgcaagagagtgctaggtgggtg

SEQ ID NO: 296970 - DNA, 50 bp, Artificial
  Synthetic oligonucleotide
aggccaggctccgcgtgttcgcctcgacggatggacaagaagtcggtgca

SEQ ID NO: 296971 - DNA, 56 bp, Artificial
  Synthetic oligonucleotide
ggtggcacagcatgccgcacacgtgttggtcgcaatcgcgcttcttttcgcagtgg

SEQ ID NO: 296972 - DNA, 50 bp, Artificial
  Synthetic oligonucleotide
aggcaggtcaactttgtccaggtgacgcagacgtgctgcatgtgccttga

SEQ ID NO: 296973 - DNA, 50 bp, Artificial
  Synthetic oligonucleotide
aggcaggccaaccagaatggcaaacgaggcaccaagcgagtgcccgtaca

SEQ ID NO: 296974 - DNA, 50 bp, Artificial
  Synthetic oligonucleotide
aggcaccactgtgcgcttcgaaccccggaatgagcacgacgactgtggaa

SEQ ID NO: 296975 - DNA, 50 bp, Artificial
  Synthetic oligonucleotide
gcactgtgcacgcaacaactgagacagtactgcgaacccctgccgcctgc

SEQ ID NO: 296976 - DNA, 50 bp, Artificial
  Synthetic oligonucleotide
aggcacacgtctgcacgcttaccggtgctccccttaacatggaagggagc

SEQ ID NO: 296977 - DNA, 50 bp, Artificial
  Synthetic oligonucleotide
aggcacaagcacagcggtgtgaatcactaggtgccacgtagagcaaatcg

SEQ ID NO: 296978 - DNA, 50 bp, Artificial
  Synthetic oligonucleotide
aggcaacccttaacgtggcttgcaaagagcgggtgacacgcagagcgacg

SEQ ID NO: 296979 - DNA, 50 bp, Artificial
  Synthetic oligonucleotide
aggcaacactcagtaggcgcaaaaacccgtgggcctaacgacgagcggaa

SEQ ID NO: 296980 - DNA, 50 bp, Artificial
  Synthetic oligonucleotide
aggtggatcctcctaccgccccagtgccacctgcacacgtgcagctcctc

SEQ ID NO: 296981 - DNA, 50 bp, Artificial
  Synthetic oligonucleotide
agggagaaagacaccccaagtgggcacagccacgcaggcaggcttatcca

SEQ ID NO: 296982 - DNA, 54 bp, Artificial
  Synthetic oligonucleotide
gtgaatgtaagacccaagttaataccttaatgacctaggttagtaaccttatga

SEQ ID NO: 296983 - DNA, 50 bp, Artificial
  Synthetic oligonucleotide
cgattctccttgcacgtgcgtctgccttgtgcgtgtgcctatccccgcgt

SEQ ID NO: 296984 - DNA, 50 bp, Artificial
  Synthetic oligonucleotide
agggaccgttacggatgagagcttctccgctccgcttgagggtggcccag

SEQ ID NO: 296985 - DNA, 50 bp, Artificial
  Synthetic oligonucleotide
aggtcagcatccttgcttattggtgcgggatgactgctgcccggtggctc

SEQ ID NO: 296986 - DNA, 50 bp, Artificial
  Synthetic oligonucleotide
agggaatgcatagcggcaaccaacggtcgggtgcttggtgggcggctctc

SEQ ID NO: 296987 - DNA, 50 bp, Artificial
  Synthetic oligonucleotide
aggctttggtgggtcgctgggtggcagaccgcgtctttcagtactgctat

SEQ ID NO: 296988 - DNA, 50 bp, Artificial
  Synthetic oligonucleotide
aggcttgggactgtctagatagcacgctttcgtcgtgcccatgccagtaa

SEQ ID NO: 296989 - DNA, 50 bp, Artificial
  Synthetic oligonucleotide
aggctctccacagaaacagtcgggctggccacacgtattgccctcggctt

SEQ ID NO: 296990 - DNA, 50 bp, Artificial
  Synthetic oligonucleotide
aggctccaatgtggagacccaccagaccacataacgggacgctgccactt

SEQ ID NO: 296991 - DNA, 50 bp, Artificial
  Synthetic oligonucleotide
aggtcgggatgccatctcccccagaggatgggcccataaagcgcccataa

SEQ ID NO: 296992 - DNA, 50 bp, Artificial
  Synthetic oligonucleotide
aggcgtctgtgcgctcacacactcatgcagcggatgtcacaggctcaagg

SEQ ID NO: 296993 - DNA, 56 bp, Artificial
  Synthetic oligonucleotide
agcgtgtactctcgaatgaaactttgtgctccaccgtaagtctctttcctccaaca

SEQ ID NO: 296994 - DNA, 50 bp, Artificial
  Synthetic oligonucleotide
aggcgtctcctcacacaagggcgtcaaaggcgtcgtacgtgagtcctgct

SEQ ID NO: 296995 - DNA, 50 bp, Artificial
  Synthetic oligonucleotide
aggcgtcgttcgtggccccgcctaccgaagcgacaaggggttggcgaggt

SEQ ID NO: 296996 - DNA, 50 bp, Artificial
  Synthetic oligonucleotide
aggcggcgtactagtgtagtgcggggtggccacatcacgtgttggaggac

SEQ ID NO: 296997 - DNA, 50 bp, Artificial
  Synthetic oligonucleotide
aggcgcttttcgctttctgagccccttactcggcgcctgtgctcatgcac

SEQ ID NO: 296998 - DNA, 50 bp, Artificial
  Synthetic oligonucleotide
aggcgctactttggcgctggggacgcttaggaagctctgcgaagtcagac

SEQ ID NO: 296999 - DNA, 50 bp, Artificial
  Synthetic oligonucleotide
aggcgcccctcgtctgctatgaagtcatgcgtgctgcgaagccgctgaag

SEQ ID NO: 297000 - DNA, 50 bp, Artificial
  Synthetic oligonucleotide
aggtgacgagggccgggtgagatgcactcgactgacgctgaaactctgcc

SEQ ID NO: 297001 - DNA, 50 bp, Artificial
  Synthetic oligonucleotide
aggcgccagggcactcacggaacactgtggatggaaggtacaactcgctc

SEQ ID NO: 297002 - DNA, 50 bp, Artificial
  Synthetic oligonucleotide
aggcgcattggacccatccctcgcaggggatatagccgcgctacgccttg

SEQ ID NO: 297003 - DNA, 50 bp, Artificial
  Synthetic oligonucleotide
aggtgactcaacggctgcatacggagttggagtgcactcggcaagagcgg

SEQ ID NO: 297004 - DNA, 56 bp, Artificial
  Synthetic oligonucleotide
gtacgcaaaatggttcaatattatcgccgtttagtatatgttattcgttgcaggac

SEQ ID NO: 297005 - DNA, 50 bp, Artificial
  Synthetic oligonucleotide
aggcgcacaaggggagaccgtggaagcctcacatgcgtgtcctcgccttc

SEQ ID NO: 297006 - DNA, 50 bp, Artificial
  Synthetic oligonucleotide
agccatctctccacttccgcgtgcactgtagaggcgaccctgcgaacgcg

SEQ ID NO: 297007 - DNA, 50 bp, Artificial
  Synthetic oligonucleotide
agccagcgtaactgcaccttgaggtcttggcgctctgacggccaaccgga

SEQ ID NO: 297008 - DNA, 50 bp, Artificial
  Synthetic oligonucleotide
agccaccactgtcgcgtatgtgagcgctgcgtgtttgacatggaccacca

SEQ ID NO: 297009 - DNA, 50 bp, Artificial
  Synthetic oligonucleotide
cgcacgtacctctcttgggcgagagtgtagtgtgggcccggggcgtcttt

SEQ ID NO: 297010 - DNA, 50 bp, Artificial
  Synthetic oligonucleotide
gcggacggtcgttgcacaactttaacatgggcctccaccccctcgctaga

SEQ ID NO: 297011 - DNA, 50 bp, Artificial
  Synthetic oligonucleotide
agtgaccccaacgcctggtgccgaggcgacccctccacgctagagatcta

SEQ ID NO: 297012 - DNA, 50 bp, Artificial
  Synthetic oligonucleotide
agccacaccacgctttgttcacgctcaaccacgtctcggtgcactccacg

SEQ ID NO: 297013 - DNA, 50 bp, Artificial
  Synthetic oligonucleotide
agccaacgtggctgccccgaaatacagcacagctaacacgccccgtgaag

SEQ ID NO: 297014 - DNA, 50 bp, Artificial
  Synthetic oligonucleotide
agcatgtgagcccgtccctgcgcgggagagatccgcccattgggtttgcc

SEQ ID NO: 297015 - DNA, 51 bp, Artificial
  Synthetic oligonucleotide
atttctaaaggttcgcaaaccacttgttttaaactatcgtcgtatcgtact

SEQ ID NO: 297016 - DNA, 50 bp, Artificial
  Synthetic oligonucleotide
agcatggcgagtgacctgtcgcacggtactgctaactcgcacgcagagtg

SEQ ID NO: 297017 - DNA, 50 bp, Artificial
  Synthetic oligonucleotide
cgagtcccgttggtagcggtgacttgaatggacagcggcgcagaggtgtg

SEQ ID NO: 297018 - DNA, 50 bp, Artificial
  Synthetic oligonucleotide
cccggtaggggccaagtaagccgcttaccgtgccgagcaagggcgatcga

SEQ ID NO: 297019 - DNA, 50 bp, Artificial
  Synthetic oligonucleotide
agcatgaacgtgtcggaaacgttttgttggtagggcatggtgggggcgcg

SEQ ID NO: 297020 - DNA, 50 bp, Artificial
  Synthetic oligonucleotide
agcatctgcttatgggccattggggatgttaacgacggtggcgagcgcca

SEQ ID NO: 297021 - DNA, 50 bp, Artificial
  Synthetic oligonucleotide
agcatcgcgcgatagtaccgacagggcgccacccgtagcccaacaagggg

SEQ ID NO: 297022 - DNA, 50 bp, Artificial
  Synthetic oligonucleotide
agcatcgacgagtcctcattctctcacgcccctcgctgcctccgactacg

SEQ ID NO: 297023 - DNA, 50 bp, Artificial
  Synthetic oligonucleotide
agcatccgcgtccctctccctctgcgccgctcgtgtgcatatatgtgggc

SEQ ID NO: 297024 - DNA, 50 bp, Artificial
  Synthetic oligonucleotide
agcatccgaggctgcaacacacgtcgggggcctcacgaacaaagttcccc

SEQ ID NO: 297025 - DNA, 50 bp, Artificial
  Synthetic oligonucleotide
agcataaaaggcagatcgggtgtccatctcgctgccaggacgcacggagg

SEQ ID NO: 297026 - DNA, 56 bp, Artificial
  Synthetic oligonucleotide
tgtacttctcgatggcccccgtgtgcctctgcgccgacccgtcactcagagcaacg

SEQ ID NO: 297027 - DNA, 50 bp, Artificial
  Synthetic oligonucleotide
cccggtgtgcttccatcacacaacgtgctctcgtcacgtgtgcatgtgcg

SEQ ID NO: 297028 - DNA, 50 bp, Artificial
  Synthetic oligonucleotide
agcagtcgggcatggggacaagaaaaccgcgcgcattaggttgacaccca

SEQ ID NO: 297029 - DNA, 50 bp, Artificial
  Synthetic oligonucleotide
gcggcgggtgatctacagggtggttcgacccatagcgggggaggcactat

SEQ ID NO: 297030 - DNA, 50 bp, Artificial
  Synthetic oligonucleotide
agcagtcgcggagtaaccgcggagtagcggcgggatatgggaagggacgt

SEQ ID NO: 297031 - DNA, 50 bp, Artificial
  Synthetic oligonucleotide
agtgacgtcggacatgctgaacgcaaccgtagtccatttcggaaatactc

SEQ ID NO: 297032 - DNA, 50 bp, Artificial
  Synthetic oligonucleotide
agtctctgctttcgccaagcgcgagtgacatgtgtgcctcaccagggctt

SEQ ID NO: 297033 - DNA, 50 bp, Artificial
  Synthetic oligonucleotide
agccgacttgggccactcgcaacaggggcgcttcatagagcaaaagcgat

SEQ ID NO: 297034 - DNA, 50 bp, Artificial
  Synthetic oligonucleotide
agccgacttgcggtggctccgtgggattgtggtgcgagggcgtagcggaa

SEQ ID NO: 297035 - DNA, 50 bp, Artificial
  Synthetic oligonucleotide
agccgacgtggcccgcaggagttgtccatgcaacataatccggtctctgc

SEQ ID NO: 297036 - DNA, 50 bp, Artificial
  Synthetic oligonucleotide
agccctggctcccagtgtaccctgctgagggcttgcagaactgctgtact

SEQ ID NO: 297037 - DNA, 56 bp, Artificial
  Synthetic oligonucleotide
tcacggcgtacggcttcagaacccagtcgctgtggctctccatacagccagggcac

SEQ ID NO: 297038 - DNA, 50 bp, Artificial
  Synthetic oligonucleotide
gcaacgcgggtgaacgggaacggaacagatgtggaaagccttccacaggc

SEQ ID NO: 297039 - DNA, 50 bp, Artificial
  Synthetic oligonucleotide
gcgcgcctagttccgatgggcactccacacagctgcaccctccgtcacgc

SEQ ID NO: 297040 - DNA, 50 bp, Artificial
  Synthetic oligonucleotide
gcgcgcctcgctacactgctctccttacaacgacacgggtgagagccgat

SEQ ID NO: 297041 - DNA, 50 bp, Artificial
  Synthetic oligonucleotide
cgagtgctcggatgtgagggcggcactaaagcagcttaacgcaacgcgcg

SEQ ID NO: 297042 - DNA, 50 bp, Artificial
  Synthetic oligonucleotide
agcccgtctgcgtcgatcccagccgagtacgtagcagcgtgtgacagtgc

SEQ ID NO: 297043 - DNA, 50 bp, Artificial
  Synthetic oligonucleotide
agcccgtccattaaccttcacccctagagtaccctcctcgcagcacgcgc

SEQ ID NO: 297044 - DNA, 50 bp, Artificial
  Synthetic oligonucleotide
gcgcggctagccaatctgagagcgtgcccgtggttcgtacaacactccaa

SEQ ID NO: 297045 - DNA, 50 bp, Artificial
  Synthetic oligonucleotide
agcccggtgaaggaggcctagctggcacaaagtgtgccccctgaaagtag

SEQ ID NO: 297046 - DNA, 50 bp, Artificial
  Synthetic oligonucleotide
agccccttaaaatggcgcccagcggcctccttcccaagtcggtgctccag

SEQ ID NO: 297047 - DNA, 50 bp, Artificial
  Synthetic oligonucleotide
agtctgcatgaggcatgcgattgtgtaagcgatgcacgcactgccccggg

SEQ ID NO: 297048 - DNA, 56 bp, Artificial
  Synthetic oligonucleotide
atcggcgtaccccgacctgatggaggggcatgctagggagagtgcgcgggcaacgg

SEQ ID NO: 297049 - DNA, 50 bp, Artificial
  Synthetic oligonucleotide
agccccgcctgtggggccttaacaaactcttcccgcgtgatgcgtagggg

SEQ ID NO: 297050 - DNA, 50 bp, Artificial
  Synthetic oligonucleotide
agccccgcctccacacggtgagcatcccaacctgtagcgacttcaccacg

SEQ ID NO: 297051 - DNA, 50 bp, Artificial
  Synthetic oligonucleotide
gcgctacacgctgcagatcgaaaaccgctcaccattgccagggaaaattg

SEQ ID NO: 297052 - DNA, 50 bp, Artificial
  Synthetic oligonucleotide
agcccacggcattgggaggcaacacacggcatgtcatcaccgctgctccg

SEQ ID NO: 297053 - DNA, 50 bp, Artificial
  Synthetic oligonucleotide
gcaacgacagctgttctacgtatggttacagtggcaacagtgatcattac

SEQ ID NO: 297054 - DNA, 50 bp, Artificial
  Synthetic oligonucleotide
agcccaccgtcagaccgcaccacggacacacgtagcacacgcgggtttcg

SEQ ID NO: 297055 - DNA, 50 bp, Artificial
  Synthetic oligonucleotide
gcaaccgtacgtgcgtggcactcgcttttcgactccgtgcccgtggtttg

SEQ ID NO: 297056 - DNA, 50 bp, Artificial
  Synthetic oligonucleotide
agtcttgggggtaggcaacgtagcgcgagccggtagagtagtcggtgtgg

SEQ ID NO: 297057 - DNA, 50 bp, Artificial
  Synthetic oligonucleotide
agtgaacacgcgtcgccctcgggaactaccacccatgcgcaggcgctaca

SEQ ID NO: 297058 - DNA, 50 bp, Artificial
  Synthetic oligonucleotide
agtgaacgcgttggggaagcgggcatgtcgggacagctattcaaggaggg

SEQ ID NO: 297059 - DNA, 56 bp, Artificial
  Synthetic oligonucleotide
ggaattctaggatgtttaggacaacaacgtatgattagatttattgcgtatagcgg

SEQ ID NO: 297060 - DNA, 50 bp, Artificial
  Synthetic oligonucleotide
agcaccacctggtatgccccgaaaaggaccgcctctaaatagtcccccga

SEQ ID NO: 297061 - DNA, 50 bp, Artificial
  Synthetic oligonucleotide
agtgcggcacgggttgtagactctccgctgtgtgtgcgccttccctttcg

SEQ ID NO: 297062 - DNA, 50 bp, Artificial
  Synthetic oligonucleotide
agcacatagagcaccgagcgacgagaaggggatacggagcttccacgcgc

SEQ ID NO: 297063 - DNA, 50 bp, Artificial
  Synthetic oligonucleotide
agcacagcgcgggaccaaagtggatcgcacagagtaggccccaagtggac

SEQ ID NO: 297064 - DNA, 50 bp, Artificial
  Synthetic oligonucleotide
agcacagacctgcggtgtacggtcccacccatcggagcagttcaccatta

SEQ ID NO: 297065 - DNA, 50 bp, Artificial
  Synthetic oligonucleotide
agcacacagaagaagaggcgggtgacgacgcccccagtagtgcaccagag

SEQ ID NO: 297066 - DNA, 50 bp, Artificial
  Synthetic oligonucleotide
agtgcgtatagtggtgcgcaaggggtgtacagaacggcacaccgtgagct

SEQ ID NO: 297067 - DNA, 50 bp, Artificial
  Synthetic oligonucleotide
agtgcgtattcgccctgtgcatgcgtgccctcggggacagaagccccatg

SEQ ID NO: 297068 - DNA, 50 bp, Artificial
  Synthetic oligonucleotide
agcaagcgcagggcgctactcaagtggaaggacgcgacaacagtgagtcc

SEQ ID NO: 297069 - DNA, 50 bp, Artificial
  Synthetic oligonucleotide
gattggctgcgtggagagagaaaaagtcccctgggaagcggtgcccgggc

SEQ ID NO: 297070 - DNA, 56 bp, Artificial
  Synthetic oligonucleotide
acttacaccgtgctggtaactctacttactctcgtcaaaagactcacggtatgaac

SEQ ID NO: 297071 - DNA, 56 bp, Artificial
  Synthetic oligonucleotide
cttgatttacagactttaccattacactaggtatatctactagttgatcatttacc

SEQ ID NO: 297072 - DNA, 50 bp, Artificial
  Synthetic oligonucleotide
agcaaccttgacaaggactgggcaacagtgcccggcttaggcggttaccg

SEQ ID NO: 297073 - DNA, 50 bp, Artificial
  Synthetic oligonucleotide
agcaaccctgcggaagtgacagggtacacggtgagaagcaaccctgcgaa

SEQ ID NO: 297074 - DNA, 50 bp, Artificial
  Synthetic oligonucleotide
agcaacccgtcgtggcagctcagccctctaccatcgtcgtgactccggat

SEQ ID NO: 297075 - DNA, 50 bp, Artificial
  Synthetic oligonucleotide
cgaggcccgacgcaagacggcgtaacgtgccattagggtctaactggcac

SEQ ID NO: 297076 - DNA, 50 bp, Artificial
  Synthetic oligonucleotide
gattgcaggttaacgccctatgtgtgcatcaggactgcgactgtcttaca

SEQ ID NO: 297077 - DNA, 50 bp, Artificial
  Synthetic oligonucleotide
agattgcttgagtgggcggcagtcaacacggagccagccgaaggagtggg

SEQ ID NO: 297078 - DNA, 50 bp, Artificial
  Synthetic oligonucleotide
agattgcgtagttgacaccgctcgagtgtcccaccagcgtgtgcaggcaa

SEQ ID NO: 297079 - DNA, 50 bp, Artificial
  Synthetic oligonucleotide
agattgcaggcacgtgtcgggccgtgaagcaggcagcggggtcggcaatt

SEQ ID NO: 297080 - DNA, 50 bp, Artificial
  Synthetic oligonucleotide
agatgtgtgtggtcgcacgtttcgtgtcagctgcctcgcctcgagtggcc

SEQ ID NO: 297081 - DNA, 50 bp, Artificial
  Synthetic oligonucleotide
gcgtcgcgcactactgtcgaacgccccactcatgcctacggcccccgtca

SEQ ID NO: 297082 - DNA, 56 bp, Artificial
  Synthetic oligonucleotide
atgttactttaggtttcgttgatttaatgagagatgactacgtagaattagatcgt

SEQ ID NO: 297083 - DNA, 50 bp, Artificial
  Synthetic oligonucleotide
agtgatgacgcggtgaatgggaaggatcttcctggcgacccctccagggg

SEQ ID NO: 297084 - DNA, 50 bp, Artificial
  Synthetic oligonucleotide
agcagggtgcgtggcgaaaagggaaacgtgcgcggttgcagttttaacgc

SEQ ID NO: 297085 - DNA, 50 bp, Artificial
  Synthetic oligonucleotide
agcaggcacgggggcgatgtgtgggtagaagggcaccaaaagggaagaca

SEQ ID NO: 297086 - DNA, 50 bp, Artificial
  Synthetic oligonucleotide
agcaggagacccgtaggctgtgtgggccgagcgagtggttccaggctatg

SEQ ID NO: 297087 - DNA, 50 bp, Artificial
  Synthetic oligonucleotide
agtgcaagttgcacgcaccctccctcgatgtcttgctcgtgtgcgctcag

SEQ ID NO: 297088 - DNA, 50 bp, Artificial
  Synthetic oligonucleotide
agtgcactggcaagggccggagtgcgaattgcagacgcttctcctctctc

SEQ ID NO: 297089 - DNA, 50 bp, Artificial
  Synthetic oligonucleotide
agcagctttcgcgcctaccgcacagacgcactaagggcggagcagcagac

SEQ ID NO: 297090 - DNA, 50 bp, Artificial
  Synthetic oligonucleotide
agcagcgtagcggcagtgtagcggcagggaatgatcacgtaatggacggc

SEQ ID NO: 297091 - DNA, 50 bp, Artificial
  Synthetic oligonucleotide
agcagcggttatcgtccccctccgtccccactacgggggcataaccccag

SEQ ID NO: 297092 - DNA, 50 bp, Artificial
  Synthetic oligonucleotide
agcagagtgcgtgtcccacaacgacaaccgccacaccgtcattcctcgcc

SEQ ID NO: 297093 - DNA, 56 bp, Artificial
  Synthetic oligonucleotide
cgacaaagtccatgaagtttacgagctaataatgattcagctactctttcaacaac

SEQ ID NO: 297094 - DNA, 50 bp, Artificial
  Synthetic oligonucleotide
agcagaggttttggcccacacatgtaccccgcgccagacctcaccttctt

SEQ ID NO: 297095 - DNA, 50 bp, Artificial
  Synthetic oligonucleotide
agcagaagtgcactggctcacagcgccatgtcaatgcacgcgcatgggca

SEQ ID NO: 297096 - DNA, 50 bp, Artificial
  Synthetic oligonucleotide
agcacttcgtaccctttcggtgctggcagcgtctcaccccatggcggcaa

SEQ ID NO: 297097 - DNA, 50 bp, Artificial
  Synthetic oligonucleotide
agtgccactaaccgtcgtcccaggagcgccagagaaccgcgcacgtcagg

SEQ ID NO: 297098 - DNA, 50 bp, Artificial
  Synthetic oligonucleotide
agcactggtccaccacattgtcacgtccgccagctgttactcaccgcctg

SEQ ID NO: 297099 - DNA, 50 bp, Artificial
  Synthetic oligonucleotide
agtgccgcccgctcccaaacaccacgtggccccactgacggcccctcacg

SEQ ID NO: 297100 - DNA, 50 bp, Artificial
  Synthetic oligonucleotide
agcactagttacttccgcgcgccccttgacagagatccctgtggctccct

SEQ ID NO: 297101 - DNA, 50 bp, Artificial
  Synthetic oligonucleotide
agcacgctacacgcgaagggcaagagggggtgtgtgcggcagtggtgcag

SEQ ID NO: 297102 - DNA, 50 bp, Artificial
  Synthetic oligonucleotide
agcacgcctcttttcattcgggcgggattgcagcggaagtgaggggtgag

SEQ ID NO: 297103 - DNA, 50 bp, Artificial
  Synthetic oligonucleotide
agtgcgacgcgattgtgcggctggcgagttcgctccggggcatgcaaagt

SEQ ID NO: 297104 - DNA, 56 bp, Artificial
  Synthetic oligonucleotide
atgtttttcatgcgccaactttcaaggttggtactttaaaccactcagacattcat

SEQ ID NO: 297105 - DNA, 50 bp, Artificial
  Synthetic oligonucleotide
agcacgactgttgcaagacaggggcggagctcgcgcatttgacacaaggc

SEQ ID NO: 297106 - DNA, 50 bp, Artificial
  Synthetic oligonucleotide
agcacgacggtccccatcaaagcgcccagggatgatgttgaggtcgcaga

SEQ ID NO: 297107 - DNA, 50 bp, Artificial
  Synthetic oligonucleotide
agtgcgactagggtagacggtccacccagaacaaacgtgcaggggagggg

SEQ ID NO: 297108 - DNA, 50 bp, Artificial
  Synthetic oligonucleotide
agcacctctggagatcgcgtcaacggactgcagtgccagggacccccaat

SEQ ID NO: 297109 - DNA, 50 bp, Artificial
  Synthetic oligonucleotide
cccctctcagccgccatacccaacacagccatacccgcagctgttgcctc

SEQ ID NO: 297110 - DNA, 50 bp, Artificial
  Synthetic oligonucleotide
agcggcaaccaacggtcgggtgcttggtgggcggctctcgccagggaggc

SEQ ID NO: 297111 - DNA, 50 bp, Artificial
  Synthetic oligonucleotide
agcggaggggtccccatacggaggcgagccagatgaatcccctttcaaag

SEQ ID NO: 297112 - DNA, 50 bp, Artificial
  Synthetic oligonucleotide
agcggagccaccgatggaccccgacaggcgtttgcgcgtctacgaccagt

SEQ ID NO: 297113 - DNA, 50 bp, Artificial
  Synthetic oligonucleotide
cccgctcgaagggattctcgacgcctgtatgctttcgccgctgcacatgc

SEQ ID NO: 297114 - DNA, 50 bp, Artificial
  Synthetic oligonucleotide
agcggacgatcagcgaagaaggacgcttacgtgtgccacttacgcagcgg

SEQ ID NO: 297115 - DNA, 56 bp, Artificial
  Synthetic oligonucleotide
acgcccttgtacttgaagaagttcaatcaggaacgagagttcaccgtgatatgtga

SEQ ID NO: 297116 - DNA, 50 bp, Artificial
  Synthetic oligonucleotide
agcggacgagtggactaacgacagttgcacatgcgagggggtggggagtc

SEQ ID NO: 297117 - DNA, 50 bp, Artificial
  Synthetic oligonucleotide
agcggacaacagccagcttacacgtttgcctgcctcgtgcacccagagcg

SEQ ID NO: 297118 - DNA, 50 bp, Artificial
  Synthetic oligonucleotide
agcggaacagcctggcccacgtatgaatcgctcatctctccgcttgcccc

SEQ ID NO: 297119 - DNA, 50 bp, Artificial
  Synthetic oligonucleotide
agcgcttagccctttggtgggggcatatacccctttggagggggagtcta

SEQ ID NO: 297120 - DNA, 50 bp, Artificial
  Synthetic oligonucleotide
agcgctgctgggggtagcttcaacggaagtggggcgtggcttgttgtggc

SEQ ID NO: 297121 - DNA, 50 bp, Artificial
  Synthetic oligonucleotide
agcgctctctcttccccctagtgacacctcggctggtgttcctccgctgg

SEQ ID NO: 297122 - DNA, 50 bp, Artificial
  Synthetic oligonucleotide
agcgcgtacgcagcccatttcccgtggtgggttcttgaggagtgactcaa

SEQ ID NO: 297123 - DNA, 50 bp, Artificial
  Synthetic oligonucleotide
agcgcgggccactaatcacatcgacagccctctgaacgtctgctagcgga

SEQ ID NO: 297124 - DNA, 50 bp, Artificial
  Synthetic oligonucleotide
agtccaccgctcttgcaaaatggctcggcatcctgagttgcaagcgtgct

SEQ ID NO: 297125 - DNA, 50 bp, Artificial
  Synthetic oligonucleotide
agcgccgctgaagggtgcctctgaatggtgccgctaaaatgggaacgttg

SEQ ID NO: 297126 - DNA, 56 bp, Artificial
  Synthetic oligonucleotide
cttgccggtggagcaaggtgaacagaccaatgcatgcacccagaacggggcgcggt

SEQ ID NO: 297127 - DNA, 50 bp, Artificial
  Synthetic oligonucleotide
agcgccgacatgtgctccacggaggtagcaacgacgcagcggccacacat

SEQ ID NO: 297128 - DNA, 50 bp, Artificial
  Synthetic oligonucleotide
agcgccatgtaccgccatacataggcacactgcgtaccgctacgcgtaga

SEQ ID NO: 297129 - DNA, 49 bp, Artificial
  Synthetic oligonucleotide
agtccccgttgggggactttccctcgtgttgttttccccactgtcggcc

SEQ ID NO: 297130 - DNA, 50 bp, Artificial
  Synthetic oligonucleotide
agcgccactttgcgagcccctgccgaagagtcaaagtttgctgcacgcac

SEQ ID NO: 297131 - DNA, 50 bp, Artificial
  Synthetic oligonucleotide
agcgcatgtgtgatagcgtgctccagtgaactgtcggggactgcccagct

SEQ ID NO: 297132 - DNA, 50 bp, Artificial
  Synthetic oligonucleotide
gcgagagatgccgcctacgcaaactccttcgcttgcatgtggcgaggcaa

SEQ ID NO: 297133 - DNA, 50 bp, Artificial
  Synthetic oligonucleotide
agcgcatcgcgagtgtaacgtagtgcagtagcccacgccgtgttctcccc

SEQ ID NO: 297134 - DNA, 50 bp, Artificial
  Synthetic oligonucleotide
agcgcagatatcgcgagagggtcggctaccaatgcaagttggaccgtgga

SEQ ID NO: 297135 - DNA, 50 bp, Artificial
  Synthetic oligonucleotide
agcgcacgggactgcgctgtggaatgagcaggacgtcatcgtacgtgagt

SEQ ID NO: 297136 - DNA, 50 bp, Artificial
  Synthetic oligonucleotide
cgataattccgaaagtgatctacggcaatccgtcgctgtagctttcatgc

SEQ ID NO: 297137 - DNA, 56 bp, Artificial
  Synthetic oligonucleotide
atagactaatgattaatttagaaccataagaattcaccatgtttttgacgttgaga

SEQ ID NO: 297138 - DNA, 50 bp, Artificial
  Synthetic oligonucleotide
gcctgagatgcggacggtcgttgcacaactttaacatgggcctccacccc

SEQ ID NO: 297139 - DNA, 50 bp, Artificial
  Synthetic oligonucleotide
agcgtatgatggcggtgtgtgacccctacacgagctctaccgtcgcccta

SEQ ID NO: 297140 - DNA, 50 bp, Artificial
  Synthetic oligonucleotide
agcgtagggagggcgtcaacgcaaggagtaccaaggcccgcgcatacaca

SEQ ID NO: 297141 - DNA, 50 bp, Artificial
  Synthetic oligonucleotide
agcgtagccggggtgtccttgttgcgtaggggacgggcacacacgatagg

SEQ ID NO: 297142 - DNA, 50 bp, Artificial
  Synthetic oligonucleotide
agcgtacccatggtcagagccatccctcgtcgttcggcgggtctccaccc

SEQ ID NO: 297143 - DNA, 50 bp, Artificial
  Synthetic oligonucleotide
agcggttagaaaagtggtcggatggatggagtgccagtcgggggagggca

SEQ ID NO: 297144 - DNA, 50 bp, Artificial
  Synthetic oligonucleotide
agcggtgtgccgtagattgggggcggtggtatccacggaaggttcgcgaa

SEQ ID NO: 297145 - DNA, 50 bp, Artificial
  Synthetic oligonucleotide
agcggtctggtctgcgtccccaccgctccactgtcgaccccctgggcgtg

SEQ ID NO: 297146 - DNA, 50 bp, Artificial
  Synthetic oligonucleotide
agcggtcgtgcgtcccgatttggttggcgaatgggtacccgagttgaacg

SEQ ID NO: 297147 - DNA, 50 bp, Artificial
  Synthetic oligonucleotide
agcggtacggaagctgcatctaccgtgactgcgtgccatcggaatgggtc

SEQ ID NO: 297148 - DNA, 56 bp, Artificial
  Synthetic oligonucleotide
cccaagcccttgtgtataactagaatcgtatcttagcccgatgatccggactctaa

SEQ ID NO: 297149 - DNA, 50 bp, Artificial
  Synthetic oligonucleotide
agcggggcttgtggtcagctgcagacatggactccgtggcacacttaccg

SEQ ID NO: 297150 - DNA, 50 bp, Artificial
  Synthetic oligonucleotide
agcggggcgcctgtactgcaaatccgtcacactctctcttgcctcggacc

SEQ ID NO: 297151 - DNA, 50 bp, Artificial
  Synthetic oligonucleotide
gccttcgctcgcgcactccgctttctgtggatgcctaccctccgtcttcc

SEQ ID NO: 297152 - DNA, 50 bp, Artificial
  Synthetic oligonucleotide
agtcacccgcatcgcaagttgcctggcagccgctcccattgggcaggtcc

SEQ ID NO: 297153 - DNA, 50 bp, Artificial
  Synthetic oligonucleotide
agcgggaaacatcaccaggcgagtgcccctcactgtggtctgcggaaggt

SEQ ID NO: 297154 - DNA, 50 bp, Artificial
  Synthetic oligonucleotide
agcggcgggcaaagaggcagaacccccatcaccctccgaacatcacggga

SEQ ID NO: 297155 - DNA, 50 bp, Artificial
  Synthetic oligonucleotide
agcggcgcggtgactacacccaccgggatgcttctaaccactccaaccac

SEQ ID NO: 297156 - DNA, 50 bp, Artificial
  Synthetic oligonucleotide
agtcacgaccggttagtggtgccgactggtcacacggggtgatacgcggt

SEQ ID NO: 297157 - DNA, 50 bp, Artificial
  Synthetic oligonucleotide
cccgctaaggaggggtgccgtttccccaagttgacgcgttctgctgacct

SEQ ID NO: 297158 - DNA, 50 bp, Artificial
  Synthetic oligonucleotide
agcggccatcggagacgccaccccggactgtacagcaagagagcaatgca

SEQ ID NO: 297159 - DNA, 56 bp, Artificial
  Synthetic oligonucleotide
cttctagatggcataacgttgtgtccactcacgagctgttgcttcataacgtgatc

SEQ ID NO: 297160 - DNA, 50 bp, Artificial
  Synthetic oligonucleotide
agcggcatgtatctgtcggcctgagccgatatgaatggctccccaggtgc

SEQ ID NO: 297161 - DNA, 50 bp, Artificial
  Synthetic oligonucleotide
agcggcacttctgcgcaggcatgctcaagaccaatcgacgtggaagcgac

SEQ ID NO: 297162 - DNA, 50 bp, Artificial
  Synthetic oligonucleotide
agcggcaactcctcccgaactacgggccctcactgaacccgatttggtgc

SEQ ID NO: 297163 - DNA, 50 bp, Artificial
  Synthetic oligonucleotide
gcgaagattggttccccctccaatcgtcttactccccctcggggaaggcg

SEQ ID NO: 297164 - DNA, 50 bp, Artificial
  Synthetic oligonucleotide
agtcgctccggtgttatcggcaaacttgcgtagggctggcgaggtgctat

SEQ ID NO: 297165 - DNA, 50 bp, Artificial
  Synthetic oligonucleotide
agcctcccgcgcgtgagaatgccgttgctgtgactggggcgacacgcctt

SEQ ID NO: 297166 - DNA, 50 bp, Artificial
  Synthetic oligonucleotide
agcctcatgtcaccccactcggtgcattggccggcgtctgaaaatcgctt

SEQ ID NO: 297167 - DNA, 50 bp, Artificial
  Synthetic oligonucleotide
agtcggcctgcctcggccatactgacttgccctccccctggagaactgac

SEQ ID NO: 297168 - DNA, 50 bp, Artificial
  Synthetic oligonucleotide
gcaagcggaaggggagtgcccccaccttaggggactggcccagtgactca

SEQ ID NO: 297169 - DNA, 50 bp, Artificial
  Synthetic oligonucleotide
agccgttagcatccaccccagcgaccaggagagagcatccgaagggacgg

SEQ ID NO: 297170 - DNA, 52 bp, Artificial
  Synthetic oligonucleotide
gttaccttaagacctacgtttctgtagttaagatctatactagttaccttag

SEQ ID NO: 297171 - DNA, 50 bp, Artificial
  Synthetic oligonucleotide
cccggacggtgggtggtacgcggagtacctaaggaacatgctacgctgcg

SEQ ID NO: 297172 - DNA, 50 bp, Artificial
  Synthetic oligonucleotide
agccgtgggacaggcgagcggaggacccgacgtggactgcctcatcaacc

SEQ ID NO: 297173 - DNA, 50 bp, Artificial
  Synthetic oligonucleotide
agccgtccgccgcaggtttgcgcctatcttcgtcagccacttcgacccgg

SEQ ID NO: 297174 - DNA, 50 bp, Artificial
  Synthetic oligonucleotide
agccggtgaacacctctggtacgaccgggttaacgcagatgcgtcgctgt

SEQ ID NO: 297175 - DNA, 50 bp, Artificial
  Synthetic oligonucleotide
agccgggtgaccgcgggagagacactcctcccttcgcttcacgagaggcg

SEQ ID NO: 297176 - DNA, 50 bp, Artificial
  Synthetic oligonucleotide
gcaagcgcaggtcgcaataaagaatttcgctccttgcaggggtctctcgg

SEQ ID NO: 297177 - DNA, 50 bp, Artificial
  Synthetic oligonucleotide
agccggagaacgaagttacgccgcctaactggcgagcgcgtaccccactt

SEQ ID NO: 297178 - DNA, 50 bp, Artificial
  Synthetic oligonucleotide
gcgccagagccactctcaccatacgctgtggaggccactgctgtctcaat

SEQ ID NO: 297179 - DNA, 50 bp, Artificial
  Synthetic oligonucleotide
agtcggtgtggcgatctgcttgtgcttcgctgacacggtcgttcacagga

SEQ ID NO: 297180 - DNA, 50 bp, Artificial
  Synthetic oligonucleotide
gcgccattggagcgcccctgtgccatctaggcgtcgcatgtgagtggggc

SEQ ID NO: 297181 - DNA, 52 bp, Artificial
  Synthetic oligonucleotide
gtttgggaattactaaatattgtggttaaacttaaacatacaggacatttaa

SEQ ID NO: 297182 - DNA, 56 bp, Artificial
  Synthetic oligonucleotide
catgatttatccgcttcaaggatattaggataggacatggaatgatagtttcgatc

SEQ ID NO: 297183 - DNA, 50 bp, Artificial
  Synthetic oligonucleotide
agccgctccgccctaccggctgcttcgaaacgctcgtgtgctccaactca

SEQ ID NO: 297184 - DNA, 50 bp, Artificial
  Synthetic oligonucleotide
gcgcccatcctgcgtgcgcccctccacaaccctccgcgattgttgttgtg

SEQ ID NO: 297185 - DNA, 50 bp, Artificial
  Synthetic oligonucleotide
agccgccagagggacttatcgtggtactctccgttctgcacccgcgactg

SEQ ID NO: 297186 - DNA, 50 bp, Artificial
  Synthetic oligonucleotide
agccgcatccgagtgggatgacgcctactgtgaggaagtggtgcgtcgca

SEQ ID NO: 297187 - DNA, 50 bp, Artificial
  Synthetic oligonucleotide
agccgcagagatacgcccacacgtccatccgaaaagtccaccccgaagtc

SEQ ID NO: 297188 - DNA, 50 bp, Artificial
  Synthetic oligonucleotide
agccgcacgggatgcgagtccctcttcgccggctgtttggtgggcccgct

SEQ ID NO: 297189 - DNA, 50 bp, Artificial
  Synthetic oligonucleotide
agccgagtacaccgtcggaagggaaacagcggacgcgtagcccacaagag

SEQ ID NO: 297190 - DNA, 50 bp, Artificial
  Synthetic oligonucleotide
agccgaggcacgtggcaacaaagcaacggcgtatgcaatgcggaaaaagg

SEQ ID NO: 297191 - DNA, 50 bp, Artificial
  Synthetic oligonucleotide
agtcccggtcggcgatttggtgcgaggtgaggcaccggagttgcttgcac

SEQ ID NO: 297192 - DNA, 50 bp, Artificial
  Synthetic oligonucleotide
agcgcaccatttgggaatgcccccttgtggacgcgtagcctagtgcaggg

SEQ ID NO: 297193 - DNA, 56 bp, Artificial
  Synthetic oligonucleotide
cattcaatgtctaaggaagaggaccatagtgaagtagaggatcatattctaagaag

SEQ ID NO: 297194 - DNA, 50 bp, Artificial
  Synthetic oligonucleotide
agcgcaactcgagcgactccgtcgtgtccccgcctgcttaaccgtccgtt

SEQ ID NO: 297195 - DNA, 50 bp, Artificial
  Synthetic oligonucleotide
agcgatgctgtacctggtagaccgcgagttgggctaccacactccgtggg

SEQ ID NO: 297196 - DNA, 50 bp, Artificial
  Synthetic oligonucleotide
agcgatgccacgacaaattgggggacgcggaagggacactacccatcagc

SEQ ID NO: 297197 - DNA, 50 bp, Artificial
  Synthetic oligonucleotide
agcgagccacgaacgtgtgccaaacgcactgcacatcatggttcaccgaa

SEQ ID NO: 297198 - DNA, 50 bp, Artificial
  Synthetic oligonucleotide
agcgagagcggtcctgaccccctggagcggaaggacgaaaccaacgcgga

SEQ ID NO: 297199 - DNA, 50 bp, Artificial
  Synthetic oligonucleotide
agcgagaccccgttctgtacgcatcgccgaaagggggcagaagtggcaac

SEQ ID NO: 297200 - DNA, 50 bp, Artificial
  Synthetic oligonucleotide
agcgacggggtgccactcgatgaaccaaagagtgagggaaacacgggaga

SEQ ID NO: 297201 - DNA, 50 bp, Artificial
  Synthetic oligonucleotide
agcgacagggcaggcgacagcttaccatgcagctacgcgacacctaccgg

SEQ ID NO: 297202 - DNA, 50 bp, Artificial
  Synthetic oligonucleotide
agcgacagggagacaaccgctcgagtcaggtccgcgcgttcatttgcccg

SEQ ID NO: 297203 - DNA, 50 bp, Artificial
  Synthetic oligonucleotide
agcgaagtagggcgaacacgagtagcaaggccgctgcgtatcaagtgggc

SEQ ID NO: 297204 - DNA, 52 bp, Artificial
  Synthetic oligonucleotide
gtcgaagtgtgaccttagttagttaacttaagacctatattagttacgttag

SEQ ID NO: 297205 - DNA, 50 bp, Artificial
  Synthetic oligonucleotide
agcgaaggggagaaccccaccattgggtgtagcagaaccagacgggggcc

SEQ ID NO: 297206 - DNA, 50 bp, Artificial
  Synthetic oligonucleotide
agcgaacgtggtgactcgaagcgcgaggaattgtcacgctacgggcaact

SEQ ID NO: 297207 - DNA, 50 bp, Artificial
  Synthetic oligonucleotide
agcgaaccacgggacggatggattgaaagcgtcacaagggggagacccac

SEQ ID NO: 297208 - DNA, 50 bp, Artificial
  Synthetic oligonucleotide
gcgcacgcgctacaactgggaagggcggttcggcccgcgtcatatagtac

SEQ ID NO: 297209 - DNA, 50 bp, Artificial
  Synthetic oligonucleotide
agcgaacacgtagaggtgcggactcccgttcgatcccctcctgcgtcgat

SEQ ID NO: 297210 - DNA, 50 bp, Artificial
  Synthetic oligonucleotide
agcgaaacaaacgtcatcgtacccgcgcacgccgacacttcgccgcgaca

SEQ ID NO: 297211 - DNA, 50 bp, Artificial
  Synthetic oligonucleotide
agcgaaaatccgaacgacgactctccctgtcgcttgcgaagggtctcgcg

SEQ ID NO: 297212 - DNA, 50 bp, Artificial
  Synthetic oligonucleotide
agcctttctatggcaccttgtgtgcccacgtacgcgtccccctcaggcga

SEQ ID NO: 297213 - DNA, 50 bp, Artificial
  Synthetic oligonucleotide
agccttggcgcgagcacacctgagacagcggcgaacccctaccgcagcat

SEQ ID NO: 297214 - DNA, 50 bp, Artificial
  Synthetic oligonucleotide
gcgcacttctacagctcggagaaaaaatgggactcgtaaagctatctcgc

SEQ ID NO: 297215 - DNA, 55 bp, Artificial
  Synthetic oligonucleotide
tacccaatgctgcgtgacaagggaggagcttctaaaccctttgtgccccaaccgt

SEQ ID NO: 297216 - DNA, 50 bp, Artificial
  Synthetic oligonucleotide
agcctgttcatgtcaccgggcagatgggtccaccgggtagtgtttcccgt

SEQ ID NO: 297217 - DNA, 50 bp, Artificial
  Synthetic oligonucleotide
agcctgtgagcaggcttcctccagtcataccatggctgagcgcgacacat

SEQ ID NO: 297218 - DNA, 50 bp, Artificial
  Synthetic oligonucleotide
agcctctccgaagcaacgtccagggaggggctactgacccttgtgaggag

SEQ ID NO: 297219 - DNA, 50 bp, Artificial
  Synthetic oligonucleotide
acacggcgataggcgtgtgggactgttcaccgggagatgctctcagctcg

SEQ ID NO: 297220 - DNA, 50 bp, Artificial
  Synthetic oligonucleotide
gaagacagggagttgttacgtcatttcacctacctcgaactggaccaact

SEQ ID NO: 297221 - DNA, 50 bp, Artificial
  Synthetic oligonucleotide
acacggccgctgtagggtcgggggacaggaagacaacacatgcgtctggg

SEQ ID NO: 297222 - DNA, 50 bp, Artificial
  Synthetic oligonucleotide
acacggagatgcacgcgccacacctgttctcagcacatagacgcacgtgc

SEQ ID NO: 297223 - DNA, 50 bp, Artificial
  Synthetic oligonucleotide
caacccacgggtgtagagcgccctccgtgtttcacattgccgcagcacct

SEQ ID NO: 297224 - DNA, 50 bp, Artificial
  Synthetic oligonucleotide
acacgctaacccgctaatccgctcacccacgcatgctgcccctccgaggg

SEQ ID NO: 297225 - DNA, 50 bp, Artificial
  Synthetic oligonucleotide
acacgcgggagttgggaagaatcgttttgcgcgaggcgacgtgggcacac

SEQ ID NO: 297226 - DNA, 55 bp, Artificial
  Synthetic oligonucleotide
tgttgtatgtctcggaagtgtacgttgattcgggtccgtctttgaaaagacttag

SEQ ID NO: 297227 - DNA, 50 bp, Artificial
  Synthetic oligonucleotide
acacgcgctcggacggacgactggtttcgcgtctcggagagcccaacagg

SEQ ID NO: 297228 - DNA, 50 bp, Artificial
  Synthetic oligonucleotide
acacgcgccatgcatgctgtgtgccccgcggccaatgtcttgtttgccct

SEQ ID NO: 297229 - DNA, 50 bp, Artificial
  Synthetic oligonucleotide
acacgcgagcttttcgcaagtgtgccggagcaagtcgcgcctcgatggtt

SEQ ID NO: 297230 - DNA, 50 bp, Artificial
  Synthetic oligonucleotide
acacgcctctcccgttcacctcgatacgctattctcatgcacgcgcggga

SEQ ID NO: 297231 - DNA, 50 bp, Artificial
  Synthetic oligonucleotide
acacgcctccacgagggcactgcgtgtcatcatatgccccgaatctgcca

SEQ ID NO: 297232 - DNA, 50 bp, Artificial
  Synthetic oligonucleotide
acacgcccgcggagctgggccgtaggtaaaaggaatccggtccgggaatg

SEQ ID NO: 297233 - DNA, 50 bp, Artificial
  Synthetic oligonucleotide
caaccccgcaggtaggtgcaccaccgccaatcgctggagcatcctaatca

SEQ ID NO: 297234 - DNA, 50 bp, Artificial
  Synthetic oligonucleotide
ccgcctggtagcagccccacctcttatcatagcgacgcagacgtcgcgag

SEQ ID NO: 297235 - DNA, 50 bp, Artificial
  Synthetic oligonucleotide
caacccggggttaagccatggcgcagcagaggcataggcggactgtggct

SEQ ID NO: 297236 - DNA, 50 bp, Artificial
  Synthetic oligonucleotide
gtcacgctgcgagaggggagcgagttgtcgcgggtgtacaacgagtccgt

SEQ ID NO: 297237 - DNA, 56 bp, Artificial
  Synthetic oligonucleotide
gaaattcgtctatttgtgatagtatatcgaacccaaaattggcgtagtaaagtggc

SEQ ID NO: 297238 - DNA, 50 bp, Artificial
  Synthetic oligonucleotide
acacgcataagttcatccccaagtgggacgtccacgaggtccccaggccg

SEQ ID NO: 297239 - DNA, 50 bp, Artificial
  Synthetic oligonucleotide
acacgcagtccccaacggggcgcgtcagtaggtgggtcaacgtgtatcta

SEQ ID NO: 297240 - DNA, 50 bp, Artificial
  Synthetic oligonucleotide
acacgcacctgtctgcggaggggaggcctagaaaggcgaatggtcgagca

SEQ ID NO: 297241 - DNA, 50 bp, Artificial
  Synthetic oligonucleotide
acacgcacaccgcaaaaggccgcggggaaaaccgttacccatttccggct

SEQ ID NO: 297242 - DNA, 50 bp, Artificial
  Synthetic oligonucleotide
cgcgcgcttgacacctgcgataacctcaagggtagcctcatcactgggct

SEQ ID NO: 297243 - DNA, 50 bp, Artificial
  Synthetic oligonucleotide
acacgcaacccccaaggctcccaccatgcgaggaactaagcggtgtagcc

SEQ ID NO: 297244 - DNA, 50 bp, Artificial
  Synthetic oligonucleotide
acacgatgccggtggacccatcaacgccggacggcccaacgcggagctac

SEQ ID NO: 297245 - DNA, 50 bp, Artificial
  Synthetic oligonucleotide
acactcggcgtaacgggcttccgtgcagtctctacgagcacacagtgcgc

SEQ ID NO: 297246 - DNA, 50 bp, Artificial
  Synthetic oligonucleotide
acactcgagggagtttcggtgtgcggggtagcgccatcgcggctgctgag

SEQ ID NO: 297247 - DNA, 50 bp, Artificial
  Synthetic oligonucleotide
acactcatgggctgctcaccatgtgcgccacgcgtatccatgcaggtgca

SEQ ID NO: 297248 - DNA, 56 bp, Artificial
  Synthetic oligonucleotide
gcattacatgatacttactatgtaatagcccatttccatttcgtattatctatagg

SEQ ID NO: 297249 - DNA, 50 bp, Artificial
  Synthetic oligonucleotide
gtagtgggcgcctaccggagtgtccccgtctaaccgagcctcacccacgt

SEQ ID NO: 297250 - DNA, 50 bp, Artificial
  Synthetic oligonucleotide
gaagttccggtcagaggtgcatgtgttgtgttctcggagagatacggcgt

SEQ ID NO: 297251 - DNA, 50 bp, Artificial
  Synthetic oligonucleotide
acacgttgtttgtacggctacgcagcggcaagggtgtgggcgcaaagggt

SEQ ID NO: 297252 - DNA, 50 bp, Artificial
  Synthetic oligonucleotide
caaaggctcttgtgacgacacacgcccgcgatacagcctaagcgcatgcc

SEQ ID NO: 297253 - DNA, 50 bp, Artificial
  Synthetic oligonucleotide
caaagggcgagccacgctccagccctcttggcttccaccactttaagcgc

SEQ ID NO: 297254 - DNA, 50 bp, Artificial
  Synthetic oligonucleotide
caaaggggagcagcggttatcgtccccctccgtccccactacgggggcat

SEQ ID NO: 297255 - DNA, 50 bp, Artificial
  Synthetic oligonucleotide
acacgtggaggcctcactgcatcgccttgcaggaaataagccgagcggct

SEQ ID NO: 297256 - DNA, 50 bp, Artificial
  Synthetic oligonucleotide
acacgtgagtcccacgcacgcccagacacatgggctagctgttgccttcc

SEQ ID NO: 297257 - DNA, 50 bp, Artificial
  Synthetic oligonucleotide
gaagggcggttcggcccgcgtcatatagtacggctgtcgcactgctggga

SEQ ID NO: 297258 - DNA, 50 bp, Artificial
  Synthetic oligonucleotide
acacggtagtgaccacgacgaaaaatcggtcccgcgccctcggctctcct

SEQ ID NO: 297259 - DNA, 56 bp, Artificial
  Synthetic oligonucleotide
accgacatcgctgcgactcttctgggctgggtgatccctatgaccccggctttgga

SEQ ID NO: 297260 - DNA, 50 bp, Artificial
  Synthetic oligonucleotide
acacggtagcacaccggagggcgtcagtcgcgcagccgtcccgttccttg

SEQ ID NO: 297261 - DNA, 50 bp, Artificial
  Synthetic oligonucleotide
caaatgggcccagttcgctgggggctgatgtggcgtcatacacgtggcat

SEQ ID NO: 297262 - DNA, 50 bp, Artificial
  Synthetic oligonucleotide
acacggtaagtaccaagccagccgcctcgcaacacattgcggaggccaca

SEQ ID NO: 297263 - DNA, 50 bp, Artificial
  Synthetic oligonucleotide
gaagctctctatcaggtacggggcggcatcgcgcctggccctcgcgttgt

SEQ ID NO: 297264 - DNA, 50 bp, Artificial
  Synthetic oligonucleotide
acacgggtggcagacgcccctgtcgtgcgcatctcgttctctgtagccca

SEQ ID NO: 297265 - DNA, 50 bp, Artificial
  Synthetic oligonucleotide
cgcgccactgtagccattccgtggggctacacagattggggagagctccg

SEQ ID NO: 297266 - DNA, 50 bp, Artificial
  Synthetic oligonucleotide
acacgggtgcctcttcggtgatccgaccgacttgactgcagcgcgtagcg

SEQ ID NO: 297267 - DNA, 50 bp, Artificial
  Synthetic oligonucleotide
acacgggaggggctaacctagcgtgtccgtcgggtctaccgcgcctatag

SEQ ID NO: 297268 - DNA, 50 bp, Artificial
  Synthetic oligonucleotide
cgcgcccgtggagatgttacctgacaatgtccgttacagtggcacgccca

SEQ ID NO: 297269 - DNA, 50 bp, Artificial
  Synthetic oligonucleotide
caacagagcgtgcgaaaatggtgcgtaagcgctcagtggcggaggttggc

SEQ ID NO: 297270 - DNA, 56 bp, Artificial
  Synthetic oligonucleotide
ctagaaaatgattcgtcgtgtatatctccctttgtagatatatgttcatcactcgc

SEQ ID NO: 297271 - DNA, 50 bp, Artificial
  Synthetic oligonucleotide
cccaccgaccgttacttgcgtcacatgggttgcgtcgttgaccggagcgt

SEQ ID NO: 297272 - DNA, 50 bp, Artificial
  Synthetic oligonucleotide
caacggtggccctcgtccgcaggcacacatgatctgacacgggggtggga

SEQ ID NO: 297273 - DNA, 50 bp, Artificial
  Synthetic oligonucleotide
caacgtacaggcgtgtcgacctggatagcggcccccaacgcgactatgcc

SEQ ID NO: 297274 - DNA, 50 bp, Artificial
  Synthetic oligonucleotide
acaccaacggggagtgcgtatagctctgcgcgggtgaatgtgccacgata

SEQ ID NO: 297275 - DNA, 50 bp, Artificial
  Synthetic oligonucleotide
gtccccctcagtggtgctcttagttgtctccccgcgcaggctcctcaaaa

SEQ ID NO: 297276 - DNA, 50 bp, Artificial
  Synthetic oligonucleotide
acacatggtccgccattcacctgtgtgcaccctccaacacatggtccgcc

SEQ ID NO: 297277 - DNA, 50 bp, Artificial
  Synthetic oligonucleotide
acacatgcgtaggtgcgcaagtccgtagcagcgttagccgccctccccgt

SEQ ID NO: 297278 - DNA, 50 bp, Artificial
  Synthetic oligonucleotide
cgcggaaacaaggaacaaacatccaagtgacggattccctcccagcagtt

SEQ ID NO: 297279 - DNA, 50 bp, Artificial
  Synthetic oligonucleotide
cccaatgaacgactcgcgagcaggagtggtactggctgcgtctccgcagg

SEQ ID NO: 297280 - DNA, 50 bp, Artificial
  Synthetic oligonucleotide
cctgctcacgcctcacagtgtacggtttggtgccccgaactggggttccc

SEQ ID NO: 297281 - DNA, 56 bp, Artificial
  Synthetic oligonucleotide
gagtgtgctgattagaactgaattaggtatgagcgggttaaagataataactatgg

SEQ ID NO: 297282 - DNA, 50 bp, Artificial
  Synthetic oligonucleotide
ccgccttttcactgggttacttccacaactacctacaccaagagcatgcg

SEQ ID NO: 297283 - DNA, 50 bp, Artificial
  Synthetic oligonucleotide
acacagcggccaaagcctgactgggtcggcgcatccgctctctactcagg

SEQ ID NO: 297284 - DNA, 50 bp, Artificial
  Synthetic oligonucleotide
caactcactcaagtgcgtaacagcaggacgcacggtgccacgttgcgcca

SEQ ID NO: 297285 - DNA, 50 bp, Artificial
  Synthetic oligonucleotide
gtccgtatgcgtccaagaaggtatttgggtgctcgagaagcacgttctcg

SEQ ID NO: 297286 - DNA, 50 bp, Artificial
  Synthetic oligonucleotide
acacactggcgctcgggaagttcacacttgcggcaatccagggggatgtg

SEQ ID NO: 297287 - DNA, 50 bp, Artificial
  Synthetic oligonucleotide
acacacggaactgccgactggcctcccctcgggtgtattgacaccccaga

SEQ ID NO: 297288 - DNA, 50 bp, Artificial
  Synthetic oligonucleotide
acacacgagggacgagacctctcccgttctcctatgcctcgggtcccctt

SEQ ID NO: 297289 - DNA, 50 bp, Artificial
  Synthetic oligonucleotide
acacaccctcggtggtactgcccaattccacgctgtgttcgccggtgcaa

SEQ ID NO: 297290 - DNA, 50 bp, Artificial
  Synthetic oligonucleotide
acacaagagtgggtgtcccgcagatctgaccggatgcacgaagctgcgta

SEQ ID NO: 297291 - DNA, 50 bp, Artificial
  Synthetic oligonucleotide
caactcctctctcgccctgtgagggccccgctgccccagtaatcaggtga

SEQ ID NO: 297292 - DNA, 56 bp, Artificial
  Synthetic oligonucleotide
aaaaaacatttaatacctgattgtgggtgtcaatcccagaaaacacaagcacttga

SEQ ID NO: 297293 - DNA, 56 bp, Artificial
  Synthetic oligonucleotide
aaaaaagacaccttacaataattacactctatataccctcctatgaggagaggcac

SEQ ID NO: 297294 - DNA, 57 bp, Artificial
  Synthetic oligonucleotide
aaaaaagcacatagagataggggaattcaacttgttgggaatgatccagttgattaa

SEQ ID NO: 297295 - DNA, 50 bp, Artificial
  Synthetic oligonucleotide
aaaaaagccccctacccctcctacatgtagagtaagtttcaaattaaagc

SEQ ID NO: 297296 - DNA, 53 bp, Artificial
  Synthetic oligonucleotide
aaaaaagccgggcttgctagtggggttaaggtgactagaacatacagaacgcc

SEQ ID NO: 297297 - DNA, 58 bp, Artificial
  Synthetic oligonucleotide
aaaaaagctaagggatggatttataaacatcactatgacagtactcatccaagaataa

SEQ ID NO: 297298 - DNA, 56 bp, Artificial
  Synthetic oligonucleotide
aaaaaaggctagaacaaattcataaggctatgcatcctgaacttcaataccacccc

SEQ ID NO: 297299 - DNA, 60 bp, Artificial
  Synthetic oligonucleotide
aaaaaatcatagctagatgataccgctatcaagttattgtatatagctttaacatgtata

SEQ ID NO: 297300 - DNA, 60 bp, Artificial
  Synthetic oligonucleotide
aaaaaatccatttcacactgtcatatgccttcatcctgcccaactcaacaacatagagcg

SEQ ID NO: 297301 - DNA, 58 bp, Artificial
  Synthetic oligonucleotide
aaaaaatgcgcatttgcaacaacacctgtttgccaatttgatggaaatactctttctg

SEQ ID NO: 297302 - DNA, 60 bp, Artificial
  Synthetic oligonucleotide
aaaaaatgttattatacgcaaagcatactagagagtacgcagaattctactcacagtcaa

SEQ ID NO: 297303 - DNA, 54 bp, Artificial
  Synthetic oligonucleotide
aaaaaatgttgggccttgatatggcatgtgtgatgttagggccctgtatggtgt

SEQ ID NO: 297304 - DNA, 56 bp, Artificial
  Synthetic oligonucleotide
aaaaaattgtccccttgacagagacaacaaatcaaaagactgaattacatgcaatc

SEQ ID NO: 297305 - DNA, 54 bp, Artificial
  Synthetic oligonucleotide
aaaaacaactttaatcgttatccgcaaagcgcctacgcaaagcctagtaacagc

SEQ ID NO: 297306 - DNA, 58 bp, Artificial
  Synthetic oligonucleotide
aaaaacaatgcagtcacaaccgtggcaaaagccctagagtctggtctatctcaattcc

SEQ ID NO: 297307 - DNA, 59 bp, Artificial
  Synthetic oligonucleotide
aaaaacacacattggctaactcaacagaaagaacctcgaaggttgacagcagtatgctg

SEQ ID NO: 297308 - DNA, 56 bp, Artificial
  Synthetic oligonucleotide
aaaaacacctatcctatccccaatactgaacaagagacaatacaaattgcagaccc

SEQ ID NO: 297309 - DNA, 60 bp, Artificial
  Synthetic oligonucleotide
aaaaacactacctggtacacttcgaggagccacatgcaacctcagtggcagtgacaactc

SEQ ID NO: 297310 - DNA, 56 bp, Artificial
  Synthetic oligonucleotide
aaaaacatcatagtacagctcccaaggtctgtaaaaatcaattgtaccagacccaa

SEQ ID NO: 297311 - DNA, 59 bp, Artificial
  Synthetic oligonucleotide
aaaaacatccactcaaacattgggtagtttgagccatagacatgggcatttgagacaaa

SEQ ID NO: 297312 - DNA, 60 bp, Artificial
  Synthetic oligonucleotide
aaaaacatcgatgtcctacattacgaagagttgattttggacattgcagccaatgatgaa

SEQ ID NO: 297313 - DNA, 52 bp, Artificial
  Synthetic oligonucleotide
aaaaacccagggtcgacctcgggccaatccaacagcaagaaaggccctccga

SEQ ID NO: 297314 - DNA, 55 bp, Artificial
  Synthetic oligonucleotide
aaaaaccccgccgccatccaggagatttcttccgttgtggagaaaatcgctcaga

SEQ ID NO: 297315 - DNA, 54 bp, Artificial
  Synthetic oligonucleotide
aaaaacccctaggcaccagagaacgcacgttgacgtgttgttgcctgtgggcgt

SEQ ID NO: 297316 - DNA, 58 bp, Artificial
  Synthetic oligonucleotide
aaaaacccggataccctctcttcagtcaccactgatgagatcaataggagtttcaagc

SEQ ID NO: 297317 - DNA, 56 bp, Artificial
  Synthetic oligonucleotide
aaaaaccctcaagaggatatctggggatatcaggaatacggtgcggaatataaata

SEQ ID NO: 297318 - DNA, 57 bp, Artificial
  Synthetic oligonucleotide
aaaaacctacctgctgtgacgttcgctcaggcgaacaaagcggcaggcggtcaatcc

SEQ ID NO: 297319 - DNA, 57 bp, Artificial
  Synthetic oligonucleotide
aaaaacctccaggcaagagtcactgccatcgagaaatacctaaaagaccaggcacta

SEQ ID NO: 297320 - DNA, 58 bp, Artificial
  Synthetic oligonucleotide
aaaaaccttgaccactgcagaggtttattcattcgcatataaacagttatatgtagtg

SEQ ID NO: 297321 - DNA, 56 bp, Artificial
  Synthetic oligonucleotide
aaaaaccttgtcacgactgcctcctcgcccgtgtcaaacgtgcggcggagatcgac

SEQ ID NO: 297322 - DNA, 60 bp, Artificial
  Synthetic oligonucleotide
aaaaacgagtaatccagtcaagaagcacgtcaatatactgcaactggatgaaatgtccac

SEQ ID NO: 297323 - DNA, 59 bp, Artificial
  Synthetic oligonucleotide
aaaaacgatgacacatacgagcaaatacttgtgttcaaagattctaactgacacaagtc

SEQ ID NO: 297324 - DNA, 58 bp, Artificial
  Synthetic oligonucleotide
aaaaacgccattttagtttactattgttggatgtccgatgctatgtctaaggcatcga

SEQ ID NO: 297325 - DNA, 55 bp, Artificial
  Synthetic oligonucleotide
aaaaacggaggattcgaaggggcgatcatggacgatcacaaagctccaaaccatc

SEQ ID NO: 297326 - DNA, 54 bp, Artificial
  Synthetic oligonucleotide
aaaaacgggaatctgcggtgcactatctgtatataattatttgaaaaacaccct

SEQ ID NO: 297327 - DNA, 56 bp, Artificial
  Synthetic oligonucleotide
aaaaacgtaaacctaaaccaggcaaacgacagcgaatgtgtatgaagctagagtca

SEQ ID NO: 297328 - DNA, 60 bp, Artificial
  Synthetic oligonucleotide
aaaaacgtcattgcacattcgagcggttattgagctatacaagcttttcggtctgaatga

SEQ ID NO: 297329 - DNA, 56 bp, Artificial
  Synthetic oligonucleotide
aaaaacgtggatcagatcgattcaagcgggaacattaagtcagactttaatgtcgt

SEQ ID NO: 297330 - DNA, 53 bp, Artificial
  Synthetic oligonucleotide
aaaaactacgccctgcacatggacgattacacgccctcgggaggcttcggggg

SEQ ID NO: 297331 - DNA, 54 bp, Artificial
  Synthetic oligonucleotide
aaaaactatgcctaccactctgacgactccacaaagcagccggacccctttggg

SEQ ID NO: 297332 - DNA, 58 bp, Artificial
  Synthetic oligonucleotide
aaaaactcattaacctttgaggagtgccactatgcaagaaattttcgctgcaatcgac

SEQ ID NO: 297333 - DNA, 56 bp, Artificial
  Synthetic oligonucleotide
aaaaactctcctcgagtacaatggtctcgggcggcattagcaagaacttggcgtac

SEQ ID NO: 297334 - DNA, 60 bp, Artificial
  Synthetic oligonucleotide
aaaaactcttgactgttcagctgtgaacttcacatcaacaatctttatgtcctgtctacc

SEQ ID NO: 297335 - DNA, 55 bp, Artificial
  Synthetic oligonucleotide
aaaaactcttgggtgtccgagagaggaccttaacgtgctgttgcctatgggcatt

SEQ ID NO: 297336 - DNA, 58 bp, Artificial
  Synthetic oligonucleotide
aaaaactggacctacaatagaattgatggctgaaataaatcgctatcttgactacaat

SEQ ID NO: 297337 - DNA, 60 bp, Artificial
  Synthetic oligonucleotide
aaaaactgtatagcactatggggacctccagatactggcaaatctatgttttgctacagc

SEQ ID NO: 297338 - DNA, 58 bp, Artificial
  Synthetic oligonucleotide
aaaaactgtcccttctgggagactgaagtctcattcgatttaagatatagagactcaa

SEQ ID NO: 297339 - DNA, 60 bp, Artificial
  Synthetic oligonucleotide
aaaaactgttgactctacaatcaactcagtaaatgagacaattggcaacacagacaatgc

SEQ ID NO: 297340 - DNA, 53 bp, Artificial
  Synthetic oligonucleotide
aaaaactttcttcacccatgtcattaagcaaacccaccaactattcgtggacg

SEQ ID NO: 297341 - DNA, 48 bp, Artificial
  Synthetic oligonucleotide
aaaaagaacccttccgtggcatttttgtaaataaggccgtgtaccccc

SEQ ID NO: 297342 - DNA, 60 bp, Artificial
  Synthetic oligonucleotide
aaaaagacacttgcaatgtgcaacagcgagagaattctccttgaggattcatcatcagtc

SEQ ID NO: 297343 - DNA, 54 bp, Artificial
  Synthetic oligonucleotide
aaaaagaccagtacagtttgcctggaattaacaccattattaagagaattggaa

SEQ ID NO: 297344 - DNA, 54 bp, Artificial
  Synthetic oligonucleotide
aaaaagactcaattttggtcagactggcgactcagagtcagttccagaccctca

SEQ ID NO: 297345 - DNA, 53 bp, Artificial
  Synthetic oligonucleotide
aaaaagaggatccctacaaggggttaaagttctgggatgtggatcttactgaa

SEQ ID NO: 297346 - DNA, 51 bp, Artificial
  Synthetic oligonucleotide
aaaaagatgggaaaatttcggacttttgacaattttcgtagcggcctatcg

SEQ ID NO: 297347 - DNA, 54 bp, Artificial
  Synthetic oligonucleotide
aaaaagcaaagattccataatataaggggtcggtggaccggtcgatgtatgtct

SEQ ID NO: 297348 - DNA, 55 bp, Artificial
  Synthetic oligonucleotide
aaaaagcatgtggccgaatcgtgacattggaagagtccgggatcctcgttaacgg

SEQ ID NO: 297349 - DNA, 54 bp, Artificial
  Synthetic oligonucleotide
aaaaagccattaccacaaaacgctcctgacgaattaaaactctccgatgaaatc

SEQ ID NO: 297350 - DNA, 51 bp, Artificial
  Synthetic oligonucleotide
aaaaagcgagtcgcaaagaagcgccgcacctataagcggaagtcccgtgtt

SEQ ID NO: 297351 - DNA, 58 bp, Artificial
  Synthetic oligonucleotide
aaaaagctcagcaacaatcggtgcacactctcaaaggtccgatccggactggcctctt

SEQ ID NO: 297352 - DNA, 51 bp, Artificial
  Synthetic oligonucleotide
aaaaagctttacaacctttacaacccggattcaacgttcttgacgagtatc

SEQ ID NO: 297353 - DNA, 57 bp, Artificial
  Synthetic oligonucleotide
aaaaagtaccatgctactgggtatatagtagccaaatacacttatctacgtgtactg

SEQ ID NO: 297354 - DNA, 53 bp, Artificial
  Synthetic oligonucleotide
aaaaagtagaccttctctctccaaaactccccggagaagacgatacaggcgga

SEQ ID NO: 297355 - DNA, 58 bp, Artificial
  Synthetic oligonucleotide
aaaaagtataaattgaaacatatagtatgggcaagcagggaattagagcgattcgcag

SEQ ID NO: 297356 - DNA, 56 bp, Artificial
  Synthetic oligonucleotide
aaaaagtatacctttaggaccaggacaagcattttatgcaacaggagatataatag

SEQ ID NO: 297357 - DNA, 56 bp, Artificial
  Synthetic oligonucleotide
aaaaagtcgaataacactagttctaaaattgctttatgagtttgatctgttgtatg

SEQ ID NO: 297358 - DNA, 60 bp, Artificial
  Synthetic oligonucleotide
aaaaagtgaagctggctatgacgtcatcatgaaagagtataataagagagtggcagcaac

SEQ ID NO: 297359 - DNA, 60 bp, Artificial
  Synthetic oligonucleotide
aaaaagtgcagctactatcgccaaccatgcaggccgctcatgcagggactggttaattga

SEQ ID NO: 297360 - DNA, 59 bp, Artificial
  Synthetic oligonucleotide
aaaaagtggaggtcctcaacaataagaattggtcaggatacagtggagcattcaccata

SEQ ID NO: 297361 - DNA, 54 bp, Artificial
  Synthetic oligonucleotide
aaaaagtgtggacttcttaggagttaagatccaccagaacaaggtccaattaca

SEQ ID NO: 297362 - DNA, 53 bp, Artificial
  Synthetic oligonucleotide
aaaaagttgaaacgaaaatgcgggaatagggactctaaatacttgtcatggcg

SEQ ID NO: 297363 - DNA, 56 bp, Artificial
  Synthetic oligonucleotide
aaaaataagttcagaagtacatatcccactaggggatgctgaattagtagtaataa

SEQ ID NO: 297364 - DNA, 55 bp, Artificial
  Synthetic oligonucleotide
aaaaatagtctggaaggtccaccccaggagcatgcaaggtcctagacagggttgg

SEQ ID NO: 297365 - DNA, 52 bp, Artificial
  Synthetic oligonucleotide
aaaaatagttccacgggggatgttggtgatataaaggaaggagccctttaca

SEQ ID NO: 297366 - DNA, 60 bp, Artificial
  Synthetic oligonucleotide
aaaaatatggaaagcgatggtttaggactaaactgtgatgcataagatagtctcattaga

SEQ ID NO: 297367 - DNA, 57 bp, Artificial
  Synthetic oligonucleotide
aaaaatcaatcgccaggagattgaaggggtgaaactagattctagtgggaatgtgta

SEQ ID NO: 297368 - DNA, 57 bp, Artificial
  Synthetic oligonucleotide
aaaaatccatgcgtccgccagacctaccaaaagcatggtcgcggttgttctggtcac

SEQ ID NO: 297369 - DNA, 57 bp, Artificial
  Synthetic oligonucleotide
aaaaatcgtatgcaagatgtcatgcgtactgggggtacgacgtgggtacgagacacc

SEQ ID NO: 297370 - DNA, 50 bp, Artificial
  Synthetic oligonucleotide
aaaaatctcgccttacccatgtgctaattgtgccagaggaaatgccgagc

SEQ ID NO: 297371 - DNA, 55 bp, Artificial
  Synthetic oligonucleotide
aaaaatcttggcaaggagcaagacccgacaggagttgagcccggagaccacctaa

SEQ ID NO: 297372 - DNA, 56 bp, Artificial
  Synthetic oligonucleotide
aaaaatctttatacagaaattgtgtacacacccatattgacaccagatggaacggt

SEQ ID NO: 297373 - DNA, 57 bp, Artificial
  Synthetic oligonucleotide
aaaaatgaaggggatggtggctgggcatttaaggccgatgcttggagaggcagcggg

SEQ ID NO: 297374 - DNA, 54 bp, Artificial
  Synthetic oligonucleotide
aaaaatgaggttttctgcgtcgaaccagaaaaaggaggccgtaagccagctcgc

SEQ ID NO: 297375 - DNA, 59 bp, Artificial
  Synthetic oligonucleotide
aaaaatgcaagtgggatggacgcagtgactttcttaacagtaaaaatggacacaatgca

SEQ ID NO: 297376 - DNA, 60 bp, Artificial
  Synthetic oligonucleotide
aaaaatgcaatcgtgtaactcacctgagcaatgacgatcaactgagaaccgatcttactc

SEQ ID NO: 297377 - DNA, 56 bp, Artificial
  Synthetic oligonucleotide
aaaaatggatccaaaggaaagttagcgtatctcaagaggtccaatgtcctcctctg

SEQ ID NO: 297378 - DNA, 52 bp, Artificial
  Synthetic oligonucleotide
aaaaatggcacaacctagcggtattgtggaaccctgtattgtaagggtggct

SEQ ID NO: 297379 - DNA, 60 bp, Artificial
  Synthetic oligonucleotide
aaaaatggcacttggatcaatggcagcgcagacacaacaaatggaactatcactctcccg

SEQ ID NO: 297380 - DNA, 54 bp, Artificial
  Synthetic oligonucleotide
aaaaatggccgtttcagtgacttcacggccgccattttaattaaggcggaagca

SEQ ID NO: 297381 - DNA, 52 bp, Artificial
  Synthetic oligonucleotide
aaaaattaggttaaggccagggggaaagagacgctatatgctaaaacactta

SEQ ID NO: 297382 - DNA, 54 bp, Artificial
  Synthetic oligonucleotide
aaaaattgattcttgagcttattagatattgccatggatctgacatgttaaagg

SEQ ID NO: 297383 - DNA, 58 bp, Artificial
  Synthetic oligonucleotide
aaaaattgtgtattgaaatgggtaagctggataatttagctcgcatgttcaattccaa

SEQ ID NO: 297384 - DNA, 49 bp, Artificial
  Synthetic oligonucleotide
aaaaatttttaataaccgtcttcttgggatcaaaggatccccacccaaa

SEQ ID NO: 297385 - DNA, 55 bp, Artificial
  Synthetic oligonucleotide
aaaacaaaccaacattggactttgaactgataaaaacagaagccaagcaacctgc

SEQ ID NO: 297386 - DNA, 50 bp, Artificial
  Synthetic oligonucleotide
aaaacaaagctcaagctcactccaatagcggccgctagccggctggactt

SEQ ID NO: 297387 - DNA, 52 bp, Artificial
  Synthetic oligonucleotide
aaaacaaatcagcagtttgagctgatagacaatgagttcaatgagatagaac

SEQ ID NO: 297388 - DNA, 58 bp, Artificial
  Synthetic oligonucleotide
aaaacaacagaatggtgatcaaagtgctctactttctcatcgtattgttaagtaggta

SEQ ID NO: 297389 - DNA, 56 bp, Artificial
  Synthetic oligonucleotide
aaaacaacaggtacatgattatatttatctaggaacaggaatgaacttctggggaa

SEQ ID NO: 297390 - DNA, 53 bp, Artificial
  Synthetic oligonucleotide
aaaacaactgggccatcataggtcgtgatgccttacaacaatgccaaggcgtc

SEQ ID NO: 297391 - DNA, 50 bp, Artificial
  Synthetic oligonucleotide
aaaacaagaatgggcacatcatgggtccccatttactatgatccaatgag

SEQ ID NO: 297392 - DNA, 54 bp, Artificial
  Synthetic oligonucleotide
aaaacaagctatgcaagcgcgccttgatctagctgaaagacaaataacacaacg

SEQ ID NO: 297393 - DNA, 55 bp, Artificial
  Synthetic oligonucleotide
aaaacaaggcggtcccaacaaagatgaggagtttcttgtgagtaatgatgcatac

SEQ ID NO: 297394 - DNA, 51 bp, Artificial
  Synthetic oligonucleotide
aaaacaaggtagtcaaagtgatgcgtcctggccctggagggttgaccttca

SEQ ID NO: 297395 - DNA, 60 bp, Artificial
  Synthetic oligonucleotide
aaaacacaaaattatggaattaacttaccaatcactggttctatggatacagcatatgca

SEQ ID NO: 297396 - DNA, 51 bp, Artificial
  Synthetic oligonucleotide
aaaacacacaagatcatgttaggtcactgtgcatgatggcatggcattcag

SEQ ID NO: 297397 - DNA, 55 bp, Artificial
  Synthetic oligonucleotide
aaaacacagattttagtccacaatgaaacgtgggcacaaaagtgttctcaactta

SEQ ID NO: 297398 - DNA, 59 bp, Artificial
  Synthetic oligonucleotide
aaaacacagtaggcaaaagcggctgacgagaaggtcagtcaaaattatcctatagtgca

SEQ ID NO: 297399 - DNA, 58 bp, Artificial
  Synthetic oligonucleotide
aaaacacccatttgaagcttatgagggtacgtatgaacatcaaacagatggcaaagag

SEQ ID NO: 297400 - DNA, 57 bp, Artificial
  Synthetic oligonucleotide
aaaacaccctcaaaaagctgagataagaggcgcgtgcaattgcgctgaaaaagttaa

SEQ ID NO: 297401 - DNA, 49 bp, Artificial
  Synthetic oligonucleotide
aaaacaccgaaagtcccgaagagaaaaatgtcttctaccttcgggggaa

SEQ ID NO: 297402 - DNA, 55 bp, Artificial
  Synthetic oligonucleotide
aaaacacctccagaggaccccttcagcgaacagaagagtctactcggatcaggag

SEQ ID NO: 297403 - DNA, 52 bp, Artificial
  Synthetic oligonucleotide
aaaacacctgcgtggtgaaagctctggatgtcggataccaatgtgacaacag

SEQ ID NO: 297404 - DNA, 52 bp, Artificial
  Synthetic oligonucleotide
aaaacacgacgcggtacgtccaactaagcggatgctacgcttacgatttacg

SEQ ID NO: 297405 - DNA, 55 bp, Artificial
  Synthetic oligonucleotide
aaaacacgacttacggttatgaagccacgccgcactgagaacgcgatgtcactat

SEQ ID NO: 297406 - DNA, 55 bp, Artificial
  Synthetic oligonucleotide
aaaacacggctcgccgaagcacccaaggcaggcagctacacgcaagtcacgctgc

SEQ ID NO: 297407 - DNA, 50 bp, Artificial
  Synthetic oligonucleotide
aaaacacggggcagtcacaagtagcaatacaacagctactaatgctgact

SEQ ID NO: 297408 - DNA, 53 bp, Artificial
  Synthetic oligonucleotide
aaaacacggtcgcaaacaattgtccttagtgaacaaaggatacttattaagct

SEQ ID NO: 297409 - DNA, 58 bp, Artificial
  Synthetic oligonucleotide
aaaacacgtattggaatctgacgatacaagactaatatactggttgacattgttaatg

SEQ ID NO: 297410 - DNA, 51 bp, Artificial
  Synthetic oligonucleotide
aaaacacgtcagagaagccaaggttctagccctagataactaggggagtca

SEQ ID NO: 297411 - DNA, 54 bp, Artificial
  Synthetic oligonucleotide
aaaacacgtggtttatctactgatgcttggaccttacggtataatacgaccgga

SEQ ID NO: 297412 - DNA, 52 bp, Artificial
  Synthetic oligonucleotide
aaaacactaaacacacaaacccagaatatctataggatacatggccggcgcg

SEQ ID NO: 297413 - DNA, 60 bp, Artificial
  Synthetic oligonucleotide
aaaacactagtcaactgtgtcagaaggatcaaggaggcccgccttcgctgctactgcagg

SEQ ID NO: 297414 - DNA, 58 bp, Artificial
  Synthetic oligonucleotide
aaaacactatcgataaccacacgacactataacccaggccgcggtgtacatgagtcgc

SEQ ID NO: 297415 - DNA, 60 bp, Artificial
  Synthetic oligonucleotide
aaaacactgatagcagctatgctaagtcaacgtacaatgtcattagattttgtaactacg

SEQ ID NO: 297416 - DNA, 51 bp, Artificial
  Synthetic oligonucleotide
aaaacactgtgatagataaatatagaaacttagcagacccctcgctcaatg

SEQ ID NO: 297417 - DNA, 57 bp, Artificial
  Synthetic oligonucleotide
aaaacactttcaagtgccttatatagaaaggcaagcaaatgatggttggttcagaaa

SEQ ID NO: 297418 - DNA, 56 bp, Artificial
  Synthetic oligonucleotide
aaaacagacttaacgaggagtcgaggcaataatagatcgtatttatacaactataa

SEQ ID NO: 297419 - DNA, 60 bp, Artificial
  Synthetic oligonucleotide
aaaacagagaaccatccaggacaaccagctcgctatcatcgtgcttctggtgttaagcct

SEQ ID NO: 297420 - DNA, 55 bp, Artificial
  Synthetic oligonucleotide
aaaacagatattgtctggtggccataaagccataatgcagcataatgccactagt

SEQ ID NO: 297421 - DNA, 55 bp, Artificial
  Synthetic oligonucleotide
aaaacagctcccactcttagaggctcaggtgaacactctggaacactcttccgct

SEQ ID NO: 297422 - DNA, 58 bp, Artificial
  Synthetic oligonucleotide
aaaacaggatttagccgagaaacgcatgaagacgatttatggtgacagagatcccggc

SEQ ID NO: 297423 - DNA, 57 bp, Artificial
  Synthetic oligonucleotide
aaaacaggcattaaacaggcatatatgacagttagatcacattattacgatagtcgt

SEQ ID NO: 297424 - DNA, 59 bp, Artificial
  Synthetic oligonucleotide
aaaacaggtagtcaggtcctggatgagagtaggctcaggcctatttgctccgcctatta

SEQ ID NO: 297425 - DNA, 60 bp, Artificial
  Synthetic oligonucleotide
aaaacagttgatgagtctatggtcaaggcccaacgtattcatgagaatcaatacggtcca

SEQ ID NO: 297426 - DNA, 54 bp, Artificial
  Synthetic oligonucleotide
aaaacataatacgaacggacgaatatgaactttaggtatatggtgtaaaatcgc

SEQ ID NO: 297427 - DNA, 55 bp, Artificial
  Synthetic oligonucleotide
aaaacatagcttgtggggcataatgtctgcacgtagctgctcccaaaacgctaag

SEQ ID NO: 297428 - DNA, 60 bp, Artificial
  Synthetic oligonucleotide
aaaacatatctaaagcaagtcgcatcgatgtctgtaccaattccaaccaacaaagacatc

SEQ ID NO: 297429 - DNA, 51 bp, Artificial
  Synthetic oligonucleotide
aaaacatattggggcctgcatacaggagaacaagcctggcacttgggcaat

SEQ ID NO: 297430 - DNA, 51 bp, Artificial
  Synthetic oligonucleotide
aaaacatattggggtctgcacacaggagaaagaggctggcatttgggtcac

SEQ ID NO: 297431 - DNA, 52 bp, Artificial
  Synthetic oligonucleotide
aaaacatcaaaaaaacatcgattctattattaaacttccgacgtaggaggaa

SEQ ID NO: 297432 - DNA, 56 bp, Artificial
  Synthetic oligonucleotide
aaaacatcacttagcgttcatcagatacgtgcagaagcacgacgtatgcataagca

SEQ ID NO: 297433 - DNA, 55 bp, Artificial
  Synthetic oligonucleotide
aaaacatcaggaatggccaaggagttaatccgaaacacaagatggaactgcacta

SEQ ID NO: 297434 - DNA, 59 bp, Artificial
  Synthetic oligonucleotide
aaaacatccttcagttcgtggacatcggaagttgaaaatattatggcggagccatgtca

SEQ ID NO: 297435 - DNA, 54 bp, Artificial
  Synthetic oligonucleotide
aaaacatcgcactgagccagtatgtgttttgatacatggtacacccggttctgg

SEQ ID NO: 297436 - DNA, 57 bp, Artificial
  Synthetic oligonucleotide
aaaacatctagtatgggcaagcagagagttggaaagattcgcaattaaccctggcct

SEQ ID NO: 297437 - DNA, 60 bp, Artificial
  Synthetic oligonucleotide
aaaacatcttatcacttcccccaagctattggagtgccatgtacacaggtgatgccaatt

SEQ ID NO: 297438 - DNA, 55 bp, Artificial
  Synthetic oligonucleotide
aaaacatgaagaaaacgagtcaactaaagtgggcacttggtgagaacatggcacc

SEQ ID NO: 297439 - DNA, 52 bp, Artificial
  Synthetic oligonucleotide
aaaacatgactggcaggtatgcggtctatagtatctttacgcccggagaccc

SEQ ID NO: 297440 - DNA, 55 bp, Artificial
  Synthetic oligonucleotide
aaaacatgagttcgcgccgaagaacacagttgatagaatctatgaccgtcagtcc

SEQ ID NO: 297441 - DNA, 52 bp, Artificial
  Synthetic oligonucleotide
aaaacatggagcaatcacaagcagcaatgctaatcatcctgataaggtttgg

SEQ ID NO: 297442 - DNA, 60 bp, Artificial
  Synthetic oligonucleotide
aaaacatgtactaccactatctgggtagagcgggatacacaatccacgtacagtgcaatg

SEQ ID NO: 297443 - DNA, 54 bp, Artificial
  Synthetic oligonucleotide
aaaacatgtataggttccttgagctaccgttggagtatcctcagggtgctccct

SEQ ID NO: 297444 - DNA, 60 bp, Artificial
  Synthetic oligonucleotide
aaaacattactcactgtattacacattgttatatgcacacaggtgtgtccaaccgatttg

SEQ ID NO: 297445 - DNA, 58 bp, Artificial
  Synthetic oligonucleotide
aaaacattgcaaaaggtcgtggaaagcgaagttggtagcgcggctatcgatggagtga

SEQ ID NO: 297446 - DNA, 56 bp, Artificial
  Synthetic oligonucleotide
aaaacattgggaccgctctattcaaaaacttctggcaacggagagagaagaatgaa

SEQ ID NO: 297447 - DNA, 51 bp, Artificial
  Synthetic oligonucleotide
aaaacatttgtgaatccccagagctctcctgaggttgtggttgaactggat

SEQ ID NO: 297448 - DNA, 54 bp, Artificial
  Synthetic oligonucleotide
aaaacatttgtgtatccccaacgctttcctcaggttgtaattgaactggacttg

SEQ ID NO: 297449 - DNA, 57 bp, Artificial
  Synthetic oligonucleotide
aaaaccaaccaacaatttgagttaatagacaatgaattcactgaggttgagaagcaa

SEQ ID NO: 297450 - DNA, 55 bp, Artificial
  Synthetic oligonucleotide
aaaaccaagcttaaactcactccaattccggctgcgtcccaactagacttgtcta

SEQ ID NO: 297451 - DNA, 53 bp, Artificial
  Synthetic oligonucleotide
aaaaccaaggagcctgttgcgtgaagtgatttacacggtccgaagtgttttcg

SEQ ID NO: 297452 - DNA, 54 bp, Artificial
  Synthetic oligonucleotide
aaaaccaagtggagggtgaggtccagattgtgtcaactgctacccaaactttcc

SEQ ID NO: 297453 - DNA, 57 bp, Artificial
  Synthetic oligonucleotide
aaaaccaagtgtgcaggacattgtgttagatctgaaaccaacgaccgagactgacct

SEQ ID NO: 297454 - DNA, 52 bp, Artificial
  Synthetic oligonucleotide
aaaaccaatatttcttacggtgaacgcattcaaagacttggaagggtcggaa

SEQ ID NO: 297455 - DNA, 55 bp, Artificial
  Synthetic oligonucleotide
aaaaccacacttaaagagctggtacataagagagtaacctcaccagaagactgga

SEQ ID NO: 297456 - DNA, 53 bp, Artificial
  Synthetic oligonucleotide
aaaaccactaactgcagaaaggaagacagattatacgccacacataccaccct

SEQ ID NO: 297457 - DNA, 48 bp, Artificial
  Synthetic oligonucleotide
aaaaccagacccgggggcaaaaaaaccgtatcagttaggataagaccc

SEQ ID NO: 297458 - DNA, 60 bp, Artificial
  Synthetic oligonucleotide
aaaaccagagtcatagaagccagtagtgttaatgacactgtagcatttagaatgacttat

SEQ ID NO: 297459 - DNA, 52 bp, Artificial
  Synthetic oligonucleotide
aaaaccagcacggacatggtgttgctaccgctccgaaggcgtgtgtcggaaa

SEQ ID NO: 297460 - DNA, 55 bp, Artificial
  Synthetic oligonucleotide
aaaaccagcatcggagaccctagcaccataccctgcccctacgcccccggagatc

SEQ ID NO: 297461 - DNA, 56 bp, Artificial
  Synthetic oligonucleotide
aaaaccagtcaattcctagatcagattgacgcctacaagcggccttctcaggtggc

SEQ ID NO: 297462 - DNA, 54 bp, Artificial
  Synthetic oligonucleotide
aaaaccagttcaaaaggtatactgagataccacgacttttccagttgacaacaa

SEQ ID NO: 297463 - DNA, 56 bp, Artificial
  Synthetic oligonucleotide
aaaaccataatagtacagctgaagaatcctgtaaacattacttgtataagacctaa

SEQ ID NO: 297464 - DNA, 60 bp, Artificial
  Synthetic oligonucleotide
aaaaccatctcatcaacagactgagcatctgaaactgattctgttacctaacttggtcaa

SEQ ID NO: 297465 - DNA, 54 bp, Artificial
  Synthetic oligonucleotide
aaaaccatcttagcattatggaaggatttaacctcagtggataccgggaaggac

SEQ ID NO: 297466 - DNA, 58 bp, Artificial
  Synthetic oligonucleotide
aaaaccatgataacaccttattccgtcgaaaagacacagacacacgctaagcagggca

SEQ ID NO: 297467 - DNA, 53 bp, Artificial
  Synthetic oligonucleotide
aaaacccaaccacctatatttccgttgggacatcaacactaaaccagagattg

SEQ ID NO: 297468 - DNA, 51 bp, Artificial
  Synthetic oligonucleotide
aaaacccaaccgtcgacgggattgttgcaatagatttagaccctgtggttt

SEQ ID NO: 297469 - DNA, 56 bp, Artificial
  Synthetic oligonucleotide
aaaacccaagatgtacaggatgtatagaagtcccgacgtgccaaggggctgtgaag

SEQ ID NO: 297470 - DNA, 59 bp, Artificial
  Synthetic oligonucleotide
aaaacccaatggggttctcgtatgatacccgctgctttgactcaacagtcactgagagc

SEQ ID NO: 297471 - DNA, 57 bp, Artificial
  Synthetic oligonucleotide
aaaacccacacaatagatggacctcttcatggggtcctctacctatcgttcaacaga

SEQ ID NO: 297472 - DNA, 52 bp, Artificial
  Synthetic oligonucleotide
aaaacccactttatgcacagacgtccgaacacgtaaatgtccttttgacccg

SEQ ID NO: 297473 - DNA, 55 bp, Artificial
  Synthetic oligonucleotide
aaaacccagatatggtaattgaagatcgcccactgaagcatgtaacaccccagat

SEQ ID NO: 297474 - DNA, 50 bp, Artificial
  Synthetic oligonucleotide
aaaacccatgcattaacttgcttctacacactgccgtcaaggattgcccc

SEQ ID NO: 297475 - DNA, 49 bp, Artificial
  Synthetic oligonucleotide
aaaacccccgtttctacgaaacataaggggttttttttgatgtatgcta

SEQ ID NO: 297476 - DNA, 55 bp, Artificial
  Synthetic oligonucleotide
aaaaccccctcctcccgctctagcgatcaactcgcgtgttcgttattaacgcatg

SEQ ID NO: 297477 - DNA, 51 bp, Artificial
  Synthetic oligonucleotide
aaaaccccgactcggtttggcccgggcccctagcttgagattgactaataa

SEQ ID NO: 297478 - DNA, 53 bp, Artificial
  Synthetic oligonucleotide
aaaaccccggggcttccctccaacgcagccactggcaagttctcagagggtgg

SEQ ID NO: 297479 - DNA, 59 bp, Artificial
  Synthetic oligonucleotide
aaaacccctatgtgaggtgaattcatggcacatcctatcaaaggacaacgcaataagga

SEQ ID NO: 297480 - DNA, 55 bp, Artificial
  Synthetic oligonucleotide
aaaacccgcagcgtcaacatccgacttctggggggacgccacagaagaactcgcg

SEQ ID NO: 297481 - DNA, 52 bp, Artificial
  Synthetic oligonucleotide
aaaacccgcgaggttgtcagggacgcggaggtaaggaagccgctagagggcg

SEQ ID NO: 297482 - DNA, 50 bp, Artificial
  Synthetic oligonucleotide
aaaaccctactgtggacgcgtataacgctgaaatttctcgcaattcagcg

SEQ ID NO: 297483 - DNA, 53 bp, Artificial
  Synthetic oligonucleotide
aaaaccctagcccgaaaacctggggcggagatcgcataccagatagttcggta

SEQ ID NO: 297484 - DNA, 51 bp, Artificial
  Synthetic oligonucleotide
aaaaccctgtttagcgaaaaccctttagaattttgggataagcataggaca

SEQ ID NO: 297485 - DNA, 58 bp, Artificial
  Synthetic oligonucleotide
aaaaccgaaaatgtgagttgagtggatctactcggcaatgattggagagcctcccaaa

SEQ ID NO: 297486 - DNA, 51 bp, Artificial
  Synthetic oligonucleotide
aaaaccgaagagatccacgagcacgtcgtgaacacacacgacaccaacatg

SEQ ID NO: 297487 - DNA, 55 bp, Artificial
  Synthetic oligonucleotide
aaaaccgaggtcgacgccgtttcactatattgcactcagatgataatgcttcgag

SEQ ID NO: 297488 - DNA, 56 bp, Artificial
  Synthetic oligonucleotide
aaaaccgattcattgaaattggagtgacacggagggaagtccatatatattactta

SEQ ID NO: 297489 - DNA, 50 bp, Artificial
  Synthetic oligonucleotide
aaaaccggaaagaaatcacacaatggaagagtatcccgtcgaaacccgga

SEQ ID NO: 297490 - DNA, 51 bp, Artificial
  Synthetic oligonucleotide
aaaaccggaattacaaggacctaggtaattgccacccgatagggatggtag

SEQ ID NO: 297491 - DNA, 54 bp, Artificial
  Synthetic oligonucleotide
aaaaccggagccacagatgaaacccgcggttgccgctaaacaatacgcgttgca

SEQ ID NO: 297492 - DNA, 55 bp, Artificial
  Synthetic oligonucleotide
aaaaccggaggaaggctgaccctcccgacgcgcggactcgacttgctgtagtgca

SEQ ID NO: 297493 - DNA, 53 bp, Artificial
  Synthetic oligonucleotide
aaaaccggaggtgagctccgcggtctccctactgacgacccctgggtggtagc

SEQ ID NO: 297494 - DNA, 51 bp, Artificial
  Synthetic oligonucleotide
aaaaccggtggttcggaccgttaatgtacaaggaccaggagcaccaaatcc

SEQ ID NO: 297495 - DNA, 59 bp, Artificial
  Synthetic oligonucleotide
aaaaccgtccaagctttcaatagtgggtcaatcagagctttactgaccatcactatgga

SEQ ID NO: 297496 - DNA, 56 bp, Artificial
  Synthetic oligonucleotide
aaaaccgtgcaacatcagcggtccacaccttgcacggaaaccgtgcaacatcagcg

SEQ ID NO: 297497 - DNA, 56 bp, Artificial
  Synthetic oligonucleotide
aaaacctacggcaggaaattgcacttgttggcccatcccttcatcatgggctttag

SEQ ID NO: 297498 - DNA, 58 bp, Artificial
  Synthetic oligonucleotide
aaaacctcatttgactgcatctggttgcctacatacgtttgatgaactatttggtgcg

SEQ ID NO: 297499 - DNA, 50 bp, Artificial
  Synthetic oligonucleotide
aaaacctccgtctattaaaacgcgttgcgttacaaaattaatgtttgtcc

SEQ ID NO: 297500 - DNA, 53 bp, Artificial
  Synthetic oligonucleotide
aaaacctctagaggagctggttggcccagatctgtttgtagctcttactcgcc

SEQ ID NO: 297501 - DNA, 52 bp, Artificial
  Synthetic oligonucleotide
aaaacctctgaaagtgagagccaagctcccacagcaggaggggccttacgct

SEQ ID NO: 297502 - DNA, 54 bp, Artificial
  Synthetic oligonucleotide
aaaacctgaccagttacgggttggttccaactgctgcagacaagtcccaaaaca

SEQ ID NO: 297503 - DNA, 55 bp, Artificial
  Synthetic oligonucleotide
aaaacctggcgcttagagccacacagaggctaactcccatccatctatatacggc

SEQ ID NO: 297504 - DNA, 53 bp, Artificial
  Synthetic oligonucleotide
aaaacctgtgacgaggagtgttgcccggccaatttcaagaagtgttgtcccct

SEQ ID NO: 297505 - DNA, 54 bp, Artificial
  Synthetic oligonucleotide
aaaaccttagggtctctgactgttaagttcttggatttatgtgtagcgttagac

SEQ ID NO: 297506 - DNA, 55 bp, Artificial
  Synthetic oligonucleotide
aaaaccttggagatgccaagattctcattaagtcagcatatcttaatgaaccgac

SEQ ID NO: 297507 - DNA, 55 bp, Artificial
  Synthetic oligonucleotide
aaaaccttgtacccgattgtgcatgaagacttgtacgaggcttataaacgcgccg

SEQ ID NO: 297508 - DNA, 59 bp, Artificial
  Synthetic oligonucleotide
aaaacgaaagtttgcaggtagtgctggcagtagcccagacagtaaaagacatgaattga

SEQ ID NO: 297509 - DNA, 54 bp, Artificial
  Synthetic oligonucleotide
aaaacgaaatccgtcattacggttattcgtggaaagattgaaactctatcatac

SEQ ID NO: 297510 - DNA, 52 bp, Artificial
  Synthetic oligonucleotide
aaaacgaaccactagaattccaactactgcctccaacaccaactaacctatg

SEQ ID NO: 297511 - DNA, 53 bp, Artificial
  Synthetic oligonucleotide
aaaacgacaaagattggcaattcgtttgccaatgtagccctaatagaaacggt

SEQ ID NO: 297512 - DNA, 51 bp, Artificial
  Synthetic oligonucleotide
aaaacgacactcaatactttggtaataccgtcgacgatgaagtatgctcat

SEQ ID NO: 297513 - DNA, 57 bp, Artificial
  Synthetic oligonucleotide
aaaacgaccagctcttggcatcttgaatgtcgtttagcaatcggggggcactcaaag

SEQ ID NO: 297514 - DNA, 50 bp, Artificial
  Synthetic oligonucleotide
aaaacgacccgcaaaatcgtggcatttatagaaccataggggccggtttt

SEQ ID NO: 297515 - DNA, 52 bp, Artificial
  Synthetic oligonucleotide
aaaacgacctacgtgatcgttaccaagtcttacgtaagttcgattcaactgt

SEQ ID NO: 297516 - DNA, 53 bp, Artificial
  Synthetic oligonucleotide
aaaacgacgaactggaatcggtccttcgtcgtctcacctccaactgaaggata

SEQ ID NO: 297517 - DNA, 55 bp, Artificial
  Synthetic oligonucleotide
aaaacgacgtatcatctttcagagacgcgttcctatacacggtgggagcagacgg

SEQ ID NO: 297518 - DNA, 55 bp, Artificial
  Synthetic oligonucleotide
aaaacgacgtattcggagaccacacaagccaatacagaggagccacacaactact

SEQ ID NO: 297519 - DNA, 53 bp, Artificial
  Synthetic oligonucleotide
aaaacgactaagcgcaagttacaagtcgtaggttgtcccctattggaaggaga

SEQ ID NO: 297520 - DNA, 58 bp, Artificial
  Synthetic oligonucleotide
aaaacgactgctggaacggggagtccttcacaggcaagctggcagaccaggcttccaa

SEQ ID NO: 297521 - DNA, 56 bp, Artificial
  Synthetic oligonucleotide
aaaacgactgttgatcttggtcaatgcggcttgctggggaccattacgggaccacc

SEQ ID NO: 297522 - DNA, 51 bp, Artificial
  Synthetic oligonucleotide
aaaacgacttaagggatcgttttcaagtgcgtcgtaaattctattccacgg

SEQ ID NO: 297523 - DNA, 51 bp, Artificial
  Synthetic oligonucleotide
aaaacgagcggcggtagaaacgtaggaataggtgtaccgtcgtaccctctg

SEQ ID NO: 297524 - DNA, 50 bp, Artificial
  Synthetic oligonucleotide
aaaacgataaaggccaatgtttgacgtttggcttgcagcatcaggaagtg

SEQ ID NO: 297525 - DNA, 53 bp, Artificial
  Synthetic oligonucleotide
aaaacgatccatccgtattcagcgaccctttactatacactttcgacagacag

SEQ ID NO: 297526 - DNA, 60 bp, Artificial
  Synthetic oligonucleotide
aaaacgattacgatcagtgtggttaaaatgcataagcaattcagtcttatgcctttctga

SEQ ID NO: 297527 - DNA, 55 bp, Artificial
  Synthetic oligonucleotide
aaaacgattgtcaaactcttcgaagttcaaaaaacaggattcaacatacaggaca

SEQ ID NO: 297528 - DNA, 51 bp, Artificial
  Synthetic oligonucleotide
aaaacgcaagcgggtctccacctaaaccccctattattaggcccgccacaa

SEQ ID NO: 297529 - DNA, 58 bp, Artificial
  Synthetic oligonucleotide
aaaacgcaccaagtattggaccagactgtcagggatcaagtgcaacaaggatcaaatt

SEQ ID NO: 297530 - DNA, 50 bp, Artificial
  Synthetic oligonucleotide
aaaacgcagttgtgatgatgttcaagacaggtaaggtgtgctttgagacg

SEQ ID NO: 297531 - DNA, 54 bp, Artificial
  Synthetic oligonucleotide
aaaacgcatatctacttctatcgtgcgagagaattgggaacgagttagtagccg

SEQ ID NO: 297532 - DNA, 53 bp, Artificial
  Synthetic oligonucleotide
aaaacgcgcgacgaagctatggcatgcattcatgctgtgtgggatgttggcct

SEQ ID NO: 297533 - DNA, 60 bp, Artificial
  Synthetic oligonucleotide
aaaacgctgagctcaaagcccttgttctatttctcaatagacagtcgctagagatcgaaa

SEQ ID NO: 297534 - DNA, 52 bp, Artificial
  Synthetic oligonucleotide
aaaacggagtttctacatttgatcgatcacctctaaagggtccagggtacct

SEQ ID NO: 297535 - DNA, 50 bp, Artificial
  Synthetic oligonucleotide
aaaacggcagcttcatcattgatggaaaatcacggaaggaatgccctttc

SEQ ID NO: 297536 - DNA, 53 bp, Artificial
  Synthetic oligonucleotide
aaaacggctcagggcttatgccattgagttcgttgacttggttgtgcctgagc

SEQ ID NO: 297537 - DNA, 60 bp, Artificial
  Synthetic oligonucleotide
aaaacggctgacagtattgaatccatcgcgctcgggcaagcacagcttgacgctatacat

SEQ ID NO: 297538 - DNA, 55 bp, Artificial
  Synthetic oligonucleotide
aaaacgggagtgcacgtcacttgcgcagccgacaacgtcagacgcggaagcaccg

SEQ ID NO: 297539 - DNA, 52 bp, Artificial
  Synthetic oligonucleotide
aaaacggggtgtgccagaaaactctatcctctaccctgcgtggaggtgtgaa

SEQ ID NO: 297540 - DNA, 53 bp, Artificial
  Synthetic oligonucleotide
aaaacggtaattgttactacagcagctgcagttgaggttactacaagttgtag

SEQ ID NO: 297541 - DNA, 52 bp, Artificial
  Synthetic oligonucleotide
aaaacggtgcaggtgagttcatgggcgaacacattcactttggcacagacga

SEQ ID NO: 297542 - DNA, 52 bp, Artificial
  Synthetic oligonucleotide
aaaacgtaatggaatgcttacgttctccaacactaccaacagtggggctagt

SEQ ID NO: 297543 - DNA, 54 bp, Artificial
  Synthetic oligonucleotide
aaaacgtatgccttaagacaagtagagatagtgttcggagaaaagggattgtac

SEQ ID NO: 297544 - DNA, 57 bp, Artificial
  Synthetic oligonucleotide
aaaacgtcaagtttggcgaacgctatatctgatttaacaagcaatatgtcggaagcg

SEQ ID NO: 297545 - DNA, 52 bp, Artificial
  Synthetic oligonucleotide
aaaacgtccctcatagcttaattattcactggtcccctatttaaacttggtc

SEQ ID NO: 297546 - DNA, 50 bp, Artificial
  Synthetic oligonucleotide
aaaacgtcgtgcacaaatatcagcgctattaactatgttacagaagccag

SEQ ID NO: 297547 - DNA, 52 bp, Artificial
  Synthetic oligonucleotide
aaaacgtggctgtgaacgttgcagttgacagcgccaagaattctcgtagaac

SEQ ID NO: 297548 - DNA, 51 bp, Artificial
  Synthetic oligonucleotide
aaaacgtgtgccgcaataaaccaaattgcgacatgtgctaacacaattaag

SEQ ID NO: 297549 - DNA, 55 bp, Artificial
  Synthetic oligonucleotide
aaaacgttatatcatatggaacagatgagcgccttcaaggtagacgtaccttcaa

SEQ ID NO: 297550 - DNA, 56 bp, Artificial
  Synthetic oligonucleotide
aaaacgttatgaaggacttcggctgaaagcgtatcaatgccgtgcagggagatgga

SEQ ID NO: 297551 - DNA, 51 bp, Artificial
  Synthetic oligonucleotide
aaaacgttcgttacccggccaattacttcgagaaacccagtaccaccatga

SEQ ID NO: 297552 - DNA, 54 bp, Artificial
  Synthetic oligonucleotide
aaaactaagcgacatgcaattattaaggatatcaactcctggcgaacctagaga

SEQ ID NO: 297553 - DNA, 55 bp, Artificial
  Synthetic oligonucleotide
aaaactaatgccacccaaatcactgatgcggatatcacagatatgcgtagtgatt

SEQ ID NO: 297554 - DNA, 52 bp, Artificial
  Synthetic oligonucleotide
aaaactacacccttgccctctcccaacaccgcaagcgccaggtcgggccccg

SEQ ID NO: 297555 - DNA, 60 bp, Artificial
  Synthetic oligonucleotide
aaaactacccctgaatggtgtgaagatatattacatataatcgaattgagatataatgtg

SEQ ID NO: 297556 - DNA, 53 bp, Artificial
  Synthetic oligonucleotide
aaaactacccgggcagagttcatgaaatagtagccatcctgattcaagagacc

SEQ ID NO: 297557 - DNA, 57 bp, Artificial
  Synthetic oligonucleotide
aaaactaccctttcatggattagtgaattgttggccatccttagcgtgcaaggagcg

SEQ ID NO: 297558 - DNA, 54 bp, Artificial
  Synthetic oligonucleotide
aaaactacgattcagagaagcccgggacaacaagtttgcatatgatgtaacagg

SEQ ID NO: 297559 - DNA, 53 bp, Artificial
  Synthetic oligonucleotide
aaaactactcaaaccagcaagggcggcacactcatcgatatttctcacttcga

SEQ ID NO: 297560 - DNA, 58 bp, Artificial
  Synthetic oligonucleotide
aaaactagcagggactagtcatcagccaaaaaggtcaactgtctcacacaaataagga

SEQ ID NO: 297561 - DNA, 60 bp, Artificial
  Synthetic oligonucleotide
aaaactaggatgcattagagctctaggaaagtctgcagagaaagcatccattgctcttcc

SEQ ID NO: 297562 - DNA, 54 bp, Artificial
  Synthetic oligonucleotide
aaaactaggggatgggtttatagacatcactacgaaagcacccatccaagaata

SEQ ID NO: 297563 - DNA, 53 bp, Artificial
  Synthetic oligonucleotide
aaaactagtggacagcctaactttcgtagtgcgtgtaaggatttctttaagga

SEQ ID NO: 297564 - DNA, 54 bp, Artificial
  Synthetic oligonucleotide
aaaactataatagtgcaactgaaggaccctgtagaaattaattgtacaagaccc

SEQ ID NO: 297565 - DNA, 60 bp, Artificial
  Synthetic oligonucleotide
aaaactatctcttggacgcctgttgttgctggtgactctttcgagtgtgatatggttggc

SEQ ID NO: 297566 - DNA, 53 bp, Artificial
  Synthetic oligonucleotide
aaaactatgataggttctagcccagttcacaactttaaggtcttgtttacacg

SEQ ID NO: 297567 - DNA, 59 bp, Artificial
  Synthetic oligonucleotide
aaaactatttatcataagccatagcttatcaattgctatttttagacttattagatagc

SEQ ID NO: 297568 - DNA, 53 bp, Artificial
  Synthetic oligonucleotide
aaaactcaagccactattgtagccaatgcatctcgatcagaccctgactggcg

SEQ ID NO: 297569 - DNA, 53 bp, Artificial
  Synthetic oligonucleotide
aaaactcaaggatgcagagagggcagtggaaatggacccagatgacgttaaca

SEQ ID NO: 297570 - DNA, 55 bp, Artificial
  Synthetic oligonucleotide
aaaactcacagggattcttacggatagttggcccaataacagcaaaagtgccaag

SEQ ID NO: 297571 - DNA, 52 bp, Artificial
  Synthetic oligonucleotide
aaaactcaccggaacctccaaacgggctgataccggtgtcaattttcgacac

SEQ ID NO: 297572 - DNA, 54 bp, Artificial
  Synthetic oligonucleotide
aaaactcaccgggacggccaaactgggtgattccggcatcaattcacgacacgc

SEQ ID NO: 297573 - DNA, 51 bp, Artificial
  Synthetic oligonucleotide
aaaactcagacaggcattcaggaaagtcttggggagctggattaggctttt

SEQ ID NO: 297574 - DNA, 57 bp, Artificial
  Synthetic oligonucleotide
aaaactcagcgttgtccacgtttgtaacatatcctagctgtgttaagactgttccca

SEQ ID NO: 297575 - DNA, 57 bp, Artificial
  Synthetic oligonucleotide
aaaactcaggttcagggaaccaacacatgaggataagatagttcttgtgagcacaaa

SEQ ID NO: 297576 - DNA, 60 bp, Artificial
  Synthetic oligonucleotide
aaaactcatctctattcgacgctgacgtaatgatagcccacttagaatcagacggccgag

SEQ ID NO: 297577 - DNA, 60 bp, Artificial
  Synthetic oligonucleotide
aaaactcattgcttcgataatgatggatcccatgatgctcatcgccactacgggttttat

SEQ ID NO: 297578 - DNA, 54 bp, Artificial
  Synthetic oligonucleotide
aaaactccatcgtcaagaaattcccctcccttttcaatgtaagccttgacatcg

SEQ ID NO: 297579 - DNA, 50 bp, Artificial
  Synthetic oligonucleotide
aaaactcctaattttaagctacccatacaaaaggaaacgtgggagtcgtg

SEQ ID NO: 297580 - DNA, 51 bp, Artificial
  Synthetic oligonucleotide
aaaactcctcgaggacatgcacctatttgaggtgcgcgcggctaagactta

SEQ ID NO: 297581 - DNA, 55 bp, Artificial
  Synthetic oligonucleotide
aaaactcgaacgtgggatgttcttgcgtgctggtgacatcgatttaaagatggcg

SEQ ID NO: 297582 - DNA, 52 bp, Artificial
  Synthetic oligonucleotide
aaaactcgaagctcattatgagccaaagagaggtacctgggagtaccgagga

SEQ ID NO: 297583 - DNA, 57 bp, Artificial
  Synthetic oligonucleotide
aaaactcggaaacgattgctcaacggtcgtattggtacatgtataccgatggtagca

SEQ ID NO: 297584 - DNA, 57 bp, Artificial
  Synthetic oligonucleotide
aaaactcgtgtctcgagacgatggaagttgttcagcaaacaagggtggacaaattga

SEQ ID NO: 297585 - DNA, 54 bp, Artificial
  Synthetic oligonucleotide
aaaactcgtgtcttgaaacgatggaagttgtccaacaaacaagagtggacaaac

SEQ ID NO: 297586 - DNA, 54 bp, Artificial
  Synthetic oligonucleotide
aaaactctcgacgggtggctaacacacttggtgtgccacccccttagcgcgaag

SEQ ID NO: 297587 - DNA, 55 bp, Artificial
  Synthetic oligonucleotide
aaaactctgcgcagcgcaaccaaggcccggggaagcgctggaacagcaagaaggg

SEQ ID NO: 297588 - DNA, 54 bp, Artificial
  Synthetic oligonucleotide
aaaactgaagactgttaatagccccttttggagtagatacctatctgagggtaa

SEQ ID NO: 297589 - DNA, 54 bp, Artificial
  Synthetic oligonucleotide
aaaactgagaagggccatagtttcggtcagaggttatctttaccagctcccgta

SEQ ID NO: 297590 - DNA, 52 bp, Artificial
  Synthetic oligonucleotide
aaaactgagagatctgcggcgaaaagagaagagtggaacgcatgcaaggact

SEQ ID NO: 297591 - DNA, 57 bp, Artificial
  Synthetic oligonucleotide
aaaactgcaaaattaatgtatcaaaatcaaactgctagacttttacagagaacagta

SEQ ID NO: 297592 - DNA, 57 bp, Artificial
  Synthetic oligonucleotide
aaaactgcagccgccggcttcattctgtccggaagaatttctctccggacagcagtg

SEQ ID NO: 297593 - DNA, 56 bp, Artificial
  Synthetic oligonucleotide
aaaactgcatgtactatgccggtgaaccaaaaaaatggcaccgccgtgatacaaaa

SEQ ID NO: 297594 - DNA, 55 bp, Artificial
  Synthetic oligonucleotide
aaaactgcctcaagatgaggaggcggggcataagccctaggcaccacccctactt

SEQ ID NO: 297595 - DNA, 56 bp, Artificial
  Synthetic oligonucleotide
aaaactgcgtagcccgctaatgtggatatggctattgacctcttacattgtgtcta

SEQ ID NO: 297596 - DNA, 55 bp, Artificial
  Synthetic oligonucleotide
aaaactgctattgttaaacaggacgaccctaacaagatgcgcaccatatggggcg

SEQ ID NO: 297597 - DNA, 54 bp, Artificial
  Synthetic oligonucleotide
aaaactggccattcctgaaacacatggtcttagggctgtcaagacatgtggcat

SEQ ID NO: 297598 - DNA, 52 bp, Artificial
  Synthetic oligonucleotide
aaaactgggacccagggagaacgttgcagttattcaagtaggtggttcgaac

SEQ ID NO: 297599 - DNA, 55 bp, Artificial
  Synthetic oligonucleotide
aaaactggggaattgagcccattgacaacgtaatgggaatgatcgggatactacc

SEQ ID NO: 297600 - DNA, 58 bp, Artificial
  Synthetic oligonucleotide
aaaactggtaattaccgacgttgtggatggcgtcaatcacaagctggatgttacaaca

SEQ ID NO: 297601 - DNA, 56 bp, Artificial
  Synthetic oligonucleotide
aaaactggtctttccgaggaattacgggtcatcgcgctgcctactcttgtacagaa

SEQ ID NO: 297602 - DNA, 56 bp, Artificial
  Synthetic oligonucleotide
aaaactggtttaatgttagatctaattggctacagggcaatctcaacatgacctca

SEQ ID NO: 297603 - DNA, 51 bp, Artificial
  Synthetic oligonucleotide
aaaactgtagctcgctggtgtggtgttgaattcgggagcatgaaatacgat

SEQ ID NO: 297604 - DNA, 54 bp, Artificial
  Synthetic oligonucleotide
aaaactgtaggccgaaagtgcaactggtaacacttctcatcctcagacctagat

SEQ ID NO: 297605 - DNA, 54 bp, Artificial
  Synthetic oligonucleotide
aaaactgtagggatgaggacacccagaagccctctcttgtttcggctcctccag

SEQ ID NO: 297606 - DNA, 58 bp, Artificial
  Synthetic oligonucleotide
aaaactgtctaggcattaaccgcaaatcccacattagattatatacatttatgcactt

SEQ ID NO: 297607 - DNA, 52 bp, Artificial
  Synthetic oligonucleotide
aaaactgtgtggttcgtggcaagtgtgaagatggggaatgagatcgcaatgt

SEQ ID NO: 297608 - DNA, 52 bp, Artificial
  Synthetic oligonucleotide
aaaactgttacttattgttcaggcacttagggacaacctagaacctggaacc

SEQ ID NO: 297609 - DNA, 56 bp, Artificial
  Synthetic oligonucleotide
aaaactgttcaaccacaaatggtacgcgcagtcagacctgtgcgacgttaaccttg

SEQ ID NO: 297610 - DNA, 54 bp, Artificial
  Synthetic oligonucleotide
aaaactgtttagcaatatggggaccgcctgatacgggcaaatcaatgttttgct

SEQ ID NO: 297611 - DNA, 60 bp, Artificial
  Synthetic oligonucleotide
aaaactgtttcatggactcctgttattgctggcgattcctttgagcttgatgctgttggc

SEQ ID NO: 297612 - DNA, 54 bp, Artificial
  Synthetic oligonucleotide
aaaactgttttaaatgacatgacggtaacgttttccaagtatacgtcatgtata

SEQ ID NO: 297613 - DNA, 55 bp, Artificial
  Synthetic oligonucleotide
aaaacttaattaattcctggcagacattcaaaacaacagccacaggagcgattca

SEQ ID NO: 297614 - DNA, 56 bp, Artificial
  Synthetic oligonucleotide
aaaacttacctggacactggaagccaacctggacactggacactcgaagactaaga

SEQ ID NO: 297615 - DNA, 56 bp, Artificial
  Synthetic oligonucleotide
aaaacttcgttctttgtatgggtaatcatcctcttccagcgagcaatctctatgcc

SEQ ID NO: 297616 - DNA, 51 bp, Artificial
  Synthetic oligonucleotide
aaaacttctactcctacagaaaagcttagcacagctgtaggtaaggccaga

SEQ ID NO: 297617 - DNA, 60 bp, Artificial
  Synthetic oligonucleotide
aaaacttctcctgacatgtgatacaactatgcctatctcaataggtacctgttcaagtcc

SEQ ID NO: 297618 - DNA, 58 bp, Artificial
  Synthetic oligonucleotide
aaaacttggacattctgtcagactaactgtgcatgttaatgtaaaaccaacacctgaa

SEQ ID NO: 297619 - DNA, 52 bp, Artificial
  Synthetic oligonucleotide
aaaacttggagaattcttcggtggattgtgggcttcgattttctggccaatt

SEQ ID NO: 297620 - DNA, 53 bp, Artificial
  Synthetic oligonucleotide
aaaacttggcaaacaggtaacctggaggagaaagcattgatctcactagcccc

SEQ ID NO: 297621 - DNA, 51 bp, Artificial
  Synthetic oligonucleotide
aaaacttggggtcccacccttgcgagcttggagacaccgggcccggaatgt

SEQ ID NO: 297622 - DNA, 52 bp, Artificial
  Synthetic oligonucleotide
aaaactttccgagggtgcatcaacatcttacaaggcaccagaagaaagcgat

SEQ ID NO: 297623 - DNA, 50 bp, Artificial
  Synthetic oligonucleotide
aaaacttttcggtggtttcaataaaacgttcattgctattagggataaac

SEQ ID NO: 297624 - DNA, 58 bp, Artificial
  Synthetic oligonucleotide
aaaacttttgagatattgcgtctcaatcttgaggacaatggagaatccggagttgatt

SEQ ID NO: 297625 - DNA, 53 bp, Artificial
  Synthetic oligonucleotide
aaaagaaaactgatgagtccgaaacagaaagtagccgacttaagccccaggct

SEQ ID NO: 297626 - DNA, 50 bp, Artificial
  Synthetic oligonucleotide
aaaagaaaccggcccccgtagagaggacgggggccggctgacacaacaaa

SEQ ID NO: 297627 - DNA, 51 bp, Artificial
  Synthetic oligonucleotide
aaaagaaactggtggtccccagtttccagaccagacctaaaggcaaaaaga

SEQ ID NO: 297628 - DNA, 60 bp, Artificial
  Synthetic oligonucleotide
aaaagaaatagtagcctgctgtgataaatgtcaactaaaaggagaagccatgcatggaca

SEQ ID NO: 297629 - DNA, 57 bp, Artificial
  Synthetic oligonucleotide
aaaagaaatcggtccatcctgaacacaagtcagagaggaatacttgaagacgaacaa

SEQ ID NO: 297630 - DNA, 55 bp, Artificial
  Synthetic oligonucleotide
aaaagaacaagtggatcatctgtcaagagagaggaagaattactcacaggcaacc

SEQ ID NO: 297631 - DNA, 55 bp, Artificial
  Synthetic oligonucleotide
aaaagaacaagtgtcagggacctattacaaagaacaggaggacctcatagcagac

SEQ ID NO: 297632 - DNA, 50 bp, Artificial
  Synthetic oligonucleotide
aaaagaacactatggagatgtacagggttcgactgagtgacaaaccacac

SEQ ID NO: 297633 - DNA, 60 bp, Artificial
  Synthetic oligonucleotide
aaaagaacgctcaaaccgatgactgatgatcccgtcgagctacagagatatactttagcc

SEQ ID NO: 297634 - DNA, 59 bp, Artificial
  Synthetic oligonucleotide
aaaagaactactggagtggatgatatcctgaggaagttttatgacaatgagcttgttaa

SEQ ID NO: 297635 - DNA, 55 bp, Artificial
  Synthetic oligonucleotide
aaaagaagagcaattgccaccgctgggatacaaatcagagggtttgtattagtag

SEQ ID NO: 297636 - DNA, 50 bp, Artificial
  Synthetic oligonucleotide
aaaagaagaggtgcgagaattggcagccctcggaaaagctccatacatag

SEQ ID NO: 297637 - DNA, 53 bp, Artificial
  Synthetic oligonucleotide
aaaagaaggcgcgcactaatattaccgcgccttcttttcctgcgaggtcccgg

SEQ ID NO: 297638 - DNA, 54 bp, Artificial
  Synthetic oligonucleotide
aaaagaagggctattgcaacacccgggatgcaaattagagggttcgtgtacttc

SEQ ID NO: 297639 - DNA, 52 bp, Artificial
  Synthetic oligonucleotide
aaaagaagtcttatataaataggacaggaacatttgagttcacaagtttttt

SEQ ID NO: 297640 - DNA, 54 bp, Artificial
  Synthetic oligonucleotide
aaaagaagtggtccccgccactatactatgtcgttcaatgaaattgcgtcctgg

SEQ ID NO: 297641 - DNA, 51 bp, Artificial
  Synthetic oligonucleotide
aaaagaagttggaggtggagtaaggtgtaccagtgtctgaagtgtggcaaa

SEQ ID NO: 297642 - DNA, 60 bp, Artificial
  Synthetic oligonucleotide
aaaagaatgaacgtgctacattaacaacactaatgagagaccctcaggcagtaggatcag

SEQ ID NO: 297643 - DNA, 55 bp, Artificial
  Synthetic oligonucleotide
aaaagaatgcttatgtacaacttcccaactaaagccggccaatgtggaggtgtcc

SEQ ID NO: 297644 - DNA, 50 bp, Artificial
  Synthetic oligonucleotide
aaaagacaagccagccaatggcctgtgctatccgggaaacttcaactatt

SEQ ID NO: 297645 - DNA, 52 bp, Artificial
  Synthetic oligonucleotide
aaaagacaattctcagcagacgtcgacaagttaattcccctcagtctcaagg

SEQ ID NO: 297646 - DNA, 55 bp, Artificial
  Synthetic oligonucleotide
aaaagacaccactagacactgtgactatagacccattaattattgccaacacact

SEQ ID NO: 297647 - DNA, 60 bp, Artificial
  Synthetic oligonucleotide
aaaagaccctttgtcaaattaaatgtggagactgatacagcagaaataagattgatgtgc

SEQ ID NO: 297648 - DNA, 51 bp, Artificial
  Synthetic oligonucleotide
aaaagaccgtttatgccattcggtgtacacaaaacgacaaatcccgggagg

SEQ ID NO: 297649 - DNA, 53 bp, Artificial
  Synthetic oligonucleotide
aaaagacgatgtaattaatgctcaacgttcgttaattagttattatttcggta

SEQ ID NO: 297650 - DNA, 55 bp, Artificial
  Synthetic oligonucleotide
aaaagacgcagagtacccgacgaagtcgaccgacagagtgccgtggggtctgccc

SEQ ID NO: 297651 - DNA, 50 bp, Artificial
  Synthetic oligonucleotide
aaaagacgtagacggcgggggctattgggcgatgcacgatagtacgcggg

SEQ ID NO: 297652 - DNA, 56 bp, Artificial
  Synthetic oligonucleotide
aaaagactcgagagttgaagtccagatgtccactaaggtaattgtgtgggcctagg

SEQ ID NO: 297653 - DNA, 54 bp, Artificial
  Synthetic oligonucleotide
aaaagactctagggtgtgcgcgtgcaattattgaggtctctcgcatataaataa

SEQ ID NO: 297654 - DNA, 53 bp, Artificial
  Synthetic oligonucleotide
aaaagactggaaatgtcacggtcatcaacatggcccgaacaactgaagaggtg

SEQ ID NO: 297655 - DNA, 60 bp, Artificial
  Synthetic oligonucleotide
aaaagactgtgcagtgatgtgcagatactataaaaaagcagaaagggaaagtatgtcaat

SEQ ID NO: 297656 - DNA, 55 bp, Artificial
  Synthetic oligonucleotide
aaaagagacatgggacacatggtggtcagaatattggcaggctacctggattcct

SEQ ID NO: 297657 - DNA, 59 bp, Artificial
  Synthetic oligonucleotide
aaaagagcaacagctattctcaggaaggcaaccagaagactgatccaattaatagtaag

SEQ ID NO: 297658 - DNA, 55 bp, Artificial
  Synthetic oligonucleotide
aaaagagcagccaatcgatacgcgggtggaacccgtcctgttacttctcaagtta

SEQ ID NO: 297659 - DNA, 55 bp, Artificial
  Synthetic oligonucleotide
aaaagagccaacccatacgatctatacaggacctgtgcaacaggggactgtccac

SEQ ID NO: 297660 - DNA, 52 bp, Artificial
  Synthetic oligonucleotide
aaaagagccctacagcggttaagctaccgctatataaatagcttaggccggg

SEQ ID NO: 297661 - DNA, 55 bp, Artificial
  Synthetic oligonucleotide
aaaagagcctattgcttgctaccggaatgaggaatgtaccagagattgtccaagg

SEQ ID NO: 297662 - DNA, 52 bp, Artificial
  Synthetic oligonucleotide
aaaagagcggcaccccggcattcccgtccgaggggattacgaccggcatgtg

SEQ ID NO: 297663 - DNA, 50 bp, Artificial
  Synthetic oligonucleotide
aaaagaggatagctgctcgtacattcgggacagcggtctatcactaacca

SEQ ID NO: 297664 - DNA, 60 bp, Artificial
  Synthetic oligonucleotide
aaaagaggtggatatcaggatctcgtgcaaatctctaaggagatctactattgtcagcac

SEQ ID NO: 297665 - DNA, 60 bp, Artificial
  Synthetic oligonucleotide
aaaagaggttctggatctggtattatcatttcagatgcatcaatccacgattgtaatacg

SEQ ID NO: 297666 - DNA, 57 bp, Artificial
  Synthetic oligonucleotide
aaaagaggtttctgaaatcacagggtcgtggttcctatgcagatttttgcgggatga

SEQ ID NO: 297667 - DNA, 51 bp, Artificial
  Synthetic oligonucleotide
aaaagagtaaaacctacttgacgcattgctccatacacctggtaactgttc

SEQ ID NO: 297668 - DNA, 60 bp, Artificial
  Synthetic oligonucleotide
aaaagagtatagacagaagattgatgcgcttaagagtgcgatagagattgagcgtgatgg

SEQ ID NO: 297669 - DNA, 55 bp, Artificial
  Synthetic oligonucleotide
aaaagagtctgtcaacactcagagttggcgctttcacgttggcatgaacgtgacc

SEQ ID NO: 297670 - DNA, 55 bp, Artificial
  Synthetic oligonucleotide
aaaagagtgcccttttatcaaaccagaggtgaagccaggaacaccagcccaggaa

SEQ ID NO: 297671 - DNA, 59 bp, Artificial
  Synthetic oligonucleotide
aaaagataagattccagatagtgagttagctatggcgataaaatcaaaggttgaggtga

SEQ ID NO: 297672 - DNA, 52 bp, Artificial
  Synthetic oligonucleotide
aaaagatacctgctgacccaaattggcttacattttctcaggagagaactag

SEQ ID NO: 297673 - DNA, 52 bp, Artificial
  Synthetic oligonucleotide
aaaagatcccgttgtacaaggaacaagtgagagcgtttgctacagcctcaga

SEQ ID NO: 297674 - DNA, 60 bp, Artificial
  Synthetic oligonucleotide
aaaagatctagatcgcttaattcgtcggcgttctactatagagtgtaggtgcatgttaga

SEQ ID NO: 297675 - DNA, 60 bp, Artificial
  Synthetic oligonucleotide
aaaagatctgactaaattaggggccacttatgacaatgcacagaagtgctgggtttatca

SEQ ID NO: 297676 - DNA, 55 bp, Artificial
  Synthetic oligonucleotide
aaaagatctgtttctctccgagattgaggaccgctatgcctgagaagcgtcaagg

SEQ ID NO: 297677 - DNA, 51 bp, Artificial
  Synthetic oligonucleotide
aaaagatcttcgccccgggaccgtatggacaccccgaccaggttccttaca

SEQ ID NO: 297678 - DNA, 50 bp, Artificial
  Synthetic oligonucleotide
aaaagatgaattatataatcccaacaagaaatccatcaacgctggctgat

SEQ ID NO: 297679 - DNA, 58 bp, Artificial
  Synthetic oligonucleotide
aaaagatgacctggtgagtttcctgcaggaattccctctggaggatttggacgatata

SEQ ID NO: 297680 - DNA, 58 bp, Artificial
  Synthetic oligonucleotide
aaaagatggagcgaatctgtatgtttataagcgtgttaatggagcgtttgttacgcta

SEQ ID NO: 297681 - DNA, 53 bp, Artificial
  Synthetic oligonucleotide
aaaagatggggttactccttacatttcatgggctataccattggatgttatgg

SEQ ID NO: 297682 - DNA, 53 bp, Artificial
  Synthetic oligonucleotide
aaaagatggtggggataccacctttaatgtgagtgggcttcccgtacttgacg

SEQ ID NO: 297683 - DNA, 59 bp, Artificial
  Synthetic oligonucleotide
aaaagattaaaaatgaacgagagtctgcgccacggcatcaggttcagaacgtggcgcca

SEQ ID NO: 297684 - DNA, 60 bp, Artificial
  Synthetic oligonucleotide
aaaagattatgtgcatccaagttgggctcttggtgtcaagtggtctctctaattggagct

SEQ ID NO: 297685 - DNA, 58 bp, Artificial
  Synthetic oligonucleotide
aaaagattcattccagtcattcaatattacagaaccccatattacaacaaattcacta

SEQ ID NO: 297686 - DNA, 55 bp, Artificial
  Synthetic oligonucleotide
aaaagattctatggagtattcagggcctaagatcacagttaaaggagtttgctct

SEQ ID NO: 297687 - DNA, 55 bp, Artificial
  Synthetic oligonucleotide
aaaagattcttagctgtggaaccggattacaccaaaactgaggtgaagtgtgatt

SEQ ID NO: 297688 - DNA, 59 bp, Artificial
  Synthetic oligonucleotide
aaaagcaaaggctttgcacagagttccctcgcgtaaagagaagatgcaagctttgtgtg

SEQ ID NO: 297689 - DNA, 58 bp, Artificial
  Synthetic oligonucleotide
aaaagcaacaaaagctgtactaggaaacacattcactacagaagattatacactagga

SEQ ID NO: 297690 - DNA, 56 bp, Artificial
  Synthetic oligonucleotide
aaaagcaagactcgcccgctgagtcctttaaaagggctctcgctgtggcagatagc

SEQ ID NO: 297691 - DNA, 53 bp, Artificial
  Synthetic oligonucleotide
aaaagcaagatatgtatcaggatacagcctatggagtaagagtcggtaatcac

SEQ ID NO: 297692 - DNA, 60 bp, Artificial
  Synthetic oligonucleotide
aaaagcacaattctgaatactgcagttcctataggatcctgcgttagtaaatgccacacc

SEQ ID NO: 297693 - DNA, 52 bp, Artificial
  Synthetic oligonucleotide
aaaagcacaggacaggtaccatctttgcagtacctagctctgctcgcacatc

SEQ ID NO: 297694 - DNA, 50 bp, Artificial
  Synthetic oligonucleotide
aaaagcactcaataagtgcctggtcatggttctcaattttacgcacggcg

SEQ ID NO: 297695 - DNA, 54 bp, Artificial
  Synthetic oligonucleotide
aaaagcagagaagaacagaccacatcaagtgcgtagcactaaatgttagcatac

SEQ ID NO: 297696 - DNA, 55 bp, Artificial
  Synthetic oligonucleotide
aaaagcagagactgaacaagaagagctacttaataagagcactgacactgaacac

SEQ ID NO: 297697 - DNA, 53 bp, Artificial
  Synthetic oligonucleotide
aaaagcagatgtcttgtcagcatgcaactccataggcatacgatattgtcgat

SEQ ID NO: 297698 - DNA, 53 bp, Artificial
  Synthetic oligonucleotide
aaaagcagcatagtaggatggcctaaggttagggaaagaatagtacaaacccc

SEQ ID NO: 297699 - DNA, 54 bp, Artificial
  Synthetic oligonucleotide
aaaagcagcgaagcagactcagagtacgtcttcgatattgatgccagaaaatgc

SEQ ID NO: 297700 - DNA, 60 bp, Artificial
  Synthetic oligonucleotide
aaaagcagcgctcacagactgacaaccagctcgctgtgtttttgatctgtgtgctcacac

SEQ ID NO: 297701 - DNA, 56 bp, Artificial
  Synthetic oligonucleotide
aaaagcaggtggaccccacaatggacgcgcccgtgaaagaaagtggtccctgcgca

SEQ ID NO: 297702 - DNA, 55 bp, Artificial
  Synthetic oligonucleotide
aaaagcaggtggaccccacaggatggccgcactcgtgaaagaaagtggtccccgc

SEQ ID NO: 297703 - DNA, 55 bp, Artificial
  Synthetic oligonucleotide
aaaagcaggtggaccccacagtggcccctacgcactaagtaatgtcggccaatta

SEQ ID NO: 297704 - DNA, 60 bp, Artificial
  Synthetic oligonucleotide
aaaagcatatacgatgtgatggtatttgatggagcgtatattgtatcaggtatttccgtt

SEQ ID NO: 297705 - DNA, 51 bp, Artificial
  Synthetic oligonucleotide
aaaagcatcctggccaagctagagagctttgctggaggtgttgtcaccaaa

SEQ ID NO: 297706 - DNA, 55 bp, Artificial
  Synthetic oligonucleotide
aaaagcatgtggatcccacgggatggccgcgcccgtgaaagaacgtggtccccgc

SEQ ID NO: 297707 - DNA, 57 bp, Artificial
  Synthetic oligonucleotide
aaaagccaagctcgtgccacaactgcctgggattccctttgtgtcctgccaacgcgg

SEQ ID NO: 297708 - DNA, 60 bp, Artificial
  Synthetic oligonucleotide
aaaagccagctagtgtggatggcatgtcattctgcagcatttgaagatctgagagtgtct

SEQ ID NO: 297709 - DNA, 57 bp, Artificial
  Synthetic oligonucleotide
aaaagccatagttacggcagttgatatggatgtaatagctacacccacaggttagat

SEQ ID NO: 297710 - DNA, 57 bp, Artificial
  Synthetic oligonucleotide
aaaagccatctaccgtaaggaaactgcttatatttctgtagtgtcctcgcattataa

SEQ ID NO: 297711 - DNA, 52 bp, Artificial
  Synthetic oligonucleotide
aaaagccctcacgtatacagacgggccactaaacacgcacatgagcgggcat

SEQ ID NO: 297712 - DNA, 58 bp, Artificial
  Synthetic oligonucleotide
aaaagccgccatacgcaccgtctacatggggaccagaagcgtataggcggtcatttga

SEQ ID NO: 297713 - DNA, 53 bp, Artificial
  Synthetic oligonucleotide
aaaagcgaaattgaattcgtacgcgccaatatcacttgagaagaggcgtgcgc

SEQ ID NO: 297714 - DNA, 51 bp, Artificial
  Synthetic oligonucleotide
aaaagcgacagaggttttgttcttggtcactccatcaccgatgtcactttc

SEQ ID NO: 297715 - DNA, 57 bp, Artificial
  Synthetic oligonucleotide
aaaagcgatatcagagataatgatggtcaagcatagacggatcttgcttctatcaac

SEQ ID NO: 297716 - DNA, 59 bp, Artificial
  Synthetic oligonucleotide
aaaagcgcagtatagctgtgaaagtaacttggggggtatagatgtaatggtgcatcaac

SEQ ID NO: 297717 - DNA, 53 bp, Artificial
  Synthetic oligonucleotide
aaaagcgcccattacctagaaagcaaataacataccttagaaaccgtgtagac

SEQ ID NO: 297718 - DNA, 58 bp, Artificial
  Synthetic oligonucleotide
aaaagcgcgagtggtacccttttcttgcttcactccaattgtgcgtcaagacagagga

SEQ ID NO: 297719 - DNA, 54 bp, Artificial
  Synthetic oligonucleotide
aaaagcgctctgaacatcgaaacccagtctcgagaagtcaccggcgaaagaagg

SEQ ID NO: 297720 - DNA, 53 bp, Artificial
  Synthetic oligonucleotide
aaaagcggacaccgcttcatatcatgttgagtccgttgaaatcgaaccgaatg

SEQ ID NO: 297721 - DNA, 55 bp, Artificial
  Synthetic oligonucleotide
aaaagcggttgatgatatgcgctctaaatacaatgagttgcttgaaaccacaacg

SEQ ID NO: 297722 - DNA, 59 bp, Artificial
  Synthetic oligonucleotide
aaaagcgttgcacgcccactacgcacaaattaaattagtgcggcatgactggaacaagc

SEQ ID NO: 297723 - DNA, 59 bp, Artificial
  Synthetic oligonucleotide
aaaagctaaaccgcgtacgttgttgcacccaagcctctttgaagacatcatgttgagca

SEQ ID NO: 297724 - DNA, 57 bp, Artificial
  Synthetic oligonucleotide
aaaagctaagggatgggtttataaacatcactatgatagccctcatccaaagataag

SEQ ID NO: 297725 - DNA, 56 bp, Artificial
  Synthetic oligonucleotide
aaaagctaagtggtccccgcgcactatcgtttgtcatccaatcagaatcgcgcgtc

SEQ ID NO: 297726 - DNA, 52 bp, Artificial
  Synthetic oligonucleotide
aaaagctagcacaggtctgttcggtgtctagtcatgcgaaatcgctggtcac

SEQ ID NO: 297727 - DNA, 55 bp, Artificial
  Synthetic oligonucleotide
aaaagctagggccaagagaaaacgtagcagttatacaggttggtggttcagatgt

SEQ ID NO: 297728 - DNA, 60 bp, Artificial
  Synthetic oligonucleotide
aaaagctcaataatgagatcagatgcacctattgacacatgcatttctgagtgtatcact

SEQ ID NO: 297729 - DNA, 52 bp, Artificial
  Synthetic oligonucleotide
aaaagctcacaattgactttgaccttgagacaagtaaagaaccctccagtgt

SEQ ID NO: 297730 - DNA, 57 bp, Artificial
  Synthetic oligonucleotide
aaaagctcccgaaccacccaccggggtggctgaggtcatggacataatctctgattg

SEQ ID NO: 297731 - DNA, 55 bp, Artificial
  Synthetic oligonucleotide
aaaagctcgagcctagttagaggactaggagaggccgtagccgtaactactctgg

SEQ ID NO: 297732 - DNA, 59 bp, Artificial
  Synthetic oligonucleotide
aaaagctcgatcacgacaggaactacgcacctgaagctattaaccagtctacacctgac

SEQ ID NO: 297733 - DNA, 51 bp, Artificial
  Synthetic oligonucleotide
aaaagctggcctcaggtcagggaaagaataaggcaaactccgacagcaaca

SEQ ID NO: 297734 - DNA, 52 bp, Artificial
  Synthetic oligonucleotide
aaaagctttcgccctgcctgaagacgcccgaccaccccgcctctcggaaacc

SEQ ID NO: 297735 - DNA, 53 bp, Artificial
  Synthetic oligonucleotide
aaaaggaaataagaaccggaggacctctctggccccaggactgggcttctgga

SEQ ID NO: 297736 - DNA, 57 bp, Artificial
  Synthetic oligonucleotide
aaaaggaaatagcgccgaagctagaggcaaccggatggcagaccaagcagcccggga

SEQ ID NO: 297737 - DNA, 58 bp, Artificial
  Synthetic oligonucleotide
aaaaggaacaaagaccagagggaaactatgcccaaactgtctcaactgcacagatctg

SEQ ID NO: 297738 - DNA, 50 bp, Artificial
  Synthetic oligonucleotide
aaaaggaactctttgggtagtagtggtattggttcctccttgggtagttc

SEQ ID NO: 297739 - DNA, 57 bp, Artificial
  Synthetic oligonucleotide
aaaaggaagatcccacttaagaaatgacactgacgtggtaaactttgtgagcatgga

SEQ ID NO: 297740 - DNA, 54 bp, Artificial
  Synthetic oligonucleotide
aaaaggaaggccaacagcttaaattgttcattgttggtcgaacaactctaacgc

SEQ ID NO: 297741 - DNA, 60 bp, Artificial
  Synthetic oligonucleotide
aaaaggacaggacatgctctcagacgctgcgctcatggtgcttcaccgcgggaaccgcgt

SEQ ID NO: 297742 - DNA, 54 bp, Artificial
  Synthetic oligonucleotide
aaaaggacccttcaagatcaaaggaatcaggtgtcggaaattgttcgaagacaa

SEQ ID NO: 297743 - DNA, 50 bp, Artificial
  Synthetic oligonucleotide
aaaaggacgcagactaacagttaaatttgatggcgaggaccacaaagcag

SEQ ID NO: 297744 - DNA, 55 bp, Artificial
  Synthetic oligonucleotide
aaaaggacgttgaggcacgcatgaattggagtgaggatattgttgaactgcctaa

SEQ ID NO: 297745 - DNA, 60 bp, Artificial
  Synthetic oligonucleotide
aaaaggactctatctacgcatctgctctggtggaagcaaccaaattttgtgcacctatat

SEQ ID NO: 297746 - DNA, 55 bp, Artificial
  Synthetic oligonucleotide
aaaaggagaattggttgaccttctctcgtgagcatactagcacatggggctgcga

SEQ ID NO: 297747 - DNA, 52 bp, Artificial
  Synthetic oligonucleotide
aaaaggagaggttaaggagagaggaactcgcgtttcaaaacgccgatcctta

SEQ ID NO: 297748 - DNA, 54 bp, Artificial
  Synthetic oligonucleotide
aaaaggagatgatttcatgcaaatcgcaatcccagaacgagttattgaaagagc

SEQ ID NO: 297749 - DNA, 55 bp, Artificial
  Synthetic oligonucleotide
aaaaggagtaggcgctaaaggagatagtggccgacctatactagacaaccaagga

SEQ ID NO: 297750 - DNA, 53 bp, Artificial
  Synthetic oligonucleotide
aaaaggagtgtggaatggatccctgaaagcagaattgaggccaattgaaaagg

SEQ ID NO: 297751 - DNA, 53 bp, Artificial
  Synthetic oligonucleotide
aaaaggagttcacgaagactgcttactggtgggacggtctccaatcgtctgat

SEQ ID NO: 297752 - DNA, 56 bp, Artificial
  Synthetic oligonucleotide
aaaaggatagctggactgtcaatgatatacagaagttagtgggaaaattaaactgg

SEQ ID NO: 297753 - DNA, 56 bp, Artificial
  Synthetic oligonucleotide
aaaaggatctggagaacgcgcggacaaggatgtcgacagaggagaggtaaagacta

SEQ ID NO: 297754 - DNA, 55 bp, Artificial
  Synthetic oligonucleotide
aaaaggatggaaagagcaagtgaagcaactctcgggtcatattacactggtgctg

SEQ ID NO: 297755 - DNA, 55 bp, Artificial
  Synthetic oligonucleotide
aaaaggatggcattacaatcctaatctgatctcctggtgcggtttaaatttggtc

SEQ ID NO: 297756 - DNA, 51 bp, Artificial
  Synthetic oligonucleotide
aaaaggatggttggtgcccgagattaactctactctacaaattgagaagca

SEQ ID NO: 297757 - DNA, 58 bp, Artificial
  Synthetic oligonucleotide
aaaaggatgttgagcgttctagaaacgcgggcttaatcctacgagatgatactggtga

SEQ ID NO: 297758 - DNA, 57 bp, Artificial
  Synthetic oligonucleotide
aaaaggatgttgagcgtttgcgaacgcgagcttggtcctaagagtgcatactggtac

SEQ ID NO: 297759 - DNA, 56 bp, Artificial
  Synthetic oligonucleotide
aaaaggatgttgagcgttttcgaacgcgggccaaatcctacgagatgatactggtg

SEQ ID NO: 297760 - DNA, 57 bp, Artificial
  Synthetic oligonucleotide
aaaaggattgtttggagcaatcgctgggttcatagagggcgggtggcaaggaatgat

SEQ ID NO: 297761 - DNA, 60 bp, Artificial
  Synthetic oligonucleotide
aaaaggcaatggcactgtcagcctttgcctgcccactgttgagctgcgctccgattggat

SEQ ID NO: 297762 - DNA, 55 bp, Artificial
  Synthetic oligonucleotide
aaaaggcactgtacccgttgattggtggaagtaaggtggtacggtcatggtatga

SEQ ID NO: 297763 - DNA, 57 bp, Artificial
  Synthetic oligonucleotide
aaaaggcaggcaatcagcggccaaattgaggtttctcgttcaattataggccggcga

SEQ ID NO: 297764 - DNA, 52 bp, Artificial
  Synthetic oligonucleotide
aaaaggcagtccagcccctttggacttggtggccctctcttacacctgatgt

SEQ ID NO: 297765 - DNA, 57 bp, Artificial
  Synthetic oligonucleotide
aaaaggcctggcgtgctccaatttcacgttagcgatgccagagggctacccccctca

SEQ ID NO: 297766 - DNA, 55 bp, Artificial
  Synthetic oligonucleotide
aaaaggcctgtccgtctgtggcaggggaggtagctgcggcggtagcaggagtgat

SEQ ID NO: 297767 - DNA, 54 bp, Artificial
  Synthetic oligonucleotide
aaaaggcgcgtggatgggtgtgaacctgcttgcctatgtccacggcaccagtgg

SEQ ID NO: 297768 - DNA, 50 bp, Artificial
  Synthetic oligonucleotide
aaaaggctaaggctaatacatcttctgcatcaaacaagtaagtatgggat

SEQ ID NO: 297769 - DNA, 51 bp, Artificial
  Synthetic oligonucleotide
aaaaggctcagaacacccaaggggccaaccgtataatattaccggttggcc

SEQ ID NO: 297770 - DNA, 55 bp, Artificial
  Synthetic oligonucleotide
aaaaggctcagtttctcctcgcctgctgctgaacatgccaaacttcgaagggctc

SEQ ID NO: 297771 - DNA, 59 bp, Artificial
  Synthetic oligonucleotide
aaaaggctctactgttattaacctggagcagactggtagtatgatgtttgaagtgaatg

SEQ ID NO: 297772 - DNA, 55 bp, Artificial
  Synthetic oligonucleotide
aaaaggctctccagagtttgattggattcttgggtggacaattaagggattggga

SEQ ID NO: 297773 - DNA, 58 bp, Artificial
  Synthetic oligonucleotide
aaaaggctgccgcactcccggttagatgcctgcccagtgtagggcagaccgagccgta

SEQ ID NO: 297774 - DNA, 53 bp, Artificial
  Synthetic oligonucleotide
aaaaggcttacgtcatcttcgatggtccttggaagggaatctaccaagattgg

SEQ ID NO: 297775 - DNA, 50 bp, Artificial
  Synthetic oligonucleotide
aaaagggaaatggacaacaaacacggaaaccggagcgccccaactcaacc

SEQ ID NO: 297776 - DNA, 59 bp, Artificial
  Synthetic oligonucleotide
aaaagggatacaggggcgtatgggctggcacgggagtcatgactactcggtgtccatgc

SEQ ID NO: 297777 - DNA, 55 bp, Artificial
  Synthetic oligonucleotide
aaaagggcttcggtgcttcaaagaaagctctgaagaatttatcgaaaagaagctc

SEQ ID NO: 297778 - DNA, 55 bp, Artificial
  Synthetic oligonucleotide
aaaaggggaagccataacagggcaagtggatgtatcaataggaatctggcagata

SEQ ID NO: 297779 - DNA, 52 bp, Artificial
  Synthetic oligonucleotide
aaaaggggaccgtgtcgaccgtttgcggccagtttgacattaatttagtctc

SEQ ID NO: 297780 - DNA, 57 bp, Artificial
  Synthetic oligonucleotide
aaaaggggacctgctagcggtttcttcagcagactgaactggttgactaagtcagga

SEQ ID NO: 297781 - DNA, 56 bp, Artificial
  Synthetic oligonucleotide
aaaagggggggtatggtcagcgggatacagtaatgggacagaatgttccgatggca

SEQ ID NO: 297782 - DNA, 51 bp, Artificial
  Synthetic oligonucleotide
aaaaggggttttcgaggcaggttcggagagtaatctggaactggagggtta

SEQ ID NO: 297783 - DNA, 51 bp, Artificial
  Synthetic oligonucleotide
aaaagggtaagtgttgccccttccatcttcggagaatccacacgacggtct

SEQ ID NO: 297784 - DNA, 57 bp, Artificial
  Synthetic oligonucleotide
aaaagggtactgctaaaccctctcaccaaggaaatgcctccagatgaggctagcaat

SEQ ID NO: 297785 - DNA, 55 bp, Artificial
  Synthetic oligonucleotide
aaaagggtcacagcacacggagacacccctcagttggacctaaaagcgaggccaa

SEQ ID NO: 297786 - DNA, 55 bp, Artificial
  Synthetic oligonucleotide
aaaagggtcagttgcagtgttttaactgtggaaagataggccatacagcaagaaa

SEQ ID NO: 297787 - DNA, 54 bp, Artificial
  Synthetic oligonucleotide
aaaagggtcgtgtgcatagcaccgctggcggtttaagagttcaacccacgcaga

SEQ ID NO: 297788 - DNA, 52 bp, Artificial
  Synthetic oligonucleotide
aaaagggtggagccaagaaaagacccgcccccagtgacgcagatataagtga

SEQ ID NO: 297789 - DNA, 58 bp, Artificial
  Synthetic oligonucleotide
aaaagggtggattatcatacgcgacgattaaatatgctactgagaccacaattttcta

SEQ ID NO: 297790 - DNA, 54 bp, Artificial
  Synthetic oligonucleotide
aaaagggttactgggcatgcaattgggccttcttgttgggctctttcaatttgg

SEQ ID NO: 297791 - DNA, 59 bp, Artificial
  Synthetic oligonucleotide
aaaagggttgctggaagtgtgggcaggaaggacatcaaatgaaagactgcacggagaga

SEQ ID NO: 297792 - DNA, 50 bp, Artificial
  Synthetic oligonucleotide
aaaagggtttgatctacgaattcaaatccctcgatgataaaagcaacccc

SEQ ID NO: 297793 - DNA, 58 bp, Artificial
  Synthetic oligonucleotide
aaaaggtaaacatagtaacagactcacaatatgtattgggcatcatctcctcccaacc

SEQ ID NO: 297794 - DNA, 55 bp, Artificial
  Synthetic oligonucleotide
aaaaggtaacagagacaagacatcttttgaaggccaaaactgaggatgttgttaa

SEQ ID NO: 297795 - DNA, 55 bp, Artificial
  Synthetic oligonucleotide
aaaaggtaacgtaccagatggactctagttcctttaaactggagtctcaagcatc

SEQ ID NO: 297796 - DNA, 53 bp, Artificial
  Synthetic oligonucleotide
aaaaggtacctgtaagcctgaaaattaaggctcaggaggagcacagcctctac

SEQ ID NO: 297797 - DNA, 51 bp, Artificial
  Synthetic oligonucleotide
aaaaggtactgattgtgaagacttgagtgactgggtactgttagaagctga

SEQ ID NO: 297798 - DNA, 52 bp, Artificial
  Synthetic oligonucleotide
aaaaggtagagatgttgggaaggagggtcgggaggcaaatgtaagacaacct

SEQ ID NO: 297799 - DNA, 50 bp, Artificial
  Synthetic oligonucleotide
aaaaggtagggtgtggaggatgaatccgtatccgtgtttacgcggcgcaa

SEQ ID NO: 297800 - DNA, 51 bp, Artificial
  Synthetic oligonucleotide
aaaaggtccgcgtatgtcctcaatgattgcgattacttcacccacgacaca

SEQ ID NO: 297801 - DNA, 55 bp, Artificial
  Synthetic oligonucleotide
aaaaggtctcacataaagagatatgtctcagtgagtgcaaatcatcaggccaggc

SEQ ID NO: 297802 - DNA, 54 bp, Artificial
  Synthetic oligonucleotide
aaaaggtctcagaggttgacctgggtctcccgaactggggagagtatgtattac

SEQ ID NO: 297803 - DNA, 56 bp, Artificial
  Synthetic oligonucleotide
aaaaggtcttcaactaatttggaccgaagaagatttagtgtatgcgtgctgtacta

SEQ ID NO: 297804 - DNA, 55 bp, Artificial
  Synthetic oligonucleotide
aaaaggtgaacatagtaacggactcccagtatgtactaaacatactaacagaaca

SEQ ID NO: 297805 - DNA, 52 bp, Artificial
  Synthetic oligonucleotide
aaaaggtgaccttctctctcctaaaactcctccgatctccgattctggcact

SEQ ID NO: 297806 - DNA, 51 bp, Artificial
  Synthetic oligonucleotide
aaaaggtgattaacgctctaagcgggatcgatttaacgcatttgcgcaccc

SEQ ID NO: 297807 - DNA, 56 bp, Artificial
  Synthetic oligonucleotide
aaaaggtggtccccgccccacgtgaatatgtcgcgcgagtgctaaacatgtcgcgc

SEQ ID NO: 297808 - DNA, 54 bp, Artificial
  Synthetic oligonucleotide
aaaaggtgttacttccctactacgacgctatagcagatttaatcatactaggga

SEQ ID NO: 297809 - DNA, 60 bp, Artificial
  Synthetic oligonucleotide
aaaaggttactcacatgtggatcgccacatgcatccagatgcctccgtaatgaaagttgt

SEQ ID NO: 297810 - DNA, 50 bp, Artificial
  Synthetic oligonucleotide
aaaaggttcgcatcggtgataccagagaagatataaacatcgagcaacgc

SEQ ID NO: 297811 - DNA, 58 bp, Artificial
  Synthetic oligonucleotide
aaaaggttgtttccctagctgagacaacaaatcaaaagactgaattacatgcaattca

SEQ ID NO: 297812 - DNA, 54 bp, Artificial
  Synthetic oligonucleotide
aaaagtaaacgacaagtctgtaacgcaagcgaaatttgtccacatgatcactcc

SEQ ID NO: 297813 - DNA, 52 bp, Artificial
  Synthetic oligonucleotide
aaaagtaaaggtggagcgttaacggtcgggtataaatatcagcgcgcccacc

SEQ ID NO: 297814 - DNA, 57 bp, Artificial
  Synthetic oligonucleotide
aaaagtaactctcacgatgtttagatcactagttactgcagctcgagtaggcggagc

SEQ ID NO: 297815 - DNA, 55 bp, Artificial
  Synthetic oligonucleotide
aaaagtaactggatgtacagttttctgtacactggcgggacctggtgctagctgt

SEQ ID NO: 297816 - DNA, 58 bp, Artificial
  Synthetic oligonucleotide
aaaagtaagctcagaagtacacatcccactaggagatgctagattagtagtaaaaaca

SEQ ID NO: 297817 - DNA, 57 bp, Artificial
  Synthetic oligonucleotide
aaaagtaatccaatctgtagactgactgaccgaccatccttggataacttttatgct

SEQ ID NO: 297818 - DNA, 60 bp, Artificial
  Synthetic oligonucleotide
aaaagtaatggagatcaatgttgcatctgatcggaaaagtccacgatgcctgtagagact

SEQ ID NO: 297819 - DNA, 55 bp, Artificial
  Synthetic oligonucleotide
aaaagtaccagcgcaaaatgctataagtactacattcccttacactggagatccc

SEQ ID NO: 297820 - DNA, 53 bp, Artificial
  Synthetic oligonucleotide
aaaagtacctgaatggtcctatatagtggaaaaggaaaatccggcgcacggtc

SEQ ID NO: 297821 - DNA, 60 bp, Artificial
  Synthetic oligonucleotide
aaaagtactgcgttctcgaaataggagatatgctcctgaggactgcgataggtcaagtgt

SEQ ID NO: 297822 - DNA, 59 bp, Artificial
  Synthetic oligonucleotide
aaaagtactgcgttctcgagataggaaacatgctcctacggactgcaataggccaagta

SEQ ID NO: 297823 - DNA, 54 bp, Artificial
  Synthetic oligonucleotide
aaaagtacttacgggagggaaagcattttcgtatggcgtacgctatcttgagaa

SEQ ID NO: 297824 - DNA, 54 bp, Artificial
  Synthetic oligonucleotide
aaaagtagaatactagagaaggttgtgctaggtacacgtttccagttagtacaa

SEQ ID NO: 297825 - DNA, 52 bp, Artificial
  Synthetic oligonucleotide
aaaagtagactttctctctcctaaaactcgccggaacgccaaaactggcagt

SEQ ID NO: 297826 - DNA, 55 bp, Artificial
  Synthetic oligonucleotide
aaaagtagcataattggatggcctgctatcagggaaagaatgagacgaaccccta

SEQ ID NO: 297827 - DNA, 55 bp, Artificial
  Synthetic oligonucleotide
aaaagtagtatagtcggatggcctgctataagagaaagaatgaaacgaacccctc

SEQ ID NO: 297828 - DNA, 52 bp, Artificial
  Synthetic oligonucleotide
aaaagtagtatagttgggtggcctgctataagggaaagattaagacaaaccc

SEQ ID NO: 297829 - DNA, 52 bp, Artificial
  Synthetic oligonucleotide
aaaagtagtatggttggatggcctgctgtaagggagagaatgagacgagctg

SEQ ID NO: 297830 - DNA, 52 bp, Artificial
  Synthetic oligonucleotide
aaaagtagtctagctgggtggcctgctgtaagggaaaggataagacggaccc

SEQ ID NO: 297831 - DNA, 52 bp, Artificial
  Synthetic oligonucleotide
aaaagtcaacgagaacccgctatacgctatcacatctgaacacgttaatgtc

SEQ ID NO: 297832 - DNA, 50 bp, Artificial
  Synthetic oligonucleotide
aaaagtcacaaagcgtctctgctgttggttcttgcgttgccacaaatttc

SEQ ID NO: 297833 - DNA, 55 bp, Artificial
  Synthetic oligonucleotide
aaaagtcaccaagcactccgagcgaagcgaggagtgcgaccctcctgcccggtag

SEQ ID NO: 297834 - DNA, 60 bp, Artificial
  Synthetic oligonucleotide
aaaagtcagctggtatggatggcgtgtcactctgcagcatttgaagatctgagagtgtca

SEQ ID NO: 297835 - DNA, 50 bp, Artificial
  Synthetic oligonucleotide
aaaagtccaggtgttgggaagttgattacctatatgccaatcctcctaaa

SEQ ID NO: 297836 - DNA, 50 bp, Artificial
  Synthetic oligonucleotide
aaaagtcctggtcttaccaaacctaaccatctcgcaccccggcgtacctt

SEQ ID NO: 297837 - DNA, 56 bp, Artificial
  Synthetic oligonucleotide
aaaagtcctgtaattttcattttaaacatgtgctgacataaagcgtataagtctcc

SEQ ID NO: 297838 - DNA, 60 bp, Artificial
  Synthetic oligonucleotide
aaaagtcgctacagaaagagctggggttctcacgtgagatggcagcggagcagacggaag

SEQ ID NO: 297839 - DNA, 55 bp, Artificial
  Synthetic oligonucleotide
aaaagtcggtgctcatgagaatactaatgtggccactggcgggtcgacagtcaac

SEQ ID NO: 297840 - DNA, 55 bp, Artificial
  Synthetic oligonucleotide
aaaagtcgtcgtgataccgggaccctcgcagtctaaggaactcgctaaccagagc

SEQ ID NO: 297841 - DNA, 57 bp, Artificial
  Synthetic oligonucleotide
aaaagtcgttgggggtcatattaatgtcatagaagttggggatgacttgacactcca

SEQ ID NO: 297842 - DNA, 55 bp, Artificial
  Synthetic oligonucleotide
aaaagtctagccgggtcagactggactcgtgtatcatactgttcccagagacttc

SEQ ID NO: 297843 - DNA, 58 bp, Artificial
  Synthetic oligonucleotide
aaaagtctctatagttgctcaagactacaatgagccagatggccccgctataccttcg

SEQ ID NO: 297844 - DNA, 50 bp, Artificial
  Synthetic oligonucleotide
aaaagtctctatagttgctcaggacatatatgagccagatggccccgcta

SEQ ID NO: 297845 - DNA, 60 bp, Artificial
  Synthetic oligonucleotide
aaaagtgaaagtaagaccagagaagatctctcgacgcagggctcggcttgctgaagtgca

SEQ ID NO: 297846 - DNA, 51 bp, Artificial
  Synthetic oligonucleotide
aaaagtgaaccaaatgtgtaagcttattgcaggtgtgctcacaagtgctgc

SEQ ID NO: 297847 - DNA, 60 bp, Artificial
  Synthetic oligonucleotide
aaaagtgaaccatatatgccgcgatatggtttggtgaggaatttacgagatatgagtcta

SEQ ID NO: 297848 - DNA, 55 bp, Artificial
  Synthetic oligonucleotide
aaaagtgacaaaacatgctgttcagattgggtgtgtgcagcattcggtgtggcag

SEQ ID NO: 297849 - DNA, 54 bp, Artificial
  Synthetic oligonucleotide
aaaagtgagcctgaacgccaaggagataatccttgcaatagtggtgtctgccgg

SEQ ID NO: 297850 - DNA, 55 bp, Artificial
  Synthetic oligonucleotide
aaaagtgagggtgtacatgaaaccaaagcatgttagagtatggtgtcctagaccg

SEQ ID NO: 297851 - DNA, 60 bp, Artificial
  Synthetic oligonucleotide
aaaagtgatcagatttgcattggttaccatgcaaacaactcgacagagcaggtcgacaca

SEQ ID NO: 297852 - DNA, 55 bp, Artificial
  Synthetic oligonucleotide
aaaagtgatggtctgctaggcacaggggttagcgcggccatggaaattatgtcac

SEQ ID NO: 297853 - DNA, 56 bp, Artificial
  Synthetic oligonucleotide
aaaagtgccagcacaaaatgctataagcacaactttcccctatactggagaccccc

SEQ ID NO: 297854 - DNA, 52 bp, Artificial
  Synthetic oligonucleotide
aaaagtgccgaactaacatccaaattcttctaaaccgcacacgacctcgaac

SEQ ID NO: 297855 - DNA, 50 bp, Artificial
  Synthetic oligonucleotide
aaaagtgctacgaatacattcaccgtccaaagttacaacagagcttggag

SEQ ID NO: 297856 - DNA, 54 bp, Artificial
  Synthetic oligonucleotide
aaaagtgctggattaagtgcctccaaggcagagcaggaagtttgcaacagcgct

SEQ ID NO: 297857 - DNA, 55 bp, Artificial
  Synthetic oligonucleotide
aaaagtggctttcaccaggtagcaatgcatccagattcaattgaatggacagctt

SEQ ID NO: 297858 - DNA, 58 bp, Artificial
  Synthetic oligonucleotide
aaaagtgtcagctagcctcaacctgtcctctctatgcttgttttcgtttccagtttca

SEQ ID NO: 297859 - DNA, 56 bp, Artificial
  Synthetic oligonucleotide
aaaagtgtctgaaacgtatgacctgtctacccagactgacaaaatgggattcgtcg

SEQ ID NO: 297860 - DNA, 57 bp, Artificial
  Synthetic oligonucleotide
aaaagtgtgcatttgtaacaatatggtatgctaatgaagaccaacgtgctaaatttt

SEQ ID NO: 297861 - DNA, 53 bp, Artificial
  Synthetic oligonucleotide
aaaagtgttgctatcattgcctagtttgctttcatcacaaaggcttaggcatc

SEQ ID NO: 297862 - DNA, 55 bp, Artificial
  Synthetic oligonucleotide
aaaagtgtttccatctaaaactgaccccactctacagtggcttgaagatcatgaa

SEQ ID NO: 297863 - DNA, 51 bp, Artificial
  Synthetic oligonucleotide
aaaagttaatacaattacccactttggtaaataattggacaccgataggta

SEQ ID NO: 297864 - DNA, 55 bp, Artificial
  Synthetic oligonucleotide
aaaagttatgttttggagattcgcgaatgcggagcttaccgtattcaagacggga

SEQ ID NO: 297865 - DNA, 50 bp, Artificial
  Synthetic oligonucleotide
aaaagttcaaacagtaccgggagctgaaacctcagacttgtactatatgt

SEQ ID NO: 297866 - DNA, 60 bp, Artificial
  Synthetic oligonucleotide
aaaagttgcccaataggttcatgtccatattgtctgaatcctgctgaagcaacaacatct

SEQ ID NO: 297867 - DNA, 55 bp, Artificial
  Synthetic oligonucleotide
aaaagttgctcgatataacgagccttcgatagaggttcccattgtttgacaccag

SEQ ID NO: 297868 - DNA, 53 bp, Artificial
  Synthetic oligonucleotide
aaaagttggcctccagcccattgaagctccctatgaaggagttcaagaagtat

SEQ ID NO: 297869 - DNA, 55 bp, Artificial
  Synthetic oligonucleotide
aaaagttggtgacagatgttcaaaacgctctcaaggagcggtgtttcccagccac

SEQ ID NO: 297870 - DNA, 51 bp, Artificial
  Synthetic oligonucleotide
aaaagttgtatgcacagagaaaccagggaatacattgaccattaggatatg

SEQ ID NO: 297871 - DNA, 54 bp, Artificial
  Synthetic oligonucleotide
aaaagttgttcccctaacggacacaacaaatcagaagactgaattacaagcaat

SEQ ID NO: 297872 - DNA, 53 bp, Artificial
  Synthetic oligonucleotide
aaaagttgttgtgacgggcagtgcccatattgtatgactttaacagaagccac

SEQ ID NO: 297873 - DNA, 52 bp, Artificial
  Synthetic oligonucleotide
aaaagtttaacatcgtatgcaaccacggcgttagacgcctggaatgatggga

SEQ ID NO: 297874 - DNA, 55 bp, Artificial
  Synthetic oligonucleotide
aaaagtttactactaatacaccacaccaagtcaccaccatacctgagggatactc

SEQ ID NO: 297875 - DNA, 57 bp, Artificial
  Synthetic oligonucleotide
aaaagtttataccgaagagatcgtacagaatagttgatgaggataccgcattcgaaa

SEQ ID NO: 297876 - DNA, 55 bp, Artificial
  Synthetic oligonucleotide
aaaagtttatatgatcctgaaaaggagaggttagtgtggggagtgagaggccttg

SEQ ID NO: 297877 - DNA, 53 bp, Artificial
  Synthetic oligonucleotide
aaaagtttgacaaaccacgtcgaatatagcgcccgatgagtcatcatgtaact

SEQ ID NO: 297878 - DNA, 53 bp, Artificial
  Synthetic oligonucleotide
aaaagtttgtccattgaacgttcaaacattgggtatcggttgccaaactacta

SEQ ID NO: 297879 - DNA, 55 bp, Artificial
  Synthetic oligonucleotide
aaaataaaacgacctgacaacatatgacacgaaacgacttggaaatacacaactc

SEQ ID NO: 297880 - DNA, 55 bp, Artificial
  Synthetic oligonucleotide
aaaataaaggtgacagctaccaccaacatttctgacaactcgggttgttgtttga

SEQ ID NO: 297881 - DNA, 56 bp, Artificial
  Synthetic oligonucleotide
aaaataacacgtcccgaccacacatgaaccgaaccaacctcaagcgatcatatcat

SEQ ID NO: 297882 - DNA, 57 bp, Artificial
  Synthetic oligonucleotide
aaaataaccgtccgcccactcttgcatctcatcgggaacgttagtgaatgacgagag

SEQ ID NO: 297883 - DNA, 53 bp, Artificial
  Synthetic oligonucleotide
aaaataacgcaatcgtcgcaaatacgagagaagtgcagcacataaaggacgag

SEQ ID NO: 297884 - DNA, 57 bp, Artificial
  Synthetic oligonucleotide
aaaataagaacacccgcattcaagatcgactctcctcctcctgttgcgtttcttcgc

SEQ ID NO: 297885 - DNA, 54 bp, Artificial
  Synthetic oligonucleotide
aaaataagactcataccaggaccaggcctattagcaacatctaccactgtaaat

SEQ ID NO: 297886 - DNA, 59 bp, Artificial
  Synthetic oligonucleotide
aaaataagagtacatgaggggtatgaagaattcacaatggttgggagaagagcaacagc

SEQ ID NO: 297887 - DNA, 57 bp, Artificial
  Synthetic oligonucleotide
aaaataagggtacacgtataaggtttaaggatgatacatcatttgaagacatcaatg

SEQ ID NO: 297888 - DNA, 55 bp, Artificial
  Synthetic oligonucleotide
aaaataaggtgcttgatctatcgcacatggcaccaaacacataacatcacgacgg

SEQ ID NO: 297889 - DNA, 60 bp, Artificial
  Synthetic oligonucleotide
aaaataatcatccgcccactcttgcatctcttctggcacattgacgaacgacgaaagact

SEQ ID NO: 297890 - DNA, 58 bp, Artificial
  Synthetic oligonucleotide
aaaataatgcattttcagctgagttaatctcctttgagtgcaaaatgggaaaattcga

SEQ ID NO: 297891 - DNA, 55 bp, Artificial
  Synthetic oligonucleotide
aaaataatggcctgtgttactttggatcgagatcaacagagctatgctctgatcc

SEQ ID NO: 297892 - DNA, 53 bp, Artificial
  Synthetic oligonucleotide
aaaatacaaccaactggcacggatcaattggaacgcatgaagtacgacgaaag

SEQ ID NO: 297893 - DNA, 58 bp, Artificial
  Synthetic oligonucleotide
aaaatacagacactctaatcgtctgtagattccatttacctaagctacctcagtgtcc

SEQ ID NO: 297894 - DNA, 51 bp, Artificial
  Synthetic oligonucleotide
aaaatacatgaaagggcattgcccgaatggcattaatggtgtctactttat

SEQ ID NO: 297895 - DNA, 60 bp, Artificial
  Synthetic oligonucleotide
aaaatacatgagaagtggctggggttggacaaactcagatggcaagactacttggtgcag

SEQ ID NO: 297896 - DNA, 50 bp, Artificial
  Synthetic oligonucleotide
aaaataccagaatcacatggcataagagccaggaaacattgtagagggcc

SEQ ID NO: 297897 - DNA, 56 bp, Artificial
  Synthetic oligonucleotide
aaaataccagtccaactgtgaatagcaccagttagccgggtcgtcacaatccggaa

SEQ ID NO: 297898 - DNA, 57 bp, Artificial
  Synthetic oligonucleotide
aaaataccagtccagctgtgagaagcaccagttagacgggtcgtcgatatccggaat

SEQ ID NO: 297899 - DNA, 56 bp, Artificial
  Synthetic oligonucleotide
aaaataccagtcgaattgtgaatagcaccagttagacgggtcgtcgagatccggaa

SEQ ID NO: 297900 - DNA, 59 bp, Artificial
  Synthetic oligonucleotide
aaaataccctttatctctgtgtctgataggcgcgtgatcagtggactgaaaaaaggtga

SEQ ID NO: 297901 - DNA, 60 bp, Artificial
  Synthetic oligonucleotide
aaaatacgaaggattctgtttatgcccagaatgagatgcttcagtataatcaacgtgagt

SEQ ID NO: 297902 - DNA, 53 bp, Artificial
  Synthetic oligonucleotide
aaaatacgaattacagagcgtcggcagctgtgaacgcgtcgcttttgtttcga

SEQ ID NO: 297903 - DNA, 55 bp, Artificial
  Synthetic oligonucleotide
aaaatacgcaccgcaaccttttgttttcttagaccccattattacatactcatca

SEQ ID NO: 297904 - DNA, 54 bp, Artificial
  Synthetic oligonucleotide
aaaatacggtggattaaacaaaagcaagccttactacacaggggaacatgcaaa

SEQ ID NO: 297905 - DNA, 59 bp, Artificial
  Synthetic oligonucleotide
aaaatactcgggtgtagagcgagaagtaatgaatagacgattgcgtatagcgaaaatga

SEQ ID NO: 297906 - DNA, 58 bp, Artificial
  Synthetic oligonucleotide
aaaatactctaagattgattccacctgtactaacccgcctatttgcaatgcaggatta

SEQ ID NO: 297907 - DNA, 57 bp, Artificial
  Synthetic oligonucleotide
aaaatactgaagcttctgcaccttaccttggaagaggatactgaaggcctgttagaa

SEQ ID NO: 297908 - DNA, 55 bp, Artificial
  Synthetic oligonucleotide
aaaatacttcgaacaatggtgcctcccgaagaaatcgcctctgctagtaatcccg

SEQ ID NO: 297909 - DNA, 60 bp, Artificial
  Synthetic oligonucleotide
aaaatactttgacggttatgaccagcagagtgtggttataatggatgacatcatgcaaaa

SEQ ID NO: 297910 - DNA, 52 bp, Artificial
  Synthetic oligonucleotide
aaaatagacgaggtccgtctgcctatcgaggaacttattcacgtaaacatgg

SEQ ID NO: 297911 - DNA, 54 bp, Artificial
  Synthetic oligonucleotide
aaaatagaggagctgagagaacatctgctgagatggggattgaccacaccagac

SEQ ID NO: 297912 - DNA, 53 bp, Artificial
  Synthetic oligonucleotide
aaaatagaggagttaagggaacacttattgaaatggggacttaccacaccaga

SEQ ID NO: 297913 - DNA, 50 bp, Artificial
  Synthetic oligonucleotide
aaaatagagtacttcctctaagacacagaaaaaagacccttgtttctact

SEQ ID NO: 297914 - DNA, 55 bp, Artificial
  Synthetic oligonucleotide
aaaatagatgaaggtggggattggagacccatagtacaattcctaagatatcagg

SEQ ID NO: 297915 - DNA, 58 bp, Artificial
  Synthetic oligonucleotide
aaaatagcgtacaatacatagattcttatacattcaagtatcactttcgctactcctt

SEQ ID NO: 297916 - DNA, 55 bp, Artificial
  Synthetic oligonucleotide
aaaataggaccatggacgcccattgatttgacccatctgagttgtccaaacaacc

SEQ ID NO: 297917 - DNA, 55 bp, Artificial
  Synthetic oligonucleotide
aaaataggctctaggttttccactgcagagtactcagaacttacgaggaaattag

SEQ ID NO: 297918 - DNA, 56 bp, Artificial
  Synthetic oligonucleotide
aaaataggtcttcatcccacttttcattgaaggagctccaccaggcttcccactct

SEQ ID NO: 297919 - DNA, 60 bp, Artificial
  Synthetic oligonucleotide
aaaatagtgctattaatctgcttaatactatagcaatagcagtagctgagggaacagata

SEQ ID NO: 297920 - DNA, 54 bp, Artificial
  Synthetic oligonucleotide
aaaatatacggcaataatgcaacgggtaagactacgacagcaaccgcattacaa

SEQ ID NO: 297921 - DNA, 55 bp, Artificial
  Synthetic oligonucleotide
aaaatatcaagactaaaaatcacactaatagcgttatattgtttttggttcgaga

SEQ ID NO: 297922 - DNA, 54 bp, Artificial
  Synthetic oligonucleotide
aaaatatcgaatgaaacatttagtatgggcaagcagggagctggacagattcgc

SEQ ID NO: 297923 - DNA, 54 bp, Artificial
  Synthetic oligonucleotide
aaaatatggtgtagaaaccctagaactcatatattggtaagcctttctatcctt

SEQ ID NO: 297924 - DNA, 60 bp, Artificial
  Synthetic oligonucleotide
aaaatattctaccctgatgttcatgatgcagaactgcctagaatactagtcgatcacgaa

SEQ ID NO: 297925 - DNA, 56 bp, Artificial
  Synthetic oligonucleotide
aaaatattgttcatcgaagaggggaaaatcgtacatattagccaattgtcaggaag

SEQ ID NO: 297926 - DNA, 53 bp, Artificial
  Synthetic oligonucleotide
aaaatatttctgatcaaggagatccttaatgacattgacccattgcctgagcg

SEQ ID NO: 297927 - DNA, 60 bp, Artificial
  Synthetic oligonucleotide
aaaatcaatgaacaccacaccaggtgtatcatttatgccgcagcgtatcgtgcgatgact

SEQ ID NO: 297928 - DNA, 54 bp, Artificial
  Synthetic oligonucleotide
aaaatcacaaacgaatcccgtagcagattgagaaagatctgcgcccaatatttt

SEQ ID NO: 297929 - DNA, 59 bp, Artificial
  Synthetic oligonucleotide
aaaatcacaaactcagacagtcgtcaaagatagaaactatggcgttgaagcttacatct

SEQ ID NO: 297930 - DNA, 55 bp, Artificial
  Synthetic oligonucleotide
aaaatcacaactaggatttaccataaagctaaacatgttaaagtctggtgtccta

SEQ ID NO: 297931 - DNA, 55 bp, Artificial
  Synthetic oligonucleotide
aaaatcacagaggtggatgagtacatgaaagaggccgtagaccactacgcagggc

SEQ ID NO: 297932 - DNA, 55 bp, Artificial
  Synthetic oligonucleotide
aaaatcaccagtgatgattatgtgaatgcgatacttcacactagtgccactagag

SEQ ID NO: 297933 - DNA, 56 bp, Artificial
  Synthetic oligonucleotide
aaaatcaccatgtggggaaacaatagcggaaattctggagaagccgcacgtcggga

SEQ ID NO: 297934 - DNA, 55 bp, Artificial
  Synthetic oligonucleotide
aaaatcacggattgatagtggcaatgacagtatccacaaaggctgggatagcttc

SEQ ID NO: 297935 - DNA, 58 bp, Artificial
  Synthetic oligonucleotide
aaaatcactagttacctctgtagtggcacgcggcctcactagtgaagcccaagtgtac

SEQ ID NO: 297936 - DNA, 60 bp, Artificial
  Synthetic oligonucleotide
aaaatcagaaccctcggatgttcctggcgatgataacatacatcacaaggaatcagcctg

SEQ ID NO: 297937 - DNA, 60 bp, Artificial
  Synthetic oligonucleotide
aaaatcagaagcgtgccaattggaagagcattactgctccctgagtactctacattgtac

SEQ ID NO: 297938 - DNA, 59 bp, Artificial
  Synthetic oligonucleotide
aaaatcagaatcctcgaatgtttttagctatgattacatacataaccagaaatcagccc

SEQ ID NO: 297939 - DNA, 55 bp, Artificial
  Synthetic oligonucleotide
aaaatcagagtttaccaccgtgctaagcacgtcttggcatggattcccagacccc

SEQ ID NO: 297940 - DNA, 54 bp, Artificial
  Synthetic oligonucleotide
aaaatcagataaagacttatgggcgacaccttggtgggttttccattatgcaga

SEQ ID NO: 297941 - DNA, 59 bp, Artificial
  Synthetic oligonucleotide
aaaatcaggtatgacatattggggggattttacaaataagtgtaggcaatgcacatgtg

SEQ ID NO: 297942 - DNA, 59 bp, Artificial
  Synthetic oligonucleotide
aaaatcataatagtacagctcaatgagtctgtagcaattaactgtacaaggccctacag

SEQ ID NO: 297943 - DNA, 55 bp, Artificial
  Synthetic oligonucleotide
aaaatcataatagtacagcttacggaggctgtgacaattaattgtaccagacctg

SEQ ID NO: 297944 - DNA, 59 bp, Artificial
  Synthetic oligonucleotide
aaaatcatacggagaatgctctattattgtacatggcatgtactcatgcctctaaccct

SEQ ID NO: 297945 - DNA, 50 bp, Artificial
  Synthetic oligonucleotide
aaaatcatcactgggctcttctgttaaagattggacgccaggaatctgag

SEQ ID NO: 297946 - DNA, 51 bp, Artificial
  Synthetic oligonucleotide
aaaatcatttgcaccactactgtgccttgggatgctgcctggagtaataga

SEQ ID NO: 297947 - DNA, 55 bp, Artificial
  Synthetic oligonucleotide
aaaatccactggttttgaaataacatcagcagtggcctgctcacatggatcctgt

SEQ ID NO: 297948 - DNA, 55 bp, Artificial
  Synthetic oligonucleotide
aaaatccagggagcggaccggccttcactatcattaatggcactttgaaatattt

SEQ ID NO: 297949 - DNA, 60 bp, Artificial
  Synthetic oligonucleotide
aaaatccatcattgtagaccgtggactgattgtccagatcgtgcacttgtctacactata

SEQ ID NO: 297950 - DNA, 57 bp, Artificial
  Synthetic oligonucleotide
aaaatccatcttggatcaaagcttgggtcttttgccataatgagatttacgggtgaa

SEQ ID NO: 297951 - DNA, 54 bp, Artificial
  Synthetic oligonucleotide
aaaatcccagccacacaatgggctcttttgagttgatccaggcagtctcagagt

SEQ ID NO: 297952 - DNA, 54 bp, Artificial
  Synthetic oligonucleotide
aaaatccgcaaatatgaataacggctggttggccaggacattatttggtcaaaa

SEQ ID NO: 297953 - DNA, 54 bp, Artificial
  Synthetic oligonucleotide
aaaatccgtgggcaaaggaaggaaactatcacctagggctgcagcagggataag

SEQ ID NO: 297954 - DNA, 56 bp, Artificial
  Synthetic oligonucleotide
aaaatccgttttccgttacattgataatggttgcatgaatgtttatggttctttca

SEQ ID NO: 297955 - DNA, 51 bp, Artificial
  Synthetic oligonucleotide
aaaatcctagctcttatagtggccctcgggtgcctatgaagggcttctgct

SEQ ID NO: 297956 - DNA, 54 bp, Artificial
  Synthetic oligonucleotide
aaaatcctccgtgtcccagtggttcagtggaagctagaccgttcaccggttagc

SEQ ID NO: 297957 - DNA, 50 bp, Artificial
  Synthetic oligonucleotide
aaaatcctggatgcactcaaaggggatacctcgaatgcgtttactcgtcc

SEQ ID NO: 297958 - DNA, 50 bp, Artificial
  Synthetic oligonucleotide
aaaatcctggttcacgaatcgaaggtctccaactgtttcgtacacgtttg

SEQ ID NO: 297959 - DNA, 60 bp, Artificial
  Synthetic oligonucleotide
aaaatcctgtatggcaatgtatgacatgacataaccgcgtcagtgaatcgatgcatgtgc

SEQ ID NO: 297960 - DNA, 53 bp, Artificial
  Synthetic oligonucleotide
aaaatcgaacatgttcgggtgaagtgtaacgacgggaaatggtacggccacta

SEQ ID NO: 297961 - DNA, 53 bp, Artificial
  Synthetic oligonucleotide
aaaatcgaagcagaatccgattcagacgattatgtacttgacgattcagatag

SEQ ID NO: 297962 - DNA, 59 bp, Artificial
  Synthetic oligonucleotide
aaaatcgcggaaatcttgcaacgtatatgcgacgcacttgaacaatgatgtttggaggt

SEQ ID NO: 297963 - DNA, 51 bp, Artificial
  Synthetic oligonucleotide
aaaatcgcggtactgtgcataaactaatgacctcaatgctaaatgtgcaag

SEQ ID NO: 297964 - DNA, 54 bp, Artificial
  Synthetic oligonucleotide
aaaatcggtatctgcaagaccacacaagtcataacattgcggctctccagacgg

SEQ ID NO: 297965 - DNA, 58 bp, Artificial
  Synthetic oligonucleotide
aaaatcgtatcaatcttcgaggtagaccctacgctacatggtctttatgtagcttcga

SEQ ID NO: 297966 - DNA, 49 bp, Artificial
  Synthetic oligonucleotide
aaaatctaaaaccggggtgaccgaggcttggaccgacttctttacgaag

SEQ ID NO: 297967 - DNA, 51 bp, Artificial
  Synthetic oligonucleotide
aaaatctaccttccatgctgttccagttcacatatgggaccggcttatgct

SEQ ID NO: 297968 - DNA, 55 bp, Artificial
  Synthetic oligonucleotide
aaaatctatcaacaggatttggaggagctttggcaaggtttaccattgttggaaa

SEQ ID NO: 297969 - DNA, 51 bp, Artificial
  Synthetic oligonucleotide
aaaatctcctacgctaaccgataactctaccgaagccccttcggacccaac

SEQ ID NO: 297970 - DNA, 60 bp, Artificial
  Synthetic oligonucleotide
aaaatctcgtataatgaaagatcacacgtgcgagaatatatcagtgcttgaaggagcaaa

SEQ ID NO: 297971 - DNA, 60 bp, Artificial
  Synthetic oligonucleotide
aaaatctgccaggttcagtgttccctatttaggaattgcttcagcatacaactgcttcta

SEQ ID NO: 297972 - DNA, 55 bp, Artificial
  Synthetic oligonucleotide
aaaatctggtagcttggaatctggtttcgcccctttctccaatgagacttgcccg

SEQ ID NO: 297973 - DNA, 60 bp, Artificial
  Synthetic oligonucleotide
aaaatctgtcacccaaccggcaacagcttgctcatctatagactcagaggcaaactgaac

SEQ ID NO: 297974 - DNA, 57 bp, Artificial
  Synthetic oligonucleotide
aaaatctgtgttgataactattggtcagtcaaaagaaatcgaaactactgctactgc

SEQ ID NO: 297975 - DNA, 51 bp, Artificial
  Synthetic oligonucleotide
aaaatcttaacacccgctattctcttctccaggcgggtggcctctcatcct

SEQ ID NO: 297976 - DNA, 56 bp, Artificial
  Synthetic oligonucleotide
aaaatcttcgaaagtctgacaaataattcagtcccagaagaaacaatactcagaaa

SEQ ID NO: 297977 - DNA, 50 bp, Artificial
  Synthetic oligonucleotide
aaaatcttggactgttataccgggctcaaacctgatctagttgctgagat

SEQ ID NO: 297978 - DNA, 56 bp, Artificial
  Synthetic oligonucleotide
aaaatctttaacctgcaagtcatccagaaaacagtaacagatagcggtacccagta

SEQ ID NO: 297979 - DNA, 51 bp, Artificial
  Synthetic oligonucleotide
aaaatctttaggggctaattcccttattacattaagagcctccgacttact

SEQ ID NO: 297980 - DNA, 60 bp, Artificial
  Synthetic oligonucleotide
aaaatgaacataacgacaagttacacttacatgctatcagatggtattcacgtagccaat

SEQ ID NO: 297981 - DNA, 56 bp, Artificial
  Synthetic oligonucleotide
aaaatgaacgagagtccgcgccacggcttcaggttcagaacgtggcgccaaaggag

SEQ ID NO: 297982 - DNA, 55 bp, Artificial
  Synthetic oligonucleotide
aaaatgaatgagttgactacatacttctcaaaacgttttgttacctattggtata

SEQ ID NO: 297983 - DNA, 53 bp, Artificial
  Synthetic oligonucleotide
aaaatgacaaaagggaaatctaaaggtctgtctgaggaacaaaaggacaatct

SEQ ID NO: 297984 - DNA, 60 bp, Artificial
  Synthetic oligonucleotide
aaaatgacacacgatgttggattagttgatgccactgagcgagccatcgctgaagccatc

SEQ ID NO: 297985 - DNA, 53 bp, Artificial
  Synthetic oligonucleotide
aaaatgacagttctcagtaaacatagtccatggcaccccttggtaggcctttt

SEQ ID NO: 297986 - DNA, 54 bp, Artificial
  Synthetic oligonucleotide
aaaatgaccagtgggacgtaatcgggtgaaaattgagacataaagttttatggc

SEQ ID NO: 297987 - DNA, 53 bp, Artificial
  Synthetic oligonucleotide
aaaatgacgcagctgtgagagctaggcaagatgctgctatcgattctgaggaa

SEQ ID NO: 297988 - DNA, 51 bp, Artificial
  Synthetic oligonucleotide
aaaatgacggtagaattcatgtccatacacaaagcggtttcggcacacgac

SEQ ID NO: 297989 - DNA, 60 bp, Artificial
  Synthetic oligonucleotide
aaaatgaggattgtggccatgctctacacccccctcagatcaaatggttctggtgatgat

SEQ ID NO: 297990 - DNA, 58 bp, Artificial
  Synthetic oligonucleotide
aaaatgagtcggatcgatccacaaatggtgagggtccgaatattccgacgagtcagac

SEQ ID NO: 297991 - DNA, 56 bp, Artificial
  Synthetic oligonucleotide
aaaatgagttgtccaaggaagcctgaaccaacagaagaattccagatatgtaaccg

SEQ ID NO: 297992 - DNA, 60 bp, Artificial
  Synthetic oligonucleotide
aaaatgatccagttatgtcaattggtgactctgatggcagaaggggagctctcttttaca

SEQ ID NO: 297993 - DNA, 60 bp, Artificial
  Synthetic oligonucleotide
aaaatgatgaccaattcacacgacacagaactctctttcacaatcactggagataacacc

SEQ ID NO: 297994 - DNA, 58 bp, Artificial
  Synthetic oligonucleotide
aaaatgatgactaactcacaagacacagaactctcttttacaataactggagacaaca

SEQ ID NO: 297995 - DNA, 60 bp, Artificial
  Synthetic oligonucleotide
aaaatgatgatgtgcatcttagtgaaggtatgttgtctttggaaaatgcatccatcgagg

SEQ ID NO: 297996 - DNA, 52 bp, Artificial
  Synthetic oligonucleotide
aaaatgcaactgctagcttcatttacgatgggaggcttgtagacagcattgg

SEQ ID NO: 297997 - DNA, 55 bp, Artificial
  Synthetic oligonucleotide
aaaatgcacctagggtcaaaacttggcaatttcgctataatgagattctctgggg

SEQ ID NO: 297998 - DNA, 58 bp, Artificial
  Synthetic oligonucleotide
aaaatgcacgcactcgccattgatacgaacggggcgaagcctgttccgtatgaagtcg

SEQ ID NO: 297999 - DNA, 58 bp, Artificial
  Synthetic oligonucleotide
aaaatgcacttttactcgctacacgtctgaaatgttaccaaacactgaactacacaca

SEQ ID NO: 298000 - DNA, 60 bp, Artificial
  Synthetic oligonucleotide
aaaatgcagttggtagcagagtggacaggcatcgctgaatggaacccagaactcttaaat

SEQ ID NO: 298001 - DNA, 60 bp, Artificial
  Synthetic oligonucleotide
aaaatgcatagatcatcaggattatgtccagggtataaaagcttaagggctgcaagatct

SEQ ID NO: 298002 - DNA, 51 bp, Artificial
  Synthetic oligonucleotide
aaaatgccctcaggaagtggccaagtcccagtatactggcaatgccgatgg

SEQ ID NO: 298003 - DNA, 60 bp, Artificial
  Synthetic oligonucleotide
aaaatgcctcgattgtcaagaaatccaggtcattacataccgcacaaacagagcgcgcat

SEQ ID NO: 298004 - DNA, 54 bp, Artificial
  Synthetic oligonucleotide
aaaatgcgccctgaatggaatcgttggacacagttgtggaatgctatgctccat

SEQ ID NO: 298005 - DNA, 53 bp, Artificial
  Synthetic oligonucleotide
aaaatgcgtggtaaaaggttacctgcccctcctaatctgtggaacgggcacca

SEQ ID NO: 298006 - DNA, 60 bp, Artificial
  Synthetic oligonucleotide
aaaatgcgtgtctcaggataatgattcacctccttcaaccaatgactgggtgcgtacact

SEQ ID NO: 298007 - DNA, 56 bp, Artificial
  Synthetic oligonucleotide
aaaatgctacagacatgcaacagtagactatatacttacatacagcagaacaacac

SEQ ID NO: 298008 - DNA, 55 bp, Artificial
  Synthetic oligonucleotide
aaaatgctataagcacaacgtttccttacactggagaccccccttacagccatgg

SEQ ID NO: 298009 - DNA, 60 bp, Artificial
  Synthetic oligonucleotide
aaaatgctattgtattgagctatgcatttatatcaatgcatagcctagttgtggaaccat

SEQ ID NO: 298010 - DNA, 55 bp, Artificial
  Synthetic oligonucleotide
aaaatgcttccttgttacagcacagcaagaattccactgcccaatctaaatgagg

SEQ ID NO: 298011 - DNA, 59 bp, Artificial
  Synthetic oligonucleotide
aaaatgctttaggtagtggggatcgacgtcatcgatgacgttgtaccaagcatcattac

SEQ ID NO: 298012 - DNA, 53 bp, Artificial
  Synthetic oligonucleotide
aaaatggagaatcgacctcctacaaacgaggttcctcctccgcactgacagca

SEQ ID NO: 298013 - DNA, 60 bp, Artificial
  Synthetic oligonucleotide
aaaatggagtcctatctggtggacacctatcaaggcatcccttacacagcagctgttcaa

SEQ ID NO: 298014 - DNA, 55 bp, Artificial
  Synthetic oligonucleotide
aaaatggatactaagcctactgacccgactgggatcgaacctgatgatcatctca

SEQ ID NO: 298015 - DNA, 60 bp, Artificial
  Synthetic oligonucleotide
aaaatggatgctcatctcaagtgaactgaaatgttttgggaacactgctattgctaaatg

SEQ ID NO: 298016 - DNA, 58 bp, Artificial
  Synthetic oligonucleotide
aaaatggatgggaaggaatggtagacggctggtatggtttcagacaccagaactctga

SEQ ID NO: 298017 - DNA, 58 bp, Artificial
  Synthetic oligonucleotide
aaaatggatgtggtttatagttgcgatggttactacaaggccatgtctattgttggaa

SEQ ID NO: 298018 - DNA, 54 bp, Artificial
  Synthetic oligonucleotide
aaaatggattaaatttaccgcctagatccccaattctgccaacgaacattgaag

SEQ ID NO: 298019 - DNA, 53 bp, Artificial
  Synthetic oligonucleotide
aaaatggatttgacggcattctctccacaatagcccactccaactcagggcca

SEQ ID NO: 298020 - DNA, 48 bp, Artificial
  Synthetic oligonucleotide
aaaatggcgccgtagcggggggggaacccccccgcaccccccatgcgg

SEQ ID NO: 298021 - DNA, 60 bp, Artificial
  Synthetic oligonucleotide
aaaatggcttgtccaatactgcaaagagagacatgtcgtagacagccacatcagaacgat

SEQ ID NO: 298022 - DNA, 53 bp, Artificial
  Synthetic oligonucleotide
aaaatgggagaacattggacttacacgacgcaaatgtcaggaacttacacgat

SEQ ID NO: 298023 - DNA, 52 bp, Artificial
  Synthetic oligonucleotide
aaaatgggagcgcagcggaaaaaaacaccaactaacccattcaaacgagaaa

SEQ ID NO: 298024 - DNA, 54 bp, Artificial
  Synthetic oligonucleotide
aaaatgggatatgttatccaggagtactgaaagagacggaggagctgaaagcac

SEQ ID NO: 298025 - DNA, 51 bp, Artificial
  Synthetic oligonucleotide
aaaatgggcataggggaatagcttcttcgttacgtggaggaccgcatagaa

SEQ ID NO: 298026 - DNA, 51 bp, Artificial
  Synthetic oligonucleotide
aaaatgggtagagaagtttacggggatgacgacaccatagaacactacttc

SEQ ID NO: 298027 - DNA, 54 bp, Artificial
  Synthetic oligonucleotide
aaaatgggtgaaacagtcctggaggtagaagaagaaatgcagtagacccaattt

SEQ ID NO: 298028 - DNA, 55 bp, Artificial
  Synthetic oligonucleotide
aaaatggtattggagaaaattggttttggtgatagagtagattacattgattacc

SEQ ID NO: 298029 - DNA, 51 bp, Artificial
  Synthetic oligonucleotide
aaaatggtctgctcgagatttgttaccaaaattcataataagcattgcaac

SEQ ID NO: 298030 - DNA, 52 bp, Artificial
  Synthetic oligonucleotide
aaaatggtggcaagtattctatactgtagtcgattacattaatcagatagta

SEQ ID NO: 298031 - DNA, 58 bp, Artificial
  Synthetic oligonucleotide
aaaatggttagcgttggaccaatgctccagagtacgcggaagtactttgcacagacac

SEQ ID NO: 298032 - DNA, 57 bp, Artificial
  Synthetic oligonucleotide
aaaatgtaatcgtcgttaagacgttgagtgcttacaagcaatcaagacacgtatccc

SEQ ID NO: 298033 - DNA, 51 bp, Artificial
  Synthetic oligonucleotide
aaaatgtacaacgaggcccaggctccctttcctctcaacaggcgaatgcag

SEQ ID NO: 298034 - DNA, 59 bp, Artificial
  Synthetic oligonucleotide
aaaatgtatgtcgacatgttcacaaagcgtagacctactgaactacaacatttattgga

SEQ ID NO: 298035 - DNA, 53 bp, Artificial
  Synthetic oligonucleotide
aaaatgtcacaattaatcctggaccatttgcgcaaacaggttatgctccagtt

SEQ ID NO: 298036 - DNA, 56 bp, Artificial
  Synthetic oligonucleotide
aaaatgtcgtggacgtccagtacctctacggcgttgggtctgcagtggtatcttgg

SEQ ID NO: 298037 - DNA, 60 bp, Artificial
  Synthetic oligonucleotide
aaaatgtgacgataaatccaggcccttttgcacagactagatatgctacagttgattggg

SEQ ID NO: 298038 - DNA, 51 bp, Artificial
  Synthetic oligonucleotide
aaaatgtggggtgttggtgcggacccgattgtagttctacggtctgtagcg

SEQ ID NO: 298039 - DNA, 53 bp, Artificial
  Synthetic oligonucleotide
aaaatgtgtgtcaaccaaaatctcctccaccgagatcagagggagtagcccct

SEQ ID NO: 298040 - DNA, 51 bp, Artificial
  Synthetic oligonucleotide
aaaatgttcgaacaattaacgccagttaatgaacgggtagccatggaagtt

SEQ ID NO: 298041 - DNA, 57 bp, Artificial
  Synthetic oligonucleotide
aaaattacacactttacaacttggacatcaattcccactttggctgctcagtttcca

SEQ ID NO: 298042 - DNA, 56 bp, Artificial
  Synthetic oligonucleotide
aaaattacccgccagttagaacaagactcgcgccgatcaagttctcaaaagattgc

SEQ ID NO: 298043 - DNA, 58 bp, Artificial
  Synthetic oligonucleotide
aaaattaccctatagtgcaaaatgcacaagggcaaatggtacatcagcctgtttcacc

SEQ ID NO: 298044 - DNA, 51 bp, Artificial
  Synthetic oligonucleotide
aaaattagagcaggagctcctcgggcagttaatgtaaaacaaggacccaaa

SEQ ID NO: 298045 - DNA, 56 bp, Artificial
  Synthetic oligonucleotide
aaaattagcgcgccaagtgcgcgtgtggcgatgtggcgggtgtggcgggttttttc

SEQ ID NO: 298046 - DNA, 54 bp, Artificial
  Synthetic oligonucleotide
aaaattaggaccaagagaaaatgtagcggttatacaagtaggtggtgcaaacat

SEQ ID NO: 298047 - DNA, 58 bp, Artificial
  Synthetic oligonucleotide
aaaattagtaagctagtcattgcagagttgaaggaaggtggcatggatttttacgtgc

SEQ ID NO: 298048 - DNA, 60 bp, Artificial
  Synthetic oligonucleotide
aaaattatgccgaagcgttccatcgatacagtgtcgtcgttgccaatgtctataacacgc

SEQ ID NO: 298049 - DNA, 55 bp, Artificial
  Synthetic oligonucleotide
aaaattatgcttgtagccggtcatggttataacgatcctggagcagtaggaaacg

SEQ ID NO: 298050 - DNA, 54 bp, Artificial
  Synthetic oligonucleotide
aaaattatggcgaagcgagccggagatataatcatttccacacccgcctccaag

SEQ ID NO: 298051 - DNA, 52 bp, Artificial
  Synthetic oligonucleotide
aaaattcagaacaccgtatggagatcgaacccgtgtcgggttcgaaacaaca

SEQ ID NO: 298052 - DNA, 52 bp, Artificial
  Synthetic oligonucleotide
aaaattcagagatatccgtggattcatccctaaggagagtggtgagttgtct

SEQ ID NO: 298053 - DNA, 55 bp, Artificial
  Synthetic oligonucleotide
aaaattcagataattcctaggagttcttggtccaatcatgatgcctcatcaggag

SEQ ID NO: 298054 - DNA, 54 bp, Artificial
  Synthetic oligonucleotide
aaaattcccacccatgaaacgttagaagcttgacattaaagtacaataggtggc

SEQ ID NO: 298055 - DNA, 52 bp, Artificial
  Synthetic oligonucleotide
aaaattcccttatcacggcttgtcagacgagagaataatggaggcgttgaaa

SEQ ID NO: 298056 - DNA, 54 bp, Artificial
  Synthetic oligonucleotide
aaaattcgacagtttagttaaatgccatgaccactatctctgcagacactgtct

SEQ ID NO: 298057 - DNA, 55 bp, Artificial
  Synthetic oligonucleotide
aaaattctctacccacacaacgagctcatgactgcggctgcctcacagggtctga

SEQ ID NO: 298058 - DNA, 55 bp, Artificial
  Synthetic oligonucleotide
aaaattctggtacttggaacatgcaaagactggcgagactagtgtccccaagtgc

SEQ ID NO: 298059 - DNA, 51 bp, Artificial
  Synthetic oligonucleotide
aaaattcttggagatgggttttacaagagcacgtcgctatgctaatcattc

SEQ ID NO: 298060 - DNA, 54 bp, Artificial
  Synthetic oligonucleotide
aaaattgaaacaaatcacaaagactacaagaattaacgatcaagcaaacgaatt

SEQ ID NO: 298061 - DNA, 55 bp, Artificial
  Synthetic oligonucleotide
aaaattgaacaatctgttgcactcctcgaatcaacaccaactcactatagcatcc

SEQ ID NO: 298062 - DNA, 56 bp, Artificial
  Synthetic oligonucleotide
aaaattgaacctgaagaggaatcaagcgccttcaaagtgttttcagatgaacccta

SEQ ID NO: 298063 - DNA, 60 bp, Artificial
  Synthetic oligonucleotide
aaaattgacgccgatacttatgttggatcaaagatttattcacaagataaatatcgcata

SEQ ID NO: 298064 - DNA, 60 bp, Artificial
  Synthetic oligonucleotide
aaaattgagacagagctgtattgtatcagttgctggacatgctatcgatgttggcccgga

SEQ ID NO: 298065 - DNA, 50 bp, Artificial
  Synthetic oligonucleotide
aaaattgcatggcttgccgttatgcccgtacccggtttaccaacttcatt

SEQ ID NO: 298066 - DNA, 56 bp, Artificial
  Synthetic oligonucleotide
aaaattgcccagcaaggtactaagtatggtttgactataacaccaccagacaagtc

SEQ ID NO: 298067 - DNA, 58 bp, Artificial
  Synthetic oligonucleotide
aaaattgcccccttaatggtagcatacatgctagaaagagagttagtccgcaagacga

SEQ ID NO: 298068 - DNA, 50 bp, Artificial
  Synthetic oligonucleotide
aaaattgcctatcaacgcactgagcaattcgttactgcgtcatcacaatc

SEQ ID NO: 298069 - DNA, 53 bp, Artificial
  Synthetic oligonucleotide
aaaattgcgtaacagtaattttggaactaaatggagtcacgtgaccccttctg

SEQ ID NO: 298070 - DNA, 58 bp, Artificial
  Synthetic oligonucleotide
aaaattggcaataggactcagaaatgtcccacaagctcaagatcggggactctttgga

SEQ ID NO: 298071 - DNA, 59 bp, Artificial
  Synthetic oligonucleotide
aaaattggcacttctagggatattcttcagattactgcggtatggaaaatcataataga

SEQ ID NO: 298072 - DNA, 56 bp, Artificial
  Synthetic oligonucleotide
aaaattggcctataactctgacatataaaatagcccattcctttggcccagtatta

SEQ ID NO: 298073 - DNA, 58 bp, Artificial
  Synthetic oligonucleotide
aaaattggctgccataaaagctaagtctcctcgagctgtgcagttaagacaaggagct

SEQ ID NO: 298074 - DNA, 59 bp, Artificial
  Synthetic oligonucleotide
aaaattggtggatacgcgtgttaattacacaattatctatgatctcatgtttctacgag

SEQ ID NO: 298075 - DNA, 58 bp, Artificial
  Synthetic oligonucleotide
aaaattgtcactgaacagtctataagcttcaagcagttggtcgatagttttggtactg

SEQ ID NO: 298076 - DNA, 55 bp, Artificial
  Synthetic oligonucleotide
aaaattgtcgtacgaatagttgttactcttcaagtcgtccacgagcgtgatggtc

SEQ ID NO: 298077 - DNA, 59 bp, Artificial
  Synthetic oligonucleotide
aaaattgttaagtgcttcaattgtggcagagaggggcacatagccagaaattgtaaggc

SEQ ID NO: 298078 - DNA, 59 bp, Artificial
  Synthetic oligonucleotide
aaaatttcctaccattcaacacgtgatggatcacatcgactcagtggaagaacttcgga

SEQ ID NO: 298079 - DNA, 55 bp, Artificial
  Synthetic oligonucleotide
aaaatttcggcacatttaagcagcaactccaatcctacttgatggagttatgcct

SEQ ID NO: 298080 - DNA, 52 bp, Artificial
  Synthetic oligonucleotide
aaaatttctagtcgggaagatttttatccaaaagtattggtttcgatgagga

SEQ ID NO: 298081 - DNA, 50 bp, Artificial
  Synthetic oligonucleotide
aaaatttggagtctacgacgtgtgccttaagaaatggttggtgaaacctc

SEQ ID NO: 298082 - DNA, 52 bp, Artificial
  Synthetic oligonucleotide
aaaattttacggggagccgctgtggagagattacctctctagaagcgctgga

SEQ ID NO: 298083 - DNA, 55 bp, Artificial
  Synthetic oligonucleotide
aaaattttggtatgtcaaccacacactttcaggacaacactcattaccaaggtgc

SEQ ID NO: 298084 - DNA, 54 bp, Artificial
  Synthetic oligonucleotide
aaaatttttgatggaagaaattggcgtgaggtctagactggtgaacaacgggga

SEQ ID NO: 298085 - DNA, 52 bp, Artificial
  Synthetic oligonucleotide
aaacaaaacagatctggaaaacgttagtgggccgaatgattgggccgttgaa

SEQ ID NO: 298086 - DNA, 60 bp, Artificial
  Synthetic oligonucleotide
aaacaaaccatatcacctaatgaactaggcttaacatcagcacaagatgatggaccattg

SEQ ID NO: 298087 - DNA, 54 bp, Artificial
  Synthetic oligonucleotide
aaacaaacccgggagagccgtggagctagacctactcggctggtccgcggtata

SEQ ID NO: 298088 - DNA, 55 bp, Artificial
  Synthetic oligonucleotide
aaacaaaccctgggatgacaaccagatcattgttggagaaagacaactccgtaaa

SEQ ID NO: 298089 - DNA, 51 bp, Artificial
  Synthetic oligonucleotide
aaacaaacgaacaccggggccgcggatcgggtgcgcgctaccgcgagttta

SEQ ID NO: 298090 - DNA, 57 bp, Artificial
  Synthetic oligonucleotide
aaacaaagaaacatcccgcttattgtaacactgatttaggtgctccactggaactgc

SEQ ID NO: 298091 - DNA, 60 bp, Artificial
  Synthetic oligonucleotide
aaacaaagccgtcagctgtcgctcgcctgttgaagtcgcaattgaacaacattgaatctt

SEQ ID NO: 298092 - DNA, 53 bp, Artificial
  Synthetic oligonucleotide
aaacaaaggcttgcgtacagggtgtagatcaagcacattgtagcgtagagtct

SEQ ID NO: 298093 - DNA, 60 bp, Artificial
  Synthetic oligonucleotide
aaacaaagtggaaacgcttaagctagaaagctcctgcaatttcgatctgcacacaagcac

SEQ ID NO: 298094 - DNA, 50 bp, Artificial
  Synthetic oligonucleotide
aaacaaatcgaaatggctgacgatctatgatttatgatgagtgagtttgc

SEQ ID NO: 298095 - DNA, 54 bp, Artificial
  Synthetic oligonucleotide
aaacaaatcgttgatcgttctcgtagagctaatgagttgacgttctcaagagta

SEQ ID NO: 298096 - DNA, 60 bp, Artificial
  Synthetic oligonucleotide
aaacaaatgagtggtctacagtcatcgataagtgtatccacatttgcttaataaagaatg

SEQ ID NO: 298097 - DNA, 58 bp, Artificial
  Synthetic oligonucleotide
aaacaaattccgcacaaaagggagaactccttgcacttatctgtggactacgtgctgc

SEQ ID NO: 298098 - DNA, 56 bp, Artificial
  Synthetic oligonucleotide
aaacaacacaagtacctttacatatcccttccaacaagccaatcttccatccaaga

SEQ ID NO: 298099 - DNA, 59 bp, Artificial
  Synthetic oligonucleotide
aaacaacacagatcgctaagggtgtctggactgagctcagtatcccggtaagcctccaa

SEQ ID NO: 298100 - DNA, 55 bp, Artificial
  Synthetic oligonucleotide
aaacaacacgaacgagacacatgtgaacccctggatatgcgaagaaccaaagcac

SEQ ID NO: 298101 - DNA, 60 bp, Artificial
  Synthetic oligonucleotide
aaacaacataagcgttgatgttcggaaactatgcgctgagagagcgtgcagtactctacc

SEQ ID NO: 298102 - DNA, 54 bp, Artificial
  Synthetic oligonucleotide
aaacaacatacgctttcaaagtcgcccgtgatgtgttttggaaactcaataact

SEQ ID NO: 298103 - DNA, 55 bp, Artificial
  Synthetic oligonucleotide
aaacaacatactatgaagtagagggtggaatgccatcaggttgtgctggaaccag

SEQ ID NO: 298104 - DNA, 57 bp, Artificial
  Synthetic oligonucleotide
aaacaacattttgctgcaaagcatcctactgccagcggaaaaacacctggtaacagg

SEQ ID NO: 298105 - DNA, 60 bp, Artificial
  Synthetic oligonucleotide
aaacaaccattgagcaaagcttgtgtgagcaaaattgatggaggctacgtatatccatgt

SEQ ID NO: 298106 - DNA, 55 bp, Artificial
  Synthetic oligonucleotide
aaacaacgaagcctatcacaacgtacttatcaaaaccgatttgtcaatctatggc

SEQ ID NO: 298107 - DNA, 60 bp, Artificial
  Synthetic oligonucleotide
aaacaacgacagatctagcagtagtgattgcaagaatcctaacaatgataaagggaatca

SEQ ID NO: 298108 - DNA, 52 bp, Artificial
  Synthetic oligonucleotide
aaacaacgacttcaattgaccttgatacggacttttcgaaaacccaggtcca

SEQ ID NO: 298109 - DNA, 55 bp, Artificial
  Synthetic oligonucleotide
aaacaacgtgcgcgtaagaccgacgaagctcgggattactgtatgaaagagaaaa

SEQ ID NO: 298110 - DNA, 60 bp, Artificial
  Synthetic oligonucleotide
aaacaactccaagccagattacttgctgtagaaagatacctacaggatcagcagattcta

SEQ ID NO: 298111 - DNA, 58 bp, Artificial
  Synthetic oligonucleotide
aaacaagaggaaactctgaatatctagatgtgggtccgctcgaaaatgtaaccatgta

SEQ ID NO: 298112 - DNA, 56 bp, Artificial
  Synthetic oligonucleotide
aaacaagaggactatttggggctatagcaggctttatagaaggagggtggcaagga

SEQ ID NO: 298113 - DNA, 49 bp, Artificial
  Synthetic oligonucleotide
aaacaagagtatactattttaaggaagggaaaatactaaaatgggaacc

SEQ ID NO: 298114 - DNA, 60 bp, Artificial
  Synthetic oligonucleotide
aaacaagatcacttacggagcatgtcctaagtatgtcaaacagagcactctaaaactggc

SEQ ID NO: 298115 - DNA, 51 bp, Artificial
  Synthetic oligonucleotide
aaacaagatggaacatttgctggccacgtacgtgttggctggcggtgaggt

SEQ ID NO: 298116 - DNA, 51 bp, Artificial
  Synthetic oligonucleotide
aaacaagccggggacaattacccctacctagttgcctaccaggctacggtc

SEQ ID NO: 298117 - DNA, 56 bp, Artificial
  Synthetic oligonucleotide
aaacaaggccccactcgacctaagaggatgcaccatggagggttggatattgggga

SEQ ID NO: 298118 - DNA, 54 bp, Artificial
  Synthetic oligonucleotide
aaacaagggcccaaggaaccattcaaagattatgttgacaggttctataagacc

SEQ ID NO: 298119 - DNA, 57 bp, Artificial
  Synthetic oligonucleotide
aaacaaggtcgttctaatgtgcattcctgctgtcccatccttgatgttagggacggt

SEQ ID NO: 298120 - DNA, 59 bp, Artificial
  Synthetic oligonucleotide
aaacaaggttcctcccagtggctggcgggacaagcagcgtgtacattgaagtgctgcac

SEQ ID NO: 298121 - DNA, 55 bp, Artificial
  Synthetic oligonucleotide
aaacaagtacacgctaaacaaacagcaatagagtacgtacaaggcttctctacaa

SEQ ID NO: 298122 - DNA, 55 bp, Artificial
  Synthetic oligonucleotide
aaacaatatacgagtttatttattccgttatatgtgagagtagaaagttcgttga

SEQ ID NO: 298123 - DNA, 56 bp, Artificial
  Synthetic oligonucleotide
aaacaatcataaactttatagtggtcagataaatgatttagggacatttgggcaaa

SEQ ID NO: 298124 - DNA, 54 bp, Artificial
  Synthetic oligonucleotide
aaacaatccctaggacctctccttaacccttatctcgagcacttgtcaaagctt

SEQ ID NO: 298125 - DNA, 51 bp, Artificial
  Synthetic oligonucleotide
aaacaatcgggcggttgataatgcctagtgatacattatcttgcagataac

SEQ ID NO: 298126 - DNA, 60 bp, Artificial
  Synthetic oligonucleotide
aaacaatcttactaccacaagtagcagaaactaatggaattgtagcatgtatgccttatg

SEQ ID NO: 298127 - DNA, 57 bp, Artificial
  Synthetic oligonucleotide
aaacaatgacaattttgacaaactatacatctggggagttcaccacccgagcacaaa

SEQ ID NO: 298128 - DNA, 55 bp, Artificial
  Synthetic oligonucleotide
aaacaatgagcatatcttaaactcatttggagctgactacactcccaagcaacat

SEQ ID NO: 298129 - DNA, 59 bp, Artificial
  Synthetic oligonucleotide
aaacaatgcacctgtcgatcgtcattgatcggcggctgttgtttgacaaacccagcttt

SEQ ID NO: 298130 - DNA, 60 bp, Artificial
  Synthetic oligonucleotide
aaacaatgctagcaaatgtgacatctgttagacaagaatacgcgataccagttggaccag

SEQ ID NO: 298131 - DNA, 60 bp, Artificial
  Synthetic oligonucleotide
aaacaatgctatcaattgtaatcttgtttctgctcgtagcagagagctcttctcaaaact

SEQ ID NO: 298132 - DNA, 60 bp, Artificial
  Synthetic oligonucleotide
aaacaatggctcggttgctcactgcgattccgtacatgtctgttatggttgcggtgtccc

SEQ ID NO: 298133 - DNA, 50 bp, Artificial
  Synthetic oligonucleotide
aaacaatgtgtatatgccagcacgtatgatcttcaaaggtgttagggtag

SEQ ID NO: 298134 - DNA, 52 bp, Artificial
  Synthetic oligonucleotide
aaacaatgttgccgttaggatgggtatgcaatatgctacaaatttagctggt

SEQ ID NO: 298135 - DNA, 55 bp, Artificial
  Synthetic oligonucleotide
aaacaattgtgaagtcctttgacattagtggtactctgtacgttcagtctcccac

SEQ ID NO: 298136 - DNA, 55 bp, Artificial
  Synthetic oligonucleotide
aaacaatttgtgggacccctcacagtaaatgaaactagaagactaaaattgatca

SEQ ID NO: 298137 - DNA, 55 bp, Artificial
  Synthetic oligonucleotide
aaacacaagaccaatagtaggcaactctccaggttgtctaaggtcaagcacttct

SEQ ID NO: 298138 - DNA, 60 bp, Artificial
  Synthetic oligonucleotide
aaacacaaggactaaattgactaagaaatactagcataagcatgtctactgcaaagatgt

SEQ ID NO: 298139 - DNA, 55 bp, Artificial
  Synthetic oligonucleotide
aaacacaagggaaaatagttgcagcaaaggatgtaaggaacattggatacccaac

SEQ ID NO: 298140 - DNA, 60 bp, Artificial
  Synthetic oligonucleotide
aaacacaaggtgggctgtatcacatgtaactggggattggtatgctgctttacacaggta

SEQ ID NO: 298141 - DNA, 59 bp, Artificial
  Synthetic oligonucleotide
aaacacaataactctgtcaacttcaacggagtttctcattagaggtgctgtaggatctg

SEQ ID NO: 298142 - DNA, 57 bp, Artificial
  Synthetic oligonucleotide
aaacacaatctcgttttacccaccaagaccatcgctattaatgtacttcgatgatcc

SEQ ID NO: 298143 - DNA, 60 bp, Artificial
  Synthetic oligonucleotide
aaacacaatggacatgtatagagtcgagttgagcgacacggctcactctgacacgccgat

SEQ ID NO: 298144 - DNA, 55 bp, Artificial
  Synthetic oligonucleotide
aaacacacatcgaggaatgtaatacctgtcctctctcagatcagtggacggacag

SEQ ID NO: 298145 - DNA, 55 bp, Artificial
  Synthetic oligonucleotide
aaacacacgacgcacgcgatgcattactcacagctctacagaacgcaggttacac

SEQ ID NO: 298146 - DNA, 59 bp, Artificial
  Synthetic oligonucleotide
aaacacacgtccaactcagtttgcctgttctacaggttagagacgtgctagtgcgtggc

SEQ ID NO: 298147 - DNA, 56 bp, Artificial
  Synthetic oligonucleotide
aaacacagaagattgtgaaacccgttgtagagaccgaatggcatcgtaacaataaa

SEQ ID NO: 298148 - DNA, 54 bp, Artificial
  Synthetic oligonucleotide
aaacacagaggtgacatcaaaaacttgggccccagtgatatgtttgttcacacc

SEQ ID NO: 298149 - DNA, 56 bp, Artificial
  Synthetic oligonucleotide
aaacacagccggcatccttcgtgggggagcgaagacaaacacccgctgcaaaacga

SEQ ID NO: 298150 - DNA, 60 bp, Artificial
  Synthetic oligonucleotide
aaacacagtggggggacatcaagcagccatgcaaatgttaaaagagaccatcaatgatga

SEQ ID NO: 298151 - DNA, 58 bp, Artificial
  Synthetic oligonucleotide
aaacacagttccttactggtatatctaccttagcaattaagctagatttatcaccaca

SEQ ID NO: 298152 - DNA, 55 bp, Artificial
  Synthetic oligonucleotide
aaacacatatctactgtcttgctgatgatgtcgtgtaagtcctctcgtgtgaagt

SEQ ID NO: 298153 - DNA, 50 bp, Artificial
  Synthetic oligonucleotide
aaacacatcctcacactttgtctctactgcatactcagtaattaatttcc

SEQ ID NO: 298154 - DNA, 55 bp, Artificial
  Synthetic oligonucleotide
aaacacatgtatccctggtctagaaactttgtacgttgaacgtgagaaatgggaa

SEQ ID NO: 298155 - DNA, 52 bp, Artificial
  Synthetic oligonucleotide
aaacaccaaaattcagattacctgttcaaaaggaggtctgggaaacctggtg

SEQ ID NO: 298156 - DNA, 55 bp, Artificial
  Synthetic oligonucleotide
aaacaccaaactccgagaatggaacatgttacccagggtatttcgccgactatga

SEQ ID NO: 298157 - DNA, 57 bp, Artificial
  Synthetic oligonucleotide
aaacaccaacaaaacattccagaacatagagagaaatgcacttggaaattgccccaa

SEQ ID NO: 298158 - DNA, 53 bp, Artificial
  Synthetic oligonucleotide
aaacaccagagcttaggggtgaaagtcatgtcgtcattcgtcaagcgttatgg

SEQ ID NO: 298159 - DNA, 56 bp, Artificial
  Synthetic oligonucleotide
aaacaccaggagaagccaaaaggacccgaccagcacacggcacaggaggcaaaagc

SEQ ID NO: 298160 - DNA, 60 bp, Artificial
  Synthetic oligonucleotide
aaacaccctataaagtgactgcagctgataagagtgagcagattgactggcgcgatatca

SEQ ID NO: 298161 - DNA, 52 bp, Artificial
  Synthetic oligonucleotide
aaacaccctggagagtgaccttccctggtactttggattccgtatttggttc

SEQ ID NO: 298162 - DNA, 58 bp, Artificial
  Synthetic oligonucleotide
aaacaccgctgaatattatttgaatcctatcatagcaaccgacttatccaaaatgatt

SEQ ID NO: 298163 - DNA, 54 bp, Artificial
  Synthetic oligonucleotide
aaacaccggccaccgaggtaaccacaccggccgatgagtccgcataccctgacg

SEQ ID NO: 298164 - DNA, 56 bp, Artificial
  Synthetic oligonucleotide
aaacaccgtattgaacctgtatgcttaattgttagaggtgctcctggaactgggaa

SEQ ID NO: 298165 - DNA, 57 bp, Artificial
  Synthetic oligonucleotide
aaacaccgttaactcctgtttggaatgacaatgcccatggtgttggttctgtgccta

SEQ ID NO: 298166 - DNA, 55 bp, Artificial
  Synthetic oligonucleotide
aaacaccttaccagtttcaaacgagaacttggaacactcattgacgccgtgaaca

SEQ ID NO: 298167 - DNA, 59 bp, Artificial
  Synthetic oligonucleotide
aaacacgaacacgtcagtataccttacacgatctctgttcagacctagatgctactccg

SEQ ID NO: 298168 - DNA, 52 bp, Artificial
  Synthetic oligonucleotide
aaacacgagtattctcaaatggaccaatggacttctcaattgcgtttcgaat

SEQ ID NO: 298169 - DNA, 51 bp, Artificial
  Synthetic oligonucleotide
aaacacgcccccggaccccgtataaggccgatgggtgcctcggacttcctc

SEQ ID NO: 298170 - DNA, 55 bp, Artificial
  Synthetic oligonucleotide
aaacacggaagtatcctcaaccacgtaactggtcacgtggtgcgcacgtcacggc

SEQ ID NO: 298171 - DNA, 56 bp, Artificial
  Synthetic oligonucleotide
aaacacggcagccttaagcaacaaggtccttgcagaatataaagtccctggcgaaa

SEQ ID NO: 298172 - DNA, 60 bp, Artificial
  Synthetic oligonucleotide
aaacacgtcgtttcaattggtgatgctcgccaggattgcttagtattgtgctcaccaccg

SEQ ID NO: 298173 - DNA, 57 bp, Artificial
  Synthetic oligonucleotide
aaacactaagagataacaccccaatggtggtcccaatacagaatggaatcgatagat

SEQ ID NO: 298174 - DNA, 55 bp, Artificial
  Synthetic oligonucleotide
aaacactacaaagtattctcagtttcccagtaactttgatcagttcgatagggtc

SEQ ID NO: 298175 - DNA, 50 bp, Artificial
  Synthetic oligonucleotide
aaacactatagtcttcattacatcctattatggatttgaacaactcttgt

SEQ ID NO: 298176 - DNA, 58 bp, Artificial
  Synthetic oligonucleotide
aaacactatagtggtaaatatcccagatagatcatggggagcttttcgaggatggagt

SEQ ID NO: 298177 - DNA, 59 bp, Artificial
  Synthetic oligonucleotide
aaacactcaaacggcaccactcatgatagaattcctcatagaacccttttaatgagtga

SEQ ID NO: 298178 - DNA, 55 bp, Artificial
  Synthetic oligonucleotide
aaacactgcacgacatgagggaaaaaatgtatgcgaagcagttacacaattcatg

SEQ ID NO: 298179 - DNA, 50 bp, Artificial
  Synthetic oligonucleotide
aaacactgttggattacccaaaaatactacgtactctatgggacatttgg

SEQ ID NO: 298180 - DNA, 59 bp, Artificial
  Synthetic oligonucleotide
aaacactgtttctagcccaactgtcaactcttgggctctgcaacatcttgggcgtctcc

SEQ ID NO: 298181 - DNA, 60 bp, Artificial
  Synthetic oligonucleotide
aaacacttacgcaccgagtcaaggaggaagacatgagctcttttccgtcgcatcatccac

SEQ ID NO: 298182 - DNA, 55 bp, Artificial
  Synthetic oligonucleotide
aaacacttagcttgcaatgtgggtgtatgcctggataagtcgtatggatgctggc

SEQ ID NO: 298183 - DNA, 54 bp, Artificial
  Synthetic oligonucleotide
aaacacttcgactacgttgactgggacgcgggatcgcgtgaaccctgttcaggg

SEQ ID NO: 298184 - DNA, 59 bp, Artificial
  Synthetic oligonucleotide
aaacacttgatctgatcagttaatctatctggtgtctcctttgtcacaaaatgacacag

SEQ ID NO: 298185 - DNA, 54 bp, Artificial
  Synthetic oligonucleotide
aaacacttgggcagctcggttaaggttaggcacttggcagggattaaacacttg

SEQ ID NO: 298186 - DNA, 54 bp, Artificial
  Synthetic oligonucleotide
aaacagaaacgccccacctcccggcatctaactatgagatcccgcgttacacac

SEQ ID NO: 298187 - DNA, 58 bp, Artificial
  Synthetic oligonucleotide
aaacagaacgttccaaaacatcgataagaatgctcttggtgactgtcccaaatacata

SEQ ID NO: 298188 - DNA, 53 bp, Artificial
  Synthetic oligonucleotide
aaacagaagttatcccaatcccgaaatacggacatttccacatacttcaccct

SEQ ID NO: 298189 - DNA, 60 bp, Artificial
  Synthetic oligonucleotide
aaacagacagtccctaagcctgcacaaaaaccagcaaggcgacaagcaacgctgagcaag

SEQ ID NO: 298190 - DNA, 55 bp, Artificial
  Synthetic oligonucleotide
aaacagacattccgtactcgttgttaagccactacccgttagccattcgtacaga

SEQ ID NO: 298191 - DNA, 54 bp, Artificial
  Synthetic oligonucleotide
aaacagactagagtttaagctaactaacactcagttgagccgggacaagcctat

SEQ ID NO: 298192 - DNA, 57 bp, Artificial
  Synthetic oligonucleotide
aaacagagagttgcatgagggaaggaggagctttatgtgcccatggaagaaacgtgg

SEQ ID NO: 298193 - DNA, 55 bp, Artificial
  Synthetic oligonucleotide
aaacagaggttattggaataactagcatgcttaaccttcatgcagggtcccaaaa

SEQ ID NO: 298194 - DNA, 59 bp, Artificial
  Synthetic oligonucleotide
aaacagagttcatagatgtttgcccactcaacaagatctcgtttttgaagcgcaccttg

SEQ ID NO: 298195 - DNA, 55 bp, Artificial
  Synthetic oligonucleotide
aaacagattggttcgctggtaatgagtggtgtgagggtggttattcctgatcccc

SEQ ID NO: 298196 - DNA, 60 bp, Artificial
  Synthetic oligonucleotide
aaacagcacaattgtcttccacatcaaacgagattgatcatgagtattgcagttccattg

SEQ ID NO: 298197 - DNA, 60 bp, Artificial
  Synthetic oligonucleotide
aaacagcacatagtaatgacctcatgaaattggcaggtgctacgcagaaggtaggaagag

SEQ ID NO: 298198 - DNA, 60 bp, Artificial
  Synthetic oligonucleotide
aaacagcagacaggatgatacatctgcattatttcacatgttttacagaatcagcaatca

SEQ ID NO: 298199 - DNA, 54 bp, Artificial
  Synthetic oligonucleotide
aaacagcagggtacgggaaaaatacaggaagtgccttccaacgccaccgcaaca

SEQ ID NO: 298200 - DNA, 60 bp, Artificial
  Synthetic oligonucleotide
aaacagcatagcattagcataatgtaagctgtgatacttatagtggtctacaataacttt

SEQ ID NO: 298201 - DNA, 54 bp, Artificial
  Synthetic oligonucleotide
aaacagcgaaaagtgagatacggtactgtttagtcgaattggtctttgggtgta

SEQ ID NO: 298202 - DNA, 60 bp, Artificial
  Synthetic oligonucleotide
aaacagcgaagtagcgatgataatagactggcatacttcctcctaggactccttagcttg

SEQ ID NO: 298203 - DNA, 58 bp, Artificial
  Synthetic oligonucleotide
aaacagcgaccacaactataacagatattcgtgtaccctctgcaacctttgcaaactc

SEQ ID NO: 298204 - DNA, 53 bp, Artificial
  Synthetic oligonucleotide
aaacagcgcgctgggctacactaccgagtacatttgcggtattcaatacttgg

SEQ ID NO: 298205 - DNA, 52 bp, Artificial
  Synthetic oligonucleotide
aaacagctttgctataaaatggggagtaactggtcaaaaagaagcctagggg

SEQ ID NO: 298206 - DNA, 60 bp, Artificial
  Synthetic oligonucleotide
aaacaggaagatccgtgctagaacatggcaaggccagagttcgtgctttggagactcggc

SEQ ID NO: 298207 - DNA, 55 bp, Artificial
  Synthetic oligonucleotide
aaacaggaggacggacgtcatgcccgtcgacaggtggactctcaacggtcccctc

SEQ ID NO: 298208 - DNA, 51 bp, Artificial
  Synthetic oligonucleotide
aaacaggatgggcctacacgcatcaaggtgggatcagctctgtagaccacg

SEQ ID NO: 298209 - DNA, 55 bp, Artificial
  Synthetic oligonucleotide
aaacaggcagttctcctcaacgtgttaggtacaggcgaagaattaccagacccac

SEQ ID NO: 298210 - DNA, 54 bp, Artificial
  Synthetic oligonucleotide
aaacaggcatgttgttaactggggctaacgctaagggcatggacctcggaactt

SEQ ID NO: 298211 - DNA, 55 bp, Artificial
  Synthetic oligonucleotide
aaacaggctctaggtgcaataaagacgtcattccctattagatggtcctctgtcc

SEQ ID NO: 298212 - DNA, 56 bp, Artificial
  Synthetic oligonucleotide
aaacaggctttgtacctcgaatcaacagaacgtacggatgaggagacgaaaatgat

SEQ ID NO: 298213 - DNA, 52 bp, Artificial
  Synthetic oligonucleotide
aaacagggaggttgcgctgagcgcttgacaatgaggtttagatccgggctaa

SEQ ID NO: 298214 - DNA, 58 bp, Artificial
  Synthetic oligonucleotide
aaacagggctctctgaaacttgcaacaggaatgaggaacattcctgaaaaggcatcaa

SEQ ID NO: 298215 - DNA, 60 bp, Artificial
  Synthetic oligonucleotide
aaacaggggtggtgatgagaatccacgtggccctgtgagccgtgagcatgtggactggtg

SEQ ID NO: 298216 - DNA, 53 bp, Artificial
  Synthetic oligonucleotide
aaacaggtaaaagctggcaaccgttccggccacgcgttcacctccctctttgc

SEQ ID NO: 298217 - DNA, 55 bp, Artificial
  Synthetic oligonucleotide
aaacaggtaccttctcttacacatcaagatactaagaaagacaaggtggaggaac

SEQ ID NO: 298218 - DNA, 59 bp, Artificial
  Synthetic oligonucleotide
aaacaggtagtaaggtcatggatgagaggaggatcgggaatctatgcacctcctatcag

SEQ ID NO: 298219 - DNA, 53 bp, Artificial
  Synthetic oligonucleotide
aaacaggtagttgttgataatttaaactggtcgggatacagtgggtctttcac

SEQ ID NO: 298220 - DNA, 59 bp, Artificial
  Synthetic oligonucleotide
aaacagtagagtcattggtctaagcaatgggttgtaatcgattccataatcgatagtcg

SEQ ID NO: 298221 - DNA, 59 bp, Artificial
  Synthetic oligonucleotide
aaacagtagccactttgcaattttctctaatgtctgagttatgaagaacaaataatcca

SEQ ID NO: 298222 - DNA, 52 bp, Artificial
  Synthetic oligonucleotide
aaacagtcagaggccgtaaacaccttgtcactaaaagagcacttagtaaagg

SEQ ID NO: 298223 - DNA, 58 bp, Artificial
  Synthetic oligonucleotide
aaacagtcaggtattcagcctcattcgaccaaatgagaatccagcacataagagccaa

SEQ ID NO: 298224 - DNA, 55 bp, Artificial
  Synthetic oligonucleotide
aaacagtcctgactcgataatcgacctctccactgacgacgggtaaaactcgtag

SEQ ID NO: 298225 - DNA, 51 bp, Artificial
  Synthetic oligonucleotide
aaacagtctctaccgaagctagtgcagccgatcgtaatgatcgagaaaaat

SEQ ID NO: 298226 - DNA, 60 bp, Artificial
  Synthetic oligonucleotide
aaacagtgaagctacgggtttttgagccatcacaatgagttctcaagaagacaacatatc

SEQ ID NO: 298227 - DNA, 56 bp, Artificial
  Synthetic oligonucleotide
aaacagtggaaacctagccatagcttacatggatgtgtttcgacccaaagtaccca

SEQ ID NO: 298228 - DNA, 57 bp, Artificial
  Synthetic oligonucleotide
aaacagtgggaattgtaatgaaacaatcattagggaatacaatgagacagtaaggat

SEQ ID NO: 298229 - DNA, 52 bp, Artificial
  Synthetic oligonucleotide
aaacagtggttagcggggctaaggtaggacgtaggacatgttttgtcctacc

SEQ ID NO: 298230 - DNA, 54 bp, Artificial
  Synthetic oligonucleotide
aaacagtgtctaaaaattacagtttcaaatccacaagaagtacaaatttcagcc

SEQ ID NO: 298231 - DNA, 58 bp, Artificial
  Synthetic oligonucleotide
aaacagttacaaatgtttattattggctgtacaccatgtataggtgaacattgggaca

SEQ ID NO: 298232 - DNA, 60 bp, Artificial
  Synthetic oligonucleotide
aaacagttacatcagacattgagcgtagtatacgtgatttacaggatcagataaattcaa

SEQ ID NO: 298233 - DNA, 55 bp, Artificial
  Synthetic oligonucleotide
aaacagttagttgacaacttcggtactggtgcgaatagtgatgtgactgccttcg

SEQ ID NO: 298234 - DNA, 50 bp, Artificial
  Synthetic oligonucleotide
aaacagttattaacagaagaacaatgctatgttaatcttcctgattgtgt

SEQ ID NO: 298235 - DNA, 51 bp, Artificial
  Synthetic oligonucleotide
aaacataaacgtgtggtgaacgtcggacctagaaatgagtcaatgttcacg

SEQ ID NO: 298236 - DNA, 57 bp, Artificial
  Synthetic oligonucleotide
aaacataagggacgccgacatggcaagacttctgacctcccgtatatgggggaagca

SEQ ID NO: 298237 - DNA, 59 bp, Artificial
  Synthetic oligonucleotide
aaacatacacgagaatacgctgagttttattcgcaatctaatcaattactttcatatgg

SEQ ID NO: 298238 - DNA, 58 bp, Artificial
  Synthetic oligonucleotide
aaacatacagtgacggccgattgattccccaagtgagagtaattgatccaggattcgg

SEQ ID NO: 298239 - DNA, 60 bp, Artificial
  Synthetic oligonucleotide
aaacatactacggacacaagaatctgaatgcgtatgccacaacggtgtctgcccagtagt

SEQ ID NO: 298240 - DNA, 58 bp, Artificial
  Synthetic oligonucleotide
aaacatactcacggctctttgcgactttcttaatcattctcggacaactggtgcacgg

SEQ ID NO: 298241 - DNA, 53 bp, Artificial
  Synthetic oligonucleotide
aaacatactttacgtccaaaaaatccttaataactatcggtattgataatcca

SEQ ID NO: 298242 - DNA, 55 bp, Artificial
  Synthetic oligonucleotide
aaacatagggcgccatgtcaaattaggtttccaccattaatgttaacgtccaaca

SEQ ID NO: 298243 - DNA, 51 bp, Artificial
  Synthetic oligonucleotide
aaacataggtaattccgtaaatattagtagtttgcctggttgggtaacacc

SEQ ID NO: 298244 - DNA, 58 bp, Artificial
  Synthetic oligonucleotide
aaacataggtgacattttaacaaatggtgcaccgttatatatttctgatacaagttga

SEQ ID NO: 298245 - DNA, 60 bp, Artificial
  Synthetic oligonucleotide
aaacatagtatccccggacatcttgctcatcagtcttgatgtagtgcacttcactttgtc

SEQ ID NO: 298246 - DNA, 58 bp, Artificial
  Synthetic oligonucleotide
aaacatatagtatgggcaagcagggaactagaaagatttgcagtcaatcctggccttt

SEQ ID NO: 298247 - DNA, 57 bp, Artificial
  Synthetic oligonucleotide
aaacatatcgtatgggcaagcagggagctggaaagattcgcacttaaccctagcctt

SEQ ID NO: 298248 - DNA, 59 bp, Artificial
  Synthetic oligonucleotide
aaacatatggtctaaaagcaatgacgggatggacttggtcagatacttcgggtgcagaa

SEQ ID NO: 298249 - DNA, 59 bp, Artificial
  Synthetic oligonucleotide
aaacatcaagtagtctgaatagtggtggagacattgatgtagtttttcacaaactccga

SEQ ID NO: 298250 - DNA, 60 bp, Artificial
  Synthetic oligonucleotide
aaacatcacagtcagaattcccattgcagacattttgatcaagatctaagttagaggata

SEQ ID NO: 298251 - DNA, 60 bp, Artificial
  Synthetic oligonucleotide
aaacatcactagtgcagtccagactgagaggaacatcaatagggcgatgactattttgca

SEQ ID NO: 298252 - DNA, 60 bp, Artificial
  Synthetic oligonucleotide
aaacatcactatacgtgtgaatgccaacttgagtctttctgggctcacgggagcgacaaa

SEQ ID NO: 298253 - DNA, 60 bp, Artificial
  Synthetic oligonucleotide
aaacatcatggagcgcaacagacacatcgatcgcaccagctacaccgagcacattgagtc

SEQ ID NO: 298254 - DNA, 55 bp, Artificial
  Synthetic oligonucleotide
aaacatccggagtactacaaagactgctgacagcgagttttctaagggactttcc

SEQ ID NO: 298255 - DNA, 57 bp, Artificial
  Synthetic oligonucleotide
aaacatcctggttcgctaggtttgtcctcgccttaatctctactgatagcgaatacc

SEQ ID NO: 298256 - DNA, 50 bp, Artificial
  Synthetic oligonucleotide
aaacatcgacgcgccgacgtcaaccgatacgccatatctggcaagttaca

SEQ ID NO: 298257 - DNA, 55 bp, Artificial
  Synthetic oligonucleotide
aaacatcgagatcaccacaagtggaacacctagcaagaagcacttcatagtcgca

SEQ ID NO: 298258 - DNA, 60 bp, Artificial
  Synthetic oligonucleotide
aaacatcgcattcagatgaatacagctagttgtaagttgaagaattgtatcaaaggtgaa

SEQ ID NO: 298259 - DNA, 56 bp, Artificial
  Synthetic oligonucleotide
aaacatcggggacccagggacgacagcatttgccgaggtgaaaaggctcgaagcag

SEQ ID NO: 298260 - DNA, 51 bp, Artificial
  Synthetic oligonucleotide
aaacatcttcaattgaaggggcttggggttctggtgtaggctttacactta

SEQ ID NO: 298261 - DNA, 52 bp, Artificial
  Synthetic oligonucleotide
aaacatgaaggggttgctataacaaacgcaggaccggtccccattaacctac

SEQ ID NO: 298262 - DNA, 55 bp, Artificial
  Synthetic oligonucleotide
aaacatgacgggcgatcgggatgttctacaacagggcccacacaacaacccggtg

SEQ ID NO: 298263 - DNA, 60 bp, Artificial
  Synthetic oligonucleotide
aaacatgcaagcaggcaggcacatgtccgcctgatgtgatacccaaaatagagcagacga

SEQ ID NO: 298264 - DNA, 60 bp, Artificial
  Synthetic oligonucleotide
aaacatgcaatcaaagcgtcattacttatgaaaacaacacttgggtaaatcagacatatg

SEQ ID NO: 298265 - DNA, 56 bp, Artificial
  Synthetic oligonucleotide
aaacatgcacactcttttgggtatgggcccacagcagtaaaggctaagtaaattgg

SEQ ID NO: 298266 - DNA, 51 bp, Artificial
  Synthetic oligonucleotide
aaacatgcacgtcattccagcaaactttggaggcccgatgcggcgtgaatg

SEQ ID NO: 298267 - DNA, 56 bp, Artificial
  Synthetic oligonucleotide
aaacatgcatagggatcggtaccaggggttgaggaaatggcttgcaaccgttactg

SEQ ID NO: 298268 - DNA, 60 bp, Artificial
  Synthetic oligonucleotide
aaacatggagactatggactccagtacccttgaactgagaagcagatactgggccataag

SEQ ID NO: 298269 - DNA, 57 bp, Artificial
  Synthetic oligonucleotide
aaacatggattaaagaggtagaggacagaaaattttcgccagagatagtgccactat

SEQ ID NO: 298270 - DNA, 60 bp, Artificial
  Synthetic oligonucleotide
aaacatggcggacaatctcttccgggtcaaaggtcgtgcatgcgtcataagtcacatgac

SEQ ID NO: 298271 - DNA, 59 bp, Artificial
  Synthetic oligonucleotide
aaacatgggctagggaagacgatcaatacaaccaagctcatccaaactctacgatgttc

SEQ ID NO: 298272 - DNA, 57 bp, Artificial
  Synthetic oligonucleotide
aaacatggggcactcacaagcagcaatacagcaactaataatgctgattgtgcctgg

SEQ ID NO: 298273 - DNA, 55 bp, Artificial
  Synthetic oligonucleotide
aaacatggtgttattggattattaactgctggtggaagtggacatgtagctttca

SEQ ID NO: 298274 - DNA, 58 bp, Artificial
  Synthetic oligonucleotide
aaacatgtccatcggtcaaaaatcgcaagaacttttacagtgcgtgagaaggatcaag

SEQ ID NO: 298275 - DNA, 60 bp, Artificial
  Synthetic oligonucleotide
aaacatgtgagcatctgaaagtgtcatgcggacctaaatcaatacagttccatgcttgct

SEQ ID NO: 298276 - DNA, 60 bp, Artificial
  Synthetic oligonucleotide
aaacattaaaagagcagtgtatgccattcctattagccatcgaagggcaagtgcttacag

SEQ ID NO: 298277 - DNA, 53 bp, Artificial
  Synthetic oligonucleotide
aaacattaattttgacctgccgacagttgacacgtcggtacaaaacgcatacg

SEQ ID NO: 298278 - DNA, 57 bp, Artificial
  Synthetic oligonucleotide
aaacattactgaggacacgtggaagtgtctttccaaatacgcagttgttttgctcga

SEQ ID NO: 298279 - DNA, 56 bp, Artificial
  Synthetic oligonucleotide
aaacattatttcattattataacgtcaacgtcaattttcattcaaattacaatgaa

SEQ ID NO: 298280 - DNA, 54 bp, Artificial
  Synthetic oligonucleotide
aaacattccatggaagtgattcagaaggaaggtttggctgcttcagcactcaag

SEQ ID NO: 298281 - DNA, 60 bp, Artificial
  Synthetic oligonucleotide
aaacattctggtcaaagatccctgtcatgttagatggtgaatgcataatggcttttgatt

SEQ ID NO: 298282 - DNA, 59 bp, Artificial
  Synthetic oligonucleotide
aaacattgaatgggaaacagtatgtttctagtggagattccagtgtactgggcacatac

SEQ ID NO: 298283 - DNA, 60 bp, Artificial
  Synthetic oligonucleotide
aaacattggaactggtacctcctcttacacatcactgaatgtgctagctagatttactga

SEQ ID NO: 298284 - DNA, 59 bp, Artificial
  Synthetic oligonucleotide
aaacattggctttctcgaagtaggcgaagagtctaccgacagtaagactgcgtatctga

SEQ ID NO: 298285 - DNA, 58 bp, Artificial
  Synthetic oligonucleotide
aaacattgtggacgtgcaatatctgtacggtgtagggtcggtggttgtctcctttgca

SEQ ID NO: 298286 - DNA, 60 bp, Artificial
  Synthetic oligonucleotide
aaacatttagtatgggcaagcagggagctggacagattcgcatgtaatcctgagctacta

SEQ ID NO: 298287 - DNA, 56 bp, Artificial
  Synthetic oligonucleotide
aaacatttagtatgggcaagcagggagctggagagatttgcttgtaaccccgggct

SEQ ID NO: 298288 - DNA, 60 bp, Artificial
  Synthetic oligonucleotide
aaacatttctacctccgtacacttatatatatgcacgtagcatatatataagtgtacgat

SEQ ID NO: 298289 - DNA, 53 bp, Artificial
  Synthetic oligonucleotide
aaacatttgtcggtgtatttaagaccaaactcttgtgtgggtggggatccagg

SEQ ID NO: 298290 - DNA, 57 bp, Artificial
  Synthetic oligonucleotide
aaacatttgtgaatctccaatgtcttcctgaggttgtggttgaatcgtatttgaagg

SEQ ID NO: 298291 - DNA, 57 bp, Artificial
  Synthetic oligonucleotide
aaacatttgtgtatccccaacgctttcctcaggttgtgattgaactgtatctggacg

SEQ ID NO: 298292 - DNA, 51 bp, Artificial
  Synthetic oligonucleotide
aaacattttggtcaaagatacctgtaatgttggatggagaatgtatcatgg

SEQ ID NO: 298293 - DNA, 60 bp, Artificial
  Synthetic oligonucleotide
aaaccaaaactgctgtcaatatgttgactcactcaataaatagtctaatatctgacaacc

SEQ ID NO: 298294 - DNA, 54 bp, Artificial
  Synthetic oligonucleotide
aaaccaaatcaaaatacgccgaagggttgacataaacccaggtcatgcagacct

SEQ ID NO: 298295 - DNA, 52 bp, Artificial
  Synthetic oligonucleotide
aaaccaaattgtggcaagacttggcgcccggcgatgcaacatatcccgctag

SEQ ID NO: 298296 - DNA, 49 bp, Artificial
  Synthetic oligonucleotide
aaaccaacgttgcgggggccgacccctctcctttacaggctggggtccg

SEQ ID NO: 298297 - DNA, 60 bp, Artificial
  Synthetic oligonucleotide
aaaccaactggttcaagggctacagcactttctgatgagagcccctatgtattgactgac

SEQ ID NO: 298298 - DNA, 57 bp, Artificial
  Synthetic oligonucleotide
aaaccaagattttacaggatgtatcgaagctcggacgtgcccaggggctgtgaaggc

SEQ ID NO: 298299 - DNA, 56 bp, Artificial
  Synthetic oligonucleotide
aaaccaaggcggagaagtaggatatgattcgtcttctaacgttattcaagatagta

SEQ ID NO: 298300 - DNA, 58 bp, Artificial
  Synthetic oligonucleotide
aaaccaatctatatgagaacaaccctggaagagtgactgtctctacccaaaccagtca

SEQ ID NO: 298301 - DNA, 60 bp, Artificial
  Synthetic oligonucleotide
aaaccaatgtatgatgctatcactcacaaagtaaactttagcttctcttctgcttatagg

SEQ ID NO: 298302 - DNA, 50 bp, Artificial
  Synthetic oligonucleotide
aaaccaatttgtataagaacaaccctggaagagtaactgtttctaccaaa

SEQ ID NO: 298303 - DNA, 59 bp, Artificial
  Synthetic oligonucleotide
aaaccacaacaaggtgaggcagacacgagcgagaaagtggatgtcccagagacaaagga

SEQ ID NO: 298304 - DNA, 56 bp, Artificial
  Synthetic oligonucleotide
aaaccacaagcaaaaggcagctgtcctcctattcaattggtgaattctacaatact

SEQ ID NO: 298305 - DNA, 60 bp, Artificial
  Synthetic oligonucleotide
aaaccacaagcaacaactgactattcaacaagcatatcatatgacgatggatggtttggc

SEQ ID NO: 298306 - DNA, 60 bp, Artificial
  Synthetic oligonucleotide
aaaccacatctgaggaatatgtgattcctaattttgctcagacgataaataatcgaacca

SEQ ID NO: 298307 - DNA, 57 bp, Artificial
  Synthetic oligonucleotide
aaaccaccagtagttattgaacctgttggacctacagatccatctatagttacatta

SEQ ID NO: 298308 - DNA, 54 bp, Artificial
  Synthetic oligonucleotide
aaaccaccgaggtctaggggcaactcgggctagggcagtctagcggaacgggca

SEQ ID NO: 298309 - DNA, 51 bp, Artificial
  Synthetic oligonucleotide
aaaccaccgtttctggttccttccgtgggttgggccagttcaaccggcaga

SEQ ID NO: 298310 - DNA, 52 bp, Artificial
  Synthetic oligonucleotide
aaaccacctccagaggaccccttcagcgaacagagaagcactctgaggcgtc

SEQ ID NO: 298311 - DNA, 56 bp, Artificial
  Synthetic oligonucleotide
aaaccacgtcactggattggtgttgttacacggagtgtctcaaactaactagaata

SEQ ID NO: 298312 - DNA, 57 bp, Artificial
  Synthetic oligonucleotide
aaaccactacacagtcagacactacagtgcagaatactactttattgattgggtttt

SEQ ID NO: 298313 - DNA, 52 bp, Artificial
  Synthetic oligonucleotide
aaaccagaaggtcatttgaactaaagaaactgtgggaacaaacccattccaa

SEQ ID NO: 298314 - DNA, 58 bp, Artificial
  Synthetic oligonucleotide
aaaccagaatagatccaaagtgtgcatatgttgggaccatggccctagatagggtaaa

SEQ ID NO: 298315 - DNA, 57 bp, Artificial
  Synthetic oligonucleotide
aaaccagaatatatcctaggctcaaatttcgtttgatcatacggcacagtcggtttc

SEQ ID NO: 298316 - DNA, 57 bp, Artificial
  Synthetic oligonucleotide
aaaccagactgttcactataagacaggaaatggccagcaggggtctatgggattcct

SEQ ID NO: 298317 - DNA, 50 bp, Artificial
  Synthetic oligonucleotide
aaaccagagggagggattccaaatggcgaccttgatgtaaacgtccgtaa

SEQ ID NO: 298318 - DNA, 60 bp, Artificial
  Synthetic oligonucleotide
aaaccagccatggagatggtgcgacaaagaggtgtgtccattattgacccagatgctaac

SEQ ID NO: 298319 - DNA, 58 bp, Artificial
  Synthetic oligonucleotide
aaaccagcctgctgcaacggcactaaacacaacaataacctcatttaggttgaatgat

SEQ ID NO: 298320 - DNA, 60 bp, Artificial
  Synthetic oligonucleotide
aaaccagcgatgcagtgcggcaattacgagcgttaatgccgaccctttcaacaagccaga

SEQ ID NO: 298321 - DNA, 60 bp, Artificial
  Synthetic oligonucleotide
aaaccagcggtagctgttcagcaagctgctccaaaatctcgctcgatgacagaccgccag

SEQ ID NO: 298322 - DNA, 58 bp, Artificial
  Synthetic oligonucleotide
aaaccaggcaggcattgtgagagctgacaaggataacgtaaggacggtagattccttc

SEQ ID NO: 298323 - DNA, 57 bp, Artificial
  Synthetic oligonucleotide
aaaccagtgggtgcgtttcatttgtccaagttcgtgtgtgctgtgtttcgtgtaggc

SEQ ID NO: 298324 - DNA, 56 bp, Artificial
  Synthetic oligonucleotide
aaaccagttgcgtctggttccaataagttggtgcagagggttgtgtataacgcagg

SEQ ID NO: 298325 - DNA, 55 bp, Artificial
  Synthetic oligonucleotide
aaaccataattgcatcaatgttgagtcaacgaactatgtcgctcgatttcgtaac

SEQ ID NO: 298326 - DNA, 52 bp, Artificial
  Synthetic oligonucleotide
aaaccatagtcgaggggattcccgaaatcggtgctgagacgaagtttttccg

SEQ ID NO: 298327 - DNA, 58 bp, Artificial
  Synthetic oligonucleotide
aaaccatatcaacatatgggttaggacctagatttggtggtatacacacaggcaatgt

SEQ ID NO: 298328 - DNA, 55 bp, Artificial
  Synthetic oligonucleotide
aaaccatgatatccacccacaatcagctactcgtgtactaacagtaccggacacg

SEQ ID NO: 298329 - DNA, 57 bp, Artificial
  Synthetic oligonucleotide
aaaccatggaagctgtacgcatggcgtagtggactagcggttagaggagacccctcc

SEQ ID NO: 298330 - DNA, 60 bp, Artificial
  Synthetic oligonucleotide
aaaccattcaacgccgaaggactggctctcatccagtggatgcattgagtgaattgattg

SEQ ID NO: 298331 - DNA, 51 bp, Artificial
  Synthetic oligonucleotide
aaaccattgttgagtcctgcggtaactataaagttaccaagggaaagcccg

SEQ ID NO: 298332 - DNA, 53 bp, Artificial
  Synthetic oligonucleotide
aaaccatttaaattcgactgttatcgctatacgctgtccggcaatatcccacc

SEQ ID NO: 298333 - DNA, 53 bp, Artificial
  Synthetic oligonucleotide
aaacccaaaagtaagtccagaaatacacatcccactaggggatgcaaggttag

SEQ ID NO: 298334 - DNA, 52 bp, Artificial
  Synthetic oligonucleotide
aaacccaacaactccaatgcagccctgttacggctcgtatgcccgcccaaca

SEQ ID NO: 298335 - DNA, 50 bp, Artificial
  Synthetic oligonucleotide
aaacccaagttgtagttactttcatttagaggtaaattttggtcacttgg

SEQ ID NO: 298336 - DNA, 56 bp, Artificial
  Synthetic oligonucleotide
aaacccaatgaggtgccaactgtggtttggtgtggtcctaactgtccgaatcagct

SEQ ID NO: 298337 - DNA, 53 bp, Artificial
  Synthetic oligonucleotide
aaacccacgggcgtcatcaaaaagtgccgagtgtccggggctgaggtcatttt

SEQ ID NO: 298338 - DNA, 53 bp, Artificial
  Synthetic oligonucleotide
aaacccagattgggtaagaaagagcggaaagagctcgagaaacgtcgtttgaa

SEQ ID NO: 298339 - DNA, 56 bp, Artificial
  Synthetic oligonucleotide
aaacccagcgtgtatctggcccgacaagagaacaatgagttttttatctcacttaa

SEQ ID NO: 298340 - DNA, 57 bp, Artificial
  Synthetic oligonucleotide
aaacccaggaccattcgcacaaactacttatgcaccagtgagttggggacctggtga

SEQ ID NO: 298341 - DNA, 58 bp, Artificial
  Synthetic oligonucleotide
aaacccagtagatcaaccaactgagcccgatgtagctgcatgcaggttctacacacta

SEQ ID NO: 298342 - DNA, 50 bp, Artificial
  Synthetic oligonucleotide
aaacccagtgcataaggagaggaggtaaatgggttaaccaatcacgggag

SEQ ID NO: 298343 - DNA, 58 bp, Artificial
  Synthetic oligonucleotide
aaacccatgaagtatagcccaatggatcgtgaagaatttgacaagcaaatcaaagagt

SEQ ID NO: 298344 - DNA, 52 bp, Artificial
  Synthetic oligonucleotide
aaacccatggaaagcaacattataaagaaaacgaaatttggtatagaaaatc

SEQ ID NO: 298345 - DNA, 52 bp, Artificial
  Synthetic oligonucleotide
aaaccccacccgtgacagcatgggctggcctctaaccctctgggtaatgctc

SEQ ID NO: 298346 - DNA, 48 bp, Artificial
  Synthetic oligonucleotide
aaaccccccttggtaacaaggacccacggggccaaaagccacgcccta

SEQ ID NO: 298347 - DNA, 54 bp, Artificial
  Synthetic oligonucleotide
aaacccccgacgtcccgttgtgtatcactagccccgcagcaacgacggcgtcaa

SEQ ID NO: 298348 - DNA, 57 bp, Artificial
  Synthetic oligonucleotide
aaacccccgatgtgataacttactcggtgatcgaagttggtcatacatagtagagag

SEQ ID NO: 298349 - DNA, 55 bp, Artificial
  Synthetic oligonucleotide
aaaccccggctgccgcctgggcaagtgccgtgaattcggggtgatgcaatggggt

SEQ ID NO: 298350 - DNA, 48 bp, Artificial
  Synthetic oligonucleotide
aaacccctaaggaagaacctcgtcttcctaaatttcgggaagttgaaa

SEQ ID NO: 298351 - DNA, 56 bp, Artificial
  Synthetic oligonucleotide
aaacccctctgtcgccgcaaccttgggtttcggggcatacatgtctaaggcacatg

SEQ ID NO: 298352 - DNA, 55 bp, Artificial
  Synthetic oligonucleotide
aaacccctgcaattccactcttgcaagagtgcccgtttgagtaacacggggcgaa

SEQ ID NO: 298353 - DNA, 54 bp, Artificial
  Synthetic oligonucleotide
aaacccctggagtgtggagaaatgtctataggatgggggactattgacagctat

SEQ ID NO: 298354 - DNA, 49 bp, Artificial
  Synthetic oligonucleotide
aaacccgaaactagggtttctggcccctttgaatttggggaatactgtc

SEQ ID NO: 298355 - DNA, 51 bp, Artificial
  Synthetic oligonucleotide
aaacccggagatgttactctctgatggtataaactcaatgtacggatcaat

SEQ ID NO: 298356 - DNA, 53 bp, Artificial
  Synthetic oligonucleotide
aaacccggctaccctgcttcccctaccggaagaaggagctcaacacgactgcc

SEQ ID NO: 298357 - DNA, 51 bp, Artificial
  Synthetic oligonucleotide
aaacccgggtcatgcagatctcagtgctaaagaagcacaggatgtcatcat

SEQ ID NO: 298358 - DNA, 52 bp, Artificial
  Synthetic oligonucleotide
aaacccgtttgtccttttacctagcttttggtatcacaccagacctccagga

SEQ ID NO: 298359 - DNA, 52 bp, Artificial
  Synthetic oligonucleotide
aaaccctaatttcccgatgatcggagtcgaaattttcccgacacgcgcggcg

SEQ ID NO: 298360 - DNA, 55 bp, Artificial
  Synthetic oligonucleotide
aaaccctagattgtcagatctacggggccacttactccattgagccactcgatct

SEQ ID NO: 298361 - DNA, 57 bp, Artificial
  Synthetic oligonucleotide
aaaccctagcgaaccgtttagatgcgtgccaggacaaaatgctagaactatatgaaa

SEQ ID NO: 298362 - DNA, 56 bp, Artificial
  Synthetic oligonucleotide
aaaccctatgttattggcccagcgataaaccaggtgtacatgttccccgacagagc

SEQ ID NO: 298363 - DNA, 50 bp, Artificial
  Synthetic oligonucleotide
aaaccctgcccgtttctaaaaaaacaaggcggtcccaacaaagatgagga

SEQ ID NO: 298364 - DNA, 59 bp, Artificial
  Synthetic oligonucleotide
aaaccctggtacaagcttatcaaactcctaagccgcctgtcgtgcatggccgctgtggc

SEQ ID NO: 298365 - DNA, 57 bp, Artificial
  Synthetic oligonucleotide
aaaccctgttccgactactgcctcacccacatcgtcaatcttctcgaggactgggga

SEQ ID NO: 298366 - DNA, 52 bp, Artificial
  Synthetic oligonucleotide
aaacccttaagtatttgggaaaccttgtgcagtattgggttctggagctaaa

SEQ ID NO: 298367 - DNA, 60 bp, Artificial
  Synthetic oligonucleotide
aaacccttgccaaatcacacaacactaccattttcctgctcatcttaggcttgattgtca

SEQ ID NO: 298368 - DNA, 50 bp, Artificial
  Synthetic oligonucleotide
aaaccgaaaccgggcctgctagtggttgtttattcggaggacgggagtgg

SEQ ID NO: 298369 - DNA, 54 bp, Artificial
  Synthetic oligonucleotide
aaaccgaaatattactcctgactttctccgaccacgccctactgatgtcccttc

SEQ ID NO: 298370 - DNA, 56 bp, Artificial
  Synthetic oligonucleotide
aaaccgaaggtgtgttctctctcgtagtggttgtggatcgtaagcctcatttgggc

SEQ ID NO: 298371 - DNA, 56 bp, Artificial
  Synthetic oligonucleotide
aaaccgaataacacctcagctcagtacatcttttcaactgttaatgctttaccaga

SEQ ID NO: 298372 - DNA, 55 bp, Artificial
  Synthetic oligonucleotide
aaaccgaccagtgggtgaggtttaacgtgctgaactattactgtacgaggagaga

SEQ ID NO: 298373 - DNA, 55 bp, Artificial
  Synthetic oligonucleotide
aaaccgagaactttcatagcatggtcatactcttcttgtgagttacacactactg

SEQ ID NO: 298374 - DNA, 51 bp, Artificial
  Synthetic oligonucleotide
aaaccgaggggggcctgttcctagcgaaaaagttattatcacggccctgtc

SEQ ID NO: 298375 - DNA, 53 bp, Artificial
  Synthetic oligonucleotide
aaaccgagtcgtaagtagtaatggacagattacgttcgggaactctgaaacgc

SEQ ID NO: 298376 - DNA, 56 bp, Artificial
  Synthetic oligonucleotide
aaaccgatgcaagcagattatctgattttcgaaagaatactgctcaacgtaaagtg

SEQ ID NO: 298377 - DNA, 60 bp, Artificial
  Synthetic oligonucleotide
aaaccgatgtattacccaagatactcatggtactccactagaaaacactatgcgtgcgca

SEQ ID NO: 298378 - DNA, 55 bp, Artificial
  Synthetic oligonucleotide
aaaccgatttcggatggacatgtgaaagaattagtcgctgagcttcgttggcagt

SEQ ID NO: 298379 - DNA, 54 bp, Artificial
  Synthetic oligonucleotide
aaaccgcacttggaatgcgctaagctaaaagaggcagaaccatacggtaaattt

SEQ ID NO: 298380 - DNA, 56 bp, Artificial
  Synthetic oligonucleotide
aaaccgcagaggtagcagcgattcaatcggagatgccgcgatacaacgtcgcgcac

SEQ ID NO: 298381 - DNA, 55 bp, Artificial
  Synthetic oligonucleotide
aaaccgccactaacccctcagtttttgtcaagctgtcagaccctccagcgcaggt

SEQ ID NO: 298382 - DNA, 58 bp, Artificial
  Synthetic oligonucleotide
aaaccgcctgattggacggctcttacatacacccctctctcgaaagcaatatatattc

SEQ ID NO: 298383 - DNA, 55 bp, Artificial
  Synthetic oligonucleotide
aaaccgctgagatcgtttcaaaggtcaattggcagaccgaccttgtccttacacc

SEQ ID NO: 298384 - DNA, 56 bp, Artificial
  Synthetic oligonucleotide
aaaccggaaaactataattacacatatttacgtgatggagagttagtaacagcaca

SEQ ID NO: 298385 - DNA, 57 bp, Artificial
  Synthetic oligonucleotide
aaaccggaaatggaggttcaaacaagtcattgcagtctgcaggttttgctgcagggt

SEQ ID NO: 298386 - DNA, 55 bp, Artificial
  Synthetic oligonucleotide
aaaccggaagttccgcgggcacaagagtccgagcgaagtgagcgccgagagttaa

SEQ ID NO: 298387 - DNA, 51 bp, Artificial
  Synthetic oligonucleotide
aaaccgggatataaaccacggagaggaccggacctctcactctgtaaaacc

SEQ ID NO: 298388 - DNA, 55 bp, Artificial
  Synthetic oligonucleotide
aaaccgggcgttttaatcttagctcatggtgcggagattaacgtagcgtggttga

SEQ ID NO: 298389 - DNA, 51 bp, Artificial
  Synthetic oligonucleotide
aaaccgtaaaggaaccaaccacccaatgcgacgaggatataatttccgaaa

SEQ ID NO: 298390 - DNA, 49 bp, Artificial
  Synthetic oligonucleotide
aaaccgtaccttatttccgaaagtaggtttctcgtgataggcggtcggt

SEQ ID NO: 298391 - DNA, 60 bp, Artificial
  Synthetic oligonucleotide
aaaccgtcagccgtcgctcgcctgttgaagtcgcaactgaacaacatagaatcttcgcaa

SEQ ID NO: 298392 - DNA, 54 bp, Artificial
  Synthetic oligonucleotide
aaaccgtccattcccatgtcaatatgggtctacctatgggtgatttttctcccg

SEQ ID NO: 298393 - DNA, 55 bp, Artificial
  Synthetic oligonucleotide
aaaccgtctcaagcgcaatttactacccgttctggtgtttctcgtcagggcaagc

SEQ ID NO: 298394 - DNA, 57 bp, Artificial
  Synthetic oligonucleotide
aaaccgtggtggtgacaccctctgctgagggcttatagtggtgatattcctacccag

SEQ ID NO: 298395 - DNA, 53 bp, Artificial
  Synthetic oligonucleotide
aaaccgtgtactctacgtgcgaatttaaaggaatcgtatttgttagagaggac

SEQ ID NO: 298396 - DNA, 60 bp, Artificial
  Synthetic oligonucleotide
aaaccgttgaagtcgaatgatgtgtgcacctgttggtatgtgtactcgaggatgtaggtg

SEQ ID NO: 298397 - DNA, 58 bp, Artificial
  Synthetic oligonucleotide
aaacctaagggctcagacaacaatgaatatggaattgctcccactaatgacatgggtt

SEQ ID NO: 298398 - DNA, 58 bp, Artificial
  Synthetic oligonucleotide
aaacctaatactgttgtggatgtgtcgcctgcacgtccacctgtggttattgaacctg

SEQ ID NO: 298399 - DNA, 60 bp, Artificial
  Synthetic oligonucleotide
aaacctaatcgatatgatgtggcgcagtacaagtacagaaatgttcccatcaccaagcga

SEQ ID NO: 298400 - DNA, 56 bp, Artificial
  Synthetic oligonucleotide
aaacctaatcgctcctcggggttatttcaagatgcgcactgggaaaagctcaataa

SEQ ID NO: 298401 - DNA, 59 bp, Artificial
  Synthetic oligonucleotide
aaacctacaagctggatgactgggccaggtttactcagtgcacaacgagtaggtccagc

SEQ ID NO: 298402 - DNA, 60 bp, Artificial
  Synthetic oligonucleotide
aaacctacaccatacaacaatgataccaaaaatcaaatgtggatgtctatgatctctgat

SEQ ID NO: 298403 - DNA, 53 bp, Artificial
  Synthetic oligonucleotide
aaacctaccccatgtgcaaccaaacgtcatgggaacccttcggaggaggacag

SEQ ID NO: 298404 - DNA, 57 bp, Artificial
  Synthetic oligonucleotide
aaacctagctaaataattcgacccagaagctgttatcaatgtcgtccagatttggaa

SEQ ID NO: 298405 - DNA, 58 bp, Artificial
  Synthetic oligonucleotide
aaacctagctaaataggtcgacccagaagctatcatcgatgtcgtccagacttggaag

SEQ ID NO: 298406 - DNA, 56 bp, Artificial
  Synthetic oligonucleotide
aaacctaggatcttgtgtactcacgccctcccggtgtagctgcagggtctggtccc

SEQ ID NO: 298407 - DNA, 55 bp, Artificial
  Synthetic oligonucleotide
aaacctatggtctaagccacaagtggaaaatacagaggagactaccagcaaggac

SEQ ID NO: 298408 - DNA, 52 bp, Artificial
  Synthetic oligonucleotide
aaacctattttatacgctgctaataaaacatttgttacgggtggtagtgaac

SEQ ID NO: 298409 - DNA, 59 bp, Artificial
  Synthetic oligonucleotide
aaacctcaaggcccgcatcggagtgattcagccagaggactgcatgggctacgaaccgg

SEQ ID NO: 298410 - DNA, 57 bp, Artificial
  Synthetic oligonucleotide
aaacctcacatcggaccttctggtggtcttccgtcctttgatgaactatttggtgca

SEQ ID NO: 298411 - DNA, 59 bp, Artificial
  Synthetic oligonucleotide
aaacctcacatgtgctgatggacctagcctaataaaaacagaattagatctgaccaaaa

SEQ ID NO: 298412 - DNA, 56 bp, Artificial
  Synthetic oligonucleotide
aaacctcaccttggaccctctgggggattgcctactttcgatgagctatttggcgc

SEQ ID NO: 298413 - DNA, 58 bp, Artificial
  Synthetic oligonucleotide
aaacctcagcgaaagcctaaaagccgagtagcaggtagcattaccatgcgttctggaa

SEQ ID NO: 298414 - DNA, 59 bp, Artificial
  Synthetic oligonucleotide
aaacctcatcttggaccatctggggggctgcctactttcgatgagctgtttggcgccag

SEQ ID NO: 298415 - DNA, 55 bp, Artificial
  Synthetic oligonucleotide
aaacctcattccattgttatggtgcctgcacaaaataccaatatccatggcacac

SEQ ID NO: 298416 - DNA, 57 bp, Artificial
  Synthetic oligonucleotide
aaacctccacattcctgaagtctgcctgaaatgggaattaatggacgaagattacca

SEQ ID NO: 298417 - DNA, 55 bp, Artificial
  Synthetic oligonucleotide
aaacctccatgaaaaggtcagacgaatgctgaaggacaatgctaaagacgaaggg

SEQ ID NO: 298418 - DNA, 58 bp, Artificial
  Synthetic oligonucleotide
aaacctcgatcataaagactaattgattccaagcaagcaaagactgtaagactacgaa

SEQ ID NO: 298419 - DNA, 48 bp, Artificial
  Synthetic oligonucleotide
aaacctcggttaggttacgggcttacctaaatacaccagggttgcccg

SEQ ID NO: 298420 - DNA, 60 bp, Artificial
  Synthetic oligonucleotide
aaacctcgttaggagagcaacggtatcagcggatccattgcaatcactattggagatgtg

SEQ ID NO: 298421 - DNA, 60 bp, Artificial
  Synthetic oligonucleotide
aaacctctacagatgtgatatggctgatcatgaacagactgtgaggactgtgagggctga

SEQ ID NO: 298422 - DNA, 53 bp, Artificial
  Synthetic oligonucleotide
aaacctctactatgactacaggggagaccccaacgacatttaccagcttaggt

SEQ ID NO: 298423 - DNA, 54 bp, Artificial
  Synthetic oligonucleotide
aaacctctactgccctaggaatgccaggcaggtaccccacctccgggtgggatc

SEQ ID NO: 298424 - DNA, 60 bp, Artificial
  Synthetic oligonucleotide
aaacctctagcgactaggaacagctatatcgggttgctatagcagtcaggatgtcattct

SEQ ID NO: 298425 - DNA, 60 bp, Artificial
  Synthetic oligonucleotide
aaacctctgtgtctatccaagatgcgatatgccaggcaagtcaagaagaatatagaggcc

SEQ ID NO: 298426 - DNA, 60 bp, Artificial
  Synthetic oligonucleotide
aaacctcttggcagcgtgagacaccagatgcacctttgctctgtatcgccctgtgtagaa

SEQ ID NO: 298427 - DNA, 59 bp, Artificial
  Synthetic oligonucleotide
aaacctgacagatcaaacccaacagattgttccgttcatacggagccttctgatgccaa

SEQ ID NO: 298428 - DNA, 60 bp, Artificial
  Synthetic oligonucleotide
aaacctgatgatcgactcatccgacttgatacccaactttatgatgagagacccatcaca

SEQ ID NO: 298429 - DNA, 57 bp, Artificial
  Synthetic oligonucleotide
aaacctgccacagcagccaaacgtgacttgccgtatgtttaccggtatgaaccaggc

SEQ ID NO: 298430 - DNA, 55 bp, Artificial
  Synthetic oligonucleotide
aaacctgcctgtataggaaatatcgaatgagtgttacaatttgtatcttcagctg

SEQ ID NO: 298431 - DNA, 57 bp, Artificial
  Synthetic oligonucleotide
aaacctggaaccttgattgttctaaacttgtctgggctgaccattctagcttgtcta

SEQ ID NO: 298432 - DNA, 57 bp, Artificial
  Synthetic oligonucleotide
aaacctgggactattattagatcgggtgtgacaatgaaaggattacaggagattcca

SEQ ID NO: 298433 - DNA, 54 bp, Artificial
  Synthetic oligonucleotide
aaacctgggtacacgttcacatctattaccctgaagccaccaaaaatagaccgc

SEQ ID NO: 298434 - DNA, 56 bp, Artificial
  Synthetic oligonucleotide
aaacctgtaatggcttcgaagaccctcgaagctatcctctcctttgcacgccgtgg

SEQ ID NO: 298435 - DNA, 55 bp, Artificial
  Synthetic oligonucleotide
aaacctgtcaagaatccggaacctaaaggatacgtgctgaatgttccaggacctg

SEQ ID NO: 298436 - DNA, 55 bp, Artificial
  Synthetic oligonucleotide
aaacctgtttggtattcgcggacagcacaatcagatcaaacgtgaggttgagagg

SEQ ID NO: 298437 - DNA, 57 bp, Artificial
  Synthetic oligonucleotide
aaaccttgaaatccaggaagcatttgtgtatccccaatgctttcctcaggttgtgat

SEQ ID NO: 298438 - DNA, 59 bp, Artificial
  Synthetic oligonucleotide
aaaccttggattggtcagacaggacagagagtgtggcaaggtattggatactgcttata

SEQ ID NO: 298439 - DNA, 56 bp, Artificial
  Synthetic oligonucleotide
aaacctttagagcttgggacgaacttggaagatagcacactacttgcgcctataaa

SEQ ID NO: 298440 - DNA, 57 bp, Artificial
  Synthetic oligonucleotide
aaacctttatagctggcctctcctggattgcagagcacgattgacggtattccccct

SEQ ID NO: 298441 - DNA, 56 bp, Artificial
  Synthetic oligonucleotide
aaacctttcaactaacatttcttctctggtcatgtggatgctgtcaaccctttgtt

SEQ ID NO: 298442 - DNA, 47 bp, Artificial
  Synthetic oligonucleotide
aaacctttcaataggttaaagttggggtggttacccaacccgtcctc

SEQ ID NO: 298443 - DNA, 55 bp, Artificial
  Synthetic oligonucleotide
aaacctttcgttccagagggggtcagcatattgccgacgttcaatgagttgtttg

SEQ ID NO: 298444 - DNA, 58 bp, Artificial
  Synthetic oligonucleotide
aaacgaaaccgtcagccgttgcttgcctgttgaagtcgcaattgaacaacatagaatc

SEQ ID NO: 298445 - DNA, 52 bp, Artificial
  Synthetic oligonucleotide
aaacgaaacgatggggttattccctaaacttcatgggttatgtgattggaag

SEQ ID NO: 298446 - DNA, 57 bp, Artificial
  Synthetic oligonucleotide
aaacgaaagctaattgattatctgcgagacctaacgaaagcatgggattacgttcca

SEQ ID NO: 298447 - DNA, 57 bp, Artificial
  Synthetic oligonucleotide
aaacgaaagtttactcacagtccctatttcagccctttgtgtgtggatcccagcata

SEQ ID NO: 298448 - DNA, 52 bp, Artificial
  Synthetic oligonucleotide
aaacgaaccactggagtttcaactaacagccccagagccaactaacctgtgg

SEQ ID NO: 298449 - DNA, 59 bp, Artificial
  Synthetic oligonucleotide
aaacgaaccagtgcaatgggtcatgtctcgaatgtgtgaccttgaaggatgttggtccc

SEQ ID NO: 298450 - DNA, 56 bp, Artificial
  Synthetic oligonucleotide
aaacgaagaagctattcacgatttccccagtccagacgttctatttctgtcaagcg

SEQ ID NO: 298451 - DNA, 56 bp, Artificial
  Synthetic oligonucleotide
aaacgaagactctttgaacttccagacagcgggtatggcaatactgaagtggaaac

SEQ ID NO: 298452 - DNA, 55 bp, Artificial
  Synthetic oligonucleotide
aaacgaagcaaaccctcggttacatagagtgtatgggatgccagaggcccctccg

SEQ ID NO: 298453 - DNA, 55 bp, Artificial
  Synthetic oligonucleotide
aaacgaattgcccactctctccgactttttgctggacgtgattgacaagtttttc

SEQ ID NO: 298454 - DNA, 55 bp, Artificial
  Synthetic oligonucleotide
aaacgaccgcatgaatacgccgcccctcatcaaccgtgctgcgctgcccgagctg

SEQ ID NO: 298455 - DNA, 57 bp, Artificial
  Synthetic oligonucleotide
aaacgactaattatcacatactaaaggcgaacacagttcaacagttgtgtagatttg

SEQ ID NO: 298456 - DNA, 51 bp, Artificial
  Synthetic oligonucleotide
aaacgacttaagggatcgtttccaagtccggcgtaaattctatgctacggt

SEQ ID NO: 298457 - DNA, 56 bp, Artificial
  Synthetic oligonucleotide
aaacgagatattaaatgtgtgattaaggtagagcgatctttaaattgctgctagta

SEQ ID NO: 298458 - DNA, 56 bp, Artificial
  Synthetic oligonucleotide
aaacgagcaaacgtcgatgagtgtgtaagactggttgtttacgactgccctacttc

SEQ ID NO: 298459 - DNA, 58 bp, Artificial
  Synthetic oligonucleotide
aaacgagccgctttattatgtcgatgttataaatgatggagctgtgcataaacgatta

SEQ ID NO: 298460 - DNA, 55 bp, Artificial
  Synthetic oligonucleotide
aaacgaggagcagtaacaagtagtaacatgaataattgcctgattagtgtctggc

SEQ ID NO: 298461 - DNA, 54 bp, Artificial
  Synthetic oligonucleotide
aaacgaggagcttctgtgaggagcactacggagagtggcaaggtgatcccggaa

SEQ ID NO: 298462 - DNA, 55 bp, Artificial
  Synthetic oligonucleotide
aaacgaggggtatgtcgagtcctggatacaatatttgcgtaacgcttaaaggtga

SEQ ID NO: 298463 - DNA, 55 bp, Artificial
  Synthetic oligonucleotide
aaacgagtccagatccggaagttgagaaaacacttgtgcatccccagtgctctcc

SEQ ID NO: 298464 - DNA, 54 bp, Artificial
  Synthetic oligonucleotide
aaacgagtttcccgaaacggtacatggtttcaggtgtatgctagcaattaagta

SEQ ID NO: 298465 - DNA, 59 bp, Artificial
  Synthetic oligonucleotide
aaacgagtttgtcggttcacatcgtccgctgtcgaacatagaacaggtgtgctcttcgc

SEQ ID NO: 298466 - DNA, 53 bp, Artificial
  Synthetic oligonucleotide
aaacgatcacgtgcccggggttgtcaattggtgaacgggttaatttatattca

SEQ ID NO: 298467 - DNA, 58 bp, Artificial
  Synthetic oligonucleotide
aaacgatcgattcaagaggacgcacatggaccattggaaaggtaacaagctttgcctc

SEQ ID NO: 298468 - DNA, 59 bp, Artificial
  Synthetic oligonucleotide
aaacgatcgtattcacaaggctgtaagtgccagccgccgaagagagctaagcgataggg

SEQ ID NO: 298469 - DNA, 55 bp, Artificial
  Synthetic oligonucleotide
aaacgatggaagttgtccagcaaacacgggtggacaaactaacgcaaggccggca

SEQ ID NO: 298470 - DNA, 58 bp, Artificial
  Synthetic oligonucleotide
aaacgatggaagttgttcagcaaacaagagtggacaaactgactcaaggtcgccagac

SEQ ID NO: 298471 - DNA, 60 bp, Artificial
  Synthetic oligonucleotide
aaacgatggcgttgcgacaagctgctgaggtgtttttgctcagaacggatgactcgttag

SEQ ID NO: 298472 - DNA, 60 bp, Artificial
  Synthetic oligonucleotide
aaacgcaactacagaattatgggcctatgctacaacgtgactgcgaaggaatgccaatag

SEQ ID NO: 298473 - DNA, 58 bp, Artificial
  Synthetic oligonucleotide
aaacgcaccacaagcaggcagcaagtcgcaaagggccaagtacgggacagcaggctac

SEQ ID NO: 298474 - DNA, 52 bp, Artificial
  Synthetic oligonucleotide
aaacgcagaaagacagactacgatcaaagaaaccccaagtaagaagaaaccc

SEQ ID NO: 298475 - DNA, 54 bp, Artificial
  Synthetic oligonucleotide
aaacgcagaagcgtttctgcgtagcaataatcaatcaaaacatgttaaagatag

SEQ ID NO: 298476 - DNA, 60 bp, Artificial
  Synthetic oligonucleotide
aaacgcagagaagcagcgcgcaaaagtgttggaatgcgggctgatacgacgtatgtagat

SEQ ID NO: 298477 - DNA, 58 bp, Artificial
  Synthetic oligonucleotide
aaacgcatcaatgcatgagtgtaacacgaagtgtcaaacacccctgggagctataaac

SEQ ID NO: 298478 - DNA, 56 bp, Artificial
  Synthetic oligonucleotide
aaacgcatctaggttctaaactcggaagcttcgctatcatgaggttttctggtgaa

SEQ ID NO: 298479 - DNA, 54 bp, Artificial
  Synthetic oligonucleotide
aaacgcatgccgctagactctaaggggcaaccggagtttgtgctctcagcagct

SEQ ID NO: 298480 - DNA, 57 bp, Artificial
  Synthetic oligonucleotide
aaacgcatttggcacgcaaatgcacacgagaagattggttaggtcaaaaacggtaca

SEQ ID NO: 298481 - DNA, 52 bp, Artificial
  Synthetic oligonucleotide
aaacgccacaatcatgtcgcgctcattgtggtacggcaacacaataatctca

SEQ ID NO: 298482 - DNA, 50 bp, Artificial
  Synthetic oligonucleotide
aaacgccacccagacgttgggttaatacccattttggggcgacggaaaca

SEQ ID NO: 298483 - DNA, 50 bp, Artificial
  Synthetic oligonucleotide
aaacgccatacttgcagccatccccagcctggcacgcgctaaacttgacg

SEQ ID NO: 298484 - DNA, 60 bp, Artificial
  Synthetic oligonucleotide
aaacgccattctctgcttgaggagcagtgatgagttcccctgtgcgtgaatccatgatta

SEQ ID NO: 298485 - DNA, 57 bp, Artificial
  Synthetic oligonucleotide
aaacgccgaaaggatggccagagtgactttataatgaaggcggaacacataactgtc

SEQ ID NO: 298486 - DNA, 55 bp, Artificial
  Synthetic oligonucleotide
aaacgccggtggtgtttcacaatggagaccaacgggcgcatcggtagtgacaaac

SEQ ID NO: 298487 - DNA, 53 bp, Artificial
  Synthetic oligonucleotide
aaacgccggttatttagaacgacattcgatgcctacctacgattagacgaaag

SEQ ID NO: 298488 - DNA, 59 bp, Artificial
  Synthetic oligonucleotide
aaacgccgtaaacgtctcccatattttcttgcagatggctatgtggcggcctagcgaga

SEQ ID NO: 298489 - DNA, 57 bp, Artificial
  Synthetic oligonucleotide
aaacgcctattcaaacttctatgatgggtatgcccgatttatggacaccaaccctga

SEQ ID NO: 298490 - DNA, 58 bp, Artificial
  Synthetic oligonucleotide
aaacgcgaagaacatggatcttggcaccggtcctggtgactgcggttgcccttacatc

SEQ ID NO: 298491 - DNA, 52 bp, Artificial
  Synthetic oligonucleotide
aaacgcgattccactaaggactgggacctaatcgttaaacacgctagggagg

SEQ ID NO: 298492 - DNA, 50 bp, Artificial
  Synthetic oligonucleotide
aaacgcgcaccacgtattggtagccgattaggaagtgcggcggcgggtat

SEQ ID NO: 298493 - DNA, 55 bp, Artificial
  Synthetic oligonucleotide
aaacgcgggcatgatacaggcaaagaaatagaattaggaaaagatttagtcggtg

SEQ ID NO: 298494 - DNA, 52 bp, Artificial
  Synthetic oligonucleotide
aaacgcgggggtccgaaaaggaactcagacccacaacaatacaacagccacc

SEQ ID NO: 298495 - DNA, 59 bp, Artificial
  Synthetic oligonucleotide
aaacgcgtactacagcttcctgtgccgtcctcttgcaacggtggcatgtatcgagtgcg

SEQ ID NO: 298496 - DNA, 59 bp, Artificial
  Synthetic oligonucleotide
aaacgcgttgagtgggattgatctgtcgcacttgcgcacgccgaaaattgaaccgacca

SEQ ID NO: 298497 - DNA, 51 bp, Artificial
  Synthetic oligonucleotide
aaacgctaagcagctacgacacacactcaatgccggcgatctactctttga

SEQ ID NO: 298498 - DNA, 53 bp, Artificial
  Synthetic oligonucleotide
aaacgctaatcctgtgtacgccattaatacgtgtaatgttcatttagcctgct

SEQ ID NO: 298499 - DNA, 60 bp, Artificial
  Synthetic oligonucleotide
aaacgctaatggcatgtattacaatgaacatgcaacatgtccaaactctgacaacggaaa

SEQ ID NO: 298500 - DNA, 59 bp, Artificial
  Synthetic oligonucleotide
aaacgctcaaggtataatcgtagcgatatgcgacgttatcttaatgattataaattcag

SEQ ID NO: 298501 - DNA, 58 bp, Artificial
  Synthetic oligonucleotide
aaacgctgagtggatcctgaagactctagtgaacacggaacacgcctatgagaacaaa

SEQ ID NO: 298502 - DNA, 50 bp, Artificial
  Synthetic oligonucleotide
aaacgctgctcggagttctcgcagcatatgaggtaagctatggttcgcgt

SEQ ID NO: 298503 - DNA, 60 bp, Artificial
  Synthetic oligonucleotide
aaacgcttatgggacgcaaatgcatacgaggaggttggtgagatcaaagatggtgcaccc

SEQ ID NO: 298504 - DNA, 59 bp, Artificial
  Synthetic oligonucleotide
aaacgcttctcaatgcaggcgccccgagatgaaatgacgccacatggcatcgatgtgta

SEQ ID NO: 298505 - DNA, 54 bp, Artificial
  Synthetic oligonucleotide
aaacggaaacccagtcgaaaagttcgtggagcaattcaaactcaggccaacatg

SEQ ID NO: 298506 - DNA, 57 bp, Artificial
  Synthetic oligonucleotide
aaacggaaagtatgggaagcaccattgtgtatggacacaatactggaaatgcccaat

SEQ ID NO: 298507 - DNA, 59 bp, Artificial
  Synthetic oligonucleotide
aaacggaacattcctcaaacatcccaatggacacaagtccttatcaactctgcatagat

SEQ ID NO: 298508 - DNA, 53 bp, Artificial
  Synthetic oligonucleotide
aaacggaaggaacacttgaaagctgtgaaactaaatgccaaactcccttggga

SEQ ID NO: 298509 - DNA, 55 bp, Artificial
  Synthetic oligonucleotide
aaacggaagtcatagtgctgaccggccctagtgggtgtggcaaatcccgctgggc

SEQ ID NO: 298510 - DNA, 60 bp, Artificial
  Synthetic oligonucleotide
aaacggaagtcgatgccatatcgttgtattgcacgcagatggttatgctacgcgcggcgc

SEQ ID NO: 298511 - DNA, 59 bp, Artificial
  Synthetic oligonucleotide
aaacggagcgccacctcgggagatgcgaccatattcaattgtgtgccgttcaatctacc

SEQ ID NO: 298512 - DNA, 52 bp, Artificial
  Synthetic oligonucleotide
aaacggaggaacccatggttccggaggtttctgaaataatctctcgacgtta

SEQ ID NO: 298513 - DNA, 51 bp, Artificial
  Synthetic oligonucleotide
aaacggaggagcccatggttccggagccttttggaatattttggtggcgtt

SEQ ID NO: 298514 - DNA, 57 bp, Artificial
  Synthetic oligonucleotide
aaacggatgcttcgaattctggcataagtgtgataatgaatgcatagagtctgtcaa

SEQ ID NO: 298515 - DNA, 52 bp, Artificial
  Synthetic oligonucleotide
aaacggatttcggtaaggtggtcatcgccttggtggttattctggttagtgt

SEQ ID NO: 298516 - DNA, 53 bp, Artificial
  Synthetic oligonucleotide
aaacggccataacaaaagggtatgaagcgctaatcaaaaggctaggaacaggg

SEQ ID NO: 298517 - DNA, 50 bp, Artificial
  Synthetic oligonucleotide
aaacggctattgacaatgcaatcgccagggtagcagatacggtggcgagc

SEQ ID NO: 298518 - DNA, 52 bp, Artificial
  Synthetic oligonucleotide
aaacgggacaccaatggtaattgggacaccgatacatcggttcccctattag

SEQ ID NO: 298519 - DNA, 54 bp, Artificial
  Synthetic oligonucleotide
aaacgggatatgctcccgcctccacttcaggccgtgttaacttacacgtgcccg

SEQ ID NO: 298520 - DNA, 60 bp, Artificial
  Synthetic oligonucleotide
aaacgggatcacaatgagagagctggagttcagcttagggctggacttcacttcagaatg

SEQ ID NO: 298521 - DNA, 59 bp, Artificial
  Synthetic oligonucleotide
aaacgggcagaacaaaaacgtatgtctatggcacagtggatagcacatagaagccaaaa

SEQ ID NO: 298522 - DNA, 54 bp, Artificial
  Synthetic oligonucleotide
aaacgggcatctcctacagatttacataggagttgtgctttaggtggggattgc

SEQ ID NO: 298523 - DNA, 51 bp, Artificial
  Synthetic oligonucleotide
aaacgggccccttagagacatcctcattgcctcagaggtgaaccctacagc

SEQ ID NO: 298524 - DNA, 55 bp, Artificial
  Synthetic oligonucleotide
aaacgggccggctccgagcggtaggacacacacacctttgcgcatctccacagct

SEQ ID NO: 298525 - DNA, 60 bp, Artificial
  Synthetic oligonucleotide
aaacgggcctcggcacacaacttcaccctggatctgaggatgctgctgtcgtacaatcaa

SEQ ID NO: 298526 - DNA, 57 bp, Artificial
  Synthetic oligonucleotide
aaacgggctatttgatgcgttttacacgcgcttatacgaaaacatgccagcgggcta

SEQ ID NO: 298527 - DNA, 50 bp, Artificial
  Synthetic oligonucleotide
aaacgggtctactaccttacccgtgaccctacaacccccttcgcaagagc

SEQ ID NO: 298528 - DNA, 57 bp, Artificial
  Synthetic oligonucleotide
aaacgggtctgaaaccataagcggttctagcaacatcgtcgaacttgaactctcaga

SEQ ID NO: 298529 - DNA, 53 bp, Artificial
  Synthetic oligonucleotide
aaacgggttctcgtttgaattccatccgggcagccaaccgcgtacctttcagc

SEQ ID NO: 298530 - DNA, 47 bp, Artificial
  Synthetic oligonucleotide
aaacggtaagaacccaccctcggggtccgacgtcccaccctttctta

SEQ ID NO: 298531 - DNA, 55 bp, Artificial
  Synthetic oligonucleotide
aaacggtaggcagtctgattatgacaattatggttggccagtgttcaatccggtc

SEQ ID NO: 298532 - DNA, 60 bp, Artificial
  Synthetic oligonucleotide
aaacggtcacgaagacagtcagggtcttctaggctccatggcgtctctgctgacgcagtg

SEQ ID NO: 298533 - DNA, 60 bp, Artificial
  Synthetic oligonucleotide
aaacggtcatacttcactcagagtcaaggtgaaattcagtggatgagaccatcaaaggag

SEQ ID NO: 298534 - DNA, 56 bp, Artificial
  Synthetic oligonucleotide
aaacggtcccggttgctcacgacttcagctcccgccggacagcggagtcacagttc

SEQ ID NO: 298535 - DNA, 53 bp, Artificial
  Synthetic oligonucleotide
aaacggtccgggtcccacatatcattgtcagagtacgaaacttccaaccgaag

SEQ ID NO: 298536 - DNA, 60 bp, Artificial
  Synthetic oligonucleotide
aaacggtctgaagctaatgcccttgtttatcaacgggtctgtctggacatcatggagagc

SEQ ID NO: 298537 - DNA, 54 bp, Artificial
  Synthetic oligonucleotide
aaacggtgatttgtataatcgtctttctggggtcgaagcgataagtgaccttcc

SEQ ID NO: 298538 - DNA, 54 bp, Artificial
  Synthetic oligonucleotide
aaacggtgcaacgttttaagataccacaggctcaaaggccttcaatgcatatat

SEQ ID NO: 298539 - DNA, 55 bp, Artificial
  Synthetic oligonucleotide
aaacggttgggtgaaccggacattgagtaagcttatcgcacacggagcgataacg

SEQ ID NO: 298540 - DNA, 58 bp, Artificial
  Synthetic oligonucleotide
aaacgtaaagtattcacttctgctcgtggtattgctgaaccgtactgctacctggcta

SEQ ID NO: 298541 - DNA, 55 bp, Artificial
  Synthetic oligonucleotide
aaacgtaattgtatattgatttatggtccccctaacactggaaagtcagcattta

SEQ ID NO: 298542 - DNA, 60 bp, Artificial
  Synthetic oligonucleotide
aaacgtacaagtattatcaatactagcaagagatgatctaccgtatacctcagaagcatt

SEQ ID NO: 298543 - DNA, 53 bp, Artificial
  Synthetic oligonucleotide
aaacgtacatattctggtaagcgtaccgattggaaacgccgtccaattattcc

SEQ ID NO: 298544 - DNA, 58 bp, Artificial
  Synthetic oligonucleotide
aaacgtaccggttatcactacaaagttggacacacttagagtgcatttagcagcatta

SEQ ID NO: 298545 - DNA, 58 bp, Artificial
  Synthetic oligonucleotide
aaacgtacctgaacacgcagatgcacaaccaagactgatgccattgcaccggctacat

SEQ ID NO: 298546 - DNA, 59 bp, Artificial
  Synthetic oligonucleotide
aaacgtagagagataacgcttggaggacagaggcctttgcagactagggatgtgcgttc

SEQ ID NO: 298547 - DNA, 54 bp, Artificial
  Synthetic oligonucleotide
aaacgtatagaatggcccactttacgggcactcttccctcactacccaggtgag

SEQ ID NO: 298548 - DNA, 55 bp, Artificial
  Synthetic oligonucleotide
aaacgtatgagcccaacactttgggccacgatttaattagggatcttatatctgt

SEQ ID NO: 298549 - DNA, 55 bp, Artificial
  Synthetic oligonucleotide
aaacgtattacctacacactattctagaatccacaaagatctaatcaaatcccga

SEQ ID NO: 298550 - DNA, 51 bp, Artificial
  Synthetic oligonucleotide
aaacgtattcactctggacgcactccgcgcagagaccaagaagaagtacga

SEQ ID NO: 298551 - DNA, 60 bp, Artificial
  Synthetic oligonucleotide
aaacgtcactcttgtgatgcaaaaacaatgcacctgtcgatcgtcattgatcggcggctg

SEQ ID NO: 298552 - DNA, 53 bp, Artificial
  Synthetic oligonucleotide
aaacgtccacacgatgtagcacttgccgtctagcgcgtcctccaaccggctaa

SEQ ID NO: 298553 - DNA, 51 bp, Artificial
  Synthetic oligonucleotide
aaacgtccaccggttttctgtgctaccaaacgttggataatacgttggaca

SEQ ID NO: 298554 - DNA, 57 bp, Artificial
  Synthetic oligonucleotide
aaacgtcgagctaatcaggtaaataaggttaatgacgagtgcaaaatgtcgtcgcaa

SEQ ID NO: 298555 - DNA, 56 bp, Artificial
  Synthetic oligonucleotide
aaacgtcgattgggttattcaaacaaggcccgagaagataacaagatgacgtcgca

SEQ ID NO: 298556 - DNA, 56 bp, Artificial
  Synthetic oligonucleotide
aaacgtcgccctagaggtaactatcgcagctgggtcagacaccgggtggctatctg

SEQ ID NO: 298557 - DNA, 60 bp, Artificial
  Synthetic oligonucleotide
aaacgtcgctcgatacactacgacagttagagcagaccctcaatacaagcgtacactcga

SEQ ID NO: 298558 - DNA, 60 bp, Artificial
  Synthetic oligonucleotide
aaacgtcgtgaggaaaatgatgactaactcacaagatactgagctctcctttacaatcac

SEQ ID NO: 298559 - DNA, 60 bp, Artificial
  Synthetic oligonucleotide
aaacgtcgtgcaaacgatgtgcctaagaatgactggtgtcattgcctgcatcacacgcag

SEQ ID NO: 298560 - DNA, 55 bp, Artificial
  Synthetic oligonucleotide
aaacgtcgtgctgctcaggttccgaaaccgacccaggctggggtatccatggccc

SEQ ID NO: 298561 - DNA, 57 bp, Artificial
  Synthetic oligonucleotide
aaacgtctctgtagcccacgacgacactggcaaaaggtactactacctcacgcgtga

SEQ ID NO: 298562 - DNA, 55 bp, Artificial
  Synthetic oligonucleotide
aaacgtgataaactacgctacccaattgaacaaatgacacaatggacgattaagc

SEQ ID NO: 298563 - DNA, 55 bp, Artificial
  Synthetic oligonucleotide
aaacgtgatcaatgtcactgtaaaggcagaactggtagtgacagaagcatccaag

SEQ ID NO: 298564 - DNA, 52 bp, Artificial
  Synthetic oligonucleotide
aaacgtggccaatcggggaatcccccagaggggtagaggaaggctctatcgg

SEQ ID NO: 298565 - DNA, 55 bp, Artificial
  Synthetic oligonucleotide
aaacgtgtgactggatggcctactgtaagggaaagaatgagacgagctgaaccag

SEQ ID NO: 298566 - DNA, 58 bp, Artificial
  Synthetic oligonucleotide
aaacgtgtgagaagagcaaacccttacgaactgtacagaacatgcaaagcggctaaca

SEQ ID NO: 298567 - DNA, 50 bp, Artificial
  Synthetic oligonucleotide
aaacgttaacggtcacgtttacggtgaacgggttgtccatccagcttacg

SEQ ID NO: 298568 - DNA, 57 bp, Artificial
  Synthetic oligonucleotide
aaacgttaccgggaggcgcatacggtccgtcactgaactctcagcgactgagcttaa

SEQ ID NO: 298569 - DNA, 54 bp, Artificial
  Synthetic oligonucleotide
aaacgttacgttcatgcgtcagaaacaccctgatgtaccattcgttaagttctt

SEQ ID NO: 298570 - DNA, 51 bp, Artificial
  Synthetic oligonucleotide
aaacgttagaagcaatgcactcccgatcaatagaaggtgcgacgcgccagt

SEQ ID NO: 298571 - DNA, 50 bp, Artificial
  Synthetic oligonucleotide
aaacgttagaggagtgcaacgtgatacttcgagaaactaatgggtttata

SEQ ID NO: 298572 - DNA, 52 bp, Artificial
  Synthetic oligonucleotide
aaacgttagataagtgttcatttgtctttatatacttggtccccaagtattt

SEQ ID NO: 298573 - DNA, 54 bp, Artificial
  Synthetic oligonucleotide
aaacgttagttaattattttgaccaggaccacagctgtcagttgggaccacacg

SEQ ID NO: 298574 - DNA, 55 bp, Artificial
  Synthetic oligonucleotide
aaacgttcacgtaatgttagccgcatagattttaaacgtcgatcaagtaagtatg

SEQ ID NO: 298575 - DNA, 59 bp, Artificial
  Synthetic oligonucleotide
aaacgttcattgcccagttgcgtgtcagcggcctgtgagatgcgtacagaccctgttcc

SEQ ID NO: 298576 - DNA, 57 bp, Artificial
  Synthetic oligonucleotide
aaacgttcatttcatcgcagagggtggaacgtgtaaaacctgtggcaaacaatgcaa

SEQ ID NO: 298577 - DNA, 53 bp, Artificial
  Synthetic oligonucleotide
aaacgttccagaggtccatttcggtgaaggcgctatgcaacgccttgccaaga

SEQ ID NO: 298578 - DNA, 54 bp, Artificial
  Synthetic oligonucleotide
aaacgttcgcaacacgaacacccgtcacaggataggtgacagtgaaagtaccgg

SEQ ID NO: 298579 - DNA, 52 bp, Artificial
  Synthetic oligonucleotide
aaacgttcgttatccggctagctacttcgggaaacccagtaacaccatgaaa

SEQ ID NO: 298580 - DNA, 55 bp, Artificial
  Synthetic oligonucleotide
aaacgttcttaatgtcacacaattgagacgtacccaattcagagacgcattgcga

SEQ ID NO: 298581 - DNA, 60 bp, Artificial
  Synthetic oligonucleotide
aaacgttgatttcctcagatatgcctcctttgttgccgtcacctctatcttgcagtccat

SEQ ID NO: 298582 - DNA, 50 bp, Artificial
  Synthetic oligonucleotide
aaacgttggtacatttcggacggggtaaatattcgttacattcgtacaac

SEQ ID NO: 298583 - DNA, 58 bp, Artificial
  Synthetic oligonucleotide
aaacgttgtgacaacgcccggtgacagccagagccctgaaccgctagtgagcacgacc

SEQ ID NO: 298584 - DNA, 54 bp, Artificial
  Synthetic oligonucleotide
aaacgtttgcaaggacacggtcaaactttttaggagggccagtgatttgatgac

SEQ ID NO: 298585 - DNA, 56 bp, Artificial
  Synthetic oligonucleotide
aaactaaacaggaatgagatcaaaggagtaaaattgagcaacatgggggtttatca

SEQ ID NO: 298586 - DNA, 55 bp, Artificial
  Synthetic oligonucleotide
aaactaaaggtggtcgtgaggaatttgcaatataagggggcatgcattaaatgtc

SEQ ID NO: 298587 - DNA, 56 bp, Artificial
  Synthetic oligonucleotide
aaactaaagtggagcaaggcaaatccagactaattgaggcgtccagtctcaatgac

SEQ ID NO: 298588 - DNA, 56 bp, Artificial
  Synthetic oligonucleotide
aaactaacagatgcaagacaaaagacctacaattatccaaagacctcttcttggtg

SEQ ID NO: 298589 - DNA, 57 bp, Artificial
  Synthetic oligonucleotide
aaactaacattagaagtgctaggagtgacgttaatgccatcaccgttttaaatggca

SEQ ID NO: 298590 - DNA, 58 bp, Artificial
  Synthetic oligonucleotide
aaactaagcagtatagtacaatcaaccgatgatacttcgtcgcacttcaactttatac

SEQ ID NO: 298591 - DNA, 59 bp, Artificial
  Synthetic oligonucleotide
aaactaagtatgctgactaagaaagcgtgcctccacttgcaaccaggaggcacctgtgt

SEQ ID NO: 298592 - DNA, 57 bp, Artificial
  Synthetic oligonucleotide
aaactaattgcaggaatgtgtaaaaatggcgtattataggcgctcgtatagaaggtc

SEQ ID NO: 298593 - DNA, 56 bp, Artificial
  Synthetic oligonucleotide
aaactaatttaggctcccatatctatttccctacagcgagtggctcgctggccagt

SEQ ID NO: 298594 - DNA, 56 bp, Artificial
  Synthetic oligonucleotide
aaactacacaaaatggaatatattcgcaatacggaccactactgtctactccaaaa

SEQ ID NO: 298595 - DNA, 57 bp, Artificial
  Synthetic oligonucleotide
aaactacacaccgggaccaggggtcagatatccactgacctttggatggtgctacaa

SEQ ID NO: 298596 - DNA, 57 bp, Artificial
  Synthetic oligonucleotide
aaactacattgagtccctcggggctgcttttgggagtggcttcacacaacagattgg

SEQ ID NO: 298597 - DNA, 54 bp, Artificial
  Synthetic oligonucleotide
aaactacccaaaatggagaaagttcacgttgacatcgaggaggatagccccttc

SEQ ID NO: 298598 - DNA, 54 bp, Artificial
  Synthetic oligonucleotide
aaactacccgggtcgagtccatgaaatagtggccatcctaatccaagaaactcc

SEQ ID NO: 298599 - DNA, 54 bp, Artificial
  Synthetic oligonucleotide
aaactaccctgggcggttcacaaacctgttggacgtggcagaggcctgcccgac

SEQ ID NO: 298600 - DNA, 60 bp, Artificial
  Synthetic oligonucleotide
aaactacgactgatagttgttgcaacgcctattggaattagatcacaagaagagctatta

SEQ ID NO: 298601 - DNA, 56 bp, Artificial
  Synthetic oligonucleotide
aaactacgcttgaaccgtgttcgagtgtctgagttggtagtattgctctaaactac

SEQ ID NO: 298602 - DNA, 60 bp, Artificial
  Synthetic oligonucleotide
aaactactagatcacacaggtgctaatgcaactgccagcagagacacttggtacaaggga

SEQ ID NO: 298603 - DNA, 58 bp, Artificial
  Synthetic oligonucleotide
aaactactccctgacccacagaatgaggtctctttgctccaggttgatagaatttcta

SEQ ID NO: 298604 - DNA, 55 bp, Artificial
  Synthetic oligonucleotide
aaactactttgacaaatggataaattctcccatgtttaacgctaggttgaggata

SEQ ID NO: 298605 - DNA, 57 bp, Artificial
  Synthetic oligonucleotide
aaactagacatcgtaagcgcgcttaactataaaccaacgaggaatgatggtatagtg

SEQ ID NO: 298606 - DNA, 60 bp, Artificial
  Synthetic oligonucleotide
aaactagatcagtatgcaaatcacatgggcatttctagaagatcacatcaaattagattt

SEQ ID NO: 298607 - DNA, 56 bp, Artificial
  Synthetic oligonucleotide
aaactagcaggagaatggttgatcacacctgtgggtaggtctaagacaggggaagt

SEQ ID NO: 298608 - DNA, 53 bp, Artificial
  Synthetic oligonucleotide
aaactaggccgtgggagtttcacttgtcggtgtctacctctataagtcactaa

SEQ ID NO: 298609 - DNA, 55 bp, Artificial
  Synthetic oligonucleotide
aaactaggccttgcaaatccagaggttctcccccaatggcaaacatatggtaatt

SEQ ID NO: 298610 - DNA, 55 bp, Artificial
  Synthetic oligonucleotide
aaactagtgaagatccaattggaacatggattttagcgtccgcaaccatgcttcc

SEQ ID NO: 298611 - DNA, 54 bp, Artificial
  Synthetic oligonucleotide
aaactagtgaccaatccattagttggggccaattggactgcttgggcaagatcc

SEQ ID NO: 298612 - DNA, 55 bp, Artificial
  Synthetic oligonucleotide
aaactagtgctgagtcaatagggagtctatgtcaagaattagaatttaggggaga

SEQ ID NO: 298613 - DNA, 51 bp, Artificial
  Synthetic oligonucleotide
aaactagtgttcacccaggcggctaaggctgccaaccccggctcagtgaca

SEQ ID NO: 298614 - DNA, 51 bp, Artificial
  Synthetic oligonucleotide
aaactataatcaatgaatgtataacccttattatatgatcactatatacta

SEQ ID NO: 298615 - DNA, 56 bp, Artificial
  Synthetic oligonucleotide
aaactataatcccaaatattgggtctagaccttgggtaagaggtcaatctggcaga

SEQ ID NO: 298616 - DNA, 55 bp, Artificial
  Synthetic oligonucleotide
aaactatgcgcatggattaaacgagacggtagagtatattggtttgatggtacag

SEQ ID NO: 298617 - DNA, 55 bp, Artificial
  Synthetic oligonucleotide
aaactatggtatcagttagaaaaagaccccatagtgggagcagaaacttactatg

SEQ ID NO: 298618 - DNA, 50 bp, Artificial
  Synthetic oligonucleotide
aaactattgcaggctatccggatagagagggcgagtttagacgcacaggg

SEQ ID NO: 298619 - DNA, 50 bp, Artificial
  Synthetic oligonucleotide
aaactatttagcaaacggagtgattaccacacagtcgtcaacaagtggcg

SEQ ID NO: 298620 - DNA, 52 bp, Artificial
  Synthetic oligonucleotide
aaactcaaaacgtaactgtaaatccaggtccgtttgcccaaactaggtatgc

SEQ ID NO: 298621 - DNA, 53 bp, Artificial
  Synthetic oligonucleotide
aaactcaaagagctagaggatgagcaacgcaacgaacttgttcgtctgaagta

SEQ ID NO: 298622 - DNA, 52 bp, Artificial
  Synthetic oligonucleotide
aaactcaaagagtccagcgaccgttcgagtgttttgaaaggttcctttctcg

SEQ ID NO: 298623 - DNA, 57 bp, Artificial
  Synthetic oligonucleotide
aaactcaacaagtttagaaacaagcttatcgattgaggcaccatggggagcaataaa

SEQ ID NO: 298624 - DNA, 54 bp, Artificial
  Synthetic oligonucleotide
aaactcaaccccttatacccatgaacactttcactatacagtaaccgacacaaa

SEQ ID NO: 298625 - DNA, 53 bp, Artificial
  Synthetic oligonucleotide
aaactcaaccctagcgtcactccgatgctttggggttacgaaaccttcacagg

SEQ ID NO: 298626 - DNA, 55 bp, Artificial
  Synthetic oligonucleotide
aaactcaagcggatgttatcatttatcaaggcaagatgcacaccaaagttcgatc

SEQ ID NO: 298627 - DNA, 55 bp, Artificial
  Synthetic oligonucleotide
aaactcaataaattggcaattcctaatagttgcgttgcacattggttgtccgtcg

SEQ ID NO: 298628 - DNA, 60 bp, Artificial
  Synthetic oligonucleotide
aaactcaattgaccttgaggaaccaagtggacagactgctgattggaaggcaattggagc

SEQ ID NO: 298629 - DNA, 56 bp, Artificial
  Synthetic oligonucleotide
aaactcaattgggctagtcagatttacacgggtatcaaaacaagacacttgtgtaa

SEQ ID NO: 298630 - DNA, 60 bp, Artificial
  Synthetic oligonucleotide
aaactcacaggatacagagctctcctttacaattactggagacaacaccaaatggaatga

SEQ ID NO: 298631 - DNA, 58 bp, Artificial
  Synthetic oligonucleotide
aaactcacatcacaatggagactctctagagaactagctaaaatacccctactaagat

SEQ ID NO: 298632 - DNA, 51 bp, Artificial
  Synthetic oligonucleotide
aaactcacgttgcgtaagtgtgttagtacatcgaattatcaagcaaggatg

SEQ ID NO: 298633 - DNA, 60 bp, Artificial
  Synthetic oligonucleotide
aaactcactctagagattactgactttgacggctctgtttcaacaatagacctgggagca

SEQ ID NO: 298634 - DNA, 57 bp, Artificial
  Synthetic oligonucleotide
aaactcactctagataaaacctgcaaagagataactcgcttaagagagaacgaagag

SEQ ID NO: 298635 - DNA, 60 bp, Artificial
  Synthetic oligonucleotide
aaactcagtgccaattgattcaatgacccgtcataacaacgtttcactcatggtcatccc

SEQ ID NO: 298636 - DNA, 55 bp, Artificial
  Synthetic oligonucleotide
aaactcagttcactctcctccacaattaacaaattcgggatcacgaagcccggga

SEQ ID NO: 298637 - DNA, 60 bp, Artificial
  Synthetic oligonucleotide
aaactcataattaaggaatatgagacaccggacactatgaaccagtgtcttgtgtatata

SEQ ID NO: 298638 - DNA, 60 bp, Artificial
  Synthetic oligonucleotide
aaactcatcgggactgacaattctgtcgtgctctcccgcaagtatacatcctttccatgg

SEQ ID NO: 298639 - DNA, 60 bp, Artificial
  Synthetic oligonucleotide
aaactcatggccaaaccatgagacaactaaaggtgttacagctgcctgctcttactctgg

SEQ ID NO: 298640 - DNA, 50 bp, Artificial
  Synthetic oligonucleotide
aaactccaaacaacaatctcaagtcaccaatctaaactgttcatacatca

SEQ ID NO: 298641 - DNA, 57 bp, Artificial
  Synthetic oligonucleotide
aaactccacctttctaactgtccctcgctgatagtagtatataagactgtagcttgc

SEQ ID NO: 298642 - DNA, 57 bp, Artificial
  Synthetic oligonucleotide
aaactcccaaggaatggcaactggatctaccttgtgataaaattcctagtgtcttga

SEQ ID NO: 298643 - DNA, 55 bp, Artificial
  Synthetic oligonucleotide
aaactccccgcgctataccatcccccaaaaccgaagagcacacaatggggagagc

SEQ ID NO: 298644 - DNA, 53 bp, Artificial
  Synthetic oligonucleotide
aaactcccggtagaacttgcaccccactggcccgtggtgacaacccagaacaa

SEQ ID NO: 298645 - DNA, 53 bp, Artificial
  Synthetic oligonucleotide
aaactccgtcatagtcccgtcgggatccatgagtccgatgaatgcggtaacga

SEQ ID NO: 298646 - DNA, 56 bp, Artificial
  Synthetic oligonucleotide
aaactcctcaaaacacttgactggacccctttcacatactcgctcgaagtggagga

SEQ ID NO: 298647 - DNA, 55 bp, Artificial
  Synthetic oligonucleotide
aaactcctcctctcgtgggtttggacacagttcagctccgggtggagaccatttg

SEQ ID NO: 298648 - DNA, 53 bp, Artificial
  Synthetic oligonucleotide
aaactcctgagaatataactataagcggtagaaagttgctaggctcaaggcac

SEQ ID NO: 298649 - DNA, 52 bp, Artificial
  Synthetic oligonucleotide
aaactccttcccccccaagggtcgcccaggaatggcgggaccccactctgca

SEQ ID NO: 298650 - DNA, 56 bp, Artificial
  Synthetic oligonucleotide
aaactcctttgacaatgaagttgaggattcttctgggtcacggtcgcaggtacaaa

SEQ ID NO: 298651 - DNA, 55 bp, Artificial
  Synthetic oligonucleotide
aaactcgctggcaggtaatatttcgcgtgtggggtgccaaaaacaatgcgccgct

SEQ ID NO: 298652 - DNA, 55 bp, Artificial
  Synthetic oligonucleotide
aaactcggagagcttcgtggaggcgcggcctctggacacttggagggccgtctat

SEQ ID NO: 298653 - DNA, 53 bp, Artificial
  Synthetic oligonucleotide
aaactcggagctagcttcaagtcctcgactttcgctgtacgcagcgattacat

SEQ ID NO: 298654 - DNA, 57 bp, Artificial
  Synthetic oligonucleotide
aaactcgtggacagagaacgtgaactccacaaattgggcaagtgtggaagctgcgtt

SEQ ID NO: 298655 - DNA, 60 bp, Artificial
  Synthetic oligonucleotide
aaactctaatggcctgtataactatgaatatgcaacatgttcaaactctcactaccgaaa

SEQ ID NO: 298656 - DNA, 55 bp, Artificial
  Synthetic oligonucleotide
aaactctcaagggcataccgaaccgtttcggaccctccctgctcataactatgcg

SEQ ID NO: 298657 - DNA, 60 bp, Artificial
  Synthetic oligonucleotide
aaactctccttgcacaatgatctgatccagcaccatttcaggccactaagcaacatgcca

SEQ ID NO: 298658 - DNA, 55 bp, Artificial
  Synthetic oligonucleotide
aaactctgacacccactgagccacaagacttgttggcactacaataagcgttttc

SEQ ID NO: 298659 - DNA, 55 bp, Artificial
  Synthetic oligonucleotide
aaactctgagtgctttggatccgttaccaagttgggagcttggactggtcccaag

SEQ ID NO: 298660 - DNA, 53 bp, Artificial
  Synthetic oligonucleotide
aaactctgctactaccggacccaaccactggtctcgcacgtactaattcccgt

SEQ ID NO: 298661 - DNA, 55 bp, Artificial
  Synthetic oligonucleotide
aaactctgtcccacacaaggatgggtcagattgtgacaatgtttgaggcgttgcc

SEQ ID NO: 298662 - DNA, 57 bp, Artificial
  Synthetic oligonucleotide
aaactctgtcggagccctccaagcaactatcaatggacttgattcgagtgttaccca

SEQ ID NO: 298663 - DNA, 59 bp, Artificial
  Synthetic oligonucleotide
aaactcttatgtgccaccgctgccatgtcaatcgcaggtcccgtacgcgaagcctacgt

SEQ ID NO: 298664 - DNA, 57 bp, Artificial
  Synthetic oligonucleotide
aaactcttcaagatcccagagtcagggccctgaactttcctgctggtggctccagtt

SEQ ID NO: 298665 - DNA, 60 bp, Artificial
  Synthetic oligonucleotide
aaactcttcacaagatctatctctcacaagggagtagaggtctagcaatcagattgaaag

SEQ ID NO: 298666 - DNA, 54 bp, Artificial
  Synthetic oligonucleotide
aaactcttgtcttctcatacaaggaaaacctgagacgtgttaactacgaaagtg

SEQ ID NO: 298667 - DNA, 51 bp, Artificial
  Synthetic oligonucleotide
aaactctttagaggataaggcgtaccagattcccgagtggaccacccagga

SEQ ID NO: 298668 - DNA, 57 bp, Artificial
  Synthetic oligonucleotide
aaactgaagcaccccaactcaacccaattgatggaccattacccgaggataatgagc

SEQ ID NO: 298669 - DNA, 54 bp, Artificial
  Synthetic oligonucleotide
aaactgaatcaaggaagggtaatataccgcaaccttataaaataacattctcag

SEQ ID NO: 298670 - DNA, 56 bp, Artificial
  Synthetic oligonucleotide
aaactgacaacacaaatcactttgaagttgctggtactacagttaaatcagggtgg

SEQ ID NO: 298671 - DNA, 55 bp, Artificial
  Synthetic oligonucleotide
aaactgacacagaaactcagggagtatggtctggtccccacccgacctgacaaaa

SEQ ID NO: 298672 - DNA, 60 bp, Artificial
  Synthetic oligonucleotide
aaactgacactaagcgtgtccttagctcgcaacctcatcagcactgcttttagatacccc

SEQ ID NO: 298673 - DNA, 60 bp, Artificial
  Synthetic oligonucleotide
aaactgacggaattgaacatacagagttggctggcattcataagtgattgctaattttgg

SEQ ID NO: 298674 - DNA, 60 bp, Artificial
  Synthetic oligonucleotide
aaactgactcagggtcgtcagacctatgattggacattaaacaggaatcagccggctgca

SEQ ID NO: 298675 - DNA, 59 bp, Artificial
  Synthetic oligonucleotide
aaactgactgggtgggccagtatgacatatcagaaccctacaagctagacaaatacagc

SEQ ID NO: 298676 - DNA, 58 bp, Artificial
  Synthetic oligonucleotide
aaactgagacagtgtaaatacgtctctaaggaattgtcacttaataggagtggcactg

SEQ ID NO: 298677 - DNA, 55 bp, Artificial
  Synthetic oligonucleotide
aaactgagagcttgaaggtatggtagtccgtcgaccgtcgcgtaatcacgctgac

SEQ ID NO: 298678 - DNA, 60 bp, Artificial
  Synthetic oligonucleotide
aaactgagattgtatccagaaatattgatctgtgactcctcctgagtgattatattcaag

SEQ ID NO: 298679 - DNA, 56 bp, Artificial
  Synthetic oligonucleotide
aaactgatagttaacgctatccagaaccttgaagtatcttttaatccctccagtga

SEQ ID NO: 298680 - DNA, 60 bp, Artificial
  Synthetic oligonucleotide
aaactgatctgcgatcagcatggataaagagtccgctctccatgtgttattggttctctg

SEQ ID NO: 298681 - DNA, 60 bp, Artificial
  Synthetic oligonucleotide
aaactgatggggatcgccagaatgcaactgagattagggcatccgtcgggaagatgattg

SEQ ID NO: 298682 - DNA, 60 bp, Artificial
  Synthetic oligonucleotide
aaactgattacttttgatagaatgatgttgtagtttcttccatgtatcaactcatgtgct

SEQ ID NO: 298683 - DNA, 55 bp, Artificial
  Synthetic oligonucleotide
aaactgattgcaatgcaaatggctttcagggctattatatttgtcttgtgggaag

SEQ ID NO: 298684 - DNA, 51 bp, Artificial
  Synthetic oligonucleotide
aaactgatttcatacctattgaggtgatggggaagttagcagaagtatgtg

SEQ ID NO: 298685 - DNA, 53 bp, Artificial
  Synthetic oligonucleotide
aaactgcaaacaagcttaacactgtttaagtactctagaacaaagaacttacc

SEQ ID NO: 298686 - DNA, 56 bp, Artificial
  Synthetic oligonucleotide
aaactgcaaaccggtgatcgattgggcaaaccaaactctaaccgatgagcaaaagc

SEQ ID NO: 298687 - DNA, 51 bp, Artificial
  Synthetic oligonucleotide
aaactgcagaagattgtttccaacggaggaggcaatagagatcgaataaac

SEQ ID NO: 298688 - DNA, 59 bp, Artificial
  Synthetic oligonucleotide
aaactgccagaaaagcatggacaagtagactgtagtccagggatatggcaattagattg

SEQ ID NO: 298689 - DNA, 54 bp, Artificial
  Synthetic oligonucleotide
aaactgcccctgacgaattacaactctccgatgaaatcggtgaagactatcgcc

SEQ ID NO: 298690 - DNA, 51 bp, Artificial
  Synthetic oligonucleotide
aaactgcgaaaacagttgatgagtctatggtcaaggcccaacgtattcatg

SEQ ID NO: 298691 - DNA, 59 bp, Artificial
  Synthetic oligonucleotide
aaactgcgtatgggaggactacaacagagacttgcttgttagcaccaccacagcccacg

SEQ ID NO: 298692 - DNA, 60 bp, Artificial
  Synthetic oligonucleotide
aaactgcgtgactcctacactcaagtgtgtgaccaccggctaatgtcagctgccatcaag

SEQ ID NO: 298693 - DNA, 60 bp, Artificial
  Synthetic oligonucleotide
aaactgctgtcaacatgttgactcactcaataaatagtttgatatctgacaacctattga

SEQ ID NO: 298694 - DNA, 60 bp, Artificial
  Synthetic oligonucleotide
aaactgctgtccacgcttggctagttagagagggacgcgaacgcctcgcaagaatggcaa

SEQ ID NO: 298695 - DNA, 55 bp, Artificial
  Synthetic oligonucleotide
aaactgctgtggtccaccggtgacggactgtgcctcctgaccaaacggctggagc

SEQ ID NO: 298696 - DNA, 57 bp, Artificial
  Synthetic oligonucleotide
aaactgcttctgtcttggacaatgtccctgtcatgatcgggaaccaaaaacgaccat

SEQ ID NO: 298697 - DNA, 60 bp, Artificial
  Synthetic oligonucleotide
aaactgcttgtaacaagtgctattgtaaagtgtgttgctggcattgtcaagtctgctttc

SEQ ID NO: 298698 - DNA, 59 bp, Artificial
  Synthetic oligonucleotide
aaactggactgttatagtttagctgctacagaccaatcaaatggaatgttgaaacctga

SEQ ID NO: 298699 - DNA, 60 bp, Artificial
  Synthetic oligonucleotide
aaactggatataagtaagtgcacttccgaatggctgagtttatgccgccagcggtagaca

SEQ ID NO: 298700 - DNA, 60 bp, Artificial
  Synthetic oligonucleotide
aaactggcaatcggtctgaggaatgtgcctgctgcatcagataggggactatttggtgcc

SEQ ID NO: 298701 - DNA, 60 bp, Artificial
  Synthetic oligonucleotide
aaactggccatacctaaccgaggagtgaacgcatggctcacagccagtgagtatgcacga

SEQ ID NO: 298702 - DNA, 59 bp, Artificial
  Synthetic oligonucleotide
aaactggccgcaatggtctttcctggcagaactgggcaaagtcatttgattacatggaa

SEQ ID NO: 298703 - DNA, 55 bp, Artificial
  Synthetic oligonucleotide
aaactggccgcgcttacaggtacgtacgtttatgaccacctcactccactgcggg

SEQ ID NO: 298704 - DNA, 56 bp, Artificial
  Synthetic oligonucleotide
aaactggctctcccttagccatccgagtggacgtccgtcctcctacggatgcccag

SEQ ID NO: 298705 - DNA, 60 bp, Artificial
  Synthetic oligonucleotide
aaactggcttaagtttcggtgacgattcactattcgacaagcaatatcagcttagatgga

SEQ ID NO: 298706 - DNA, 54 bp, Artificial
  Synthetic oligonucleotide
aaactggcttaccagaggcgggggggcgtggtagacggtatgtctaggtccaga

SEQ ID NO: 298707 - DNA, 54 bp, Artificial
  Synthetic oligonucleotide
aaactgggacactgacccacgggacggtaccagttgcaagagtgtccggcctgg

SEQ ID NO: 298708 - DNA, 52 bp, Artificial
  Synthetic oligonucleotide
aaactgggacgaggtttcggcgagcccgctgaccatagccacggctagagag

SEQ ID NO: 298709 - DNA, 59 bp, Artificial
  Synthetic oligonucleotide
aaactgggagactgtgaaaatccaatggtcacaggatcccacaatgttgtacaataaga

SEQ ID NO: 298710 - DNA, 56 bp, Artificial
  Synthetic oligonucleotide
aaactgggatcgtttatggcggggtttcgtgatgcgactaatgcgagtgggtggaa

SEQ ID NO: 298711 - DNA, 55 bp, Artificial
  Synthetic oligonucleotide
aaactgggccagccagatttacccagggattaaggtaaggcaactgtgcaaactc

SEQ ID NO: 298712 - DNA, 56 bp, Artificial
  Synthetic oligonucleotide
aaactgggctttccttacgagcaccacgaaggatacttctaaagattagtctgtca

SEQ ID NO: 298713 - DNA, 60 bp, Artificial
  Synthetic oligonucleotide
aaactggggacatggtgagataaatgattccactactgttgagccagtattggatggacc

SEQ ID NO: 298714 - DNA, 54 bp, Artificial
  Synthetic oligonucleotide
aaactgggggtaggtgaaggacaataccccgggactaatccacagagagcaagc

SEQ ID NO: 298715 - DNA, 55 bp, Artificial
  Synthetic oligonucleotide
aaactggtgagactagtgtccccaagtgttggcttgtcactaatggctcttactt

SEQ ID NO: 298716 - DNA, 53 bp, Artificial
  Synthetic oligonucleotide
aaactggtgtctaccgccaaccgaggccgtagagcggggacttcgggcaatcc

SEQ ID NO: 298717 - DNA, 56 bp, Artificial
  Synthetic oligonucleotide
aaactggttgtacaaatcaggtaacacatacccgatgctaaacgttactatgccaa

SEQ ID NO: 298718 - DNA, 49 bp, Artificial
  Synthetic oligonucleotide
aaactggttttttgaaaccggttttgagaactggaacggaattgccgcg

SEQ ID NO: 298719 - DNA, 55 bp, Artificial
  Synthetic oligonucleotide
aaactgtaaggtcgtagtcaattctagacagtgcatccatcagcaaacaggctct

SEQ ID NO: 298720 - DNA, 60 bp, Artificial
  Synthetic oligonucleotide
aaactgtagcaatgtcaatgtcacttgtcctagtcaggggaataagactaacgatgctat

SEQ ID NO: 298721 - DNA, 60 bp, Artificial
  Synthetic oligonucleotide
aaactgtcacctgttcctgcaactcatcctcaaactcctctacagagagatgatatataa

SEQ ID NO: 298722 - DNA, 59 bp, Artificial
  Synthetic oligonucleotide
aaactgtcgtatttcttcaaggactatcagattcctcttgcatggggcgtcttaggatc

SEQ ID NO: 298723 - DNA, 59 bp, Artificial
  Synthetic oligonucleotide
aaactgtctgaagtcactaaacacacagtgtgtcactgtacacattgtggtgaacgggt

SEQ ID NO: 298724 - DNA, 53 bp, Artificial
  Synthetic oligonucleotide
aaactgtgcacggtttccgttgtatgcccgcgatcaaatacttgcaggctgta

SEQ ID NO: 298725 - DNA, 53 bp, Artificial
  Synthetic oligonucleotide
aaactgtgcattttccagtagcccaggcgtaaacgttactaggatttctaacg

SEQ ID NO: 298726 - DNA, 57 bp, Artificial
  Synthetic oligonucleotide
aaactgttagcaatctaaatattgcatataaatacctatcaacaggaaaagcaaagg

SEQ ID NO: 298727 - DNA, 56 bp, Artificial
  Synthetic oligonucleotide
aaactgtttaataatacttgcataggaaatacaagcatggaggggtgtaataacac

SEQ ID NO: 298728 - DNA, 52 bp, Artificial
  Synthetic oligonucleotide
aaactgtttaatagtacttggaagtttaatggtactacttggaattggacta

SEQ ID NO: 298729 - DNA, 56 bp, Artificial
  Synthetic oligonucleotide
aaactgtttaatagtacttgggcaggaaatgaaagcatggagaggggtaatgacaa

SEQ ID NO: 298730 - DNA, 55 bp, Artificial
  Synthetic oligonucleotide
aaactgtttataatggaacaacacaagcgttctctgacgctagtgaattcgacag

SEQ ID NO: 298731 - DNA, 53 bp, Artificial
  Synthetic oligonucleotide
aaacttaaccttatggaaattagttacccatcagttgctataatactaagaac

SEQ ID NO: 298732 - DNA, 57 bp, Artificial
  Synthetic oligonucleotide
aaacttaatagacaggaaatagattcagtgaaactggaaaatctgggtgtatatcaa

SEQ ID NO: 298733 - DNA, 58 bp, Artificial
  Synthetic oligonucleotide
aaacttaatgttctctacactagggaggagtgcacttgggtcttcaaaccacatgaga

SEQ ID NO: 298734 - DNA, 55 bp, Artificial
  Synthetic oligonucleotide
aaacttacagtgatagcggtatgaatggcataacaatcaattcctatggtggtgt

SEQ ID NO: 298735 - DNA, 51 bp, Artificial
  Synthetic oligonucleotide
aaacttacttcccggcctctaatagagaggtttacatgaaggagtttttag

SEQ ID NO: 298736 - DNA, 56 bp, Artificial
  Synthetic oligonucleotide
aaacttatagatttgggacagcttggtattgctacctacggaggggcaggcactaa

SEQ ID NO: 298737 - DNA, 52 bp, Artificial
  Synthetic oligonucleotide
aaacttatcgggacggacaattccgttgtcctttcccgcaaatatacatccg

SEQ ID NO: 298738 - DNA, 48 bp, Artificial
  Synthetic oligonucleotide
aaacttatttcgaaaaagtcgaaaggttgaaacacgggacctttggcc

SEQ ID NO: 298739 - DNA, 58 bp, Artificial
  Synthetic oligonucleotide
aaacttcaaaaggtgctgccctataatctgtggtaaagctttaatgttcagtgataga

SEQ ID NO: 298740 - DNA, 57 bp, Artificial
  Synthetic oligonucleotide
aaacttcaatggacttagacctggaagaagaagctttactcttagaagagctctcac

SEQ ID NO: 298741 - DNA, 60 bp, Artificial
  Synthetic oligonucleotide
aaacttcacagagcttctggattgtgccctggttataaaagcctaagagctgccagagtc

SEQ ID NO: 298742 - DNA, 59 bp, Artificial
  Synthetic oligonucleotide
aaacttcagcaaatgattgacacctatgggcttgacctgccatatgtaacctacttaaa

SEQ ID NO: 298743 - DNA, 52 bp, Artificial
  Synthetic oligonucleotide
aaacttcctcccggttacgtagaagccttggtctgtttctactctaaaatca

SEQ ID NO: 298744 - DNA, 51 bp, Artificial
  Synthetic oligonucleotide
aaacttcctccgtaggaggaagctcagggggagaataccatttctcccccg

SEQ ID NO: 298745 - DNA, 55 bp, Artificial
  Synthetic oligonucleotide
aaacttcgaattccagttacgaaacagatattcaacgtgttcaccagtctaattg

SEQ ID NO: 298746 - DNA, 60 bp, Artificial
  Synthetic oligonucleotide
aaacttcgagtatgtgagaggattcatgcagggtcgacataagtgccagctgtgctttct

SEQ ID NO: 298747 - DNA, 55 bp, Artificial
  Synthetic oligonucleotide
aaacttcgtcatatggtgtatagccgtttggttggaaccaatagccattaggttc

SEQ ID NO: 298748 - DNA, 50 bp, Artificial
  Synthetic oligonucleotide
aaacttcgtgaaagtatgcaagctagaattgcaaaaaacgaacttaaaac

SEQ ID NO: 298749 - DNA, 55 bp, Artificial
  Synthetic oligonucleotide
aaacttctccagccttgaaaactttagagcctatgtggatggattcgaaccgaac

SEQ ID NO: 298750 - DNA, 60 bp, Artificial
  Synthetic oligonucleotide
aaacttctccagtcttgataactttagagcctatgtggatggattcgagccgaatggcta

SEQ ID NO: 298751 - DNA, 55 bp, Artificial
  Synthetic oligonucleotide
aaacttcttaggctcatggcatggaccagaaagaacgacctcaccgaccacatgt

SEQ ID NO: 298752 - DNA, 60 bp, Artificial
  Synthetic oligonucleotide
aaacttgagaccacaatatgaagtaattgagggaatgccaagaactatagcatggatggt

SEQ ID NO: 298753 - DNA, 55 bp, Artificial
  Synthetic oligonucleotide
aaacttgcaacaggaatgaggaacgttcctgaaaaggcatcaagaggtctttttg

SEQ ID NO: 298754 - DNA, 56 bp, Artificial
  Synthetic oligonucleotide
aaacttggaagttcaggtaggctttgtggagatgcaacgctttcctcaggttgtgg

SEQ ID NO: 298755 - DNA, 51 bp, Artificial
  Synthetic oligonucleotide
aaacttgggaaggataaaagctgatatttttgagcttggacatcactgtaa

SEQ ID NO: 298756 - DNA, 56 bp, Artificial
  Synthetic oligonucleotide
aaacttggggttggtgttgcaactgatttcattgtccctgggatccctgatggttg

SEQ ID NO: 298757 - DNA, 55 bp, Artificial
  Synthetic oligonucleotide
aaacttggtttgtacacaaacttacgatcatcccagaggtttaattatgttgatc

SEQ ID NO: 298758 - DNA, 55 bp, Artificial
  Synthetic oligonucleotide
aaacttgtacacttcgcagcgaggtagcccagttgaactagaggcatatgtcaca

SEQ ID NO: 298759 - DNA, 53 bp, Artificial
  Synthetic oligonucleotide
aaacttgtacctgtcatgaaacatctatccgttaatgataaaaaacgtccctt

SEQ ID NO: 298760 - DNA, 58 bp, Artificial
  Synthetic oligonucleotide
aaacttgtatggtacacgtattgaagatagagagatatctttaggtgtatcggactgt

SEQ ID NO: 298761 - DNA, 52 bp, Artificial
  Synthetic oligonucleotide
aaacttgtggatagggtcattgaggtttgccttaggggtgtaaaacccatta

SEQ ID NO: 298762 - DNA, 52 bp, Artificial
  Synthetic oligonucleotide
aaacttgttgtccaagtttgttaggttctagtatttaaatacctacatgtac

SEQ ID NO: 298763 - DNA, 53 bp, Artificial
  Synthetic oligonucleotide
aaactttacacaaccctcaggaggggacttagaaatcacaacacataccttta

SEQ ID NO: 298764 - DNA, 55 bp, Artificial
  Synthetic oligonucleotide
aaactttacgcgaaatttggagggacggctactccatccatgttcaccacgtcac

SEQ ID NO: 298765 - DNA, 55 bp, Artificial
  Synthetic oligonucleotide
aaactttcaatctctcatacgagggttcgaagacactctactcagtatcaggaac

SEQ ID NO: 298766 - DNA, 59 bp, Artificial
  Synthetic oligonucleotide
aaactttcctgcctgagcatgatgacaaagtcctctctatcttagaaaaatttggtgtc

SEQ ID NO: 298767 - DNA, 55 bp, Artificial
  Synthetic oligonucleotide
aaactttgataagactactccgtctcctgtaactgacataagattcctcggcaac

SEQ ID NO: 298768 - DNA, 59 bp, Artificial
  Synthetic oligonucleotide
aaactttggactctgactctaatctagggtttgagagtgaagagtacatccttgagagc

SEQ ID NO: 298769 - DNA, 56 bp, Artificial
  Synthetic oligonucleotide
aaactttggctcagaatgcacgcttggaagtgtactttgtcaagaacttggcaagt

SEQ ID NO: 298770 - DNA, 55 bp, Artificial
  Synthetic oligonucleotide
aaacttttgtactcgataagagataaatatcacgactttagttaactgtcacatt

SEQ ID NO: 298771 - DNA, 55 bp, Artificial
  Synthetic oligonucleotide
aaagaaaatgacatacctcttctagacttaactgtcaccagtctaattaggagcc

SEQ ID NO: 298772 - DNA, 60 bp, Artificial
  Synthetic oligonucleotide
aaagaaaatgctgccgcgagcgcattttgagcgagctaagggcagtgatgcggataatga

SEQ ID NO: 298773 - DNA, 59 bp, Artificial
  Synthetic oligonucleotide
aaagaaaccttaccgatatgtcattagcgcgatatgctttcgatttatacgaaatgaca

SEQ ID NO: 298774 - DNA, 52 bp, Artificial
  Synthetic oligonucleotide
aaagaaacgctaatactaagaagaaggaactattactccttaccttcccaga

SEQ ID NO: 298775 - DNA, 51 bp, Artificial
  Synthetic oligonucleotide
aaagaaactatagatttcttaggaatatctattgacaaaggtacacattca

SEQ ID NO: 298776 - DNA, 55 bp, Artificial
  Synthetic oligonucleotide
aaagaaagattggtctggggctgtagaggtatagaaataggtagaggacagccat

SEQ ID NO: 298777 - DNA, 52 bp, Artificial
  Synthetic oligonucleotide
aaagaaagcctcaacccctggtgctacacctttaaaatcctgggtaaggatc

SEQ ID NO: 298778 - DNA, 55 bp, Artificial
  Synthetic oligonucleotide
aaagaaagggcacgcctccgcgcctcgaaagaagctcgtaagggctatctgttcg

SEQ ID NO: 298779 - DNA, 50 bp, Artificial
  Synthetic oligonucleotide
aaagaaatcttagacgtcttaaaaaactctaaagataaacaggttatccc

SEQ ID NO: 298780 - DNA, 54 bp, Artificial
  Synthetic oligonucleotide
aaagaaatgggatgattacccctggcaaacctcttcaaacccgtccatattcta

SEQ ID NO: 298781 - DNA, 55 bp, Artificial
  Synthetic oligonucleotide
aaagaacaagcgggtcctcagttaaaagagaggaagaagtgcttacaggcaatct

SEQ ID NO: 298782 - DNA, 59 bp, Artificial
  Synthetic oligonucleotide
aaagaacaagctgagcttgttaaagagacgctgcaagtctcttgaaactgtggaatatc

SEQ ID NO: 298783 - DNA, 55 bp, Artificial
  Synthetic oligonucleotide
aaagaacaagtggatcgtctgtcaagagggaagaagaaatgcttacaggcaacct

SEQ ID NO: 298784 - DNA, 57 bp, Artificial
  Synthetic oligonucleotide
aaagaacaatttgtttggattggatggaaatgtcagcacgaaggaggaaaacacaga

SEQ ID NO: 298785 - DNA, 57 bp, Artificial
  Synthetic oligonucleotide
aaagaacatggagaacagtataccgtgcatccacccttattcttgaccttgctattt

SEQ ID NO: 298786 - DNA, 60 bp, Artificial
  Synthetic oligonucleotide
aaagaacctcatgttggcctgttgcagtaggtatgccatttgcgggcgtgtattgtatcg

SEQ ID NO: 298787 - DNA, 55 bp, Artificial
  Synthetic oligonucleotide
aaagaacctctacccctacagttgtcaccgcagtcctcccagacaccaatggacc

SEQ ID NO: 298788 - DNA, 54 bp, Artificial
  Synthetic oligonucleotide
aaagaacggaacttacgatcataaggaatatgaagaggaggctaaactagaaag

SEQ ID NO: 298789 - DNA, 55 bp, Artificial
  Synthetic oligonucleotide
aaagaacgttactgtcacacatgctcaagacatacttgaaaggacacacaacggg

SEQ ID NO: 298790 - DNA, 57 bp, Artificial
  Synthetic oligonucleotide
aaagaacgttgatgacaaaggcaatgtaactggttctgccccgccagtgagtaagga

SEQ ID NO: 298791 - DNA, 60 bp, Artificial
  Synthetic oligonucleotide
aaagaactagagtgtataccttgtcaaacatctggactgacatatatatcctcctattgt

SEQ ID NO: 298792 - DNA, 57 bp, Artificial
  Synthetic oligonucleotide
aaagaactggatgacagaaaccctgctggtccaaaatgcaaatccagattgtaaaaa

SEQ ID NO: 298793 - DNA, 59 bp, Artificial
  Synthetic oligonucleotide
aaagaactgtattgtgttatatggtccaccaaacacaggcaagtcatactttggtatga

SEQ ID NO: 298794 - DNA, 58 bp, Artificial
  Synthetic oligonucleotide
aaagaactgtgtaaactcctcaggggagccaaagcactaacagatatagtaacactga

SEQ ID NO: 298795 - DNA, 58 bp, Artificial
  Synthetic oligonucleotide
aaagaactttttattgcttcgagccatcatgtcaatctcagccccgtgtaattgaaat

SEQ ID NO: 298796 - DNA, 55 bp, Artificial
  Synthetic oligonucleotide
aaagaagagacagaccctagtactcaaacaatggcaacccgacgttaacagactg

SEQ ID NO: 298797 - DNA, 58 bp, Artificial
  Synthetic oligonucleotide
aaagaagagcatagccaaagatgctatccgcaaacctcaatctgacagttctatcggg

SEQ ID NO: 298798 - DNA, 55 bp, Artificial
  Synthetic oligonucleotide
aaagaagagcgcaactgcgcatgtgttgggcccgtggcgttggaggggagggatg

SEQ ID NO: 298799 - DNA, 55 bp, Artificial
  Synthetic oligonucleotide
aaagaagaggtcaggggttagtaagatagctatggttatccgtgacaatttctcc

SEQ ID NO: 298800 - DNA, 58 bp, Artificial
  Synthetic oligonucleotide
aaagaagatactggataacaaggcgttcaccgttgaaagtggtgaatgcataataaca

SEQ ID NO: 298801 - DNA, 60 bp, Artificial
  Synthetic oligonucleotide
aaagaagcgtaaggaggcgatgttggggacacatgtgatctgggacataggattgcagtc

SEQ ID NO: 298802 - DNA, 53 bp, Artificial
  Synthetic oligonucleotide
aaagaagctcgttttcgaagacgaaactggagcaggcgacggaccccctgagg

SEQ ID NO: 298803 - DNA, 51 bp, Artificial
  Synthetic oligonucleotide
aaagaaggactcggacgcgaacccgtgagtggaaacctcgttctttattgg

SEQ ID NO: 298804 - DNA, 54 bp, Artificial
  Synthetic oligonucleotide
aaagaaggcggtcgaaaggagtgatgctaacgttacagcctttcttaagatgga

SEQ ID NO: 298805 - DNA, 59 bp, Artificial
  Synthetic oligonucleotide
aaagaaggctaggcggcttctaggtatgtggcagccctcactgtacaatgtccccggca

SEQ ID NO: 298806 - DNA, 52 bp, Artificial
  Synthetic oligonucleotide
aaagaaggggctagccctcgccttgagagttaattagtgttaaataagttag

SEQ ID NO: 298807 - DNA, 52 bp, Artificial
  Synthetic oligonucleotide
aaagaaggggtgggctctccgatccgaggggcccaaccaccaagtttggaga

SEQ ID NO: 298808 - DNA, 53 bp, Artificial
  Synthetic oligonucleotide
aaagaaggtggaccccacggatggccacgcccatgaaagaaagtggtccccgc

SEQ ID NO: 298809 - DNA, 56 bp, Artificial
  Synthetic oligonucleotide
aaagaaggtttaagtgctacggcaccgcatcttgatagggtcacagggttcaacca

SEQ ID NO: 298810 - DNA, 60 bp, Artificial
  Synthetic oligonucleotide
aaagaagtgctagtatggaagtttgacagcaccctagcattccatcacgtggcccgagag

SEQ ID NO: 298811 - DNA, 50 bp, Artificial
  Synthetic oligonucleotide
aaagaatacttatgggatggactgcaatcttctgatgattttgccctgtt

SEQ ID NO: 298812 - DNA, 55 bp, Artificial
  Synthetic oligonucleotide
aaagaatcggtacaacgagataccctgttgggatcactctcgagtaattttaata

SEQ ID NO: 298813 - DNA, 55 bp, Artificial
  Synthetic oligonucleotide
aaagaatgaaagtgaggcgaagatttcatctgtttcgactgacctttgcatttaa

SEQ ID NO: 298814 - DNA, 55 bp, Artificial
  Synthetic oligonucleotide
aaagaatgaatagagcaattcctgtgggaccggaaccttcaagtcaagccaaccg

SEQ ID NO: 298815 - DNA, 54 bp, Artificial
  Synthetic oligonucleotide
aaagaatgagggtgatttccctttcacctggagaaatggtttcccccatgatct

SEQ ID NO: 298816 - DNA, 60 bp, Artificial
  Synthetic oligonucleotide
aaagaatggaggacgtgatgccatttctattcacgtactatcagctggcagcgaaatccg

SEQ ID NO: 298817 - DNA, 58 bp, Artificial
  Synthetic oligonucleotide
aaagaattaagtgctttaactgtggcaaagaaggacatctagccagaaattgcagggc

SEQ ID NO: 298818 - DNA, 53 bp, Artificial
  Synthetic oligonucleotide
aaagaattcggatggccatcaattagtgtcgaattgtttaaaaacgaccttgt

SEQ ID NO: 298819 - DNA, 57 bp, Artificial
  Synthetic oligonucleotide
aaagaatttttatctcaagatcaagtcagtaaattcttgagatatattgccccggga

SEQ ID NO: 298820 - DNA, 54 bp, Artificial
  Synthetic oligonucleotide
aaagacaagggggctctttggggcaattgctggttttatagagaatgggtggga

SEQ ID NO: 298821 - DNA, 57 bp, Artificial
  Synthetic oligonucleotide
aaagacacaatgatggtggatatagaagggtcgacgtgtttatctactaggcgttct

SEQ ID NO: 298822 - DNA, 55 bp, Artificial
  Synthetic oligonucleotide
aaagacaccacggaatgggaacactcacgtggatttgagagctgggaagaagtcc

SEQ ID NO: 298823 - DNA, 54 bp, Artificial
  Synthetic oligonucleotide
aaagacacctggagactaaggagaggttccatgatatagcgggagtgtggaacg

SEQ ID NO: 298824 - DNA, 53 bp, Artificial
  Synthetic oligonucleotide
aaagacacgctctcgcagttatttctgactaagggatggcctactggatccat

SEQ ID NO: 298825 - DNA, 54 bp, Artificial
  Synthetic oligonucleotide
aaagacacgctgcttttcaatacttccaatggaatacaatcttttggtgcggcg

SEQ ID NO: 298826 - DNA, 56 bp, Artificial
  Synthetic oligonucleotide
aaagacagaagcccttaccgaactttgatgagctgtcctgttggtgaagccccctc

SEQ ID NO: 298827 - DNA, 55 bp, Artificial
  Synthetic oligonucleotide
aaagacagagctgaagggtcgatataagatccaacatgttacgagggagcttctt

SEQ ID NO: 298828 - DNA, 60 bp, Artificial
  Synthetic oligonucleotide
aaagacaggaaagtatgctaggcaaaaggccactcatactaatgacatcagacagttggc

SEQ ID NO: 298829 - DNA, 60 bp, Artificial
  Synthetic oligonucleotide
aaagacaggatatcagtggtccaggctctagttttgactcaacaatatcaccagctgaag

SEQ ID NO: 298830 - DNA, 60 bp, Artificial
  Synthetic oligonucleotide
aaagacaggattcaacatacaggacatggacattgtggcctctgaacatctgctgcatca

SEQ ID NO: 298831 - DNA, 52 bp, Artificial
  Synthetic oligonucleotide
aaagacagtaacacctcaaactgttggccctggatgttataggacgttgaac

SEQ ID NO: 298832 - DNA, 55 bp, Artificial
  Synthetic oligonucleotide
aaagacagtggactggaacccgcctatcccggtagacagcgtcgcgacttacaaa

SEQ ID NO: 298833 - DNA, 51 bp, Artificial
  Synthetic oligonucleotide
aaagacagtttttattcccgaaggtctcggtgttcctaataccactataag

SEQ ID NO: 298834 - DNA, 51 bp, Artificial
  Synthetic oligonucleotide
aaagacataaaattaccgataacaacaaataatcaagcttagagcgaattg

SEQ ID NO: 298835 - DNA, 60 bp, Artificial
  Synthetic oligonucleotide
aaagacatactgtgtgtctggacaactggtagaaggcacatgcttcaatccgatccacac

SEQ ID NO: 298836 - DNA, 55 bp, Artificial
  Synthetic oligonucleotide
aaagacatgtggaccaataaaaaacgtccctcatagcttaattattcactggtcc

SEQ ID NO: 298837 - DNA, 53 bp, Artificial
  Synthetic oligonucleotide
aaagaccaaaccctgccgtcttcatgagccatcaacaagcggagggacatcca

SEQ ID NO: 298838 - DNA, 56 bp, Artificial
  Synthetic oligonucleotide
aaagacccaaagtaagagatcaagaagggagaattaactactactggactctgctg

SEQ ID NO: 298839 - DNA, 55 bp, Artificial
  Synthetic oligonucleotide
aaagacccgggaattgaagtctaagtgtccactgagataattgtgtgggcctaag

SEQ ID NO: 298840 - DNA, 53 bp, Artificial
  Synthetic oligonucleotide
aaagaccctaagaaaactggaggacccatatacaggagaatagacggaaagtg

SEQ ID NO: 298841 - DNA, 59 bp, Artificial
  Synthetic oligonucleotide
aaagaccctaccagcactgaattcgcccactgtggaggagtgcggatatagcgacaggg

SEQ ID NO: 298842 - DNA, 55 bp, Artificial
  Synthetic oligonucleotide
aaagaccctgcgtccgcgctccttggtatgttgagccgcgaccctaacgaagaag

SEQ ID NO: 298843 - DNA, 55 bp, Artificial
  Synthetic oligonucleotide
aaagaccgtgtgtggcccggtatattgtttcacgcccagtcctgtggtggtggga

SEQ ID NO: 298844 - DNA, 60 bp, Artificial
  Synthetic oligonucleotide
aaagacctattgctctaagcaagcaagctgtaagaagaatgctgtcaatgaatattgagg

SEQ ID NO: 298845 - DNA, 58 bp, Artificial
  Synthetic oligonucleotide
aaagacctctacagggcaatcaaaaactacagaaccagagtttgtagtgcacagagta

SEQ ID NO: 298846 - DNA, 57 bp, Artificial
  Synthetic oligonucleotide
aaagaccttttcacagattacatgttcgtcaagtggaaagttgagtacattaagaca

SEQ ID NO: 298847 - DNA, 57 bp, Artificial
  Synthetic oligonucleotide
aaagacgaccccaacaagatgcgaaccatctggggcgcttccaaaccctggatcatc

SEQ ID NO: 298848 - DNA, 54 bp, Artificial
  Synthetic oligonucleotide
aaagacgaccctgtaggttatgttgagaaccgtgaattcctcgaccgctataaa

SEQ ID NO: 298849 - DNA, 56 bp, Artificial
  Synthetic oligonucleotide
aaagacgagactttatattgggccaccatcgacgctcggctttcacttgccacccc

SEQ ID NO: 298850 - DNA, 60 bp, Artificial
  Synthetic oligonucleotide
aaagacgatgcactcgagactgacgagttagtacttcatgttgacgtcgagcaccaacgt

SEQ ID NO: 298851 - DNA, 60 bp, Artificial
  Synthetic oligonucleotide
aaagacgccgtcacatgcgactataaattgtctcacaagcgcgattcattcatggatcct

SEQ ID NO: 298852 - DNA, 60 bp, Artificial
  Synthetic oligonucleotide
aaagacgcctccagatacatccactctccttatagaggattcaaccccatatacgcctgc

SEQ ID NO: 298853 - DNA, 60 bp, Artificial
  Synthetic oligonucleotide
aaagacgctggcaacttccatgtgttagaccatagtgcgtatgcttatgatagcgacttt

SEQ ID NO: 298854 - DNA, 60 bp, Artificial
  Synthetic oligonucleotide
aaagacgtcggatatgatgcacatcataacgatggatcctgataatcattggattattga

SEQ ID NO: 298855 - DNA, 50 bp, Artificial
  Synthetic oligonucleotide
aaagactaagttctctcactattcagggagacaagatccgagaagtagga

SEQ ID NO: 298856 - DNA, 60 bp, Artificial
  Synthetic oligonucleotide
aaagactacaatgatattaacacattttctgtgaatccacaactgtattgtgattataat

SEQ ID NO: 298857 - DNA, 60 bp, Artificial
  Synthetic oligonucleotide
aaagactatcatattcttgtggatcagagcctaagctgatagtgatcaagggaacattgg

SEQ ID NO: 298858 - DNA, 51 bp, Artificial
  Synthetic oligonucleotide
aaagactatctaaacactgttagtagaatattaatcaaagttaaggtggag

SEQ ID NO: 298859 - DNA, 56 bp, Artificial
  Synthetic oligonucleotide
aaagactatcttttgcgttacgacacgaaaagtatgaaagtaggctactgagaaca

SEQ ID NO: 298860 - DNA, 59 bp, Artificial
  Synthetic oligonucleotide
aaagactccgataacgcctctactgactacacaactccgtggcaagcagtgggcgctcg

SEQ ID NO: 298861 - DNA, 57 bp, Artificial
  Synthetic oligonucleotide
aaagactctggactgttccccagtcagcctgacatcaacaagtttcaagtctttcct

SEQ ID NO: 298862 - DNA, 60 bp, Artificial
  Synthetic oligonucleotide
aaagactggtccttcattggagctgatggctgagataaatcgatatcttgattacaatta

SEQ ID NO: 298863 - DNA, 51 bp, Artificial
  Synthetic oligonucleotide
aaagactgtaacccgagcagaaaacagaaaccggtcacattaaaattcaga

SEQ ID NO: 298864 - DNA, 56 bp, Artificial
  Synthetic oligonucleotide
aaagactgtaatgagaggcaggctaattttttagggaagatctggccttcccagag

SEQ ID NO: 298865 - DNA, 59 bp, Artificial
  Synthetic oligonucleotide
aaagactgttaaaataacagctgtgatagcggataaatcaacagtctcgcgtgttccac

SEQ ID NO: 298866 - DNA, 58 bp, Artificial
  Synthetic oligonucleotide
aaagactgttaagtgtttcaattgtggcaaagaaggacacatagccagaaattgcagg

SEQ ID NO: 298867 - DNA, 55 bp, Artificial
  Synthetic oligonucleotide
aaagacttaggtaattgtcacccgatagggatggtaatagggactcctgcctgtg

SEQ ID NO: 298868 - DNA, 52 bp, Artificial
  Synthetic oligonucleotide
aaagacttctgcgtcacccagttccagccgaagtaagtcttttcgttcctac

SEQ ID NO: 298869 - DNA, 56 bp, Artificial
  Synthetic oligonucleotide
aaagagaaagtttatctctcatgggtcccagcacacaaaggaatagggggtaatga

SEQ ID NO: 298870 - DNA, 52 bp, Artificial
  Synthetic oligonucleotide
aaagagaaatggttttagctcaccctttattagggtacctcacaaaaaatgc

SEQ ID NO: 298871 - DNA, 54 bp, Artificial
  Synthetic oligonucleotide
aaagagaatcatagggcaggtaagagagcaagctgaacaccttaagacagcagt

SEQ ID NO: 298872 - DNA, 56 bp, Artificial
  Synthetic oligonucleotide
aaagagaccgaagtactttcacagacgtaggcaggttgttttgaataatgtagcag

SEQ ID NO: 298873 - DNA, 58 bp, Artificial
  Synthetic oligonucleotide
aaagagacgggatacctgcgacgcaggttccatagagtgtgtggtaatcattcccgga

SEQ ID NO: 298874 - DNA, 60 bp, Artificial
  Synthetic oligonucleotide
aaagagagataacattccatggagccaaggaagtggcactcagctactcagctggtgcac

SEQ ID NO: 298875 - DNA, 53 bp, Artificial
  Synthetic oligonucleotide
aaagagagcaacggggctagccgtcaggtgttccaccccccgagaggggacga

SEQ ID NO: 298876 - DNA, 57 bp, Artificial
  Synthetic oligonucleotide
aaagagaggggtactccctggtcggaatagatccattccgtctgcttcagaacagcc

SEQ ID NO: 298877 - DNA, 60 bp, Artificial
  Synthetic oligonucleotide
aaagagatatctaaccaagagccactaaagatatagtaacctgcttgcatagcttctact

SEQ ID NO: 298878 - DNA, 55 bp, Artificial
  Synthetic oligonucleotide
aaagagatccccgtctgacaactgactttaacacggctttgttctctaaatataa

SEQ ID NO: 298879 - DNA, 60 bp, Artificial
  Synthetic oligonucleotide
aaagagatcgtcaactgcattggtatgccgcaagactacgcaactttctgggcgatgtgt

SEQ ID NO: 298880 - DNA, 58 bp, Artificial
  Synthetic oligonucleotide
aaagagatggtggcggaatatcgcaacaaaattgaggcgttacgtggagcaattgagg

SEQ ID NO: 298881 - DNA, 54 bp, Artificial
  Synthetic oligonucleotide
aaagagattgagacaactgccactgccgaaggaggtgaaatcgttttccaaaat

SEQ ID NO: 298882 - DNA, 58 bp, Artificial
  Synthetic oligonucleotide
aaagagcaaattacattcggacaatcaagaatgtttattccacatataacattgagtt

SEQ ID NO: 298883 - DNA, 59 bp, Artificial
  Synthetic oligonucleotide
aaagagcaatggtggatcaagtgagagaaagtcggaacccaggaaatgctgaaatcgaa

SEQ ID NO: 298884 - DNA, 59 bp, Artificial
  Synthetic oligonucleotide
aaagagcagattcgaggtacccgcaaatgtcgcagacgactacagttcaaaggagcaaa

SEQ ID NO: 298885 - DNA, 58 bp, Artificial
  Synthetic oligonucleotide
aaagagcagtggaggtggaccccgatgatgttaacaaaagcacactacagagtagacg

SEQ ID NO: 298886 - DNA, 57 bp, Artificial
  Synthetic oligonucleotide
aaagagcagtgggactaggagctttgttccttgggttcttgggaacagcaggaagca

SEQ ID NO: 298887 - DNA, 52 bp, Artificial
  Synthetic oligonucleotide
aaagagcctacaatccaacactccccgtggcaaaatcgaagggcacattccc

SEQ ID NO: 298888 - DNA, 55 bp, Artificial
  Synthetic oligonucleotide
aaagagcgagcctcccagttcgagagtcccggacccctcggctctggagtccacc

SEQ ID NO: 298889 - DNA, 56 bp, Artificial
  Synthetic oligonucleotide
aaagagcggggttaccaagattacattaaagagttagattcaataagatctggaga

SEQ ID NO: 298890 - DNA, 54 bp, Artificial
  Synthetic oligonucleotide
aaagagcgtcgtatacacaatagcaagactcacgtacccatctttgagttactg

SEQ ID NO: 298891 - DNA, 60 bp, Artificial
  Synthetic oligonucleotide
aaagagcgttcatgtctttatctagtcagaagtcaggaatagctgatgagatagctgcat

SEQ ID NO: 298892 - DNA, 56 bp, Artificial
  Synthetic oligonucleotide
aaagagctacgggcttatggtaaatcgtttgggtggaactatgacatagagttcac

SEQ ID NO: 298893 - DNA, 55 bp, Artificial
  Synthetic oligonucleotide
aaagagctcttttataacatggggagcaagttgtcaaaaggatgggccgaggtaa

SEQ ID NO: 298894 - DNA, 57 bp, Artificial
  Synthetic oligonucleotide
aaagagctgttgcttggtccgtctaacgctaaaaattggcgacgagcttggatcgaa

SEQ ID NO: 298895 - DNA, 57 bp, Artificial
  Synthetic oligonucleotide
aaagaggaacttttgtggagaatcgaaatcttggcatccagacgtcacgcgtgaagt

SEQ ID NO: 298896 - DNA, 53 bp, Artificial
  Synthetic oligonucleotide
aaagaggaataaagctcacctcatgggtagaagtaattgtaaagacgtttacg

SEQ ID NO: 298897 - DNA, 50 bp, Artificial
  Synthetic oligonucleotide
aaagaggacagagtacacaatgggatcaagcagcagttttgtattctaac

SEQ ID NO: 298898 - DNA, 59 bp, Artificial
  Synthetic oligonucleotide
aaagaggacagagtacacaatgggatcaagcagcggttttatactcaaattatatagta

SEQ ID NO: 298899 - DNA, 54 bp, Artificial
  Synthetic oligonucleotide
aaagaggctgactccttcgttgaggacggccctaaggagggacctggctagccc

SEQ ID NO: 298900 - DNA, 53 bp, Artificial
  Synthetic oligonucleotide
aaagagggaaggcgaaagaccaatttgtacggtttcatcataaaaggaagatc

SEQ ID NO: 298901 - DNA, 58 bp, Artificial
  Synthetic oligonucleotide
aaagagggagaggtgttatttctatgagatacgctgataccgtagtgctaaaatatac

SEQ ID NO: 298902 - DNA, 57 bp, Artificial
  Synthetic oligonucleotide
aaagagggcagaaagggattcaaaggagaagtcagtcatgcacatgtacgacatgtg

SEQ ID NO: 298903 - DNA, 54 bp, Artificial
  Synthetic oligonucleotide
aaagagggcagcgcgactggcgaccggaatttctgacggtcccgttgtagttgt

SEQ ID NO: 298904 - DNA, 52 bp, Artificial
  Synthetic oligonucleotide
aaagagggtctactacctcacccgtgaccccacaacccccctcgcgagagcc

SEQ ID NO: 298905 - DNA, 55 bp, Artificial
  Synthetic oligonucleotide
aaagaggtgcaagctcttaaggttatcattcataacttcgagcaaaggctcttgg

SEQ ID NO: 298906 - DNA, 57 bp, Artificial
  Synthetic oligonucleotide
aaagaggtggagagtcagggaggcccagagggtcttagagtgtcacaacattcgggc

SEQ ID NO: 298907 - DNA, 54 bp, Artificial
  Synthetic oligonucleotide
aaagaggtggagagtcagggaggccccgtggggaccttagagtgtcacaacatt

SEQ ID NO: 298908 - DNA, 56 bp, Artificial
  Synthetic oligonucleotide
aaagagtcactggtgggtcaagactccatcctagagaagtctctaaaggctctagt

SEQ ID NO: 298909 - DNA, 56 bp, Artificial
  Synthetic oligonucleotide
aaagagtcgacatacctgagagttggtgaaccaggcggtaagggtcgatcctccca

SEQ ID NO: 298910 - DNA, 51 bp, Artificial
  Synthetic oligonucleotide
aaagagtcggacacgatcatctccaaggttatattcagatgaagaaacatg

SEQ ID NO: 298911 - DNA, 55 bp, Artificial
  Synthetic oligonucleotide
aaagagtgagagtccctgtgagttcacccctagtagtgtgacaggggaaaacgcg

SEQ ID NO: 298912 - DNA, 60 bp, Artificial
  Synthetic oligonucleotide
aaagagtgcctagagcttaatgaagagtcaggacactgctcgctaataaatgtagaggat

SEQ ID NO: 298913 - DNA, 60 bp, Artificial
  Synthetic oligonucleotide
aaagagtgtttactcaattcatagggacagagatgggaccattgctgcagacgcgatggg

SEQ ID NO: 298914 - DNA, 54 bp, Artificial
  Synthetic oligonucleotide
aaagagttaacgacatcctatcaagccctctcccgaggttggcaaaactactaa

SEQ ID NO: 298915 - DNA, 54 bp, Artificial
  Synthetic oligonucleotide
aaagagttaagtacgtaagggaacaaggatcttttatattgtatgatgtaccta

SEQ ID NO: 298916 - DNA, 60 bp, Artificial
  Synthetic oligonucleotide
aaagagttgcacctatacctagatatactggattcatggctgtgatgctatgcttgttat

SEQ ID NO: 298917 - DNA, 52 bp, Artificial
  Synthetic oligonucleotide
aaagagtttttcgactcgtttaaaaagacttggcaccctgaagcatttgtgg

SEQ ID NO: 298918 - DNA, 55 bp, Artificial
  Synthetic oligonucleotide
aaagataagtctcgtcgtaagaattactgtcacgtatctgttccgtcaggtgcaa

SEQ ID NO: 298919 - DNA, 53 bp, Artificial
  Synthetic oligonucleotide
aaagataagtgttgcactgtcatacccttgaatagagctatccgggctagatc

SEQ ID NO: 298920 - DNA, 55 bp, Artificial
  Synthetic oligonucleotide
aaagataagttcacacttggttttaactgggtgttggacaaatctgaggatgtgg

SEQ ID NO: 298921 - DNA, 58 bp, Artificial
  Synthetic oligonucleotide
aaagataatagtgtaagaatcggttccaagggggatgtgtttgtcatgagagagccat

SEQ ID NO: 298922 - DNA, 56 bp, Artificial
  Synthetic oligonucleotide
aaagatacaataaagcttaaacaagaaagatggctcggtaagagactatcgcaatt

SEQ ID NO: 298923 - DNA, 59 bp, Artificial
  Synthetic oligonucleotide
aaagatacagaagaagtgactaatgttgaattgtgtctaacatttgcagataaaacgta

SEQ ID NO: 298924 - DNA, 51 bp, Artificial
  Synthetic oligonucleotide
aaagatacctcatggagcctaaatgcaccttaaaaaagggaccccgggtag

SEQ ID NO: 298925 - DNA, 59 bp, Artificial
  Synthetic oligonucleotide
aaagatacctcggtgtctcatcttctcgcacttctcccacagccttacggtgctagtat

SEQ ID NO: 298926 - DNA, 51 bp, Artificial
  Synthetic oligonucleotide
aaagatactcgtatggtttctgtaatagtactggaccagcttggacataag

SEQ ID NO: 298927 - DNA, 51 bp, Artificial
  Synthetic oligonucleotide
aaagatacttcactcaattatcacatcgtcgaagcaggattcaagcgcgct

SEQ ID NO: 298928 - DNA, 60 bp, Artificial
  Synthetic oligonucleotide
aaagatataaccacttaatcatatatgcactgattatagatgtagtgagttactaacatg

SEQ ID NO: 298929 - DNA, 60 bp, Artificial
  Synthetic oligonucleotide
aaagatataagcgatttgaagcaatatgatagtgacgaacctgaattaaggtcactctca

SEQ ID NO: 298930 - DNA, 60 bp, Artificial
  Synthetic oligonucleotide
aaagatcaaaggaccacagatgatcgtgaaatctacacaggtaatgcacaagttagactc

SEQ ID NO: 298931 - DNA, 59 bp, Artificial
  Synthetic oligonucleotide
aaagatcatcacgtacgaggcgcatctcgacattcacgagctactactggggtgaattt

SEQ ID NO: 298932 - DNA, 55 bp, Artificial
  Synthetic oligonucleotide
aaagatccagagagagtcacggaagatactaagaagctaatactcaagggctgtg

SEQ ID NO: 298933 - DNA, 56 bp, Artificial
  Synthetic oligonucleotide
aaagatccagtttactcgaccaagctgtgccggcattattggatggggaccgtccc

SEQ ID NO: 298934 - DNA, 60 bp, Artificial
  Synthetic oligonucleotide
aaagatccatgtgttgctcactcctgtgtcatctgtgctgaggggatcatcaattaccag

SEQ ID NO: 298935 - DNA, 59 bp, Artificial
  Synthetic oligonucleotide
aaagatccctgacggtctcgttaaattctctgtcgacgcggagataagagagatctaca

SEQ ID NO: 298936 - DNA, 52 bp, Artificial
  Synthetic oligonucleotide
aaagatcgtataacgtttcgaaaacacgattaaacattttaacaggtgcggc

SEQ ID NO: 298937 - DNA, 55 bp, Artificial
  Synthetic oligonucleotide
aaagatctatagtacaatcggaaaagcggcggagcgattcgctgagagtgagata

SEQ ID NO: 298938 - DNA, 55 bp, Artificial
  Synthetic oligonucleotide
aaagatgaggccaagagatatggcacatctggcaagtatgaggtgttacatgaac

SEQ ID NO: 298939 - DNA, 59 bp, Artificial
  Synthetic oligonucleotide
aaagatgatgactaattcacaagacacagagctttctttcacaatcactggggacaaca

SEQ ID NO: 298940 - DNA, 56 bp, Artificial
  Synthetic oligonucleotide
aaagatgattcatcctacgaagaagttaacggaatcagaaaaccgagacatcttta

SEQ ID NO: 298941 - DNA, 55 bp, Artificial
  Synthetic oligonucleotide
aaagatggacatacgcacaggcgtgtgcatcactagacaagaccacttccagcgg

SEQ ID NO: 298942 - DNA, 53 bp, Artificial
  Synthetic oligonucleotide
aaagatggaggaacgtgtacgagattcagttacttattttagttcaaaaagat

SEQ ID NO: 298943 - DNA, 55 bp, Artificial
  Synthetic oligonucleotide
aaagattagacactatcgtctgtaccaacttagtgagctgcgctctccgacaggc

SEQ ID NO: 298944 - DNA, 56 bp, Artificial
  Synthetic oligonucleotide
aaagattcacgctcaggttacgagactttcaaggttattggtggttggtccacagc

SEQ ID NO: 298945 - DNA, 58 bp, Artificial
  Synthetic oligonucleotide
aaagattctataccagatgtgcaaactttgtttgaagtttttacgtctgtgcaagata

SEQ ID NO: 298946 - DNA, 56 bp, Artificial
  Synthetic oligonucleotide
aaagattctggactgttctccggtcagtctgacatcaacaagttttaaatctttcc

SEQ ID NO: 298947 - DNA, 60 bp, Artificial
  Synthetic oligonucleotide
aaagattgatttatggtcatataatgcagagctgttagttgcacttgaaaaccaacacac

SEQ ID NO: 298948 - DNA, 56 bp, Artificial
  Synthetic oligonucleotide
aaagattgccggctacgtcataagtcacctgactggggaggaggcacaacccggaa

SEQ ID NO: 298949 - DNA, 60 bp, Artificial
  Synthetic oligonucleotide
aaagattgctttccgggcttgtgccaacatttatccatctcaggactatcctgcactaat

SEQ ID NO: 298950 - DNA, 59 bp, Artificial
  Synthetic oligonucleotide
aaagattgtatgttacagttggacccaagtagcaaaacatggatagatattgagggcag

SEQ ID NO: 298951 - DNA, 53 bp, Artificial
  Synthetic oligonucleotide
aaagatttaatctgtcttgaaccatactcggtaagccctatgctagaaaagtt

SEQ ID NO: 298952 - DNA, 55 bp, Artificial
  Synthetic oligonucleotide
aaagatttatcgtatgatccagcgtgggctatgaactttgcggtttcaatgaggg

SEQ ID NO: 298953 - DNA, 55 bp, Artificial
  Synthetic oligonucleotide
aaagatttgaggttattgatcgtactgattcatggccacagatcaccgagactag

SEQ ID NO: 298954 - DNA, 53 bp, Artificial
  Synthetic oligonucleotide
aaagcaaacaccaacaatccagattgggacttcaaccccaaaaaggacaactg

SEQ ID NO: 298955 - DNA, 53 bp, Artificial
  Synthetic oligonucleotide
aaagcaaagaaagcaacggggctagcgagtggatgttcctccccccgaaggtc

SEQ ID NO: 298956 - DNA, 58 bp, Artificial
  Synthetic oligonucleotide
aaagcaaagctatctggatggtcaaagatgtctattcagatactgaacgacaatccaa

SEQ ID NO: 298957 - DNA, 53 bp, Artificial
  Synthetic oligonucleotide
aaagcaaccagtaacactcgggagaggagagttcgctaaatttgtcaaaaact

SEQ ID NO: 298958 - DNA, 54 bp, Artificial
  Synthetic oligonucleotide
aaagcaacggggctagccggtgaatgttccgcccaacgagaggggacgagtgag

SEQ ID NO: 298959 - DNA, 54 bp, Artificial
  Synthetic oligonucleotide
aaagcaagctaatggatggttctatagacatcattatgagagcagacatccaaa

SEQ ID NO: 298960 - DNA, 58 bp, Artificial
  Synthetic oligonucleotide
aaagcaaggaatgttctaagcattgcagaagtactatgttcgtgcaacagtgctccac

SEQ ID NO: 298961 - DNA, 59 bp, Artificial
  Synthetic oligonucleotide
aaagcaagtaaaacctctacagatgtgatatggctcaggttattaattccctgacctga

SEQ ID NO: 298962 - DNA, 60 bp, Artificial
  Synthetic oligonucleotide
aaagcaatacttaggcttgcactaagtaatatcttttgctattgtcagtgtcatccagcc

SEQ ID NO: 298963 - DNA, 57 bp, Artificial
  Synthetic oligonucleotide
aaagcaataggaaagagtatggatattgatggtaaagtagggcaatatgaaacctta

SEQ ID NO: 298964 - DNA, 55 bp, Artificial
  Synthetic oligonucleotide
aaagcaatccaactcatggacaagtcgtctagagtcagatacagtgtagaccaga

SEQ ID NO: 298965 - DNA, 60 bp, Artificial
  Synthetic oligonucleotide
aaagcacaaggatggcagtgcactatcagtcataccggacggtggcaacccccgactgct

SEQ ID NO: 298966 - DNA, 57 bp, Artificial
  Synthetic oligonucleotide
aaagcacagtagatggaagctgtgaatcctttgtcctggccgttaaacccgttatga

SEQ ID NO: 298967 - DNA, 59 bp, Artificial
  Synthetic oligonucleotide
aaagcactaacagaagtagtaccactaacagaagaagcagagctagaactggcagaaaa

SEQ ID NO: 298968 - DNA, 55 bp, Artificial
  Synthetic oligonucleotide
aaagcactatatgatgaaacacttaatatgggcaagcagggagctggaaagattt

SEQ ID NO: 298969 - DNA, 53 bp, Artificial
  Synthetic oligonucleotide
aaagcactatttgaagttgtatacgaaatccctgttcccgtatgtttagtggg

SEQ ID NO: 298970 - DNA, 55 bp, Artificial
  Synthetic oligonucleotide
aaagcagagtacttataccactacccaaacaatgtcacacaggtagacttcatag

SEQ ID NO: 298971 - DNA, 57 bp, Artificial
  Synthetic oligonucleotide
aaagcagatcggatctcgattgtcacatctgaacatggtgacgctcaacgagtcgag

SEQ ID NO: 298972 - DNA, 55 bp, Artificial
  Synthetic oligonucleotide
aaagcaggcaaaccatttgaatggatgtcaatccgactctacttttcctaaaggt

SEQ ID NO: 298973 - DNA, 52 bp, Artificial
  Synthetic oligonucleotide
aaagcaggtggaccccacaatatgaccgcgtccgttaaagaaagtggtcccc

SEQ ID NO: 298974 - DNA, 57 bp, Artificial
  Synthetic oligonucleotide
aaagcagtaaagacaaacacaaatttagattcattagtacccatgtcaatgaattaa

SEQ ID NO: 298975 - DNA, 60 bp, Artificial
  Synthetic oligonucleotide
aaagcagtcgaagtctaccgggtgagagaaagctacacaagcatatgcctctttgtatta

SEQ ID NO: 298976 - DNA, 60 bp, Artificial
  Synthetic oligonucleotide
aaagcagtgcgtgaaacgatggtgaacacctatgaagagaacgatgtactagcagacttc

SEQ ID NO: 298977 - DNA, 59 bp, Artificial
  Synthetic oligonucleotide
aaagcagtgtcacttcgtgacatctttgcgaagatccgccaagtgatccctacagagga

SEQ ID NO: 298978 - DNA, 57 bp, Artificial
  Synthetic oligonucleotide
aaagcagttcggggtgatctgaacttcgtcaatagggcaaaccagcggctgaaccca

SEQ ID NO: 298979 - DNA, 55 bp, Artificial
  Synthetic oligonucleotide
aaagcagttctcggtctagctctagtgcccacaagaaaacagctgtagcgaccac

SEQ ID NO: 298980 - DNA, 60 bp, Artificial
  Synthetic oligonucleotide
aaagcagttgaagtggacccagatgacgttaacaagagcacactacaaagcagacgggca

SEQ ID NO: 298981 - DNA, 59 bp, Artificial
  Synthetic oligonucleotide
aaagcataaattcattatgtccatcacgccgtatgtgtgtagctataatggttgtactg

SEQ ID NO: 298982 - DNA, 60 bp, Artificial
  Synthetic oligonucleotide
aaagcatactagagagtacgcagaattttactcgcagtcaaatcaattgttatcatatgg

SEQ ID NO: 298983 - DNA, 60 bp, Artificial
  Synthetic oligonucleotide
aaagcatccggagtactataaagattgctgacacagatgttgctgacaagggactttcca

SEQ ID NO: 298984 - DNA, 57 bp, Artificial
  Synthetic oligonucleotide
aaagcatgaccgaggaagcgatacaagagatagcaggaatgacgtcagatgtcctag

SEQ ID NO: 298985 - DNA, 60 bp, Artificial
  Synthetic oligonucleotide
aaagcatgataacaaataccatgtgaatataccaagtgcgttgaaaatacattcagaaca

SEQ ID NO: 298986 - DNA, 53 bp, Artificial
  Synthetic oligonucleotide
aaagcatgcagccgacaccgcgttggcatgggctactcggcactacaagtcgt

SEQ ID NO: 298987 - DNA, 60 bp, Artificial
  Synthetic oligonucleotide
aaagcatgggaggattttctgcagtgcaccagtggagaatctgaacaagttgagggggga

SEQ ID NO: 298988 - DNA, 60 bp, Artificial
  Synthetic oligonucleotide
aaagcatgtgctgtcatgtcatttaacatactcaggcacaccacagatgaaatgtatgat

SEQ ID NO: 298989 - DNA, 51 bp, Artificial
  Synthetic oligonucleotide
aaagcatgttgcatagctgttgacatattattaactgcactgacggaacta

SEQ ID NO: 298990 - DNA, 55 bp, Artificial
  Synthetic oligonucleotide
aaagcatgttttgtcgtgtagaatatgtacaacctatggaacagatctctacctg

SEQ ID NO: 298991 - DNA, 55 bp, Artificial
  Synthetic oligonucleotide
aaagcattcaagacctgtttaacggccaactggttaatgacgaccattcctcgac

SEQ ID NO: 298992 - DNA, 55 bp, Artificial
  Synthetic oligonucleotide
aaagcattcttctcctggtctttgacagactcatccggcaaggatacccctggag

SEQ ID NO: 298993 - DNA, 54 bp, Artificial
  Synthetic oligonucleotide
aaagccaaaagggaaagttgtggatcttggttgcgggagaggaggatggtcgta

SEQ ID NO: 298994 - DNA, 60 bp, Artificial
  Synthetic oligonucleotide
aaagccaaggtagcgcacacagcgaatcctacgttttgcggatggaatctgtgccctgat

SEQ ID NO: 298995 - DNA, 50 bp, Artificial
  Synthetic oligonucleotide
aaagccacagaggaacaatatgtaggtgcttatgttgttgaaccagtacc

SEQ ID NO: 298996 - DNA, 60 bp, Artificial
  Synthetic oligonucleotide
aaagccacaggacgctagttgcgaacagggtgtgaagagcctattgagctacatgagatt

SEQ ID NO: 298997 - DNA, 54 bp, Artificial
  Synthetic oligonucleotide
aaagccacatcgggcgatttaatatcttgcgatcagcgtttcaacgacgtcgaa

SEQ ID NO: 298998 - DNA, 55 bp, Artificial
  Synthetic oligonucleotide
aaagccacctcgatacacgtcaacgtgcattttgaggttgtcacaccgcgcggtg

SEQ ID NO: 298999 - DNA, 53 bp, Artificial
  Synthetic oligonucleotide
aaagccacctttggaggaggaccgtaccacgccccaggatagtgttggttcaa

SEQ ID NO: 299000 - DNA, 55 bp, Artificial
  Synthetic oligonucleotide
aaagccacgacgctaccgcttcgcgcaaaattttcgcccttctggtctggtccag

SEQ ID NO: 299001 - DNA, 51 bp, Artificial
  Synthetic oligonucleotide
aaagccacgttgatgtagacacatgcgacaagaaccagttgaatttaacgg

SEQ ID NO: 299002 - DNA, 55 bp, Artificial
  Synthetic oligonucleotide
aaagccaggggagaccttgaatgtggaatccaatggaaatctaattgccccttgg

SEQ ID NO: 299003 - DNA, 59 bp, Artificial
  Synthetic oligonucleotide
aaagccatgtgtcaaattgaccccactatgtgttactttaaattgcactgaattgaaga

SEQ ID NO: 299004 - DNA, 57 bp, Artificial
  Synthetic oligonucleotide
aaagccatgttgggcaagggacaccccttttggctatgtgcgggataatggattctc

SEQ ID NO: 299005 - DNA, 55 bp, Artificial
  Synthetic oligonucleotide
aaagcccaaatccactttgagggatcaggagctcaggttatgggaccaatgggac

SEQ ID NO: 299006 - DNA, 60 bp, Artificial
  Synthetic oligonucleotide
aaagcccaataacttccccagcgcaaacaatccttctgatgagtgctgctcctacagcta

SEQ ID NO: 299007 - DNA, 60 bp, Artificial
  Synthetic oligonucleotide
aaagcccaggcctaatcagcctggtcagacactcctggggtccatcaggagacggatcgc

SEQ ID NO: 299008 - DNA, 59 bp, Artificial
  Synthetic oligonucleotide
aaagcccagtctttgagtgcagaattcttttcttcgtccaagtactctttatatgatga

SEQ ID NO: 299009 - DNA, 60 bp, Artificial
  Synthetic oligonucleotide
aaagcccgaacactgcacgacctatgcgagcaacgtgaggagagccagcacgaagtgcaa

SEQ ID NO: 299010 - DNA, 58 bp, Artificial
  Synthetic oligonucleotide
aaagcccgacgactgagcggtccaccccaggcgtgattccggttgctctgcgtgattc

SEQ ID NO: 299011 - DNA, 56 bp, Artificial
  Synthetic oligonucleotide
aaagcccgcgatcgttcctagcgcgcctgtggccgtagagagcgtgtctaaaaaac

SEQ ID NO: 299012 - DNA, 50 bp, Artificial
  Synthetic oligonucleotide
aaagcccgctaaacttacgttctggccggaggactgggacactaaaccgg

SEQ ID NO: 299013 - DNA, 60 bp, Artificial
  Synthetic oligonucleotide
aaagcccgtacagcgccgcaaggcgaagcagcgggcactgccaccacagcatcagtccct

SEQ ID NO: 299014 - DNA, 57 bp, Artificial
  Synthetic oligonucleotide
aaagccctccagagggaggacccccttcagcgaacagaagagcgtcagacgcgtcag

SEQ ID NO: 299015 - DNA, 59 bp, Artificial
  Synthetic oligonucleotide
aaagccctccgatcagccgcctccatactccccgcagtcatctaatatgcccgtgaccg

SEQ ID NO: 299016 - DNA, 52 bp, Artificial
  Synthetic oligonucleotide
aaagccgcaggtctgaacgtatcacagaagaagtcattctacgttgaaggga

SEQ ID NO: 299017 - DNA, 55 bp, Artificial
  Synthetic oligonucleotide
aaagccgcgcctgctcccggctgttggtttcggtcagaatggacaggccgatcag

SEQ ID NO: 299018 - DNA, 58 bp, Artificial
  Synthetic oligonucleotide
aaagccgctgaattgttcgcgcttaccttgcgtgtacgcgcaggaaacactgacgtcc

SEQ ID NO: 299019 - DNA, 55 bp, Artificial
  Synthetic oligonucleotide
aaagccgcttgttgttcttcagtaaacaactcattatctagtacacctcctccaa

SEQ ID NO: 299020 - DNA, 58 bp, Artificial
  Synthetic oligonucleotide
aaagccggaagtcgaatggtggatatcgcgcgagagttcagtgaagtctacgtcaagt

SEQ ID NO: 299021 - DNA, 50 bp, Artificial
  Synthetic oligonucleotide
aaagccggatacggggtctagaacctttgctccctggtagcccacggccc

SEQ ID NO: 299022 - DNA, 56 bp, Artificial
  Synthetic oligonucleotide
aaagccggcactcccttagccatccgagtggacgtccgtcctccttcggatgccca

SEQ ID NO: 299023 - DNA, 55 bp, Artificial
  Synthetic oligonucleotide
aaagccggcctacacaccacaagagcgaggccaatgggcggagttctgcggctac

SEQ ID NO: 299024 - DNA, 54 bp, Artificial
  Synthetic oligonucleotide
aaagccgtcccaatgtcgcgaggccgtcggtattccccagtacattacgataac

SEQ ID NO: 299025 - DNA, 54 bp, Artificial
  Synthetic oligonucleotide
aaagccgtcgaccatctaaacaagggaggtacctgtgttgccctaggctacgga

SEQ ID NO: 299026 - DNA, 54 bp, Artificial
  Synthetic oligonucleotide
aaagcctagacttatagtgttctctaaccaactcacataggttttaggacccga

SEQ ID NO: 299027 - DNA, 58 bp, Artificial
  Synthetic oligonucleotide
aaagcctcaataaagcttgctttgagtgcttaaagtggtgtgtgcccatctgtgttag

SEQ ID NO: 299028 - DNA, 60 bp, Artificial
  Synthetic oligonucleotide
aaagcctcctatgcgatggcttatcacctgagtcgtcgtatgaggaagcatacaattgta

SEQ ID NO: 299029 - DNA, 51 bp, Artificial
  Synthetic oligonucleotide
aaagcctcgcccctgcagaagactctcctcagcttcgacgagccttccccg

SEQ ID NO: 299030 - DNA, 58 bp, Artificial
  Synthetic oligonucleotide
aaagcctgaggcttgcaactggactaagaaatgttccacagattgaaactagaggact

SEQ ID NO: 299031 - DNA, 55 bp, Artificial
  Synthetic oligonucleotide
aaagccttcaaacctatgtaacacaacaactaatcagggctgctgaaatcagggc

SEQ ID NO: 299032 - DNA, 57 bp, Artificial
  Synthetic oligonucleotide
aaagcgaaacagaggctggtggagaagacttcgaggggtcattagagcaggaactac

SEQ ID NO: 299033 - DNA, 56 bp, Artificial
  Synthetic oligonucleotide
aaagcgaataagttgccatcttctgtcacacctgatgtgatattgtgtagtgctag

SEQ ID NO: 299034 - DNA, 57 bp, Artificial
  Synthetic oligonucleotide
aaagcgactaccgcttccgacaaatctgacagcgccgaagagcctaagaaattagac

SEQ ID NO: 299035 - DNA, 58 bp, Artificial
  Synthetic oligonucleotide
aaagcgaggaacgctggtcgtgctagtggtaccggcacgcaggcgcaggaaactgaag

SEQ ID NO: 299036 - DNA, 55 bp, Artificial
  Synthetic oligonucleotide
aaagcgagggctggccaagctcagtcacctggccggagatgccccaatgagctgg

SEQ ID NO: 299037 - DNA, 54 bp, Artificial
  Synthetic oligonucleotide
aaagcgatcagaggtttgtgccaccttaaaacgcacaacaaaaagctttcgtac

SEQ ID NO: 299038 - DNA, 51 bp, Artificial
  Synthetic oligonucleotide
aaagcgatttcaccaacgacacacatttagacatgtcactcactagatgca

SEQ ID NO: 299039 - DNA, 60 bp, Artificial
  Synthetic oligonucleotide
aaagcgcaattgtcaccgggtattgcaccaatggtggcgacagagtacagaagagcaagt

SEQ ID NO: 299040 - DNA, 53 bp, Artificial
  Synthetic oligonucleotide
aaagcgccctaatgaggtattcttggttaacaaagattgtgttctgaacaata

SEQ ID NO: 299041 - DNA, 59 bp, Artificial
  Synthetic oligonucleotide
aaagcgcgttagtatagacatacgtaatatatgctactataaacacagtttgtgcgtag

SEQ ID NO: 299042 - DNA, 60 bp, Artificial
  Synthetic oligonucleotide
aaagcgctgcgagagccttgggatagggtctgtacttggtggcgcaaactgctccgtcag

SEQ ID NO: 299043 - DNA, 51 bp, Artificial
  Synthetic oligonucleotide
aaagcgcttctcgctagattcatatggtggttgcaatatctcctcaccagg

SEQ ID NO: 299044 - DNA, 60 bp, Artificial
  Synthetic oligonucleotide
aaagcgcttgagtttggcactcagtcgcatactaactttgagagtcgtgatctgtttact

SEQ ID NO: 299045 - DNA, 55 bp, Artificial
  Synthetic oligonucleotide
aaagcggacattttatgcaccaaaagagaactgcaatgtttcaggacccacagga

SEQ ID NO: 299046 - DNA, 56 bp, Artificial
  Synthetic oligonucleotide
aaagcggcctccgtgaccttatgggcaattatcagcatttggttcggtctttattg

SEQ ID NO: 299047 - DNA, 60 bp, Artificial
  Synthetic oligonucleotide
aaagcggcggagcgatttgctgagagtgagataggttcagcggcgatcgatggattagta

SEQ ID NO: 299048 - DNA, 59 bp, Artificial
  Synthetic oligonucleotide
aaagcgggtgacagtgggatcgttctgttagcacgcagactctttgggtggcacagcgg

SEQ ID NO: 299049 - DNA, 54 bp, Artificial
  Synthetic oligonucleotide
aaagcggtctaattttacatgacacgctccaaatacggaatccctcaaagtttg

SEQ ID NO: 299050 - DNA, 55 bp, Artificial
  Synthetic oligonucleotide
aaagcggtgataagagccggtgttaatggtgtacgtgcagttggccatgacggac

SEQ ID NO: 299051 - DNA, 55 bp, Artificial
  Synthetic oligonucleotide
aaagcggttaggccataaggacataatgactacgtacaacacgtatacgcacgtc

SEQ ID NO: 299052 - DNA, 60 bp, Artificial
  Synthetic oligonucleotide
aaagcgtaaacaagggaagaagcctcatggcgatgcgcagaaagagagtgccgaggagga

SEQ ID NO: 299053 - DNA, 55 bp, Artificial
  Synthetic oligonucleotide
aaagcgtaacaatggccatcatttatctcatactcctgttcacagcagtgagggg

SEQ ID NO: 299054 - DNA, 58 bp, Artificial
  Synthetic oligonucleotide
aaagcgtaaccaagaccgaccatacatgccacgatatggtcttcagcgcaatttaacc

SEQ ID NO: 299055 - DNA, 58 bp, Artificial
  Synthetic oligonucleotide
aaagcgtcttagcttgatcaactcgtattctgatgataattttgaagtggaaagaaaa

SEQ ID NO: 299056 - DNA, 55 bp, Artificial
  Synthetic oligonucleotide
aaagcgtgtggcatattagcagggtctaaacccttaaccatagggtcactacctg

SEQ ID NO: 299057 - DNA, 55 bp, Artificial
  Synthetic oligonucleotide
aaagcgttctggagtcagatacagcagaccaggcgaagggcatgttggttgggat

SEQ ID NO: 299058 - DNA, 58 bp, Artificial
  Synthetic oligonucleotide
aaagctaagaacttgattgtcactgagagtggtgccccaccgaccgacttgcaaaaga

SEQ ID NO: 299059 - DNA, 55 bp, Artificial
  Synthetic oligonucleotide
aaagctaataaatcttcgctgcattaggcagagacttgtgagagacattgcctgg

SEQ ID NO: 299060 - DNA, 55 bp, Artificial
  Synthetic oligonucleotide
aaagctaatcagcctcaatgtttcaacagaagaatactcagcagaggtatctagg

SEQ ID NO: 299061 - DNA, 59 bp, Artificial
  Synthetic oligonucleotide
aaagctacgagccgtttatgcaggatggtagcaaaccgaatggtgttaagcggccagca

SEQ ID NO: 299062 - DNA, 56 bp, Artificial
  Synthetic oligonucleotide
aaagctacgcaccctccagcagacgtaactgctagccgtcggataaccagggcatg

SEQ ID NO: 299063 - DNA, 54 bp, Artificial
  Synthetic oligonucleotide
aaagctagacatttgtggtaggaagtttttttttcataaagtgagaggctcttg

SEQ ID NO: 299064 - DNA, 58 bp, Artificial
  Synthetic oligonucleotide
aaagctataactatcgatcaggcgttaaatggaaagcttggttcagctattagaaata

SEQ ID NO: 299065 - DNA, 55 bp, Artificial
  Synthetic oligonucleotide
aaagctatatcaaaatccaaccacctatgtttccgttggaacgtcaacactgaac

SEQ ID NO: 299066 - DNA, 55 bp, Artificial
  Synthetic oligonucleotide
aaagctcaggtcgagaccgggcctttgtccggcgctcccttggagcctacctaga

SEQ ID NO: 299067 - DNA, 60 bp, Artificial
  Synthetic oligonucleotide
aaagctccaagatcaatgatgaatccattcataagattgggttcattattgatgggtaaa

SEQ ID NO: 299068 - DNA, 54 bp, Artificial
  Synthetic oligonucleotide
aaagctcgatcttccgaacaaaactgcttcgtggaaacccaactgggaagataa

SEQ ID NO: 299069 - DNA, 58 bp, Artificial
  Synthetic oligonucleotide
aaagctctaatattccgatagaaatacgacaccacagtcgtaattggactatcgttca

SEQ ID NO: 299070 - DNA, 59 bp, Artificial
  Synthetic oligonucleotide
aaagctgagataagaggcgcgtgcaaatgcgcccaaaaagttaacattctctctcctat

SEQ ID NO: 299071 - DNA, 53 bp, Artificial
  Synthetic oligonucleotide
aaagctgatcgacagagtcactggacaaggacttttggactactcgagggtca

SEQ ID NO: 299072 - DNA, 60 bp, Artificial
  Synthetic oligonucleotide
aaagctgcacttggtcaacagcgtgaattggctctccagcgcattggcttggaccgccaa

SEQ ID NO: 299073 - DNA, 56 bp, Artificial
  Synthetic oligonucleotide
aaagctgcctgttggtgggcggggataaagcaggaatttggcataccctacaatcc

SEQ ID NO: 299074 - DNA, 59 bp, Artificial
  Synthetic oligonucleotide
aaagctgcttctcattgttcaggcacttagggacaacctggaacctggcaccttcgatc

SEQ ID NO: 299075 - DNA, 60 bp, Artificial
  Synthetic oligonucleotide
aaagctggacagactcttgcttgctttcaacattctgcccgttgcagatttgcaccctac

SEQ ID NO: 299076 - DNA, 56 bp, Artificial
  Synthetic oligonucleotide
aaagctggactgtcaatgatatacaaaagttagtgggaaaactaaattgggcaagc

SEQ ID NO: 299077 - DNA, 55 bp, Artificial
  Synthetic oligonucleotide
aaagctggcgacccaacctgcaacacggcgcaggcaccatcacaccgccactgtg

SEQ ID NO: 299078 - DNA, 55 bp, Artificial
  Synthetic oligonucleotide
aaagctgtgcacgaacgaacaactactgtccttgctttcactcaccgctgaacca

SEQ ID NO: 299079 - DNA, 57 bp, Artificial
  Synthetic oligonucleotide
aaagcttaccgttgacaataccagataattctgacctaactaggaaataatcatctg

SEQ ID NO: 299080 - DNA, 59 bp, Artificial
  Synthetic oligonucleotide
aaagcttactatactgcttcagaagacgttgcttacttgactggatttataaagcctga

SEQ ID NO: 299081 - DNA, 56 bp, Artificial
  Synthetic oligonucleotide
aaagcttagaagcactgtagcagctttgttttggtataaaggcagttccaactcgg

SEQ ID NO: 299082 - DNA, 60 bp, Artificial
  Synthetic oligonucleotide
aaagcttatattcatcacgctgagattctatataattaaaggcatttggtggattaacta

SEQ ID NO: 299083 - DNA, 60 bp, Artificial
  Synthetic oligonucleotide
aaagcttatcaatgcgcttcgccttatttatggcgactcacaatatattgtcgaaacact

SEQ ID NO: 299084 - DNA, 55 bp, Artificial
  Synthetic oligonucleotide
aaagcttctccaactagtgaaccgtaccagcctcctcatcccgaacctccaatct

SEQ ID NO: 299085 - DNA, 54 bp, Artificial
  Synthetic oligonucleotide
aaagcttggcccctaaatataaatctagaccagaggccccctattagccttgct

SEQ ID NO: 299086 - DNA, 60 bp, Artificial
  Synthetic oligonucleotide
aaagcttggccggcaacatggaaagtgagccgggagctgtgtcatcgcttcgtggtgaaa

SEQ ID NO: 299087 - DNA, 55 bp, Artificial
  Synthetic oligonucleotide
aaagcttggtgtcctagaccccccagagcagttacgtataaccatatatacaacc

SEQ ID NO: 299088 - DNA, 52 bp, Artificial
  Synthetic oligonucleotide
aaagctttccacctaaacccagggattgtgactggtagtgcggtcggatgtg

SEQ ID NO: 299089 - DNA, 55 bp, Artificial
  Synthetic oligonucleotide
aaagctttccgtgtgagcacgtgagagattaaatggctttctcgtacagaacgcc

SEQ ID NO: 299090 - DNA, 60 bp, Artificial
  Synthetic oligonucleotide
aaagctttgacattctcagcagatgatgagacatctctggagaaggctataacagaagca

SEQ ID NO: 299091 - DNA, 60 bp, Artificial
  Synthetic oligonucleotide
aaagctttgatatctctcagtgccccaagattggaggacatggtagcaagaagtgcactg

SEQ ID NO: 299092 - DNA, 55 bp, Artificial
  Synthetic oligonucleotide
aaagctttgctagacaaagatggaaagtaccctgtagaagtttggagcccagacc

SEQ ID NO: 299093 - DNA, 59 bp, Artificial
  Synthetic oligonucleotide
aaagcttttaaagaaaggaatcgcgggcgatgaattcactatgtcgcttgatatagcca

SEQ ID NO: 299094 - DNA, 55 bp, Artificial
  Synthetic oligonucleotide
aaagcttttaccactccatcttggacattgggtatgtgcctaacgaaattcctaa

SEQ ID NO: 299095 - DNA, 56 bp, Artificial
  Synthetic oligonucleotide
aaaggaaaaatcttacccacgctccgccgtaaatcagacacactcaaggagtgcaa

SEQ ID NO: 299096 - DNA, 56 bp, Artificial
  Synthetic oligonucleotide
aaaggaaacggatgttttgaaattttccatcagtgtgacaacaactgcattgaaag

SEQ ID NO: 299097 - DNA, 59 bp, Artificial
  Synthetic oligonucleotide
aaaggaaatctactcaagatgatgaatgactcaatggctaagaaaaccaatggaaatgc

SEQ ID NO: 299098 - DNA, 59 bp, Artificial
  Synthetic oligonucleotide
aaaggaacagtatcttactacgtcccgacagactcatcagctcgattatttgcttacaa

SEQ ID NO: 299099 - DNA, 52 bp, Artificial
  Synthetic oligonucleotide
aaaggaaccgacaaccactttgcggacttcctttcaagagaattcaataagg

SEQ ID NO: 299100 - DNA, 52 bp, Artificial
  Synthetic oligonucleotide
aaaggaactgcaacgttacccaaatgcgagaactacccgttttagattcggc

SEQ ID NO: 299101 - DNA, 56 bp, Artificial
  Synthetic oligonucleotide
aaaggaagactaatggactgggtcaatgcaactgggccttatttgaaatgggcttg

SEQ ID NO: 299102 - DNA, 54 bp, Artificial
  Synthetic oligonucleotide
aaaggaagagatgcaaaagcagtgcctttcttttaggctggaaagtgctctcac

SEQ ID NO: 299103 - DNA, 55 bp, Artificial
  Synthetic oligonucleotide
aaaggaagaggatcacagtactggatgtaggtgacgcatatttctccatacctct

SEQ ID NO: 299104 - DNA, 53 bp, Artificial
  Synthetic oligonucleotide
aaaggaaggacatgaagggttctcgccagtggtactggaccaaggacgttaac

SEQ ID NO: 299105 - DNA, 54 bp, Artificial
  Synthetic oligonucleotide
aaaggaatacatagtaattcccacccacccaccctaaagacataaggtcatata

SEQ ID NO: 299106 - DNA, 55 bp, Artificial
  Synthetic oligonucleotide
aaaggaatagccccactacaattgaggaaatgtaacattgctggatggatcctgg

SEQ ID NO: 299107 - DNA, 51 bp, Artificial
  Synthetic oligonucleotide
aaaggaatcttatcccccactacttatccttttatatttttccgtgtcatt

SEQ ID NO: 299108 - DNA, 57 bp, Artificial
  Synthetic oligonucleotide
aaaggaatgagcaagggcaaaccctctggagcaaaacaaacgatgccggctcagacc

SEQ ID NO: 299109 - DNA, 55 bp, Artificial
  Synthetic oligonucleotide
aaaggaatgggacggaaaactcgcaattttgtgcatttatatggtgtggagcctg

SEQ ID NO: 299110 - DNA, 55 bp, Artificial
  Synthetic oligonucleotide
aaaggaatgtggctttcgtgagattatcccgaaccagtattagtttgtatactgg

SEQ ID NO: 299111 - DNA, 57 bp, Artificial
  Synthetic oligonucleotide
aaaggaattagacgaaatgtcattcagcgacattcaaaagttctactctgaagtttg

SEQ ID NO: 299112 - DNA, 55 bp, Artificial
  Synthetic oligonucleotide
aaaggaattcgctttattgcaagacgatttaacagtattacggtacgctaatgaa

SEQ ID NO: 299113 - DNA, 57 bp, Artificial
  Synthetic oligonucleotide
aaaggaatttcaccgaccaatgcgtttctttgagtggttatcaatgcgtgtatatgg

SEQ ID NO: 299114 - DNA, 54 bp, Artificial
  Synthetic oligonucleotide
aaaggacaaacaagtgcaactggtgtgttaattggaaaaaatacagttctaaca

SEQ ID NO: 299115 - DNA, 55 bp, Artificial
  Synthetic oligonucleotide
aaaggacaaccactagcccagtcagaggaacaaaccccagaggtcgattcttatg

SEQ ID NO: 299116 - DNA, 52 bp, Artificial
  Synthetic oligonucleotide
aaaggacaaccctgtcaatggcctatgctaccctggggatttcaacgactat

SEQ ID NO: 299117 - DNA, 60 bp, Artificial
  Synthetic oligonucleotide
aaaggacaagctcatggggttgtgaagagttcggatgtctagcaataagtgatgggtgcg

SEQ ID NO: 299118 - DNA, 55 bp, Artificial
  Synthetic oligonucleotide
aaaggacctgcacctagtgaaccatacaagttaatggcttcactacttaaacctg

SEQ ID NO: 299119 - DNA, 51 bp, Artificial
  Synthetic oligonucleotide
aaaggacggagccgagacttttatcgtcggcactcattccgcagggggcaa

SEQ ID NO: 299120 - DNA, 58 bp, Artificial
  Synthetic oligonucleotide
aaaggactgacgccgttcacaacatttaatgttatggagggatatgaattaatctaca

SEQ ID NO: 299121 - DNA, 58 bp, Artificial
  Synthetic oligonucleotide
aaaggactgggtctgccctacatagattcaaatctgcaaggtacagtgaaggtggtta

SEQ ID NO: 299122 - DNA, 53 bp, Artificial
  Synthetic oligonucleotide
aaaggactgtttaatagtacttggaagctggttaatagtacttgggagctggt

SEQ ID NO: 299123 - DNA, 55 bp, Artificial
  Synthetic oligonucleotide
aaaggacttagcgtgttgctaaacataccggaaaagcacatgcttattgagcccc

SEQ ID NO: 299124 - DNA, 60 bp, Artificial
  Synthetic oligonucleotide
aaaggacttggtgagctacatgcggccatgacagaagatctccgagccttagaggagtct

SEQ ID NO: 299125 - DNA, 48 bp, Artificial
  Synthetic oligonucleotide
aaaggactttttacgtcctaaccagggtattcaaatccctaaaaagaa

SEQ ID NO: 299126 - DNA, 60 bp, Artificial
  Synthetic oligonucleotide
aaaggagaagtcagtcatgcacatgtacgacatgtgctgcaaagcattaggaggaccccc

SEQ ID NO: 299127 - DNA, 53 bp, Artificial
  Synthetic oligonucleotide
aaaggagaagttgcgttggtttgacacttttgaggggaatacactcaagcccc

SEQ ID NO: 299128 - DNA, 60 bp, Artificial
  Synthetic oligonucleotide
aaaggagaattagccgctcatagtgatctaggctattggattgagagcaggtcaaaaaac

SEQ ID NO: 299129 - DNA, 55 bp, Artificial
  Synthetic oligonucleotide
aaaggagagatgaaaccgaagatggacacgtcctcttacagtacttacaatcccc

SEQ ID NO: 299130 - DNA, 53 bp, Artificial
  Synthetic oligonucleotide
aaaggagatgaccaggttttaccaagtatgctatgagtatgtgaaatcgacag

SEQ ID NO: 299131 - DNA, 60 bp, Artificial
  Synthetic oligonucleotide
aaaggagattcagcaatcatgaaaagtgaactggagtatggtaattgtgataccaaatgt

SEQ ID NO: 299132 - DNA, 59 bp, Artificial
  Synthetic oligonucleotide
aaaggagcaatctcaaaggctaccagccagctcccaaaagaattaagaaggacatgtca

SEQ ID NO: 299133 - DNA, 60 bp, Artificial
  Synthetic oligonucleotide
aaaggagccctgagtcgcgaggagtaagagcatagcgatggggggagatgctaggagtta

SEQ ID NO: 299134 - DNA, 58 bp, Artificial
  Synthetic oligonucleotide
aaaggaggaatgctcacggaaacagaccgttggggtatcactgctgcctcgtccagaa

SEQ ID NO: 299135 - DNA, 55 bp, Artificial
  Synthetic oligonucleotide
aaaggaggtcacactcacgtataacggtaaagatatgcttacactcgcacataaa

SEQ ID NO: 299136 - DNA, 59 bp, Artificial
  Synthetic oligonucleotide
aaaggaggtggaactttagtggatgaagccatccgatttataggaagagcaatggcaga

SEQ ID NO: 299137 - DNA, 60 bp, Artificial
  Synthetic oligonucleotide
aaaggagttggaacaatggcgctggagttgatcaggatgatcaaacgtgggatcaatgat

SEQ ID NO: 299138 - DNA, 59 bp, Artificial
  Synthetic oligonucleotide
aaaggagttgggacaatggtattggagttaatcaggatgatcaaacgtgggatcaatga

SEQ ID NO: 299139 - DNA, 55 bp, Artificial
  Synthetic oligonucleotide
aaaggatacatgttcgaaagcaaaagcatgaagatacgaacacaaataccagcgg

SEQ ID NO: 299140 - DNA, 60 bp, Artificial
  Synthetic oligonucleotide
aaaggatacgtgctgaatgttccaggacctggcgcgtacagaattcaggatgggcaggat

SEQ ID NO: 299141 - DNA, 55 bp, Artificial
  Synthetic oligonucleotide
aaaggatcaacagctcctagggctttggggcagctctggaaaacacatctgctcc

SEQ ID NO: 299142 - DNA, 60 bp, Artificial
  Synthetic oligonucleotide
aaaggatcagccaggcacatagaggaatgctcgtgctatgggcacaattcaaaggtaact

SEQ ID NO: 299143 - DNA, 55 bp, Artificial
  Synthetic oligonucleotide
aaaggatcgactgtccgaattgaacgtggcgtcagcgtacgactttcgagcagtg

SEQ ID NO: 299144 - DNA, 60 bp, Artificial
  Synthetic oligonucleotide
aaaggatcgttcatgctctgctcgaaactcacacatcttttgcacaagttctttgcaaca

SEQ ID NO: 299145 - DNA, 53 bp, Artificial
  Synthetic oligonucleotide
aaaggatcttcaccgttggggcacggaaaggtatatcaaccgaatgtttagcc

SEQ ID NO: 299146 - DNA, 54 bp, Artificial
  Synthetic oligonucleotide
aaaggatcttcactgtcggtgcccggaaagggatatccaccgagtgtttcgccg

SEQ ID NO: 299147 - DNA, 50 bp, Artificial
  Synthetic oligonucleotide
aaaggatgagcaacactgcagtaagacgacgccaggaggatttaaaacaa

SEQ ID NO: 299148 - DNA, 55 bp, Artificial
  Synthetic oligonucleotide
aaaggatgctccagcacctgaaaagaaagatccatatgacggtctaaagttttgg

SEQ ID NO: 299149 - DNA, 60 bp, Artificial
  Synthetic oligonucleotide
aaaggatggcattacaacccaaatctcatttcatggtgtggtctcaatctagttgactca

SEQ ID NO: 299150 - DNA, 56 bp, Artificial
  Synthetic oligonucleotide
aaaggatgggcctttgacagtggaaatgacatttggatgggaagaacgatcgaaaa

SEQ ID NO: 299151 - DNA, 56 bp, Artificial
  Synthetic oligonucleotide
aaaggatgtcctcaatcaatctatcagtttcgaatccggaaaggacacttttatac

SEQ ID NO: 299152 - DNA, 55 bp, Artificial
  Synthetic oligonucleotide
aaaggatgttgacaaccctgttcttatgggttgggattatcctaaatgtgatcgt

SEQ ID NO: 299153 - DNA, 57 bp, Artificial
  Synthetic oligonucleotide
aaaggattaaaactagatagtgtattactagcacggattgatactctctatcgttta

SEQ ID NO: 299154 - DNA, 50 bp, Artificial
  Synthetic oligonucleotide
aaaggcaacctgatgaatacagagccgaccgttgcagaacttgtcagtta

SEQ ID NO: 299155 - DNA, 57 bp, Artificial
  Synthetic oligonucleotide
aaaggcaactggcagataggattgcaactgggaagaactttggaaaagaacaagatc

SEQ ID NO: 299156 - DNA, 57 bp, Artificial
  Synthetic oligonucleotide
aaaggcaattccaaactttgcaacatatgttgccacatccgcttcgtacgttggtgt

SEQ ID NO: 299157 - DNA, 55 bp, Artificial
  Synthetic oligonucleotide
aaaggcacactgcaagggacgttaatcagaacatgcatacacttcttggcatggg

SEQ ID NO: 299158 - DNA, 52 bp, Artificial
  Synthetic oligonucleotide
aaaggcacgcaactttctattcgcaatgacaacggcgccatgcacttctcct

SEQ ID NO: 299159 - DNA, 60 bp, Artificial
  Synthetic oligonucleotide
aaaggcactagactccatgtgtcgccagcacacgttgacgactacgaggagtgcactcac

SEQ ID NO: 299160 - DNA, 60 bp, Artificial
  Synthetic oligonucleotide
aaaggcagactacataattaactaccatagatgtccacctatgctagcaaccatagacac

SEQ ID NO: 299161 - DNA, 58 bp, Artificial
  Synthetic oligonucleotide
aaaggcagtacaccaggtttttggcagtgtgtatacaactatgtttggaggagtctca

SEQ ID NO: 299162 - DNA, 60 bp, Artificial
  Synthetic oligonucleotide
aaaggcattcctgggaatacagaagtagataacctatgtcaaacaatgatgataatatca

SEQ ID NO: 299163 - DNA, 60 bp, Artificial
  Synthetic oligonucleotide
aaaggcatttgtggcattcactctctaggagatggtgccataggtgcagccaccgttctg

SEQ ID NO: 299164 - DNA, 60 bp, Artificial
  Synthetic oligonucleotide
aaaggccaaccgcgatagacacttgctacccatttgatgtgccagactatcagagtttga

SEQ ID NO: 299165 - DNA, 54 bp, Artificial
  Synthetic oligonucleotide
aaaggcccaaattttctaatttccgtaacgtgatgaacatttccgcttcacaga

SEQ ID NO: 299166 - DNA, 51 bp, Artificial
  Synthetic oligonucleotide
aaaggcccattcatttgggccgattcttttgggccttcacatttaatttaa

SEQ ID NO: 299167 - DNA, 52 bp, Artificial
  Synthetic oligonucleotide
aaaggccggcttaacaccggagttactgtcgaaagcaaaagacccgacgcta

SEQ ID NO: 299168 - DNA, 55 bp, Artificial
  Synthetic oligonucleotide
aaaggcgaaatgacgttagattattatcgtaaaattggcgaagtgttgagcgcga

SEQ ID NO: 299169 - DNA, 55 bp, Artificial
  Synthetic oligonucleotide
aaaggcgagcgcagtcgatggacgcgccgtacactttcccttagcgtgctcggtc

SEQ ID NO: 299170 - DNA, 55 bp, Artificial
  Synthetic oligonucleotide
aaaggcgccaatgaccacttgaaaacaataaacactcgaaacggtatttgctgtc

SEQ ID NO: 299171 - DNA, 50 bp, Artificial
  Synthetic oligonucleotide
aaaggcgcgcacatacccctgctgccacgatacgcaaaggtggtcttcgg

SEQ ID NO: 299172 - DNA, 60 bp, Artificial
  Synthetic oligonucleotide
aaaggcggaacgtggatatcagagagcgaaggctgacggattgatcgtcaatactatctt

SEQ ID NO: 299173 - DNA, 60 bp, Artificial
  Synthetic oligonucleotide
aaaggctaacacagtgagtcagctagtcctctttgctagtgacacgctgaagtcagaaat

SEQ ID NO: 299174 - DNA, 50 bp, Artificial
  Synthetic oligonucleotide
aaaggctaagaacactctggtttcgccagagttttggactgtcctcataa

SEQ ID NO: 299175 - DNA, 52 bp, Artificial
  Synthetic oligonucleotide
aaaggctacgtattttatgacaccacctttgggaacggaaaaatgccagacg

SEQ ID NO: 299176 - DNA, 50 bp, Artificial
  Synthetic oligonucleotide
aaaggctagttagaaacccttacccagtgagctccctgctgacttctttg

SEQ ID NO: 299177 - DNA, 60 bp, Artificial
  Synthetic oligonucleotide
aaaggctattatgattgcttcagtactacatggtcatgggtcagtgcaggtagcaacgat

SEQ ID NO: 299178 - DNA, 56 bp, Artificial
  Synthetic oligonucleotide
aaaggctcaacccaactggaggcggaaagatgcggactattcagagagggtgggcc

SEQ ID NO: 299179 - DNA, 53 bp, Artificial
  Synthetic oligonucleotide
aaaggctccagtccctgtggcaacgtcttgggcacttcgaggtatctggtccc

SEQ ID NO: 299180 - DNA, 60 bp, Artificial
  Synthetic oligonucleotide
aaaggctctgcattgataagcctgagacaaaccagagatcctatctctctaaacagatcg

SEQ ID NO: 299181 - DNA, 59 bp, Artificial
  Synthetic oligonucleotide
aaaggctgacactagaatattattcataagagagggaaagattgtacacattagcccat

SEQ ID NO: 299182 - DNA, 57 bp, Artificial
  Synthetic oligonucleotide
aaaggctgcgtttccgaccttcatctgccccttattctttcacaccgaatgatatcc

SEQ ID NO: 299183 - DNA, 60 bp, Artificial
  Synthetic oligonucleotide
aaaggctgctccctggcacgagcactagacatcctgtcttcacctactatccagatgtgc

SEQ ID NO: 299184 - DNA, 60 bp, Artificial
  Synthetic oligonucleotide
aaaggctgtatcactttatggtaagaaagagaaggtgggtgatctgacacatttagctgc

SEQ ID NO: 299185 - DNA, 57 bp, Artificial
  Synthetic oligonucleotide
aaaggctgttctctcaacacttgtagggagatacggccgtaggacgaaattatatga

SEQ ID NO: 299186 - DNA, 59 bp, Artificial
  Synthetic oligonucleotide
aaaggcttcatagaagcaagaacggcggcagatttatactgcaaaaatcatgggttaga

SEQ ID NO: 299187 - DNA, 52 bp, Artificial
  Synthetic oligonucleotide
aaaggcttctcccgcaaaagtattacagggtcataatgtttttggtacaacc

SEQ ID NO: 299188 - DNA, 55 bp, Artificial
  Synthetic oligonucleotide
aaaggctttcatggcaaagagctcttgattatcctggtcaagatcgcctacacag

SEQ ID NO: 299189 - DNA, 58 bp, Artificial
  Synthetic oligonucleotide
aaaggctttggatttcggcagggatctgatgtatggatgggtcgaacgattagtcgaa

SEQ ID NO: 299190 - DNA, 60 bp, Artificial
  Synthetic oligonucleotide
aaagggaagattcagcacattgagcttgagaactcgattggccataatggtgctattaac

SEQ ID NO: 299191 - DNA, 55 bp, Artificial
  Synthetic oligonucleotide
aaagggaaggtctcatctgagaaacgatactgatgtggtaaattttgtgagtatg

SEQ ID NO: 299192 - DNA, 50 bp, Artificial
  Synthetic oligonucleotide
aaagggaagtaaccacaagcatacaaccgcctaccccggcgttaacggga

SEQ ID NO: 299193 - DNA, 60 bp, Artificial
  Synthetic oligonucleotide
aaagggaattgggacgatggtaatggagctgattcggatgataaagcgagggatcaatga

SEQ ID NO: 299194 - DNA, 55 bp, Artificial
  Synthetic oligonucleotide
aaagggacgaagcgatccggttccagtggctcctgaggcacgccatagtttttac

SEQ ID NO: 299195 - DNA, 58 bp, Artificial
  Synthetic oligonucleotide
aaagggactttcagcgttggtgcgttgaggcccactgtgagtacatccgctagtttga

SEQ ID NO: 299196 - DNA, 54 bp, Artificial
  Synthetic oligonucleotide
aaagggagaactagcaggtcttttggcgggcttagcagccgccccgcctgaacc

SEQ ID NO: 299197 - DNA, 55 bp, Artificial
  Synthetic oligonucleotide
aaagggagaactccttgcacttatctgtggactacgtgctgccaagccatggccc

SEQ ID NO: 299198 - DNA, 58 bp, Artificial
  Synthetic oligonucleotide
aaagggagtagggacaatggtgatggagctgattcggatgataaaacgagggatcaac

SEQ ID NO: 299199 - DNA, 55 bp, Artificial
  Synthetic oligonucleotide
aaagggagttggcaattgggtcacttattgtaccgttgaatttcgagcgcgctcg

SEQ ID NO: 299200 - DNA, 57 bp, Artificial
  Synthetic oligonucleotide
aaagggatatacacttgggcagctggttatggtgaacactcgaaagggatatacact

SEQ ID NO: 299201 - DNA, 59 bp, Artificial
  Synthetic oligonucleotide
aaagggatatatgcccgcatgcggggggaactctatatataacgcgccgagtggcgcta

SEQ ID NO: 299202 - DNA, 53 bp, Artificial
  Synthetic oligonucleotide
aaagggatgggcacctttgagtaaggacaacggaattagaattggatcccgag

SEQ ID NO: 299203 - DNA, 54 bp, Artificial
  Synthetic oligonucleotide
aaagggcaactatgtttactcgtagtggcaaacaaataggtgctagggtacatt

SEQ ID NO: 299204 - DNA, 51 bp, Artificial
  Synthetic oligonucleotide
aaagggcagtaaagcttgccaagtccatggccaggggaaccacaggtcttc

SEQ ID NO: 299205 - DNA, 59 bp, Artificial
  Synthetic oligonucleotide
aaagggcataaaccccaactatctcctggcttggaagcaagtgctagcagagctacagg

SEQ ID NO: 299206 - DNA, 52 bp, Artificial
  Synthetic oligonucleotide
aaagggccaaaaacttaggaattaaatatagccttagattagatatagattt

SEQ ID NO: 299207 - DNA, 55 bp, Artificial
  Synthetic oligonucleotide
aaagggccagggaccagatttcctctgacctttggatggtgcttcaagttagtac

SEQ ID NO: 299208 - DNA, 56 bp, Artificial
  Synthetic oligonucleotide
aaagggcctccagtgtgtcttccagcaactaataaagacacaacagggggtacaca

SEQ ID NO: 299209 - DNA, 54 bp, Artificial
  Synthetic oligonucleotide
aaagggcgtattaaagcagtgaagccatcaacccacttgacaccgcttttaacc

SEQ ID NO: 299210 - DNA, 55 bp, Artificial
  Synthetic oligonucleotide
aaagggctcaagccggctaggcattagtgatactcttaggtttgtgagtggttag

SEQ ID NO: 299211 - DNA, 60 bp, Artificial
  Synthetic oligonucleotide
aaagggctcaaggatggattgtctgaagtgtgaccttaccatatgcatattatgcaggcc

SEQ ID NO: 299212 - DNA, 54 bp, Artificial
  Synthetic oligonucleotide
aaaggggacctgatagcggttttttcagtagactgaactggttgaccaaatcag

SEQ ID NO: 299213 - DNA, 56 bp, Artificial
  Synthetic oligonucleotide
aaaggggactcagcaattatgaaaagtgaattggaatatggtaactgtaacaccaa

SEQ ID NO: 299214 - DNA, 54 bp, Artificial
  Synthetic oligonucleotide
aaaggggactggagctgtacctgacgctttgaccgtgtccgattttctcggacc

SEQ ID NO: 299215 - DNA, 55 bp, Artificial
  Synthetic oligonucleotide
aaaggggatttggtacttcccagatatagacgccactccatgcttgagctgcagt

SEQ ID NO: 299216 - DNA, 59 bp, Artificial
  Synthetic oligonucleotide
aaagggggtcatcttacaggtctgcctgcccatcacgggagcgcagcctggcttgtggt

SEQ ID NO: 299217 - DNA, 59 bp, Artificial
  Synthetic oligonucleotide
aaaggggtggatcttgactcccttcgtatgatcgcatacggagatgacgtcattgcgtc

SEQ ID NO: 299218 - DNA, 59 bp, Artificial
  Synthetic oligonucleotide
aaaggggttgggccagcagaaccaggagactgcggtgggattttgagatgcatacatgg

SEQ ID NO: 299219 - DNA, 56 bp, Artificial
  Synthetic oligonucleotide
aaaggggttgtaatcatacaaattgatgaggagggcgaatttacggtgtatagcga

SEQ ID NO: 299220 - DNA, 56 bp, Artificial
  Synthetic oligonucleotide
aaagggtcagcagctacgtcacaagtcacctgactggggaggggtcacaacccgga

SEQ ID NO: 299221 - DNA, 54 bp, Artificial
  Synthetic oligonucleotide
aaagggtccatgggtgataaaccaccccatgtcagttctgcaaaggttactttg

SEQ ID NO: 299222 - DNA, 51 bp, Artificial
  Synthetic oligonucleotide
aaagggtcccccttgttctcctacaatccacaaacggaaatcctaactata

SEQ ID NO: 299223 - DNA, 54 bp, Artificial
  Synthetic oligonucleotide
aaagggtcccctctattttcctataatccacaaacagaagtcctaactatatgc

SEQ ID NO: 299224 - DNA, 55 bp, Artificial
  Synthetic oligonucleotide
aaagggtctcgatgaaaacgatatccccgaccgcctcaatcatccagtcggacgg

SEQ ID NO: 299225 - DNA, 52 bp, Artificial
  Synthetic oligonucleotide
aaagggtgaacatccgttacccgcctcagtacttcgagaaacctagtacgcc

SEQ ID NO: 299226 - DNA, 58 bp, Artificial
  Synthetic oligonucleotide
aaagggtgatacttgactcggttcttcgcgctccaactatagatgcggaatctccagg

SEQ ID NO: 299227 - DNA, 50 bp, Artificial
  Synthetic oligonucleotide
aaagggtgcgccatccgtgccgttttgggacagtgtcgcgtgaatgtcgg

SEQ ID NO: 299228 - DNA, 59 bp, Artificial
  Synthetic oligonucleotide
aaagggtgtactccgaatgagctctcgcaaaactcgctcctgcaattggagtaatggag

SEQ ID NO: 299229 - DNA, 55 bp, Artificial
  Synthetic oligonucleotide
aaagggtgtcacgagaaggtgaacaccatgcagcgatatgactgtacgtgggagg

SEQ ID NO: 299230 - DNA, 55 bp, Artificial
  Synthetic oligonucleotide
aaagggtgtgttgcagcctttcccacgcattttatagctgcaatgaagttaagaa

SEQ ID NO: 299231 - DNA, 60 bp, Artificial
  Synthetic oligonucleotide
aaagggttatgctttatcgcgcgatttgaatattattggtcgcgatgactgaccatggcc

SEQ ID NO: 299232 - DNA, 56 bp, Artificial
  Synthetic oligonucleotide
aaagggttgcacctatgctctataaatctgcaaagtcccgggttgtaattgtacaa

SEQ ID NO: 299233 - DNA, 53 bp, Artificial
  Synthetic oligonucleotide
aaaggtaaaccgttggaagcagatttaacggtaaatgaactagactatgagaa

SEQ ID NO: 299234 - DNA, 54 bp, Artificial
  Synthetic oligonucleotide
aaaggtaaaccttgccctaaaccccacaggattaaccacatggctgtgtgctcc

SEQ ID NO: 299235 - DNA, 55 bp, Artificial
  Synthetic oligonucleotide
aaaggtaacaacattttgtgttgtgattacagcaggtttgacggctttttgccca

SEQ ID NO: 299236 - DNA, 58 bp, Artificial
  Synthetic oligonucleotide
aaaggtaacttgtgtatgcagggacaactggcaaggggctaacagaccagtgatcgaa

SEQ ID NO: 299237 - DNA, 57 bp, Artificial
  Synthetic oligonucleotide
aaaggtaagatgcgtctaatggatgtaacgaaatgcctggggactggagttcaactc

SEQ ID NO: 299238 - DNA, 51 bp, Artificial
  Synthetic oligonucleotide
aaaggtaaggagacggaggaaaaaagctccggtcatacaatggttccctcc

SEQ ID NO: 299239 - DNA, 50 bp, Artificial
  Synthetic oligonucleotide
aaaggtaagttgaacatggctgaagctaccaggctgtgcaaggagtgtcc

SEQ ID NO: 299240 - DNA, 60 bp, Artificial
  Synthetic oligonucleotide
aaaggtacactatctggtggtcaatttgtggcggagagtgcatgatctatggaggtataa

SEQ ID NO: 299241 - DNA, 57 bp, Artificial
  Synthetic oligonucleotide
aaaggtacctcaattaacttgtgaatgtgccacgacagcaaagtggacacgtaatcc

SEQ ID NO: 299242 - DNA, 54 bp, Artificial
  Synthetic oligonucleotide
aaaggtactacgcctcaaacaccgggcatgcaagaaaccaagtttaccaattga

SEQ ID NO: 299243 - DNA, 58 bp, Artificial
  Synthetic oligonucleotide
aaaggtatacgttacagcaacaacacgatgaatcgtgctaagtacaacagacctgtgg

SEQ ID NO: 299244 - DNA, 55 bp, Artificial
  Synthetic oligonucleotide
aaaggtatgacccttgggcagtaactcgaagatatattctacccgaccctcctga

SEQ ID NO: 299245 - DNA, 56 bp, Artificial
  Synthetic oligonucleotide
aaaggtcaatcccagtaatagcaacaaggcctaaagtgaatggacaaggaggtaga

SEQ ID NO: 299246 - DNA, 56 bp, Artificial
  Synthetic oligonucleotide
aaaggtcaccggcgccatattacatcacgtgacctttgacgtcacggccaccattt

SEQ ID NO: 299247 - DNA, 56 bp, Artificial
  Synthetic oligonucleotide
aaaggtcagcaactacgtcacaagtcacgtggcaggggaggagtcacaacccggaa

SEQ ID NO: 299248 - DNA, 60 bp, Artificial
  Synthetic oligonucleotide
aaaggtcatcatgagagcggtaaatgactggatcctggaacgactggcacaaaagagcaa

SEQ ID NO: 299249 - DNA, 53 bp, Artificial
  Synthetic oligonucleotide
aaaggtcattcgactcgtctcgttgggacgaattcatcaagccttcgttcatt

SEQ ID NO: 299250 - DNA, 55 bp, Artificial
  Synthetic oligonucleotide
aaaggtccgaacgaaatggatgctggtatttactacgctccatatgtagctctga

SEQ ID NO: 299251 - DNA, 55 bp, Artificial
  Synthetic oligonucleotide
aaaggtccgtgatgcgatggcaatagatcacaccatctgcaggcgaacctgtgat

SEQ ID NO: 299252 - DNA, 50 bp, Artificial
  Synthetic oligonucleotide
aaaggtcctaggaatcatttcaagaggttattcatagacgaaggtttgat

SEQ ID NO: 299253 - DNA, 57 bp, Artificial
  Synthetic oligonucleotide
aaaggtcctgtaatcaagtctgtttacgtatggggaagaatttggatggatgagata

SEQ ID NO: 299254 - DNA, 54 bp, Artificial
  Synthetic oligonucleotide
aaaggtccttcgcaaagcgcctcctcccgagcttgggaggatctagagcttcag

SEQ ID NO: 299255 - DNA, 50 bp, Artificial
  Synthetic oligonucleotide
aaaggtcgatgggagaacgatgaagaatagcaccactaacatatcaacaa

SEQ ID NO: 299256 - DNA, 57 bp, Artificial
  Synthetic oligonucleotide
aaaggtcgcgcagcggcatcaaccccaaaataagaatcggcccattcctgcacaatt

SEQ ID NO: 299257 - DNA, 57 bp, Artificial
  Synthetic oligonucleotide
aaaggtcggggtcttggatcagcagtttgtatcagtcacactttccggctgagtacg

SEQ ID NO: 299258 - DNA, 54 bp, Artificial
  Synthetic oligonucleotide
aaaggtcgggtgacgaaaattggcaaagctggttattaccaatggtcctggtgc

SEQ ID NO: 299259 - DNA, 60 bp, Artificial
  Synthetic oligonucleotide
aaaggtcgtgactacgttcattgctgcatgcctaacatggacttacgtgacgtcatgcgt

SEQ ID NO: 299260 - DNA, 57 bp, Artificial
  Synthetic oligonucleotide
aaaggtctcttgcataagtcccaggtttagtgttccgatggaaggattaatggcatg

SEQ ID NO: 299261 - DNA, 60 bp, Artificial
  Synthetic oligonucleotide
aaaggtctcttttgacccaattcctatacattattgtgctccagctggctatgcgattct

SEQ ID NO: 299262 - DNA, 54 bp, Artificial
  Synthetic oligonucleotide
aaaggtgataacggggacgcttaagattttattcgtcgttatgtcgcctctgct

SEQ ID NO: 299263 - DNA, 54 bp, Artificial
  Synthetic oligonucleotide
aaaggtgatagtaaacaaggacgattagtccgttggcaaaattggttcagcaag

SEQ ID NO: 299264 - DNA, 55 bp, Artificial
  Synthetic oligonucleotide
aaaggtgattataaaagacagccaggggtgagtaagaagtgcacgagctcgaagg

SEQ ID NO: 299265 - DNA, 57 bp, Artificial
  Synthetic oligonucleotide
aaaggtgcggtcactaagcagcagttggataagagcggtggggactacttactctct

SEQ ID NO: 299266 - DNA, 57 bp, Artificial
  Synthetic oligonucleotide
aaaggtgcgttagttgaggctgacagagtgatccaaagattaataccattaagttct

SEQ ID NO: 299267 - DNA, 56 bp, Artificial
  Synthetic oligonucleotide
aaaggtggaactgtaccttttttggcccgcagtattctgattaccagcaatcagac

SEQ ID NO: 299268 - DNA, 60 bp, Artificial
  Synthetic oligonucleotide
aaaggtggcactcgtatgtgctgcccataacaatgggacaccacagaagtgaaatcggca

SEQ ID NO: 299269 - DNA, 55 bp, Artificial
  Synthetic oligonucleotide
aaaggtgggaggaatggaagtttgagggtgttagcgtgacgccactggctactcg

SEQ ID NO: 299270 - DNA, 56 bp, Artificial
  Synthetic oligonucleotide
aaaggtggtgtctacaaacgtatagattggaccgatcacttggacttggtgctccc

SEQ ID NO: 299271 - DNA, 56 bp, Artificial
  Synthetic oligonucleotide
aaaggtggtttgaacacgaccttgccgttccaaaatgtcagcaaatatgcatttgg

SEQ ID NO: 299272 - DNA, 54 bp, Artificial
  Synthetic oligonucleotide
aaaggtgtattttatgcttttataaacaacgtaaccacagagaatgtgtttata

SEQ ID NO: 299273 - DNA, 60 bp, Artificial
  Synthetic oligonucleotide
aaaggtgtgaagaattcagctgacatgagatctttggtcagtgcaatgagaggttcaagt

SEQ ID NO: 299274 - DNA, 60 bp, Artificial
  Synthetic oligonucleotide
aaaggtgtgatgacatttctgatcttgaacttccttctgtggatttagatgagtctatag

SEQ ID NO: 299275 - DNA, 60 bp, Artificial
  Synthetic oligonucleotide
aaaggtgtgatgctcttaacattgatagaagacatgtgctgtcatctgtggaactcaacc

SEQ ID NO: 299276 - DNA, 57 bp, Artificial
  Synthetic oligonucleotide
aaaggtgtgccgttcacgcgcacctttcccaggcgcctgccgtgggtggactatcag

SEQ ID NO: 299277 - DNA, 55 bp, Artificial
  Synthetic oligonucleotide
aaaggttacatgtagtcgttcaaggcaacccatattctattacagttaccacgac

SEQ ID NO: 299278 - DNA, 54 bp, Artificial
  Synthetic oligonucleotide
aaaggttagcgttaaatggtgacacctcgcaacagaatgccgtttactttgtgc

SEQ ID NO: 299279 - DNA, 55 bp, Artificial
  Synthetic oligonucleotide
aaaggttatgtagtcagaattccaaatcagttggccagcagcggtagtttgtttt

SEQ ID NO: 299280 - DNA, 54 bp, Artificial
  Synthetic oligonucleotide
aaaggttcactggcccccattttgcccaccacctatcccgatggtaggctagta

SEQ ID NO: 299281 - DNA, 52 bp, Artificial
  Synthetic oligonucleotide
aaaggttcgtcgcacgttgaatttctccccacgtggaggtggtggcccaaaa

SEQ ID NO: 299282 - DNA, 58 bp, Artificial
  Synthetic oligonucleotide
aaaggttctacaaaactgagccaaaaactacttgctaacttcatcatagcactatggc

SEQ ID NO: 299283 - DNA, 54 bp, Artificial
  Synthetic oligonucleotide
aaaggttgaaacacgggacctttggccctgtacacttcagaaatcaagtcaaga

SEQ ID NO: 299284 - DNA, 55 bp, Artificial
  Synthetic oligonucleotide
aaaggttgagaccagagggcttttcggagccatcgcaggtttcatcgaaggggga

SEQ ID NO: 299285 - DNA, 60 bp, Artificial
  Synthetic oligonucleotide
aaaggttgtggcaacggattcctatgtgaaacgcactagtatattttatcatgcaggcag

SEQ ID NO: 299286 - DNA, 55 bp, Artificial
  Synthetic oligonucleotide
aaaggtttttatgcgggcgtcatacattgggcaagtgtgcccgaatcctttccaa

SEQ ID NO: 299287 - DNA, 50 bp, Artificial
  Synthetic oligonucleotide
aaagtaaaacagtatgataacatccccttagaaatttgtggacacaaggt

SEQ ID NO: 299288 - DNA, 51 bp, Artificial
  Synthetic oligonucleotide
aaagtaaagaaagcaacggggctagccgtcaggtgttcctccccccgagag

SEQ ID NO: 299289 - DNA, 60 bp, Artificial
  Synthetic oligonucleotide
aaagtaaattcaatcattgataagatgaacactcaattcgaagctgttgagaaagaattc

SEQ ID NO: 299290 - DNA, 53 bp, Artificial
  Synthetic oligonucleotide
aaagtaacggcaaaggggaaaacgtttgtgtttcctgatggtactcgcatcga

SEQ ID NO: 299291 - DNA, 54 bp, Artificial
  Synthetic oligonucleotide
aaagtaacgggaactttatagctcctgaatatgcatacaagatagttaaaaaag

SEQ ID NO: 299292 - DNA, 59 bp, Artificial
  Synthetic oligonucleotide
aaagtaacttagaattagagcaagtgagtaagtgttatccattgtgcgcctctcttcta

SEQ ID NO: 299293 - DNA, 50 bp, Artificial
  Synthetic oligonucleotide
aaagtaagacaatatgagcaagtatgtatagaaatttgtggacaaaaggc

SEQ ID NO: 299294 - DNA, 53 bp, Artificial
  Synthetic oligonucleotide
aaagtaagacagtatgagcaggtagaagtagatatctgtggacataaggctac

SEQ ID NO: 299295 - DNA, 50 bp, Artificial
  Synthetic oligonucleotide
aaagtaagacagtatgatcaaatacaggtagaaatctgtggacataaggc

SEQ ID NO: 299296 - DNA, 50 bp, Artificial
  Synthetic oligonucleotide
aaagtaagacagtatgatcaaatactcgtagaaatttgtggaaagaaagc

SEQ ID NO: 299297 - DNA, 55 bp, Artificial
  Synthetic oligonucleotide
aaagtaagacagtatgatcaaatagctatggaaatctgtggaaaaaaagctatag

SEQ ID NO: 299298 - DNA, 56 bp, Artificial
  Synthetic oligonucleotide
aaagtaagacagtatgatcaaatatctatggaaattgagggaaaaagggctatagg

SEQ ID NO: 299299 - DNA, 50 bp, Artificial
  Synthetic oligonucleotide
aaagtaagacagtatgatcagataaccataggaatctgtggacataaagc

SEQ ID NO: 299300 - DNA, 54 bp, Artificial
  Synthetic oligonucleotide
aaagtaagacagtatgatcagatacccatagaaatttgcggacacaaggctgtt

SEQ ID NO: 299301 - DNA, 50 bp, Artificial
  Synthetic oligonucleotide
aaagtaagacagtatgatcaggtaccccttgaaatctgtgggcaaaaggc

SEQ ID NO: 299302 - DNA, 50 bp, Artificial
  Synthetic oligonucleotide
aaagtaagacagtatgatcaggtagttatggaaatttgtggacaaaaggc

SEQ ID NO: 299303 - DNA, 54 bp, Artificial
  Synthetic oligonucleotide
aaagtaagccaagggaaagcaaactggtgctaacccagggacactagataatag

SEQ ID NO: 299304 - DNA, 50 bp, Artificial
  Synthetic oligonucleotide
aaagtaaggcaatatgatcagatacttgtagaaatttgtgggaaaaaggc

SEQ ID NO: 299305 - DNA, 54 bp, Artificial
  Synthetic oligonucleotide
aaagtaaggcaattatgtaaactccttagaggaaccaaagcactaacagaagta

SEQ ID NO: 299306 - DNA, 49 bp, Artificial
  Synthetic oligonucleotide
aaagtacaaaactcaaaatcaattcaatttacttaagaaaaattaaagg

SEQ ID NO: 299307 - DNA, 60 bp, Artificial
  Synthetic oligonucleotide
aaagtacaaagtaaatgcttagtatcagacctacctctatgggcagcagcatatggatat

SEQ ID NO: 299308 - DNA, 54 bp, Artificial
  Synthetic oligonucleotide
aaagtacacatcccactaagggatgcggaattagtaataacaacatattggggt

SEQ ID NO: 299309 - DNA, 56 bp, Artificial
  Synthetic oligonucleotide
aaagtacagactacgtgctggtaagaagtcagagttagcgtacttagagaaagacc

SEQ ID NO: 299310 - DNA, 54 bp, Artificial
  Synthetic oligonucleotide
aaagtacagatatagggtttcgtcagaaagttaaagacctattagtattatcat

SEQ ID NO: 299311 - DNA, 55 bp, Artificial
  Synthetic oligonucleotide
aaagtaccaacgtcccgggcacgatgctctaccacgtccggctcaacagcggtcg

SEQ ID NO: 299312 - DNA, 55 bp, Artificial
  Synthetic oligonucleotide
aaagtaccacctggtattcataaatacgtatggtttcatagccgaggacttcaac

SEQ ID NO: 299313 - DNA, 56 bp, Artificial
  Synthetic oligonucleotide
aaagtaccagcttgacgtgtttcacgacttggtagtgtgcggaccgtgggcttaca

SEQ ID NO: 299314 - DNA, 60 bp, Artificial
  Synthetic oligonucleotide
aaagtaccccagtcgatgtaatcaccgtccttcttgatgtaggacttgacatcagatgat

SEQ ID NO: 299315 - DNA, 58 bp, Artificial
  Synthetic oligonucleotide
aaagtacctcgcttctatgtacctgaacacggcgtcattatgactctcgccgttactc

SEQ ID NO: 299316 - DNA, 55 bp, Artificial
  Synthetic oligonucleotide
aaagtacctctcgtcacgagtagtgacgggtttgatgcactggagcagagcatgg

SEQ ID NO: 299317 - DNA, 60 bp, Artificial
  Synthetic oligonucleotide
aaagtacgccgcggataccactccactagtgccaatcactgtgactatagcccctatgga

SEQ ID NO: 299318 - DNA, 54 bp, Artificial
  Synthetic oligonucleotide
aaagtacgggtacctgattagatatcctaacgatctagggccaaaggcccgtga

SEQ ID NO: 299319 - DNA, 59 bp, Artificial
  Synthetic oligonucleotide
aaagtactatgaacactcctgtctacccagtgcccaagccaaatggccgatggagaatg

SEQ ID NO: 299320 - DNA, 58 bp, Artificial
  Synthetic oligonucleotide
aaagtactgccttatgggactttctgttatcgccgcccctcgtggaatagctcagcgc

SEQ ID NO: 299321 - DNA, 54 bp, Artificial
  Synthetic oligonucleotide
aaagtactgtccgacttctggtatctcagctgcggcctacttttcccaaaaggg

SEQ ID NO: 299322 - DNA, 60 bp, Artificial
  Synthetic oligonucleotide
aaagtagaaagcccaacagatatgaagtttcccaatacagatatcgcaatgtgccaataa

SEQ ID NO: 299323 - DNA, 54 bp, Artificial
  Synthetic oligonucleotide
aaagtagaaccggaggctgaaatctctcgacgcaggactcggctcgttgggtgc

SEQ ID NO: 299324 - DNA, 52 bp, Artificial
  Synthetic oligonucleotide
aaagtagccgcggggacaaattttgttgtggtgcgaatctaaatgcatttcg

SEQ ID NO: 299325 - DNA, 56 bp, Artificial
  Synthetic oligonucleotide
aaagtaggcctacctacattgtatcgtttaacggacttcctaacatcatagaatgc

SEQ ID NO: 299326 - DNA, 59 bp, Artificial
  Synthetic oligonucleotide
aaagtaggtggaactgcagcccagtcgatgatctctctctggttgtatggtgcccactc

SEQ ID NO: 299327 - DNA, 54 bp, Artificial
  Synthetic oligonucleotide
aaagtaggtggaccccacatgttggacgcgcctgtgaaagaaagtggtccccgc

SEQ ID NO: 299328 - DNA, 51 bp, Artificial
  Synthetic oligonucleotide
aaagtagtttctgtaagacatctagagaatttggtactgagaagagagaat

SEQ ID NO: 299329 - DNA, 55 bp, Artificial
  Synthetic oligonucleotide
aaagtagtttgagccctacgtcacctaccatgtttggtcagtaggggcggtgcag

SEQ ID NO: 299330 - DNA, 57 bp, Artificial
  Synthetic oligonucleotide
aaagtataaccggagattcacacctgaaatagcggccagacctaaagtcagagggca

SEQ ID NO: 299331 - DNA, 55 bp, Artificial
  Synthetic oligonucleotide
aaagtatacgatgttgtcttacagcactcattcgatacacccactctgtatgtga

SEQ ID NO: 299332 - DNA, 53 bp, Artificial
  Synthetic oligonucleotide
aaagtatattggtcagactggcgatcagttgctcacttcatatactcgacgcg

SEQ ID NO: 299333 - DNA, 59 bp, Artificial
  Synthetic oligonucleotide
aaagtatcgcatgttcacctaccttcgtatggggtatgatgtggtcgctattgtctccc

SEQ ID NO: 299334 - DNA, 57 bp, Artificial
  Synthetic oligonucleotide
aaagtatctacgtgcccatagggaagatttcatcgctggagcttaagtccaaagccc

SEQ ID NO: 299335 - DNA, 59 bp, Artificial
  Synthetic oligonucleotide
aaagtatggcaatgtcaccattccctttgtgtctcctgtggatgtgcctttacaacctg

SEQ ID NO: 299336 - DNA, 59 bp, Artificial
  Synthetic oligonucleotide
aaagtatgtgattcctaaaggtgcctacaacgatgacacttacactaccactgtgaagc

SEQ ID NO: 299337 - DNA, 58 bp, Artificial
  Synthetic oligonucleotide
aaagtattttcacagtcctgataaagcagtgctaagtttaagtccgcggcttcaggca

SEQ ID NO: 299338 - DNA, 53 bp, Artificial
  Synthetic oligonucleotide
aaagtattttctgctcggacctttcagttgtttgctaagtttcttggagtcgg

SEQ ID NO: 299339 - DNA, 55 bp, Artificial
  Synthetic oligonucleotide
aaagtcaaaattcacaatctagctgaagctcatgagaaggtactaagagccttcc

SEQ ID NO: 299340 - DNA, 56 bp, Artificial
  Synthetic oligonucleotide
aaagtcaacaccccgcagcttaatctggcgttccatgtattcattaagggtttcaa

SEQ ID NO: 299341 - DNA, 58 bp, Artificial
  Synthetic oligonucleotide
aaagtcaacgaaaaccctctgtatgcatcaacttcagagcacgttaacgtgttattga

SEQ ID NO: 299342 - DNA, 59 bp, Artificial
  Synthetic oligonucleotide
aaagtcacagcacttaacgtggttagtaggaggtatctagcatcattacacaagagggc

SEQ ID NO: 299343 - DNA, 59 bp, Artificial
  Synthetic oligonucleotide
aaagtcacatcaatcatcccctggctaagggagagtccacaagaaacccttcagagctc

SEQ ID NO: 299344 - DNA, 54 bp, Artificial
  Synthetic oligonucleotide
aaagtcagagagcggatcaacattgtttaccaagaggtccgtggtgctcgccca

SEQ ID NO: 299345 - DNA, 60 bp, Artificial
  Synthetic oligonucleotide
aaagtcagttttcaactgcttgtatgcgtccccacaattagaaggattctcagctgaatc

SEQ ID NO: 299346 - DNA, 53 bp, Artificial
  Synthetic oligonucleotide
aaagtcatatttcctaacaaaagtaacggtcacatgtttaccttatctctagg

SEQ ID NO: 299347 - DNA, 56 bp, Artificial
  Synthetic oligonucleotide
aaagtcatggctttgcctgagctatctcaggataaggctgaggtgaagcaatatat

SEQ ID NO: 299348 - DNA, 58 bp, Artificial
  Synthetic oligonucleotide
aaagtcattggtggttggtccacacctaattccaagtcgcaggtcaatagacaggtca

SEQ ID NO: 299349 - DNA, 55 bp, Artificial
  Synthetic oligonucleotide
aaagtccaattatgaattgttccaagaggacggatcggaagagcatactaagccc

SEQ ID NO: 299350 - DNA, 55 bp, Artificial
  Synthetic oligonucleotide
aaagtccacacagttctcgttgtagtccttggacaatatatttattgtcggaggt

SEQ ID NO: 299351 - DNA, 55 bp, Artificial
  Synthetic oligonucleotide
aaagtccacattatcccatgtcaatcccaaaagctcactaaatctcataccagtc

SEQ ID NO: 299352 - DNA, 53 bp, Artificial
  Synthetic oligonucleotide
aaagtccaccagaaaccccgcaggtttctgggttacatttgttgcacagggta

SEQ ID NO: 299353 - DNA, 55 bp, Artificial
  Synthetic oligonucleotide
aaagtccactggttttgagataacatcagcagtagcctgctcacatgggtcttgc

SEQ ID NO: 299354 - DNA, 50 bp, Artificial
  Synthetic oligonucleotide
aaagtcccgatcgttttggactctttggcgcaccccccttagaggaaggg

SEQ ID NO: 299355 - DNA, 51 bp, Artificial
  Synthetic oligonucleotide
aaagtcccgttgtccaaaggcgcgccgtccgaaagactaatccaacgggga

SEQ ID NO: 299356 - DNA, 60 bp, Artificial
  Synthetic oligonucleotide
aaagtccgatctccgatctgcttgcccatgattcgttcggacatatagccagatagggta

SEQ ID NO: 299357 - DNA, 52 bp, Artificial
  Synthetic oligonucleotide
aaagtcctcgagtagaagaaagttctcacggacccgcccggtgttcccaagc

SEQ ID NO: 299358 - DNA, 60 bp, Artificial
  Synthetic oligonucleotide
aaagtcctgtcctgcgcctatcgcattggatattgaatttcttgatatgtctgttgatct

SEQ ID NO: 299359 - DNA, 54 bp, Artificial
  Synthetic oligonucleotide
aaagtcgaaccctaccatggacgggtagttgtacctagtggtactgccattcca

SEQ ID NO: 299360 - DNA, 58 bp, Artificial
  Synthetic oligonucleotide
aaagtcgagcgcttaatatgtgacacgtggcggcctatgtctttaggccgtggcactt

SEQ ID NO: 299361 - DNA, 55 bp, Artificial
  Synthetic oligonucleotide
aaagtcgctaagcactccgagcgccagcgaggagtgcgaccccccccccagggcc

SEQ ID NO: 299362 - DNA, 60 bp, Artificial
  Synthetic oligonucleotide
aaagtcgctgagcttcagcgcgttaacagagagctgtccctgaagttagtggacgttcag

SEQ ID NO: 299363 - DNA, 57 bp, Artificial
  Synthetic oligonucleotide
aaagtcgctggggttcattgacgatcctgcgaatgcgagctttacggcgttacttaa

SEQ ID NO: 299364 - DNA, 55 bp, Artificial
  Synthetic oligonucleotide
aaagtcgtccagccgatcagatgacgggccagacatggcgattgcattgccgacg

SEQ ID NO: 299365 - DNA, 53 bp, Artificial
  Synthetic oligonucleotide
aaagtcgtctgcaagagaacgaccggcggggctaaggcctgagaaaccaaccc

SEQ ID NO: 299366 - DNA, 56 bp, Artificial
  Synthetic oligonucleotide
aaagtcgttggttaccctacgcgcgcaatttcatcactggtctccggcaactggct

SEQ ID NO: 299367 - DNA, 60 bp, Artificial
  Synthetic oligonucleotide
aaagtctagagagaaggaggagcgattgactggtcaatcggtgtctctcaaacttggcta

SEQ ID NO: 299368 - DNA, 60 bp, Artificial
  Synthetic oligonucleotide
aaagtctagatctctggcaagttggatccagagtgaattcaataaggcatgtgaattgac

SEQ ID NO: 299369 - DNA, 60 bp, Artificial
  Synthetic oligonucleotide
aaagtctataccagaacactgatgcatacgtttcagttggatcatcaaagtacaaccgaa

SEQ ID NO: 299370 - DNA, 55 bp, Artificial
  Synthetic oligonucleotide
aaagtctattagctcataaacgcttcgagatgatgatagctgctcaacgtgcagc

SEQ ID NO: 299371 - DNA, 59 bp, Artificial
  Synthetic oligonucleotide
aaagtctctgatgtgtataaatatccgagcatattaaggggttctaccacaccatgtat

SEQ ID NO: 299372 - DNA, 55 bp, Artificial
  Synthetic oligonucleotide
aaagtctgggatgctcaagtacgtgataagaaactactcgctcttgctcacaccg

SEQ ID NO: 299373 - DNA, 56 bp, Artificial
  Synthetic oligonucleotide
aaagtctggtcttaggccgatggttcacgatcttgcggtgaatatcccgttcggtg

SEQ ID NO: 299374 - DNA, 60 bp, Artificial
  Synthetic oligonucleotide
aaagtctgtattcaacagcttgtatgcatctccacaacttgagggattttcagctgagtc

SEQ ID NO: 299375 - DNA, 55 bp, Artificial
  Synthetic oligonucleotide
aaagtcttcactagactcgggatgctttccctctctaaaactcttttacttgaca

SEQ ID NO: 299376 - DNA, 55 bp, Artificial
  Synthetic oligonucleotide
aaagtcttcctgatcaagagtgggatcaatcaggcctgcaaagcttgggtgcatc

SEQ ID NO: 299377 - DNA, 56 bp, Artificial
  Synthetic oligonucleotide
aaagtcttggttagtttgagtgtaggccctttccacagtgcctgactctaatctaa

SEQ ID NO: 299378 - DNA, 52 bp, Artificial
  Synthetic oligonucleotide
aaagtcttgttgacctggggccctactaccgttgactctagcttcgagtttt

SEQ ID NO: 299379 - DNA, 58 bp, Artificial
  Synthetic oligonucleotide
aaagtgaaagactccattgctttgtgtaactatgatcttgcacttacgaacttcgaag

SEQ ID NO: 299380 - DNA, 55 bp, Artificial
  Synthetic oligonucleotide
aaagtgaaagtaggtgaaccagaggagatctctcgacgcaaggactcggcttgct

SEQ ID NO: 299381 - DNA, 54 bp, Artificial
  Synthetic oligonucleotide
aaagtgaaagttaatagggactcgaaagcggaagttccagagaagttctctcga

SEQ ID NO: 299382 - DNA, 59 bp, Artificial
  Synthetic oligonucleotide
aaagtgaaatcacggagctgcgccaagagagactcaccgtaatcacttccgagcgtact

SEQ ID NO: 299383 - DNA, 60 bp, Artificial
  Synthetic oligonucleotide
aaagtgaaattggacgttcaatatgatattctgctaatccatctgaagacgctcctcccg

SEQ ID NO: 299384 - DNA, 55 bp, Artificial
  Synthetic oligonucleotide
aaagtgaacgacggtagtatatttggttcttggaaagcatgccagactctagctc

SEQ ID NO: 299385 - DNA, 60 bp, Artificial
  Synthetic oligonucleotide
aaagtgaaggactcgcaagcgctcgtgtggtatgatcttgctttgactaattacacacta

SEQ ID NO: 299386 - DNA, 55 bp, Artificial
  Synthetic oligonucleotide
aaagtgaagtttccctatgctgcgttgtcgtacattaacgtgacgctgtgcacct

SEQ ID NO: 299387 - DNA, 55 bp, Artificial
  Synthetic oligonucleotide
aaagtgacactgacactggtactcggtcactggtgacgggcgaaggatgcccttc

SEQ ID NO: 299388 - DNA, 59 bp, Artificial
  Synthetic oligonucleotide
aaagtgaccaaatgcatgaatgctcagtacttggcggtaaaagtagggattacgactca

SEQ ID NO: 299389 - DNA, 55 bp, Artificial
  Synthetic oligonucleotide
aaagtgagatgatcgttaggatcggtcacgtagacgaatccatctagacacacgg

SEQ ID NO: 299390 - DNA, 60 bp, Artificial
  Synthetic oligonucleotide
aaagtgagcagatgtgatgcgccgtgtctgtaaagtatattatattgggtgtttaaatag

SEQ ID NO: 299391 - DNA, 60 bp, Artificial
  Synthetic oligonucleotide
aaagtgagtgtgcagcaaggaggtattgatacaaccattcgcacatacttcataaggaga

SEQ ID NO: 299392 - DNA, 60 bp, Artificial
  Synthetic oligonucleotide
aaagtgagttcaacaaagcttgtgagctgacagattcaagctggatagagctcgatgaaa

SEQ ID NO: 299393 - DNA, 57 bp, Artificial
  Synthetic oligonucleotide
aaagtgatagtgatgatcaatctgatgaggatcacgagattgggagtacagagccag

SEQ ID NO: 299394 - DNA, 56 bp, Artificial
  Synthetic oligonucleotide
aaagtgatctacctaaattacgtgttatacacgtagaccttggtagatctagtata

SEQ ID NO: 299395 - DNA, 59 bp, Artificial
  Synthetic oligonucleotide
aaagtgcaagatcagaagatgtgtctttccaggggcggggagtattcgagctctcggac

SEQ ID NO: 299396 - DNA, 58 bp, Artificial
  Synthetic oligonucleotide
aaagtgcaccaggtgaggccttcgggtcgctcgtggttgtgataccaggagcataccc

SEQ ID NO: 299397 - DNA, 60 bp, Artificial
  Synthetic oligonucleotide
aaagtgcatgcctcaaaacctcattagagcctgcccacgaaacatctctattaacttgtg

SEQ ID NO: 299398 - DNA, 55 bp, Artificial
  Synthetic oligonucleotide
aaagtgccattaagccagcagccacaaattcatatttacgctgcaccttggattc

SEQ ID NO: 299399 - DNA, 55 bp, Artificial
  Synthetic oligonucleotide
aaagtgcccttgtgtcattgagcacatctgccttgacggtggttgtccaagcgga

SEQ ID NO: 299400 - DNA, 58 bp, Artificial
  Synthetic oligonucleotide
aaagtgccggctgcgtatgcagcccaagggtacaaggtgctcgtcctgaacccatccg

SEQ ID NO: 299401 - DNA, 50 bp, Artificial
  Synthetic oligonucleotide
aaagtgcctcctctttgcttagggagcagtgtggatatgtgaggaagtag

SEQ ID NO: 299402 - DNA, 55 bp, Artificial
  Synthetic oligonucleotide
aaagtgcggagcgaaacgatgtgttgagcttacggaatgatgctcctttcccgtg

SEQ ID NO: 299403 - DNA, 55 bp, Artificial
  Synthetic oligonucleotide
aaagtgctaggtcctgaaggtatagttgggttaaggcaggacatatttgaacgag

SEQ ID NO: 299404 - DNA, 56 bp, Artificial
  Synthetic oligonucleotide
aaagtgctcgggatacacgttggtggcaatggacaccaagggttctctgcagcctt

SEQ ID NO: 299405 - DNA, 58 bp, Artificial
  Synthetic oligonucleotide
aaagtgctctttcaaaattggggaattgaacatatcgacaatgtaatgggaatgattg

SEQ ID NO: 299406 - DNA, 59 bp, Artificial
  Synthetic oligonucleotide
aaagtgctttaagtagtgggggtctacatcatcaatcacgttgtaccaggcatcattat

SEQ ID NO: 299407 - DNA, 54 bp, Artificial
  Synthetic oligonucleotide
aaagtggaagtcgatggctttttgacaagttacacggcaaccttaagggagtga

SEQ ID NO: 299408 - DNA, 53 bp, Artificial
  Synthetic oligonucleotide
aaagtggagacttgggccttgagacacccaggatttacggtgatagccctttt

SEQ ID NO: 299409 - DNA, 56 bp, Artificial
  Synthetic oligonucleotide
aaagtggagtaaatcaaacaggcatatattacctacaaggagcatttaaacattac

SEQ ID NO: 299410 - DNA, 52 bp, Artificial
  Synthetic oligonucleotide
aaagtggcattatgagatacagtttaggggcccagtaggattcaatctggca

SEQ ID NO: 299411 - DNA, 58 bp, Artificial
  Synthetic oligonucleotide
aaagtggccacgcattataaacgaacggtgatgaaccaacagacactcacggctctta

SEQ ID NO: 299412 - DNA, 53 bp, Artificial
  Synthetic oligonucleotide
aaagtggcgcgcttgtttggggcttataaaggaccggtccgtgacgaccgtga

SEQ ID NO: 299413 - DNA, 56 bp, Artificial
  Synthetic oligonucleotide
aaagtgggaagagaaatcgacaattacacaggactaatatacaacttaattgaaga

SEQ ID NO: 299414 - DNA, 58 bp, Artificial
  Synthetic oligonucleotide
aaagtgggagttcagcaagtggacttcctaggagctacaattggaaattcacgcatcc

SEQ ID NO: 299415 - DNA, 57 bp, Artificial
  Synthetic oligonucleotide
aaagtgggcacttggagaaaacatggcacctgaaaaggtggactttgaggattgcaa

SEQ ID NO: 299416 - DNA, 53 bp, Artificial
  Synthetic oligonucleotide
aaagtgggccaattggaggtattaaatcaatgggaattactaccttagttcag

SEQ ID NO: 299417 - DNA, 58 bp, Artificial
  Synthetic oligonucleotide
aaagtggggcgtgtgcttctttggctcggcttgcttcccagtatcaatgggcaagtta

SEQ ID NO: 299418 - DNA, 55 bp, Artificial
  Synthetic oligonucleotide
aaagtggtaaaattaccatatattctcccgctttccaagcaatgattagagccag

SEQ ID NO: 299419 - DNA, 55 bp, Artificial
  Synthetic oligonucleotide
aaagtggtatccacacttgtggtcaagtgtcgaatattttgaagcgaatggctgg

SEQ ID NO: 299420 - DNA, 60 bp, Artificial
  Synthetic oligonucleotide
aaagtggtatgttcgtgcactgggtactactggctctattgatgtctgatgacgtcacca

SEQ ID NO: 299421 - DNA, 55 bp, Artificial
  Synthetic oligonucleotide
aaagtggtccccatatatattgtcgtacatctactaagtgcggttgtggtccctc

SEQ ID NO: 299422 - DNA, 55 bp, Artificial
  Synthetic oligonucleotide
aaagtggtccccgccccacgtgaacatgtcgcgcgatgctgtccaatcagaactc

SEQ ID NO: 299423 - DNA, 55 bp, Artificial
  Synthetic oligonucleotide
aaagtggtgtatccgcatttagggatacaaggcgagtatttagtggagaaaattg

SEQ ID NO: 299424 - DNA, 59 bp, Artificial
  Synthetic oligonucleotide
aaagtggtgtgtgcccatccattcggtaactctggtacctagagatccctcagaccatc

SEQ ID NO: 299425 - DNA, 58 bp, Artificial
  Synthetic oligonucleotide
aaagtgtagtagtgcacagtgggactttgctacagaaattaaaggctattatactgga

SEQ ID NO: 299426 - DNA, 50 bp, Artificial
  Synthetic oligonucleotide
aaagtgtccattattcacttagacaaaattcgcctaggatccactgtgcg

SEQ ID NO: 299427 - DNA, 60 bp, Artificial
  Synthetic oligonucleotide
aaagtgtcgcacagtcaatccagagcaagattgatgaattaaggagacagctggctgacc

SEQ ID NO: 299428 - DNA, 57 bp, Artificial
  Synthetic oligonucleotide
aaagtgtgcggagcgcccccttgtgccatcggaggggcgcccaataacaccttgcac

SEQ ID NO: 299429 - DNA, 60 bp, Artificial
  Synthetic oligonucleotide
aaagtgtttagatcttgtgagaaagtgagttactcaatggtgagacctggatggagcgga

SEQ ID NO: 299430 - DNA, 55 bp, Artificial
  Synthetic oligonucleotide
aaagtgtttgactcggaggactttattatagagtatgggacaactgacgacgaag

SEQ ID NO: 299431 - DNA, 56 bp, Artificial
  Synthetic oligonucleotide
aaagtgttttaggtagtggggatcgacgtcatcaatgacgttataccaggcctcat

SEQ ID NO: 299432 - DNA, 54 bp, Artificial
  Synthetic oligonucleotide
aaagttaacattctctctcctatttccggtgaaactatcatttccggtggttgc

SEQ ID NO: 299433 - DNA, 57 bp, Artificial
  Synthetic oligonucleotide
aaagttacacctagtatcgatcgtaattcggtccgatcgtgtatgttgccatcgacg

SEQ ID NO: 299434 - DNA, 58 bp, Artificial
  Synthetic oligonucleotide
aaagttactaagatgtcttcaagccgtgaatcgggatcccggatgattgagctaccac

SEQ ID NO: 299435 - DNA, 57 bp, Artificial
  Synthetic oligonucleotide
aaagttactaatgacagttatgaatgtattatataattgattgctgctttatcgttg

SEQ ID NO: 299436 - DNA, 57 bp, Artificial
  Synthetic oligonucleotide
aaagttagcgcacagaaacgaacaagggatgcaagcaaggtttcgaagaaccatagc

SEQ ID NO: 299437 - DNA, 56 bp, Artificial
  Synthetic oligonucleotide
aaagttagcgttgtcaatgcgacgaatgacactctgtatctgctcccgagcggaag

SEQ ID NO: 299438 - DNA, 55 bp, Artificial
  Synthetic oligonucleotide
aaagttaggaattggcgttgcaaccgattacattatcccagggattcctgatggc

SEQ ID NO: 299439 - DNA, 54 bp, Artificial
  Synthetic oligonucleotide
aaagttaggttagttacgtgggacgatgatttcaacgcttccctgtctgacctc

SEQ ID NO: 299440 - DNA, 58 bp, Artificial
  Synthetic oligonucleotide
aaagttatacagctggacccttctcctggattgcagagcacgattgtcggaactcccc

SEQ ID NO: 299441 - DNA, 51 bp, Artificial
  Synthetic oligonucleotide
aaagttatatgcactgaaaagccaggtagcacattagcaatcaagatctgc

SEQ ID NO: 299442 - DNA, 59 bp, Artificial
  Synthetic oligonucleotide
aaagttatcatctagaataacagcactggatccaactcccctgtcaccctgggtgattg

SEQ ID NO: 299443 - DNA, 60 bp, Artificial
  Synthetic oligonucleotide
aaagttatcatgacagctcgaggcgtcagcaaaatagtgcctattagcacaagagcgatg

SEQ ID NO: 299444 - DNA, 51 bp, Artificial
  Synthetic oligonucleotide
aaagttatctataaagataacggttatagcattgaactcacgataagaacc

SEQ ID NO: 299445 - DNA, 60 bp, Artificial
  Synthetic oligonucleotide
aaagttatgaccactgcctcatccaaagatactccaagggtgggagcatcggcttccatg

SEQ ID NO: 299446 - DNA, 55 bp, Artificial
  Synthetic oligonucleotide
aaagttcaaacagtatagagagttgagacctcagacctgcaccatatgtgaaaca

SEQ ID NO: 299447 - DNA, 57 bp, Artificial
  Synthetic oligonucleotide
aaagttcacatccgcttatcttgttttgtcaagacaaagttagagtagtgcctatac

SEQ ID NO: 299448 - DNA, 55 bp, Artificial
  Synthetic oligonucleotide
aaagttcatgccaaacttgccggaaaacgtacaatacataattcagtgtataggg

SEQ ID NO: 299449 - DNA, 58 bp, Artificial
  Synthetic oligonucleotide
aaagttcatgcgattttgacttatacaccacgccaatgacccaaaaaagctatacaca

SEQ ID NO: 299450 - DNA, 56 bp, Artificial
  Synthetic oligonucleotide
aaagttccaaggagttggaccctgctacggctgagcgagcggaacgtattcgagac

SEQ ID NO: 299451 - DNA, 56 bp, Artificial
  Synthetic oligonucleotide
aaagttctggggttacatcctattatactccgacgataggagactaataagcagac

SEQ ID NO: 299452 - DNA, 55 bp, Artificial
  Synthetic oligonucleotide
aaagttcttccccagcagttcgtacagaaggccagttgggatttccagtatggtg

SEQ ID NO: 299453 - DNA, 54 bp, Artificial
  Synthetic oligonucleotide
aaagttgaggaattaacaccagggaggttcaggacaattgtctgtgggttattc

SEQ ID NO: 299454 - DNA, 55 bp, Artificial
  Synthetic oligonucleotide
aaagttgatttagacgtagtgtcgaaagtactggctggtcttacgactggagatt

SEQ ID NO: 299455 - DNA, 60 bp, Artificial
  Synthetic oligonucleotide
aaagttgctatataatgagcagtttgctgtccagggtctactgagatatcatacatatgc

SEQ ID NO: 299456 - DNA, 56 bp, Artificial
  Synthetic oligonucleotide
aaagttgctctatgttcctcatgattctataccccctattaccgtcaacccaatct

SEQ ID NO: 299457 - DNA, 56 bp, Artificial
  Synthetic oligonucleotide
aaagttggaactggtggcgacgcttattatcaaaagttcggtgatctggacgtgag

SEQ ID NO: 299458 - DNA, 54 bp, Artificial
  Synthetic oligonucleotide
aaagttggcgcaatgccgcctgagtgggttggtacacagccttgaaaacacata

SEQ ID NO: 299459 - DNA, 57 bp, Artificial
  Synthetic oligonucleotide
aaagttgtataaggcagtggaggtgcggtgttccgtcggcgtgtctctcggcggcga

SEQ ID NO: 299460 - DNA, 55 bp, Artificial
  Synthetic oligonucleotide
aaagttgtggcttgagcaggattcgagtggcgggtggtggttggtcgtggaagac

SEQ ID NO: 299461 - DNA, 53 bp, Artificial
  Synthetic oligonucleotide
aaagttgttctacaagttgtctctaccgtccttgacggaaaagttaccacatc

SEQ ID NO: 299462 - DNA, 60 bp, Artificial
  Synthetic oligonucleotide
aaagttgttgccaggagtggtgcgatcagtgagttcacagaatattgtgaccgacagcac

SEQ ID NO: 299463 - DNA, 52 bp, Artificial
  Synthetic oligonucleotide
aaagtttaaccacattcgtacacaagaagaaaaaagatggtgaggaggaaac

SEQ ID NO: 299464 - DNA, 53 bp, Artificial
  Synthetic oligonucleotide
aaagtttaattgcccattcaggtcttaagaggtcaaagtattggtccctccac

SEQ ID NO: 299465 - DNA, 54 bp, Artificial
  Synthetic oligonucleotide
aaagtttatcagttgtgtgtatttctaaacttacaccccattgtatggaacgta

SEQ ID NO: 299466 - DNA, 56 bp, Artificial
  Synthetic oligonucleotide
aaagtttatgttagttgtccaggactgccgtagtcctgtcggaagctttagtgtga

SEQ ID NO: 299467 - DNA, 55 bp, Artificial
  Synthetic oligonucleotide
aaagtttctcactaggagactttcaggcacattcacctggaccctgtcagactcc

SEQ ID NO: 299468 - DNA, 54 bp, Artificial
  Synthetic oligonucleotide
aaagtttgacaaaccaggaaattatactattaatttctaataggccgcgccagc

SEQ ID NO: 299469 - DNA, 56 bp, Artificial
  Synthetic oligonucleotide
aaagtttggagtcttcgacgtggtgtcaaggaaatggctaatcaaacccactgcta

SEQ ID NO: 299470 - DNA, 49 bp, Artificial
  Synthetic oligonucleotide
aaagtttgggggggtatactcttttgaaaagtgagtaaatagtaggagt

SEQ ID NO: 299471 - DNA, 55 bp, Artificial
  Synthetic oligonucleotide
aaataaaacccctccacaatagaaccagacccatggactcaacgcgtcaagtatc

SEQ ID NO: 299472 - DNA, 56 bp, Artificial
  Synthetic oligonucleotide
aaataaaaccccttatgtgtattgctcgcaatgtcttctaccaacgtaatcctcca

SEQ ID NO: 299473 - DNA, 50 bp, Artificial
  Synthetic oligonucleotide
aaataaaaggcacgagttccccgaataccaccggcgtgtgatgatttcgc

SEQ ID NO: 299474 - DNA, 51 bp, Artificial
  Synthetic oligonucleotide
aaataaaagggcgtgggtcactagccccccattaaaatgggttccatgacc

SEQ ID NO: 299475 - DNA, 54 bp, Artificial
  Synthetic oligonucleotide
aaataaaattactattaacgatattctgcgtgacataaaaccattcttcgttac

SEQ ID NO: 299476 - DNA, 54 bp, Artificial
  Synthetic oligonucleotide
aaataaacgcgttaatcaccgaaaagatgtgctacgtgaccagttttatcaggg

SEQ ID NO: 299477 - DNA, 55 bp, Artificial
  Synthetic oligonucleotide
aaataaaggggatttgatatctcccagatatacacgccattctccgcttgacgtg

SEQ ID NO: 299478 - DNA, 55 bp, Artificial
  Synthetic oligonucleotide
aaataaatcccattatgtcaagcctcgtcaatataccaattcctaacccacttac

SEQ ID NO: 299479 - DNA, 60 bp, Artificial
  Synthetic oligonucleotide
aaataaatgactcaactactgtagagcctgtattagatggtccataccaaccagttgcat

SEQ ID NO: 299480 - DNA, 58 bp, Artificial
  Synthetic oligonucleotide
aaataaatgattcaactactgtagaacctgtgctagatggtccataccaaccaacttc

SEQ ID NO: 299481 - DNA, 60 bp, Artificial
  Synthetic oligonucleotide
aaataacagtctgcgcatgacgcatcgtaacggcatcttcggctctatggccacgatcct

SEQ ID NO: 299482 - DNA, 60 bp, Artificial
  Synthetic oligonucleotide
aaataacatggagagacatggcgcacacactaataatgattgggtccaacgcctctgaca

SEQ ID NO: 299483 - DNA, 59 bp, Artificial
  Synthetic oligonucleotide
aaataaccgcactggcaaacaaatacggctatgcctacgctagcaatagttactttgca

SEQ ID NO: 299484 - DNA, 60 bp, Artificial
  Synthetic oligonucleotide
aaataacgggcaacgtattgatgcatttagaatcatgggagtgtcggagtggacagatgg

SEQ ID NO: 299485 - DNA, 57 bp, Artificial
  Synthetic oligonucleotide
aaataactgaagacttttcaaattctcatgtggtgttaatcaatggttctagacgta

SEQ ID NO: 299486 - DNA, 53 bp, Artificial
  Synthetic oligonucleotide
aaataactgacgtggacttcacagtcctcgagggtgttcggtcgctggcacga

SEQ ID NO: 299487 - DNA, 59 bp, Artificial
  Synthetic oligonucleotide
aaataagacgcagttcttccgttaattacaagaatatcgttaaagcttgcaatgatgca

SEQ ID NO: 299488 - DNA, 50 bp, Artificial
  Synthetic oligonucleotide
aaataagacgcgctcatttacggcagcaccaatagacactctcttagggg

SEQ ID NO: 299489 - DNA, 52 bp, Artificial
  Synthetic oligonucleotide
aaataagagcaaacaaaagacacagcagaaagcagcagctgccacaggaagc

SEQ ID NO: 299490 - DNA, 60 bp, Artificial
  Synthetic oligonucleotide
aaataagagcatagaagtctgatgtgttgtgcagtataccctgacccatgtcaagtatgg

SEQ ID NO: 299491 - DNA, 58 bp, Artificial
  Synthetic oligonucleotide
aaataagtagcatgtctcccgttctttaatgcaagatgtattctgtttacagacgtgg

SEQ ID NO: 299492 - DNA, 55 bp, Artificial
  Synthetic oligonucleotide
aaataatagactctacaacatgagagtctctatcagaatacgaggttgtccggag

SEQ ID NO: 299493 - DNA, 52 bp, Artificial
  Synthetic oligonucleotide
aaataatcaaaccacacgaaaaaggcataaaccccaattacctcctggcttg

SEQ ID NO: 299494 - DNA, 58 bp, Artificial
  Synthetic oligonucleotide
aaataatcaaggctatacatcattttcaggaagcaccgtttggagtgtcactttccca

SEQ ID NO: 299495 - DNA, 60 bp, Artificial
  Synthetic oligonucleotide
aaataatcatccgcccattcttgcatctctcttggcacgttagtgaaagaggagaggtga

SEQ ID NO: 299496 - DNA, 58 bp, Artificial
  Synthetic oligonucleotide
aaataatcgaagggagagaccgtaatatggcctggaccgtggtgaatagcatttgcaa

SEQ ID NO: 299497 - DNA, 55 bp, Artificial
  Synthetic oligonucleotide
aaataatcgaccaaaaggatgagttaatctctaaacttaagaatgaaatcaccat

SEQ ID NO: 299498 - DNA, 60 bp, Artificial
  Synthetic oligonucleotide
aaataatgaaagacgtaatgaaatgttagcgcattgttctctcgggtcaaatgtgacagc

SEQ ID NO: 299499 - DNA, 52 bp, Artificial
  Synthetic oligonucleotide
aaataatgaatgtagcgactgtccaggccggagtctagcgcagaaatgacga

SEQ ID NO: 299500 - DNA, 58 bp, Artificial
  Synthetic oligonucleotide
aaataatggcaggtccaatagcttagtacagcatggcccttagtaatacaaaggagga

SEQ ID NO: 299501 - DNA, 60 bp, Artificial
  Synthetic oligonucleotide
aaataatgggagctgcaatgaaacaatcattagggaatacaatgagacagtacgggttga

SEQ ID NO: 299502 - DNA, 58 bp, Artificial
  Synthetic oligonucleotide
aaataatggggtgccattcgcgctaccatccaatctgccaacgctcccgagcgaacta

SEQ ID NO: 299503 - DNA, 53 bp, Artificial
  Synthetic oligonucleotide
aaataatggtgtttgacgaaaagaagtgtatgcgtgtaagcccagaaaaactg

SEQ ID NO: 299504 - DNA, 55 bp, Artificial
  Synthetic oligonucleotide
aaataattgagctagagcatctatgtccgactaatgatgtgtatctgggatcagg

SEQ ID NO: 299505 - DNA, 59 bp, Artificial
  Synthetic oligonucleotide
aaataattgggcaccgataggtaaatgaggcaccgatacatcggtgcctctattggtga

SEQ ID NO: 299506 - DNA, 59 bp, Artificial
  Synthetic oligonucleotide
aaatacaaacatctgccactatagttgattttaacactgaataaattctgtatgattta

SEQ ID NO: 299507 - DNA, 51 bp, Artificial
  Synthetic oligonucleotide
aaatacaacgtagtaccgtcttcgtggattttgtcacgttcacataaggat

SEQ ID NO: 299508 - DNA, 59 bp, Artificial
  Synthetic oligonucleotide
aaatacaaggaaactacatttattaccatacaggaggagtcataggagcaggagctata

SEQ ID NO: 299509 - DNA, 59 bp, Artificial
  Synthetic oligonucleotide
aaatacaaggggcaatggtatccattccttgcacttctacagatctccaacaagaccaa

SEQ ID NO: 299510 - DNA, 51 bp, Artificial
  Synthetic oligonucleotide
aaatacaattggaccgattacccttcaacaccagggaggtgccttgatgac

SEQ ID NO: 299511 - DNA, 56 bp, Artificial
  Synthetic oligonucleotide
aaatacacagagagaatacgttttagatggacagacggtgcagctacaagtttcaa

SEQ ID NO: 299512 - DNA, 52 bp, Artificial
  Synthetic oligonucleotide
aaatacactggacaaatatgccgggtaccttagatccctttacggctttaac

SEQ ID NO: 299513 - DNA, 59 bp, Artificial
  Synthetic oligonucleotide
aaatacagagtaaatgtcttatacaagacatgcccttatgggcctctgtatacggattc

SEQ ID NO: 299514 - DNA, 60 bp, Artificial
  Synthetic oligonucleotide
aaatacagcgtatgtgtctcgatcggtgtaatctctacaattatggtgcacaagtgaagt

SEQ ID NO: 299515 - DNA, 60 bp, Artificial
  Synthetic oligonucleotide
aaatacagctgacagactacggagctctaacattggattgttcacctagaacaggactag

SEQ ID NO: 299516 - DNA, 54 bp, Artificial
  Synthetic oligonucleotide
aaatacaggctacgagttctcctcgtagggtctctctttcttggcctttagtgg

SEQ ID NO: 299517 - DNA, 56 bp, Artificial
  Synthetic oligonucleotide
aaatacaggctgtgtctttggttcttgtcaggatataataaggccagaaacaaagg

SEQ ID NO: 299518 - DNA, 60 bp, Artificial
  Synthetic oligonucleotide
aaatacaggggattgtttatgtcccaggtatacacgccattcattgcttgaggagcagtg

SEQ ID NO: 299519 - DNA, 60 bp, Artificial
  Synthetic oligonucleotide
aaatacaggggattttgaatctcccagataaacacgccattctctgcttgagctgcagtg

SEQ ID NO: 299520 - DNA, 58 bp, Artificial
  Synthetic oligonucleotide
aaatacatcagcaaaaaacaactgcataactatatattctttaaacacatacctatac

SEQ ID NO: 299521 - DNA, 60 bp, Artificial
  Synthetic oligonucleotide
aaatacatgtatataaacgtgatctctgagaagttgataggtattgggcattaacatttc

SEQ ID NO: 299522 - DNA, 60 bp, Artificial
  Synthetic oligonucleotide
aaatacatgtttatgggtttgataatcccatgtttgactggtagtgatcagttgtgggca

SEQ ID NO: 299523 - DNA, 60 bp, Artificial
  Synthetic oligonucleotide
aaataccaacggtagctggcatattaacaggactgccctgaattgcaatgactctctcca

SEQ ID NO: 299524 - DNA, 52 bp, Artificial
  Synthetic oligonucleotide
aaataccaccgtcgctggtcgtattctcaacgacgaactattcaacgaaccc

SEQ ID NO: 299525 - DNA, 56 bp, Artificial
  Synthetic oligonucleotide
aaataccagaatcgacactgtagaagtagccttgaaaaggctaaccaagcagttcc

SEQ ID NO: 299526 - DNA, 60 bp, Artificial
  Synthetic oligonucleotide
aaataccatgcgtgctcgtaggcgcagggctgcgccagacacgttatacagacagtgtgc

SEQ ID NO: 299527 - DNA, 58 bp, Artificial
  Synthetic oligonucleotide
aaataccattcgtgtctcgtattccaacggtcactttgcgtcacgcttcagtgatcgg

SEQ ID NO: 299528 - DNA, 53 bp, Artificial
  Synthetic oligonucleotide
aaatacccaattacagcagacaaaaaaataacggaaatgattcctgaaaggaa

SEQ ID NO: 299529 - DNA, 57 bp, Artificial
  Synthetic oligonucleotide
aaatacccactacggagaaagatccagtagggttctgtctgcgtaataaggtgtgca

SEQ ID NO: 299530 - DNA, 54 bp, Artificial
  Synthetic oligonucleotide
aaatacccgaccccgcctgccaattcgcttacaaaacggtctatgcgaaatata

SEQ ID NO: 299531 - DNA, 59 bp, Artificial
  Synthetic oligonucleotide
aaatacccgattacggctgacaaaagaataatggagatgatccctgaaaggaatgagca

SEQ ID NO: 299532 - DNA, 55 bp, Artificial
  Synthetic oligonucleotide
aaatacccttaaaccctgtatggaatgacaacgcccatggagtaggttctgtgcc

SEQ ID NO: 299533 - DNA, 53 bp, Artificial
  Synthetic oligonucleotide
aaatacctatgcatgcagctgctataactagaattaccctaaccaggtcaaaa

SEQ ID NO: 299534 - DNA, 57 bp, Artificial
  Synthetic oligonucleotide
aaatacctatgggagtaggcctcagcccgtttctcctggctcagtttactagtgcca

SEQ ID NO: 299535 - DNA, 58 bp, Artificial
  Synthetic oligonucleotide
aaatacctgaggaccaacagatatatccctctcaaatgtatccactgttggaggtccc

SEQ ID NO: 299536 - DNA, 57 bp, Artificial
  Synthetic oligonucleotide
aaataccttcagctggttgaatgtacttattctcctgatacactcggttacgattta

SEQ ID NO: 299537 - DNA, 54 bp, Artificial
  Synthetic oligonucleotide
aaataccttgaagaacatcccagtgcggggaaagatcctaagaaaactggagga

SEQ ID NO: 299538 - DNA, 59 bp, Artificial
  Synthetic oligonucleotide
aaatacgaaatttatgttatgtaccgcactcaacatattacgcactgagagggcatttg

SEQ ID NO: 299539 - DNA, 56 bp, Artificial
  Synthetic oligonucleotide
aaatacgaaccaatagattttaattgtagtgataaggttcatctagttgtattatc

SEQ ID NO: 299540 - DNA, 60 bp, Artificial
  Synthetic oligonucleotide
aaatacgagaatcatacggagaatgcgttgatgctttatatggcttgtacccatgctagc

SEQ ID NO: 299541 - DNA, 58 bp, Artificial
  Synthetic oligonucleotide
aaatacgagatgcccggacgaattgtcaacaatacggtcattgatagtgtttaatctc

SEQ ID NO: 299542 - DNA, 60 bp, Artificial
  Synthetic oligonucleotide
aaatacgatgctgcgttgcagttagacatgtcagaattagcagatttgatacttaatgag

SEQ ID NO: 299543 - DNA, 54 bp, Artificial
  Synthetic oligonucleotide
aaatacgcaaacattaggaattgggtgcctaactactgatacaaagacgtttga

SEQ ID NO: 299544 - DNA, 54 bp, Artificial
  Synthetic oligonucleotide
aaatacgcggttacccagacgtccagggaagtgacgtactgcccagtagtcgta

SEQ ID NO: 299545 - DNA, 56 bp, Artificial
  Synthetic oligonucleotide
aaatacgcgttctcaaattatcgcaatcgattatttcgacataagtttcgtgtaat

SEQ ID NO: 299546 - DNA, 58 bp, Artificial
  Synthetic oligonucleotide
aaatacgctcaatactggtctaacctgaaccaatctatcctgagtaaagcccaagata

SEQ ID NO: 299547 - DNA, 55 bp, Artificial
  Synthetic oligonucleotide
aaatacgggctcttatgtcaggctctatctctggggagtgcatcacccatcaagc

SEQ ID NO: 299548 - DNA, 55 bp, Artificial
  Synthetic oligonucleotide
aaatacggtgggaacgttgaacaaatagggaacgtggtatcagattcagagagac

SEQ ID NO: 299549 - DNA, 50 bp, Artificial
  Synthetic oligonucleotide
aaatacgtacgctggtgcggactttgttattgcatacgctcaggctcgcg

SEQ ID NO: 299550 - DNA, 59 bp, Artificial
  Synthetic oligonucleotide
aaatacgtgatgaagttggaaggcgagcattggactgtctccgtcacccctgggatgtc

SEQ ID NO: 299551 - DNA, 52 bp, Artificial
  Synthetic oligonucleotide
aaatactaacacatctacttgagtgtggttgctaagaacatccaatgcgtgc

SEQ ID NO: 299552 - DNA, 60 bp, Artificial
  Synthetic oligonucleotide
aaatactatttcaggcatgtcgaccgcaaggagtgctgcttctgaattcgtcaaaagcta

SEQ ID NO: 299553 - DNA, 60 bp, Artificial
  Synthetic oligonucleotide
aaatactcatgccaatgttgattcaccgatgcgcgtttttggaagcaagaatggaaaaga

SEQ ID NO: 299554 - DNA, 51 bp, Artificial
  Synthetic oligonucleotide
aaatactccggtaccggcaaatcctccgacgactttcagcccggccaagtt

SEQ ID NO: 299555 - DNA, 55 bp, Artificial
  Synthetic oligonucleotide
aaatactgcaatttggtggcccagtcgtaagggaattccttccgaaccaagcaga

SEQ ID NO: 299556 - DNA, 60 bp, Artificial
  Synthetic oligonucleotide
aaatactgtcaatttacagctgcattgcaagcagtctcgtattggcagcactcatcatgg

SEQ ID NO: 299557 - DNA, 55 bp, Artificial
  Synthetic oligonucleotide
aaatactgtgatgttttttcttgttaaagatcgccgtccaagtgggacgcccatg

SEQ ID NO: 299558 - DNA, 58 bp, Artificial
  Synthetic oligonucleotide
aaatacttaatgcattgactactaaagactcttaagaaacgcgaggtctgaggatgta

SEQ ID NO: 299559 - DNA, 57 bp, Artificial
  Synthetic oligonucleotide
aaatagaaaagcgtgcttgccatggtggaggacgttgtatcgcctcccagggtattg

SEQ ID NO: 299560 - DNA, 51 bp, Artificial
  Synthetic oligonucleotide
aaatagaaatgcaacccttggcgtcctcccgagagcccctgtatgatgtgt

SEQ ID NO: 299561 - DNA, 55 bp, Artificial
  Synthetic oligonucleotide
aaatagaacagattggatcggagaaaactcaaaatgtgacgataaatccaggccc

SEQ ID NO: 299562 - DNA, 55 bp, Artificial
  Synthetic oligonucleotide
aaatagaaccactctgccaaatatgttaccaccaatattccctccaaacgatcga

SEQ ID NO: 299563 - DNA, 54 bp, Artificial
  Synthetic oligonucleotide
aaatagaatcacaaataattcaacttacctcgacggtgcccgtagaacaaataa

SEQ ID NO: 299564 - DNA, 60 bp, Artificial
  Synthetic oligonucleotide
aaatagacatacaatcgatgtcatgcctgacatatatgactttgttaaacccattggcgc

SEQ ID NO: 299565 - DNA, 55 bp, Artificial
  Synthetic oligonucleotide
aaatagacatcacgccataccgtatcacacggtgacgcataatcgattgcgtgat

SEQ ID NO: 299566 - DNA, 51 bp, Artificial
  Synthetic oligonucleotide
aaatagaccgcgggtcttattacggtaaaaggttgttattacctgattcag

SEQ ID NO: 299567 - DNA, 51 bp, Artificial
  Synthetic oligonucleotide
aaatagaggagctgcctgactggttcgcagccaaggaacccatatttctag

SEQ ID NO: 299568 - DNA, 60 bp, Artificial
  Synthetic oligonucleotide
aaatagaggatgtctgcccattcagagacaaaggctctagtccacgcgaggacaaatgaa

SEQ ID NO: 299569 - DNA, 57 bp, Artificial
  Synthetic oligonucleotide
aaatagaggggatttggtgtctcccagatatagacgccattctccgcctgaggtgca

SEQ ID NO: 299570 - DNA, 57 bp, Artificial
  Synthetic oligonucleotide
aaatagagttaggcaggggtattcaccactctcgttgcagacccacctcccagctcc

SEQ ID NO: 299571 - DNA, 60 bp, Artificial
  Synthetic oligonucleotide
aaatagatcacaacctcaacatgataatttgatgggcacgatgtggttgaatgcaggttc

SEQ ID NO: 299572 - DNA, 59 bp, Artificial
  Synthetic oligonucleotide
aaatagatcagcatagagcaaaaatagaggagttaagggctcatttattaagatgggga

SEQ ID NO: 299573 - DNA, 57 bp, Artificial
  Synthetic oligonucleotide
aaatagattgtagtccagggatatggcaattagattgtacacatttagaaggaaaag

SEQ ID NO: 299574 - DNA, 55 bp, Artificial
  Synthetic oligonucleotide
aaatagcaacacggcctaaggtgaatgggcagggaggtagaatggagttttcttg

SEQ ID NO: 299575 - DNA, 59 bp, Artificial
  Synthetic oligonucleotide
aaatagcactgtatgtgtacagtccgcattgccttatgttaacttttttgtctcctaca

SEQ ID NO: 299576 - DNA, 60 bp, Artificial
  Synthetic oligonucleotide
aaatagcatggaactgatgatattcagctacaaccaagactactcgttaagtaatgaatc

SEQ ID NO: 299577 - DNA, 53 bp, Artificial
  Synthetic oligonucleotide
aaatagcatttgcaacaccacgggggttgagaaacccaagtttcttcctgatt

SEQ ID NO: 299578 - DNA, 60 bp, Artificial
  Synthetic oligonucleotide
aaatagcgaaagcggtattctcgatgcgcgacagccgaacatgatcgcgtcaaaaaataa

SEQ ID NO: 299579 - DNA, 60 bp, Artificial
  Synthetic oligonucleotide
aaatagcgagagcggcgaaataaagattgaaggcagtgccgaaaatgatcagccacatga

SEQ ID NO: 299580 - DNA, 58 bp, Artificial
  Synthetic oligonucleotide
aaatagcgggaatgaccgctgatgtattagaggcggcgtctgaagaggtgcctttaat

SEQ ID NO: 299581 - DNA, 55 bp, Artificial
  Synthetic oligonucleotide
aaatagctggaattcatgttgctggtgatgcccgcgggaaagcttatgcagagtc

SEQ ID NO: 299582 - DNA, 51 bp, Artificial
  Synthetic oligonucleotide
aaataggcactatgatggatgcggtaacagagcttcaggtttacctgtaac

SEQ ID NO: 299583 - DNA, 56 bp, Artificial
  Synthetic oligonucleotide
aaataggcctatgtacaggaagcccaggatatatcgaacgttacgaggccctgacg

SEQ ID NO: 299584 - DNA, 59 bp, Artificial
  Synthetic oligonucleotide
aaataggcgactgattcaattaaatcaagctctataatcctggaaactgcgatttacca

SEQ ID NO: 299585 - DNA, 53 bp, Artificial
  Synthetic oligonucleotide
aaataggcgcaagttcaacaaatgcaaagggtttggggctcaaatgttcgggg

SEQ ID NO: 299586 - DNA, 60 bp, Artificial
  Synthetic oligonucleotide
aaataggctatgtgcagctagaatggcatcctgagtatcaggtggaagagtagtgtcaac

SEQ ID NO: 299587 - DNA, 59 bp, Artificial
  Synthetic oligonucleotide
aaataggggatatgctcctacggactgcaataggccaagtatcaagacccatgttcctg

SEQ ID NO: 299588 - DNA, 55 bp, Artificial
  Synthetic oligonucleotide
aaataggtagacttccattcgaaattagaattccgaatattggcggccatccgat

SEQ ID NO: 299589 - DNA, 57 bp, Artificial
  Synthetic oligonucleotide
aaataggtagacttccatttgaattgaaaagtaggatctgtgtaattgcggccatcc

SEQ ID NO: 299590 - DNA, 55 bp, Artificial
  Synthetic oligonucleotide
aaataggttgtatcgatgtggtgactgggatggtattttacttctcctttcagga

SEQ ID NO: 299591 - DNA, 60 bp, Artificial
  Synthetic oligonucleotide
aaatagtaatagtacagagcactttgatgcatgcaggtggactaaatcagaaccacattc

SEQ ID NO: 299592 - DNA, 53 bp, Artificial
  Synthetic oligonucleotide
aaatagtcccttaaactgtcaaggttatttataccatgacctgagggcaaatc

SEQ ID NO: 299593 - DNA, 54 bp, Artificial
  Synthetic oligonucleotide
aaatagtcgaactacaaactatcaataatctcgatcttgcgtataaatatttag

SEQ ID NO: 299594 - DNA, 59 bp, Artificial
  Synthetic oligonucleotide
aaatagtcgtctcttgcgcaaaatcattactcaacgttggccgccatacaacaacacaa

SEQ ID NO: 299595 - DNA, 55 bp, Artificial
  Synthetic oligonucleotide
aaatagtgtacacggttaaagtcgaaccacacacgggagactatgttgccgcaaa

SEQ ID NO: 299596 - DNA, 58 bp, Artificial
  Synthetic oligonucleotide
aaatagttgaattacagactattagtaatcttaatcttgcgtatcagtacttagctac

SEQ ID NO: 299597 - DNA, 56 bp, Artificial
  Synthetic oligonucleotide
aaatataaagtggttaggatagaaccccttgcagtagcacctagcaaggcaaagag

SEQ ID NO: 299598 - DNA, 55 bp, Artificial
  Synthetic oligonucleotide
aaatataacgaattgagcgaaactgtgaaatcatggatgcaaacccgtactagtg

SEQ ID NO: 299599 - DNA, 57 bp, Artificial
  Synthetic oligonucleotide
aaatataccgataagacaacaaagcactatgacccagacttaggccgtatggttggc

SEQ ID NO: 299600 - DNA, 56 bp, Artificial
  Synthetic oligonucleotide
aaatatacggggcacccaaggtgatcactatcataaaggctagtaccctaagcaaa

SEQ ID NO: 299601 - DNA, 55 bp, Artificial
  Synthetic oligonucleotide
aaatatagcatgaaacatttaatatgggcaggcagggagctggaaagatttgcac

SEQ ID NO: 299602 - DNA, 51 bp, Artificial
  Synthetic oligonucleotide
aaatatagggtatctcgagcttccgacaggtgaagagagatcatatataga

SEQ ID NO: 299603 - DNA, 60 bp, Artificial
  Synthetic oligonucleotide
aaatataggtaatgacttgcaatattggacgttgtggcctttacataatgattacactca

SEQ ID NO: 299604 - DNA, 55 bp, Artificial
  Synthetic oligonucleotide
aaatatcattatgatgctgattactcccggtgggactcaacacaacaaagagccg

SEQ ID NO: 299605 - DNA, 60 bp, Artificial
  Synthetic oligonucleotide
aaatatccctgacattagtgcatacttgcatttatcttgtccgctcttagtggacacgcg

SEQ ID NO: 299606 - DNA, 60 bp, Artificial
  Synthetic oligonucleotide
aaatatccgatcactgcagacaaaagaataatggagatgatccctgagagaaatgaacaa

SEQ ID NO: 299607 - DNA, 50 bp, Artificial
  Synthetic oligonucleotide
aaatatccgattacagctgacaagaggataacagaaatgattcctgagag

SEQ ID NO: 299608 - DNA, 60 bp, Artificial
  Synthetic oligonucleotide
aaatatccgattacggcagataagaggataatggaaatgatccctgagaggaatgaacaa

SEQ ID NO: 299609 - DNA, 59 bp, Artificial
  Synthetic oligonucleotide
aaatatcgagaggactttcggatggatgaaggagaggatcctagccttctgttccagtc

SEQ ID NO: 299610 - DNA, 54 bp, Artificial
  Synthetic oligonucleotide
aaatatctttgggtacccaggctataaataacacgtcacgaggcgggtgtagta

SEQ ID NO: 299611 - DNA, 60 bp, Artificial
  Synthetic oligonucleotide
aaatatgaaaatcacacggagaatgcgttgttattgtatatggcatgtactcatgcctct

SEQ ID NO: 299612 - DNA, 52 bp, Artificial
  Synthetic oligonucleotide
aaatatgaagaagagtctaggttaaataggaacgaaatcaaaggagtaaaat

SEQ ID NO: 299613 - DNA, 58 bp, Artificial
  Synthetic oligonucleotide
aaatatgaccggtgtcatagcctctagcacacagaggtcgcgtgggttcaactccccc

SEQ ID NO: 299614 - DNA, 60 bp, Artificial
  Synthetic oligonucleotide
aaatatgaggttctaaggatttacccgatcagtacttataatcatgatcgtgtcaatgtc

SEQ ID NO: 299615 - DNA, 57 bp, Artificial
  Synthetic oligonucleotide
aaatatgataagcggaactttatcgaatttcagtgtgtgtttttgaccacatataac

SEQ ID NO: 299616 - DNA, 60 bp, Artificial
  Synthetic oligonucleotide
aaatatgatcctgcgcaatccttggttgcgagtgctttctttacagttaagacgtctgcg

SEQ ID NO: 299617 - DNA, 59 bp, Artificial
  Synthetic oligonucleotide
aaatatgatgactgcccggactcattggcccgaggtctggaatggctaggcctgctacg

SEQ ID NO: 299618 - DNA, 55 bp, Artificial
  Synthetic oligonucleotide
aaatatgccgctgttgctctcgatttctcacaatatgattctagtttacatggcg

SEQ ID NO: 299619 - DNA, 58 bp, Artificial
  Synthetic oligonucleotide
aaatatgctatcaatacttacccgtggcttaactccgtcgagtctgttgaccagctcg

SEQ ID NO: 299620 - DNA, 58 bp, Artificial
  Synthetic oligonucleotide
aaatatggagtatgacgctgttgcaacaacacattcctgggttcccaaaaggaatcga

SEQ ID NO: 299621 - DNA, 52 bp, Artificial
  Synthetic oligonucleotide
aaatatggtatgtcgctcgactagtaacaacgtggccaacgaaatgcaggat

SEQ ID NO: 299622 - DNA, 55 bp, Artificial
  Synthetic oligonucleotide
aaatatgtactacacaccacattttcagggaccaaatttatgtagtagagggcgg

SEQ ID NO: 299623 - DNA, 58 bp, Artificial
  Synthetic oligonucleotide
aaatatgtcgcgcataccaagaacatcgttgtttctcaatacagaattaacgtcggcg

SEQ ID NO: 299624 - DNA, 53 bp, Artificial
  Synthetic oligonucleotide
aaatatgtgggatcctttactgaatgagtttcccgaaaccgtacacggtttca

SEQ ID NO: 299625 - DNA, 59 bp, Artificial
  Synthetic oligonucleotide
aaatattacaggactgctattaacaagggatggtggtcataacacgaatactactgaga

SEQ ID NO: 299626 - DNA, 55 bp, Artificial
  Synthetic oligonucleotide
aaatattacagggctgctattaacaagagatggaggtaaccaaaatgggaccaac

SEQ ID NO: 299627 - DNA, 57 bp, Artificial
  Synthetic oligonucleotide
aaatattacagggctgctattaacaagagatggggggaataataggacaaatgagac

SEQ ID NO: 299628 - DNA, 58 bp, Artificial
  Synthetic oligonucleotide
aaatattacagggctgctattaacaagagatggtggtacgagcgataccaataccacc

SEQ ID NO: 299629 - DNA, 57 bp, Artificial
  Synthetic oligonucleotide
aaatattatccgccaccaacctcagtaattgctccagccgcatttaagggaggattg

SEQ ID NO: 299630 - DNA, 60 bp, Artificial
  Synthetic oligonucleotide
aaatattatgagcatgctccaatagaactgatttatgcatgtaggtcagcaagggaattt

SEQ ID NO: 299631 - DNA, 55 bp, Artificial
  Synthetic oligonucleotide
aaatattccccaaggaaagctcatggcccaaacacaacataaccagaggagtaac

SEQ ID NO: 299632 - DNA, 51 bp, Artificial
  Synthetic oligonucleotide
aaatattcctggcttgctttcctccagtagcttaaatggttcactgcacat

SEQ ID NO: 299633 - DNA, 60 bp, Artificial
  Synthetic oligonucleotide
aaatattgcaacgcaactcaaaggcctgcaagcaatctcagttcttgacatgcccatgat

SEQ ID NO: 299634 - DNA, 60 bp, Artificial
  Synthetic oligonucleotide
aaatattgcaagccactagcgttgtcacacttggcctctggacacatgggattaattgca

SEQ ID NO: 299635 - DNA, 60 bp, Artificial
  Synthetic oligonucleotide
aaatattgcgtgcctgggctctcgttttggtgacagcaaactctgtggaatgaattggtg

SEQ ID NO: 299636 - DNA, 60 bp, Artificial
  Synthetic oligonucleotide
aaatattgttaggagagcaacggtatcagcagatccattggcatcattattagagatgtg

SEQ ID NO: 299637 - DNA, 55 bp, Artificial
  Synthetic oligonucleotide
aaatatttgcaggccgttgaggaaacgtatgagcccaacactttgggccacgatt

SEQ ID NO: 299638 - DNA, 54 bp, Artificial
  Synthetic oligonucleotide
aaatcaaatgcgttaactcgtacggtgaagacctcaagctttcttacgaccttg

SEQ ID NO: 299639 - DNA, 58 bp, Artificial
  Synthetic oligonucleotide
aaatcaaccagccgactacatgtcttgaagcatcaggtttatttataaaacctgaaca

SEQ ID NO: 299640 - DNA, 60 bp, Artificial
  Synthetic oligonucleotide
aaatcaacgcgacgtcgtctgattgctcgtttcttcgcagctctgtgttgaactttgata

SEQ ID NO: 299641 - DNA, 51 bp, Artificial
  Synthetic oligonucleotide
aaatcaactggcaggacgcatgataccaaaagggacagtaacttggtccgg

SEQ ID NO: 299642 - DNA, 56 bp, Artificial
  Synthetic oligonucleotide
aaatcaactgggaaacgtccagttgagtatatagaagattgttgtaacacttacga

SEQ ID NO: 299643 - DNA, 58 bp, Artificial
  Synthetic oligonucleotide
aaatcaagatctatatgaattacacttcctccgtaggaggaagcacaaggggagaata

SEQ ID NO: 299644 - DNA, 60 bp, Artificial
  Synthetic oligonucleotide
aaatcaagatctatctgaatatactgcctccgtaggaggcagctcagggggagaatacca

SEQ ID NO: 299645 - DNA, 51 bp, Artificial
  Synthetic oligonucleotide
aaatcaagcaatgtttccgaaaactccctgttaatcgaccgatagattgga

SEQ ID NO: 299646 - DNA, 51 bp, Artificial
  Synthetic oligonucleotide
aaatcaagctttcttgcgttcaagaccgcttttcgtcttcgacgcttacgt

SEQ ID NO: 299647 - DNA, 59 bp, Artificial
  Synthetic oligonucleotide
aaatcaagttcgctttttattgattccgatctgatatcgtcatctataccgtattcttc

SEQ ID NO: 299648 - DNA, 60 bp, Artificial
  Synthetic oligonucleotide
aaatcaatcgtcatgtactcattacgtatcatatggtcgcactcgtcttttttagacaac

SEQ ID NO: 299649 - DNA, 54 bp, Artificial
  Synthetic oligonucleotide
aaatcaatgaaccttatcacgggcgtgttaatccaacctaaggttctcccaagc

SEQ ID NO: 299650 - DNA, 59 bp, Artificial
  Synthetic oligonucleotide
aaatcaatgaggaatggtataaggtggtggtgcctgactacaaagcgagtcgcgattac

SEQ ID NO: 299651 - DNA, 53 bp, Artificial
  Synthetic oligonucleotide
aaatcaatgcttagttatggaaatgtcattgacctcaatcatcttgacattga

SEQ ID NO: 299652 - DNA, 59 bp, Artificial
  Synthetic oligonucleotide
aaatcaattcagatctataattaaagggatcgtgaatcaatggtacgatgttactgaat

SEQ ID NO: 299653 - DNA, 58 bp, Artificial
  Synthetic oligonucleotide
aaatcacaggtaaatagacaactcatagttgacaataataattggtctgggtattctg

SEQ ID NO: 299654 - DNA, 60 bp, Artificial
  Synthetic oligonucleotide
aaatcacctccagaggaccccttcagcgaacagagagcgcatcgcgagagggagtagacc

SEQ ID NO: 299655 - DNA, 60 bp, Artificial
  Synthetic oligonucleotide
aaatcacctggctaatagatgtcctagaagatatactaatcaggctagagcaagtctaat

SEQ ID NO: 299656 - DNA, 55 bp, Artificial
  Synthetic oligonucleotide
aaatcagaaaataataaccattggatacgtttgcatgacactcgggacaatcagc

SEQ ID NO: 299657 - DNA, 58 bp, Artificial
  Synthetic oligonucleotide
aaatcagaggcggtaagcaagtaccgcgaggctgtcattgaccctaaagacgttgaga

SEQ ID NO: 299658 - DNA, 55 bp, Artificial
  Synthetic oligonucleotide
aaatcagatcagtaccagtaggtagggctctcatattaccaccttactctcagct

SEQ ID NO: 299659 - DNA, 57 bp, Artificial
  Synthetic oligonucleotide
aaatcagatcgtttagagactacaagtgcggtaaaatatgcgttgaaccttatgtag

SEQ ID NO: 299660 - DNA, 59 bp, Artificial
  Synthetic oligonucleotide
aaatcagcatggtcgatggacggcatgtcgttgtaagaggtaatcaccaccggctttcc

SEQ ID NO: 299661 - DNA, 60 bp, Artificial
  Synthetic oligonucleotide
aaatcagcggaccgcattaccctctcgctctgctctacgaggggctcgtctctcagcaga

SEQ ID NO: 299662 - DNA, 58 bp, Artificial
  Synthetic oligonucleotide
aaatcaggagaatttggcgccaggccaacaatggagaagatgcaacagctggccttac

SEQ ID NO: 299663 - DNA, 60 bp, Artificial
  Synthetic oligonucleotide
aaatcaggagatagaactttcacatcaaatatgaagttgtgctctgctgaatccttgtaa

SEQ ID NO: 299664 - DNA, 53 bp, Artificial
  Synthetic oligonucleotide
aaatcaggtaacacatacccaatactaaacgtcaccatgcaaaacagtgacga

SEQ ID NO: 299665 - DNA, 60 bp, Artificial
  Synthetic oligonucleotide
aaatcaggtcttgtcttcttcacgcctagcgcgtctcatccagcgtatgtgaatttcgcg

SEQ ID NO: 299666 - DNA, 59 bp, Artificial
  Synthetic oligonucleotide
aaatcagtgacagtattagatgtgggggatgcttatttctcctgtcctttagatccaga

SEQ ID NO: 299667 - DNA, 57 bp, Artificial
  Synthetic oligonucleotide
aaatcagttacacaaacattagtgtcgaacaatgattggtcgggttattcagggagc

SEQ ID NO: 299668 - DNA, 55 bp, Artificial
  Synthetic oligonucleotide
aaatcatatctattaccaaagtattatcaaactacatgtacacaaggggggaccg

SEQ ID NO: 299669 - DNA, 59 bp, Artificial
  Synthetic oligonucleotide
aaatcatctcaacaaattggccaatgtcgtaggagacgccatccccgttgcctcaaaga

SEQ ID NO: 299670 - DNA, 60 bp, Artificial
  Synthetic oligonucleotide
aaatcatgaaacatgtgcactgaatgttcacaattgtaaatggtgtcagattaacagctg

SEQ ID NO: 299671 - DNA, 52 bp, Artificial
  Synthetic oligonucleotide
aaatcatgacgacctgatcacagtgacggctacactcgccttgattggttgc

SEQ ID NO: 299672 - DNA, 60 bp, Artificial
  Synthetic oligonucleotide
aaatcatgagacaaccaaaggtgtcacagctgcatgctcttactctggagctagcagttt

SEQ ID NO: 299673 - DNA, 60 bp, Artificial
  Synthetic oligonucleotide
aaatcatgagacgtgtgcgctgaatgttcataattgtaaatggtgccagattaccagctg

SEQ ID NO: 299674 - DNA, 60 bp, Artificial
  Synthetic oligonucleotide
aaatcatgagggaatacaagcaggagtggatagattctacagaacttgcaagctagttgg

SEQ ID NO: 299675 - DNA, 57 bp, Artificial
  Synthetic oligonucleotide
aaatcatggaaagtggagggattgacaagataagcactggatttacatacgggtcat

SEQ ID NO: 299676 - DNA, 60 bp, Artificial
  Synthetic oligonucleotide
aaatccaatgcagggcccgcttacgcgagcaatcgcgcgcgctgcttatgtgtagcccac

SEQ ID NO: 299677 - DNA, 58 bp, Artificial
  Synthetic oligonucleotide
aaatccaatgggttggctaagagatataatgtcgtgggcggcttggcttggagggaca

SEQ ID NO: 299678 - DNA, 59 bp, Artificial
  Synthetic oligonucleotide
aaatccacaaccgcggtcttgccagatgccctgatggagaaatcaggtacacggttgag

SEQ ID NO: 299679 - DNA, 51 bp, Artificial
  Synthetic oligonucleotide
aaatccacaatttggggcattggatggatggtacatttaacatcaagactg

SEQ ID NO: 299680 - DNA, 56 bp, Artificial
  Synthetic oligonucleotide
aaatccaccgtgattgaaaactccaacatcccctttgtgttagtaagcatgtagtc

SEQ ID NO: 299681 - DNA, 51 bp, Artificial
  Synthetic oligonucleotide
aaatccacttcagataacacatcaattctcaattttatagatgtggagttc

SEQ ID NO: 299682 - DNA, 55 bp, Artificial
  Synthetic oligonucleotide
aaatccagaaatttaactctaggtgaccacttcatcttagttgaagccaggtcgc

SEQ ID NO: 299683 - DNA, 57 bp, Artificial
  Synthetic oligonucleotide
aaatccagactgtaaacacattttgaaggcactaggacaaggagcaaccttagagga

SEQ ID NO: 299684 - DNA, 60 bp, Artificial
  Synthetic oligonucleotide
aaatccagcacataagagtcagttggtgtggatggcatgccattccgctgcatttgagga

SEQ ID NO: 299685 - DNA, 55 bp, Artificial
  Synthetic oligonucleotide
aaatccaggtcattacataccgcacaaacagagcgcgcatagcatcgtaaacgcc

SEQ ID NO: 299686 - DNA, 55 bp, Artificial
  Synthetic oligonucleotide
aaatccagtgcaccattagatgtagttggtactttgtgtaaatggcctgacttct

SEQ ID NO: 299687 - DNA, 60 bp, Artificial
  Synthetic oligonucleotide
aaatccatagttacggcagttgatatggatgtaatagctacacccacacttcaggtcaat

SEQ ID NO: 299688 - DNA, 60 bp, Artificial
  Synthetic oligonucleotide
aaatccatggtggtgggccgctacgtgagccagattaaagagaagctggtgacccgcatc

SEQ ID NO: 299689 - DNA, 59 bp, Artificial
  Synthetic oligonucleotide
aaatcccacacttgcgcctgtattcgaagctcttcttcgtgcaacggacacaaagaaca

SEQ ID NO: 299690 - DNA, 55 bp, Artificial
  Synthetic oligonucleotide
aaatcccagtgggatgttatattccgtaagtctttacgcagatcccacacgcggt

SEQ ID NO: 299691 - DNA, 54 bp, Artificial
  Synthetic oligonucleotide
aaatcccattgggtcgttgactttgtcaacgagttaactacgatgtcggcccta

SEQ ID NO: 299692 - DNA, 59 bp, Artificial
  Synthetic oligonucleotide
aaatccccatggttcatccccctaccattgacccacccacagtcctctatgccagatga

SEQ ID NO: 299693 - DNA, 57 bp, Artificial
  Synthetic oligonucleotide
aaatccctgaaggggaatggcgtgatggcttcgactggatcaccgagtacgaggggc

SEQ ID NO: 299694 - DNA, 58 bp, Artificial
  Synthetic oligonucleotide
aaatccctgcaactacattagtgccctctgaaccagacattagactagattggttttc

SEQ ID NO: 299695 - DNA, 52 bp, Artificial
  Synthetic oligonucleotide
aaatcccttagataggagcctgagggctctgctttctatgttaaagacaact

SEQ ID NO: 299696 - DNA, 59 bp, Artificial
  Synthetic oligonucleotide
aaatccgaagataagattcccacacacttgtggctgatatcaaaaggctactgcctatt

SEQ ID NO: 299697 - DNA, 56 bp, Artificial
  Synthetic oligonucleotide
aaatccgacatttttgatgcaccagttgaagaaactgtctcagacgaagttcccgg

SEQ ID NO: 299698 - DNA, 57 bp, Artificial
  Synthetic oligonucleotide
aaatccgatcgtggaacctgagtcaagtaacccccctgaatctgcaggtgtgtcatt

SEQ ID NO: 299699 - DNA, 53 bp, Artificial
  Synthetic oligonucleotide
aaatccgcatttgtaggacttggaccaatcatacttttagtggcccaagattc

SEQ ID NO: 299700 - DNA, 60 bp, Artificial
  Synthetic oligonucleotide
aaatccgttcccatttccatatcacaattggcagcttgaagtgctgtctgcgatcggaga

SEQ ID NO: 299701 - DNA, 50 bp, Artificial
  Synthetic oligonucleotide
aaatccgttcgagtttctgttgtggctgaggtttgtggcctgactccaaa

SEQ ID NO: 299702 - DNA, 59 bp, Artificial
  Synthetic oligonucleotide
aaatcctagaatacagccaatctcatggactctcaacgaactgtagaattaactaatcc

SEQ ID NO: 299703 - DNA, 60 bp, Artificial
  Synthetic oligonucleotide
aaatcctagaccgacagagcgaggaacattcacggattgtttacaatatgcaatgctgca

SEQ ID NO: 299704 - DNA, 60 bp, Artificial
  Synthetic oligonucleotide
aaatcctagaggtaatgtagcgataatacagattggagggccagaaatattggatatatc

SEQ ID NO: 299705 - DNA, 55 bp, Artificial
  Synthetic oligonucleotide
aaatcctatgccaatccgacaggctcaaaacacatggatggttatgtgtcccagg

SEQ ID NO: 299706 - DNA, 52 bp, Artificial
  Synthetic oligonucleotide
aaatcctgacagttcccttctaagggactgggtccacaaaaaggacttgact

SEQ ID NO: 299707 - DNA, 60 bp, Artificial
  Synthetic oligonucleotide
aaatcctggaacgcctatagttggcctgatgaaaactgagggcagcagttacatgtggtc

SEQ ID NO: 299708 - DNA, 52 bp, Artificial
  Synthetic oligonucleotide
aaatcctggaataattactggttcagcagtagggtgtgatccagagaccttt

SEQ ID NO: 299709 - DNA, 60 bp, Artificial
  Synthetic oligonucleotide
aaatcctgggaatgcagaaattgaagacctcatctttcttgcacgatctgctctcattct

SEQ ID NO: 299710 - DNA, 59 bp, Artificial
  Synthetic oligonucleotide
aaatcctggtccaatgccgaggccaaagaggcccggtatgtctgcgattgtctcttcaa

SEQ ID NO: 299711 - DNA, 60 bp, Artificial
  Synthetic oligonucleotide
aaatcctggttttcacactggtgttgcaattggaattgatcctgatagacagtgggacca

SEQ ID NO: 299712 - DNA, 57 bp, Artificial
  Synthetic oligonucleotide
aaatccttttgtgttgaatagatggatgggaaagctgacttttcctcaaggcacttc

SEQ ID NO: 299713 - DNA, 50 bp, Artificial
  Synthetic oligonucleotide
aaatcgaaagtataattgaggccgagtcctcagtcaaggagaaagacatg

SEQ ID NO: 299714 - DNA, 54 bp, Artificial
  Synthetic oligonucleotide
aaatcgaactggttgctgtctggatccatacagttcacgcgcagtgtgcgtatt

SEQ ID NO: 299715 - DNA, 59 bp, Artificial
  Synthetic oligonucleotide
aaatcgaattactaatgaggtgtccattggaacgaatgtgtattctcaagactggagta

SEQ ID NO: 299716 - DNA, 57 bp, Artificial
  Synthetic oligonucleotide
aaatcgatatttcggcaacctgatggctcgaccaatcttaccggggatgaagtgaac

SEQ ID NO: 299717 - DNA, 59 bp, Artificial
  Synthetic oligonucleotide
aaatcgatgccgataaggacgatgacgcaggaacgtcagtcttaggaccgaagatggtc

SEQ ID NO: 299718 - DNA, 51 bp, Artificial
  Synthetic oligonucleotide
aaatcgcaatatcagacttacgtgaaagatagaaacttcggtctcgaagca

SEQ ID NO: 299719 - DNA, 60 bp, Artificial
  Synthetic oligonucleotide
aaatcgcagtggcgcgcgagtgcttaacctgtatgacgtgatctcggcaatttgcgttga

SEQ ID NO: 299720 - DNA, 55 bp, Artificial
  Synthetic oligonucleotide
aaatcgccacatgacattgactttggccaccacagtcgcttcgggcccttctgtg

SEQ ID NO: 299721 - DNA, 57 bp, Artificial
  Synthetic oligonucleotide
aaatcgcctacgcctcaatgagaactgagttggggaagattaaatccctccaccata

SEQ ID NO: 299722 - DNA, 55 bp, Artificial
  Synthetic oligonucleotide
aaatcgcgctgggcgagtatggtcacggaattccaagccgttaccacatcttgac

SEQ ID NO: 299723 - DNA, 57 bp, Artificial
  Synthetic oligonucleotide
aaatcgcggtagagtgtttcggtgtatcgtataccgctttcgaaatatcgtcacata

SEQ ID NO: 299724 - DNA, 55 bp, Artificial
  Synthetic oligonucleotide
aaatcgctggtgattgttactaccatggcactggtaaagactaaaccactcgtcc

SEQ ID NO: 299725 - DNA, 55 bp, Artificial
  Synthetic oligonucleotide
aaatcgctttaggttctcgttttgcgacaattgacgatgttgcactcatctacaa

SEQ ID NO: 299726 - DNA, 55 bp, Artificial
  Synthetic oligonucleotide
aaatcggacaggaacattcgaattcacaagctttttctaccgttatggattcgta

SEQ ID NO: 299727 - DNA, 53 bp, Artificial
  Synthetic oligonucleotide
aaatcggacctgggtggcaagcggttggttccgcccgcattcctggcgtacta

SEQ ID NO: 299728 - DNA, 60 bp, Artificial
  Synthetic oligonucleotide
aaatcgggcagagctttcctagacacaccatcctttctctgcataataataccagccaat

SEQ ID NO: 299729 - DNA, 55 bp, Artificial
  Synthetic oligonucleotide
aaatcgggtatttgcaccaacatattggttctagtctaatcacacagtgtactcg

SEQ ID NO: 299730 - DNA, 59 bp, Artificial
  Synthetic oligonucleotide
aaatcggtagtgcataccctgccaataagtgccggatcagcatcgtaaataactccaac

SEQ ID NO: 299731 - DNA, 50 bp, Artificial
  Synthetic oligonucleotide
aaatcggtgatctagaacacctaggatggatcctaaggggacctgccgtg

SEQ ID NO: 299732 - DNA, 60 bp, Artificial
  Synthetic oligonucleotide
aaatcggttcagcggcgatcgatggattggtacagggcagcgtgcactcgatattgacag

SEQ ID NO: 299733 - DNA, 50 bp, Artificial
  Synthetic oligonucleotide
aaatcgtaagctcgggagagcgagttcctgtccgcgcgcaagaccctcta

SEQ ID NO: 299734 - DNA, 55 bp, Artificial
  Synthetic oligonucleotide
aaatcgtaatcgagttctaactctaatggcacaaaatactaatctaaacgtaaca

SEQ ID NO: 299735 - DNA, 60 bp, Artificial
  Synthetic oligonucleotide
aaatcgtatgaggctctaggagctttaagaatagtgtggagtaaccacagctgccaccaa

SEQ ID NO: 299736 - DNA, 51 bp, Artificial
  Synthetic oligonucleotide
aaatcgtatttttgttatacactgttaaactttttgaaaggtcgagtagta

SEQ ID NO: 299737 - DNA, 54 bp, Artificial
  Synthetic oligonucleotide
aaatcgtccagggtgtgttgttttggagtctttactggtttgcggtgtggatta

SEQ ID NO: 299738 - DNA, 50 bp, Artificial
  Synthetic oligonucleotide
aaatcgtcggattccaaagaagcctgcaccttcgttcgaactgccgattc

SEQ ID NO: 299739 - DNA, 56 bp, Artificial
  Synthetic oligonucleotide
aaatcgtctatgagagaacctactgtacaactggtatactaacagaagggaagtgt

SEQ ID NO: 299740 - DNA, 55 bp, Artificial
  Synthetic oligonucleotide
aaatcgtgctactcagcagtcttgggttgatgtaattgagaagagcaattcgtct

SEQ ID NO: 299741 - DNA, 55 bp, Artificial
  Synthetic oligonucleotide
aaatcgtggagaaaggacatactaagaacccaggagtctgaatgtcagtgcattg

SEQ ID NO: 299742 - DNA, 57 bp, Artificial
  Synthetic oligonucleotide
aaatctagcgttaatctaaccgaaatgtcggcgctaccattcagagcctacaactta

SEQ ID NO: 299743 - DNA, 59 bp, Artificial
  Synthetic oligonucleotide
aaatctaggagcaggatcaataggaaatttgtaccaacaaggatggccatctaatcaaa

SEQ ID NO: 299744 - DNA, 56 bp, Artificial
  Synthetic oligonucleotide
aaatctataaaagatggataatcctgggattaaataaaatagtaaggatgtatagc

SEQ ID NO: 299745 - DNA, 52 bp, Artificial
  Synthetic oligonucleotide
aaatctatctgtctcacaaatctagcctgcaaggttttgggcacaggatact

SEQ ID NO: 299746 - DNA, 60 bp, Artificial
  Synthetic oligonucleotide
aaatctcagaagaaagcaagctatgcaggtatagctgatcagttaaagggcttaggagtt

SEQ ID NO: 299747 - DNA, 60 bp, Artificial
  Synthetic oligonucleotide
aaatctcccgttcgagagagcaaccatcatggcggcattcacgggaaacactgaaggcag

SEQ ID NO: 299748 - DNA, 55 bp, Artificial
  Synthetic oligonucleotide
aaatctcgatgccgggcgactgtatcgagggcgtcgtgtcgcagaagggcgcgaa

SEQ ID NO: 299749 - DNA, 52 bp, Artificial
  Synthetic oligonucleotide
aaatctcgctaatcggttgttaaagctacgggagatacatttcatttacgat

SEQ ID NO: 299750 - DNA, 60 bp, Artificial
  Synthetic oligonucleotide
aaatctctagacaatatttgggagaacatgacatggatggagtgggatagagaaattaac

SEQ ID NO: 299751 - DNA, 59 bp, Artificial
  Synthetic oligonucleotide
aaatctctcccaatgttgcggtgaaatgctgcgtagctcgacttgaggaggggctcccc

SEQ ID NO: 299752 - DNA, 59 bp, Artificial
  Synthetic oligonucleotide
aaatctgcctcggacatcatgctgtgtcaaacggaactaaagtaaacacattaactgaa

SEQ ID NO: 299753 - DNA, 57 bp, Artificial
  Synthetic oligonucleotide
aaatctgctttctatcaatcctatttaagaaggacccaatccatgggaatacaactg

SEQ ID NO: 299754 - DNA, 60 bp, Artificial
  Synthetic oligonucleotide
aaatctggaaagttcacttacagcagtagaactggagaagccatcggcatctttgtggct

SEQ ID NO: 299755 - DNA, 55 bp, Artificial
  Synthetic oligonucleotide
aaatctggatgtcgaagcgcatctgactaatttcctctcccatgtgccgtaaccc

SEQ ID NO: 299756 - DNA, 53 bp, Artificial
  Synthetic oligonucleotide
aaatctggggaatggcttctaggaatcttgaatggtaactggattgttgttgt

SEQ ID NO: 299757 - DNA, 55 bp, Artificial
  Synthetic oligonucleotide
aaatctggtctccttattcctacctgttctcagccagatctctgttctggtgtcc

SEQ ID NO: 299758 - DNA, 50 bp, Artificial
  Synthetic oligonucleotide
aaatctgtacatctattgtttgaattacatggtacaatacatgcttaata

SEQ ID NO: 299759 - DNA, 56 bp, Artificial
  Synthetic oligonucleotide
aaatctgtatggattcattgtaaagggaagatcccacttaagaaatgataccgacg

SEQ ID NO: 299760 - DNA, 59 bp, Artificial
  Synthetic oligonucleotide
aaatctgtatgggttcataataaagggaagatctcatttgaggaacgatactgatgtag

SEQ ID NO: 299761 - DNA, 56 bp, Artificial
  Synthetic oligonucleotide
aaatctgtcacccaggacgataggccaatgccccaaatatgtaaacaagaggagtt

SEQ ID NO: 299762 - DNA, 51 bp, Artificial
  Synthetic oligonucleotide
aaatctgtccgaagtggtatctgggttagcactccccaaattaccaattcc

SEQ ID NO: 299763 - DNA, 58 bp, Artificial
  Synthetic oligonucleotide
aaatctgtccgggctctcacttcaagaattctgttcacaaatggtgggtggcataatt

SEQ ID NO: 299764 - DNA, 51 bp, Artificial
  Synthetic oligonucleotide
aaatcttacgcgtccgccgagctcggtttaggcacgatgttatccgccgac

SEQ ID NO: 299765 - DNA, 60 bp, Artificial
  Synthetic oligonucleotide
aaatcttcacaccttatactccgcatcacaggtggaaagattgacatatctatagccttg

SEQ ID NO: 299766 - DNA, 55 bp, Artificial
  Synthetic oligonucleotide
aaatcttcagagtgtggttgatcgtgtgaccgctcttgagcgagcagctgccaat

SEQ ID NO: 299767 - DNA, 55 bp, Artificial
  Synthetic oligonucleotide
aaatcttcatcgagctcaggttatctgagagctgaatacgcgagttagtagcgtg

SEQ ID NO: 299768 - DNA, 53 bp, Artificial
  Synthetic oligonucleotide
aaatcttcattcagtgttggaagctgtattttagccatactgtaatatggcag

SEQ ID NO: 299769 - DNA, 56 bp, Artificial
  Synthetic oligonucleotide
aaatcttgggcctcccacgcatgggcacaaacacacacgagaatttaagtttcaaa

SEQ ID NO: 299770 - DNA, 53 bp, Artificial
  Synthetic oligonucleotide
aaatcttgtttaaaccgtagtatgtgatcaaaaataagactatgatattattg

SEQ ID NO: 299771 - DNA, 60 bp, Artificial
  Synthetic oligonucleotide
aaatctttatagctagcaccctcaccaggattgcaaagcacgattgatgggatccctcct

SEQ ID NO: 299772 - DNA, 56 bp, Artificial
  Synthetic oligonucleotide
aaatctttatgtaattgaccgggcgaacgtaatagctcccgtacaagtgcttgcgc

SEQ ID NO: 299773 - DNA, 53 bp, Artificial
  Synthetic oligonucleotide
aaatctttgggagctaattcccgtataaccctaagagcctctgccttacttcc

SEQ ID NO: 299774 - DNA, 58 bp, Artificial
  Synthetic oligonucleotide
aaatcttttttcataaggcttgaaaaacagttagacctgtgcagaccagcggacagca

SEQ ID NO: 299775 - DNA, 59 bp, Artificial
  Synthetic oligonucleotide
aaatgaaaaactgctctttctatatcaccacaagcataagagataaggtgcagaaagaa

SEQ ID NO: 299776 - DNA, 55 bp, Artificial
  Synthetic oligonucleotide
aaatgaaaaagccgacagctgcaataatttggcaacttttgtgagctttgcactg

SEQ ID NO: 299777 - DNA, 60 bp, Artificial
  Synthetic oligonucleotide
aaatgaaaacccagctcacaagagtcaactagtgtggatggcttgccactctgccgcatt

SEQ ID NO: 299778 - DNA, 55 bp, Artificial
  Synthetic oligonucleotide
aaatgaacaaactattcgaaaaaacgaggcggcaattgagggagaatgccgaaga

SEQ ID NO: 299779 - DNA, 59 bp, Artificial
  Synthetic oligonucleotide
aaatgaagactatgtcaaattcgctgaataccgaactcttttctcccagacaactgaca

SEQ ID NO: 299780 - DNA, 58 bp, Artificial
  Synthetic oligonucleotide
aaatgaaggcagccgccctcgttggcactacgaatagaatgtttggatcggatggtag

SEQ ID NO: 299781 - DNA, 56 bp, Artificial
  Synthetic oligonucleotide
aaatgaatagagacaacactatattttgggatcctaggcgcaccgaccataagttc

SEQ ID NO: 299782 - DNA, 59 bp, Artificial
  Synthetic oligonucleotide
aaatgaattacactttaagtgatcattacgcttcgatgtatcgttctgctcctttagaa

SEQ ID NO: 299783 - DNA, 57 bp, Artificial
  Synthetic oligonucleotide
aaatgacaactggagaattgagagagaattcgacgaattctacagctacacactatc

SEQ ID NO: 299784 - DNA, 60 bp, Artificial
  Synthetic oligonucleotide
aaatgacaaggtgacttctgcagcatcatttgtgagcgcgtactcaacgcgctcagattg

SEQ ID NO: 299785 - DNA, 57 bp, Artificial
  Synthetic oligonucleotide
aaatgacacctcccatttccgtatggtgtttggaaatctcttctcaacctttcatgc

SEQ ID NO: 299786 - DNA, 55 bp, Artificial
  Synthetic oligonucleotide
aaatgacacgttcacgtacgccggatgccaaggtcttacaaagccaaaggttcaa

SEQ ID NO: 299787 - DNA, 55 bp, Artificial
  Synthetic oligonucleotide
aaatgacagacacagcaatctataggtacatgaatgattacttccatttgtccgc

SEQ ID NO: 299788 - DNA, 55 bp, Artificial
  Synthetic oligonucleotide
aaatgacctggccactaaggggatagaggttccactatccgtcattatcgtagac

SEQ ID NO: 299789 - DNA, 55 bp, Artificial
  Synthetic oligonucleotide
aaatgacgcattgcgaggactgccgctgtgtgtctgctccgggcactgctgggtg

SEQ ID NO: 299790 - DNA, 60 bp, Artificial
  Synthetic oligonucleotide
aaatgactcaccgaatgacatagcgatagttaatgactacacatcggcttacatgcaggg

SEQ ID NO: 299791 - DNA, 55 bp, Artificial
  Synthetic oligonucleotide
aaatgactgacgggatgtacgatgagaacttcgatactaaagcgctggacgattc

SEQ ID NO: 299792 - DNA, 60 bp, Artificial
  Synthetic oligonucleotide
aaatgacttcagttgctataactggatctttgagactgtttccatcagaacgtgtactaa

SEQ ID NO: 299793 - DNA, 55 bp, Artificial
  Synthetic oligonucleotide
aaatgagaattcccattagatctcctggtgggtttaatgtagaccggagggtgac

SEQ ID NO: 299794 - DNA, 56 bp, Artificial
  Synthetic oligonucleotide
aaatgagacacattcccggtcatctgagcaacgagactgcaacacagatagtccag

SEQ ID NO: 299795 - DNA, 54 bp, Artificial
  Synthetic oligonucleotide
aaatgagaccccgataggtaaatgagaccccaatatatcggggactcaatcggg

SEQ ID NO: 299796 - DNA, 55 bp, Artificial
  Synthetic oligonucleotide
aaatgagatcgcgcgtgtgacgggagaaacgtcgacgtggggacccgcgcgtcaa

SEQ ID NO: 299797 - DNA, 60 bp, Artificial
  Synthetic oligonucleotide
aaatgagcgcacagcggcgaaggttctcgcactcccatggttctccaacgagtcttatgg

SEQ ID NO: 299798 - DNA, 57 bp, Artificial
  Synthetic oligonucleotide
aaatgagctcggtccaggcctccccgaggagctacgggcagaagtggcaaggtacta

SEQ ID NO: 299799 - DNA, 56 bp, Artificial
  Synthetic oligonucleotide
aaatgaggacattacctgtgataccattttgatgtgggaagcaattagtgtaaaaa

SEQ ID NO: 299800 - DNA, 55 bp, Artificial
  Synthetic oligonucleotide
aaatgaggaccaagctaacaacttggtatccaactttggtgagtatgtagctata

SEQ ID NO: 299801 - DNA, 58 bp, Artificial
  Synthetic oligonucleotide
aaatgaggacctaacctgtggaaatctactgatgtgggaggctgtaactgtacaaaca

SEQ ID NO: 299802 - DNA, 51 bp, Artificial
  Synthetic oligonucleotide
aaatgaggagtggcgcgagatgttcatttgaatggctatagttgtgagcag

SEQ ID NO: 299803 - DNA, 60 bp, Artificial
  Synthetic oligonucleotide
aaatgatatgcctgctgacttaatggaatacctaagctgtgctatcctttcaaataagac

SEQ ID NO: 299804 - DNA, 60 bp, Artificial
  Synthetic oligonucleotide
aaatgatgatcaactcacaagatacagagctttcctttacaattactggagacaacacca

SEQ ID NO: 299805 - DNA, 60 bp, Artificial
  Synthetic oligonucleotide
aaatgattagcccagtcatgagtgtgatcggtttcttggcactggcaaaagattgggctg

SEQ ID NO: 299806 - DNA, 60 bp, Artificial
  Synthetic oligonucleotide
aaatgattcaatcagttgataggactgcagtgactggtgcttcttattttacttctgtgg

SEQ ID NO: 299807 - DNA, 55 bp, Artificial
  Synthetic oligonucleotide
aaatgattcgtgcagatcagcattgggagacacctgcgtttcgttcgacgatgtt

SEQ ID NO: 299808 - DNA, 54 bp, Artificial
  Synthetic oligonucleotide
aaatgattggattcctaagggacagacgaatgaggctttgacctctttcatgga

SEQ ID NO: 299809 - DNA, 58 bp, Artificial
  Synthetic oligonucleotide
aaatgatttggctaagacaaatgacggagtagcggtgctattgaaccgttatactgat

SEQ ID NO: 299810 - DNA, 55 bp, Artificial
  Synthetic oligonucleotide
aaatgcaacgtttgcgtggataaattagattgtctagcctgcaaagcggcctatg

SEQ ID NO: 299811 - DNA, 58 bp, Artificial
  Synthetic oligonucleotide
aaatgcaatgtcaatcatgacgaagagttctgtgatatgctccgactgattgattaca

SEQ ID NO: 299812 - DNA, 56 bp, Artificial
  Synthetic oligonucleotide
aaatgcagacttacttcaacgtgcagttagatttcctattaatagggttaattgta

SEQ ID NO: 299813 - DNA, 55 bp, Artificial
  Synthetic oligonucleotide
aaatgcatgaagaccttctttggatggaaagagcctaatgttgttaagccgcatg

SEQ ID NO: 299814 - DNA, 57 bp, Artificial
  Synthetic oligonucleotide
aaatgccaactaaaaggggaagccattcatggacaagtagattgtagtccagggatg

SEQ ID NO: 299815 - DNA, 59 bp, Artificial
  Synthetic oligonucleotide
aaatgccaaggtgtcttaaagaacatactggtctttgggatatcattcggtctagtgca

SEQ ID NO: 299816 - DNA, 53 bp, Artificial
  Synthetic oligonucleotide
aaatgccacaacgttaactacctcgtgcccccccatactgactttgtgaatct

SEQ ID NO: 299817 - DNA, 51 bp, Artificial
  Synthetic oligonucleotide
aaatgccacaactggtattctggtacttagcaaaccgtaatggtacttgcg

SEQ ID NO: 299818 - DNA, 50 bp, Artificial
  Synthetic oligonucleotide
aaatgccagccagcaaagagcatccgcgggacaagtcagtgttcaaccca

SEQ ID NO: 299819 - DNA, 58 bp, Artificial
  Synthetic oligonucleotide
aaatgccaggccagaagatgtgtccttccaaggacggggagtcttcgagctctcggac

SEQ ID NO: 299820 - DNA, 56 bp, Artificial
  Synthetic oligonucleotide
aaatgcccctatcttatcaacacttccggaaactactgttgttagaggacgacgca

SEQ ID NO: 299821 - DNA, 55 bp, Artificial
  Synthetic oligonucleotide
aaatgcccgctccctcatcctctggacagaacgaggcgcagcccgtcacgcaaaa

SEQ ID NO: 299822 - DNA, 55 bp, Artificial
  Synthetic oligonucleotide
aaatgccctattaagacgtatagttagacctagttgtgagtaccaagcaggacac

SEQ ID NO: 299823 - DNA, 53 bp, Artificial
  Synthetic oligonucleotide
aaatgcgaacggactgagtgggggaaatttaaacgttatcattatttgagttc

SEQ ID NO: 299824 - DNA, 60 bp, Artificial
  Synthetic oligonucleotide
aaatgcgagagcagacattcagtgattggtggagcaatcaaatagcaaataatcgggtag

SEQ ID NO: 299825 - DNA, 60 bp, Artificial
  Synthetic oligonucleotide
aaatgcgccacgcggaacgtttaatgaacatgcgcaagatcatcttgaacgatccacaac

SEQ ID NO: 299826 - DNA, 55 bp, Artificial
  Synthetic oligonucleotide
aaatgcgctggatggcctactgtaagggaaagaatgagacgagctgcgccagggg

SEQ ID NO: 299827 - DNA, 57 bp, Artificial
  Synthetic oligonucleotide
aaatgcggatcctcgttctcctttctactagacgcaccaggatatgacccagtgtgg

SEQ ID NO: 299828 - DNA, 60 bp, Artificial
  Synthetic oligonucleotide
aaatgctacgaacaccatctttacagagcaattgataagatgtggtgtggtccgacagtg

SEQ ID NO: 299829 - DNA, 56 bp, Artificial
  Synthetic oligonucleotide
aaatgctacgtggcaatggggttaagttaccattgttaagatatttatatgaagac

SEQ ID NO: 299830 - DNA, 60 bp, Artificial
  Synthetic oligonucleotide
aaatgctactgcagtctattttgctgtccttactgtagggcctgctcatcggacaaaatc

SEQ ID NO: 299831 - DNA, 59 bp, Artificial
  Synthetic oligonucleotide
aaatgctagagatcatgagaagggtctgctctctcgctgcaacgtatctaatgaatcga

SEQ ID NO: 299832 - DNA, 60 bp, Artificial
  Synthetic oligonucleotide
aaatgctattgcagtctattctgttgtccttactgtagagcttgctcatccgacaaaaac

SEQ ID NO: 299833 - DNA, 60 bp, Artificial
  Synthetic oligonucleotide
aaatgctcaacctttcgtaaatcatgccactgttggattgactctcaggatcgattcagc

SEQ ID NO: 299834 - DNA, 60 bp, Artificial
  Synthetic oligonucleotide
aaatgctgaaaatacccaatgcaggtactgatcccaattctaggatagcagaacgacagg

SEQ ID NO: 299835 - DNA, 60 bp, Artificial
  Synthetic oligonucleotide
aaatgctgaaagtcccaaatgcggagacagataatcagtcaggtccagttgcgcaccagg

SEQ ID NO: 299836 - DNA, 60 bp, Artificial
  Synthetic oligonucleotide
aaatgctgactattcttctgactttaataagctgaagattaaacagagtgatgttgattg

SEQ ID NO: 299837 - DNA, 59 bp, Artificial
  Synthetic oligonucleotide
aaatgctgcagtacgcaagtttagcgaggatattgacaaccaaggttacgactacgcag

SEQ ID NO: 299838 - DNA, 60 bp, Artificial
  Synthetic oligonucleotide
aaatgcttggagtattgtttatcccggtactgctcaagcaggtgtggtcgaatatcgtca

SEQ ID NO: 299839 - DNA, 57 bp, Artificial
  Synthetic oligonucleotide
aaatggaaacgcggtgactatgtgatggtcaaatataaggactctgacaagattctg

SEQ ID NO: 299840 - DNA, 57 bp, Artificial
  Synthetic oligonucleotide
aaatggaacaatcgttgttcctattcaagtttggtatgataatggacactttagctc

SEQ ID NO: 299841 - DNA, 55 bp, Artificial
  Synthetic oligonucleotide
aaatggaacgagatcaactgatgccccaatggcctcaagttctggatttagcaat

SEQ ID NO: 299842 - DNA, 55 bp, Artificial
  Synthetic oligonucleotide
aaatggaagacccaccgggatttacagggagttacattgtgtactgagcagaatt

SEQ ID NO: 299843 - DNA, 54 bp, Artificial
  Synthetic oligonucleotide
aaatggaaggcaaagccatcagatacaaggctgaatgaaaaaatctgtgcctac

SEQ ID NO: 299844 - DNA, 52 bp, Artificial
  Synthetic oligonucleotide
aaatggaatcagggccactttgtcaccaaatttgcacttatgctgtgtgaat

SEQ ID NO: 299845 - DNA, 60 bp, Artificial
  Synthetic oligonucleotide
aaatggaatgaaaatcagaatcctcgaatgtttttagctatgattacatacataaccaga

SEQ ID NO: 299846 - DNA, 55 bp, Artificial
  Synthetic oligonucleotide
aaatggaccagcaacttgaggacttccccgccataaatctggaaactaggccacg

SEQ ID NO: 299847 - DNA, 58 bp, Artificial
  Synthetic oligonucleotide
aaatggacctggggcggggacttccccagacagagaccaatcattgatccgtgcaaca

SEQ ID NO: 299848 - DNA, 60 bp, Artificial
  Synthetic oligonucleotide
aaatggactactcccaatatgatggttccctgagttctatgctattgtgggaggctgtgg

SEQ ID NO: 299849 - DNA, 59 bp, Artificial
  Synthetic oligonucleotide
aaatggagatgttcgtcccaatcctcgagaacgagcgactaattgcctcagcggcctac

SEQ ID NO: 299850 - DNA, 60 bp, Artificial
  Synthetic oligonucleotide
aaatggagcctacgtttgagcatgcggttatggagatatacaaagggattgctggcgttg

SEQ ID NO: 299851 - DNA, 59 bp, Artificial
  Synthetic oligonucleotide
aaatggagcctcgcagtggggtactatcctacattccccggcagtaggcagcaattgcc

SEQ ID NO: 299852 - DNA, 54 bp, Artificial
  Synthetic oligonucleotide
aaatggagtaccgttgaatataaccttacgcttaagcggacttaatgcaggtag

SEQ ID NO: 299853 - DNA, 55 bp, Artificial
  Synthetic oligonucleotide
aaatggagtatgtaggcaagcatctagacatgttcaatagtgtcgaagatgtgtg

SEQ ID NO: 299854 - DNA, 55 bp, Artificial
  Synthetic oligonucleotide
aaatggagttcgagccatttcaatccttggtgcctaaagctgccaggggccaata

SEQ ID NO: 299855 - DNA, 60 bp, Artificial
  Synthetic oligonucleotide
aaatggatagtgagctatacatagtcaatgctgactgtgtgatatgtaatagcgatggat

SEQ ID NO: 299856 - DNA, 58 bp, Artificial
  Synthetic oligonucleotide
aaatggatatcgatgggaacagactgcacggtaaaagtttgtccactcaatacacaaa

SEQ ID NO: 299857 - DNA, 60 bp, Artificial
  Synthetic oligonucleotide
aaatggatgagagagctgattttgtatgacaaagaggagatcaggagaatttggcgccaa

SEQ ID NO: 299858 - DNA, 57 bp, Artificial
  Synthetic oligonucleotide
aaatggcaatgtacgacgacgaattcgatacgaaagcttctgaccttaccttctctc

SEQ ID NO: 299859 - DNA, 57 bp, Artificial
  Synthetic oligonucleotide
aaatggcagatgtacgactgatggcgtactcttaggcactacccagctgtcagctgt

SEQ ID NO: 299860 - DNA, 55 bp, Artificial
  Synthetic oligonucleotide
aaatggccagattttgtgcagatgacaaaggacacatatggtgataaagcattct

SEQ ID NO: 299861 - DNA, 55 bp, Artificial
  Synthetic oligonucleotide
aaatggccctgtacgacgtggttagcaaactccccctggccgtgatgggaagctc

SEQ ID NO: 299862 - DNA, 55 bp, Artificial
  Synthetic oligonucleotide
aaatggccgttagcttcagtcaattcaacagaaggtttcttaatgttgtgcggca

SEQ ID NO: 299863 - DNA, 56 bp, Artificial
  Synthetic oligonucleotide
aaatggcgaaattaggaaaaggatacatgttcgaaagtaagagcatgaagttacga

SEQ ID NO: 299864 - DNA, 60 bp, Artificial
  Synthetic oligonucleotide
aaatggcgagattagggaaaggatacatgttcgaaagcaagagcatgaagctacgaacac

SEQ ID NO: 299865 - DNA, 55 bp, Artificial
  Synthetic oligonucleotide
aaatggcgcatatctcgttaaacatactattaaactaaaacaggaaagatggtta

SEQ ID NO: 299866 - DNA, 56 bp, Artificial
  Synthetic oligonucleotide
aaatggctaggtatccgaagaaatctataaataagaggcgggttggcatgaggaag

SEQ ID NO: 299867 - DNA, 57 bp, Artificial
  Synthetic oligonucleotide
aaatggctctagacacctttgctaaagtggctctgcggccggataaagtttacacta

SEQ ID NO: 299868 - DNA, 58 bp, Artificial
  Synthetic oligonucleotide
aaatggctgatctgcttgacttagcccccccaggtataagaaagttcttcaagtgcta

SEQ ID NO: 299869 - DNA, 60 bp, Artificial
  Synthetic oligonucleotide
aaatggctgcagactttgttgaactgatctgcatatggaccgatatcctttgttgttgca

SEQ ID NO: 299870 - DNA, 60 bp, Artificial
  Synthetic oligonucleotide
aaatggctgttttgagttctaccacaaatgtgataatgaatgcatggaaagcgtaaagaa

SEQ ID NO: 299871 - DNA, 57 bp, Artificial
  Synthetic oligonucleotide
aaatgggacaaaagtcaacacactaactgagaaaggagtggaagtggtcaatgccac

SEQ ID NO: 299872 - DNA, 60 bp, Artificial
  Synthetic oligonucleotide
aaatgggacaagcaccaagtccgtacaatgtcagagtagaatgcgtggggtggtccagca

SEQ ID NO: 299873 - DNA, 55 bp, Artificial
  Synthetic oligonucleotide
aaatgggaccatacatgacagaagtccgtttagggcattaataagttgggaaatg

SEQ ID NO: 299874 - DNA, 53 bp, Artificial
  Synthetic oligonucleotide
aaatgggagatggaaagtcaaccaaatgtttagagtctagaaagtttataaag

SEQ ID NO: 299875 - DNA, 58 bp, Artificial
  Synthetic oligonucleotide
aaatgggagctaatggatgaagattatcagggaaggctttgtaatcccctgaatccat

SEQ ID NO: 299876 - DNA, 50 bp, Artificial
  Synthetic oligonucleotide
aaatgggaggtacattggggtaacacagtaatttatgaaccatgcaactc

SEQ ID NO: 299877 - DNA, 54 bp, Artificial
  Synthetic oligonucleotide
aaatgggagttaatggacgaagactatcagggaagactttgtaatcccctgaac

SEQ ID NO: 299878 - DNA, 55 bp, Artificial
  Synthetic oligonucleotide
aaatgggatcctgtgagagggggtccctccatttacagctggactgtactttggg

SEQ ID NO: 299879 - DNA, 56 bp, Artificial
  Synthetic oligonucleotide
aaatgggcaaggtagccttgaattagtagctgttaagatagataggcctgttaatt

SEQ ID NO: 299880 - DNA, 55 bp, Artificial
  Synthetic oligonucleotide
aaatgggcccagcagtcctgagtaaatcagaccctagactagaggaaccagtcga

SEQ ID NO: 299881 - DNA, 53 bp, Artificial
  Synthetic oligonucleotide
aaatgggcctcctctggtttaacctacgacgacttacccgatttatgtgccga

SEQ ID NO: 299882 - DNA, 60 bp, Artificial
  Synthetic oligonucleotide
aaatgggcggcgtacagctggaaagcgactatccatacgaagcagacaataacaattgcc

SEQ ID NO: 299883 - DNA, 58 bp, Artificial
  Synthetic oligonucleotide
aaatgggctgacctggttgtggaaaccaggtcgaagaatctgttgttttgacatctga

SEQ ID NO: 299884 - DNA, 56 bp, Artificial
  Synthetic oligonucleotide
aaatggggcagtgtaaagcagtgcacgggtaggggtataaaacttggtggctcgca

SEQ ID NO: 299885 - DNA, 55 bp, Artificial
  Synthetic oligonucleotide
aaatggggcgcccaagaaggaggctgcctcccaggcttcaggaagtgtgggcaca

SEQ ID NO: 299886 - DNA, 56 bp, Artificial
  Synthetic oligonucleotide
aaatgggggatcatcagacagtggtgtacccaacagtaatgaccccggtggtacca

SEQ ID NO: 299887 - DNA, 58 bp, Artificial
  Synthetic oligonucleotide
aaatgggtacgtgattgcatggcatgcactagtggtaattttattgtaagagctccaa

SEQ ID NO: 299888 - DNA, 60 bp, Artificial
  Synthetic oligonucleotide
aaatgggtgctttgaattctggcataaatgtgacaatgagtgcatagaatctgtcaaaaa

SEQ ID NO: 299889 - DNA, 55 bp, Artificial
  Synthetic oligonucleotide
aaatgggtggcaagtgctcaaaacatagttttcctgggtgggatactataaggga

SEQ ID NO: 299890 - DNA, 56 bp, Artificial
  Synthetic oligonucleotide
aaatgggtggcaagtggtcaaaatgtagtatgggtaggggatggtctgctgtaagg

SEQ ID NO: 299891 - DNA, 59 bp, Artificial
  Synthetic oligonucleotide
aaatgggtggcaagtggtctaaactaagaggatggcctgctgtaagggagagaatgaga

SEQ ID NO: 299892 - DNA, 60 bp, Artificial
  Synthetic oligonucleotide
aaatgggtgtctgctttggaacaatcccggtggccaatcctgatgatgctgccttaggat

SEQ ID NO: 299893 - DNA, 59 bp, Artificial
  Synthetic oligonucleotide
aaatggtaaaactctatggagactcaaagcctcaaaagttcacctcatctgccaatgga

SEQ ID NO: 299894 - DNA, 55 bp, Artificial
  Synthetic oligonucleotide
aaatggtacaacaattcagggaataccccgacatggtaggtgccattgacggtag

SEQ ID NO: 299895 - DNA, 60 bp, Artificial
  Synthetic oligonucleotide
aaatggtaccaaagtgaacacactcacagagagaggtgtagaagttgtcaatgcaaccga

SEQ ID NO: 299896 - DNA, 51 bp, Artificial
  Synthetic oligonucleotide
aaatggtaccagaggacgtaatgttactatgaatccgccatcatttaacca

SEQ ID NO: 299897 - DNA, 55 bp, Artificial
  Synthetic oligonucleotide
aaatggtagcctccacccggtacggtatgatctccgcactacgaaccgtcagacg

SEQ ID NO: 299898 - DNA, 53 bp, Artificial
  Synthetic oligonucleotide
aaatggtgcttcaataaggacttctcccaccttaccctttctctcagggggac

SEQ ID NO: 299899 - DNA, 53 bp, Artificial
  Synthetic oligonucleotide
aaatggtgttgtaaaccccagaaagaggcgtgtagccccttctaacaaatctg

SEQ ID NO: 299900 - DNA, 56 bp, Artificial
  Synthetic oligonucleotide
aaatggttggagaaggtgatctaccccccaatcaattaccttatgacgatgatctt

SEQ ID NO: 299901 - DNA, 53 bp, Artificial
  Synthetic oligonucleotide
aaatggttttaaggccgcccaagtttacagttgacgaaagctcgctactagac

SEQ ID NO: 299902 - DNA, 60 bp, Artificial
  Synthetic oligonucleotide
aaatgtaaaagacaccattatgaggaagctgcagaatgggacagattacatccagtgcat

SEQ ID NO: 299903 - DNA, 55 bp, Artificial
  Synthetic oligonucleotide
aaatgtaacacccctacaatggatgccgacaagattgtgttcaaagtcaataatc

SEQ ID NO: 299904 - DNA, 59 bp, Artificial
  Synthetic oligonucleotide
aaatgtaacatcatgacctataaaatcgttgctacaaatctgaggtgtcctaaggagac

SEQ ID NO: 299905 - DNA, 57 bp, Artificial
  Synthetic oligonucleotide
aaatgtaaggactatcaagtttgtgactccgatggattgcttcttcggtccgtcgga

SEQ ID NO: 299906 - DNA, 55 bp, Artificial
  Synthetic oligonucleotide
aaatgtacgtgcaatgcgggcagacccgccgactggcctggctcaaggcgaacgt

SEQ ID NO: 299907 - DNA, 60 bp, Artificial
  Synthetic oligonucleotide
aaatgtactgggtttcatgtggaacaggaaacattgtgtcagcagtaaacatgacatcca

SEQ ID NO: 299908 - DNA, 50 bp, Artificial
  Synthetic oligonucleotide
aaatgtacttgtgtatgtctcgagctataatgaagtcgacaccttggcta

SEQ ID NO: 299909 - DNA, 53 bp, Artificial
  Synthetic oligonucleotide
aaatgtagaagtcttggactgggatggtctagacttccctgaacctgatccaa

SEQ ID NO: 299910 - DNA, 60 bp, Artificial
  Synthetic oligonucleotide
aaatgtagaggatctagtgttatctgctctagagttgcatgaggtaggtgatttagagca

SEQ ID NO: 299911 - DNA, 55 bp, Artificial
  Synthetic oligonucleotide
aaatgtagcagaaatctacaagaagtgggtgatcatggggctgcagagatgtgtc

SEQ ID NO: 299912 - DNA, 53 bp, Artificial
  Synthetic oligonucleotide
aaatgtaggaaatatttcccctgattacatacaaaatttggcaacgatcgggg

SEQ ID NO: 299913 - DNA, 57 bp, Artificial
  Synthetic oligonucleotide
aaatgtatctaatggtcaaactaaatctactcgttcgcagaattgggaatcaactgt

SEQ ID NO: 299914 - DNA, 50 bp, Artificial
  Synthetic oligonucleotide
aaatgtatgggtacgttaatattgctagaactcttgatggatatcaacaa

SEQ ID NO: 299915 - DNA, 56 bp, Artificial
  Synthetic oligonucleotide
aaatgtatgggtatgttaatatcgctaggaatcttgatgggtatcaacaaattaat

SEQ ID NO: 299916 - DNA, 57 bp, Artificial
  Synthetic oligonucleotide
aaatgtatggtacgctgatgccatttacccaatgtatgcagacacggaggtgttctc

SEQ ID NO: 299917 - DNA, 55 bp, Artificial
  Synthetic oligonucleotide
aaatgtcaactaaaaggggaagccatacacggacaagtagactgtagtccaggaa

SEQ ID NO: 299918 - DNA, 59 bp, Artificial
  Synthetic oligonucleotide
aaatgtcaactaaaaggggaagccatgcatggacaagtagactgtagtccagggatatg

SEQ ID NO: 299919 - DNA, 59 bp, Artificial
  Synthetic oligonucleotide
aaatgtcaactgtgcttcctaaggaatgggtgcgaccggcagactttttatcatatcga

SEQ ID NO: 299920 - DNA, 60 bp, Artificial
  Synthetic oligonucleotide
aaatgtcaagaaacatgaatggtatgagatacaagaatcagaatattaccctaaacatgt

SEQ ID NO: 299921 - DNA, 55 bp, Artificial
  Synthetic oligonucleotide
aaatgtcacggagcgttccgaggactccggtctgcacgctctgtcgcacagaggc

SEQ ID NO: 299922 - DNA, 56 bp, Artificial
  Synthetic oligonucleotide
aaatgtcactcgtgattttatgccggctgacactttattgcccgagggatgggttt

SEQ ID NO: 299923 - DNA, 59 bp, Artificial
  Synthetic oligonucleotide
aaatgtcagctaaaaggggaagccacacatgggcaagtagactgtagtccagggatatg

SEQ ID NO: 299924 - DNA, 60 bp, Artificial
  Synthetic oligonucleotide
aaatgtccttgatgtaaatgccattgacatcgaagaaccaagtggtcagacagcagattg

SEQ ID NO: 299925 - DNA, 60 bp, Artificial
  Synthetic oligonucleotide
aaatgtcgaacgaggcagacgactatcgttcatgatgagactaagatgtcttcgcagcgc

SEQ ID NO: 299926 - DNA, 60 bp, Artificial
  Synthetic oligonucleotide
aaatgtcggaccgatatcgccagactatactcaacatatggctacgattggtgtgctagc

SEQ ID NO: 299927 - DNA, 60 bp, Artificial
  Synthetic oligonucleotide
aaatgtctgatgggagggacgagcttcagagtggataggaaacacaaggatagcgcggag

SEQ ID NO: 299928 - DNA, 51 bp, Artificial
  Synthetic oligonucleotide
aaatgtctgcagatgtgtatggggacagtatgttcttctgtttacgtaggg

SEQ ID NO: 299929 - DNA, 59 bp, Artificial
  Synthetic oligonucleotide
aaatgtctggggagtggcatatttgtaataatagctgggcaccgattggggactctcta

SEQ ID NO: 299930 - DNA, 60 bp, Artificial
  Synthetic oligonucleotide
aaatgtgacgagctcgccgcaaagctgtcgggcctcggaattaatgctgtagcgtattac

SEQ ID NO: 299931 - DNA, 56 bp, Artificial
  Synthetic oligonucleotide
aaatgtgatcactactatttactattactataatttatactattcgaaacctataa

SEQ ID NO: 299932 - DNA, 59 bp, Artificial
  Synthetic oligonucleotide
aaatgtgcagattggcctcgtctatgaaaggactctggaaaaacggagcgcgggcgcta

SEQ ID NO: 299933 - DNA, 57 bp, Artificial
  Synthetic oligonucleotide
aaatgtgccatagcacacagatcggaggaataaggatggtggacatccttaggcaga

SEQ ID NO: 299934 - DNA, 60 bp, Artificial
  Synthetic oligonucleotide
aaatgtgctatggtgttcaattacgagatgggtatgtggattgaggcccgtcagatggac

SEQ ID NO: 299935 - DNA, 59 bp, Artificial
  Synthetic oligonucleotide
aaatgtgctgacctggttggggataccaagtcgaagaatctgttatttgtgcactggta

SEQ ID NO: 299936 - DNA, 54 bp, Artificial
  Synthetic oligonucleotide
aaatgtgctgacctgtttggggataccaggtcgaagaacctttggttcttacat

SEQ ID NO: 299937 - DNA, 59 bp, Artificial
  Synthetic oligonucleotide
aaatgtgctgaccttgttggggatacaaggtcgaataatctgttgtttgtgcagacgaa

SEQ ID NO: 299938 - DNA, 50 bp, Artificial
  Synthetic oligonucleotide
aaatgtggacaattctcctggcccgccgggaagattcgtggaactggatg

SEQ ID NO: 299939 - DNA, 54 bp, Artificial
  Synthetic oligonucleotide
aaatgtggcttttacctttacgttcaatattagaccgaactttatgcttcacag

SEQ ID NO: 299940 - DNA, 60 bp, Artificial
  Synthetic oligonucleotide
aaatgtggtgagaaagatgatgactaattcacaagacacagagctctctttcacaatcac

SEQ ID NO: 299941 - DNA, 55 bp, Artificial
  Synthetic oligonucleotide
aaatgtgtcaagtcctccttccaaccggttcccatacactactgtgctccacccg

SEQ ID NO: 299942 - DNA, 51 bp, Artificial
  Synthetic oligonucleotide
aaatgtgttcaccatgccaactgaaccaagtgacaccttactctgtgacat

SEQ ID NO: 299943 - DNA, 53 bp, Artificial
  Synthetic oligonucleotide
aaatgtgtttacatactgggcagttatcgaaatcgccatgagtagaagaacag

SEQ ID NO: 299944 - DNA, 57 bp, Artificial
  Synthetic oligonucleotide
aaatgttaccgttgcccaagccggtatgcctttttcattagatgctggagcggcaac

SEQ ID NO: 299945 - DNA, 53 bp, Artificial
  Synthetic oligonucleotide
aaatgttccccatttatcactataaatacgttagtccaaaaccgggtgcgcac

SEQ ID NO: 299946 - DNA, 60 bp, Artificial
  Synthetic oligonucleotide
aaatgttctgaaatttccatgatatcaacgagtgatttttttatactgatcatagatgag

SEQ ID NO: 299947 - DNA, 55 bp, Artificial
  Synthetic oligonucleotide
aaatgttgaagtgaagttgacgggtgtgtcccgacaagttggtgctatgttgccg

SEQ ID NO: 299948 - DNA, 60 bp, Artificial
  Synthetic oligonucleotide
aaatgttgagagaaggagtctaatgaacctgccctatgccatcttggatctccgcactaa

SEQ ID NO: 299949 - DNA, 60 bp, Artificial
  Synthetic oligonucleotide
aaatgttgatggagctttcatccttagtcacaatctgaaggcagtcatgttcttgagtca

SEQ ID NO: 299950 - DNA, 60 bp, Artificial
  Synthetic oligonucleotide
aaatgttggtagtcgaagggttctacgcccctttgatgtatcatgactatatgaatgatc

SEQ ID NO: 299951 - DNA, 59 bp, Artificial
  Synthetic oligonucleotide
aaatgttggtatactcccgttccacaacatcgctcgtgaccggagatcatataatgccg

SEQ ID NO: 299952 - DNA, 60 bp, Artificial
  Synthetic oligonucleotide
aaatgttgttaattatccatcaatattgcatccaatagattacgcatttaatgagtactt

SEQ ID NO: 299953 - DNA, 59 bp, Artificial
  Synthetic oligonucleotide
aaatgtttataataggctgtgcaccttgcatgggggaacattgggatagggccttgcca

SEQ ID NO: 299954 - DNA, 57 bp, Artificial
  Synthetic oligonucleotide
aaatgtttccaatagtattaatgtttttccagtgagtttgaatccatcaggtatcac

SEQ ID NO: 299955 - DNA, 60 bp, Artificial
  Synthetic oligonucleotide
aaatgttttggactcctggacatctgcgtttaacacgcgcagacagccgctgtttgcaca

SEQ ID NO: 299956 - DNA, 56 bp, Artificial
  Synthetic oligonucleotide
aaattaaaacaactcgacaagacatatacaaacacaacgcgattaaaactctctca

SEQ ID NO: 299957 - DNA, 52 bp, Artificial
  Synthetic oligonucleotide
aaattaaaactcgttataaagacaacaaacaactcagacgcaaacagaaatt

SEQ ID NO: 299958 - DNA, 52 bp, Artificial
  Synthetic oligonucleotide
aaattaaaataccactgaaacccacgctttaacgtttcgtcagtggcatcgt

SEQ ID NO: 299959 - DNA, 56 bp, Artificial
  Synthetic oligonucleotide
aaattaaaccaacccaaaacaatctgacaacgaacaacgcacactcacagcaacca

SEQ ID NO: 299960 - DNA, 59 bp, Artificial
  Synthetic oligonucleotide
aaattaaagggacgaggcctaggcatccaatcaggatctttagtggataatgactgtga

SEQ ID NO: 299961 - DNA, 53 bp, Artificial
  Synthetic oligonucleotide
aaattaaccacaagcagaatttggagtccccaataggtaaatgggcacccaaa

SEQ ID NO: 299962 - DNA, 55 bp, Artificial
  Synthetic oligonucleotide
aaattaacctgagggcgaatagcgggatgtctacgagcaaccggcggagcactag

SEQ ID NO: 299963 - DNA, 50 bp, Artificial
  Synthetic oligonucleotide
aaattaactataggaggaaaaatttgttaattaaacatcaattttattta

SEQ ID NO: 299964 - DNA, 57 bp, Artificial
  Synthetic oligonucleotide
aaattaagctcccagtaaggatatattccgcgggatggctcgtgtgcgcgaggttta

SEQ ID NO: 299965 - DNA, 52 bp, Artificial
  Synthetic oligonucleotide
aaattaaggggacggggcctaggcatccaatcaggggccttggtggataata

SEQ ID NO: 299966 - DNA, 54 bp, Artificial
  Synthetic oligonucleotide
aaattaattgtctccacaaacttctcggtgtttagggagcaaatgaaaggagaa

SEQ ID NO: 299967 - DNA, 55 bp, Artificial
  Synthetic oligonucleotide
aaattacaaacggagagtttactaactcaacgtggtcaagatctacaacataaga

SEQ ID NO: 299968 - DNA, 57 bp, Artificial
  Synthetic oligonucleotide
aaattacaaccaggagacacattgctctttttaggaccacttgagcaaggtggaata

SEQ ID NO: 299969 - DNA, 54 bp, Artificial
  Synthetic oligonucleotide
aaattacagggtttgcacccttttccaaggacaattcaattcgactttctgctg

SEQ ID NO: 299970 - DNA, 60 bp, Artificial
  Synthetic oligonucleotide
aaattaccagcgcatgcattagcgtcgcaccattacactagaatcaaccctaatactagg

SEQ ID NO: 299971 - DNA, 57 bp, Artificial
  Synthetic oligonucleotide
aaattaccccaacaggccatgctgaggcctataagatccattagctccttaacttct

SEQ ID NO: 299972 - DNA, 57 bp, Artificial
  Synthetic oligonucleotide
aaattaccccattcgatgtaatctccgtccttctcaacatatgatttggcgtcggag

SEQ ID NO: 299973 - DNA, 59 bp, Artificial
  Synthetic oligonucleotide
aaattaccctatagtgcaaaatgcacaagggcaaatgatacaccagaacttgtcaccta

SEQ ID NO: 299974 - DNA, 54 bp, Artificial
  Synthetic oligonucleotide
aaattaccttatatgccatttggtgaacacaatacgacaaaacccgggagggca

SEQ ID NO: 299975 - DNA, 58 bp, Artificial
  Synthetic oligonucleotide
aaattacgccatagtaattttggtcacagatggcagcctatgaccccgtcaagaggac

SEQ ID NO: 299976 - DNA, 55 bp, Artificial
  Synthetic oligonucleotide
aaattactgtctattgcccagttggcttttcacctcccacgccaggcttacgacc

SEQ ID NO: 299977 - DNA, 54 bp, Artificial
  Synthetic oligonucleotide
aaattagaagatgacgaaacatcggtagtgttaacaaaagaagagttggacgtg

SEQ ID NO: 299978 - DNA, 59 bp, Artificial
  Synthetic oligonucleotide
aaattagatatttcatgaactgtctaaataacttagacatttcatgtagttctgtaata

SEQ ID NO: 299979 - DNA, 55 bp, Artificial
  Synthetic oligonucleotide
aaattaggggccacttatgacaatgcacagaagtgctgggtttatcagggaaagc

SEQ ID NO: 299980 - DNA, 57 bp, Artificial
  Synthetic oligonucleotide
aaattaggtagggcagggtatgtcacagatagaggacaggaaaaggccatagaccta

SEQ ID NO: 299981 - DNA, 55 bp, Artificial
  Synthetic oligonucleotide
aaattagtagaggatcgatggaacaacctccagaggatcagggaccgcagaggga

SEQ ID NO: 299982 - DNA, 59 bp, Artificial
  Synthetic oligonucleotide
aaattagtgttgatagagtccatgtaatcccatgtataccatgtggtgtttgtcttaaa

SEQ ID NO: 299983 - DNA, 50 bp, Artificial
  Synthetic oligonucleotide
aaattagttatgcctgctaggttttatcccaaagttactaaatatttgcc

SEQ ID NO: 299984 - DNA, 50 bp, Artificial
  Synthetic oligonucleotide
aaattatactattaatttctaataggccgcgccagcggcaatgagaagag

SEQ ID NO: 299985 - DNA, 60 bp, Artificial
  Synthetic oligonucleotide
aaattatcaagctttcactgcattatggctaaaaccaagagtggggctccatgatgcgca

SEQ ID NO: 299986 - DNA, 59 bp, Artificial
  Synthetic oligonucleotide
aaattatcaggttgccaaaagatcgtacaacaatacgagcggagagcaaatgctaataa

SEQ ID NO: 299987 - DNA, 52 bp, Artificial
  Synthetic oligonucleotide
aaattatccaccaataaaccccgatggaacaaactttgactggggaaccaga

SEQ ID NO: 299988 - DNA, 60 bp, Artificial
  Synthetic oligonucleotide
aaattatctcgagccgttctagctccactgtcaatgggtctgcgtaaccaagttcagcga

SEQ ID NO: 299989 - DNA, 60 bp, Artificial
  Synthetic oligonucleotide
aaattatgagaatggcccttactcgtgctcaggagactggtcagcatttaactaatagtc

SEQ ID NO: 299990 - DNA, 59 bp, Artificial
  Synthetic oligonucleotide
aaattatgctgcgagtcttctctgaggtctagaatagggactttattttcagctctacc

SEQ ID NO: 299991 - DNA, 52 bp, Artificial
  Synthetic oligonucleotide
aaattatgctggcaactccattaagccaactggtacgagtcgcacagcgatt

SEQ ID NO: 299992 - DNA, 54 bp, Artificial
  Synthetic oligonucleotide
aaattatgtccagccccaccagtactcttcctactattataaccttgtcggaaa

SEQ ID NO: 299993 - DNA, 60 bp, Artificial
  Synthetic oligonucleotide
aaattatgtgcgcagtttgagaagggacaagatctcatcgctacccaagcggcccatgga

SEQ ID NO: 299994 - DNA, 52 bp, Artificial
  Synthetic oligonucleotide
aaattatgttatgataagattggatatgttttagcagtattgtattcatctg

SEQ ID NO: 299995 - DNA, 51 bp, Artificial
  Synthetic oligonucleotide
aaattattaagaaacttcataacttgagtcttaaagacccttaagaaacga

SEQ ID NO: 299996 - DNA, 56 bp, Artificial
  Synthetic oligonucleotide
aaattattctaaagcgctatggcgggtggccgctgaggagtacgtggaggttacgc

SEQ ID NO: 299997 - DNA, 60 bp, Artificial
  Synthetic oligonucleotide
aaattattgatggactcgacgcgaccactgacggtacagcaacttagtgataagttgaca

SEQ ID NO: 299998 - DNA, 55 bp, Artificial
  Synthetic oligonucleotide
aaattatttcactaaggtgacggacggttcacagtacgaagctttggccattcgc

SEQ ID NO: 299999 - DNA, 54 bp, Artificial
  Synthetic oligonucleotide
aaattatttctaaagttttattgtctttatctctatttactgtaggagctagtg

SEQ ID NO: 300000 - DNA, 56 bp, Artificial
  Synthetic oligonucleotide
aaattcaaaggaaatgaagtggtgcttaactacacaggaccagcgaagattaacac

SEQ ID NO: 300001 - DNA, 55 bp, Artificial
  Synthetic oligonucleotide
aaattcaaagtactttcatattgtacttattagtaccgctgttctaagtgacgta

SEQ ID NO: 300002 - DNA, 60 bp, Artificial
  Synthetic oligonucleotide
aaattcaacaagaagaagtgatacctactaggatggacagagtaaagtatctagcatatg

SEQ ID NO: 300003 - DNA, 55 bp, Artificial
  Synthetic oligonucleotide
aaattcaagcctgggcagtgggcttagattttaaagccgcaacaaaagcagaagg

SEQ ID NO: 300004 - DNA, 55 bp, Artificial
  Synthetic oligonucleotide
aaattcaatcacgctgaccaggactttatagatagcctccaagacgaccagtcat

SEQ ID NO: 300005 - DNA, 57 bp, Artificial
  Synthetic oligonucleotide
aaattcaatccgtttagaggagggctgaacaggattgtcgagtggatactggctccg

SEQ ID NO: 300006 - DNA, 52 bp, Artificial
  Synthetic oligonucleotide
aaattcacaattaagtatatgaaagctgttaagcttcatattactaaatata

SEQ ID NO: 300007 - DNA, 55 bp, Artificial
  Synthetic oligonucleotide
aaattcactaatggggcattgaaaatttgtcaaggtgaagacgtaaaactgacca

SEQ ID NO: 300008 - DNA, 60 bp, Artificial
  Synthetic oligonucleotide
aaattcagagacattagaatgtttattgctgatgaaccagagtgtagcgatgcaacactc

SEQ ID NO: 300009 - DNA, 59 bp, Artificial
  Synthetic oligonucleotide
aaattcagagacgcatcgcttcttatctgggacccgtggattatgagagtgggcaagct

SEQ ID NO: 300010 - DNA, 56 bp, Artificial
  Synthetic oligonucleotide
aaattcagttagaattcaacaattggccgttgcagggatgtcccccactgttgtgt

SEQ ID NO: 300011 - DNA, 60 bp, Artificial
  Synthetic oligonucleotide
aaattcatcagcatgttacaaagccgtagagatctccacgttaatcaagccatccctaga

SEQ ID NO: 300012 - DNA, 58 bp, Artificial
  Synthetic oligonucleotide
aaattcatcttctgggcaggcaacccagtcaagacaatttccaaaattattgccacga

SEQ ID NO: 300013 - DNA, 60 bp, Artificial
  Synthetic oligonucleotide
aaattcatggccaagaatactatatacttggactctagtcactatatgaaagtgtttaga

SEQ ID NO: 300014 - DNA, 53 bp, Artificial
  Synthetic oligonucleotide
aaattccaaagggagtgtattcttttgtgtcgtcatttttcgaaacgcctgaa

SEQ ID NO: 300015 - DNA, 58 bp, Artificial
  Synthetic oligonucleotide
aaattccaagaggccaataggcagcccgaaagagcagtataggcggattcttgtattc

SEQ ID NO: 300016 - DNA, 55 bp, Artificial
  Synthetic oligonucleotide
aaattccagaccagacagggagaaagaaggtatgggaagaatctagtaatggaaa

SEQ ID NO: 300017 - DNA, 59 bp, Artificial
  Synthetic oligonucleotide
aaattccagttccttcaaacaacaatgcagactcatacttaaacatctactgcactgga

SEQ ID NO: 300018 - DNA, 60 bp, Artificial
  Synthetic oligonucleotide
aaattccatatccagatactaagaatcccagcactactgcatctgttactccaaacacgc

SEQ ID NO: 300019 - DNA, 58 bp, Artificial
  Synthetic oligonucleotide
aaattccatgccccggacgccatcacaagcgacgctccgactgttgaagaccgcgaaa

SEQ ID NO: 300020 - DNA, 58 bp, Artificial
  Synthetic oligonucleotide
aaattccattcgtgtctcgtattccaactgtcaccttgcgtcacgcctcggtgattgg

SEQ ID NO: 300021 - DNA, 55 bp, Artificial
  Synthetic oligonucleotide
aaattcccagcgtatgatagaatttatcgttgtccgcgatccaacacattcatag

SEQ ID NO: 300022 - DNA, 60 bp, Artificial
  Synthetic oligonucleotide
aaattcccgatgatgatagatacgttacgaaaatcacgtcacattgtgaccttgacgatc

SEQ ID NO: 300023 - DNA, 53 bp, Artificial
  Synthetic oligonucleotide
aaattcccgtttacacgaaccacccgttgatatcggtcatatatataccggtg

SEQ ID NO: 300024 - DNA, 51 bp, Artificial
  Synthetic oligonucleotide
aaattccctcccgtgtctcgggaatctgacgttaaaagacccaatttgcga

SEQ ID NO: 300025 - DNA, 60 bp, Artificial
  Synthetic oligonucleotide
aaattccgaacaacacatctgcatcacacacacttctggccccccagcccactattctcc

SEQ ID NO: 300026 - DNA, 60 bp, Artificial
  Synthetic oligonucleotide
aaattcctcacgaaggcgattgagcaggggtctatgtctataccttatcagcatgtgaat

SEQ ID NO: 300027 - DNA, 55 bp, Artificial
  Synthetic oligonucleotide
aaattcctctttcataatagacgggccaaacacaccggagtgtccaagtgcctca

SEQ ID NO: 300028 - DNA, 57 bp, Artificial
  Synthetic oligonucleotide
aaattcctgatccgctaagtccaggagagcgagggatacaagctaagttgaaagagt

SEQ ID NO: 300029 - DNA, 52 bp, Artificial
  Synthetic oligonucleotide
aaattccttctagcatagtagtgatgcatgaggagatattgtgagcagcagt

SEQ ID NO: 300030 - DNA, 51 bp, Artificial
  Synthetic oligonucleotide
aaattcgacaatcaccacacaggaatgtgctaatgtggtggtcggatatgg

SEQ ID NO: 300031 - DNA, 60 bp, Artificial
  Synthetic oligonucleotide
aaattcgacgacgctagcacagcgttccataaggctcgttcttatttgagaggtctgcga

SEQ ID NO: 300032 - DNA, 60 bp, Artificial
  Synthetic oligonucleotide
aaattcgagcacataatcctagcgtgttcgacttgcatcataactcaggtatcattttag

SEQ ID NO: 300033 - DNA, 60 bp, Artificial
  Synthetic oligonucleotide
aaattcgattcttcccattcgccatcattgaatcattactcgtgtactggaacgcagtta

SEQ ID NO: 300034 - DNA, 55 bp, Artificial
  Synthetic oligonucleotide
aaattcgatttcctaatgttccgcgtcatttataaataactcaacgcttctaata

SEQ ID NO: 300035 - DNA, 55 bp, Artificial
  Synthetic oligonucleotide
aaattcgcgcatcatttgattgcaataacccgtggtgatctgattgtacccacac

SEQ ID NO: 300036 - DNA, 53 bp, Artificial
  Synthetic oligonucleotide
aaattcgcgggctcggttccaaatattgcgcaggggtaaaaagcgttcaatag

SEQ ID NO: 300037 - DNA, 57 bp, Artificial
  Synthetic oligonucleotide
aaattcgcttctcgcttctgtacccgcgcttattgctgcccagctctataaaaaggg

SEQ ID NO: 300038 - DNA, 55 bp, Artificial
  Synthetic oligonucleotide
aaattcggagttaagatattaggcgataagatagatgttcccctcttcttacgaa

SEQ ID NO: 300039 - DNA, 51 bp, Artificial
  Synthetic oligonucleotide
aaattcggtcgggttcccctcgtcttggccaccctaaacgaagtactctca

SEQ ID NO: 300040 - DNA, 55 bp, Artificial
  Synthetic oligonucleotide
aaattctagagatgcaggcaaagtcgttgactctgaaactgcggctatttgtgac

SEQ ID NO: 300041 - DNA, 56 bp, Artificial
  Synthetic oligonucleotide
aaattctatgacgcacgacctccggatgatgttttacaaggcttaccctttagcta

SEQ ID NO: 300042 - DNA, 60 bp, Artificial
  Synthetic oligonucleotide
aaattctcaatacctagcgttgtttgtgatcatgactaatgttgatggtactccacgtaa

SEQ ID NO: 300043 - DNA, 55 bp, Artificial
  Synthetic oligonucleotide
aaattctccaggatttctcgacctagttcgtttatctggtgacttgcgctaccgt

SEQ ID NO: 300044 - DNA, 55 bp, Artificial
  Synthetic oligonucleotide
aaattctccaggatttctcgacctcggttgttttatctggtagtttgcgctaatc

SEQ ID NO: 300045 - DNA, 60 bp, Artificial
  Synthetic oligonucleotide
aaattctctcttacccatggaatgcagccaaaccatgacctcaggaaggaaagtgcatga

SEQ ID NO: 300046 - DNA, 52 bp, Artificial
  Synthetic oligonucleotide
aaattctgaccgttcttttccggttgtctaggaccagcaactggtttccttg

SEQ ID NO: 300047 - DNA, 59 bp, Artificial
  Synthetic oligonucleotide
aaattctgccgcttctacgccaagcttatctggaacgcacgtctcagccgcaaccggcc

SEQ ID NO: 300048 - DNA, 56 bp, Artificial
  Synthetic oligonucleotide
aaattctgtcctctgtcacacaatccttcttggggacatctatttcgggggtcctc

SEQ ID NO: 300049 - DNA, 56 bp, Artificial
  Synthetic oligonucleotide
aaattctgtgctgtccctacgttctaggctgactttgccaacataccgttatccct

SEQ ID NO: 300050 - DNA, 55 bp, Artificial
  Synthetic oligonucleotide
aaattcttaagtatctaggaagcattgtgcagtattggggtctaaagctaaaaaa

SEQ ID NO: 300051 - DNA, 52 bp, Artificial
  Synthetic oligonucleotide
aaattcttaagtgacaacaaaattccgctaaacttctacaaccagtgtttgg

SEQ ID NO: 300052 - DNA, 55 bp, Artificial
  Synthetic oligonucleotide
aaattcttccccagcagttcatatcggagtccagttggaatgtactgcatggtgg

SEQ ID NO: 300053 - DNA, 54 bp, Artificial
  Synthetic oligonucleotide
aaattcttcgaacctgttctgaatttcggggccagcagtaaacgtgttggtaca

SEQ ID NO: 300054 - DNA, 60 bp, Artificial
  Synthetic oligonucleotide
aaattcttgctgatggatgctctaaaattaagcattgaggacccgagtcatgagggagag

SEQ ID NO: 300055 - DNA, 51 bp, Artificial
  Synthetic oligonucleotide
aaattcttggtgatcaaccgtggtacgagtccaataaggatcagttctttt

SEQ ID NO: 300056 - DNA, 57 bp, Artificial
  Synthetic oligonucleotide
aaattgaaaacgtttgtaaaagccgagaagatcaacatcacacgcaagccagatccg

SEQ ID NO: 300057 - DNA, 50 bp, Artificial
  Synthetic oligonucleotide
aaattgaaagcatgattgaggccgagtcctctgttaaagagaaagacatg

SEQ ID NO: 300058 - DNA, 55 bp, Artificial
  Synthetic oligonucleotide
aaattgaacgcaaaatactccgagcccgaatatacaaagtatctcctcgaaataa

SEQ ID NO: 300059 - DNA, 53 bp, Artificial
  Synthetic oligonucleotide
aaattgaacgtggacccggtgacacgctaatggacggcccttcgtcaaaggta

SEQ ID NO: 300060 - DNA, 57 bp, Artificial
  Synthetic oligonucleotide
aaattgaagagatagaattttgccagatgcaccctgtatttgcgaatagtgggtacg

SEQ ID NO: 300061 - DNA, 60 bp, Artificial
  Synthetic oligonucleotide
aaattgaagatctcatatttctggcacgatctgcactcatcctgagaggatcagtggccc

SEQ ID NO: 300062 - DNA, 60 bp, Artificial
  Synthetic oligonucleotide
aaattgaagatctcatcttcctcgcacggtctgctctcattctgaggggatcagtggctc

SEQ ID NO: 300063 - DNA, 60 bp, Artificial
  Synthetic oligonucleotide
aaattgaagatctcatctttcttgcgcggtctgctctcatcctgagagggtcagtggctc

SEQ ID NO: 300064 - DNA, 59 bp, Artificial
  Synthetic oligonucleotide
aaattgaaggtgttaaaagacgaatatatggtagcattatatgcactgtctaatgactt

SEQ ID NO: 300065 - DNA, 52 bp, Artificial
  Synthetic oligonucleotide
aaattgacaattacacacaacaaatatacaccttacttgaagaatcgcagtt

SEQ ID NO: 300066 - DNA, 51 bp, Artificial
  Synthetic oligonucleotide
aaattgacaattacacaggcttaatatacactttaattgaaggagcgcaat

SEQ ID NO: 300067 - DNA, 57 bp, Artificial
  Synthetic oligonucleotide
aaattgacgaggagggcgaatttacagtgtatagcgagggaattgtgtctcatcggg

SEQ ID NO: 300068 - DNA, 53 bp, Artificial
  Synthetic oligonucleotide
aaattgacgttagaacaacgtcaaaaactagtccgaatgcattcggagggaac

SEQ ID NO: 300069 - DNA, 58 bp, Artificial
  Synthetic oligonucleotide
aaattgagaaatgccttgtggagatccaatgctttcctcaggttgtggttgaaccgga

SEQ ID NO: 300070 - DNA, 60 bp, Artificial
  Synthetic oligonucleotide
aaattgagaaccttgaatacacagtggttgtaacagtccacaatggagacacccatgcag

SEQ ID NO: 300071 - DNA, 60 bp, Artificial
  Synthetic oligonucleotide
aaattgagtccgtaaacaatgctgtagtgatgccagcccatggtccagccaaaagcatgg

SEQ ID NO: 300072 - DNA, 58 bp, Artificial
  Synthetic oligonucleotide
aaattgatccgtaatgcgacttaacacgttatgcgcctgacggatagtgctacggtac

SEQ ID NO: 300073 - DNA, 60 bp, Artificial
  Synthetic oligonucleotide
aaattgatgaccctccagctaggatgaccatcccattcatgtgcataaactcagcctatg

SEQ ID NO: 300074 - DNA, 60 bp, Artificial
  Synthetic oligonucleotide
aaattgattgattatgcagcctcaggagatccaacatcacctgacaatatagaggatcct

SEQ ID NO: 300075 - DNA, 57 bp, Artificial
  Synthetic oligonucleotide
aaattgcaacgcgggtgtatcataaggctaaacatgtaaaagcttggtgcccaaggc

SEQ ID NO: 300076 - DNA, 60 bp, Artificial
  Synthetic oligonucleotide
aaattgcacagtactatacccactggtcaggttccatcagaatctccctaatgtatacag

SEQ ID NO: 300077 - DNA, 53 bp, Artificial
  Synthetic oligonucleotide
aaattgcaccctgattcttaaggggataaatttgggcctcggcccaatttatc

SEQ ID NO: 300078 - DNA, 58 bp, Artificial
  Synthetic oligonucleotide
aaattgcatctacatggagtccgttgccttcagtaacataaggaaaccttataattgc

SEQ ID NO: 300079 - DNA, 56 bp, Artificial
  Synthetic oligonucleotide
aaattgccgggagtccccttcttctcatgtcagcgtgggtacaagggagtctggcg

SEQ ID NO: 300080 - DNA, 52 bp, Artificial
  Synthetic oligonucleotide
aaattgcctttcctaaaatacccccgcttttgtgtctaataggcgcgtcgga

SEQ ID NO: 300081 - DNA, 50 bp, Artificial
  Synthetic oligonucleotide
aaattgcgaaatactttttctcaaggggcgaaacaagtttgttttcgccc

SEQ ID NO: 300082 - DNA, 55 bp, Artificial
  Synthetic oligonucleotide
aaattgcgtcatccttcgtatcttgctcttatcaatagataaacaggtcggaaag

SEQ ID NO: 300083 - DNA, 55 bp, Artificial
  Synthetic oligonucleotide
aaattgctagggtccctgctagctgtggaaagtggacaaatgctcctagaacccc

SEQ ID NO: 300084 - DNA, 54 bp, Artificial
  Synthetic oligonucleotide
aaattgctcggcgtactaaaatgggaagcttttagctactccctgtgtccctcc

SEQ ID NO: 300085 - DNA, 60 bp, Artificial
  Synthetic oligonucleotide
aaattgctggagctgcatttgtcaccacgcgcatcgccaagcgcatgaacatacaagacc

SEQ ID NO: 300086 - DNA, 55 bp, Artificial
  Synthetic oligonucleotide
aaattggaaaaagtggtggcaagtgttttacacagtggtggattacgtcaatcaa

SEQ ID NO: 300087 - DNA, 55 bp, Artificial
  Synthetic oligonucleotide
aaattggaaaaggtggtggcaagtattttatacgatagttgattatgttaatcaa

SEQ ID NO: 300088 - DNA, 55 bp, Artificial
  Synthetic oligonucleotide
aaattggaagctctttctcgcagcgggtttacttctcacaatcaccgcactttcc

SEQ ID NO: 300089 - DNA, 56 bp, Artificial
  Synthetic oligonucleotide
aaattggaagtcgatctacaaaataaaattagttcacttgtatcttcagttgaatg

SEQ ID NO: 300090 - DNA, 58 bp, Artificial
  Synthetic oligonucleotide
aaattggaccagagattccataacagaagtgtggtcctacaatgccgaactcttagtg

SEQ ID NO: 300091 - DNA, 60 bp, Artificial
  Synthetic oligonucleotide
aaattggaccagagattccatgacagaagtgtggtcctataacgctgaactcttggtagc

SEQ ID NO: 300092 - DNA, 53 bp, Artificial
  Synthetic oligonucleotide
aaattggacccagagaaactgactgcaaaacttaaagagtacggcctcaaacc

SEQ ID NO: 300093 - DNA, 56 bp, Artificial
  Synthetic oligonucleotide
aaattggacgggaagctgtgtacttgctactcttttacccgatatagacattattc

SEQ ID NO: 300094 - DNA, 56 bp, Artificial
  Synthetic oligonucleotide
aaattggaggacgcagtctatggtactgagggcttagaggctctagatctgaccac

SEQ ID NO: 300095 - DNA, 53 bp, Artificial
  Synthetic oligonucleotide
aaattggaggctggatgaaagaagtatcaggcttctttaaaggcctaaaaggg

SEQ ID NO: 300096 - DNA, 57 bp, Artificial
  Synthetic oligonucleotide
aaattggagtcatccgaccgtatggagaaaatttccgacaagaggtgatccactgag

SEQ ID NO: 300097 - DNA, 50 bp, Artificial
  Synthetic oligonucleotide
aaattggcaactaggctttgtacctacaccagacaattctgtccatgata

SEQ ID NO: 300098 - DNA, 60 bp, Artificial
  Synthetic oligonucleotide
aaattggctatgtatgtagtgggatatttggggacaatcccaggcctgtggatggcacag

SEQ ID NO: 300099 - DNA, 60 bp, Artificial
  Synthetic oligonucleotide
aaattggctatgtgtgcagtggggtattcggagataatcccaggcctgtggatggtactg

SEQ ID NO: 300100 - DNA, 60 bp, Artificial
  Synthetic oligonucleotide
aaattgggaacatgatctcaatatgggtcagtcattcaattcagacagggaatctaaacc

SEQ ID NO: 300101 - DNA, 56 bp, Artificial
  Synthetic oligonucleotide
aaattgggaacgctgaagttggcagggccttcttggagggcaataggagaactcga

SEQ ID NO: 300102 - DNA, 60 bp, Artificial
  Synthetic oligonucleotide
aaattgggctatcaggaagataccaagtttgctgctttcgacttctttgatggagtcaca

SEQ ID NO: 300103 - DNA, 60 bp, Artificial
  Synthetic oligonucleotide
aaattggggcatcgtctaataccagcgatgagagtatgattgagacacgatgcgttctta

SEQ ID NO: 300104 - DNA, 58 bp, Artificial
  Synthetic oligonucleotide
aaattggtagaaatggtttctggcaccctcaatcaactcaatgggatacctagtgcta

SEQ ID NO: 300105 - DNA, 53 bp, Artificial
  Synthetic oligonucleotide
aaattgtaactcacagttttatttgtggaggggagtttttctactgtaataca

SEQ ID NO: 300106 - DNA, 50 bp, Artificial
  Synthetic oligonucleotide
aaattgtacatataaaggatatgttgtatcatctgaggatctctgcaatg

SEQ ID NO: 300107 - DNA, 56 bp, Artificial
  Synthetic oligonucleotide
aaattgtgagcacagatataaaattggacccagaaaaactgacggcaaagctaaag

SEQ ID NO: 300108 - DNA, 56 bp, Artificial
  Synthetic oligonucleotide
aaattgtggcgatccaaagagttgaacacggactcaccaaacgaattattattgac

SEQ ID NO: 300109 - DNA, 57 bp, Artificial
  Synthetic oligonucleotide
aaattgttctaattgtatacttactaattgcattagaggtgtggccaaaggagaaca

SEQ ID NO: 300110 - DNA, 54 bp, Artificial
  Synthetic oligonucleotide
aaatttaaaactgaaatcacctctagccccctcttctgcggctactacctctcc

SEQ ID NO: 300111 - DNA, 54 bp, Artificial
  Synthetic oligonucleotide
aaatttaacaggcttaatttccgcgctttacgtcaatggctttcacttacagaa

SEQ ID NO: 300112 - DNA, 52 bp, Artificial
  Synthetic oligonucleotide
aaatttaaggaaagctttgggcttgggcttggagagcttacccgcgccttta

SEQ ID NO: 300113 - DNA, 57 bp, Artificial
  Synthetic oligonucleotide
aaatttaccagtcggcatgttttgactacttctgccgtcattctccccctcatgaaa

SEQ ID NO: 300114 - DNA, 54 bp, Artificial
  Synthetic oligonucleotide
aaatttaccgacagggagactccaaacgctctacgtaagtttgcttgcactttc

SEQ ID NO: 300115 - DNA, 59 bp, Artificial
  Synthetic oligonucleotide
aaatttactaaacagactccgagttgccattggactcaggagctatgaatcagtaacga

SEQ ID NO: 300116 - DNA, 58 bp, Artificial
  Synthetic oligonucleotide
aaatttagacagcgcgtttgacagttacattctggaggttgacagcttgaaaactgcc

SEQ ID NO: 300117 - DNA, 51 bp, Artificial
  Synthetic oligonucleotide
aaatttagactacccatccaaaaggagacatgggatctatggtggacagac

SEQ ID NO: 300118 - DNA, 54 bp, Artificial
  Synthetic oligonucleotide
aaatttagaggatcatattaacttttggaatgctgttagaaaagaaaatgtcgt

SEQ ID NO: 300119 - DNA, 54 bp, Artificial
  Synthetic oligonucleotide
aaatttagctattaccccctctttgaaggatcgtttctacattcgtcatgtgtt

SEQ ID NO: 300120 - DNA, 55 bp, Artificial
  Synthetic oligonucleotide
aaatttagtcctatgcaactgacacacatggtcaactacttcatggtagttgccc

SEQ ID NO: 300121 - DNA, 58 bp, Artificial
  Synthetic oligonucleotide
aaatttatatcaacaaggatggccatctaatcaaaactggcctaatacaaacagagac

SEQ ID NO: 300122 - DNA, 57 bp, Artificial
  Synthetic oligonucleotide
aaatttatcccaaataataaatgcggtatctccagaacagttcggagcagtaggaga

SEQ ID NO: 300123 - DNA, 52 bp, Artificial
  Synthetic oligonucleotide
aaatttattgggtaagggcgaaagaagtcgacccgatacttggaagcaagcg

SEQ ID NO: 300124 - DNA, 59 bp, Artificial
  Synthetic oligonucleotide
aaatttcaacgccgcacgctaatgaacgcgcttctatatcgtgtgaaaatagcttgaaa

SEQ ID NO: 300125 - DNA, 54 bp, Artificial
  Synthetic oligonucleotide
aaatttcaatcatactggggtttacgggtacaatacactaaatcacatgggtag

SEQ ID NO: 300126 - DNA, 54 bp, Artificial
  Synthetic oligonucleotide
aaatttcaattcttttcgtcggcgtctgggacgttagtgatgaacgtcaaatta

SEQ ID NO: 300127 - DNA, 53 bp, Artificial
  Synthetic oligonucleotide
aaatttcagcgaacaaactagcatcttcaagtaaactcacccgatgagacaat

SEQ ID NO: 300128 - DNA, 55 bp, Artificial
  Synthetic oligonucleotide
aaatttcatcagggcactctcatagtagctatgataccagaacatcaattggcca

SEQ ID NO: 300129 - DNA, 60 bp, Artificial
  Synthetic oligonucleotide
aaatttcatcatggccatatattcagattattcaaacatagatgacctaattaatgacaa

SEQ ID NO: 300130 - DNA, 51 bp, Artificial
  Synthetic oligonucleotide
aaatttcctgtatacatgcttgtttctcagttgacaaagcatgcagggaca

SEQ ID NO: 300131 - DNA, 53 bp, Artificial
  Synthetic oligonucleotide
aaatttcgacaaatacgtctaccaaagggaccaatggcaccctatacccacaa

SEQ ID NO: 300132 - DNA, 56 bp, Artificial
  Synthetic oligonucleotide
aaatttgaataaacagcagcttcaaacttgcaaggccgtgggagtttcactggtcg

SEQ ID NO: 300133 - DNA, 51 bp, Artificial
  Synthetic oligonucleotide
aaatttgactatctgtgttatggggctcacaggaaggatgttgtcgtccgt

SEQ ID NO: 300134 - DNA, 56 bp, Artificial
  Synthetic oligonucleotide
aaatttgatgtgcccattcccgacatagatggtaagccccagtttaccttaactga

SEQ ID NO: 300135 - DNA, 54 bp, Artificial
  Synthetic oligonucleotide
aaatttggacttccacacctagtggcaaaacaaatagtaaactcctgtgataag

SEQ ID NO: 300136 - DNA, 57 bp, Artificial
  Synthetic oligonucleotide
aaatttggaggtaacagggccagatggggagaaggacattgttgtgctaggatcact

SEQ ID NO: 300137 - DNA, 54 bp, Artificial
  Synthetic oligonucleotide
aaatttggatttcctgacacctccttttataaccctgatacacaacgattagta

SEQ ID NO: 300138 - DNA, 55 bp, Artificial
  Synthetic oligonucleotide
aaatttggggatggggcgcgctgattggctgtgacagcggcgttcgttaggggcg

SEQ ID NO: 300139 - DNA, 55 bp, Artificial
  Synthetic oligonucleotide
aaatttggtcacatgtctttatacccgaaaggtatcacacaggtgtatagtacac

SEQ ID NO: 300140 - DNA, 56 bp, Artificial
  Synthetic oligonucleotide
aaatttgtatggattcatcataaagggaaggtcccatttaagaaatgacactgacg

SEQ ID NO: 300141 - DNA, 54 bp, Artificial
  Synthetic oligonucleotide
aaatttgtcagcacaaataaaaagggagccgtcttcaagtcaaatttaccaatc

SEQ ID NO: 300142 - DNA, 58 bp, Artificial
  Synthetic oligonucleotide
aaatttgtcgcacaacttcatgtgagacatttgggaatagctgagccaacctcccaag

SEQ ID NO: 300143 - DNA, 57 bp, Artificial
  Synthetic oligonucleotide
aaatttgtgaatctagggatagcgccctagaaaacattcgaagttgaggatagcgcc

SEQ ID NO: 300144 - DNA, 55 bp, Artificial
  Synthetic oligonucleotide
aaattttagagccattcttacagccttttcacctgctcaagacatttggggcacg

SEQ ID NO: 300145 - DNA, 58 bp, Artificial
  Synthetic oligonucleotide
aaattttagcttcggaactgacttatctatacgaaatcgcgtgtctgattgcgtacaa

SEQ ID NO: 300146 - DNA, 58 bp, Artificial
  Synthetic oligonucleotide
aaattttatggggtatgtcattggatgttatgggtccttgccacaagaacacatcgta

SEQ ID NO: 300147 - DNA, 56 bp, Artificial
  Synthetic oligonucleotide
aaattttattcgcatgcctacgcacttaacgcgaagtgcaacggatcgggaggaaa

SEQ ID NO: 300148 - DNA, 60 bp, Artificial
  Synthetic oligonucleotide
aaattttccggtcgcattggatgatccaggcttgtctaattcaatcagcgtggccgtgat

SEQ ID NO: 300149 - DNA, 58 bp, Artificial
  Synthetic oligonucleotide
aaattttcctattgtttagcaatggctgcgaaaaatgcatttggaggcactccaacta

SEQ ID NO: 300150 - DNA, 56 bp, Artificial
  Synthetic oligonucleotide
aaattttctgtggggcaagcgggaatatcacgcgaagcgtttcttcacaagctatt

SEQ ID NO: 300151 - DNA, 59 bp, Artificial
  Synthetic oligonucleotide
aaattttgtcattggtgttaaattgctggacatcagaaactatcgtgcttacggtcaca

SEQ ID NO: 300152 - DNA, 60 bp, Artificial
  Synthetic oligonucleotide
aaattttgtgcacctatatacgagtgtgcatgggttagctccactggcattgtgaagaag

SEQ ID NO: 300153 - DNA, 57 bp, Artificial
  Synthetic oligonucleotide
aaatttttgacaaacagtgactacatcgatacaatagtcaacaccgagagtcgtata

SEQ ID NO: 300154 - DNA, 58 bp, Artificial
  Synthetic oligonucleotide
aaatttttgacctcacaggtcagcattcgttcgtgacgggacgtgacatcggattatg

SEQ ID NO: 300155 - DNA, 57 bp, Artificial
  Synthetic oligonucleotide
aaatttttgactagcggaggctagaggagagagatgggtgcgcgagcgtcggtttta

SEQ ID NO: 300156 - DNA, 60 bp, Artificial
  Synthetic oligonucleotide
aaattttttgactagcagaggctagaaggagagagatgggtgcgagagcgtcagtattga

SEQ ID NO: 300157 - DNA, 58 bp, Artificial
  Synthetic oligonucleotide
aacaaaaacccccacatccgaaagttctcgtaagccttagcaagcattcatgcataca

SEQ ID NO: 300158 - DNA, 59 bp, Artificial
  Synthetic oligonucleotide
aacaaaaatggccagtgtaagaagacacgcttacaccggatgacagatctgtcgttagc

SEQ ID NO: 300159 - DNA, 53 bp, Artificial
  Synthetic oligonucleotide
aacaaaaatttgtcattgaatgatctatgcggtagtccaagcaataccgcacc

SEQ ID NO: 300160 - DNA, 56 bp, Artificial
  Synthetic oligonucleotide
aacaaaacgccgcacggacccactgagcccattatacgacttacacttgtcgatag

SEQ ID NO: 300161 - DNA, 56 bp, Artificial
  Synthetic oligonucleotide
aacaaaacggacttaaatacctacagctggtcccctaggttgtccattgcagtgca

SEQ ID NO: 300162 - DNA, 57 bp, Artificial
  Synthetic oligonucleotide
aacaaaacgttccggtgacacaagtggaagaactcgtgcatggcggaattgatccga

SEQ ID NO: 300163 - DNA, 60 bp, Artificial
  Synthetic oligonucleotide
aacaaaactggccgtggcaagaaacacaccgcattctctagcaagggcttgagcgatgag

SEQ ID NO: 300164 - DNA, 57 bp, Artificial
  Synthetic oligonucleotide
aacaaaagaaatgtcagtagatattaaagatgtctctggacaagtttatcttcctct

SEQ ID NO: 300165 - DNA, 55 bp, Artificial
  Synthetic oligonucleotide
aacaaaagatggcttcattttaggcatccatagtctatcacaccttgaacaggag

SEQ ID NO: 300166 - DNA, 57 bp, Artificial
  Synthetic oligonucleotide
aacaaaagattatgtaaagttgaaggatgggtagtggtggctaaggacaatgccata

SEQ ID NO: 300167 - DNA, 55 bp, Artificial
  Synthetic oligonucleotide
aacaaaaggcatccgcaggccagatcagtgtgcagcctacattctcagtgcagcg

SEQ ID NO: 300168 - DNA, 55 bp, Artificial
  Synthetic oligonucleotide
aacaaaagtcaagatcgttgaataccccagatcggtgaacaatggtgtttacgat

SEQ ID NO: 300169 - DNA, 55 bp, Artificial
  Synthetic oligonucleotide
aacaaaatcattaaccgcccaatcaccttctgcatcggtatcttggtggtctttt

SEQ ID NO: 300170 - DNA, 55 bp, Artificial
  Synthetic oligonucleotide
aacaaaattccgtctcagtttacccctgactatatcttacgcacagccctctacc

SEQ ID NO: 300171 - DNA, 56 bp, Artificial
  Synthetic oligonucleotide
aacaaacatattgagctttctttttgccccgagaactgctttcaagaggtcctcac

SEQ ID NO: 300172 - DNA, 56 bp, Artificial
  Synthetic oligonucleotide
aacaaacccagctgctacagctgtgaccccaaatggcccaaaccaacattccggta

SEQ ID NO: 300173 - DNA, 58 bp, Artificial
  Synthetic oligonucleotide
aacaaacccgctcaaaggcaggactgctggtgtcagatggaggaccaaacttatacaa

SEQ ID NO: 300174 - DNA, 57 bp, Artificial
  Synthetic oligonucleotide
aacaaacctatcgacttacaacacattggagacaatgtatacgtagctcagagggtt

SEQ ID NO: 300175 - DNA, 55 bp, Artificial
  Synthetic oligonucleotide
aacaaacgacctttaatccaccaatagaatattggacgttattcgctcccactga

SEQ ID NO: 300176 - DNA, 56 bp, Artificial
  Synthetic oligonucleotide
aacaaacgatgcaaagggtcctctaaatgggtgtttgaccacaagcaacctagagc

SEQ ID NO: 300177 - DNA, 55 bp, Artificial
  Synthetic oligonucleotide
aacaaacggcattactgcttatttgttgtaccagcagaaatctggtaattgcgac

SEQ ID NO: 300178 - DNA, 58 bp, Artificial
  Synthetic oligonucleotide
aacaaactctatgaacgtgtcaggaaacagttgagggaaaatgcagaagaggatggaa

SEQ ID NO: 300179 - DNA, 55 bp, Artificial
  Synthetic oligonucleotide
aacaaactgtttgcgtggatgcgcgatcacaaaatccttattgcttcaggttccc

SEQ ID NO: 300180 - DNA, 60 bp, Artificial
  Synthetic oligonucleotide
aacaaagagttagcggcagactggcaagctgtcgtagaactatatgccgaattggaagag

SEQ ID NO: 300181 - DNA, 58 bp, Artificial
  Synthetic oligonucleotide
aacaaagatgaggaggtcgaagacaatggcatgggtcaactattgactaaaattctgg

SEQ ID NO: 300182 - DNA, 55 bp, Artificial
  Synthetic oligonucleotide
aacaaagcaggtatgttcaatccatatgctgccactaaaggtaattccattacct

SEQ ID NO: 300183 - DNA, 52 bp, Artificial
  Synthetic oligonucleotide
aacaaagcctatatgtttgaaccccagggtcctaaacccatacaggggtaca

SEQ ID NO: 300184 - DNA, 54 bp, Artificial
  Synthetic oligonucleotide
aacaaaggcgcaatgggaacgatacatggtcgtgaaggagggatcgattagctt

SEQ ID NO: 300185 - DNA, 50 bp, Artificial
  Synthetic oligonucleotide
aacaaagggctgcgaataacccgaataggaataggaacccgaatagggtt

SEQ ID NO: 300186 - DNA, 51 bp, Artificial
  Synthetic oligonucleotide
aacaaagggctgctaacaacccgaatagaaacccgaatagggtttcgaatg

SEQ ID NO: 300187 - DNA, 55 bp, Artificial
  Synthetic oligonucleotide
aacaaaggggctaaagaaatgcgtctcagctctgaaacaaggcgcctgcaggaac

SEQ ID NO: 300188 - DNA, 57 bp, Artificial
  Synthetic oligonucleotide
aacaaagggtataccaactctacaatctccttcagttgaggcgtgtgggtactctga

SEQ ID NO: 300189 - DNA, 55 bp, Artificial
  Synthetic oligonucleotide
aacaaagtggcagacgcttataacaactatttcaaagatggtaaatccgacggaa

SEQ ID NO: 300190 - DNA, 58 bp, Artificial
  Synthetic oligonucleotide
aacaaagttgctaaatgtataactctcgtgacagagagttcgcacgttatacacttac

SEQ ID NO: 300191 - DNA, 59 bp, Artificial
  Synthetic oligonucleotide
aacaaatagcatggatgactggcaacccagctatcccagtgggagaaatttacaaaaga

SEQ ID NO: 300192 - DNA, 55 bp, Artificial
  Synthetic oligonucleotide
aacaaatatccctgagcacaccactaatggaacatgacatcacttgaacatctaa

SEQ ID NO: 300193 - DNA, 60 bp, Artificial
  Synthetic oligonucleotide
aacaaatccttgcagtctgcagggttcactgctgggctcacctattctcagctcatgact

SEQ ID NO: 300194 - DNA, 51 bp, Artificial
  Synthetic oligonucleotide
aacaaatcgttgagccgcactcgcgcgtccaacttgcacgctgcgcagtcg

SEQ ID NO: 300195 - DNA, 60 bp, Artificial
  Synthetic oligonucleotide
aacaaatctatgaagatgacgaagcagacgttgtctatcaatcaataagcaccagaatct

SEQ ID NO: 300196 - DNA, 60 bp, Artificial
  Synthetic oligonucleotide
aacaaatctcccaccggtatagcctatgacattgagatgagatatgagccgacatacgca

SEQ ID NO: 300197 - DNA, 60 bp, Artificial
  Synthetic oligonucleotide
aacaaatgcagccaagcatacttccaactactctggagggtgctattgggtactcaccca

SEQ ID NO: 300198 - DNA, 55 bp, Artificial
  Synthetic oligonucleotide
aacaaatgctgttagtaatggtggcacacctttcaccttgggcaatcgagcaccg

SEQ ID NO: 300199 - DNA, 60 bp, Artificial
  Synthetic oligonucleotide
aacaaatggtccaagatgtgtcaaacgatgtgaggtatatatactctagaatgaacgcta

SEQ ID NO: 300200 - DNA, 52 bp, Artificial
  Synthetic oligonucleotide
aacaaatgtgaaactacaccgaccactacaccccacccggtttacaactgta

SEQ ID NO: 300201 - DNA, 57 bp, Artificial
  Synthetic oligonucleotide
aacaaattaggagaacatttccctaatagcacagtcataaaatttgaaccatcctca

SEQ ID NO: 300202 - DNA, 53 bp, Artificial
  Synthetic oligonucleotide
aacaaattatagcagcgactttagcaggtaagaatctggattactacgtcgag

SEQ ID NO: 300203 - DNA, 60 bp, Artificial
  Synthetic oligonucleotide
aacaaatttggctctgctataaggaacagaaattggcttgctgatacttctagagcagct

SEQ ID NO: 300204 - DNA, 51 bp, Artificial
  Synthetic oligonucleotide
aacaacaaacatatttgctcagagactagatgagatatatggactgcctgg

SEQ ID NO: 300205 - DNA, 60 bp, Artificial
  Synthetic oligonucleotide
aacaacaaactgttgtatgatctttcggcgatgcgcgctgatataggcgacatgagaaag

SEQ ID NO: 300206 - DNA, 55 bp, Artificial
  Synthetic oligonucleotide
aacaacaacatcctacctcaacacaaaactacctcactttacctacctcatttgc

SEQ ID NO: 300207 - DNA, 52 bp, Artificial
  Synthetic oligonucleotide
aacaacaagcaccaggttacaaccctgttcctagtaaaggtaacaactggat

SEQ ID NO: 300208 - DNA, 55 bp, Artificial
  Synthetic oligonucleotide
aacaacacaaatggagagcaaatactgataatttggggagtacatcatcccaatg

SEQ ID NO: 300209 - DNA, 56 bp, Artificial
  Synthetic oligonucleotide
aacaacacaagtggatacgatacttgagaagaatgtaaccgtcacacactcagttg

SEQ ID NO: 300210 - DNA, 57 bp, Artificial
  Synthetic oligonucleotide
aacaacacaggaggcagcaaaggcggtcgttgcctacggacaatggcctagttacaa

SEQ ID NO: 300211 - DNA, 55 bp, Artificial
  Synthetic oligonucleotide
aacaacacagtggcgagtcataaaagggtaagtatgtatgctgttcgcgtgggtg

SEQ ID NO: 300212 - DNA, 60 bp, Artificial
  Synthetic oligonucleotide
aacaacacctatgatcatacacaatatagagaagaggcactcctgaatagactcagcatc

SEQ ID NO: 300213 - DNA, 51 bp, Artificial
  Synthetic oligonucleotide
aacaacactacctcatccacaaaccctccccttttctacctcaaataaaac

SEQ ID NO: 300214 - DNA, 56 bp, Artificial
  Synthetic oligonucleotide
aacaacactcttgttacttgataagtctaaagcagtacttgttatattaggtctaa

SEQ ID NO: 300215 - DNA, 52 bp, Artificial
  Synthetic oligonucleotide
aacaacagaaggacagacgacgatcaaagaaaccccaacgaagaagaaaccc

SEQ ID NO: 300216 - DNA, 58 bp, Artificial
  Synthetic oligonucleotide
aacaacagaaggcggtaaacaaataataggacagctacaatcatctcttaagacagga

SEQ ID NO: 300217 - DNA, 55 bp, Artificial
  Synthetic oligonucleotide
aacaacagatgcagccgacaagatgtcgaaggttcttgaactcagtgaggaaacg

SEQ ID NO: 300218 - DNA, 56 bp, Artificial
  Synthetic oligonucleotide
aacaacagcatcgtctttagttggacactgtatgttgccaagtaactccttatcaa

SEQ ID NO: 300219 - DNA, 58 bp, Artificial
  Synthetic oligonucleotide
aacaacagccacctcgtaaaagaaatactcaacgaagaagtgctctcgcaccgatcgc

SEQ ID NO: 300220 - DNA, 60 bp, Artificial
  Synthetic oligonucleotide
aacaacagcgcttggagcccgactctgatactctgcagccctctccaattacgcaccaag

SEQ ID NO: 300221 - DNA, 55 bp, Artificial
  Synthetic oligonucleotide
aacaacaggagaacagccttggcatctaggacatggagtatccatagaatggaga

SEQ ID NO: 300222 - DNA, 53 bp, Artificial
  Synthetic oligonucleotide
aacaacaggtagggcaatctcacagtcaggagaacaaactctgctgatgattg

SEQ ID NO: 300223 - DNA, 51 bp, Artificial
  Synthetic oligonucleotide
aacaacagtttctggaaagtcccaccgcagtttcaggttccccaaacgacc

SEQ ID NO: 300224 - DNA, 55 bp, Artificial
  Synthetic oligonucleotide
aacaacatcctatggttagaacaaatgtcccagaagtttgctccattatacgctg

SEQ ID NO: 300225 - DNA, 60 bp, Artificial
  Synthetic oligonucleotide
aacaacatcgtcgacagaatgaatacaaatttcgagtctttgcaacacgaattcagtgaa

SEQ ID NO: 300226 - DNA, 57 bp, Artificial
  Synthetic oligonucleotide
aacaacatctgctttacaggcccattttaaggtgtgtaaactcacatcaaggtttca

SEQ ID NO: 300227 - DNA, 60 bp, Artificial
  Synthetic oligonucleotide
aacaacattcgcagcacctctatacaatgctgcagctttgcaaggaaaatgggttaatcc

SEQ ID NO: 300228 - DNA, 55 bp, Artificial
  Synthetic oligonucleotide
aacaacattgccttatataggtccgacctcgaattactaacgaacggttctgcgc

SEQ ID NO: 300229 - DNA, 49 bp, Artificial
  Synthetic oligonucleotide
aacaaccaagatttactgtaccgaagtaataagttgtttaacggggtcc

SEQ ID NO: 300230 - DNA, 60 bp, Artificial
  Synthetic oligonucleotide
aacaaccagcctgtagctttggtaggagcattgccatttgtgacagattcatcagttata

SEQ ID NO: 300231 - DNA, 57 bp, Artificial
  Synthetic oligonucleotide
aacaaccagtactcttgccgtagtgaatggcacggaggcgctctaaacgtatacctc

SEQ ID NO: 300232 - DNA, 59 bp, Artificial
  Synthetic oligonucleotide
aacaaccatgttgtgtataatcaccaggaagccgcgaaatacgagaatcatacggagaa

SEQ ID NO: 300233 - DNA, 54 bp, Artificial
  Synthetic oligonucleotide
aacaacccttgccacaatctccacgagtccccaatccctcacaaccaaaccagg

SEQ ID NO: 300234 - DNA, 53 bp, Artificial
  Synthetic oligonucleotide
aacaaccgacttgggattggatcccaggttggactggccttccgggccaaata

SEQ ID NO: 300235 - DNA, 59 bp, Artificial
  Synthetic oligonucleotide
aacaaccgtttaggcattgggctgtttgagccattgacataggcatttgggacaatata

SEQ ID NO: 300236 - DNA, 60 bp, Artificial
  Synthetic oligonucleotide
aacaacctcagcaaggctcatcaacaacagccttacctgacgatcttgttgacaaactca

SEQ ID NO: 300237 - DNA, 58 bp, Artificial
  Synthetic oligonucleotide
aacaacctgaccaagactgtttcagagaacccgctaccactcagctgttggtctgaag

SEQ ID NO: 300238 - DNA, 55 bp, Artificial
  Synthetic oligonucleotide
aacaacctggcatcccaactcaatggaagagatagtccgatggaccctccgagac

SEQ ID NO: 300239 - DNA, 55 bp, Artificial
  Synthetic oligonucleotide
aacaacgaggcggtggatcgttcggccttctactgtctagactatttcccctcag

SEQ ID NO: 300240 - DNA, 56 bp, Artificial
  Synthetic oligonucleotide
aacaacgagtataacaacggaagatatcaatcggactttcaaaccagtgataggac

SEQ ID NO: 300241 - DNA, 56 bp, Artificial
  Synthetic oligonucleotide
aacaacgcccactaatgtggtgactgactctgcgtttgttgcaaaaatgctactca

SEQ ID NO: 300242 - DNA, 54 bp, Artificial
  Synthetic oligonucleotide
aacaacgctttctactaggcgttacaactgttggtccaattttaaggatctaga

SEQ ID NO: 300243 - DNA, 54 bp, Artificial
  Synthetic oligonucleotide
aacaacggaagatatcaatcggactttcaaaccagtgataggaccaaggcccct

SEQ ID NO: 300244 - DNA, 55 bp, Artificial
  Synthetic oligonucleotide
aacaacggaaggtttgggaagctccactttgtatggacacaattcttgaaatgcc

SEQ ID NO: 300245 - DNA, 54 bp, Artificial
  Synthetic oligonucleotide
aacaacggggactacgcaagactttacatatggggagttcaccatccttcaacc

SEQ ID NO: 300246 - DNA, 50 bp, Artificial
  Synthetic oligonucleotide
aacaacgtaactcgaacttgtagcagacgggcttggtacgacttgagact

SEQ ID NO: 300247 - DNA, 56 bp, Artificial
  Synthetic oligonucleotide
aacaacgttgccatcttctgggagatgtccacctcttcgaagatccccctcggtcc

SEQ ID NO: 300248 - DNA, 60 bp, Artificial
  Synthetic oligonucleotide
aacaactaaacaatggcatacacaacgcaagctaccggaatcatgagacaattaatgaca

SEQ ID NO: 300249 - DNA, 56 bp, Artificial
  Synthetic oligonucleotide
aacaactaaccatggataaccggataactgacctactcacaagatctggctacgcg

SEQ ID NO: 300250 - DNA, 59 bp, Artificial
  Synthetic oligonucleotide
aacaactaagggttgaagcgtggctgctatgaagccacgtttatcatgtactatttgga

SEQ ID NO: 300251 - DNA, 58 bp, Artificial
  Synthetic oligonucleotide
aacaactacatacagttcaagagcaaacaccgtattgaaccagtatgcatgctcatac

SEQ ID NO: 300252 - DNA, 60 bp, Artificial
  Synthetic oligonucleotide
aacaactagctcactcagatcagagtctggtttggtctattcagtggagcttctcaatca

SEQ ID NO: 300253 - DNA, 52 bp, Artificial
  Synthetic oligonucleotide
aacaactcaactgctgctaaatggcagtctagcagagggagagataataatt

SEQ ID NO: 300254 - DNA, 58 bp, Artificial
  Synthetic oligonucleotide
aacaactcaccatacctccccatcagtttgtttgcaccctcgtcaacctctgactcca

SEQ ID NO: 300255 - DNA, 51 bp, Artificial
  Synthetic oligonucleotide
aacaactccttaggaaaccctccaatgattactagcatcactgttgaaagt

SEQ ID NO: 300256 - DNA, 56 bp, Artificial
  Synthetic oligonucleotide
aacaactgcctcgttgccctcacccgctccaaaaaaggcttcatgttcgttggcaa

SEQ ID NO: 300257 - DNA, 59 bp, Artificial
  Synthetic oligonucleotide
aacaactggggtggtgatgcatacgctctttctagacgtatgaattacatattcaaagt

SEQ ID NO: 300258 - DNA, 60 bp, Artificial
  Synthetic oligonucleotide
aacaactgtgacactgcatttcaagcaaaatggatgcagcatcccctcgaacaaccaagt

SEQ ID NO: 300259 - DNA, 55 bp, Artificial
  Synthetic oligonucleotide
aacaacttgttaatactggagctatttatccggatgaagcttctgctgtatatgc

SEQ ID NO: 300260 - DNA, 51 bp, Artificial
  Synthetic oligonucleotide
aacaactttaaaaaagagcgggaaccaatcaaattcaaacaccaacaacca

SEQ ID NO: 300261 - DNA, 53 bp, Artificial
  Synthetic oligonucleotide
aacaactttctttggccgtacgggaaaggtacaagactgatgaagatccgacg

SEQ ID NO: 300262 - DNA, 57 bp, Artificial
  Synthetic oligonucleotide
aacaagaaaattaagagagcaccttaatgggacaatgacaataagctttcgaccatc

SEQ ID NO: 300263 - DNA, 60 bp, Artificial
  Synthetic oligonucleotide
aacaagaaccgtgacaagaagtggaatgacatatttgaggtgacgtgggctatggcacat

SEQ ID NO: 300264 - DNA, 55 bp, Artificial
  Synthetic oligonucleotide
aacaagaagatggaagacgggtttctagatgtttggacttataatgccgaacttc

SEQ ID NO: 300265 - DNA, 54 bp, Artificial
  Synthetic oligonucleotide
aacaagaagtcgttgcaattcgataggaggtaacccgtggacaccctcgtagaa

SEQ ID NO: 300266 - DNA, 58 bp, Artificial
  Synthetic oligonucleotide
aacaagaccgttagctgagaatgtcactaagcaactgaagtcagacccatttcatgtg

SEQ ID NO: 300267 - DNA, 55 bp, Artificial
  Synthetic oligonucleotide
aacaagacctattgtgtgcttggtgggatgccctcaggctgttcgggaacatcca

SEQ ID NO: 300268 - DNA, 60 bp, Artificial
  Synthetic oligonucleotide
aacaagagacactcatgcaacagtcgggacagaagacctacaggggtggcccagaatata

SEQ ID NO: 300269 - DNA, 60 bp, Artificial
  Synthetic oligonucleotide
aacaagaggcggaaaaatatgggacaggtgtgcaatgggctgtacatgtgtgtggtcagg

SEQ ID NO: 300270 - DNA, 60 bp, Artificial
  Synthetic oligonucleotide
aacaagaggctcacagtcctcggaaaggatgcaggtgcacttattgaagacccagatgaa

SEQ ID NO: 300271 - DNA, 55 bp, Artificial
  Synthetic oligonucleotide
aacaagaggggtaataaagctggagttaaatccactgcttcagaagggtcatcag

SEQ ID NO: 300272 - DNA, 52 bp, Artificial
  Synthetic oligonucleotide
aacaagaggttataatttacaaggttccgcagtttctcagtgggtttatgcg

SEQ ID NO: 300273 - DNA, 54 bp, Artificial
  Synthetic oligonucleotide
aacaagagtgagcctgagagtaaaaggatgtctcttaaagagagaaaagcaatt

SEQ ID NO: 300274 - DNA, 55 bp, Artificial
  Synthetic oligonucleotide
aacaagagtgcccgcgctctcaagaacgacggttctgtccgcacgaaccgtacgg

SEQ ID NO: 300275 - DNA, 60 bp, Artificial
  Synthetic oligonucleotide
aacaagagtggataaactgactcaaggccgccagacttatgactggacattgaatcggaa

SEQ ID NO: 300276 - DNA, 52 bp, Artificial
  Synthetic oligonucleotide
aacaagatcgagtggtcgaatcttcctgatgggggtgcatgatgcccggttg

SEQ ID NO: 300277 - DNA, 57 bp, Artificial
  Synthetic oligonucleotide
aacaagcaacaccaacataaccaaagtaactgttggatgtgtggaaacaaacgctca

SEQ ID NO: 300278 - DNA, 56 bp, Artificial
  Synthetic oligonucleotide
aacaagcaacttgttgaaatcatactctaaaagccgttccccattcaaatgcttgt

SEQ ID NO: 300279 - DNA, 56 bp, Artificial
  Synthetic oligonucleotide
aacaagcaatcgtgttgcagcgcattatcgaataggtggcacttttgtcgaattca

SEQ ID NO: 300280 - DNA, 60 bp, Artificial
  Synthetic oligonucleotide
aacaagcactcaaacggaacaatacacgacaggactgctttcagagggctgatatcaact

SEQ ID NO: 300281 - DNA, 60 bp, Artificial
  Synthetic oligonucleotide
aacaagcactcaaatgggacaatacacgacaggactgcattcagaggattaatatcaact

SEQ ID NO: 300282 - DNA, 51 bp, Artificial
  Synthetic oligonucleotide
aacaagcactgcctcgaaattgatctgtctaagtttgataaatctcagggt

SEQ ID NO: 300283 - DNA, 55 bp, Artificial
  Synthetic oligonucleotide
aacaagcagataggatccattatgacttcaataggaattagaatggagaagctcc

SEQ ID NO: 300284 - DNA, 60 bp, Artificial
  Synthetic oligonucleotide
aacaagcagtatgaaatcattgatcatgaattcagtgagatcgaagccagactcaatatg

SEQ ID NO: 300285 - DNA, 59 bp, Artificial
  Synthetic oligonucleotide
aacaagccaaagatgaaactctttattgggctaccatcgaagctagactacaatgcact

SEQ ID NO: 300286 - DNA, 55 bp, Artificial
  Synthetic oligonucleotide
aacaagccacagtactcctgggtaactccaagcgcctgggacaatcttcaaactt

SEQ ID NO: 300287 - DNA, 56 bp, Artificial
  Synthetic oligonucleotide
aacaagcctgattgggagatcactcgctgaaaaattgaacagctcagtatactcac

SEQ ID NO: 300288 - DNA, 60 bp, Artificial
  Synthetic oligonucleotide
aacaagcgacgatcatggacgtacaggcccatgtatcgaaagcccaagatgtacagaatg

SEQ ID NO: 300289 - DNA, 55 bp, Artificial
  Synthetic oligonucleotide
aacaagcgatcgaatactgcaagaaagaaggagattttcacgaagtcggaacccc

SEQ ID NO: 300290 - DNA, 55 bp, Artificial
  Synthetic oligonucleotide
aacaagctacatcgaatctctcggcacagcctttggcgcagggttcacccacaca

SEQ ID NO: 300291 - DNA, 60 bp, Artificial
  Synthetic oligonucleotide
aacaagctaccatcatatacacaccatgtagtcaatagggcatcatactgttcaggcgtt

SEQ ID NO: 300292 - DNA, 55 bp, Artificial
  Synthetic oligonucleotide
aacaagctagaggcaaaacgtttgactgtgtaaccttttactgtgctgagagcac

SEQ ID NO: 300293 - DNA, 60 bp, Artificial
  Synthetic oligonucleotide
aacaagctcgggaattaagtcatgctgtccgcaggcttatttcgcactcacttgtcaacc

SEQ ID NO: 300294 - DNA, 53 bp, Artificial
  Synthetic oligonucleotide
aacaagctgactcatagactgttaacgcctacgatatttcttaagtgactaag

SEQ ID NO: 300295 - DNA, 54 bp, Artificial
  Synthetic oligonucleotide
aacaaggaagttttctatcactaccaacagacaatagaattgtactaaaagact

SEQ ID NO: 300296 - DNA, 58 bp, Artificial
  Synthetic oligonucleotide
aacaaggacactcatcgtcaaatggttgaagaccccaaattcctgccgctcctgacgc

SEQ ID NO: 300297 - DNA, 53 bp, Artificial
  Synthetic oligonucleotide
aacaaggatacttgaagcatacgagctattaaccttgtcgaagtattcctcta

SEQ ID NO: 300298 - DNA, 54 bp, Artificial
  Synthetic oligonucleotide
aacaaggctgttgccgggttcaaatcccttgaggatttttaggcggcccactca

SEQ ID NO: 300299 - DNA, 57 bp, Artificial
  Synthetic oligonucleotide
aacaagggaataacgggcacgtggtgatacaatacatgtatgtaccaccgggtgctc

SEQ ID NO: 300300 - DNA, 59 bp, Artificial
  Synthetic oligonucleotide
aacaagggccagaccaatggacatatcaaatataccaagagccatataagaatctaaaa

SEQ ID NO: 300301 - DNA, 55 bp, Artificial
  Synthetic oligonucleotide
aacaagggtctcgcagatgctaaaacagaccctcgtctggcgatccgaggcccgt

SEQ ID NO: 300302 - DNA, 55 bp, Artificial
  Synthetic oligonucleotide
aacaaggtctactgagtctatagaatctctcctaagatcagtggaggttaaaagc

SEQ ID NO: 300303 - DNA, 56 bp, Artificial
  Synthetic oligonucleotide
aacaaggttccaggagaaccttcgcaagtcactaaatccatatgagcctaaacgag

SEQ ID NO: 300304 - DNA, 56 bp, Artificial
  Synthetic oligonucleotide
aacaaggttgtctccatctgtgtcgggtcggctaaataccaagcccctgtagccag

SEQ ID NO: 300305 - DNA, 55 bp, Artificial
  Synthetic oligonucleotide
aacaagtacttggaggagcaccccagtgctggaaaggatcctaagaaaactggag

SEQ ID NO: 300306 - DNA, 60 bp, Artificial
  Synthetic oligonucleotide
aacaagtatgcatagcatggtccagctcaagttgtcacgatggaagagcatggttacatg

SEQ ID NO: 300307 - DNA, 60 bp, Artificial
  Synthetic oligonucleotide
aacaagtcaggttataaaactgagatttattcagtttcatcagatgcatcaaaatggtct

SEQ ID NO: 300308 - DNA, 53 bp, Artificial
  Synthetic oligonucleotide
aacaagtgagaacttgaacttgacagcatcaatggaaatagcaagattgacgc

SEQ ID NO: 300309 - DNA, 55 bp, Artificial
  Synthetic oligonucleotide
aacaagtgcaattgtcaatgacaaatttgaggttgacctgcagcaagaatggtgg

SEQ ID NO: 300310 - DNA, 60 bp, Artificial
  Synthetic oligonucleotide
aacaagtggtcaactatctccgagctgtgcgattacatcatgactaacgtcgacttgcat

SEQ ID NO: 300311 - DNA, 51 bp, Artificial
  Synthetic oligonucleotide
aacaagtggtcttttccaaacgaccaactagacctcgccagatatagaggc

SEQ ID NO: 300312 - DNA, 60 bp, Artificial
  Synthetic oligonucleotide
aacaagtgtgacgttatgaactagacggtaagcatctacacttacgtggtatagatgctg

SEQ ID NO: 300313 - DNA, 56 bp, Artificial
  Synthetic oligonucleotide
aacaagttagataagacacgttttacatcgctttatttatctacaagctcataaaa

SEQ ID NO: 300314 - DNA, 60 bp, Artificial
  Synthetic oligonucleotide
aacaagttatatgagagagtgagacggcaattgagagagaatgctgaagaggatggcact

SEQ ID NO: 300315 - DNA, 55 bp, Artificial
  Synthetic oligonucleotide
aacaagttgataactgtaggaagctcgaaatatcagcaatcgttcaccccgagtc

SEQ ID NO: 300316 - DNA, 59 bp, Artificial
  Synthetic oligonucleotide
aacaagttgatggatgtggtctactctatcgcatcgcatccaatagatgaagtcaacat

SEQ ID NO: 300317 - DNA, 55 bp, Artificial
  Synthetic oligonucleotide
aacaagttggggctgtaacccatcagactgccctggagtaggtacaggctgtaca

SEQ ID NO: 300318 - DNA, 53 bp, Artificial
  Synthetic oligonucleotide
aacaagtttagacctgaccccttagccgttctgtggcttttctgcttggggat

SEQ ID NO: 300319 - DNA, 56 bp, Artificial
  Synthetic oligonucleotide
aacaagtttggaaggcgtgcgtggataacgcacattctgtacggttaagccctcta

SEQ ID NO: 300320 - DNA, 56 bp, Artificial
  Synthetic oligonucleotide
aacaataacaaccccggtggtaccaaactgcagtgacaccataattacatataaca

SEQ ID NO: 300321 - DNA, 52 bp, Artificial
  Synthetic oligonucleotide
aacaataacttcagttggtaaatacgaatgtgggggagaggggtacgtcgag

SEQ ID NO: 300322 - DNA, 53 bp, Artificial
  Synthetic oligonucleotide
aacaataagaaagtattagttcccaaggtatcaggcttacagtatagggtctt

SEQ ID NO: 300323 - DNA, 60 bp, Artificial
  Synthetic oligonucleotide
aacaataagcacagcttcaagatccggatacgagatgctaaaggtgccaaatgcattgac

SEQ ID NO: 300324 - DNA, 52 bp, Artificial
  Synthetic oligonucleotide
aacaataatagcacaccttaatgcacctatacaaattgagtgtacaagaccc

SEQ ID NO: 300325 - DNA, 50 bp, Artificial
  Synthetic oligonucleotide
aacaatacaacccgataccgaactatccgcagttaactcaatcttgggta

SEQ ID NO: 300326 - DNA, 54 bp, Artificial
  Synthetic oligonucleotide
aacaatacaagcggagaacaaatgctaataatttggggagtgcaccatcctaat

SEQ ID NO: 300327 - DNA, 51 bp, Artificial
  Synthetic oligonucleotide
aacaatacacgcagggtcaatttatgaataccccatggagaaacccagcaa

SEQ ID NO: 300328 - DNA, 60 bp, Artificial
  Synthetic oligonucleotide
aacaatacagaacctctctgcaatgtatccggatttgcaatagtttccaaggacaatgga

SEQ ID NO: 300329 - DNA, 60 bp, Artificial
  Synthetic oligonucleotide
aacaatactccattatgcacaacagaagttatgtacactgcactttcccgtgcagtacat

SEQ ID NO: 300330 - DNA, 60 bp, Artificial
  Synthetic oligonucleotide
aacaatagctcctcaggccagcacatgcgcacgtggtacatgagagattcatgtgataag

SEQ ID NO: 300331 - DNA, 54 bp, Artificial
  Synthetic oligonucleotide
aacaataggaaaagcagcggaacgttttgcggagagtgaaatcggttcggccgc

SEQ ID NO: 300332 - DNA, 58 bp, Artificial
  Synthetic oligonucleotide
aacaatagtgacttcgaagggtgaagtggtcagagggcatacaccacattgggcaact

SEQ ID NO: 300333 - DNA, 58 bp, Artificial
  Synthetic oligonucleotide
aacaatatacgcgtaaggaaatatgtgaaacacaggagggatcggagtatgtcctcca

SEQ ID NO: 300334 - DNA, 59 bp, Artificial
  Synthetic oligonucleotide
aacaatatagcagggttccctgaatatgaaggtacactacgacaaactggaagagcaca

SEQ ID NO: 300335 - DNA, 58 bp, Artificial
  Synthetic oligonucleotide
aacaatatatgtaatggactgtttgagtcagatatgccggaaatggtggaaaacgacg

SEQ ID NO: 300336 - DNA, 55 bp, Artificial
  Synthetic oligonucleotide
aacaatatcaagggagctgaaccagatgaaatgcagcgtgatctgtaccatctag

SEQ ID NO: 300337 - DNA, 60 bp, Artificial
  Synthetic oligonucleotide
aacaatatcatatagcagccgatcaggattcgaggtgatcaaagtctcaaatggttgggt

SEQ ID NO: 300338 - DNA, 58 bp, Artificial
  Synthetic oligonucleotide
aacaatatcatattttcggtgggctctactatctatcacgaaaagagggacctactgc

SEQ ID NO: 300339 - DNA, 55 bp, Artificial
  Synthetic oligonucleotide
aacaatattgttggactaggcttcctcaagggttcctcaatagtccagctttatt

SEQ ID NO: 300340 - DNA, 55 bp, Artificial
  Synthetic oligonucleotide
aacaatcaagaaagcatggagcaatgcgtgggagctttgggaaacctcaccttgg

SEQ ID NO: 300341 - DNA, 60 bp, Artificial
  Synthetic oligonucleotide
aacaatcatgagagttcttgattcaatatcagtactgggggtccagatcatgccgcgtac

SEQ ID NO: 300342 - DNA, 60 bp, Artificial
  Synthetic oligonucleotide
aacaatcatggaatttacgcgtgatttggggtgcgtgcaaggaagtgttatatgcagcca

SEQ ID NO: 300343 - DNA, 59 bp, Artificial
  Synthetic oligonucleotide
aacaatcctctcaaatcagggtccattcaaaggtttcaatgaagtctccacagcattta

SEQ ID NO: 300344 - DNA, 60 bp, Artificial
  Synthetic oligonucleotide
aacaatctctgaggttggtcaatgctgctacacccctcgtgatgacggccaaccaagagg

SEQ ID NO: 300345 - DNA, 60 bp, Artificial
  Synthetic oligonucleotide
aacaatctgtgtggtaagcacctccgcagttgatatggaaaatttgcctgcaggcatctg

SEQ ID NO: 300346 - DNA, 54 bp, Artificial
  Synthetic oligonucleotide
aacaatctgttgggtaaagcggcaactattgatcaggcattgaatggaaaattt

SEQ ID NO: 300347 - DNA, 59 bp, Artificial
  Synthetic oligonucleotide
aacaatcttgtcgcgaggatcctattctgcaatgccaatctgaccctactaaatcgccg

SEQ ID NO: 300348 - DNA, 60 bp, Artificial
  Synthetic oligonucleotide
aacaatgagagagggaatccaggagtgaaaggctgggcctttgacaatggagatgacgtg

SEQ ID NO: 300349 - DNA, 56 bp, Artificial
  Synthetic oligonucleotide
aacaatgagtcttaagatcgtacattttagcgcagctggggctaacttttggaaag

SEQ ID NO: 300350 - DNA, 53 bp, Artificial
  Synthetic oligonucleotide
aacaatgatggaaattttaaaaccatagtggcatctcggctcctagagtttat

SEQ ID NO: 300351 - DNA, 57 bp, Artificial
  Synthetic oligonucleotide
aacaatgcactccctttaatctggaggggcctaattgatttaactggatactatgag

SEQ ID NO: 300352 - DNA, 52 bp, Artificial
  Synthetic oligonucleotide
aacaatgcagaaacacggtcactggcctcatttatgggcaccatttgttgac

SEQ ID NO: 300353 - DNA, 60 bp, Artificial
  Synthetic oligonucleotide
aacaatgcgtgagaagagaataaggaatgtttccattccttagatttatcatcagccact

SEQ ID NO: 300354 - DNA, 60 bp, Artificial
  Synthetic oligonucleotide
aacaatgctacgctaagtgttgcaacctttttgaggcttgctttaacagtgcgtcataca

SEQ ID NO: 300355 - DNA, 59 bp, Artificial
  Synthetic oligonucleotide
aacaatggaatctagcactcttgaactaagaagcaggtactgggctataaggaccagga

SEQ ID NO: 300356 - DNA, 60 bp, Artificial
  Synthetic oligonucleotide
aacaatggagacgattgtgtgctgttcttcgaagctgaggaagttgacagggtgcgcgaa

SEQ ID NO: 300357 - DNA, 60 bp, Artificial
  Synthetic oligonucleotide
aacaatggagaggaagcaactgctggtcttacccacctgatgatatggcattccaatcta

SEQ ID NO: 300358 - DNA, 55 bp, Artificial
  Synthetic oligonucleotide
aacaatggagtaaaaggattctcatatctagatggtgacaatacgtggctaggac

SEQ ID NO: 300359 - DNA, 57 bp, Artificial
  Synthetic oligonucleotide
aacaatgggaggcaaatggtcaaaaggttgtataagtggatggcctgctgtaaggga

SEQ ID NO: 300360 - DNA, 58 bp, Artificial
  Synthetic oligonucleotide
aacaatgggggcccaaggtgagatgaagctgtagtctcactgaaaggactagaggtta

SEQ ID NO: 300361 - DNA, 59 bp, Artificial
  Synthetic oligonucleotide
aacaatgggtggcttaagaaatttacagagatgactaatgcatgtaaagggatggagtg

SEQ ID NO: 300362 - DNA, 60 bp, Artificial
  Synthetic oligonucleotide
aacaatgtgcctcctcatgcagattgccatcctaataactactgtaacattgcatttcaa

SEQ ID NO: 300363 - DNA, 58 bp, Artificial
  Synthetic oligonucleotide
aacaatgtgtattccattggctcgtaaattcacccaatctatctattcaacccaacca

SEQ ID NO: 300364 - DNA, 53 bp, Artificial
  Synthetic oligonucleotide
aacaatgttacgagaagtgaattatacatgatggtcgaatgtcatgttatgtt

SEQ ID NO: 300365 - DNA, 56 bp, Artificial
  Synthetic oligonucleotide
aacaatgttctcaataattgaggaagtgcagaaaagccttagttcattatcgataa

SEQ ID NO: 300366 - DNA, 60 bp, Artificial
  Synthetic oligonucleotide
aacaattatgagagttcttgattcaatatcagtattgggagtcaaaatcatgccgcgcgc

SEQ ID NO: 300367 - DNA, 58 bp, Artificial
  Synthetic oligonucleotide
aacaattatgttgtttacaatcaacaggaagcaggaaaatacgagaatcataccgaga

SEQ ID NO: 300368 - DNA, 58 bp, Artificial
  Synthetic oligonucleotide
aacaattcaatctgaaacacaattcttaacgggtatcaattcacaagccgctaatgat

SEQ ID NO: 300369 - DNA, 60 bp, Artificial
  Synthetic oligonucleotide
aacaattcagccacaattattgttccttatgtgaatgcagttcctatggattcaatgcta

SEQ ID NO: 300370 - DNA, 56 bp, Artificial
  Synthetic oligonucleotide
aacaattctcccaacgtacacaatacagaactcgcttcgtccactagtgaaaactc

SEQ ID NO: 300371 - DNA, 51 bp, Artificial
  Synthetic oligonucleotide
aacaattctgcaacaatcatagtaccatatgtaaatgcagtgcccatggac

SEQ ID NO: 300372 - DNA, 55 bp, Artificial
  Synthetic oligonucleotide
aacaattgcaaacacacatatactatcaatatacgggagtccacaaagacggatg

SEQ ID NO: 300373 - DNA, 50 bp, Artificial
  Synthetic oligonucleotide
aacaattggagtcgttacccgcaagatgcctacgcaaaacctagtagcat

SEQ ID NO: 300374 - DNA, 56 bp, Artificial
  Synthetic oligonucleotide
aacaattggcagttacctccgacccgctagacatcttggacgaatacttgggcggc

SEQ ID NO: 300375 - DNA, 55 bp, Artificial
  Synthetic oligonucleotide
aacaattgtgttaatgcaaatcggaaaagacaaatggttatgtagggtaagaaca

SEQ ID NO: 300376 - DNA, 58 bp, Artificial
  Synthetic oligonucleotide
aacaatttagaagaccaatacagatacctcagctcggtagcaacccgctgtgcaaagc

SEQ ID NO: 300377 - DNA, 59 bp, Artificial
  Synthetic oligonucleotide
aacacaaacttcgtaccactgtaaatcctacaagctggaggcatgtacagctgtctagt

SEQ ID NO: 300378 - DNA, 60 bp, Artificial
  Synthetic oligonucleotide
aacacaaagtcaatgacggctccgtcttcggatcctggaaagcctgccagactctagcac

SEQ ID NO: 300379 - DNA, 52 bp, Artificial
  Synthetic oligonucleotide
aacacaaatagcaccacccacacaagactctgtactgttagagcccatgaca

SEQ ID NO: 300380 - DNA, 55 bp, Artificial
  Synthetic oligonucleotide
aacacaacaagagcagtggaactagaccggttaaggataccggtgtcagcccaaa

SEQ ID NO: 300381 - DNA, 55 bp, Artificial
  Synthetic oligonucleotide
aacacaacacatgtgtggttactactgacaatggcaaattcactggattgggaat

SEQ ID NO: 300382 - DNA, 51 bp, Artificial
  Synthetic oligonucleotide
aacacaagaggagttgaagcaacacatagcaaggttcacaggggcaaaggg

SEQ ID NO: 300383 - DNA, 57 bp, Artificial
  Synthetic oligonucleotide
aacacaagagtcttcgtgtgtttgcataaagggagagtgttattgggtaatgacgga

SEQ ID NO: 300384 - DNA, 58 bp, Artificial
  Synthetic oligonucleotide
aacacaagtgtcccaatattacggaatacctatggctgagcgccagaaacaacggatg

SEQ ID NO: 300385 - DNA, 60 bp, Artificial
  Synthetic oligonucleotide
aacacaatatatgggcaacgcaggcatgtgtgcctaccgacccaagcccaatagagtttc

SEQ ID NO: 300386 - DNA, 50 bp, Artificial
  Synthetic oligonucleotide
aacacaatccagaaggatacgatcgcctcctccatcattgccgccctcaa

SEQ ID NO: 300387 - DNA, 55 bp, Artificial
  Synthetic oligonucleotide
aacacacaacgtgcaccagtacgttttcgaggttcttaaaaccatgtctgttcag

SEQ ID NO: 300388 - DNA, 51 bp, Artificial
  Synthetic oligonucleotide
aacacacacgggaactgttggctcaactcgttgttgcagctctttcgatac

SEQ ID NO: 300389 - DNA, 57 bp, Artificial
  Synthetic oligonucleotide
aacacacactgtggtgaacgggttgtccatccagcttacggctaaaatggtcagtcg

SEQ ID NO: 300390 - DNA, 58 bp, Artificial
  Synthetic oligonucleotide
aacacacagtgtgtcactgtacacattgtggtgaacgggttgtccatccagcttacgg

SEQ ID NO: 300391 - DNA, 55 bp, Artificial
  Synthetic oligonucleotide
aacacaccaatacaaacatgtttagaacgtataggatgtcggggtagaccatttg

SEQ ID NO: 300392 - DNA, 54 bp, Artificial
  Synthetic oligonucleotide
aacacacccggtagtaatcagtacctgacatctgacaatttccaatcaccatgt

SEQ ID NO: 300393 - DNA, 53 bp, Artificial
  Synthetic oligonucleotide
aacacacctactactatcaatggtgtcaaccccggtgatgaacgagtccaaac

SEQ ID NO: 300394 - DNA, 50 bp, Artificial
  Synthetic oligonucleotide
aacacactaaagcagaacaatgatcatatatgtataattggccgcgcagc

SEQ ID NO: 300395 - DNA, 60 bp, Artificial
  Synthetic oligonucleotide
aacacactcacagagaggggtgtagaagttgtcaatgcaaccgaaacagtggagcagaca

SEQ ID NO: 300396 - DNA, 58 bp, Artificial
  Synthetic oligonucleotide
aacacagaaactggagcaccccaacttaacccaattgatggaccattgcctgaggata

SEQ ID NO: 300397 - DNA, 54 bp, Artificial
  Synthetic oligonucleotide
aacacagaccaatagggagcgacaaaccagtcgtgaaaggtcaagcacttctgt

SEQ ID NO: 300398 - DNA, 55 bp, Artificial
  Synthetic oligonucleotide
aacacagactgggccagagctagacaagatacacaaggttacctgccacaaccta

SEQ ID NO: 300399 - DNA, 59 bp, Artificial
  Synthetic oligonucleotide
aacacagagcacaaggcgtacctagataagaacaaagcatatcctgttgaatgttgggt

SEQ ID NO: 300400 - DNA, 51 bp, Artificial
  Synthetic oligonucleotide
aacacagagcctctctgtgatgtatcaggatttgctattgtttctaaggac

SEQ ID NO: 300401 - DNA, 60 bp, Artificial
  Synthetic oligonucleotide
aacacagatcgttggttagctacgatattaatagagccgaatgtatcatcacagcaacgg

SEQ ID NO: 300402 - DNA, 60 bp, Artificial
  Synthetic oligonucleotide
aacacagcccagctcgccactcgccgtctcgagaacatcaagtatgttcccaagattgct

SEQ ID NO: 300403 - DNA, 53 bp, Artificial
  Synthetic oligonucleotide
aacacagcccccacaagctcaaatttctgggaaaaactggaagctaccccgta

SEQ ID NO: 300404 - DNA, 54 bp, Artificial
  Synthetic oligonucleotide
aacacagcgaagaaaatctatagtaccatagggaaggcggcggaaaggttcgcg

SEQ ID NO: 300405 - DNA, 55 bp, Artificial
  Synthetic oligonucleotide
aacacagctgccactaatgctgattgtgcctggctggaagcacaagaggaggacg

SEQ ID NO: 300406 - DNA, 55 bp, Artificial
  Synthetic oligonucleotide
aacacagctgtttcagcagccgagcttgtgactccaccgccattcaactggctgg

SEQ ID NO: 300407 - DNA, 59 bp, Artificial
  Synthetic oligonucleotide
aacacaggcaactggcggctacaataatgcagaaggcataccacgctaaagtggtaaaa

SEQ ID NO: 300408 - DNA, 55 bp, Artificial
  Synthetic oligonucleotide
aacacaggctggaagccgcctgcaactggacgcggggcgaacgttgtgatctgga

SEQ ID NO: 300409 - DNA, 58 bp, Artificial
  Synthetic oligonucleotide
aacacagtagattatccggctatacttcacccgatagactatgaatttaatcaatact

SEQ ID NO: 300410 - DNA, 50 bp, Artificial
  Synthetic oligonucleotide
aacacagttactatgttaacctctaatgactcctggtacagaggaacagt

SEQ ID NO: 300411 - DNA, 60 bp, Artificial
  Synthetic oligonucleotide
aacacagttcaagcactgacaacaggggaggttagagcttccatacgcctcacattggat

SEQ ID NO: 300412 - DNA, 59 bp, Artificial
  Synthetic oligonucleotide
aacacagttgattgatgtttcaagtaccgtgaatactatatcgacacaaacttctacta

SEQ ID NO: 300413 - DNA, 60 bp, Artificial
  Synthetic oligonucleotide
aacacatacatatgaatggcttgatagcagaaactatagtcatctgcgttataattcaag

SEQ ID NO: 300414 - DNA, 52 bp, Artificial
  Synthetic oligonucleotide
aacacataccgtggctggctagcaacggtcaccgctctgattgaggtgtact

SEQ ID NO: 300415 - DNA, 52 bp, Artificial
  Synthetic oligonucleotide
aacacatcattgaggtgacgtgtaagcaggactccaacgagccatggaatta

SEQ ID NO: 300416 - DNA, 58 bp, Artificial
  Synthetic oligonucleotide
aacacatcgaatagagcgcgcactaattcgacttcagacctagtactatcgacgtttt

SEQ ID NO: 300417 - DNA, 60 bp, Artificial
  Synthetic oligonucleotide
aacacatctggttctagtaagtccacatcacagctttgaggttcaattcctcttgctccc

SEQ ID NO: 300418 - DNA, 55 bp, Artificial
  Synthetic oligonucleotide
aacacatgaaccaatgatagaagaaagagttgttagcaccactgatgcagtcgac

SEQ ID NO: 300419 - DNA, 60 bp, Artificial
  Synthetic oligonucleotide
aacacatgctgaaggtcatgagaggagaatgacctctgacaacaacgagtataggaggcc

SEQ ID NO: 300420 - DNA, 60 bp, Artificial
  Synthetic oligonucleotide
aacacatgctgatcctggtaaggaaatacagattgatggcattagtacaaaggttgaaga

SEQ ID NO: 300421 - DNA, 59 bp, Artificial
  Synthetic oligonucleotide
aacacatggttagggagaaccattagcccgagatcaaggagtggattcgaaatgctgaa

SEQ ID NO: 300422 - DNA, 58 bp, Artificial
  Synthetic oligonucleotide
aacacatgtgtcacccagacagtcgactttagtttggatcccaccttcaccattgaaa

SEQ ID NO: 300423 - DNA, 54 bp, Artificial
  Synthetic oligonucleotide
aacacattgatcctttacgctttttcaaacactacctgctgccaaaaaatcggt

SEQ ID NO: 300424 - DNA, 55 bp, Artificial
  Synthetic oligonucleotide
aacacattgcaagcaaggcaacagacagtgtcagcactggaagacaaacttgcag

SEQ ID NO: 300425 - DNA, 60 bp, Artificial
  Synthetic oligonucleotide
aacacattggagcacacaagcagatatgtgtgcactggaattctgacagataccagcaga

SEQ ID NO: 300426 - DNA, 58 bp, Artificial
  Synthetic oligonucleotide
aacaccaagtgtcaaactccaatgggggcgataaactctagtatgccattccacaaca

SEQ ID NO: 300427 - DNA, 55 bp, Artificial
  Synthetic oligonucleotide
aacaccacatgtcatgtgttaggttcttccacaataccatattacctggcaatat

SEQ ID NO: 300428 - DNA, 55 bp, Artificial
  Synthetic oligonucleotide
aacaccacgcccacttaggctgccatgtgggcctccctgttttcaacggtccaaa

SEQ ID NO: 300429 - DNA, 56 bp, Artificial
  Synthetic oligonucleotide
aacaccacgccctctcaaattacctgatggacccccttgctctcagcggtcaaaat

SEQ ID NO: 300430 - DNA, 55 bp, Artificial
  Synthetic oligonucleotide
aacaccactctgctcaacggaagtgcgttccaactaatatgcccttacggatggg

SEQ ID NO: 300431 - DNA, 60 bp, Artificial
  Synthetic oligonucleotide
aacaccactgattcttaggaattagcctttcaaatatcccaactgcaatgagcacgatag

SEQ ID NO: 300432 - DNA, 59 bp, Artificial
  Synthetic oligonucleotide
aacaccagaattgaaccacattctattagaaaatgaggtaaagttgaccatcatgacag

SEQ ID NO: 300433 - DNA, 59 bp, Artificial
  Synthetic oligonucleotide
aacaccagcttgttacaccctgtgagcctgcgtgggaatggatgaccctgagggagaag

SEQ ID NO: 300434 - DNA, 60 bp, Artificial
  Synthetic oligonucleotide
aacaccagtgtacatgctctctagtccctacaaccctcgattcatagattttacatctat

SEQ ID NO: 300435 - DNA, 59 bp, Artificial
  Synthetic oligonucleotide
aacaccataaaacggtcatgttaccaggtcaaatcgaagcatttgaacatctgattcga

SEQ ID NO: 300436 - DNA, 55 bp, Artificial
  Synthetic oligonucleotide
aacaccatcaatgaaaaagaaggtggtgtttactaaggttaggatgtccgaggca

SEQ ID NO: 300437 - DNA, 60 bp, Artificial
  Synthetic oligonucleotide
aacaccatgcacctgcggtagctcggacctttacttggtcacgaggcacgctgatgtcat

SEQ ID NO: 300438 - DNA, 54 bp, Artificial
  Synthetic oligonucleotide
aacaccatgtacgcgatagacgcaccccctgaactttaaacactcgaaacttaa

SEQ ID NO: 300439 - DNA, 55 bp, Artificial
  Synthetic oligonucleotide
aacaccatgttgggttctgtgacccggatgtttacacagtggcgtgggtccatag

SEQ ID NO: 300440 - DNA, 55 bp, Artificial
  Synthetic oligonucleotide
aacacccaagatcatgtgcgttcactgtgtctcttggcttggcacgctggaaggg

SEQ ID NO: 300441 - DNA, 48 bp, Artificial
  Synthetic oligonucleotide
aacacccaaggggccaaccgtataatattaccggttggccccgccccc

SEQ ID NO: 300442 - DNA, 53 bp, Artificial
  Synthetic oligonucleotide
aacacccacctagccacgggagaacccatcgtgcaaaccgttggcatccgacg

SEQ ID NO: 300443 - DNA, 56 bp, Artificial
  Synthetic oligonucleotide
aacaccccagggagccataaacagtagcctcccttttcagaacatacacccagtca

SEQ ID NO: 300444 - DNA, 59 bp, Artificial
  Synthetic oligonucleotide
aacaccccgcttattgcaacactgatttaggatcaccattggaactacgagactgcaaa

SEQ ID NO: 300445 - DNA, 54 bp, Artificial
  Synthetic oligonucleotide
aacacccctggctgaattggtaaccgctccttggtgtggggcgagttgggtgag

SEQ ID NO: 300446 - DNA, 56 bp, Artificial
  Synthetic oligonucleotide
aacacccgataccaggtccactgccagcaggacaacttagggaccccagagggtca

SEQ ID NO: 300447 - DNA, 56 bp, Artificial
  Synthetic oligonucleotide
aacacccgccaacaccgcaatcacaaagtaaacaatagatccgaaacgtcacattc

SEQ ID NO: 300448 - DNA, 52 bp, Artificial
  Synthetic oligonucleotide
aacacccgctccgccggtgacattaaccgtcaggaccatcccacgtaccggg

SEQ ID NO: 300449 - DNA, 55 bp, Artificial
  Synthetic oligonucleotide
aacaccctttcagggcgtgagattcatcaaaatcgtgattacgtggtcgagcaaa

SEQ ID NO: 300450 - DNA, 58 bp, Artificial
  Synthetic oligonucleotide
aacaccgatttgaaataatcgaagggagagatcgtactatggcctggacagtggtgaa

SEQ ID NO: 300451 - DNA, 53 bp, Artificial
  Synthetic oligonucleotide
aacaccggaaacacacaaccaaggaaaggcttccgatgctagatcgagattct

SEQ ID NO: 300452 - DNA, 54 bp, Artificial
  Synthetic oligonucleotide
aacaccggctttatagcagggcttatctattaccacaaattcaactcctccggt

SEQ ID NO: 300453 - DNA, 55 bp, Artificial
  Synthetic oligonucleotide
aacaccgggagcggtcacaagagagtaggtacaacgaaggaggtccttacagcaa

SEQ ID NO: 300454 - DNA, 54 bp, Artificial
  Synthetic oligonucleotide
aacaccgtattgaaccagtatgtttgttagtacacggcagcccaggtacgggga

SEQ ID NO: 300455 - DNA, 58 bp, Artificial
  Synthetic oligonucleotide
aacacctaacgttgacattaatgtttccctggccccctgtgatgttgagtatcatgga

SEQ ID NO: 300456 - DNA, 55 bp, Artificial
  Synthetic oligonucleotide
aacacctagcatatccaggtacctaaggacctgggttctgaaaactctcaagaaa

SEQ ID NO: 300457 - DNA, 60 bp, Artificial
  Synthetic oligonucleotide
aacacctatcagtggatcatcagaaattgggagactgtgaagattcaatggtctaaggac

SEQ ID NO: 300458 - DNA, 55 bp, Artificial
  Synthetic oligonucleotide
aacacctcaagacaaccaattgacctacgttgtcatagccatcctcacagtggtg

SEQ ID NO: 300459 - DNA, 56 bp, Artificial
  Synthetic oligonucleotide
aacacctccattggccttcaacctacgctttaaccacttagataagtcatgttgaa

SEQ ID NO: 300460 - DNA, 55 bp, Artificial
  Synthetic oligonucleotide
aacacctcccttagtcagattagtcttcaacctagtaaaagagcctatacaggga

SEQ ID NO: 300461 - DNA, 57 bp, Artificial
  Synthetic oligonucleotide
aacacctcgttaggatttgggcttgtgcaatggacacccgctagtaattatatcaat

SEQ ID NO: 300462 - DNA, 60 bp, Artificial
  Synthetic oligonucleotide
aacacctgccgccccacctcatccagtaccaatctgcctgcttcgacttcttctgtcgca

SEQ ID NO: 300463 - DNA, 53 bp, Artificial
  Synthetic oligonucleotide
aacacctgggagagcgccaaaacaacattgtcctcccccgaattttggaccaa

SEQ ID NO: 300464 - DNA, 60 bp, Artificial
  Synthetic oligonucleotide
aacacctgtatgcgagtatgatggtaatatggtctctaggtataagaaagtaatggcaac

SEQ ID NO: 300465 - DNA, 55 bp, Artificial
  Synthetic oligonucleotide
aacacctgtttatcctcatgggctgagagtattatatgaatcattgccctttcac

SEQ ID NO: 300466 - DNA, 60 bp, Artificial
  Synthetic oligonucleotide
aacaccttatagtctgggggattcaccatccttctagcacacaagagaagaatgatctgt

SEQ ID NO: 300467 - DNA, 55 bp, Artificial
  Synthetic oligonucleotide
aacaccttatggacgggagttaatccaagtgctaactgtataattacggaagatg

SEQ ID NO: 300468 - DNA, 57 bp, Artificial
  Synthetic oligonucleotide
aacaccttcaacgaatgcatgccaactaagtgcggaattaatcgtgtattgtaaaat

SEQ ID NO: 300469 - DNA, 53 bp, Artificial
  Synthetic oligonucleotide
aacaccttcagatggaaagatgtgtattctgcaaatggtaccattcaaacatc

SEQ ID NO: 300470 - DNA, 56 bp, Artificial
  Synthetic oligonucleotide
aacacctttgggacgcaagtttctgtatcaaatgggaaagctgtcaactaatagga

SEQ ID NO: 300471 - DNA, 57 bp, Artificial
  Synthetic oligonucleotide
aacaccttttccgtatcataggtgtactagatatggaaactttgaagactatggtga

SEQ ID NO: 300472 - DNA, 53 bp, Artificial
  Synthetic oligonucleotide
aacacgaagataaagcagacgaacgtcgaagatgacatgcgcgtggaggccat

SEQ ID NO: 300473 - DNA, 55 bp, Artificial
  Synthetic oligonucleotide
aacacgaagggccgcgcccttaaccgcccctccgatggcgccctgtgcatcgaag

SEQ ID NO: 300474 - DNA, 54 bp, Artificial
  Synthetic oligonucleotide
aacacgaccaaaagtttgtctgatttgcggggctatgtttatcaaggcctaaag

SEQ ID NO: 300475 - DNA, 53 bp, Artificial
  Synthetic oligonucleotide
aacacgacccgttgggccgacagatgcccgtagtgaagccacggggatagacc

SEQ ID NO: 300476 - DNA, 57 bp, Artificial
  Synthetic oligonucleotide
aacacgactttgtttggggcaaaatcttcatctgaatccagcttttggagcaacgct

SEQ ID NO: 300477 - DNA, 58 bp, Artificial
  Synthetic oligonucleotide
aacacgagatacttaatgacaacggtgaaactgtgaagtgcaggtcacccggtggagc

SEQ ID NO: 300478 - DNA, 51 bp, Artificial
  Synthetic oligonucleotide
aacacgagatgaggactcggtaccctaaggcgtatcgtatcttcaacaacc

SEQ ID NO: 300479 - DNA, 60 bp, Artificial
  Synthetic oligonucleotide
aacacgagctgagatcatctgaagtttaggttaagctactgtgcaacgttgttgttggcg

SEQ ID NO: 300480 - DNA, 60 bp, Artificial
  Synthetic oligonucleotide
aacacgatgtgcctgatcatagcaatggagtattgcagaatgcgtgtggagaaagatcac

SEQ ID NO: 300481 - DNA, 53 bp, Artificial
  Synthetic oligonucleotide
aacacgattaccgggagtgtcggtttcaacgtgaaaaacgcttctgtgtgtat

SEQ ID NO: 300482 - DNA, 60 bp, Artificial
  Synthetic oligonucleotide
aacacgattgatcgtttactggttaacagatgtgactgagagaagcgctatctttcggct

SEQ ID NO: 300483 - DNA, 60 bp, Artificial
  Synthetic oligonucleotide
aacacgccacacagttgcactatgcacgtttgtgtctctcatcactaagtttgtttcacg

SEQ ID NO: 300484 - DNA, 60 bp, Artificial
  Synthetic oligonucleotide
aacacgcctcctgtgtctacggcgttaccgacccagtcatcaagctcacaatccggcaca

SEQ ID NO: 300485 - DNA, 53 bp, Artificial
  Synthetic oligonucleotide
aacacgcgatgctataaaagggtggattatggatccagtgattgccaagtcga

SEQ ID NO: 300486 - DNA, 60 bp, Artificial
  Synthetic oligonucleotide
aacacgctaaacaacatgggcacgctatatgcaagacatgtcaacgctggaagcacgggt

SEQ ID NO: 300487 - DNA, 51 bp, Artificial
  Synthetic oligonucleotide
aacacgctactccagttggaagaaccacagctgcattgtggttgtagaaac

SEQ ID NO: 300488 - DNA, 55 bp, Artificial
  Synthetic oligonucleotide
aacacgctatgacaatcgtacgctatgacaaaaggggaccacaaagactcggggg

SEQ ID NO: 300489 - DNA, 53 bp, Artificial
  Synthetic oligonucleotide
aacacgctcataccatgtatcagttgtggtaggcttgctagcgtagtcagtct

SEQ ID NO: 300490 - DNA, 60 bp, Artificial
  Synthetic oligonucleotide
aacacgctgacagtgcaagctatgttcataccaccaggagcacccaacccaattcaatgg

SEQ ID NO: 300491 - DNA, 55 bp, Artificial
  Synthetic oligonucleotide
aacacgctgtggctgttcggacatgcgaccaccggcaagaccaacatcgcggagg

SEQ ID NO: 300492 - DNA, 57 bp, Artificial
  Synthetic oligonucleotide
aacacggaaccagtgtacctagaggttcttccagaagtgatggcacctgggatgatt

SEQ ID NO: 300493 - DNA, 59 bp, Artificial
  Synthetic oligonucleotide
aacacggaataggagtaagaccatagcgataggaagagatgctaggagtcgaaggagac

SEQ ID NO: 300494 - DNA, 57 bp, Artificial
  Synthetic oligonucleotide
aacacggaatctttatgagttaaagatagaatgcccacatactgtgggtttaggcca

SEQ ID NO: 300495 - DNA, 52 bp, Artificial
  Synthetic oligonucleotide
aacacggagcttccgtacaaccgctcctctcggacccaggaccctcggtacg

SEQ ID NO: 300496 - DNA, 57 bp, Artificial
  Synthetic oligonucleotide
aacacggcaagcatactttgtcctttcttgaagtctttgaaatgattaagagagagt

SEQ ID NO: 300497 - DNA, 54 bp, Artificial
  Synthetic oligonucleotide
aacacggctcctcaaattggaactgtcaacagccagggggccttacccggtatg

SEQ ID NO: 300498 - DNA, 55 bp, Artificial
  Synthetic oligonucleotide
aacacggtcatgttctggttagttagggatcgtcgcccagttacaacgccttatg

SEQ ID NO: 300499 - DNA, 55 bp, Artificial
  Synthetic oligonucleotide
aacacggtctgaaaagagggccttctacggaaggagtaccagagtctatgaggga

SEQ ID NO: 300500 - DNA, 52 bp, Artificial
  Synthetic oligonucleotide
aacacggtgggtgtgtgactaccatggctaagaacaagcccacgctggacat

SEQ ID NO: 300501 - DNA, 54 bp, Artificial
  Synthetic oligonucleotide
aacacgtaacccccacatgtggatcgttggctctggaaattctcaaatttcttt

SEQ ID NO: 300502 - DNA, 50 bp, Artificial
  Synthetic oligonucleotide
aacacgtacacgcacaccggagaatttggtaatgttcagacgcctcgcac

SEQ ID NO: 300503 - DNA, 52 bp, Artificial
  Synthetic oligonucleotide
aacacgtcgagacgatgttatgacaaatcttcgcaagtttactcaagtcagt

SEQ ID NO: 300504 - DNA, 50 bp, Artificial
  Synthetic oligonucleotide
aacacgtctgaaaaagggcccggcatagcggtgtcctcggcagtcgttcc

SEQ ID NO: 300505 - DNA, 55 bp, Artificial
  Synthetic oligonucleotide
aacacgtctgaaccagtggcatttagaccgccgctcgtgcaccgaatgtggctga

SEQ ID NO: 300506 - DNA, 59 bp, Artificial
  Synthetic oligonucleotide
aacacgtgtcatagaagctagtagtgtaaatgatactgtactatttagaacaacatttg

SEQ ID NO: 300507 - DNA, 55 bp, Artificial
  Synthetic oligonucleotide
aacacgttcaaccaaacacctactaagatacaggagggtagcccaaagagtgaga

SEQ ID NO: 300508 - DNA, 56 bp, Artificial
  Synthetic oligonucleotide
aacacgtttacgacaggccccaaatacacatgtccgtatcttatcaattgattacc

SEQ ID NO: 300509 - DNA, 56 bp, Artificial
  Synthetic oligonucleotide
aacactaaaaatacgagtacatgaggggtatgaggaattcacaatggttgggagga

SEQ ID NO: 300510 - DNA, 55 bp, Artificial
  Synthetic oligonucleotide
aacactaatgagttgtcctgtgggtgaggctccctccccatataactcaaggttt

SEQ ID NO: 300511 - DNA, 53 bp, Artificial
  Synthetic oligonucleotide
aacactaatgcctgctttgctactaactgattattcctgttacaacaacctac

SEQ ID NO: 300512 - DNA, 58 bp, Artificial
  Synthetic oligonucleotide
aacactaattggcgtaactgggatagccgactatcaaattatgatatcggcaacctcc

SEQ ID NO: 300513 - DNA, 54 bp, Artificial
  Synthetic oligonucleotide
aacactagctcgaccaactctagaatccgcgtaatgtgtgcttttcacgctggc

SEQ ID NO: 300514 - DNA, 60 bp, Artificial
  Synthetic oligonucleotide
aacactatagaagtattcagatcaaacggcctcatagcaaatgaatctgggaggctaata

SEQ ID NO: 300515 - DNA, 60 bp, Artificial
  Synthetic oligonucleotide
aacactatagaggttttcagatcaaacggtctgacagctaatgaatcaggaaggctaata

SEQ ID NO: 300516 - DNA, 56 bp, Artificial
  Synthetic oligonucleotide
aacactatccagtcagctttgaagggccgggactagtagaagtccaagaaagtgaa

SEQ ID NO: 300517 - DNA, 52 bp, Artificial
  Synthetic oligonucleotide
aacactatggaagcctatatccgcgaaaaccgtaaacccaaaactactaaca

SEQ ID NO: 300518 - DNA, 51 bp, Artificial
  Synthetic oligonucleotide
aacactatggagcggatgaaggcaagcgagaggataagctcgcaggggacc

SEQ ID NO: 300519 - DNA, 58 bp, Artificial
  Synthetic oligonucleotide
aacactattgctgaccgtttactgagatggttgggaagtatcatatacttgggtgggc

SEQ ID NO: 300520 - DNA, 57 bp, Artificial
  Synthetic oligonucleotide
aacactcaactttcctctatgtgatcgtattagcattacaattgaaccttggaatgc

SEQ ID NO: 300521 - DNA, 60 bp, Artificial
  Synthetic oligonucleotide
aacactcagagggcgacatgcaaatgggactatacatgataggagcccatacagagccct

SEQ ID NO: 300522 - DNA, 55 bp, Artificial
  Synthetic oligonucleotide
aacactcagtcaccaccggttgagcgccaggggttctcgcagccgtcataagcgc

SEQ ID NO: 300523 - DNA, 55 bp, Artificial
  Synthetic oligonucleotide
aacactcagtggtgcatactttacaaataaagcaatcatgtagttcgtgcactcc

SEQ ID NO: 300524 - DNA, 60 bp, Artificial
  Synthetic oligonucleotide
aacactccctgaacaaatggggctgctgaatgatgtattcatgagatgggagactacaac

SEQ ID NO: 300525 - DNA, 60 bp, Artificial
  Synthetic oligonucleotide
aacactccgaggattgatcttattacatgctttgcagctgggaagggcgatgataatcgc

SEQ ID NO: 300526 - DNA, 57 bp, Artificial
  Synthetic oligonucleotide
aacactcgaaagggatatacacttgggcagctggttatggtgaacactcgaaaggga

SEQ ID NO: 300527 - DNA, 51 bp, Artificial
  Synthetic oligonucleotide
aacactcgaatcggtttgggggtcacttcgatcccttcgggggttgtggct

SEQ ID NO: 300528 - DNA, 60 bp, Artificial
  Synthetic oligonucleotide
aacactcgccgttgcactacgcatgcccgccaaagtgcgcagtattttcactgcgttgcc

SEQ ID NO: 300529 - DNA, 55 bp, Artificial
  Synthetic oligonucleotide
aacactctaaacaacatgggaaccctttacgcaaggcatgtcaacaccgggagca

SEQ ID NO: 300530 - DNA, 55 bp, Artificial
  Synthetic oligonucleotide
aacactctgtattcaacttctctcctattgcactgttgtctaagattgtgaccat

SEQ ID NO: 300531 - DNA, 60 bp, Artificial
  Synthetic oligonucleotide
aacactgaagcaaacattgcctatacacacaccaaattcaacataccatgcgatgccgca

SEQ ID NO: 300532 - DNA, 52 bp, Artificial
  Synthetic oligonucleotide
aacactgaaggactatcagacttcattaacacctcagacgctcagctattcg

SEQ ID NO: 300533 - DNA, 51 bp, Artificial
  Synthetic oligonucleotide
aacactgaccatactcattagaacaggactgctggtgatatcaggactttt

SEQ ID NO: 300534 - DNA, 55 bp, Artificial
  Synthetic oligonucleotide
aacactgacgaagagtactataagactgtaaagactcaggacgcagactcagaat

SEQ ID NO: 300535 - DNA, 55 bp, Artificial
  Synthetic oligonucleotide
aacactgcctgccagtttggaacgggctatgcgcaaagggctggttgaaggtgtg

SEQ ID NO: 300536 - DNA, 60 bp, Artificial
  Synthetic oligonucleotide
aacactgctattgcaaaatgcaaccttaatcatgagtcggagttctgtgacatgcttagg

SEQ ID NO: 300537 - DNA, 56 bp, Artificial
  Synthetic oligonucleotide
aacactggagttcgacattcagccaatgtgccccgcaaacacgggcggcggttacg

SEQ ID NO: 300538 - DNA, 54 bp, Artificial
  Synthetic oligonucleotide
aacactggcaccgttcccctcgctgtgccaatgtgcagtaccagccgggtgact

SEQ ID NO: 300539 - DNA, 55 bp, Artificial
  Synthetic oligonucleotide
aacactgggatagacccccaaggagcaaccttagagataatcccttctatccttg

SEQ ID NO: 300540 - DNA, 59 bp, Artificial
  Synthetic oligonucleotide
aacactgggctaaaggcactgtttgcactggagtgtcctctaaggctggcgattgcccc

SEQ ID NO: 300541 - DNA, 55 bp, Artificial
  Synthetic oligonucleotide
aacactgtcatgttctggttagttagagatagacgtccccttacaactccctacg

SEQ ID NO: 300542 - DNA, 55 bp, Artificial
  Synthetic oligonucleotide
aacactgtgtctaaacaaactgactctcgaagtgcattcccggacattcaagaaa

SEQ ID NO: 300543 - DNA, 60 bp, Artificial
  Synthetic oligonucleotide
aacactgtgtctggggcatcatgcggtaccgaatggaacaatagtgaagacaattacgga

SEQ ID NO: 300544 - DNA, 57 bp, Artificial
  Synthetic oligonucleotide
aacacttcaaacaccagaagccatacaaggtggatacgtagcatatgcaggctcaaa

SEQ ID NO: 300545 - DNA, 60 bp, Artificial
  Synthetic oligonucleotide
aacacttcagacgggcattgcgaaaccatatacggcattgggtatggttcctatatcatc

SEQ ID NO: 300546 - DNA, 58 bp, Artificial
  Synthetic oligonucleotide
aacacttccttattatgtgttaaaggaacaccacaagatagaactggcctcagtgcaa

SEQ ID NO: 300547 - DNA, 53 bp, Artificial
  Synthetic oligonucleotide
aacacttcgagtaatggagaaacttggttaggacatttaagacctaacatctc

SEQ ID NO: 300548 - DNA, 60 bp, Artificial
  Synthetic oligonucleotide
aacacttgatgatttcaggtcaatggaggcattctcagggatctttaggtcaccacatgg

SEQ ID NO: 300549 - DNA, 60 bp, Artificial
  Synthetic oligonucleotide
aacacttggagtggttgcattgaggcggatggtcaagcttgcactttgtactacgagtgt

SEQ ID NO: 300550 - DNA, 54 bp, Artificial
  Synthetic oligonucleotide
aacacttggtgtagtgaatacaaccctatcaacaatagcccttattattggggt

SEQ ID NO: 300551 - DNA, 53 bp, Artificial
  Synthetic oligonucleotide
aacacttggttatcaaacactctcgttacccttggaatcgtcctttcaaccta

SEQ ID NO: 300552 - DNA, 57 bp, Artificial
  Synthetic oligonucleotide
aacactttcacctggttagctgtacaaggatccctctattctaaatggaggtggata

SEQ ID NO: 300553 - DNA, 59 bp, Artificial
  Synthetic oligonucleotide
aacactttggtgacatacgaaacaagtacatggaatcggacagttttgatcgacagtca

SEQ ID NO: 300554 - DNA, 52 bp, Artificial
  Synthetic oligonucleotide
aacagaaaggcggccactatttgctggagaaggaaactccgatatttaaggc

SEQ ID NO: 300555 - DNA, 55 bp, Artificial
  Synthetic oligonucleotide
aacagaacaattagcggcgtttgtgatgcgttaaccgaaaggacttcactcgcgc

SEQ ID NO: 300556 - DNA, 57 bp, Artificial
  Synthetic oligonucleotide
aacagaaccatatcccctatggctaggaacatggggatttttagactatgagagaaa

SEQ ID NO: 300557 - DNA, 50 bp, Artificial
  Synthetic oligonucleotide
aacagaagaacaagccgtagacatatgcaaggcagcaatgggcttaagga

SEQ ID NO: 300558 - DNA, 53 bp, Artificial
  Synthetic oligonucleotide
aacagaagaactccttttaacaacaacaaaaggaagtctccagaacaagccag

SEQ ID NO: 300559 - DNA, 59 bp, Artificial
  Synthetic oligonucleotide
aacagaagagatacaaaccatccaaagatatataattatggagggttttgtctctctgc

SEQ ID NO: 300560 - DNA, 58 bp, Artificial
  Synthetic oligonucleotide
aacagaagattcctacttataagtctgcggtaactaacaccttcactttcgcgcatga

SEQ ID NO: 300561 - DNA, 60 bp, Artificial
  Synthetic oligonucleotide
aacagaagggatgcaatgcttggaacacatgttgtctgggatattggattacaatccact

SEQ ID NO: 300562 - DNA, 60 bp, Artificial
  Synthetic oligonucleotide
aacagaaggtcactttgttgaatttactcgtgacacatcagcacaagtggcaagtgacat

SEQ ID NO: 300563 - DNA, 60 bp, Artificial
  Synthetic oligonucleotide
aacagaatctatgcacagtggtgcagcgaagcatcctcctcttatagctccaccaaaagc

SEQ ID NO: 300564 - DNA, 57 bp, Artificial
  Synthetic oligonucleotide
aacagaatcttgggtatacaagcattctggatttttggcataattgttgtaaacgga

SEQ ID NO: 300565 - DNA, 55 bp, Artificial
  Synthetic oligonucleotide
aacagaatggataggcgcgtcatatgatagaactcggattagggcgctggagctg

SEQ ID NO: 300566 - DNA, 55 bp, Artificial
  Synthetic oligonucleotide
aacagaatggatcccattctttacactcagacccttctacatgaactgtggcacg

SEQ ID NO: 300567 - DNA, 60 bp, Artificial
  Synthetic oligonucleotide
aacagaatggtgctggccagcactacggctaaggctatggagcagatggctggatcgagt

SEQ ID NO: 300568 - DNA, 55 bp, Artificial
  Synthetic oligonucleotide
aacagaattattgtttattctacttcttaatgctgcatgtaatgcaggcgataac

SEQ ID NO: 300569 - DNA, 53 bp, Artificial
  Synthetic oligonucleotide
aacagaattgccggttgggttcttaaaagacacctatcgcgtttacaattcta

SEQ ID NO: 300570 - DNA, 55 bp, Artificial
  Synthetic oligonucleotide
aacagacaccttcccggaaaactccaccatctatgatgtcacgtttctgaaacgt

SEQ ID NO: 300571 - DNA, 60 bp, Artificial
  Synthetic oligonucleotide
aacagacagactacccaggggagcatctagcgattccgagaccagtgatagagaatcagg

SEQ ID NO: 300572 - DNA, 58 bp, Artificial
  Synthetic oligonucleotide
aacagacagatggtttgcttgtgtacttgttgaaccaagcgtaccaagtacacaaaga

SEQ ID NO: 300573 - DNA, 58 bp, Artificial
  Synthetic oligonucleotide
aacagacagtagtttcagtgaaattagcgggcagttcttctctctgccctgttagtgg

SEQ ID NO: 300574 - DNA, 57 bp, Artificial
  Synthetic oligonucleotide
aacagaccaagtacagttgacagagttccccatagagcacacgaagatcctaaagac

SEQ ID NO: 300575 - DNA, 55 bp, Artificial
  Synthetic oligonucleotide
aacagaccagtcaacaccggagggctaaaggcagtcagcaacgccctaaagaccg

SEQ ID NO: 300576 - DNA, 59 bp, Artificial
  Synthetic oligonucleotide
aacagacctatgttccgaaagcctcggatgtacagaatgttcagaagccctgatgttcc

SEQ ID NO: 300577 - DNA, 52 bp, Artificial
  Synthetic oligonucleotide
aacagacctcacgcacggccacaggcacctggccgcaccgggcacgcatgat

SEQ ID NO: 300578 - DNA, 58 bp, Artificial
  Synthetic oligonucleotide
aacagacgtggtgggtcttctaggcaacgacgaagttattctcgatcaatatggttga

SEQ ID NO: 300579 - DNA, 55 bp, Artificial
  Synthetic oligonucleotide
aacagactatacaccaggaacccaactttcatccataaccttaaatacgggtgca

SEQ ID NO: 300580 - DNA, 60 bp, Artificial
  Synthetic oligonucleotide
aacagactcacaatatgcattaggaatcattcaggcacaaccagacaaaagtgagtcaga

SEQ ID NO: 300581 - DNA, 60 bp, Artificial
  Synthetic oligonucleotide
aacagactcacagtatgcattaggaattattcaagcacaaccagataggagtgaatcaga

SEQ ID NO: 300582 - DNA, 59 bp, Artificial
  Synthetic oligonucleotide
aacagactccgagatgccattggacactgagggggcaaacagcaacgaaagtgagtggg

SEQ ID NO: 300583 - DNA, 55 bp, Artificial
  Synthetic oligonucleotide
aacagactttatgcaaataaacgtctcatatccgcgtcacacagcatatggtggt

SEQ ID NO: 300584 - DNA, 58 bp, Artificial
  Synthetic oligonucleotide
aacagactttatgtaaataaatgtctgatatccggctatacaatgctaaagtggtccc

SEQ ID NO: 300585 - DNA, 53 bp, Artificial
  Synthetic oligonucleotide
aacagagaaaccgggaggttgaatattaatggtccaacccgaactaagctgga

SEQ ID NO: 300586 - DNA, 59 bp, Artificial
  Synthetic oligonucleotide
aacagagaccacaacagaaaatctagtggcagctctgggagggagcggactaatcgttc

SEQ ID NO: 300587 - DNA, 60 bp, Artificial
  Synthetic oligonucleotide
aacagagcagaatgcagttctcctccttgactgtaaatgtaagagggtcaggaatgagaa

SEQ ID NO: 300588 - DNA, 55 bp, Artificial
  Synthetic oligonucleotide
aacagagcgagatactaaagcttgtaagtgtggagcaagtttagaaccacgatct

SEQ ID NO: 300589 - DNA, 55 bp, Artificial
  Synthetic oligonucleotide
aacagagcgtgagatatcgcggcaaataggtaatgtactgaaagagcataacagc

SEQ ID NO: 300590 - DNA, 60 bp, Artificial
  Synthetic oligonucleotide
aacagaggcggattgtgtggatagtgctgagactttatctgaattgtttgatgcagatac

SEQ ID NO: 300591 - DNA, 60 bp, Artificial
  Synthetic oligonucleotide
aacagagggattgagatcattatataacacagtggcaactctctattgtgtacataacaa

SEQ ID NO: 300592 - DNA, 59 bp, Artificial
  Synthetic oligonucleotide
aacagaggggaacagtgtctttgctagaggctgaatttgctgcgcttaagaaaacgcac

SEQ ID NO: 300593 - DNA, 59 bp, Artificial
  Synthetic oligonucleotide
aacagagtcattgcagaatagaatacagatagacccagtgaaattgagtagtgggtaca

SEQ ID NO: 300594 - DNA, 57 bp, Artificial
  Synthetic oligonucleotide
aacagagtgatgggttaagaagttgcagaattaaagatactgggagttgtaatgtat

SEQ ID NO: 300595 - DNA, 58 bp, Artificial
  Synthetic oligonucleotide
aacagagtgtcaatgccgacatttagatttcctctggagctagatacctcatcaaata

SEQ ID NO: 300596 - DNA, 50 bp, Artificial
  Synthetic oligonucleotide
aacagagttattctctgatgaacgggttgtccatccagctaacggttaaa

SEQ ID NO: 300597 - DNA, 60 bp, Artificial
  Synthetic oligonucleotide
aacagagttcacagtccttaaaagagaaccagtcgggcacatgcatcatgggcaacagca

SEQ ID NO: 300598 - DNA, 60 bp, Artificial
  Synthetic oligonucleotide
aacagagttcgttcatatatcaagctcacaggtcttaccatgtctggaacatttggcatt

SEQ ID NO: 300599 - DNA, 60 bp, Artificial
  Synthetic oligonucleotide
aacagatacatccgagcgcatgatgatgacgtgttacatgaatattgcttcaatagacga

SEQ ID NO: 300600 - DNA, 60 bp, Artificial
  Synthetic oligonucleotide
aacagatatagtaacattgactgaggaagcagaattagaattggcagaaaacagggagat

SEQ ID NO: 300601 - DNA, 60 bp, Artificial
  Synthetic oligonucleotide
aacagatatcgagcgcagcagagccaaccgcattgcacgcacggaaatcactaccgcact

SEQ ID NO: 300602 - DNA, 60 bp, Artificial
  Synthetic oligonucleotide
aacagatattagaaactatctggaattcccactcagcccagcaaccatgtcatttagtgg

SEQ ID NO: 300603 - DNA, 60 bp, Artificial
  Synthetic oligonucleotide
aacagatccagcagtgaagaattggatgacccagacactactagtacagaatgccaaccc

SEQ ID NO: 300604 - DNA, 60 bp, Artificial
  Synthetic oligonucleotide
aacagatccgatgtcgacaacgttcgcagccgtacaatttgtagatggatcgaatagagt

SEQ ID NO: 300605 - DNA, 58 bp, Artificial
  Synthetic oligonucleotide
aacagatcctccatcaactgcaaaatactatgcatccattaactacaacactggctac

SEQ ID NO: 300606 - DNA, 60 bp, Artificial
  Synthetic oligonucleotide
aacagatctagagttcttggcactatattagaaaacaatgattaccccatgtatgaagta

SEQ ID NO: 300607 - DNA, 60 bp, Artificial
  Synthetic oligonucleotide
aacagatcttgagatatggtcgttcagccacaagcagctgcgagttgtgtggaaaaaggg

SEQ ID NO: 300608 - DNA, 55 bp, Artificial
  Synthetic oligonucleotide
aacagatgaaagccagctggcatatgagtatgcattactaggccatgaggaccct

SEQ ID NO: 300609 - DNA, 50 bp, Artificial
  Synthetic oligonucleotide
aacagatgaggggggaaataaaaaactgctctttcaatatcaccacaagc

SEQ ID NO: 300610 - DNA, 55 bp, Artificial
  Synthetic oligonucleotide
aacagatgagggtcaagcttcgacaactcaactcacttatgagacaggtgcttgg

SEQ ID NO: 300611 - DNA, 60 bp, Artificial
  Synthetic oligonucleotide
aacagatgataggtcaaagcccactcaaggtcagacaatcgtactaaacactgactggag

SEQ ID NO: 300612 - DNA, 60 bp, Artificial
  Synthetic oligonucleotide
aacagatggcaggtcctgatagtatggcaagtggacagacagaaagtgaaagcgtggaac

SEQ ID NO: 300613 - DNA, 53 bp, Artificial
  Synthetic oligonucleotide
aacagatggtaggttttttgcttatcgcgttgaaacattcgaagaaataccgt

SEQ ID NO: 300614 - DNA, 57 bp, Artificial
  Synthetic oligonucleotide
aacagatgtacaccccgggcggagaagtgagaaatgatgatgttgaccagagtttga

SEQ ID NO: 300615 - DNA, 60 bp, Artificial
  Synthetic oligonucleotide
aacagatgtaccagaaatgttgcaatctattcgagaaattcttccccagcagttcatatc

SEQ ID NO: 300616 - DNA, 58 bp, Artificial
  Synthetic oligonucleotide
aacagatgttggaacggggaatagttctactgcaaaagcttacacatcagtttctgac

SEQ ID NO: 300617 - DNA, 58 bp, Artificial
  Synthetic oligonucleotide
aacagcaaaggagttgtagggttgcgctcactatatgaagcggcgcgtaaggttagac

SEQ ID NO: 300618 - DNA, 55 bp, Artificial
  Synthetic oligonucleotide
aacagcaacacatcccaaaataatcctgattgtgcctggctggaagcacaacagg

SEQ ID NO: 300619 - DNA, 55 bp, Artificial
  Synthetic oligonucleotide
aacagcaaccacaaacagacaggtatggtccggaataacgaaattggagcgcgac

SEQ ID NO: 300620 - DNA, 60 bp, Artificial
  Synthetic oligonucleotide
aacagcaagctgcgaatgaggaggcaatacaggagatgcttgacataagtgcggatgtga

SEQ ID NO: 300621 - DNA, 60 bp, Artificial
  Synthetic oligonucleotide
aacagcactgcaacactgtgcttggggcatcatgcggtgccaaatggaacaatagtgaag

SEQ ID NO: 300622 - DNA, 60 bp, Artificial
  Synthetic oligonucleotide
aacagcagaagtgcttaacgcaacgcagcgtgttgatgattcaacaactgcaattcgtgg

SEQ ID NO: 300623 - DNA, 51 bp, Artificial
  Synthetic oligonucleotide
aacagcagagagtatctgcacctactggttaagatcaatctcttatgttaa

SEQ ID NO: 300624 - DNA, 60 bp, Artificial
  Synthetic oligonucleotide
aacagcagattggttttcgatcggtcaatacatcataggctttgcacttgcaattgtctt

SEQ ID NO: 300625 - DNA, 60 bp, Artificial
  Synthetic oligonucleotide
aacagcaggatcatgtggggtttactattgctagccgctctggttggccaaggtttagca

SEQ ID NO: 300626 - DNA, 58 bp, Artificial
  Synthetic oligonucleotide
aacagcatccgctctaagtgtccagttgaagagtcggaggcctcttccccccctcaca

SEQ ID NO: 300627 - DNA, 57 bp, Artificial
  Synthetic oligonucleotide
aacagcatctatagagggtgcatggggttctggagttgggtttacccttacctgcca

SEQ ID NO: 300628 - DNA, 55 bp, Artificial
  Synthetic oligonucleotide
aacagcatgagaaagaacacaatccgctaccattattatcgaggctttgtgtcac

SEQ ID NO: 300629 - DNA, 59 bp, Artificial
  Synthetic oligonucleotide
aacagcatgtcgcgcgtgcggtagtactgttcttggccgttgtcgtacgcaactaacga

SEQ ID NO: 300630 - DNA, 56 bp, Artificial
  Synthetic oligonucleotide
aacagccaagtttggagagcactccggccgaaggatcgaggtacccagaaggagga

SEQ ID NO: 300631 - DNA, 59 bp, Artificial
  Synthetic oligonucleotide
aacagccaataatcttgaaatgggagccgaaactgaatgagctctctattgggggagga

SEQ ID NO: 300632 - DNA, 60 bp, Artificial
  Synthetic oligonucleotide
aacagccacaggtcagatcgattcgcttacgccgaatcgttttgcgcttcttcgcctgtc

SEQ ID NO: 300633 - DNA, 58 bp, Artificial
  Synthetic oligonucleotide
aacagccccagtactagggaattacaaagagatatgtgtagcttggtcgagtagcagt

SEQ ID NO: 300634 - DNA, 50 bp, Artificial
  Synthetic oligonucleotide
aacagcccgacacactcccgttaactcatggctgggcaacatcataatgt

SEQ ID NO: 300635 - DNA, 55 bp, Artificial
  Synthetic oligonucleotide
aacagcccggtgtgcctgtaaaatggaagaggtgagactcccatcagggcccccg

SEQ ID NO: 300636 - DNA, 57 bp, Artificial
  Synthetic oligonucleotide
aacagccgtcacggctctcagaagtgctgggctaactttgggccaagtcccaatggt

SEQ ID NO: 300637 - DNA, 51 bp, Artificial
  Synthetic oligonucleotide
aacagcctcccccgagggaaataccacaaaggcctccacgaccacccaccc

SEQ ID NO: 300638 - DNA, 59 bp, Artificial
  Synthetic oligonucleotide
aacagccttgacgagattttctgatggtatagctttacttaacttgacaggtgagaata

SEQ ID NO: 300639 - DNA, 60 bp, Artificial
  Synthetic oligonucleotide
aacagccttgagattgaagacttcggatttggaatcacatctactcgagtgtggctaaaa

SEQ ID NO: 300640 - DNA, 55 bp, Artificial
  Synthetic oligonucleotide
aacagcgaaacacagggagtttgcagagatacgtcttggtagggatcgccagggg

SEQ ID NO: 300641 - DNA, 55 bp, Artificial
  Synthetic oligonucleotide
aacagcgaaagaaacatggaattgaacgtaggtgcaatgacaaacgtcgaactcc

SEQ ID NO: 300642 - DNA, 59 bp, Artificial
  Synthetic oligonucleotide
aacagcgaacgttacagttaatccaggaccatttgcacaaactggatatgctccagtta

SEQ ID NO: 300643 - DNA, 56 bp, Artificial
  Synthetic oligonucleotide
aacagcgaggttggcctcccgtccctgcactggccaaccgcgctcacccctaacgc

SEQ ID NO: 300644 - DNA, 60 bp, Artificial
  Synthetic oligonucleotide
aacagcgatcggcaatgcattacctgacagtgttcacgttacgtgctatcggcgagaaaa

SEQ ID NO: 300645 - DNA, 55 bp, Artificial
  Synthetic oligonucleotide
aacagcgatgaatctaacccaggaggatgaacaaaggcttgcactactacgcgag

SEQ ID NO: 300646 - DNA, 57 bp, Artificial
  Synthetic oligonucleotide
aacagcgccgccagaacagattgtgtgggaacatcttaataacgaagtggtaaatcc

SEQ ID NO: 300647 - DNA, 60 bp, Artificial
  Synthetic oligonucleotide
aacagcgctgaagaagcgtaatgccgacgttccagagttatccgatgtggtcgacattca

SEQ ID NO: 300648 - DNA, 55 bp, Artificial
  Synthetic oligonucleotide
aacagcgcttcagattcaaaacaaagccaggtgctaattgtggggtgtattcccc

SEQ ID NO: 300649 - DNA, 59 bp, Artificial
  Synthetic oligonucleotide
aacagcggcacctctaatcacctaacggcatacagtcagtggcccaaaagcgtacaggc

SEQ ID NO: 300650 - DNA, 59 bp, Artificial
  Synthetic oligonucleotide
aacagcggcggctcaactgagtcgctgcacttggagttcgggttaaactcagatagtac

SEQ ID NO: 300651 - DNA, 50 bp, Artificial
  Synthetic oligonucleotide
aacagcgggggtgacgtgatccaccttgctctgatagcaactttcaacgt

SEQ ID NO: 300652 - DNA, 60 bp, Artificial
  Synthetic oligonucleotide
aacagcgtagggcggcgcattgtcgcgtcagggagcacaataaccgtaagcgctgcatct

SEQ ID NO: 300653 - DNA, 57 bp, Artificial
  Synthetic oligonucleotide
aacagctaatgctggtagtgtgtcaagtgtatatagtagctccgatggcggtttgag

SEQ ID NO: 300654 - DNA, 60 bp, Artificial
  Synthetic oligonucleotide
aacagctatgcatcatactaatagacacaggagcatgttcatcccacatctccaaggatc

SEQ ID NO: 300655 - DNA, 60 bp, Artificial
  Synthetic oligonucleotide
aacagctcatggcattgacccgaatgtgcgcactggtgtgaggaccatcactaccggcgg

SEQ ID NO: 300656 - DNA, 58 bp, Artificial
  Synthetic oligonucleotide
aacagctcctggggatttggggttgctctggaaaactcatttgcaccactactgtgcc

SEQ ID NO: 300657 - DNA, 59 bp, Artificial
  Synthetic oligonucleotide
aacagctctaattacattgttaatggaaataacgcctaactgatctaagtacatgttga

SEQ ID NO: 300658 - DNA, 56 bp, Artificial
  Synthetic oligonucleotide
aacagctgagaacgccctgttagtagctttattcggctatgtaggatatcaggcac

SEQ ID NO: 300659 - DNA, 60 bp, Artificial
  Synthetic oligonucleotide
aacagctgtagcgacctcacagtagcagcggactcccctcttggtaacaagagcctctgc

SEQ ID NO: 300660 - DNA, 54 bp, Artificial
  Synthetic oligonucleotide
aacagctgtcttttagtcagggttgcaggagggcggtgggttttttattgtgcg

SEQ ID NO: 300661 - DNA, 54 bp, Artificial
  Synthetic oligonucleotide
aacagctttcagttacaaaacagctttcggatactttgaagttttcaatttgaa

SEQ ID NO: 300662 - DNA, 55 bp, Artificial
  Synthetic oligonucleotide
aacaggaaaacgcccgcgaagcgttaaacatgtactgcgaccatggctacggccc

SEQ ID NO: 300663 - DNA, 50 bp, Artificial
  Synthetic oligonucleotide
aacaggaaactccttagtgcacagatccttccagtcttgtgagatcttag

SEQ ID NO: 300664 - DNA, 53 bp, Artificial
  Synthetic oligonucleotide
aacaggaaagaaaccaagtggagtcgacaaaaagttggcaacattactagtcc

SEQ ID NO: 300665 - DNA, 58 bp, Artificial
  Synthetic oligonucleotide
aacaggaacaaaagcattagataatccagacgtatatgtgattaaatggggggcacaa

SEQ ID NO: 300666 - DNA, 58 bp, Artificial
  Synthetic oligonucleotide
aacaggaactagctgacactgcacaagagggaaactagctgacaccgcagggactttc

SEQ ID NO: 300667 - DNA, 51 bp, Artificial
  Synthetic oligonucleotide
aacaggaagcacagcgaaaagtgtctgaagagatggtactgcctgaagatg

SEQ ID NO: 300668 - DNA, 53 bp, Artificial
  Synthetic oligonucleotide
aacaggaagtgcaagtggactccatcccacctcaggatacaatccccagggag

SEQ ID NO: 300669 - DNA, 60 bp, Artificial
  Synthetic oligonucleotide
aacaggaatcagccgcctgcaactgcactagctaatacgatagagatattcagatcgaac

SEQ ID NO: 300670 - DNA, 52 bp, Artificial
  Synthetic oligonucleotide
aacaggaatgcggaatgtccctgagaagcaaaccagaggcctgttcggcgca

SEQ ID NO: 300671 - DNA, 54 bp, Artificial
  Synthetic oligonucleotide
aacaggacccctagtaatactgctcctgttgcttacagttgggcctttcttagt

SEQ ID NO: 300672 - DNA, 52 bp, Artificial
  Synthetic oligonucleotide
aacaggacccgggactgtgactctacaagtcaaaacccctaccggcacccaa

SEQ ID NO: 300673 - DNA, 56 bp, Artificial
  Synthetic oligonucleotide
aacaggacccttaatagtcctcctcctgttactcacagttgggccatgtattatta

SEQ ID NO: 300674 - DNA, 53 bp, Artificial
  Synthetic oligonucleotide
aacaggacggatgcccctcattatctgtggaaaggggtccacccagttcaact

SEQ ID NO: 300675 - DNA, 54 bp, Artificial
  Synthetic oligonucleotide
aacaggagactgtaacaacccgatcactgggagtccgggagcccctggggtcaa

SEQ ID NO: 300676 - DNA, 56 bp, Artificial
  Synthetic oligonucleotide
aacaggatgggaacggtaaccacagaagtagctttcggcctagtgtgtgccacttg

SEQ ID NO: 300677 - DNA, 59 bp, Artificial
  Synthetic oligonucleotide
aacaggcaaatactagcacatattctctaccacctgacccctcacactttgatggttat

SEQ ID NO: 300678 - DNA, 51 bp, Artificial
  Synthetic oligonucleotide
aacaggcacaccaacgagactgtcatctataaggtgtcactggactaccac

SEQ ID NO: 300679 - DNA, 56 bp, Artificial
  Synthetic oligonucleotide
aacaggcacccttacggagcctgtgttcgccatccagtgttacgcgacgaacaccg

SEQ ID NO: 300680 - DNA, 58 bp, Artificial
  Synthetic oligonucleotide
aacaggcatacttaagtgatcctaaactgatagggcacgtagtcccatacacaagctt

SEQ ID NO: 300681 - DNA, 60 bp, Artificial
  Synthetic oligonucleotide
aacaggccactgtacagtccatcttgatggcccacccagatcaagatgagattgaagacc

SEQ ID NO: 300682 - DNA, 57 bp, Artificial
  Synthetic oligonucleotide
aacaggcccagagactttacggcaagtcagagaagccatagccacgcttcagtatgg

SEQ ID NO: 300683 - DNA, 51 bp, Artificial
  Synthetic oligonucleotide
aacaggcccatgtacaggaagcccaggatatatcgatcactaagaggcccc

SEQ ID NO: 300684 - DNA, 60 bp, Artificial
  Synthetic oligonucleotide
aacaggcgaaacaatagcacatggtaaagtcgggcaggggatatctgcatggagcaaaac

SEQ ID NO: 300685 - DNA, 60 bp, Artificial
  Synthetic oligonucleotide
aacaggctgccccagtgtgcgtagttctcatccagacttcggtctggcaacttgttgtta

SEQ ID NO: 300686 - DNA, 50 bp, Artificial
  Synthetic oligonucleotide
aacaggctgtcttgtgatacaaactcaattatggcacaattgggttttag

SEQ ID NO: 300687 - DNA, 54 bp, Artificial
  Synthetic oligonucleotide
aacagggaaaagtagagagacagttggaaacacattagcagggttgttgtctgt

SEQ ID NO: 300688 - DNA, 55 bp, Artificial
  Synthetic oligonucleotide
aacagggatgagcctacagccatccggatgttttcctggaaaattgggtacgggc

SEQ ID NO: 300689 - DNA, 60 bp, Artificial
  Synthetic oligonucleotide
aacagggattgagcctgatgaccatctaaaggaaaaatcgtcactgagatatgggaatgt

SEQ ID NO: 300690 - DNA, 58 bp, Artificial
  Synthetic oligonucleotide
aacagggcactcaaagtgtctggcaacaaaaagaggctagatgcttcttttgtcggat

SEQ ID NO: 300691 - DNA, 56 bp, Artificial
  Synthetic oligonucleotide
aacagggccttgcgaatctaatggggacaaagggcgtggaggcatcaagggaggat

SEQ ID NO: 300692 - DNA, 58 bp, Artificial
  Synthetic oligonucleotide
aacagggcgaacatagcaggcagtatatattattctactcctagtgggtctttagtaa

SEQ ID NO: 300693 - DNA, 57 bp, Artificial
  Synthetic oligonucleotide
aacagggctagactgtatgaggccgtgcttctgggttgaattaatcaggggacgacc

SEQ ID NO: 300694 - DNA, 52 bp, Artificial
  Synthetic oligonucleotide
aacagggcttcccatccctgtttacccttactccactcacccctccccttga

SEQ ID NO: 300695 - DNA, 59 bp, Artificial
  Synthetic oligonucleotide
aacagggcttgagcctgatgaccatctaaaggaaaaatctgccttgaggtatggtaatg

SEQ ID NO: 300696 - DNA, 60 bp, Artificial
  Synthetic oligonucleotide
aacagggcttgagcctgatgaccatttaaaggagaaatcagctctgcgatatgggaatgt

SEQ ID NO: 300697 - DNA, 53 bp, Artificial
  Synthetic oligonucleotide
aacaggggaaaactgggcgggattgattaaaggattcaaaagaacaggatcag

SEQ ID NO: 300698 - DNA, 55 bp, Artificial
  Synthetic oligonucleotide
aacaggggaagcctactggaagccttccgctgattgggacctgatcacggtaaaa

SEQ ID NO: 300699 - DNA, 60 bp, Artificial
  Synthetic oligonucleotide
aacaggggcaatgcactgaaggattagtggcacaattaggccattccttgcaataaagag

SEQ ID NO: 300700 - DNA, 55 bp, Artificial
  Synthetic oligonucleotide
aacaggggccacaatgcctgttcttccatcagacagcatagaaaccagaactacc

SEQ ID NO: 300701 - DNA, 60 bp, Artificial
  Synthetic oligonucleotide
aacaggggggagctgcaaccccccagagaaatcaaatgcaggtgcaacagtctgtgctac

SEQ ID NO: 300702 - DNA, 60 bp, Artificial
  Synthetic oligonucleotide
aacagggtagattcgagaatgttgagacctccattaatcatctcaaccgatcaaacatgg

SEQ ID NO: 300703 - DNA, 60 bp, Artificial
  Synthetic oligonucleotide
aacagggtcagacagcctgcagtcactctggaacacaatagtagtgctctggtgtgttca

SEQ ID NO: 300704 - DNA, 55 bp, Artificial
  Synthetic oligonucleotide
aacagggtgtgaagagcctattgagctacataagagtcctccggcccctgaatgc

SEQ ID NO: 300705 - DNA, 60 bp, Artificial
  Synthetic oligonucleotide
aacagggttcaagatatcatctgcagttgcttgtgctagcggagtttgcgtcacaggatc

SEQ ID NO: 300706 - DNA, 52 bp, Artificial
  Synthetic oligonucleotide
aacaggtaactaaaaaattagaagagaactttaataggacaataagctttca

SEQ ID NO: 300707 - DNA, 54 bp, Artificial
  Synthetic oligonucleotide
aacaggtaatctcggcttcaactgggactcagattgatcatactactcatgaga

SEQ ID NO: 300708 - DNA, 52 bp, Artificial
  Synthetic oligonucleotide
aacaggtagaatctggacgcacaaacaatgacgcgggcaaaaatggcgggaa

SEQ ID NO: 300709 - DNA, 58 bp, Artificial
  Synthetic oligonucleotide
aacaggtagataagactcttggacgtcagcttgcaacttggccgtatcgtaagtatta

SEQ ID NO: 300710 - DNA, 56 bp, Artificial
  Synthetic oligonucleotide
aacaggtaggttgaaggagcatgtaagcttcgggactaacctggaagatgttaggc

SEQ ID NO: 300711 - DNA, 60 bp, Artificial
  Synthetic oligonucleotide
aacaggtatccgcaatccctgcactgatacaccagcctatcctgtgccacagtcaggaag

SEQ ID NO: 300712 - DNA, 56 bp, Artificial
  Synthetic oligonucleotide
aacaggtcaagtgacgatagcaagatgtcacactatcggattcatgagaatcaata

SEQ ID NO: 300713 - DNA, 54 bp, Artificial
  Synthetic oligonucleotide
aacaggtccaaaacgcccaagaacagaggtccccgtggccgttgcaggagacgc

SEQ ID NO: 300714 - DNA, 57 bp, Artificial
  Synthetic oligonucleotide
aacaggtggactttctcaaacgaccagctagacctcgccagatacaggggctgtaaa

SEQ ID NO: 300715 - DNA, 60 bp, Artificial
  Synthetic oligonucleotide
aacaggtggcggagaacacagggcagtactctgaatataggtccgctgagagggctagtg

SEQ ID NO: 300716 - DNA, 60 bp, Artificial
  Synthetic oligonucleotide
aacaggtgtatgtgaggaggtcgatagaggatgttcacagtggggcgaatatgcagttgt

SEQ ID NO: 300717 - DNA, 58 bp, Artificial
  Synthetic oligonucleotide
aacaggttaagaaatcatttgagtcaacttgcaatgacactgagaataaagtacaggg

SEQ ID NO: 300718 - DNA, 54 bp, Artificial
  Synthetic oligonucleotide
aacaggttgaaagaacgctcactctctccgtgctaaacacgttcctggggtacc

SEQ ID NO: 300719 - DNA, 51 bp, Artificial
  Synthetic oligonucleotide
aacaggtttaaactcatggtcaagccggatgttaagttcaagggagattcg

SEQ ID NO: 300720 - DNA, 59 bp, Artificial
  Synthetic oligonucleotide
aacagtaaaaattgagcgtgtgcatgcggatgtgaacatggacgggttatgtcctaaaa

SEQ ID NO: 300721 - DNA, 57 bp, Artificial
  Synthetic oligonucleotide
aacagtaaaccctgttccgaccactgcctcacccacatcgtcaatcttctcgaggac

SEQ ID NO: 300722 - DNA, 55 bp, Artificial
  Synthetic oligonucleotide
aacagtaacagcggtgcccccaacgttacgactgtgcaggcctatgaattaggtt

SEQ ID NO: 300723 - DNA, 60 bp, Artificial
  Synthetic oligonucleotide
aacagtaataagaaattcatgcatctctcaagacttatcgtctgggttgttccaactata

SEQ ID NO: 300724 - DNA, 56 bp, Artificial
  Synthetic oligonucleotide
aacagtaatggcaacttaattgcaccgcggggatatttcaaaatacgagcagggaa

SEQ ID NO: 300725 - DNA, 55 bp, Artificial
  Synthetic oligonucleotide
aacagtacagagagctaaagcctcaaacatgtattgtctgtgaatctatccctgt

SEQ ID NO: 300726 - DNA, 60 bp, Artificial
  Synthetic oligonucleotide
aacagtacgtgctgtcatttgacccggctaagcaaaccatggccgctggcccacatagcc

SEQ ID NO: 300727 - DNA, 55 bp, Artificial
  Synthetic oligonucleotide
aacagtagctactttgcgtggcgcccatatggagaattcttcaactttaggtcgg

SEQ ID NO: 300728 - DNA, 53 bp, Artificial
  Synthetic oligonucleotide
aacagtaggcaatcccctcaggctagtgtaccacctttacggagttttttata

SEQ ID NO: 300729 - DNA, 55 bp, Artificial
  Synthetic oligonucleotide
aacagtatgctggtgggctaagatagagcataccacaggagttccctataacccc

SEQ ID NO: 300730 - DNA, 60 bp, Artificial
  Synthetic oligonucleotide
aacagtatgtcagacgccgcttcttcaattagtagatctacatccataagatcaataggt

SEQ ID NO: 300731 - DNA, 58 bp, Artificial
  Synthetic oligonucleotide
aacagtatgttggtgacgacaccttattttacactgaattgagaacgcggtcagttga

SEQ ID NO: 300732 - DNA, 56 bp, Artificial
  Synthetic oligonucleotide
aacagtattggtgggacctactcctgttaatattattggaagaaacatattgacag

SEQ ID NO: 300733 - DNA, 60 bp, Artificial
  Synthetic oligonucleotide
aacagtatttgcaacactactggagctgagaaaccgaagtttctgccagatttgtatgat

SEQ ID NO: 300734 - DNA, 60 bp, Artificial
  Synthetic oligonucleotide
aacagtcaattgcagacaatgcacaatctctgtacaagacatgtatactcctccttactg

SEQ ID NO: 300735 - DNA, 52 bp, Artificial
  Synthetic oligonucleotide
aacagtcacaaatgacatgggtacattatgctttagaatagttactgaagaa

SEQ ID NO: 300736 - DNA, 55 bp, Artificial
  Synthetic oligonucleotide
aacagtccctccgtgcctctggtagcctactgacaggcggctgttgagcacatac

SEQ ID NO: 300737 - DNA, 51 bp, Artificial
  Synthetic oligonucleotide
aacagtccgatttaatcccaagggtcgatggtggtaattatttgaaaccgg

SEQ ID NO: 300738 - DNA, 60 bp, Artificial
  Synthetic oligonucleotide
aacagtcgtagacaacacactcatggtgttgatagcaatgagatactcactacgtcggtt

SEQ ID NO: 300739 - DNA, 51 bp, Artificial
  Synthetic oligonucleotide
aacagtcttttcgataggatatacgacgaagcaaaccggatattacgagaa

SEQ ID NO: 300740 - DNA, 57 bp, Artificial
  Synthetic oligonucleotide
aacagtgaagagcgccacaagagatcaccaaagggtacttaggtgggtacataatag

SEQ ID NO: 300741 - DNA, 60 bp, Artificial
  Synthetic oligonucleotide
aacagtgaattctttgatctcagatcagttgttaatgaggaatcatctaagagacctaat

SEQ ID NO: 300742 - DNA, 52 bp, Artificial
  Synthetic oligonucleotide
aacagtgactggcctgtttgaaagccccctcttcggcaccattatctccttg

SEQ ID NO: 300743 - DNA, 57 bp, Artificial
  Synthetic oligonucleotide
aacagtgagtgctacaatccatgcttttacgtagagttaattagaggaagacccgaa

SEQ ID NO: 300744 - DNA, 60 bp, Artificial
  Synthetic oligonucleotide
aacagtgattgcccttgcaataatcagcgttgtcaaaggtgaccaaatctgcatcggtta

SEQ ID NO: 300745 - DNA, 60 bp, Artificial
  Synthetic oligonucleotide
aacagtggaggccgacccagatgatgttaacaaaagtacactacagagcagacaggcggc

SEQ ID NO: 300746 - DNA, 60 bp, Artificial
  Synthetic oligonucleotide
aacagtggcgagttccctagtactggcaatcatggtggctggtctatctttatggatgtg

SEQ ID NO: 300747 - DNA, 60 bp, Artificial
  Synthetic oligonucleotide
aacagtgggccgtcttgtcggttatggtgccgttcatgatggagagcatccggcatcatg

SEQ ID NO: 300748 - DNA, 58 bp, Artificial
  Synthetic oligonucleotide
aacagtggggagatgccctcgatatgtcaaacaaacaagcctccttttggccacagga

SEQ ID NO: 300749 - DNA, 55 bp, Artificial
  Synthetic oligonucleotide
aacagtggtatccgaggtaaagcagttgtcgacgcctatacagcttcagctgaag

SEQ ID NO: 300750 - DNA, 53 bp, Artificial
  Synthetic oligonucleotide
aacagtgtatactcgttcaactaagcgagtagaagttgtgtcggagagtagtg

SEQ ID NO: 300751 - DNA, 60 bp, Artificial
  Synthetic oligonucleotide
aacagtgtatgcaaccgcatgtgacctgcaatatccgttcggctcaccactaactgaaaa

SEQ ID NO: 300752 - DNA, 53 bp, Artificial
  Synthetic oligonucleotide
aacagtgtccaaactaatgtcacagctgttaaatataccagagacacatatgg

SEQ ID NO: 300753 - DNA, 55 bp, Artificial
  Synthetic oligonucleotide
aacagtgtctgttccttgtgtttaggatggaaacctgaggttgcgaactacgtgt

SEQ ID NO: 300754 - DNA, 51 bp, Artificial
  Synthetic oligonucleotide
aacagtgttgaagcgtgaaaatgtaattccgcgttctgatatccttgattc

SEQ ID NO: 300755 - DNA, 60 bp, Artificial
  Synthetic oligonucleotide
aacagttagtgagaacactgagaggcatactgctgctgatgtgaatcagaacatgcactc

SEQ ID NO: 300756 - DNA, 56 bp, Artificial
  Synthetic oligonucleotide
aacagttccaattgggctcttgctcacctggatcaggaacccgaggtctaagttgg

SEQ ID NO: 300757 - DNA, 58 bp, Artificial
  Synthetic oligonucleotide
aacagttctggcatacttcgagatgtcagttttgctagtggatttcgggagttagcgc

SEQ ID NO: 300758 - DNA, 55 bp, Artificial
  Synthetic oligonucleotide
aacagttgaagagtgaacctttttacgcgagtcccacactccgtatgagaggtac

SEQ ID NO: 300759 - DNA, 50 bp, Artificial
  Synthetic oligonucleotide
aacagttgcaaaaggattaagtacattattgcacgtacctgaaacctgta

SEQ ID NO: 300760 - DNA, 55 bp, Artificial
  Synthetic oligonucleotide
aacagttggctggctgcggttctaggagagccggaggggtgccgtggactaggga

SEQ ID NO: 300761 - DNA, 57 bp, Artificial
  Synthetic oligonucleotide
aacagttgtcattccaccagagctattggaagggttggattacagcttcaactcggt

SEQ ID NO: 300762 - DNA, 59 bp, Artificial
  Synthetic oligonucleotide
aacagtttggcccactggattctgaccctctgtgcaatggttgaggtgacccggattga

SEQ ID NO: 300763 - DNA, 58 bp, Artificial
  Synthetic oligonucleotide
aacagttttactcgcctactccagccgcagaccaaggctacggatatcctcctcagaa

SEQ ID NO: 300764 - DNA, 56 bp, Artificial
  Synthetic oligonucleotide
aacataaaacatgagtttggcataccatataacccacaaagtcaaggggtagtaga

SEQ ID NO: 300765 - DNA, 51 bp, Artificial
  Synthetic oligonucleotide
aacataaaagtctccctgataacactgttccaaccaataggtcgtcatcca

SEQ ID NO: 300766 - DNA, 55 bp, Artificial
  Synthetic oligonucleotide
aacataaacctatcgaagaatgaacggacgatgacaccagtaggcctcgagcaca

SEQ ID NO: 300767 - DNA, 50 bp, Artificial
  Synthetic oligonucleotide
aacataaacctccggaggagcttggaagatcttatccaaattagccttga

SEQ ID NO: 300768 - DNA, 60 bp, Artificial
  Synthetic oligonucleotide
aacataacagatgtgttctccatgccctggactagtgtgccctcaagttggcgtatatct

SEQ ID NO: 300769 - DNA, 51 bp, Artificial
  Synthetic oligonucleotide
aacataactattgcggacttggagttacgagtacgggtattaaaggagctg

SEQ ID NO: 300770 - DNA, 60 bp, Artificial
  Synthetic oligonucleotide
aacataagtgatagtttgttctggctgagggaagctgaaggcaattccgtagtgcttgac

SEQ ID NO: 300771 - DNA, 55 bp, Artificial
  Synthetic oligonucleotide
aacataagttactgtactactggaaactgaccggcctacccctaccagatgagtg

SEQ ID NO: 300772 - DNA, 58 bp, Artificial
  Synthetic oligonucleotide
aacatacaagtagccataaaccaagtgagaaggctcatcgggaatgagaattatctag

SEQ ID NO: 300773 - DNA, 60 bp, Artificial
  Synthetic oligonucleotide
aacataccagatctcaggtcaaatagaggctaagatcccccatactgtgagctctaaaaa

SEQ ID NO: 300774 - DNA, 59 bp, Artificial
  Synthetic oligonucleotide
aacatacccaaatctacccagcgattcgcagtatacgcaccctcgtggctacgttcgca

SEQ ID NO: 300775 - DNA, 54 bp, Artificial
  Synthetic oligonucleotide
aacataccctggacttctggtgtacagtttagatatactgatccagacacatat

SEQ ID NO: 300776 - DNA, 57 bp, Artificial
  Synthetic oligonucleotide
aacataccgacacctcagttggccaatgtgggtggtcaccaatggaaggcggcttta

SEQ ID NO: 300777 - DNA, 60 bp, Artificial
  Synthetic oligonucleotide
aacatacctcgcatcgttctaactcctatcccagataggcgtggactacatggtcgtctc

SEQ ID NO: 300778 - DNA, 53 bp, Artificial
  Synthetic oligonucleotide
aacatactccggactcaggaatcagagtgtgtttgtatcaatggtacctgcac

SEQ ID NO: 300779 - DNA, 60 bp, Artificial
  Synthetic oligonucleotide
aacatactcgactatgctggtcttggaaacgttgatgcttgtgcttcacatttatccagg

SEQ ID NO: 300780 - DNA, 56 bp, Artificial
  Synthetic oligonucleotide
aacatactcggcggctggatagccgcccaagtggctcccccccccgcgtccacagc

SEQ ID NO: 300781 - DNA, 55 bp, Artificial
  Synthetic oligonucleotide
aacatactgccgcggaggcgcagtaagggctaggggttcctgaacctctccggga

SEQ ID NO: 300782 - DNA, 60 bp, Artificial
  Synthetic oligonucleotide
aacatactgctaataatagcacgatgatggacggattccttcgcgcttggattcctgctt

SEQ ID NO: 300783 - DNA, 56 bp, Artificial
  Synthetic oligonucleotide
aacatagacatgagggacaaatttgccaaatgggatataagcttccaagaacaagc

SEQ ID NO: 300784 - DNA, 55 bp, Artificial
  Synthetic oligonucleotide
aacatagacctgcaggctgctcttcgcctccattgctgcaccccgtgaggggtgc

SEQ ID NO: 300785 - DNA, 59 bp, Artificial
  Synthetic oligonucleotide
aacatagacgaagtgccaagagctaacaatgaactcgtcccagtagaccatgagagcaa

SEQ ID NO: 300786 - DNA, 59 bp, Artificial
  Synthetic oligonucleotide
aacatagacgaggtgccaagagccaacaacgaacttgttccagtggaccatgaaagcaa

SEQ ID NO: 300787 - DNA, 60 bp, Artificial
  Synthetic oligonucleotide
aacatagcacatggggacattggacaggattcccgagacaacatatctcttgataataag

SEQ ID NO: 300788 - DNA, 58 bp, Artificial
  Synthetic oligonucleotide
aacatagctatcccttctgggtgggtgtcaagttctagcgacggtagtagctgttgcc

SEQ ID NO: 300789 - DNA, 60 bp, Artificial
  Synthetic oligonucleotide
aacatagctctgacaagagatagtggtcgttggatgcctcgatcggacgattgaggtttg

SEQ ID NO: 300790 - DNA, 55 bp, Artificial
  Synthetic oligonucleotide
aacatagctgaattttcaattaatccacaactcttctgtgactataacgtagtgt

SEQ ID NO: 300791 - DNA, 60 bp, Artificial
  Synthetic oligonucleotide
aacatagctgcgttagtggaccaagtgacacggatgatgcactccaagggtaaaacagtg

SEQ ID NO: 300792 - DNA, 52 bp, Artificial
  Synthetic oligonucleotide
aacatagctttgatgagatacaattcaagtctagaacttgatatgtcggaat

SEQ ID NO: 300793 - DNA, 55 bp, Artificial
  Synthetic oligonucleotide
aacataggaaattgtcgttgaactacatgttgtaaggctttagagaaataaggga

SEQ ID NO: 300794 - DNA, 60 bp, Artificial
  Synthetic oligonucleotide
aacataggtagagtagccagagaatttccaggactatacacagacgttgtctataatcca

SEQ ID NO: 300795 - DNA, 56 bp, Artificial
  Synthetic oligonucleotide
aacataggtttgatgaaataccggataaagagttagcggtgagcatactagcaaag

SEQ ID NO: 300796 - DNA, 53 bp, Artificial
  Synthetic oligonucleotide
aacatagtaacagcaagagtatatttgctgtgattacgagaatcattcattgt

SEQ ID NO: 300797 - DNA, 56 bp, Artificial
  Synthetic oligonucleotide
aacatatactaataccgacggtgctcgtttgtgttagggacaaataataatgacaa

SEQ ID NO: 300798 - DNA, 60 bp, Artificial
  Synthetic oligonucleotide
aacatatatatctgtgtattagcaggcataataacgttaatatgtatgcggttgataatt

SEQ ID NO: 300799 - DNA, 55 bp, Artificial
  Synthetic oligonucleotide
aacatatcatccatttcagtgtggacggatgtttccgaacaaatagtaggttcgt

SEQ ID NO: 300800 - DNA, 50 bp, Artificial
  Synthetic oligonucleotide
aacatatctggaacatttgccattcgcagtactgaaatgatgacggaagt

SEQ ID NO: 300801 - DNA, 60 bp, Artificial
  Synthetic oligonucleotide
aacatatgacaggagaatgtgtgcagagacctcaaagacacaacataacagtagacagga

SEQ ID NO: 300802 - DNA, 58 bp, Artificial
  Synthetic oligonucleotide
aacatattgagcttcttcttggccccaaggactgcctttaggaggtcctcactgttgc

SEQ ID NO: 300803 - DNA, 56 bp, Artificial
  Synthetic oligonucleotide
aacatcaaaaggaaccaccctttcagtggatggggtatgagctccacccagacaag

SEQ ID NO: 300804 - DNA, 60 bp, Artificial
  Synthetic oligonucleotide
aacatcaaatatcgtcctccaaaaactgatgaatacgctgccgacaatagaatagcaagt

SEQ ID NO: 300805 - DNA, 57 bp, Artificial
  Synthetic oligonucleotide
aacatcaatggaggactgtggtgtccttgccgttgcggttacagaaggtgttattgt

SEQ ID NO: 300806 - DNA, 60 bp, Artificial
  Synthetic oligonucleotide
aacatcacaatatatccacatcagtttatcaatcttaggagtaataactcagctacactc

SEQ ID NO: 300807 - DNA, 55 bp, Artificial
  Synthetic oligonucleotide
aacatcacatcaggattcctaggacccctgctcgtgttacaggcggggtttttct

SEQ ID NO: 300808 - DNA, 59 bp, Artificial
  Synthetic oligonucleotide
aacatcaccatgagtgcagaggtggcagaactgtacagattggagttgggagattataa

SEQ ID NO: 300809 - DNA, 60 bp, Artificial
  Synthetic oligonucleotide
aacatcacccgggtagagtctgagagcaaagtcatcgtgcttgactcatttgatcccatc

SEQ ID NO: 300810 - DNA, 53 bp, Artificial
  Synthetic oligonucleotide
aacatcactgtgaatgggttccatgtcagaattgtgaatggttacccaactaa

SEQ ID NO: 300811 - DNA, 57 bp, Artificial
  Synthetic oligonucleotide
aacatcactttttcgcataacggcggactaatagcacctagtagagtgagtaaacta

SEQ ID NO: 300812 - DNA, 58 bp, Artificial
  Synthetic oligonucleotide
aacatcaggaggctgtagacaaatactggaacagctagaaccaacccttaagacagga

SEQ ID NO: 300813 - DNA, 57 bp, Artificial
  Synthetic oligonucleotide
aacatcatgataaactgcgagaaaacgccccaagacctctcccgatgggtcctcaac

SEQ ID NO: 300814 - DNA, 55 bp, Artificial
  Synthetic oligonucleotide
aacatcatttgggctgaagagtgtggtaactttggtaactgggttgaagacttta

SEQ ID NO: 300815 - DNA, 59 bp, Artificial
  Synthetic oligonucleotide
aacatccaccggaatggtgcaatttgggagcttcccaccagtgccattacgatccacaa

SEQ ID NO: 300816 - DNA, 60 bp, Artificial
  Synthetic oligonucleotide
aacatccagaaggcaactgaatcctgtgaagattgctcacccatcaacttccaaaagtgc

SEQ ID NO: 300817 - DNA, 56 bp, Artificial
  Synthetic oligonucleotide
aacatccagacgcacacacaaaggtaggacctcctccttctttacaagtcctagct

SEQ ID NO: 300818 - DNA, 56 bp, Artificial
  Synthetic oligonucleotide
aacatccaggcgtggtactgttcgctttagtagattaggtcaaagggcaactatgt

SEQ ID NO: 300819 - DNA, 60 bp, Artificial
  Synthetic oligonucleotide
aacatccagtgatgccacccctgctatattagatgtaacctccactaccacacctattag

SEQ ID NO: 300820 - DNA, 60 bp, Artificial
  Synthetic oligonucleotide
aacatccatcggtgtattgtgggcatgatacaacggcatacaccagagccactgactcag

SEQ ID NO: 300821 - DNA, 60 bp, Artificial
  Synthetic oligonucleotide
aacatccattgactttgaggttgatggaaagagatactctcttgtatcctcgcgtaagcc

SEQ ID NO: 300822 - DNA, 55 bp, Artificial
  Synthetic oligonucleotide
aacatcccagcgctgggaaagaccctaagaaaactggaggacccatatataggaa

SEQ ID NO: 300823 - DNA, 55 bp, Artificial
  Synthetic oligonucleotide
aacatcccgtgatcacattaatgttcaaataacaaaggacctagatttcgaaaac

SEQ ID NO: 300824 - DNA, 59 bp, Artificial
  Synthetic oligonucleotide
aacatccgcaacgtagatcaactctccgtcgtctgattgtcctcttcgctattcggtgt

SEQ ID NO: 300825 - DNA, 58 bp, Artificial
  Synthetic oligonucleotide
aacatcctaaatgtgccagaatgcgtgtccctatacgggttcaacccattctcaggcg

SEQ ID NO: 300826 - DNA, 60 bp, Artificial
  Synthetic oligonucleotide
aacatcgaagagggagctacactggttcctgatgtttactctcagttgattccttacatg

SEQ ID NO: 300827 - DNA, 55 bp, Artificial
  Synthetic oligonucleotide
aacatcgatgtcgctgaattcagacgctgcataacacatgtacttactgctgcac

SEQ ID NO: 300828 - DNA, 60 bp, Artificial
  Synthetic oligonucleotide
aacatcgcacgctcctcaggctcacaatacttgtagagtgatttctgtcatcctactgtt

SEQ ID NO: 300829 - DNA, 59 bp, Artificial
  Synthetic oligonucleotide
aacatcgctaggaaccttgatggatatcaacaaatcaatttggaagagttaatgagaac

SEQ ID NO: 300830 - DNA, 60 bp, Artificial
  Synthetic oligonucleotide
aacatcgctgaagagactgaagcagcgaagggtgaggtgggtgatcatttctcacagatg

SEQ ID NO: 300831 - DNA, 58 bp, Artificial
  Synthetic oligonucleotide
aacatcggtcccacaggcagatggtaactaccaccaacccactaatcaggcatgaaaa

SEQ ID NO: 300832 - DNA, 60 bp, Artificial
  Synthetic oligonucleotide
aacatcgtgacaagagactccatcttgtcaagacgaatccaactagcccacacacgtgtg

SEQ ID NO: 300833 - DNA, 58 bp, Artificial
  Synthetic oligonucleotide
aacatcgtggacacgcagtacttgtacggggtgggatcaagcgtcgtgtcctgggcca

SEQ ID NO: 300834 - DNA, 60 bp, Artificial
  Synthetic oligonucleotide
aacatcgttgagaggttctcccccttgttcagtcatgcaggagattgtcacagctggcac

SEQ ID NO: 300835 - DNA, 60 bp, Artificial
  Synthetic oligonucleotide
aacatctaactcatacaatgggacatgttacccaggagatttcaccaattatgaggagct

SEQ ID NO: 300836 - DNA, 55 bp, Artificial
  Synthetic oligonucleotide
aacatctaagaacactacattaaccccatgcctggtctccactagttgaaggcga

SEQ ID NO: 300837 - DNA, 60 bp, Artificial
  Synthetic oligonucleotide
aacatctcacgtttggttcatctacacactggacagtggtctacacagcatggagtcacg

SEQ ID NO: 300838 - DNA, 59 bp, Artificial
  Synthetic oligonucleotide
aacatctctattaacttgtgacacttgctcgcgtgccagtctaaccccaacacttataa

SEQ ID NO: 300839 - DNA, 60 bp, Artificial
  Synthetic oligonucleotide
aacatctgacttgacagtctgagtgaattgactcaaacctctccttaaggactgagtcca

SEQ ID NO: 300840 - DNA, 59 bp, Artificial
  Synthetic oligonucleotide
aacatctgcgacgacaaaacaaagtaaagaaaccaggcgcatctcgtgcgccttacaca

SEQ ID NO: 300841 - DNA, 55 bp, Artificial
  Synthetic oligonucleotide
aacatcttaactaacgtggattatggaacggttaatcattggatcgattgggtaa

SEQ ID NO: 300842 - DNA, 60 bp, Artificial
  Synthetic oligonucleotide
aacatcttgatgcaggccatttattggcggatacaaatgtggttatagatgttccacttg

SEQ ID NO: 300843 - DNA, 57 bp, Artificial
  Synthetic oligonucleotide
aacatcttgctccgcaaacgtctccgtagcccatgaccaaaatggacgtaggtacta

SEQ ID NO: 300844 - DNA, 53 bp, Artificial
  Synthetic oligonucleotide
aacatgaacccctcctccggcggttcctatgtccgttataattatccctacgc

SEQ ID NO: 300845 - DNA, 60 bp, Artificial
  Synthetic oligonucleotide
aacatgaaggacggcagaactatcgtggtcccatgcagacatcaggacgaactgatagga

SEQ ID NO: 300846 - DNA, 60 bp, Artificial
  Synthetic oligonucleotide
aacatgaagttcatgtgcttcttcttcatcccataacgcttaggttcatagttgcaaggt

SEQ ID NO: 300847 - DNA, 60 bp, Artificial
  Synthetic oligonucleotide
aacatgaattattcatatcatgcgaacgcccgtataatttatcctcattcgtttatcgca

SEQ ID NO: 300848 - DNA, 60 bp, Artificial
  Synthetic oligonucleotide
aacatgaccccccagaccagtatcgcctcgggtcatgagacagaccccataaatcatgcc

SEQ ID NO: 300849 - DNA, 53 bp, Artificial
  Synthetic oligonucleotide
aacatgactaatgatgctagagtcatccagacactaaatctatataaacaaac

SEQ ID NO: 300850 - DNA, 60 bp, Artificial
  Synthetic oligonucleotide
aacatgagtgccctccattatataggcgtcatatatctggatatatgaacgtaattcaat

SEQ ID NO: 300851 - DNA, 59 bp, Artificial
  Synthetic oligonucleotide
aacatgagttaagagatgctaaggaagacattatcaggctccagaacgacatggctgag

SEQ ID NO: 300852 - DNA, 55 bp, Artificial
  Synthetic oligonucleotide
aacatgcaccactcgtcacgactccccagacgcggacctcatagaggccaacctc

SEQ ID NO: 300853 - DNA, 53 bp, Artificial
  Synthetic oligonucleotide
aacatgcacgaccattaatcaaagcaacactactgtagtagaaaccacatacg

SEQ ID NO: 300854 - DNA, 60 bp, Artificial
  Synthetic oligonucleotide
aacatgcagaaactgcaggttgtagcatgattgacgatattgagtcaccatcatcgatat

SEQ ID NO: 300855 - DNA, 55 bp, Artificial
  Synthetic oligonucleotide
aacatgcagacatatagaatgtatttagagatctactatgcactaatttgactta

SEQ ID NO: 300856 - DNA, 57 bp, Artificial
  Synthetic oligonucleotide
aacatgccacatgtggtatgcaatcttgaaatgggtcgaaaatttcggttccggtgt

SEQ ID NO: 300857 - DNA, 58 bp, Artificial
  Synthetic oligonucleotide
aacatgcccgcagcctaagccagtgcctaaactaatagtgaaaggaaatgtacaagta

SEQ ID NO: 300858 - DNA, 59 bp, Artificial
  Synthetic oligonucleotide
aacatggaacgcctgttgcacgcattccaagctaaaatccgccggttcggatacattga

SEQ ID NO: 300859 - DNA, 55 bp, Artificial
  Synthetic oligonucleotide
aacatggacatgaaaacgctggagatgtatgcttacgacatgctagttcagtgct

SEQ ID NO: 300860 - DNA, 60 bp, Artificial
  Synthetic oligonucleotide
aacatggactctgtccaaatgcaagtaatgaatgactccttgaaaggaggcgttctctac

SEQ ID NO: 300861 - DNA, 53 bp, Artificial
  Synthetic oligonucleotide
aacatggactctgttcagatgcaagtgatgaatgactctttaaaggggggtgt

SEQ ID NO: 300862 - DNA, 54 bp, Artificial
  Synthetic oligonucleotide
aacatggactggcgtggtcgtgtgtacgctgtgagcatgtttaacccacagggt

SEQ ID NO: 300863 - DNA, 56 bp, Artificial
  Synthetic oligonucleotide
aacatggatgttcaggattgtaggcttaagttcgggaagacttttcgaccttatga

SEQ ID NO: 300864 - DNA, 60 bp, Artificial
  Synthetic oligonucleotide
aacatggcattcaacgctctcaaccgtccttcaaagtggtcaatcactctactcaacgag

SEQ ID NO: 300865 - DNA, 54 bp, Artificial
  Synthetic oligonucleotide
aacatggcccgacagagtatgggtgttctgccgtcgctcggcgatcgtaatggt

SEQ ID NO: 300866 - DNA, 60 bp, Artificial
  Synthetic oligonucleotide
aacatggccgcgcctaggctacaagaaagtgtgaatgagtttgagattattgaaaacaca

SEQ ID NO: 300867 - DNA, 57 bp, Artificial
  Synthetic oligonucleotide
aacatggcggagaggggcggagtttatgctaattaatttatgcaaactaggaggagc

SEQ ID NO: 300868 - DNA, 55 bp, Artificial
  Synthetic oligonucleotide
aacatgggaaacgcattgaggaaaagcaaatttgcaggatggccagcagtaagag

SEQ ID NO: 300869 - DNA, 55 bp, Artificial
  Synthetic oligonucleotide
aacatgggaccaagacataccctgtaaacctctaccatatactaatctacatcct

SEQ ID NO: 300870 - DNA, 59 bp, Artificial
  Synthetic oligonucleotide
aacatgggccttgcccacctataacaaccacctctacaagcaaatctccagtgcttcaa

SEQ ID NO: 300871 - DNA, 57 bp, Artificial
  Synthetic oligonucleotide
aacatggggaagggatttagttggtgtgaccatgccatttgtagccgagcagtttaa

SEQ ID NO: 300872 - DNA, 55 bp, Artificial
  Synthetic oligonucleotide
aacatggtaaaacaatgcgtcttaatgggtcttatcctttgagtttatgggcgag

SEQ ID NO: 300873 - DNA, 54 bp, Artificial
  Synthetic oligonucleotide
aacatggtcaacttttggttacaggcttttgagtttgcttactttaatggacca

SEQ ID NO: 300874 - DNA, 53 bp, Artificial
  Synthetic oligonucleotide
aacatggtttagaactacagctaaacaaacatttcgagaatttttcggataac

SEQ ID NO: 300875 - DNA, 60 bp, Artificial
  Synthetic oligonucleotide
aacatgtatgataatgagcccagcactgctactatcaagaatgatcttcgagatcgttat

SEQ ID NO: 300876 - DNA, 55 bp, Artificial
  Synthetic oligonucleotide
aacatgtcatgtggtcgattcatatggatcaattagtactgggtatcacattctg

SEQ ID NO: 300877 - DNA, 59 bp, Artificial
  Synthetic oligonucleotide
aacatgtcgcagcagtacctgtacgcccctataacgcagcgagtgaccacgcgtgtcgc

SEQ ID NO: 300878 - DNA, 60 bp, Artificial
  Synthetic oligonucleotide
aacatgtcgctacgtgcacagaatgctcaggacgttgttccaccgctagactatctgaac

SEQ ID NO: 300879 - DNA, 60 bp, Artificial
  Synthetic oligonucleotide
aacatgtctcaacaaaacaatgcacgcgtctcaaccgcttctcgcaccagttccgtcgaa

SEQ ID NO: 300880 - DNA, 52 bp, Artificial
  Synthetic oligonucleotide
aacatgtgaagtgtgcaagagagttgcacgcagcaacagacatgaggttagc

SEQ ID NO: 300881 - DNA, 60 bp, Artificial
  Synthetic oligonucleotide
aacatgtgattatggacacagatttcgtcagacgtgttgccgaagtttcattccggcaat

SEQ ID NO: 300882 - DNA, 60 bp, Artificial
  Synthetic oligonucleotide
aacatgtgcattgaatgttcataattgtaaatggtgtcagattactagctgttacaaaat

SEQ ID NO: 300883 - DNA, 53 bp, Artificial
  Synthetic oligonucleotide
aacatgtgggatcctcttttgaacgagtttcctgaaactgttcacggttttag

SEQ ID NO: 300884 - DNA, 60 bp, Artificial
  Synthetic oligonucleotide
aacatgtgtacccttattgcaatggatctgggagagttatgtgatgacacgatgacctac

SEQ ID NO: 300885 - DNA, 54 bp, Artificial
  Synthetic oligonucleotide
aacatgtgtctacgcctttccttgctagggaatggtataagttagtgctagaac

SEQ ID NO: 300886 - DNA, 51 bp, Artificial
  Synthetic oligonucleotide
aacatgttaccccggggagttcatcgattatgaggaattaagagaacagct

SEQ ID NO: 300887 - DNA, 58 bp, Artificial
  Synthetic oligonucleotide
aacatgttcaaactctcactaccgaaagattacagttaacttctgtcacatccttatg

SEQ ID NO: 300888 - DNA, 58 bp, Artificial
  Synthetic oligonucleotide
aacatgttcgacaacgagcctagcaccgccactgtgaaaaacgatctccgtgatcgtt

SEQ ID NO: 300889 - DNA, 55 bp, Artificial
  Synthetic oligonucleotide
aacatgttgggtcaaaagtctgacacgtccatcctctttgaggtccggcctattc

SEQ ID NO: 300890 - DNA, 59 bp, Artificial
  Synthetic oligonucleotide
aacatgtttgacaacgaacctagcactgctacggtcaagaacgatctccgtgatcattt

SEQ ID NO: 300891 - DNA, 50 bp, Artificial
  Synthetic oligonucleotide
aacattaacgaccgagaaattgcaactaacatcagtaacatcattatgta

SEQ ID NO: 300892 - DNA, 56 bp, Artificial
  Synthetic oligonucleotide
aacattacacccaatggagtggttcagtagagatcacttgcatgttcaccgggact

SEQ ID NO: 300893 - DNA, 55 bp, Artificial
  Synthetic oligonucleotide
aacattaccaggatgtacagaaggagattaagcttcgagcgtccacggtgcaggc

SEQ ID NO: 300894 - DNA, 55 bp, Artificial
  Synthetic oligonucleotide
aacattacgggtcaccgccgtagcaggcgctcgctgagtcgtctctcgcctgact

SEQ ID NO: 300895 - DNA, 54 bp, Artificial
  Synthetic oligonucleotide
aacattagcgggcaattcacctctttgccccattagtggttgggccgtacacag

SEQ ID NO: 300896 - DNA, 55 bp, Artificial
  Synthetic oligonucleotide
aacattaggtataggttgtcaaactactaatgtaaacacatttgaacaagttaca

SEQ ID NO: 300897 - DNA, 55 bp, Artificial
  Synthetic oligonucleotide
aacattagtggagaaaaatggtatgaaactctacaacaggtagctataaaattag

SEQ ID NO: 300898 - DNA, 54 bp, Artificial
  Synthetic oligonucleotide
aacattagtggagctgactggaatagaactttacaaggggtaggtagaaaatta

SEQ ID NO: 300899 - DNA, 54 bp, Artificial
  Synthetic oligonucleotide
aacattagttcgggatccccgtgtgtcccctgttaatgtccacctcaaagtata

SEQ ID NO: 300900 - DNA, 53 bp, Artificial
  Synthetic oligonucleotide
aacattatcatgtatgctcctacaatctgggtgcgcatggtcttgtgcactca

SEQ ID NO: 300901 - DNA, 59 bp, Artificial
  Synthetic oligonucleotide
aacattatgtcggcttacgcttttcactcttgcgataagtgtgttgatggacccaagaa

SEQ ID NO: 300902 - DNA, 59 bp, Artificial
  Synthetic oligonucleotide
aacattatgtgcctctacacaaaatcctgtgccaagtacatatgaccctactaagttta

SEQ ID NO: 300903 - DNA, 60 bp, Artificial
  Synthetic oligonucleotide
aacattatttgcacttgatgtgatcagatctccgagtgcagccgagtcaatgaaagttgg

SEQ ID NO: 300904 - DNA, 52 bp, Artificial
  Synthetic oligonucleotide
aacattcaactcccgcctaacacgaacacctacgagtacatgaacgggcgaa

SEQ ID NO: 300905 - DNA, 52 bp, Artificial
  Synthetic oligonucleotide
aacattcacgcgtccagttgaccgcgacgagacgccagacatgggtgccgtg

SEQ ID NO: 300906 - DNA, 55 bp, Artificial
  Synthetic oligonucleotide
aacattcatttacaagaggacattattgatcggtgtcaacaatttgtgggccctc

SEQ ID NO: 300907 - DNA, 60 bp, Artificial
  Synthetic oligonucleotide
aacattccatgagtggagcttctgctgattctactcaggcataaacactcatgatgacca

SEQ ID NO: 300908 - DNA, 57 bp, Artificial
  Synthetic oligonucleotide
aacattccattaccttctgatggagatgtgttgttgtcgggaattaaaccgacttca

SEQ ID NO: 300909 - DNA, 52 bp, Artificial
  Synthetic oligonucleotide
aacattccggaactgcaatccactttcgatttgaatgcggaagtcgacacgt

SEQ ID NO: 300910 - DNA, 51 bp, Artificial
  Synthetic oligonucleotide
aacattcgattacgattcatggaaccatggaatattggtgaacaaatgctc

SEQ ID NO: 300911 - DNA, 51 bp, Artificial
  Synthetic oligonucleotide
aacattcggtcccgttcatttccgtaaccaaattaaaatacgccgcagagt

SEQ ID NO: 300912 - DNA, 57 bp, Artificial
  Synthetic oligonucleotide
aacattctatcgtaactccgtttcaatgtcaccacgacgttgaatgtcaaggctttg

SEQ ID NO: 300913 - DNA, 60 bp, Artificial
  Synthetic oligonucleotide
aacattctatgcaacaggtgatataataggagacataagacaagcatattgtctcattaa

SEQ ID NO: 300914 - DNA, 60 bp, Artificial
  Synthetic oligonucleotide
aacattgacggtatttagcgagtatcaatggttcgctcgagaggtggctgacaacatgac

SEQ ID NO: 300915 - DNA, 58 bp, Artificial
  Synthetic oligonucleotide
aacattgactctttgctacctgtattcggcggagtccgcccaataaatgtggatcagt

SEQ ID NO: 300916 - DNA, 60 bp, Artificial
  Synthetic oligonucleotide
aacattgaggtcctgtttgacgatataagtgccggtataatatcaggcacacagactcga

SEQ ID NO: 300917 - DNA, 57 bp, Artificial
  Synthetic oligonucleotide
aacattgataagtcaaggcttaccgggtctgatgaaatctggaagttattgtacctc

SEQ ID NO: 300918 - DNA, 51 bp, Artificial
  Synthetic oligonucleotide
aacattgattgaagtcgaacagctaaactttgaggattacgagatacaatt

SEQ ID NO: 300919 - DNA, 60 bp, Artificial
  Synthetic oligonucleotide
aacattgcaggggagcagtctggacatgctctacctctgatgatgcaaggaaatggaatc

SEQ ID NO: 300920 - DNA, 60 bp, Artificial
  Synthetic oligonucleotide
aacattgcctttccacaacatccatccattgacaataggtgaatgtcccaaatatgtaaa

SEQ ID NO: 300921 - DNA, 60 bp, Artificial
  Synthetic oligonucleotide
aacattgcgcccaccggcacatcgcgtggcacaacaccaaatttgacagagttggacacc

SEQ ID NO: 300922 - DNA, 56 bp, Artificial
  Synthetic oligonucleotide
aacattggagccaggtggtctcttgacccaatggacaatgtgaaccccttcaatca

SEQ ID NO: 300923 - DNA, 54 bp, Artificial
  Synthetic oligonucleotide
aacattggataactaaaactgatataattgactatatattacctggatggaaac

SEQ ID NO: 300924 - DNA, 55 bp, Artificial
  Synthetic oligonucleotide
aacattgggcttcatttcaaggtaggagacacgccggaaatagggacccccagca

SEQ ID NO: 300925 - DNA, 60 bp, Artificial
  Synthetic oligonucleotide
aacattgtatttgatatccctcgtgataagaaggattatctgcaatacagtttaatagag

SEQ ID NO: 300926 - DNA, 54 bp, Artificial
  Synthetic oligonucleotide
aacattgtcaaacaagagtagctaaagtctggaaacagttattaattgtcgtca

SEQ ID NO: 300927 - DNA, 59 bp, Artificial
  Synthetic oligonucleotide
aacattgtggatgtgcagtacttgtacggggtggggtcaagcattgcgtcctgggctat

SEQ ID NO: 300928 - DNA, 52 bp, Artificial
  Synthetic oligonucleotide
aacattgttcatctctgcggagacggggtgcgtggttgtcacgggtgggtca

SEQ ID NO: 300929 - DNA, 52 bp, Artificial
  Synthetic oligonucleotide
aacatttaaactaggcttcaaataaacaaggccgtgggagtttcacttgtcg

SEQ ID NO: 300930 - DNA, 60 bp, Artificial
  Synthetic oligonucleotide
aacatttatatattgacttggattgcgggctataaataagacgcagggaaatggcattga

SEQ ID NO: 300931 - DNA, 56 bp, Artificial
  Synthetic oligonucleotide
aacatttattgaaatggggactcaccactccagacaagaaacatcaaaaagagccc

SEQ ID NO: 300932 - DNA, 58 bp, Artificial
  Synthetic oligonucleotide
aacatttcaaccaactccgaaaatactgaaaggcacactgcaagggatgtgaatcaaa

SEQ ID NO: 300933 - DNA, 59 bp, Artificial
  Synthetic oligonucleotide
aacatttcctgcgcattctttagcagaaactccgacataggtcgttcgcctgtatgaaa

SEQ ID NO: 300934 - DNA, 52 bp, Artificial
  Synthetic oligonucleotide
aacatttcggaatgttaatccggttaagttggcgtgaatccatttcccatct

SEQ ID NO: 300935 - DNA, 60 bp, Artificial
  Synthetic oligonucleotide
aacatttctgattggggtatgtatcttgaaggatttatgtctgaggaatctggagaaaca

SEQ ID NO: 300936 - DNA, 60 bp, Artificial
  Synthetic oligonucleotide
aacatttggactgctccgcttcctcctgagactgagctttctcgccaaatgacgacttct

SEQ ID NO: 300937 - DNA, 57 bp, Artificial
  Synthetic oligonucleotide
aacatttgtaattcgaattgtacagacgtatcgaaaatgttcccgctgttatcgtga

SEQ ID NO: 300938 - DNA, 55 bp, Artificial
  Synthetic oligonucleotide
aacatttgtcaacttaacaggttgctattcttgtaactatggggctagagtgtgc

SEQ ID NO: 300939 - DNA, 60 bp, Artificial
  Synthetic oligonucleotide
aacattttataggacacactctttacattacaacacatcagatcttagcattaccgcttg

SEQ ID NO: 300940 - DNA, 56 bp, Artificial
  Synthetic oligonucleotide
aacattttcatgtacacggaagaagggtgacgcacgtccgaatagtactcgaacga

SEQ ID NO: 300941 - DNA, 56 bp, Artificial
  Synthetic oligonucleotide
aacattttcttgcttcctactgggcgacgactggcaaaaacttacaatatactaga

SEQ ID NO: 300942 - DNA, 60 bp, Artificial
  Synthetic oligonucleotide
aacatttttcacttacaacatgctggatgatcaaattaatgcaccacagcagcatttgcc

SEQ ID NO: 300943 - DNA, 57 bp, Artificial
  Synthetic oligonucleotide
aaccaaaactatctattcaaagccaacccaaattatgctggcaactctattaagcca

SEQ ID NO: 300944 - DNA, 52 bp, Artificial
  Synthetic oligonucleotide
aaccaaaagcttgatagggttgagtctttaatagctaaggtggaacgttggg

SEQ ID NO: 300945 - DNA, 52 bp, Artificial
  Synthetic oligonucleotide
aaccaaaagtaaattttaaaaatatttatgattggaagtttctgccaacaga

SEQ ID NO: 300946 - DNA, 59 bp, Artificial
  Synthetic oligonucleotide
aaccaaagatggatatgtcaagttactcccaatatgatccaccttctaacataatatat

SEQ ID NO: 300947 - DNA, 50 bp, Artificial
  Synthetic oligonucleotide
aaccaaagcaaagcgaaccaattacgcccaaaacaccacccactaacgaa

SEQ ID NO: 300948 - DNA, 54 bp, Artificial
  Synthetic oligonucleotide
aaccaaagggctttccatggtttacacctctgatttcaaagaaatggcagttct

SEQ ID NO: 300949 - DNA, 55 bp, Artificial
  Synthetic oligonucleotide
aaccaaaggttgtttaacagagaagggaagaaggctgtcctcgctgcacagggcg

SEQ ID NO: 300950 - DNA, 54 bp, Artificial
  Synthetic oligonucleotide
aaccaaatacgctgtgagaacctggctctttgagaacggagaagaaagggtaac

SEQ ID NO: 300951 - DNA, 58 bp, Artificial
  Synthetic oligonucleotide
aaccaaatctgtgagcaggtcaacctcctaaaagagtcactggtgggtcacgattcca

SEQ ID NO: 300952 - DNA, 59 bp, Artificial
  Synthetic oligonucleotide
aaccaaattctaaacaggggtggtgatgagaatccacgtggcccagtgagccgtgagca

SEQ ID NO: 300953 - DNA, 60 bp, Artificial
  Synthetic oligonucleotide
aaccaaattgtggatgcgtcagactcaattagtagtatttcaacgcagactgctactatt

SEQ ID NO: 300954 - DNA, 53 bp, Artificial
  Synthetic oligonucleotide
aaccaaatttccgtggcgtcagtgggattcctgaatgacccaagaaccccgct

SEQ ID NO: 300955 - DNA, 57 bp, Artificial
  Synthetic oligonucleotide
aaccaaattttgtgcacctatatacgaatgtgcctgggctagctccactggcattgt

SEQ ID NO: 300956 - DNA, 55 bp, Artificial
  Synthetic oligonucleotide
aaccaacacaaaggaagggtccaacatctgcttaacaagaaccgacagaggatgg

SEQ ID NO: 300957 - DNA, 60 bp, Artificial
  Synthetic oligonucleotide
aaccaacagagggcatctgcaggccagatcagtgtgcaacctacattctcagtacaacgg

SEQ ID NO: 300958 - DNA, 54 bp, Artificial
  Synthetic oligonucleotide
aaccaacagcccgctaggggaaatgctcagggcctgccaaacttggacaccccg

SEQ ID NO: 300959 - DNA, 59 bp, Artificial
  Synthetic oligonucleotide
aaccaacaggccccgaagaggcatcgagacactttgccatcaaggaattctctgattac

SEQ ID NO: 300960 - DNA, 54 bp, Artificial
  Synthetic oligonucleotide
aaccaacagtttggcgcagaggacactaagacctcccgagggtccccaccagcc

SEQ ID NO: 300961 - DNA, 57 bp, Artificial
  Synthetic oligonucleotide
aaccaaccagaaaccaccataattaatgttggggatgtagtatcatatggtaatatc

SEQ ID NO: 300962 - DNA, 56 bp, Artificial
  Synthetic oligonucleotide
aaccaacccataggaccatgatgtacaattttcctacaaaagctggacagtgcggg

SEQ ID NO: 300963 - DNA, 55 bp, Artificial
  Synthetic oligonucleotide
aaccaaccggtgtgctcggtaaagcccgatggtgtccacatgaccggtgtcatct

SEQ ID NO: 300964 - DNA, 57 bp, Artificial
  Synthetic oligonucleotide
aaccaacctctcgctttcaatcttcgtgaccttactcggtctaatattcgctgcact

SEQ ID NO: 300965 - DNA, 56 bp, Artificial
  Synthetic oligonucleotide
aaccaacctttgagacatcggcttgtccctgttcaagtgtacaactccctcttcac

SEQ ID NO: 300966 - DNA, 55 bp, Artificial
  Synthetic oligonucleotide
aaccaacgactttcaatccacccgtgagttattggatgttgttagcaccaacaaa

SEQ ID NO: 300967 - DNA, 50 bp, Artificial
  Synthetic oligonucleotide
aaccaacgcaacccgatgtcgcgacatgcagattctatacgttagattcg

SEQ ID NO: 300968 - DNA, 53 bp, Artificial
  Synthetic oligonucleotide
aaccaacgttagtcttgaacaatcgccatacgtgagcaagtacaggagcggtt

SEQ ID NO: 300969 - DNA, 60 bp, Artificial
  Synthetic oligonucleotide
aaccaactagcacacaatcgacatagaattgcggagtatgactttgtaatatttgatgag

SEQ ID NO: 300970 - DNA, 60 bp, Artificial
  Synthetic oligonucleotide
aaccaactctacactaccacttcacatcagacatctttagtaaggaatagtgcatcactt

SEQ ID NO: 300971 - DNA, 55 bp, Artificial
  Synthetic oligonucleotide
aaccaactggttcaatggggattattcccggtttgatggtgtcacaccacggtgc

SEQ ID NO: 300972 - DNA, 55 bp, Artificial
  Synthetic oligonucleotide
aaccaacttaaatggcaccccgtttgacccaactgaggatgtccctgctccactg

SEQ ID NO: 300973 - DNA, 59 bp, Artificial
  Synthetic oligonucleotide
aaccaagaggaagtgacatagcagggacaactagcaccattcaggaacaagtgggatgg

SEQ ID NO: 300974 - DNA, 55 bp, Artificial
  Synthetic oligonucleotide
aaccaagaggacgtcgagtatatgaagctgttcaactgcgtgcagcttaatgaga

SEQ ID NO: 300975 - DNA, 60 bp, Artificial
  Synthetic oligonucleotide
aaccaagatggagttatccagtgaatgaatacgccgagacgcttcacaacctcatcgcaa

SEQ ID NO: 300976 - DNA, 55 bp, Artificial
  Synthetic oligonucleotide
aaccaagcaattgcaatcaccactagagtagtacgttcgctcagtcattccgaga

SEQ ID NO: 300977 - DNA, 59 bp, Artificial
  Synthetic oligonucleotide
aaccaagcgtatcgaatacacaaagagaatacgttttagatggacagacggtgcagcta

SEQ ID NO: 300978 - DNA, 60 bp, Artificial
  Synthetic oligonucleotide
aaccaaggcacacttccggcaataacggacgtgctgtcatcccttgacgtatcatctgga

SEQ ID NO: 300979 - DNA, 52 bp, Artificial
  Synthetic oligonucleotide
aaccaagggacctcagttaaagcagccggtaataacagtcttgaaaattact

SEQ ID NO: 300980 - DNA, 52 bp, Artificial
  Synthetic oligonucleotide
aaccaaggtggccctaagattccgggcctagatgctccccttaacgccccga

SEQ ID NO: 300981 - DNA, 56 bp, Artificial
  Synthetic oligonucleotide
aaccaagttaaaatacgccgccgagttgatgtaaacccgggtcatgcagatctcag

SEQ ID NO: 300982 - DNA, 57 bp, Artificial
  Synthetic oligonucleotide
aaccaatacatgataatttgatgggaactatgtggcttaatgctggatcagaaatcc

SEQ ID NO: 300983 - DNA, 59 bp, Artificial
  Synthetic oligonucleotide
aaccaatactactgttggcgtgccactagctctagacgcgagggctatcaccgttgcgc

SEQ ID NO: 300984 - DNA, 60 bp, Artificial
  Synthetic oligonucleotide
aaccaatcagaggacaggtggatgcctctctaggaacatggcagatggattgcacccact

SEQ ID NO: 300985 - DNA, 51 bp, Artificial
  Synthetic oligonucleotide
aaccaatcattttccccgccgccctttgaagggcaaaggcggaaggtagaa

SEQ ID NO: 300986 - DNA, 55 bp, Artificial
  Synthetic oligonucleotide
aaccaatcgtatacatgataggatcagcgccctcgtattggatatatgatgtcaa

SEQ ID NO: 300987 - DNA, 58 bp, Artificial
  Synthetic oligonucleotide
aaccaatgagcagctggatcgtctttggaggggaggaccaaagacaaatcctaatggc

SEQ ID NO: 300988 - DNA, 60 bp, Artificial
  Synthetic oligonucleotide
aaccaatgcacgaaccgaggctcacagagagaggcacgaacgatgggagaggtgagtcat

SEQ ID NO: 300989 - DNA, 60 bp, Artificial
  Synthetic oligonucleotide
aaccaatgctcaagctagcatgttcaccaatctaaccttctcaggcgcagcatataccgg

SEQ ID NO: 300990 - DNA, 58 bp, Artificial
  Synthetic oligonucleotide
aaccaatgtgaccaaagtcatctttgcgaaccaaagtcatggtagtgacccagaggtg

SEQ ID NO: 300991 - DNA, 60 bp, Artificial
  Synthetic oligonucleotide
aaccaattacatttcaggcaaggagtctagctatatatatccatatatgggtcgtgtcta

SEQ ID NO: 300992 - DNA, 58 bp, Artificial
  Synthetic oligonucleotide
aaccaattagaacaacttccgcttttccactctatatctcgcgctgcagttccgaatg

SEQ ID NO: 300993 - DNA, 58 bp, Artificial
  Synthetic oligonucleotide
aaccaattatagacgagattacattgacggagataaatattcccttctcgcttctatg

SEQ ID NO: 300994 - DNA, 54 bp, Artificial
  Synthetic oligonucleotide
aaccaattcacgaacggacggacttaaacgtagctcataatgaaggttctacca

SEQ ID NO: 300995 - DNA, 53 bp, Artificial
  Synthetic oligonucleotide
aaccaattctacagtggagttttgacaagccctagtggtgaactgggtttttc

SEQ ID NO: 300996 - DNA, 57 bp, Artificial
  Synthetic oligonucleotide
aaccaattcttgtgtttcttcgcataacaggataaatcaaaccaagtattatcaaga

SEQ ID NO: 300997 - DNA, 59 bp, Artificial
  Synthetic oligonucleotide
aaccaattgggactccatctatggaaacttgcccgcgcagcggcactgctaaatcaatt

SEQ ID NO: 300998 - DNA, 56 bp, Artificial
  Synthetic oligonucleotide
aaccacaaagttgccctccaatcactggttgcttccgcgcagagggttcaaccacc

SEQ ID NO: 300999 - DNA, 60 bp, Artificial
  Synthetic oligonucleotide
aaccacaactgaggcttccaatatcctgcgctcttgccacgcctgccgcggaggcaaccc

SEQ ID NO: 301000 - DNA, 52 bp, Artificial
  Synthetic oligonucleotide
aaccacaagcttgacaccgtctttccgacgttaaagggaagtaaccacaagc

SEQ ID NO: 301001 - DNA, 57 bp, Artificial
  Synthetic oligonucleotide
aaccacaattggactgttttaacactgattgtagacttctccacaaaagaggcgtgc

SEQ ID NO: 301002 - DNA, 60 bp, Artificial
  Synthetic oligonucleotide
aaccacacaggaacatattgttctttagatggaatcagcccagtgcacttgggagattgc

SEQ ID NO: 301003 - DNA, 59 bp, Artificial
  Synthetic oligonucleotide
aaccacacattatgtttctcagattggcggcttcccagatcaaacagaagacggaggac

SEQ ID NO: 301004 - DNA, 56 bp, Artificial
  Synthetic oligonucleotide
aaccacacctgaatataggatcctttcagcgtagggtcggaactcaaaagactgtg

SEQ ID NO: 301005 - DNA, 51 bp, Artificial
  Synthetic oligonucleotide
aaccacacgaacagcgtcatgttctggttagttagagacaggagaccctac

SEQ ID NO: 301006 - DNA, 59 bp, Artificial
  Synthetic oligonucleotide
aaccacagaactaagagataagagaaagcaagaatatgcacttttttatagacttgatg

SEQ ID NO: 301007 - DNA, 56 bp, Artificial
  Synthetic oligonucleotide
aaccacagaatggtagtataagttcccatgtttatatcacaacacctagtggttcc

SEQ ID NO: 301008 - DNA, 54 bp, Artificial
  Synthetic oligonucleotide
aaccacagaccgcgagtggaacacggagtcttgcgtgaccctctgtcgaacgac

SEQ ID NO: 301009 - DNA, 52 bp, Artificial
  Synthetic oligonucleotide
aaccacagccgaccccaaccccccccgccgacacatcagcctaggttggtgt

SEQ ID NO: 301010 - DNA, 54 bp, Artificial
  Synthetic oligonucleotide
aaccacataagggggtaatgatgtggtcacacccggagaaggaaaactctgaag

SEQ ID NO: 301011 - DNA, 57 bp, Artificial
  Synthetic oligonucleotide
aaccacatacgcatcggactcccctccactaacacaccaggtgatgtacgtaccacc

SEQ ID NO: 301012 - DNA, 55 bp, Artificial
  Synthetic oligonucleotide
aaccacatctgatgttggcgattcaaacgtaagggcgccatcaaaacgcaggtag

SEQ ID NO: 301013 - DNA, 53 bp, Artificial
  Synthetic oligonucleotide
aaccacattctggaagagcgctcgagagtacaactccttaggagcccgcacaa

SEQ ID NO: 301014 - DNA, 55 bp, Artificial
  Synthetic oligonucleotide
aaccaccaagacaacgtagtgaaacccaggtgtaataacgccatgcgtggtaatg

SEQ ID NO: 301015 - DNA, 53 bp, Artificial
  Synthetic oligonucleotide
aaccaccaagtttggagggcactccgggccgaagggttgagtagcacccagag

SEQ ID NO: 301016 - DNA, 60 bp, Artificial
  Synthetic oligonucleotide
aaccaccaattagtcatactgatccatatcctgcgacctgccctgtcacgcatgtgtttt

SEQ ID NO: 301017 - DNA, 58 bp, Artificial
  Synthetic oligonucleotide
aaccaccacttctgaacttgatttgcattccactaccaatttagatattaggtcgatg

SEQ ID NO: 301018 - DNA, 58 bp, Artificial
  Synthetic oligonucleotide
aaccaccaggaggccggaaaatacgagaaccatactgagaatgctttgctcttgtaca

SEQ ID NO: 301019 - DNA, 53 bp, Artificial
  Synthetic oligonucleotide
aaccaccagttgatgacccaaaataccaaggagactttcccatgcccagtaac

SEQ ID NO: 301020 - DNA, 59 bp, Artificial
  Synthetic oligonucleotide
aaccaccattttgaagggaacgatgatgttcgatggtgcgatgatgtttgacgaccaag

SEQ ID NO: 301021 - DNA, 54 bp, Artificial
  Synthetic oligonucleotide
aaccaccgtgaacgcccaccgaatgttgcccaaggtcttatataagagaactct

SEQ ID NO: 301022 - DNA, 51 bp, Artificial
  Synthetic oligonucleotide
aaccacctattccaccggcgcgcaagtgggtcaaaccgtttcggggttcgc

SEQ ID NO: 301023 - DNA, 55 bp, Artificial
  Synthetic oligonucleotide
aaccacctattggaatttgacagtagaaaagggatggctagggacatatggggta

SEQ ID NO: 301024 - DNA, 54 bp, Artificial
  Synthetic oligonucleotide
aaccacgaatgaaaagttttggcgttctgacaaactcgtgtcgttttcaataga

SEQ ID NO: 301025 - DNA, 60 bp, Artificial
  Synthetic oligonucleotide
aaccacggacttcacatggtccgcgcgttcatgcacatgccagaagagctgctctacatg

SEQ ID NO: 301026 - DNA, 54 bp, Artificial
  Synthetic oligonucleotide
aaccacggggtcattatgacgacagcacgggactacaccggggccaccaaatac

SEQ ID NO: 301027 - DNA, 60 bp, Artificial
  Synthetic oligonucleotide
aaccacgtcgtctacaatcaccaagaggctggcaaatacgagaatcatactgagaacgct

SEQ ID NO: 301028 - DNA, 59 bp, Artificial
  Synthetic oligonucleotide
aaccactacagtgtgctcaagcccgcggaggtcaggcccccgcgaggcatgtgcgggag

SEQ ID NO: 301029 - DNA, 57 bp, Artificial
  Synthetic oligonucleotide
aaccactaccgaagttcaggatagcgcctgacacacgaagttagggattgcgcccta

SEQ ID NO: 301030 - DNA, 53 bp, Artificial
  Synthetic oligonucleotide
aaccactacgacccggcgtatgtggggagtattttggtcgggtggtgccagaa

SEQ ID NO: 301031 - DNA, 59 bp, Artificial
  Synthetic oligonucleotide
aaccactcaagaccatggacaatagaactgtaatgtcaataatcgaacaagttcaattg

SEQ ID NO: 301032 - DNA, 56 bp, Artificial
  Synthetic oligonucleotide
aaccactccatgttggcccctccaacaattacatcccttcaggcaatgaatagacg

SEQ ID NO: 301033 - DNA, 58 bp, Artificial
  Synthetic oligonucleotide
aaccactcgtaagtccttaaacttctagctcgttgcagtaatcatacactgcctcgta

SEQ ID NO: 301034 - DNA, 55 bp, Artificial
  Synthetic oligonucleotide
aaccactcttagcggcagtgcagccgcacctgtggagccaggactcgatgctcct

SEQ ID NO: 301035 - DNA, 57 bp, Artificial
  Synthetic oligonucleotide
aaccacttgacgactgtattagctttaagtccgaaatacttagcacattgagcctta

SEQ ID NO: 301036 - DNA, 55 bp, Artificial
  Synthetic oligonucleotide
aaccactttacgtgcgtcactggatctggcgtgaacgcggtcgtagtgttggtgg

SEQ ID NO: 301037 - DNA, 53 bp, Artificial
  Synthetic oligonucleotide
aaccagaaaaagaggagatttctcggtccgcttcaaatgcctttaaggaatct

SEQ ID NO: 301038 - DNA, 55 bp, Artificial
  Synthetic oligonucleotide
aaccagaaatgtttatgctagactgctgctcagtgatgacccctaaaactgggtg

SEQ ID NO: 301039 - DNA, 56 bp, Artificial
  Synthetic oligonucleotide
aaccagaacgcctccaggccttgcaacacttggtccggacggccctggaggcaggc

SEQ ID NO: 301040 - DNA, 59 bp, Artificial
  Synthetic oligonucleotide
aaccagaactatacgaatattagttctgagtattactctcagtcgagcatgcaagccgt

SEQ ID NO: 301041 - DNA, 55 bp, Artificial
  Synthetic oligonucleotide
aaccagaagattggttcagctcatagtgagtggaagagacgaacagtcaatagcc

SEQ ID NO: 301042 - DNA, 56 bp, Artificial
  Synthetic oligonucleotide
aaccagaatcagaaaccgattcctctgaggaagacgaacctaccgataatgcgaaa

SEQ ID NO: 301043 - DNA, 60 bp, Artificial
  Synthetic oligonucleotide
aaccagacaaggtgtgataagacagccttaccactgacttggacaggtatgattgatcta

SEQ ID NO: 301044 - DNA, 59 bp, Artificial
  Synthetic oligonucleotide
aaccagacattattgcattataggcgcagatacggtcgacagaatttttgtaagtattg

SEQ ID NO: 301045 - DNA, 53 bp, Artificial
  Synthetic oligonucleotide
aaccagaccctcaacaaaatcactgaatctgtcaaccaagctgctcaggtcgt

SEQ ID NO: 301046 - DNA, 60 bp, Artificial
  Synthetic oligonucleotide
aaccagacgatgcgcacaatcatattcaatcatggagcaacccaatccttcattagtatc

SEQ ID NO: 301047 - DNA, 59 bp, Artificial
  Synthetic oligonucleotide
aaccagactattcaccataagacaagagatggccagtagaggtctctgggattcctttc

SEQ ID NO: 301048 - DNA, 59 bp, Artificial
  Synthetic oligonucleotide
aaccagagaagtggtgatcaagtgcgtatagtttcacataaacttcacgtacgaggcac

SEQ ID NO: 301049 - DNA, 55 bp, Artificial
  Synthetic oligonucleotide
aaccagagcccgttggactggccccgctgagcgaaacccgacgtgccttatctcg

SEQ ID NO: 301050 - DNA, 60 bp, Artificial
  Synthetic oligonucleotide
aaccagagcgaatagtatcgattctagaatgggatcggtcgaaagagccatgtcatcgac

SEQ ID NO: 301051 - DNA, 54 bp, Artificial
  Synthetic oligonucleotide
aaccagaggcctatttaagtacagacacctcaaggacgatgaagaaaccggtta

SEQ ID NO: 301052 - DNA, 55 bp, Artificial
  Synthetic oligonucleotide
aaccagaggctgactcttccgacgcacgggactcggcttgctgagtgcacacagc

SEQ ID NO: 301053 - DNA, 51 bp, Artificial
  Synthetic oligonucleotide
aaccagagtgatagaagctagcagtctgaatgacactgtgcacatgcgcat

SEQ ID NO: 301054 - DNA, 51 bp, Artificial
  Synthetic oligonucleotide
aaccagatagctggagttgtacttttggatgggaatagggcaactcaggaa

SEQ ID NO: 301055 - DNA, 55 bp, Artificial
  Synthetic oligonucleotide
aaccagatgttcccaaacctaatgacaactcgaaacctggcggaagtgttgatcc

SEQ ID NO: 301056 - DNA, 60 bp, Artificial
  Synthetic oligonucleotide
aaccagcacacagggtattgcttatttatcgaaaacggacagtcagggcagccacagtca

SEQ ID NO: 301057 - DNA, 60 bp, Artificial
  Synthetic oligonucleotide
aaccagcatacaattgacatggctgattcagagatgctaaatttgtatgagagagtgagg

SEQ ID NO: 301058 - DNA, 59 bp, Artificial
  Synthetic oligonucleotide
aaccagcatatggacaaactaggtattttaggttcatcagatgcggctaccacttccgc

SEQ ID NO: 301059 - DNA, 56 bp, Artificial
  Synthetic oligonucleotide
aaccagcatcaactacattcctgagacggtcaaaccagacctatcaaactacggag

SEQ ID NO: 301060 - DNA, 60 bp, Artificial
  Synthetic oligonucleotide
aaccagccatcagacagtattccttgccaggagacattcttaagctgggtggcaagttag

SEQ ID NO: 301061 - DNA, 56 bp, Artificial
  Synthetic oligonucleotide
aaccagcgtttcaatgctctagaagaccagctcatggacatatatgaacaagggag

SEQ ID NO: 301062 - DNA, 59 bp, Artificial
  Synthetic oligonucleotide
aaccagctagccggaatgcaacttgcacgcccactacaatacccttgctcgaacactta

SEQ ID NO: 301063 - DNA, 57 bp, Artificial
  Synthetic oligonucleotide
aaccagctccaaacccagtaattcagacctaaatcacaatattcgtattacatgcta

SEQ ID NO: 301064 - DNA, 60 bp, Artificial
  Synthetic oligonucleotide
aaccagctctgcctgacgagcaagaacaagcataggcaagccaagctcagagcaacgctt

SEQ ID NO: 301065 - DNA, 59 bp, Artificial
  Synthetic oligonucleotide
aaccagctggctccgccacggttgagtgtagttgaactttgctttacatgagaagcaag

SEQ ID NO: 301066 - DNA, 60 bp, Artificial
  Synthetic oligonucleotide
aaccaggaaatgacatactactggaaagcaggagaatattcatctccatttatgcaaaga

SEQ ID NO: 301067 - DNA, 55 bp, Artificial
  Synthetic oligonucleotide
aaccaggaacactcaaggagaaactaatgtccattgctcttctggccgttcactc

SEQ ID NO: 301068 - DNA, 56 bp, Artificial
  Synthetic oligonucleotide
aaccaggaatttgggtcgagccttagtgccgcgtgggcttgaggcgcttattcgga

SEQ ID NO: 301069 - DNA, 60 bp, Artificial
  Synthetic oligonucleotide
aaccaggacagtgtggcgctgtcattggctccactggacacatcattggcatacatgttg

SEQ ID NO: 301070 - DNA, 56 bp, Artificial
  Synthetic oligonucleotide
aaccaggagagtggagtgacttggtcatgacaagtcgagtagtactttaactacga

SEQ ID NO: 301071 - DNA, 56 bp, Artificial
  Synthetic oligonucleotide
aaccaggagatacactgttaattaccagtaatgggaatctaattgctcctcgggga

SEQ ID NO: 301072 - DNA, 60 bp, Artificial
  Synthetic oligonucleotide
aaccaggagcggagggaacactaaccagcagagagcatctgcagggcaaatcagcgtaca

SEQ ID NO: 301073 - DNA, 60 bp, Artificial
  Synthetic oligonucleotide
aaccaggcagatgttctcgcaactctccaacagtccctaattgcagacctgtggatattt

SEQ ID NO: 301074 - DNA, 60 bp, Artificial
  Synthetic oligonucleotide
aaccaggccagacattgcgagtaagatccaatgggaatctaattgctccatggtatggac

SEQ ID NO: 301075 - DNA, 59 bp, Artificial
  Synthetic oligonucleotide
aaccagggacgggtggtcgctattgtgctgggaggtgtgaatgaaggatctaggacagc

SEQ ID NO: 301076 - DNA, 55 bp, Artificial
  Synthetic oligonucleotide
aaccaggggtatcacggttatagttttccagcagataaagtatacagacagtatg

SEQ ID NO: 301077 - DNA, 56 bp, Artificial
  Synthetic oligonucleotide
aaccaggggtcagcaaaaggtgcacgagttcgaaagatggtaattatgtgtatccc

SEQ ID NO: 301078 - DNA, 50 bp, Artificial
  Synthetic oligonucleotide
aaccaggtggagggcgaagttcagattgtgtcaactgctgctcagacctt

SEQ ID NO: 301079 - DNA, 60 bp, Artificial
  Synthetic oligonucleotide
aaccaggttcttacttcatgattatacagatactgtgaaggctatttcatgctgcccaaa

SEQ ID NO: 301080 - DNA, 54 bp, Artificial
  Synthetic oligonucleotide
aaccagtaacaatggataataggttgagttactgggagtccagcggggttgacc

SEQ ID NO: 301081 - DNA, 57 bp, Artificial
  Synthetic oligonucleotide
aaccagtagaaaagatgcaatgctctctactcatgtagtatgggatgttggactgca

SEQ ID NO: 301082 - DNA, 57 bp, Artificial
  Synthetic oligonucleotide
aaccagtatgtgttttgatacatggtagtccaggcaccggtaagtcggttgccacta

SEQ ID NO: 301083 - DNA, 51 bp, Artificial
  Synthetic oligonucleotide
aaccagtcaagaaatgggtgctactgatctaccacgcaattacggctagcc

SEQ ID NO: 301084 - DNA, 51 bp, Artificial
  Synthetic oligonucleotide
aaccagtcactggtactgtgtcgtccttgccgcaacaactatcagttcaag

SEQ ID NO: 301085 - DNA, 60 bp, Artificial
  Synthetic oligonucleotide
aaccagtcattccatactgccaacccatgcttatttcgatgattcgtaccatcaagccct

SEQ ID NO: 301086 - DNA, 60 bp, Artificial
  Synthetic oligonucleotide
aaccagtccggtacaaatgacagcggcaacaacataacagatctgtccatgtgcaattcc

SEQ ID NO: 301087 - DNA, 55 bp, Artificial
  Synthetic oligonucleotide
aaccagtcgccattatggtgcacggtccaccagggaccggtaagtccataacaac

SEQ ID NO: 301088 - DNA, 54 bp, Artificial
  Synthetic oligonucleotide
aaccagtctatcgacttcggttaccttatgggtaagaccgttgatcgagttcaa

SEQ ID NO: 301089 - DNA, 58 bp, Artificial
  Synthetic oligonucleotide
aaccagtggtatattaacatctgagcaactggctcttgcgaggttgggaaaaatacag

SEQ ID NO: 301090 - DNA, 55 bp, Artificial
  Synthetic oligonucleotide
aaccagttaagttatctgagggtttagatgaagtgaaagcagattatagcttggc

SEQ ID NO: 301091 - DNA, 51 bp, Artificial
  Synthetic oligonucleotide
aaccagttgctacgtggttttgagtcgtccctcagaggaagccgtgtgcgg

SEQ ID NO: 301092 - DNA, 54 bp, Artificial
  Synthetic oligonucleotide
aaccataatagtacagttgaatgagcctgtaacaattagttgtatcagacctgg

SEQ ID NO: 301093 - DNA, 56 bp, Artificial
  Synthetic oligonucleotide
aaccataatagtacagtttaatgagactgtaagaattaattgtaccagacctaaca

SEQ ID NO: 301094 - DNA, 60 bp, Artificial
  Synthetic oligonucleotide
aaccatacaccacaaaagcagcaagcaccttagaaacatacctatactgctaccacaatg

SEQ ID NO: 301095 - DNA, 55 bp, Artificial
  Synthetic oligonucleotide
aaccatacatgacagaacgactttccgtggtctcatatccaccccattgggcacc

SEQ ID NO: 301096 - DNA, 55 bp, Artificial
  Synthetic oligonucleotide
aaccatacttgcagaagaggatggatgcgacaatacgccaaactaaaggcgggac

SEQ ID NO: 301097 - DNA, 57 bp, Artificial
  Synthetic oligonucleotide
aaccatagtatatcctcccgtgtgaccgattggcctaggtataacagcgttttcaga

SEQ ID NO: 301098 - DNA, 55 bp, Artificial
  Synthetic oligonucleotide
aaccatataccggaccaccaaccaaccatacttactgccgccctccttcacgata

SEQ ID NO: 301099 - DNA, 60 bp, Artificial
  Synthetic oligonucleotide
aaccatatatgcggaatgattttgatcgaaatgagatgcccgatttgccaggtgtgatga

SEQ ID NO: 301100 - DNA, 53 bp, Artificial
  Synthetic oligonucleotide
aaccatatctcaacccctccgagactccctccgaacttacccctggtccgtgc

SEQ ID NO: 301101 - DNA, 60 bp, Artificial
  Synthetic oligonucleotide
aaccatattcttgggaacacagacagctagtgcaacataatgggcaacaacataaaagtc

SEQ ID NO: 301102 - DNA, 55 bp, Artificial
  Synthetic oligonucleotide
aaccatcacaggtgatctcctaattaagaacccttattctctatcctatacccct

SEQ ID NO: 301103 - DNA, 56 bp, Artificial
  Synthetic oligonucleotide
aaccatcagcagaacatcaagatcaggatttgaaatccttaaagtcagaaatggtt

SEQ ID NO: 301104 - DNA, 55 bp, Artificial
  Synthetic oligonucleotide
aaccatcatccacgtgcaagatcaatgagttcaacccgtagtagtacagaaggta

SEQ ID NO: 301105 - DNA, 60 bp, Artificial
  Synthetic oligonucleotide
aaccatccctagcactcttgtgctccctgcgaacaaggcaattaatcatgtcaagtgcgc

SEQ ID NO: 301106 - DNA, 54 bp, Artificial
  Synthetic oligonucleotide
aaccatcgccaatgccttatgtcccttaccctcgttccaccgaggtttatgttc

SEQ ID NO: 301107 - DNA, 57 bp, Artificial
  Synthetic oligonucleotide
aaccatcggatcaatctgtatggtaactggaatggttagcttaatgttacaaattgg

SEQ ID NO: 301108 - DNA, 60 bp, Artificial
  Synthetic oligonucleotide
aaccatcggcaagtcaggaaggcagcctactcccttatctccacctctgagggacactca

SEQ ID NO: 301109 - DNA, 53 bp, Artificial
  Synthetic oligonucleotide
aaccatcggtaaagagcattcacgtaccgtacacacaggccgcgtcaggttac

SEQ ID NO: 301110 - DNA, 55 bp, Artificial
  Synthetic oligonucleotide
aaccatctatcggatggtcgacttgcccgtgttgcagccgcggctgtgcacgcac

SEQ ID NO: 301111 - DNA, 60 bp, Artificial
  Synthetic oligonucleotide
aaccatctcatgtccacaattgtggtcgcggagtggcacaaggcaggaaggccaaatccc

SEQ ID NO: 301112 - DNA, 53 bp, Artificial
  Synthetic oligonucleotide
aaccatcttggttaccggcctgtcaccacggtagagtacgttcccaatggtac

SEQ ID NO: 301113 - DNA, 60 bp, Artificial
  Synthetic oligonucleotide
aaccatgacctagagctagtgagatacatcagaaccagccttaaactctacagacacgag

SEQ ID NO: 301114 - DNA, 60 bp, Artificial
  Synthetic oligonucleotide
aaccatgacctcaggaaggaaagtgcatgactgggcagccagccagtggcagttaatttg

SEQ ID NO: 301115 - DNA, 57 bp, Artificial
  Synthetic oligonucleotide
aaccatgagacaagctttcgcatccgttgatagggtgatgacacatttcgaggcaag

SEQ ID NO: 301116 - DNA, 60 bp, Artificial
  Synthetic oligonucleotide
aaccatgatgcatagtgctcttctgaaggaatctagcgctaggacgttattatccagcgg

SEQ ID NO: 301117 - DNA, 55 bp, Artificial
  Synthetic oligonucleotide
aaccatgcatggtaaagtaccaacgttgcaagaggttatattagaacttgcaccg

SEQ ID NO: 301118 - DNA, 55 bp, Artificial
  Synthetic oligonucleotide
aaccatgccctgcgctcacctggccgtcatagaggggtatgtatacatactcgcc

SEQ ID NO: 301119 - DNA, 57 bp, Artificial
  Synthetic oligonucleotide
aaccatgcgcaggcttgccgaccaaagcctcccaccgaatttctccagccttgaaaa

SEQ ID NO: 301120 - DNA, 60 bp, Artificial
  Synthetic oligonucleotide
aaccatgggactcacgcgtgttgatccgagcacgaactctagtatcggacaatacacgcg

SEQ ID NO: 301121 - DNA, 55 bp, Artificial
  Synthetic oligonucleotide
aaccatggttctgggagtataacacaggtcaattattacgggtcagactactccc

SEQ ID NO: 301122 - DNA, 52 bp, Artificial
  Synthetic oligonucleotide
aaccatggtttggagtcaatacgtttacgaagctacggcgggatatgatgtt

SEQ ID NO: 301123 - DNA, 60 bp, Artificial
  Synthetic oligonucleotide
aaccatgtgcacctggagtaggagcagtctccagagagctagcagctagagggggaatac

SEQ ID NO: 301124 - DNA, 54 bp, Artificial
  Synthetic oligonucleotide
aaccatgttacttacaatcacaaggaggaagctaagtacgagaatcatttagag

SEQ ID NO: 301125 - DNA, 54 bp, Artificial
  Synthetic oligonucleotide
aaccattaattccatttgttgatatattcggatcggtaaacgcgtgccggggaa

SEQ ID NO: 301126 - DNA, 60 bp, Artificial
  Synthetic oligonucleotide
aaccattcacactgtcagagcgaccgattgtcgtggcatgtacgagatgacagctaacaa

SEQ ID NO: 301127 - DNA, 60 bp, Artificial
  Synthetic oligonucleotide
aaccattcgcactcgctctggagcacagataggttcacaagttcatttctatagagactt

SEQ ID NO: 301128 - DNA, 58 bp, Artificial
  Synthetic oligonucleotide
aaccattctacacgctttaggcttcaacccaagtaactgcattatcaaagtgcaaggc

SEQ ID NO: 301129 - DNA, 59 bp, Artificial
  Synthetic oligonucleotide
aaccattgaatcaggaatgggtgatttgggcaaccgagtcactactaatgagcggtcta

SEQ ID NO: 301130 - DNA, 55 bp, Artificial
  Synthetic oligonucleotide
aaccattggatcaatctgtatgtcaattggaatagttagcttgatgttacaaatt

SEQ ID NO: 301131 - DNA, 60 bp, Artificial
  Synthetic oligonucleotide
aaccattggcagtggttttgcagcccctggggactgtggtggcatcattagatgccaaca

SEQ ID NO: 301132 - DNA, 55 bp, Artificial
  Synthetic oligonucleotide
aaccatttacgttacgcaattggtgatgtcgttttatgtgttaaaataccgcagc

SEQ ID NO: 301133 - DNA, 58 bp, Artificial
  Synthetic oligonucleotide
aaccatttagagattatgtggacagattttacaaaactctaagagctgaacaagcaac

SEQ ID NO: 301134 - DNA, 60 bp, Artificial
  Synthetic oligonucleotide
aaccatttgaaatggcaacaatcatgtttggagattttactgtgcagctgaatcacaaca

SEQ ID NO: 301135 - DNA, 57 bp, Artificial
  Synthetic oligonucleotide
aaccatttgactctagatttgtgttttgtagtacaaatcattcacttttggcaccac

SEQ ID NO: 301136 - DNA, 54 bp, Artificial
  Synthetic oligonucleotide
aaccatttgattacaccctggaacgtaaaaacagccgtttagacattgagctgt

SEQ ID NO: 301137 - DNA, 58 bp, Artificial
  Synthetic oligonucleotide
aaccatttgtggcatgtggccccacagaatgtagaacatttttcctaacgcaaggtgc

SEQ ID NO: 301138 - DNA, 60 bp, Artificial
  Synthetic oligonucleotide
aacccaaaatgttataaccagcagattgaagtaagtcatttacatgcatcattaatgtgt

SEQ ID NO: 301139 - DNA, 55 bp, Artificial
  Synthetic oligonucleotide
aacccaaaccttgggaacttcctcagagtttcgatggaattgcactcaaagaagc

SEQ ID NO: 301140 - DNA, 59 bp, Artificial
  Synthetic oligonucleotide
aacccaaattcccacgaagaacatgatggatataccagatgttccgattcgtgaagcgc

SEQ ID NO: 301141 - DNA, 53 bp, Artificial
  Synthetic oligonucleotide
aacccaaatttctcccggatttatacgattacaaagagaatcgtttcattgaa

SEQ ID NO: 301142 - DNA, 60 bp, Artificial
  Synthetic oligonucleotide
aacccaacacaacagaacgcgatggtacagatacaggtcgtgttctatatatctatggat

SEQ ID NO: 301143 - DNA, 54 bp, Artificial
  Synthetic oligonucleotide
aacccaacacactcaatggaatccgacagcgcaaccccagggcagggaaaaccc

SEQ ID NO: 301144 - DNA, 52 bp, Artificial
  Synthetic oligonucleotide
aacccaacagaacagcaattagcttcgaaattagcagctttgaatcgcgaag

SEQ ID NO: 301145 - DNA, 51 bp, Artificial
  Synthetic oligonucleotide
aacccaacgactggcgcctttcctttgccgcgaagtgtgaacatacatcaa

SEQ ID NO: 301146 - DNA, 59 bp, Artificial
  Synthetic oligonucleotide
aacccaactgtgctacctatacaagtcttctgacttacaccgacagttggacatcacga

SEQ ID NO: 301147 - DNA, 55 bp, Artificial
  Synthetic oligonucleotide
aacccaacttagcggtgtggtagggacaacaggttccgttgcagttactcatgcg

SEQ ID NO: 301148 - DNA, 50 bp, Artificial
  Synthetic oligonucleotide
aacccaagaaggaaaactagtaaaaggatcctttggaaaagcactaagag

SEQ ID NO: 301149 - DNA, 59 bp, Artificial
  Synthetic oligonucleotide
aacccaagctctccatatggagctacagccccaagcagcccctctatcccaagtagtcc

SEQ ID NO: 301150 - DNA, 52 bp, Artificial
  Synthetic oligonucleotide
aacccaaggttcgggaggcttttgaaagaggcgatcgatgttagcctttacg

SEQ ID NO: 301151 - DNA, 54 bp, Artificial
  Synthetic oligonucleotide
aacccaagtcctcaaggtccaagcagggcacggcctacaccccctattatcttc

SEQ ID NO: 301152 - DNA, 50 bp, Artificial
  Synthetic oligonucleotide
aacccaataactttaccgttagagggaaaaattctcacctttacgcaagc

SEQ ID NO: 301153 - DNA, 60 bp, Artificial
  Synthetic oligonucleotide
aacccaatggcctagtcgtaggaatgatggggtagttcagcacatgcgtctagtccaagc

SEQ ID NO: 301154 - DNA, 55 bp, Artificial
  Synthetic oligonucleotide
aacccacaacaatctggattgaaggtggaccttattatccaagcaggtaccaagt

SEQ ID NO: 301155 - DNA, 59 bp, Artificial
  Synthetic oligonucleotide
aacccacaaccgcgtcgacgtgccaacaatcgccggcgtagtaatcgcactgatgcgcc

SEQ ID NO: 301156 - DNA, 56 bp, Artificial
  Synthetic oligonucleotide
aacccacataaactgtcactaatagagtggcatacggttgagttctttaggacgcc

SEQ ID NO: 301157 - DNA, 59 bp, Artificial
  Synthetic oligonucleotide
aacccacatacctaatacagatgatctcgggatgtttgatcgaccaggtgataagcccg

SEQ ID NO: 301158 - DNA, 56 bp, Artificial
  Synthetic oligonucleotide
aacccacattgaattcttagggtccatgtcaacacccctgtggtagtgtcagtaaa

SEQ ID NO: 301159 - DNA, 57 bp, Artificial
  Synthetic oligonucleotide
aacccaccattccacgaatttgcgtatgaaggactgaaacgaagaccagcggctcca

SEQ ID NO: 301160 - DNA, 54 bp, Artificial
  Synthetic oligonucleotide
aacccacccaaccagacgtggccacgtgcaggttttacacgcttgaatccgtaa

SEQ ID NO: 301161 - DNA, 55 bp, Artificial
  Synthetic oligonucleotide
aacccacggatacggttcctcctgttgacaatggcaagcccgacataagcaaacc

SEQ ID NO: 301162 - DNA, 58 bp, Artificial
  Synthetic oligonucleotide
aacccactacaggtatgtagtggtcgacacatacaccgcaggagggtatattacatgt

SEQ ID NO: 301163 - DNA, 55 bp, Artificial
  Synthetic oligonucleotide
aacccactcgtcacgcttagcagaggtgataactcgtttagaagtagcacgagac

SEQ ID NO: 301164 - DNA, 56 bp, Artificial
  Synthetic oligonucleotide
aacccagaaatcaaacaaggaatctgcagaagtagaggattcactctacaatttgg

SEQ ID NO: 301165 - DNA, 53 bp, Artificial
  Synthetic oligonucleotide
aacccagaagtgggtttgtgctttttgtcccgtgtatttgtagacccactcaa

SEQ ID NO: 301166 - DNA, 55 bp, Artificial
  Synthetic oligonucleotide
aacccagacccatgtctacggtgttaatgttctgcgtgacgtggtacgtagtgct

SEQ ID NO: 301167 - DNA, 60 bp, Artificial
  Synthetic oligonucleotide
aacccagagaatgcctaaacttagagctggctacatgcataaggttatccattatctgat

SEQ ID NO: 301168 - DNA, 55 bp, Artificial
  Synthetic oligonucleotide
aacccagagtgtagcttaggccgatgagtctggacgttccccaccggcgacggtg

SEQ ID NO: 301169 - DNA, 56 bp, Artificial
  Synthetic oligonucleotide
aacccagattctacaggggtcgaaggagcagtgatgttccacggggttgtgaagga

SEQ ID NO: 301170 - DNA, 57 bp, Artificial
  Synthetic oligonucleotide
aacccagatttagcctggactcaaatcttttatacagcccccagccgtaatgtgctg

SEQ ID NO: 301171 - DNA, 60 bp, Artificial
  Synthetic oligonucleotide
aacccagcaaggatcacatcaaaagtgagggtgtacatgaaaccaaagcatgttagagta

SEQ ID NO: 301172 - DNA, 55 bp, Artificial
  Synthetic oligonucleotide
aacccagcacggcaactttactgcgaaaaccactttaaggtgacactgatactgg

SEQ ID NO: 301173 - DNA, 55 bp, Artificial
  Synthetic oligonucleotide
aacccagcgaagggaggtcggaagcctgctcggctgatcgtgtatccggatctcg

SEQ ID NO: 301174 - DNA, 51 bp, Artificial
  Synthetic oligonucleotide
aacccagcttcctcggctgcagaattgaggcagggcgacagctggttccca

SEQ ID NO: 301175 - DNA, 55 bp, Artificial
  Synthetic oligonucleotide
aacccagcttttgtactacaccggtacacgtcacaaagtgaccagggcgcgtcac

SEQ ID NO: 301176 - DNA, 55 bp, Artificial
  Synthetic oligonucleotide
aacccagggtcgtcagacctatgattggacattgaatagaaatcagccggctgcg

SEQ ID NO: 301177 - DNA, 54 bp, Artificial
  Synthetic oligonucleotide
aacccaggtacttgttggatctcagcatccgagtctgtttccgcggctgggagt

SEQ ID NO: 301178 - DNA, 53 bp, Artificial
  Synthetic oligonucleotide
aacccagtacgtagggtgtcgtaatgcgtaagtctgggatggaaccgactact

SEQ ID NO: 301179 - DNA, 55 bp, Artificial
  Synthetic oligonucleotide
aacccagtcataacttactcaacagcaaccgaaagagtaaacgagctggccatcc

SEQ ID NO: 301180 - DNA, 55 bp, Artificial
  Synthetic oligonucleotide
aacccagttggggacgagccagaaatcttgaagaatctctccttaatggaaccac

SEQ ID NO: 301181 - DNA, 53 bp, Artificial
  Synthetic oligonucleotide
aacccataacggaaaattatgcaaactaaatggaatccctccacttgaactag

SEQ ID NO: 301182 - DNA, 53 bp, Artificial
  Synthetic oligonucleotide
aacccatcatacgaaaaccgatgtcaataccttacactcacaccgttaagatg

SEQ ID NO: 301183 - DNA, 57 bp, Artificial
  Synthetic oligonucleotide
aacccatcgacaatgtaatgggaatgatcggaatattacccgacatgaccccaagta

SEQ ID NO: 301184 - DNA, 55 bp, Artificial
  Synthetic oligonucleotide
aacccatctgtgacacaagttacgttgggtggtaaacctatggatttggctatcc

SEQ ID NO: 301185 - DNA, 58 bp, Artificial
  Synthetic oligonucleotide
aacccatgcaaggttgacctgcatacacaatcaattgacggggcctggggttcaggag

SEQ ID NO: 301186 - DNA, 55 bp, Artificial
  Synthetic oligonucleotide
aacccatggcgtagaccaagaatgatttcgtatagtggttacaatgtttggcagc

SEQ ID NO: 301187 - DNA, 55 bp, Artificial
  Synthetic oligonucleotide
aacccattgcaagtaggccacgccatctgttgtgttcttaacaaacagatgggca

SEQ ID NO: 301188 - DNA, 54 bp, Artificial
  Synthetic oligonucleotide
aacccattgttagagtaggccccgagcagtggctgtttcccgaaaggaagccta

SEQ ID NO: 301189 - DNA, 57 bp, Artificial
  Synthetic oligonucleotide
aacccatttatttatttgtactccacaatacacacatttaactgtatcattctcacc

SEQ ID NO: 301190 - DNA, 55 bp, Artificial
  Synthetic oligonucleotide
aaccccaaaggatgcgtgttttttagactattctgagaatcactgcggtgagtgg

SEQ ID NO: 301191 - DNA, 52 bp, Artificial
  Synthetic oligonucleotide
aaccccaaccttcccgacccgctgttcaaggtctccgacgttgccgcctgta

SEQ ID NO: 301192 - DNA, 56 bp, Artificial
  Synthetic oligonucleotide
aaccccactagcaaacccctgaccgctcagctgtttctggtagtgcaacacagcag

SEQ ID NO: 301193 - DNA, 60 bp, Artificial
  Synthetic oligonucleotide
aaccccacttgactgcatctggtggtctacatacattcgacgagctgttcggtgcaagga

SEQ ID NO: 301194 - DNA, 53 bp, Artificial
  Synthetic oligonucleotide
aaccccacttgggaggaagtttctgttccagactaatgtgttgcagggtggag

SEQ ID NO: 301195 - DNA, 53 bp, Artificial
  Synthetic oligonucleotide
aaccccaggacccttaaaatttgtgtcctcttgtctagttgtgactgtgtaag

SEQ ID NO: 301196 - DNA, 54 bp, Artificial
  Synthetic oligonucleotide
aaccccagtaagcttataagactggacacaacttcatggcagactagttatact

SEQ ID NO: 301197 - DNA, 55 bp, Artificial
  Synthetic oligonucleotide
aaccccagtaatgaaacttgaaggtcgatgtgatcgctccttctaaaccgttgaa

SEQ ID NO: 301198 - DNA, 57 bp, Artificial
  Synthetic oligonucleotide
aaccccattgtgatgaagaacggagattcagtccttgtggaagtggagccgcctttc

SEQ ID NO: 301199 - DNA, 58 bp, Artificial
  Synthetic oligonucleotide
aaccccattttagcggctactactctaaacttgaatcagataaacacgactatgatca

SEQ ID NO: 301200 - DNA, 60 bp, Artificial
  Synthetic oligonucleotide
aaccccccaacagtgagcaacagtgagttcatatgtgttggatggtcaagcacaagctgc

SEQ ID NO: 301201 - DNA, 51 bp, Artificial
  Synthetic oligonucleotide
aacccccccctctgagctttctgcagacgccatccggtctaatctggattt

SEQ ID NO: 301202 - DNA, 49 bp, Artificial
  Synthetic oligonucleotide
aaccccccctggtgacagggacccacgggccgaaagccacgtcctaacg

SEQ ID NO: 301203 - DNA, 55 bp, Artificial
  Synthetic oligonucleotide
aacccccccttgaaactgggcttatagtattggagattggggacaatatatatgc

SEQ ID NO: 301204 - DNA, 53 bp, Artificial
  Synthetic oligonucleotide
aacccccgatggatatgcacccgcccccgattttatgctgccgtttaaaataa

SEQ ID NO: 301205 - DNA, 52 bp, Artificial
  Synthetic oligonucleotide
aacccccggagaagacgaacggaggccttccggtcaccaaatcacgacacgc

SEQ ID NO: 301206 - DNA, 52 bp, Artificial
  Synthetic oligonucleotide
aacccccggagctcatccagtcctccggccgagaattctcgcctcatcctcg

SEQ ID NO: 301207 - DNA, 48 bp, Artificial
  Synthetic oligonucleotide
aacccccgtacccccacccgtacctgtgaccattcccctcccaccgaa

SEQ ID NO: 301208 - DNA, 60 bp, Artificial
  Synthetic oligonucleotide
aacccccgtgtaagcttatccaaagacagctacagcacgacacaatggggcagcgtcaga

SEQ ID NO: 301209 - DNA, 57 bp, Artificial
  Synthetic oligonucleotide
aaccccctgtggcagactccactacctcacaggcattccccctccgctcaggaggaa

SEQ ID NO: 301210 - DNA, 59 bp, Artificial
  Synthetic oligonucleotide
aaccccgaaggagcagctctcaaagaacaagtcccttagtggcttgcgattgtggctgc

SEQ ID NO: 301211 - DNA, 60 bp, Artificial
  Synthetic oligonucleotide
aaccccgacactcctctgctgacacaccagatcatgtatgtgcccccgggtggcccagtg

SEQ ID NO: 301212 - DNA, 55 bp, Artificial
  Synthetic oligonucleotide
aaccccgatctacgtgttgatttgcgttgggcagggatgtttgtgtattacggcg

SEQ ID NO: 301213 - DNA, 60 bp, Artificial
  Synthetic oligonucleotide
aaccccgcaactatatagacctggtgccaaagtcacacgtatctgcttggctctcatggg

SEQ ID NO: 301214 - DNA, 55 bp, Artificial
  Synthetic oligonucleotide
aaccccgctttacaggacaagttggacgagtttgctaggcgattggctattcagg

SEQ ID NO: 301215 - DNA, 52 bp, Artificial
  Synthetic oligonucleotide
aaccccggaagagtgactgtttctacccaaaccagtcaaacaagtgtagtac

SEQ ID NO: 301216 - DNA, 57 bp, Artificial
  Synthetic oligonucleotide
aaccccggctagaaaccaggatcatcctcaaccttaggcggggtgcatcatgtcaac

SEQ ID NO: 301217 - DNA, 48 bp, Artificial
  Synthetic oligonucleotide
aaccccggggtaagccatacgtaaagagaaagttcaagccccccaaac

SEQ ID NO: 301218 - DNA, 59 bp, Artificial
  Synthetic oligonucleotide
aaccccggttcgccgggtcatcacagagcatgaccgaggagacaacatgaataactcgc

SEQ ID NO: 301219 - DNA, 56 bp, Artificial
  Synthetic oligonucleotide
aacccctatgcgaaaacaatgccataaggtatgcaaacaaagtagatgacctactt

SEQ ID NO: 301220 - DNA, 55 bp, Artificial
  Synthetic oligonucleotide
aacccctcccgtatccccatggcaccgacggtccgatgagcggccctgtagtaga

SEQ ID NO: 301221 - DNA, 58 bp, Artificial
  Synthetic oligonucleotide
aacccctcgcacatcgtccgctcatcacgctgaagcctcccgctcaaggcttccgtgt

SEQ ID NO: 301222 - DNA, 54 bp, Artificial
  Synthetic oligonucleotide
aacccctctctgcgtcacgttaaattgtaccaacaccacgagtgacaacaaccc

SEQ ID NO: 301223 - DNA, 57 bp, Artificial
  Synthetic oligonucleotide
aacccctctctgcgttactttagattgtagctataacatcactaaggtcaacaatac

SEQ ID NO: 301224 - DNA, 57 bp, Artificial
  Synthetic oligonucleotide
aacccctctctgtgttactttaaactgtactgatgcaaatgtaaccacagtagccaa

SEQ ID NO: 301225 - DNA, 57 bp, Artificial
  Synthetic oligonucleotide
aacccctctctgtgttactttaaactgtgttaacatcactaataatactgctgtgga

SEQ ID NO: 301226 - DNA, 56 bp, Artificial
  Synthetic oligonucleotide
aacccctctctgtgttactttaaactgtgttaatgtaagttgcaccaacagcactg

SEQ ID NO: 301227 - DNA, 53 bp, Artificial
  Synthetic oligonucleotide
aacccctctctgtgttactttaacctgtactaatgtaaactgtactaataata

SEQ ID NO: 301228 - DNA, 56 bp, Artificial
  Synthetic oligonucleotide
aacccctgaagctaatgtccaaatcggaggagtttcgagtatgcgtatggttggtc

SEQ ID NO: 301229 - DNA, 52 bp, Artificial
  Synthetic oligonucleotide
aacccctgctcagcttgggggactaagtaaccttcaatactcaaggctctac

SEQ ID NO: 301230 - DNA, 51 bp, Artificial
  Synthetic oligonucleotide
aacccctgggcaaatacgtttcttaggtcaagttatatctcctgaccatat

SEQ ID NO: 301231 - DNA, 57 bp, Artificial
  Synthetic oligonucleotide
aacccctggttcgttgtgtgtacaggcttgacgctctgtgctaaggcatggaggtgc

SEQ ID NO: 301232 - DNA, 55 bp, Artificial
  Synthetic oligonucleotide
aaccccttagagactatgtagacaggtcttataaaactctaagagctgagcaggc

SEQ ID NO: 301233 - DNA, 54 bp, Artificial
  Synthetic oligonucleotide
aaccccttcccagtggttacgtgtcaagttcggcgcgtgccgaaagcttctctc

SEQ ID NO: 301234 - DNA, 56 bp, Artificial
  Synthetic oligonucleotide
aacccctttgccacactcgatacattctggagtactcggagcagacaccggggaaa

SEQ ID NO: 301235 - DNA, 50 bp, Artificial
  Synthetic oligonucleotide
aacccctttggaacccgtcttggaaatggagcgagtttacggtaatggta

SEQ ID NO: 301236 - DNA, 54 bp, Artificial
  Synthetic oligonucleotide
aacccgaacagagcaagtacctcgcgcaactaacacccgacccagtagtcgcgg

SEQ ID NO: 301237 - DNA, 54 bp, Artificial
  Synthetic oligonucleotide
aacccgaactacaccctgatggaggtccaggccctgcgatacccctgcccctac

SEQ ID NO: 301238 - DNA, 52 bp, Artificial
  Synthetic oligonucleotide
aacccgaatagggtttcgagcggtgtaggacctgcgatccgaccgcaaccgg

SEQ ID NO: 301239 - DNA, 53 bp, Artificial
  Synthetic oligonucleotide
aacccgaccctgtgtctattcgaagtgtcccgacgtcccgtgcttgcccgtaa

SEQ ID NO: 301240 - DNA, 50 bp, Artificial
  Synthetic oligonucleotide
aacccgacgctagcgatggtcaaatggacgacttgatgactaattgatcg

SEQ ID NO: 301241 - DNA, 55 bp, Artificial
  Synthetic oligonucleotide
aacccgactaaggtcccgtcatcggatccgcgtacgatattgaagtgcacgcttc

SEQ ID NO: 301242 - DNA, 55 bp, Artificial
  Synthetic oligonucleotide
aacccgactgcctaccagaagcagcctatcacccgcttggcactcccctacaccg

SEQ ID NO: 301243 - DNA, 50 bp, Artificial
  Synthetic oligonucleotide
aacccgagcgtttcacagattaaggattggctgttaaaaacaagggatgg

SEQ ID NO: 301244 - DNA, 60 bp, Artificial
  Synthetic oligonucleotide
aacccgcactgaaattactggctgcactgccattaagcagtgtgtcgcttataagagcga

SEQ ID NO: 301245 - DNA, 56 bp, Artificial
  Synthetic oligonucleotide
aacccgccatacccgccacatgtgccacttgggcacttccagtaagaattttcgga

SEQ ID NO: 301246 - DNA, 59 bp, Artificial
  Synthetic oligonucleotide
aacccgccgctgcaaatgggcctgacataggggtggagaaagatactgtccgtgcatta

SEQ ID NO: 301247 - DNA, 54 bp, Artificial
  Synthetic oligonucleotide
aacccgccggaacgccaaaactgggtgttgccggcatcaattacgacacgcgcg

SEQ ID NO: 301248 - DNA, 50 bp, Artificial
  Synthetic oligonucleotide
aacccgccgttttgtgttggcgtgcccgagggtagggtttacctgcgagg

SEQ ID NO: 301249 - DNA, 55 bp, Artificial
  Synthetic oligonucleotide
aacccgcgcgcctatgagcgccaaacgtgtgtattatctcaacgtcacaacacga

SEQ ID NO: 301250 - DNA, 58 bp, Artificial
  Synthetic oligonucleotide
aacccgcgtgacagggggggagcaagctcgcaccactctccgctttgcatccctcttc

SEQ ID NO: 301251 - DNA, 56 bp, Artificial
  Synthetic oligonucleotide
aacccgctcgatggctaacctgacgttcaagcaacgccgggacgcgccacctgagg

SEQ ID NO: 301252 - DNA, 57 bp, Artificial
  Synthetic oligonucleotide
aacccgctttcagctccttgccactaagaatgagggatccttcagccccgtggcgag

SEQ ID NO: 301253 - DNA, 53 bp, Artificial
  Synthetic oligonucleotide
aacccggaaaaagggagtgtgatttaaagcgcaccatatattcgcaaaagttg

SEQ ID NO: 301254 - DNA, 59 bp, Artificial
  Synthetic oligonucleotide
aacccggagccgagattgcatatcaaatagtaaggtacgaggcaatcaggatggtgggc

SEQ ID NO: 301255 - DNA, 51 bp, Artificial
  Synthetic oligonucleotide
aacccggagggctcgtaaaagattgtccggaaccaaaaggaaagcaagcaa

SEQ ID NO: 301256 - DNA, 58 bp, Artificial
  Synthetic oligonucleotide
aacccggatggggcagatatgaagctcttttgtcaaatggtgtccactgtggagttta

SEQ ID NO: 301257 - DNA, 60 bp, Artificial
  Synthetic oligonucleotide
aacccggcagctttaaagagatgggatacctgcgacgcaggttccatagagtgtgtggca

SEQ ID NO: 301258 - DNA, 51 bp, Artificial
  Synthetic oligonucleotide
aacccggcggagatgattgcgaagatagcctcagcccgagcgaacgttgac

SEQ ID NO: 301259 - DNA, 51 bp, Artificial
  Synthetic oligonucleotide
aacccggtccgagtttgttcgggccattgtggaaaggctcacccggctacg

SEQ ID NO: 301260 - DNA, 51 bp, Artificial
  Synthetic oligonucleotide
aacccgtactctgctggtctgtcgggattcaagtataatctgtacagagcc

SEQ ID NO: 301261 - DNA, 50 bp, Artificial
  Synthetic oligonucleotide
aacccgtaggttaaggataagttaagtagtactaacatgcagacatataa

SEQ ID NO: 301262 - DNA, 55 bp, Artificial
  Synthetic oligonucleotide
aacccgtataattatccgtacgatatgaatcctttcaaaggactgtatccaggta

SEQ ID NO: 301263 - DNA, 55 bp, Artificial
  Synthetic oligonucleotide
aacccgtcaagccagtctacgacgacaggaacattcacctcccgtacgactccga

SEQ ID NO: 301264 - DNA, 52 bp, Artificial
  Synthetic oligonucleotide
aacccgtcaatttacaaccacttgtacctcccccaatgtggaatctgtttac

SEQ ID NO: 301265 - DNA, 52 bp, Artificial
  Synthetic oligonucleotide
aacccgtcggttgcagctaccttagggtttggggcctatatgtctaaggccc

SEQ ID NO: 301266 - DNA, 54 bp, Artificial
  Synthetic oligonucleotide
aacccgtctgaatgttcctctcttgcgactctgatgtatactggtttgacgact

SEQ ID NO: 301267 - DNA, 54 bp, Artificial
  Synthetic oligonucleotide
aacccgtgagggctccctgtatccagactgcctggtgtacaggacttctcccct

SEQ ID NO: 301268 - DNA, 60 bp, Artificial
  Synthetic oligonucleotide
aacccgtgttattgaagctagtagtgtcaatgatacagtagcatttaggatggtgtatgg

SEQ ID NO: 301269 - DNA, 49 bp, Artificial
  Synthetic oligonucleotide
aacccgttttcaggttcttcccgaacattagttgaaaacaaacaggtgg

SEQ ID NO: 301270 - DNA, 54 bp, Artificial
  Synthetic oligonucleotide
aaccctaatggtggaagggatttgaagaaagcagtaactagacttaatctatac

SEQ ID NO: 301271 - DNA, 57 bp, Artificial
  Synthetic oligonucleotide
aaccctacaagatatgttcggattgccaagagtagtagccaatgaaattttacagaa

SEQ ID NO: 301272 - DNA, 55 bp, Artificial
  Synthetic oligonucleotide
aaccctacaatagcggagttcaattctatttatgacatgagaagctttatcgggt

SEQ ID NO: 301273 - DNA, 55 bp, Artificial
  Synthetic oligonucleotide
aaccctaccctgaaacttatagaagcttgtacacaccgaccgacaggtggcaatc

SEQ ID NO: 301274 - DNA, 58 bp, Artificial
  Synthetic oligonucleotide
aaccctactattgtagtagttggactaaatggaatgtcaggaatctacaaggtctgca

SEQ ID NO: 301275 - DNA, 60 bp, Artificial
  Synthetic oligonucleotide
aaccctaggcagatgctacggggggtgtctgtggtcatatgtgatgagtgccacagtcat

SEQ ID NO: 301276 - DNA, 52 bp, Artificial
  Synthetic oligonucleotide
aaccctagtcctccctccggaagccctctacagacttcgatccctctacccc

SEQ ID NO: 301277 - DNA, 55 bp, Artificial
  Synthetic oligonucleotide
aaccctatctcccaggttgcaccggatggcttccccgacatgtcgttcgtgccct

SEQ ID NO: 301278 - DNA, 60 bp, Artificial
  Synthetic oligonucleotide
aaccctatggagcaaaacgagcgatgccggatcagatcgggtgatggtatcacctctagc

SEQ ID NO: 301279 - DNA, 60 bp, Artificial
  Synthetic oligonucleotide
aaccctatggagtaaaatgagtgatgccgggtcagatcgagtgatggtatcacctttggc

SEQ ID NO: 301280 - DNA, 58 bp, Artificial
  Synthetic oligonucleotide
aaccctatgtgtcatgtgacaccagtaaatgttaccaatttgcacttgggcaggggac

SEQ ID NO: 301281 - DNA, 55 bp, Artificial
  Synthetic oligonucleotide
aaccctatgtttcatgcgacccagatgaatgcaggttctatgctctaagccaagg

SEQ ID NO: 301282 - DNA, 58 bp, Artificial
  Synthetic oligonucleotide
aaccctcacagcattgcgtgagttgtatgggtttgacacgagtgacatcggggcgctc

SEQ ID NO: 301283 - DNA, 58 bp, Artificial
  Synthetic oligonucleotide
aaccctcacctatcagaaggtttcatgcttgttgttaaagctgaatgtttctctgttg

SEQ ID NO: 301284 - DNA, 56 bp, Artificial
  Synthetic oligonucleotide
aaccctcacgttggagacaacattcacgcccttccacacggaggatattacaggga

SEQ ID NO: 301285 - DNA, 56 bp, Artificial
  Synthetic oligonucleotide
aaccctcaggaacccccctaagtgaagcaccagcgtactctacaaagatgcgccta

SEQ ID NO: 301286 - DNA, 54 bp, Artificial
  Synthetic oligonucleotide
aaccctcatggagggaaagctgtgatggtggagtagtgacccacttcagccggg

SEQ ID NO: 301287 - DNA, 56 bp, Artificial
  Synthetic oligonucleotide
aaccctccaaagaatgaggacccagacctccgatgggccccaagctggttgataca

SEQ ID NO: 301288 - DNA, 53 bp, Artificial
  Synthetic oligonucleotide
aaccctccccgacaaggaagcgagggagatttataacaagagcctagggtaca

SEQ ID NO: 301289 - DNA, 60 bp, Artificial
  Synthetic oligonucleotide
aaccctccctcctgttctgtggtgggagctgagttggcagtgttgctataaactgtctga

SEQ ID NO: 301290 - DNA, 55 bp, Artificial
  Synthetic oligonucleotide
aaccctcctaaattgcctgggaattgtcccagagcttatgccattcctgaaggcc

SEQ ID NO: 301291 - DNA, 53 bp, Artificial
  Synthetic oligonucleotide
aaccctctcccctcctcttggggcagcgttaccgatgagtggaccggtagacg

SEQ ID NO: 301292 - DNA, 55 bp, Artificial
  Synthetic oligonucleotide
aaccctcttggtgatgtctggcgatgtcctatcaagtcaaagcctaagcagcccc

SEQ ID NO: 301293 - DNA, 54 bp, Artificial
  Synthetic oligonucleotide
aaccctgaaactcctccaagaacttcaacaggagaacaaagttatcctgaggtc

SEQ ID NO: 301294 - DNA, 56 bp, Artificial
  Synthetic oligonucleotide
aaccctgaacgtgtccaggtgagcggctactacgccttcagccttcggcgtcccaa

SEQ ID NO: 301295 - DNA, 58 bp, Artificial
  Synthetic oligonucleotide
aaccctgaagcttactggtggcaacctactgaccctgtacgattcgatgatgaagact

SEQ ID NO: 301296 - DNA, 51 bp, Artificial
  Synthetic oligonucleotide
aaccctgacaatccgaatcattggcttaaccgagattatatcggtaagaac

SEQ ID NO: 301297 - DNA, 54 bp, Artificial
  Synthetic oligonucleotide
aaccctgacggcagcgttcgacacaactggtacgtcgtaacgaacgacgaggta

SEQ ID NO: 301298 - DNA, 60 bp, Artificial
  Synthetic oligonucleotide
aaccctgagcttgtacttgggagtcagacgcttcggagcagctgcctgagagcactcgct

SEQ ID NO: 301299 - DNA, 55 bp, Artificial
  Synthetic oligonucleotide
aaccctgatagtgaacgcttagtatggaaggttagagggttagaagtcattagag

SEQ ID NO: 301300 - DNA, 60 bp, Artificial
  Synthetic oligonucleotide
aaccctgcagactataggtgctacatgagacatgtagaggagtatgaaatatctttgatc

SEQ ID NO: 301301 - DNA, 60 bp, Artificial
  Synthetic oligonucleotide
aaccctgcatcttcttcgtgtaattggcgcccatctgcatgaggcgaattacatcatctg

SEQ ID NO: 301302 - DNA, 60 bp, Artificial
  Synthetic oligonucleotide
aaccctgcctgtgccagcaacatggggatcagagaatggtcatacttgattgaagatccc

SEQ ID NO: 301303 - DNA, 60 bp, Artificial
  Synthetic oligonucleotide
aaccctggaaatgctgaaatcgaagatcttatatttctggctcgatctgcactcatactg

SEQ ID NO: 301304 - DNA, 59 bp, Artificial
  Synthetic oligonucleotide
aaccctggaactgtgaccggctcagccgtgggatgcaatccggatacattctggagtaa

SEQ ID NO: 301305 - DNA, 56 bp, Artificial
  Synthetic oligonucleotide
aaccctggagcgaacattaggacggctggaaaatcggtcaccgtcgtccattgcga

SEQ ID NO: 301306 - DNA, 55 bp, Artificial
  Synthetic oligonucleotide
aaccctgggagagtaactgtgtctactaaaactagtcaaacaagcatagttccta

SEQ ID NO: 301307 - DNA, 54 bp, Artificial
  Synthetic oligonucleotide
aaccctgtgagtaagtgtgtgtttgcacgttgtcctacttcctacactttgttt

SEQ ID NO: 301308 - DNA, 54 bp, Artificial
  Synthetic oligonucleotide
aaccctgtgtatgctaccataaagatacggatctatttctatgattcagtatcg

SEQ ID NO: 301309 - DNA, 58 bp, Artificial
  Synthetic oligonucleotide
aaccctgtttttatgtcgagcttatacgagggaggcccaacaggaatgatgatgtctc

SEQ ID NO: 301310 - DNA, 55 bp, Artificial
  Synthetic oligonucleotide
aacccttacagactagaaggattgcacgttcccttagaatgcagcatcctgttcc

SEQ ID NO: 301311 - DNA, 59 bp, Artificial
  Synthetic oligonucleotide
aacccttagcaggagcccttggtctgatctctgattggctgctaacaaccaacactaac

SEQ ID NO: 301312 - DNA, 55 bp, Artificial
  Synthetic oligonucleotide
aacccttatccatgtttacgtggttcattgatagctgctgaagctcagctcgggg

SEQ ID NO: 301313 - DNA, 52 bp, Artificial
  Synthetic oligonucleotide
aacccttcagttagcacgatatcttaaaaatcgtgagctcaatgttggtact

SEQ ID NO: 301314 - DNA, 56 bp, Artificial
  Synthetic oligonucleotide
aacccttcatttcctattgacatattgtccgcgcagcggaacacccacgaaaacga

SEQ ID NO: 301315 - DNA, 58 bp, Artificial
  Synthetic oligonucleotide
aacccttccaaaacgtaaacaagatcacatatggtgcatgtcctaaatacattaagca

SEQ ID NO: 301316 - DNA, 55 bp, Artificial
  Synthetic oligonucleotide
aacccttcgccgtgacaacgtgaaacagattcttactcgtgaactgccattttcc

SEQ ID NO: 301317 - DNA, 51 bp, Artificial
  Synthetic oligonucleotide
aacccttcttggcacaacacccgtctctgggtcctgggtttcctgctttgc

SEQ ID NO: 301318 - DNA, 57 bp, Artificial
  Synthetic oligonucleotide
aacccttcttgtgatctactgttgggaggaagagaatggtcctacatcgttgaaaga

SEQ ID NO: 301319 - DNA, 50 bp, Artificial
  Synthetic oligonucleotide
aaccctttaaatcctattttgctaaaggcttccttttaatagactcaggt

SEQ ID NO: 301320 - DNA, 51 bp, Artificial
  Synthetic oligonucleotide
aacccttttgatgaacgagttgggtgttccgtttcatttggggaccaaaca

SEQ ID NO: 301321 - DNA, 56 bp, Artificial
  Synthetic oligonucleotide
aacccttttgtggctcttatgtcatgaaagttcgaggattcactcccctcgtctta

SEQ ID NO: 301322 - DNA, 50 bp, Artificial
  Synthetic oligonucleotide
aaccgaaaccatcactggcttatcattattctgtcccgaaccaagcttag

SEQ ID NO: 301323 - DNA, 55 bp, Artificial
  Synthetic oligonucleotide
aaccgaactaaagagatcatttccctggtagatgtgattgagagagccgtggcta

SEQ ID NO: 301324 - DNA, 52 bp, Artificial
  Synthetic oligonucleotide
aaccgaagaagtaagatcctgttatattaatatgaccctagaacatcaaaat

SEQ ID NO: 301325 - DNA, 60 bp, Artificial
  Synthetic oligonucleotide
aaccgaagccacccagacagtgacacattacaacttcattgcttggccagaccatgatgt

SEQ ID NO: 301326 - DNA, 58 bp, Artificial
  Synthetic oligonucleotide
aaccgaagcgtccagcctcgcccgagacatcgatcttggccgaaactgctcccgctcc

SEQ ID NO: 301327 - DNA, 55 bp, Artificial
  Synthetic oligonucleotide
aaccgaaggttcacaccagaaatagcagctagacctaaagtcagagaacaagcag

SEQ ID NO: 301328 - DNA, 59 bp, Artificial
  Synthetic oligonucleotide
aaccgaagtctgctgcatatccagtaattaagggaacatataataatactggctcccaa

SEQ ID NO: 301329 - DNA, 57 bp, Artificial
  Synthetic oligonucleotide
aaccgaagtttctaccagatttgtatgattacaaggagaacagattcatcgaaattg

SEQ ID NO: 301330 - DNA, 52 bp, Artificial
  Synthetic oligonucleotide
aaccgaatagacgaaagtcaacaccagccactcgtaaaccctctccacctag

SEQ ID NO: 301331 - DNA, 60 bp, Artificial
  Synthetic oligonucleotide
aaccgaatcgggctgtattccaacagcactcgcgtcggcactgtgtacgcagacaccacc

SEQ ID NO: 301332 - DNA, 53 bp, Artificial
  Synthetic oligonucleotide
aaccgacacagaacaaaccaacctatataagaacaaccccggaagagtgactg

SEQ ID NO: 301333 - DNA, 56 bp, Artificial
  Synthetic oligonucleotide
aaccgaccaaacctccagagcatcggggcaatgtctcccggatatctctctgcgca

SEQ ID NO: 301334 - DNA, 59 bp, Artificial
  Synthetic oligonucleotide
aaccgaccaggttgcaggacgcctggaggatctgaaagacgagggactagcgctgccaa

SEQ ID NO: 301335 - DNA, 54 bp, Artificial
  Synthetic oligonucleotide
aaccgaccgtttaagagttgatttactgagcatattaccactactcggtgggga

SEQ ID NO: 301336 - DNA, 55 bp, Artificial
  Synthetic oligonucleotide
aaccgactacctgtaatgcagctagtacctccgggaagatagattgggccgacct

SEQ ID NO: 301337 - DNA, 52 bp, Artificial
  Synthetic oligonucleotide
aaccgactcttccaataattcgggtccttactactagatcctaggggccgtc

SEQ ID NO: 301338 - DNA, 56 bp, Artificial
  Synthetic oligonucleotide
aaccgagacagctaccaatttacagagcgaatggagaaaaagagttgcgtaacaga

SEQ ID NO: 301339 - DNA, 57 bp, Artificial
  Synthetic oligonucleotide
aaccgagataataagaatgatggaaagtgccaaacctgaagatgtgtctttccaggg

SEQ ID NO: 301340 - DNA, 55 bp, Artificial
  Synthetic oligonucleotide
aaccgaggctatatcaacagggcttaagctgtcaggcgcaagcgcgtctgaagcg

SEQ ID NO: 301341 - DNA, 58 bp, Artificial
  Synthetic oligonucleotide
aaccgaggtgtacgatgctctgttcacctacacaagagccgttcgaactctcaggacc

SEQ ID NO: 301342 - DNA, 55 bp, Artificial
  Synthetic oligonucleotide
aaccgaggttttcagttaacaggtctaccataattggtaatacgctgcagggcgc

SEQ ID NO: 301343 - DNA, 55 bp, Artificial
  Synthetic oligonucleotide
aaccgataacaaccaagctgtcaccaaatgactcatatcacaaatcagcttatgc

SEQ ID NO: 301344 - DNA, 54 bp, Artificial
  Synthetic oligonucleotide
aaccgataaggcgtcgtgtagtgggactacgtgtaccctatcgatatccggccc

SEQ ID NO: 301345 - DNA, 53 bp, Artificial
  Synthetic oligonucleotide
aaccgataataggatataagaatgaaataggagatcaaagtttaataactatg

SEQ ID NO: 301346 - DNA, 57 bp, Artificial
  Synthetic oligonucleotide
aaccgataccattaggaaggagagatgtaccaggaagacggactagaataatattca

SEQ ID NO: 301347 - DNA, 55 bp, Artificial
  Synthetic oligonucleotide
aaccgatcacgaaaatgtatattacggaagcactaaacatccattaaaccaacga

SEQ ID NO: 301348 - DNA, 58 bp, Artificial
  Synthetic oligonucleotide
aaccgatgcgtcagaaaaactacgtgcacgtcagagtttgacggttgcgaagcaagcg

SEQ ID NO: 301349 - DNA, 50 bp, Artificial
  Synthetic oligonucleotide
aaccgatggtatcgcttcatgtagcaggtccagtacgtcaccacggcata

SEQ ID NO: 301350 - DNA, 60 bp, Artificial
  Synthetic oligonucleotide
aaccgattgaagaacgaccgaggagcttatgagactcgtgcagaagactgtgcgacttat

SEQ ID NO: 301351 - DNA, 54 bp, Artificial
  Synthetic oligonucleotide
aaccgcaatcgaggtcaaccctccgtcgtcgtgttggcctcctcttggaaatct

SEQ ID NO: 301352 - DNA, 55 bp, Artificial
  Synthetic oligonucleotide
aaccgcaatgtaggtcaatccttttacgcctcgtctgtctcttggcgtatctgtg

SEQ ID NO: 301353 - DNA, 53 bp, Artificial
  Synthetic oligonucleotide
aaccgcactgccttgaattgcaatgagagcctcgacactggttggctagcggg

SEQ ID NO: 301354 - DNA, 60 bp, Artificial
  Synthetic oligonucleotide
aaccgcagcggatataccatatccgttcggctcaccactaactgactctgtggttgtgaa

SEQ ID NO: 301355 - DNA, 60 bp, Artificial
  Synthetic oligonucleotide
aaccgcaggcctagacaggcatggtgctggtttagaggcaactggacagaagccatgaag

SEQ ID NO: 301356 - DNA, 60 bp, Artificial
  Synthetic oligonucleotide
aaccgcatatacttgttggtttgtcgagacacacacgctcactggtttatgccgctctga

SEQ ID NO: 301357 - DNA, 55 bp, Artificial
  Synthetic oligonucleotide
aaccgcatgagaagggcataaatcccaactatctcctggcttggaaccaggtgct

SEQ ID NO: 301358 - DNA, 53 bp, Artificial
  Synthetic oligonucleotide
aaccgccaacgtaacattttgtttaagggggcagagaatgttgattggaccga

SEQ ID NO: 301359 - DNA, 52 bp, Artificial
  Synthetic oligonucleotide
aaccgccaaggtcgtaaccaagaaactgttagaggagatcttccccaggttc

SEQ ID NO: 301360 - DNA, 55 bp, Artificial
  Synthetic oligonucleotide
aaccgccatattagtgacgtcacagccgccattttaagtaagcatggcgggcggt

SEQ ID NO: 301361 - DNA, 60 bp, Artificial
  Synthetic oligonucleotide
aaccgcctatgatcagcgagtcattgaaatgacaactgagctcctagcagcaattaaaac

SEQ ID NO: 301362 - DNA, 58 bp, Artificial
  Synthetic oligonucleotide
aaccgcctctagcacttctgccgtcgatttggaattcgccccattcgatagtatctcc

SEQ ID NO: 301363 - DNA, 60 bp, Artificial
  Synthetic oligonucleotide
aaccgcgtaggcatacactctgaattatgcaaggcggtggagtcacgttacgagaccaca

SEQ ID NO: 301364 - DNA, 59 bp, Artificial
  Synthetic oligonucleotide
aaccgcgttcgttcttatatcaagctaaagagtctcaacatatctgggacatttgctgt

SEQ ID NO: 301365 - DNA, 55 bp, Artificial
  Synthetic oligonucleotide
aaccgctaatttgaattgccgaccacaaactgacatatgcaaattaacttctgca

SEQ ID NO: 301366 - DNA, 55 bp, Artificial
  Synthetic oligonucleotide
aaccgctatagtacttcgagaaacctagtattgccttcggagtgttgatgcgttg

SEQ ID NO: 301367 - DNA, 56 bp, Artificial
  Synthetic oligonucleotide
aaccgctatattaaatagaactactctgccaaatatgttaccgcctatatttcctc

SEQ ID NO: 301368 - DNA, 60 bp, Artificial
  Synthetic oligonucleotide
aaccgctatgcaaatgcggtttgcttcgatcactccagagtaattttaccgacagagcga

SEQ ID NO: 301369 - DNA, 54 bp, Artificial
  Synthetic oligonucleotide
aaccgctctatcctcaatacaagccaaaggggaatccttgaggatgaacagatg

SEQ ID NO: 301370 - DNA, 60 bp, Artificial
  Synthetic oligonucleotide
aaccgctgcagcaatgggcactactcttgtgagcatattctcgccttcgggtatctatga

SEQ ID NO: 301371 - DNA, 55 bp, Artificial
  Synthetic oligonucleotide
aaccgctgctgcttcgccagggaagggattcacccggagtacttttgcatcaccc

SEQ ID NO: 301372 - DNA, 52 bp, Artificial
  Synthetic oligonucleotide
aaccgcttgttaagttggttgcaaccgagacccccggtgccctcgtagcgta

SEQ ID NO: 301373 - DNA, 58 bp, Artificial
  Synthetic oligonucleotide
aaccggaagcgagtgttggaagacgcacactttgagatagacgaagccacaggcgtta

SEQ ID NO: 301374 - DNA, 57 bp, Artificial
  Synthetic oligonucleotide
aaccggacacatccaattacaatatcgttaccttttgttgtcagtgtgagtctacac

SEQ ID NO: 301375 - DNA, 53 bp, Artificial
  Synthetic oligonucleotide
aaccggacatgacatgtctatgacacgacattaaactgtcagaacctgtttgg

SEQ ID NO: 301376 - DNA, 53 bp, Artificial
  Synthetic oligonucleotide
aaccggagcctccgctgggaaaccagtcgacggggactagaggttagaggaga

SEQ ID NO: 301377 - DNA, 57 bp, Artificial
  Synthetic oligonucleotide
aaccggaggtgatggtacagcgaacattcgttccttgaccgtgcgtaccggcatcga

SEQ ID NO: 301378 - DNA, 54 bp, Artificial
  Synthetic oligonucleotide
aaccggagtcttcaaagagaccctctggaccctcctctgtgagactttccccga

SEQ ID NO: 301379 - DNA, 55 bp, Artificial
  Synthetic oligonucleotide
aaccggagtttctctgatatatagcgcgctgcatggtgaacatttatcgctggtc

SEQ ID NO: 301380 - DNA, 50 bp, Artificial
  Synthetic oligonucleotide
aaccggagttttgacactattggcacttcgcgtgtcattcgtgtcgactc

SEQ ID NO: 301381 - DNA, 55 bp, Artificial
  Synthetic oligonucleotide
aaccggataccggacggctacggagacggagctctcgtcggattggctacgacga

SEQ ID NO: 301382 - DNA, 56 bp, Artificial
  Synthetic oligonucleotide
aaccggattcaccaaagtgtgcggagcgcctccttgtgtcatcggaggggtgaccg

SEQ ID NO: 301383 - DNA, 50 bp, Artificial
  Synthetic oligonucleotide
aaccggcaacccatatcaacggtagaaccggttgttcgacccgtaccacc

SEQ ID NO: 301384 - DNA, 58 bp, Artificial
  Synthetic oligonucleotide
aaccggcaagatgctcatagcatacacacccccagggggccctttgcctaaggacaga

SEQ ID NO: 301385 - DNA, 60 bp, Artificial
  Synthetic oligonucleotide
aaccggcagccttaagcaatggagacccacggcttgaggttgatctcagtacatctgtgt

SEQ ID NO: 301386 - DNA, 55 bp, Artificial
  Synthetic oligonucleotide
aaccggctcctcgagtctggtctcactccagacgagatccgtgacatggtggacc

SEQ ID NO: 301387 - DNA, 52 bp, Artificial
  Synthetic oligonucleotide
aaccgggaaaagggtctactacctgacccgtgaccctgagactcccctggca

SEQ ID NO: 301388 - DNA, 60 bp, Artificial
  Synthetic oligonucleotide
aaccgggacatgcagtattctaccttctcacaagcgagggttggatctgtgttgatgaca

SEQ ID NO: 301389 - DNA, 47 bp, Artificial
  Synthetic oligonucleotide
aaccgggactataaccatttaccccgtttcgcccttaccggtggtct

SEQ ID NO: 301390 - DNA, 55 bp, Artificial
  Synthetic oligonucleotide
aaccgggccccccctccatggaagaaagatggctgacggtagcgtactgcgccca

SEQ ID NO: 301391 - DNA, 58 bp, Artificial
  Synthetic oligonucleotide
aaccgggcccccctcgatggaagaaagatggctgacggtagcgtactgcgcacacaga

SEQ ID NO: 301392 - DNA, 51 bp, Artificial
  Synthetic oligonucleotide
aaccgggcgcggtctcctgtagcggctcctctatcctgagtaaacgcttcc

SEQ ID NO: 301393 - DNA, 55 bp, Artificial
  Synthetic oligonucleotide
aaccggggctttatatttaccatcctatccctgacgttgatgatgcggaagtaac

SEQ ID NO: 301394 - DNA, 52 bp, Artificial
  Synthetic oligonucleotide
aaccgggttaaacgtggtaagtggacagtgtctccttcttatgcagccacaa

SEQ ID NO: 301395 - DNA, 60 bp, Artificial
  Synthetic oligonucleotide
aaccggtacaggtgggagtggctcctgcacagctggactactatctctccaacaatattg

SEQ ID NO: 301396 - DNA, 56 bp, Artificial
  Synthetic oligonucleotide
aaccggtagaaccatacccagtaacagtcgagtgtgtgagcaagttacagggtgac

SEQ ID NO: 301397 - DNA, 60 bp, Artificial
  Synthetic oligonucleotide
aaccggtatgctccaaggaatcagagaggctatggccccctatagggatttgcgatatga

SEQ ID NO: 301398 - DNA, 52 bp, Artificial
  Synthetic oligonucleotide
aaccggtccaaataggggtgccttgaaaggaggccaggattctccacgtccg

SEQ ID NO: 301399 - DNA, 60 bp, Artificial
  Synthetic oligonucleotide
aaccggtccatattgaacacaagccaaaggggaatactcgaagatgagcagatgtatcag

SEQ ID NO: 301400 - DNA, 60 bp, Artificial
  Synthetic oligonucleotide
aaccggtcgtcagaaagaggacgtatcggaaactctgtgccattcatcatctgctggggc

SEQ ID NO: 301401 - DNA, 57 bp, Artificial
  Synthetic oligonucleotide
aaccggtgctagtcgcacagcgatcaccactctcgggaagtttggacaacagtccgg

SEQ ID NO: 301402 - DNA, 55 bp, Artificial
  Synthetic oligonucleotide
aaccggtggacctcgccgagccctgcctgggcgcacctgatccagcgtgagtcga

SEQ ID NO: 301403 - DNA, 55 bp, Artificial
  Synthetic oligonucleotide
aaccggtggcagcgacgcaaccccgggtggcacgtgtcagccgacgaggtccaat

SEQ ID NO: 301404 - DNA, 50 bp, Artificial
  Synthetic oligonucleotide
aaccggtttgcgccttcgaaatccgccgctcccccttttatagtggttgt

SEQ ID NO: 301405 - DNA, 59 bp, Artificial
  Synthetic oligonucleotide
aaccgtacaccccatctatttgggttctatgcattatgatgtaacgtatgaagtattga

SEQ ID NO: 301406 - DNA, 54 bp, Artificial
  Synthetic oligonucleotide
aaccgtatctgtacgtggtataccctcgttctggtatacagtggttcctctacc

SEQ ID NO: 301407 - DNA, 54 bp, Artificial
  Synthetic oligonucleotide
aaccgtatgttctaatagtcgataaaattactaatcgtgattaaatggccaaaa

SEQ ID NO: 301408 - DNA, 56 bp, Artificial
  Synthetic oligonucleotide
aaccgtattagatcaggacatttatttattagaatcgaattgggcgcttatcccta

SEQ ID NO: 301409 - DNA, 54 bp, Artificial
  Synthetic oligonucleotide
aaccgtatttggatatggataatgtcgtggttttcgttgaatggccgccgttgg

SEQ ID NO: 301410 - DNA, 55 bp, Artificial
  Synthetic oligonucleotide
aaccgtatttggatgtggtatatcctggtgttggtgtaaattgggtcttctacac

SEQ ID NO: 301411 - DNA, 58 bp, Artificial
  Synthetic oligonucleotide
aaccgtcactgcaggcgctctggtgggtttttcgtccggtgtcagtgtcagtttatca

SEQ ID NO: 301412 - DNA, 55 bp, Artificial
  Synthetic oligonucleotide
aaccgtccgaagtggtgatgtgcgcgtaataatgcgtcaacagggcgccgcatgt

SEQ ID NO: 301413 - DNA, 55 bp, Artificial
  Synthetic oligonucleotide
aaccgtccggctacttattttgatccaatctggcaacaattccctgagacggatg

SEQ ID NO: 301414 - DNA, 57 bp, Artificial
  Synthetic oligonucleotide
aaccgtcggtgtgcctgcgtccggcaaaactacgtgggctgagaaattctgtgcaaa

SEQ ID NO: 301415 - DNA, 55 bp, Artificial
  Synthetic oligonucleotide
aaccgtctccgtatatacctacttgtatgtgagacgctgagctaggtaatatatc

SEQ ID NO: 301416 - DNA, 60 bp, Artificial
  Synthetic oligonucleotide
aaccgtgacgcgcttattataactcatctgcgtcaacctggatgcatacctgatgttaga

SEQ ID NO: 301417 - DNA, 60 bp, Artificial
  Synthetic oligonucleotide
aaccgtgagcatctctgggtcatatattgtaactggtagccagctacagcctctgtacca

SEQ ID NO: 301418 - DNA, 60 bp, Artificial
  Synthetic oligonucleotide
aaccgtgatgacctgatagatttggatggaatatcaatgttcgagtgcttgtggctgtgt

SEQ ID NO: 301419 - DNA, 55 bp, Artificial
  Synthetic oligonucleotide
aaccgtgccgactgaagggctcgaggtcacgtggggcaacaacgagccgtataag

SEQ ID NO: 301420 - DNA, 56 bp, Artificial
  Synthetic oligonucleotide
aaccgtgctcccagagagtgcacccggttaagtttgtgacaggggtgagctttaca

SEQ ID NO: 301421 - DNA, 55 bp, Artificial
  Synthetic oligonucleotide
aaccgtggagtcagcgaaaatcgattcagttttacctccattaactgtacgcgaa

SEQ ID NO: 301422 - DNA, 57 bp, Artificial
  Synthetic oligonucleotide
aaccgtggccacactactcatcaagagaccaactggggaactcatgcctctggcagc

SEQ ID NO: 301423 - DNA, 47 bp, Artificial
  Synthetic oligonucleotide
aaccgttaacggtatcgtaaccccggtcgtagtacgtacttcgtacg

SEQ ID NO: 301424 - DNA, 55 bp, Artificial
  Synthetic oligonucleotide
aaccgttaactcggtgtttgatttggcctgggctcttcgccgacacctgacacta

SEQ ID NO: 301425 - DNA, 55 bp, Artificial
  Synthetic oligonucleotide
aaccgttacaatctagagtggttgtgcagttacctccgatggctgtcaagaacgg

SEQ ID NO: 301426 - DNA, 56 bp, Artificial
  Synthetic oligonucleotide
aaccgttagcagatactaaggtagccatgttggatgatgccacacacacgtgttgg

SEQ ID NO: 301427 - DNA, 52 bp, Artificial
  Synthetic oligonucleotide
aaccgttaggcgtcaaaatactgttccaaaatactattcaccaaaccactag

SEQ ID NO: 301428 - DNA, 51 bp, Artificial
  Synthetic oligonucleotide
aaccgttagtaatcttaaacttgcgtaccaatatttagctagtggtaaatc

SEQ ID NO: 301429 - DNA, 60 bp, Artificial
  Synthetic oligonucleotide
aaccgttatggcagctttcagcggtaacaatgagggacggacatcagacatgcgaacgga

SEQ ID NO: 301430 - DNA, 59 bp, Artificial
  Synthetic oligonucleotide
aaccgttcacggtggtaacagcagatagacacaatctctttatggggagtgagtattgc

SEQ ID NO: 301431 - DNA, 54 bp, Artificial
  Synthetic oligonucleotide
aaccgttccgcacacccaaaacgtcaagttgtccagctatacctacgctttcaa

SEQ ID NO: 301432 - DNA, 55 bp, Artificial
  Synthetic oligonucleotide
aaccgttgcacagattcaagggtgtaagtatccagtagtttccattccgttagga

SEQ ID NO: 301433 - DNA, 52 bp, Artificial
  Synthetic oligonucleotide
aaccgttggacatttcagtgaaagaccccatgatgcaatcaatggacacttg

SEQ ID NO: 301434 - DNA, 57 bp, Artificial
  Synthetic oligonucleotide
aaccgttgttaccttgcaggctgcctcacctgaaatgaggaaatttgcctactccaa

SEQ ID NO: 301435 - DNA, 57 bp, Artificial
  Synthetic oligonucleotide
aaccgtttaagagggctcatggggaacctcatgcgcatatggatccggacgaaatta

SEQ ID NO: 301436 - DNA, 58 bp, Artificial
  Synthetic oligonucleotide
aaccgtttcaggtccgcgaaggccgctcagactatcgtctgcttccagcattccgtgt

SEQ ID NO: 301437 - DNA, 54 bp, Artificial
  Synthetic oligonucleotide
aaccgtttctagaaagcgggaaagatggtatcaggtttctataaaagctcacac

SEQ ID NO: 301438 - DNA, 52 bp, Artificial
  Synthetic oligonucleotide
aacctaaaacggtgacgtttgaaggtgactctgtgtttttaccatttactgc

SEQ ID NO: 301439 - DNA, 52 bp, Artificial
  Synthetic oligonucleotide
aacctaacaggtaaataattgggacaccaaaggtaaatgggacaccgataca

SEQ ID NO: 301440 - DNA, 50 bp, Artificial
  Synthetic oligonucleotide
aacctaagcgcagggtcctccgcttgctccgacacaatgtcaaacgccga

SEQ ID NO: 301441 - DNA, 54 bp, Artificial
  Synthetic oligonucleotide
aacctaatcgaaccaggtcctatgtcaagctaaaacgactccgatttaagggca

SEQ ID NO: 301442 - DNA, 50 bp, Artificial
  Synthetic oligonucleotide
aacctaatcgagcgccgtgcagtcaaagggtgcctcttgccgaccccaag

SEQ ID NO: 301443 - DNA, 59 bp, Artificial
  Synthetic oligonucleotide
aacctaatcttatctcatcgagatttgtcgaagctagcttggtccaagccggcctggat

SEQ ID NO: 301444 - DNA, 54 bp, Artificial
  Synthetic oligonucleotide
aacctaatgcaacctcgccagcttgttttccgtcccgaggttttctggaatcac

SEQ ID NO: 301445 - DNA, 57 bp, Artificial
  Synthetic oligonucleotide
aacctaatggtgatagcgaattttacgaaatattaggaagattctcgctaatatcac

SEQ ID NO: 301446 - DNA, 60 bp, Artificial
  Synthetic oligonucleotide
aacctacccaaggcattctacactgataggataaagactgtccatgaatctcaaggcatt

SEQ ID NO: 301447 - DNA, 55 bp, Artificial
  Synthetic oligonucleotide
aacctaccgcaatcctgttcagtgaacaacacacaccattactacaaagggcctg

SEQ ID NO: 301448 - DNA, 55 bp, Artificial
  Synthetic oligonucleotide
aacctacgggaactccacagcacaagtagacgtatttgtcaacggtgtgactcca

SEQ ID NO: 301449 - DNA, 53 bp, Artificial
  Synthetic oligonucleotide
aacctacggggaagagtccacaagtcgtggtgacccttcggccctcgcgcaaa

SEQ ID NO: 301450 - DNA, 58 bp, Artificial
  Synthetic oligonucleotide
aacctactaccttgaagacaagacgacattgaagacagcaaacttctttgcagttata

SEQ ID NO: 301451 - DNA, 55 bp, Artificial
  Synthetic oligonucleotide
aacctactgtacaactggtatactaacagaagggaagtgttttgtgccagaccag

SEQ ID NO: 301452 - DNA, 60 bp, Artificial
  Synthetic oligonucleotide
aacctactgtgttaagggcggcatgccatctggctgctccggcacttcaatctttaattc

SEQ ID NO: 301453 - DNA, 52 bp, Artificial
  Synthetic oligonucleotide
aacctagactttctgtctacagcaaatggtatacaattaagtggaccttatc

SEQ ID NO: 301454 - DNA, 52 bp, Artificial
  Synthetic oligonucleotide
aacctaggcatcacgtcctgtggcgaggttaagtgcgtggccctgtcacagg

SEQ ID NO: 301455 - DNA, 57 bp, Artificial
  Synthetic oligonucleotide
aacctaggcctgtattacttggacgagcatcattttaaggtgtactatgttgacttc

SEQ ID NO: 301456 - DNA, 58 bp, Artificial
  Synthetic oligonucleotide
aacctagggaagtatgtttgcataagaccagactggtggccatacgagacgacgacag

SEQ ID NO: 301457 - DNA, 53 bp, Artificial
  Synthetic oligonucleotide
aacctaggggaagagatcggtgatctagaacacctagggtggatcttaagggg

SEQ ID NO: 301458 - DNA, 59 bp, Artificial
  Synthetic oligonucleotide
aacctagtaaaagatcctataccaggtgcagaaaccttctacacagatggatcctgcaa

SEQ ID NO: 301459 - DNA, 55 bp, Artificial
  Synthetic oligonucleotide
aacctagtaactgcgtagcatccgactgtaacctgttctctgctgaatgcgaggg

SEQ ID NO: 301460 - DNA, 49 bp, Artificial
  Synthetic oligonucleotide
aacctagttaaaccctttacaggtcgttcttctactgttacggaacagg

SEQ ID NO: 301461 - DNA, 53 bp, Artificial
  Synthetic oligonucleotide
aacctagttaataggttcgttatactcccttctggtgaggtcactctgcagaa

SEQ ID NO: 301462 - DNA, 58 bp, Artificial
  Synthetic oligonucleotide
aacctataccgacctcgcctgcgaccctgctcttatggctaacctgcctccgcgcgaa

SEQ ID NO: 301463 - DNA, 55 bp, Artificial
  Synthetic oligonucleotide
aacctatacgacagggggagcggtatctcgaggtacccacagcctcacgtccctc

SEQ ID NO: 301464 - DNA, 60 bp, Artificial
  Synthetic oligonucleotide
aacctatcccgccgttatttctgcgatgattgacatggaaaatggcagcaatccatatac

SEQ ID NO: 301465 - DNA, 56 bp, Artificial
  Synthetic oligonucleotide
aacctatcccgctaaaaattctatggcagggatcaatggccagaggttcccaacaa

SEQ ID NO: 301466 - DNA, 53 bp, Artificial
  Synthetic oligonucleotide
aacctatgaacggttcatttcgagcatggtccaggtgatcgtaaatggaaaga

SEQ ID NO: 301467 - DNA, 51 bp, Artificial
  Synthetic oligonucleotide
aacctatgcttggaaatacaatgtccgttggatattcgttacgaggtattg

SEQ ID NO: 301468 - DNA, 55 bp, Artificial
  Synthetic oligonucleotide
aacctatggacttggatccagatatggtggtgttttcacaagcaatgttaaaatc

SEQ ID NO: 301469 - DNA, 57 bp, Artificial
  Synthetic oligonucleotide
aacctatgttccctgccacataaggcaagtagtaaatgattggtacaccttgtctaa

SEQ ID NO: 301470 - DNA, 58 bp, Artificial
  Synthetic oligonucleotide
aacctatgtttcagtaggcacatcaacattgaacaaaaggtcgacccctgaaatagca

SEQ ID NO: 301471 - DNA, 57 bp, Artificial
  Synthetic oligonucleotide
aacctattaggctcattcgcttgtgacttctacacgggtcgcattcttgcgggattc

SEQ ID NO: 301472 - DNA, 58 bp, Artificial
  Synthetic oligonucleotide
aacctattgaaaaagtgcatgttcactaagctcaaaatgttgattctactaattgtta

SEQ ID NO: 301473 - DNA, 57 bp, Artificial
  Synthetic oligonucleotide
aacctatttaattggaataacactaaggatatcatgccaaatggcacaaagaattac

SEQ ID NO: 301474 - DNA, 60 bp, Artificial
  Synthetic oligonucleotide
aacctcaagcccagtgacctctccagcacagctgatcttcgtgcagagtgctactaccgt

SEQ ID NO: 301475 - DNA, 52 bp, Artificial
  Synthetic oligonucleotide
aacctcaagttacgttcattgtgtcatacgcaaaggatatctatgataaatt

SEQ ID NO: 301476 - DNA, 50 bp, Artificial
  Synthetic oligonucleotide
aacctcacaaaatgttgtctaaacttccagctgtgctgagatcagaacta

SEQ ID NO: 301477 - DNA, 58 bp, Artificial
  Synthetic oligonucleotide
aacctcagtgtgtaagaataggcggtcttgagcacatttacacatgcgtgtccatctt

SEQ ID NO: 301478 - DNA, 54 bp, Artificial
  Synthetic oligonucleotide
aacctcagtgttcgagtgaacggagcccaacggttaaatgtcttggaataaata

SEQ ID NO: 301479 - DNA, 57 bp, Artificial
  Synthetic oligonucleotide
aacctcataatgacaagggattagcggagtggtcaaaggaagcacagttacgtaata

SEQ ID NO: 301480 - DNA, 50 bp, Artificial
  Synthetic oligonucleotide
aacctcatgtgatatcagccttcgggcatatcattcttcggacccctctc

SEQ ID NO: 301481 - DNA, 54 bp, Artificial
  Synthetic oligonucleotide
aacctcattaaagggcaggattcaactgcctccttgctcaacactaggatgtca

SEQ ID NO: 301482 - DNA, 55 bp, Artificial
  Synthetic oligonucleotide
aacctccaagcccagtacccgaggtcccgaccccgctcctgcttccgcagagagc

SEQ ID NO: 301483 - DNA, 54 bp, Artificial
  Synthetic oligonucleotide
aacctccacaggaaacacccggccactcttatcatagaggtaaaccgcaactaa

SEQ ID NO: 301484 - DNA, 51 bp, Artificial
  Synthetic oligonucleotide
aacctccactcggggcacgcagtgtcaagagggacggcaaaactccgctgg

SEQ ID NO: 301485 - DNA, 57 bp, Artificial
  Synthetic oligonucleotide
aacctccactgggtgggtcaaggttgaggtatagaatcctattcgctcctgatagga

SEQ ID NO: 301486 - DNA, 56 bp, Artificial
  Synthetic oligonucleotide
aacctcccacatatcaaacccgcatataagtacataactgtagaaggtgtcgaaac

SEQ ID NO: 301487 - DNA, 56 bp, Artificial
  Synthetic oligonucleotide
aacctcccgcgagacggcaccagccgagtcaaggagatgttcgagtcccgcttcgg

SEQ ID NO: 301488 - DNA, 55 bp, Artificial
  Synthetic oligonucleotide
aacctccctttccctcttcagatctgctatctgacatgtcttgcacaggtccggt

SEQ ID NO: 301489 - DNA, 60 bp, Artificial
  Synthetic oligonucleotide
aacctccgagaatttatgcttgctacaatgcctttagatgcaaagagcaaaatcggaggc

SEQ ID NO: 301490 - DNA, 55 bp, Artificial
  Synthetic oligonucleotide
aacctccgcccatccatgtttgcaaatctaaggtagcaggtcggccataagacct

SEQ ID NO: 301491 - DNA, 58 bp, Artificial
  Synthetic oligonucleotide
aacctccggtatcaacgctggaaggtgacactaacgcagacacagcgaacgctcggcg

SEQ ID NO: 301492 - DNA, 58 bp, Artificial
  Synthetic oligonucleotide
aacctcgagtgcgaggccgaaactcaaacctgagggaaccttctgccggcatgtcatc

SEQ ID NO: 301493 - DNA, 60 bp, Artificial
  Synthetic oligonucleotide
aacctcgcgtcgctcttccaattgctccgcaaacgactagctctcttgctaagcttgatt

SEQ ID NO: 301494 - DNA, 60 bp, Artificial
  Synthetic oligonucleotide
aacctcggagatggtaggatgcagtacagtcactcaggtgatgattggagagcacgtaga

SEQ ID NO: 301495 - DNA, 53 bp, Artificial
  Synthetic oligonucleotide
aacctcgtgggagacgccaacctatccccaaggcgcgtcgatccgagggaagg

SEQ ID NO: 301496 - DNA, 60 bp, Artificial
  Synthetic oligonucleotide
aacctctaataatagacttgtaggaatgctacaatatagtggaagagtatggacatttca

SEQ ID NO: 301497 - DNA, 55 bp, Artificial
  Synthetic oligonucleotide
aacctctagaagaatccgagaagtactataacgcactatccgagctatctgtgct

SEQ ID NO: 301498 - DNA, 56 bp, Artificial
  Synthetic oligonucleotide
aacctctcagactactattgagattggaaatttgtcacgcgttttcccaagctttc

SEQ ID NO: 301499 - DNA, 59 bp, Artificial
  Synthetic oligonucleotide
aacctctggatggtctccacgaattatctctactttggcatctgtggctctgaagatca

SEQ ID NO: 301500 - DNA, 50 bp, Artificial
  Synthetic oligonucleotide
aacctctgggagcggggcaggggtgcagacatgaagagttactgcggttg

SEQ ID NO: 301501 - DNA, 55 bp, Artificial
  Synthetic oligonucleotide
aacctctgtataaatgtacccgcttcttgcattgtattcagtcgctctgcggaga

SEQ ID NO: 301502 - DNA, 60 bp, Artificial
  Synthetic oligonucleotide
aacctcttatgacgctgacaaccgtcctatacttgtcatgcgctctaatctctgggcatc

SEQ ID NO: 301503 - DNA, 58 bp, Artificial
  Synthetic oligonucleotide
aacctcttcaacgaatccttccccttctgtcaacaaaggaggcagtacatgtgctcac

SEQ ID NO: 301504 - DNA, 58 bp, Artificial
  Synthetic oligonucleotide
aacctcttctacacaaaacatagtttactgcatatcacattttccacccacgagagct

SEQ ID NO: 301505 - DNA, 57 bp, Artificial
  Synthetic oligonucleotide
aacctcttctacacaaaacatagtttattgcatatcacattttatcccacccacgtg

SEQ ID NO: 301506 - DNA, 57 bp, Artificial
  Synthetic oligonucleotide
aacctcttcttcataaaacatagtttatttcatatcacattttccacccacgagtgc

SEQ ID NO: 301507 - DNA, 58 bp, Artificial
  Synthetic oligonucleotide
aacctcttgcaaccactttgattggtgaaatagctaactattacacacattggactgg

SEQ ID NO: 301508 - DNA, 53 bp, Artificial
  Synthetic oligonucleotide
aacctctttttcgaggaataaactgtacacattctccggcattagaagagttt

SEQ ID NO: 301509 - DNA, 56 bp, Artificial
  Synthetic oligonucleotide
aacctgaaaggtctattcgactcctcaaaacaggcgaatgtaaaatagcaggggca

SEQ ID NO: 301510 - DNA, 55 bp, Artificial
  Synthetic oligonucleotide
aacctgaagcagattcaagagtctatccttgaattaaacacccgtgttgatacta

SEQ ID NO: 301511 - DNA, 60 bp, Artificial
  Synthetic oligonucleotide
aacctgaccttgtttgcacatgcatgcaacagtcaaactcggcatggttccaaactgatt

SEQ ID NO: 301512 - DNA, 55 bp, Artificial
  Synthetic oligonucleotide
aacctgagtagagtgggccgtagagggtgacgaaggacgcattttttactgccca

SEQ ID NO: 301513 - DNA, 57 bp, Artificial
  Synthetic oligonucleotide
aacctgatcacatttgaggacggcctgagagaactatcagtaatacagagtcacctt

SEQ ID NO: 301514 - DNA, 60 bp, Artificial
  Synthetic oligonucleotide
aacctgcacagaatctgactatgaagcctttgattcctcacaagatgctaacatcctagc

SEQ ID NO: 301515 - DNA, 58 bp, Artificial
  Synthetic oligonucleotide
aacctgccaacagtcttacataagaggactcttggactttctgcaatgtcaacgacca

SEQ ID NO: 301516 - DNA, 60 bp, Artificial
  Synthetic oligonucleotide
aacctgccaataactggttcaatggatactacatacgctaattccacacgagaagagaca

SEQ ID NO: 301517 - DNA, 52 bp, Artificial
  Synthetic oligonucleotide
aacctgccctacaggaactacgattactaaaaggcgagccgttgcctaaacg

SEQ ID NO: 301518 - DNA, 55 bp, Artificial
  Synthetic oligonucleotide
aacctgcgctcctggattagaaccactaaggttaccggagaccaccctctcgtca

SEQ ID NO: 301519 - DNA, 53 bp, Artificial
  Synthetic oligonucleotide
aacctgcggggaatcataaacgggaacgcgcggcatggttcttaccctttgga

SEQ ID NO: 301520 - DNA, 50 bp, Artificial
  Synthetic oligonucleotide
aacctgcttaaggccaggcaataagactataaggaacctccagatagggg

SEQ ID NO: 301521 - DNA, 53 bp, Artificial
  Synthetic oligonucleotide
aacctggaaacaagctttgagaccttatactcgtaatctgagtgtttcaattt

SEQ ID NO: 301522 - DNA, 56 bp, Artificial
  Synthetic oligonucleotide
aacctggagctcacactggtaacgcttgacaccaacgaaaaatttagagacatcac

SEQ ID NO: 301523 - DNA, 60 bp, Artificial
  Synthetic oligonucleotide
aacctggatggaatgatatggctcacgggacaggaattgtgcccatcgtgacagacttag

SEQ ID NO: 301524 - DNA, 54 bp, Artificial
  Synthetic oligonucleotide
aacctgggaaaaagacacagagtttgcagaccgcaacgagataggggtgggaaa

SEQ ID NO: 301525 - DNA, 57 bp, Artificial
  Synthetic oligonucleotide
aacctgggaaaaccactgcacatatgcaggtccttttgggatgtccaggattctcct

SEQ ID NO: 301526 - DNA, 59 bp, Artificial
  Synthetic oligonucleotide
aacctggggcaccctctcatcctagacacctgcaccatcgaaggactggtatacggcaa

SEQ ID NO: 301527 - DNA, 50 bp, Artificial
  Synthetic oligonucleotide
aacctggtatcgtgcatttctatgatgacgtgtccagtggcattaacggg

SEQ ID NO: 301528 - DNA, 60 bp, Artificial
  Synthetic oligonucleotide
aacctggtggtctttcagtcctctgcactttgtctttcaacttattgagatcaccagaca

SEQ ID NO: 301529 - DNA, 52 bp, Artificial
  Synthetic oligonucleotide
aacctggttgcatgtggacaagctgagagcgcattggtgacaaagcatgttg

SEQ ID NO: 301530 - DNA, 60 bp, Artificial
  Synthetic oligonucleotide
aacctgtacagcctgaacttagagatattacacatgttagcgctgctagaacatttaggg

SEQ ID NO: 301531 - DNA, 57 bp, Artificial
  Synthetic oligonucleotide
aacctgtacgaagacgctccattctacacgtatggtgacgacggcgtgtatgccatg

SEQ ID NO: 301532 - DNA, 58 bp, Artificial
  Synthetic oligonucleotide
aacctgtatcgaagagcgttgtcgacaaagtgtgtgacattttgtctaggataatttc

SEQ ID NO: 301533 - DNA, 55 bp, Artificial
  Synthetic oligonucleotide
aacctgtgaaaccggtcttcaatggcttgcgacatgaagccgttgtaccacagag

SEQ ID NO: 301534 - DNA, 60 bp, Artificial
  Synthetic oligonucleotide
aacctgtgccaagcgtccaccgtgtgacacggtaactgatagcaatgagtctttgctacg

SEQ ID NO: 301535 - DNA, 55 bp, Artificial
  Synthetic oligonucleotide
aacctgtgggcgcactgagcgagcacgttgcacgaggcgacgtcatcctgtaccg

SEQ ID NO: 301536 - DNA, 56 bp, Artificial
  Synthetic oligonucleotide
aacctgtgtctctgtcccctccgtttatgaatacgagcgactttgtaacttgtgga

SEQ ID NO: 301537 - DNA, 56 bp, Artificial
  Synthetic oligonucleotide
aacctgttaaataatgaaaaacgcggacaaagtacacaatgggatcaggcagcagt

SEQ ID NO: 301538 - DNA, 56 bp, Artificial
  Synthetic oligonucleotide
aacctgttccttgtatgataaagagaactggagcctacccgtgtctggaccagcac

SEQ ID NO: 301539 - DNA, 59 bp, Artificial
  Synthetic oligonucleotide
aacctgttgacgaatcctgctgcggtcctgggcaatatctctttgtccatggttgaagg

SEQ ID NO: 301540 - DNA, 55 bp, Artificial
  Synthetic oligonucleotide
aacctgttgttcaaaaagcgattggtagtgagtttgaggatggtttaaactgcaa

SEQ ID NO: 301541 - DNA, 52 bp, Artificial
  Synthetic oligonucleotide
aaccttacagcaataaactttactcaacagcccccaggaggggacccagaaa

SEQ ID NO: 301542 - DNA, 56 bp, Artificial
  Synthetic oligonucleotide
aaccttactggaggcggaaaagttactaaggttgttgtgtcacgcatgtgattcaa

SEQ ID NO: 301543 - DNA, 56 bp, Artificial
  Synthetic oligonucleotide
aaccttatcttaacgctacggcagtacaaacccccagtgattctcatcactgtgag

SEQ ID NO: 301544 - DNA, 50 bp, Artificial
  Synthetic oligonucleotide
aaccttatgactagctcatgttgctaggcaactgaactgtgataaccttt

SEQ ID NO: 301545 - DNA, 50 bp, Artificial
  Synthetic oligonucleotide
aaccttatgatgtgcatctatactgccaacctaatcagcccaggaattga

SEQ ID NO: 301546 - DNA, 55 bp, Artificial
  Synthetic oligonucleotide
aaccttatgtgtcgtgcggtcttggtaaatgttatcaatttgcacttgggcaggg

SEQ ID NO: 301547 - DNA, 60 bp, Artificial
  Synthetic oligonucleotide
aaccttcaaaaacccatgcgcttcagtaccatcaagcagcgtctcgataacagaatccat

SEQ ID NO: 301548 - DNA, 52 bp, Artificial
  Synthetic oligonucleotide
aaccttcacagatgcacgagcacgtactatctctgtgtcgcttaatgtggca

SEQ ID NO: 301549 - DNA, 53 bp, Artificial
  Synthetic oligonucleotide
aaccttcaccgaaccgacgtcattcaaattctccttcgttacgtctggcacgg

SEQ ID NO: 301550 - DNA, 55 bp, Artificial
  Synthetic oligonucleotide
aaccttcagagcccagtgacaccctgttctgcgacataggggaatcctccccaag

SEQ ID NO: 301551 - DNA, 59 bp, Artificial
  Synthetic oligonucleotide
aaccttcatgcactcccgcacggaggccgatacgtcgacggaactaagtccatcagcta

SEQ ID NO: 301552 - DNA, 59 bp, Artificial
  Synthetic oligonucleotide
aaccttccaggacaactggtgaactataatggagcgacggctgtagcagcctccaatgg

SEQ ID NO: 301553 - DNA, 60 bp, Artificial
  Synthetic oligonucleotide
aaccttccattcgagagagcaaccattatggcggcatttacaggaaacactgaaggcaga

SEQ ID NO: 301554 - DNA, 51 bp, Artificial
  Synthetic oligonucleotide
aaccttcccaaaatatgttcaaaagggaaaagaacaatcgaccttggccag

SEQ ID NO: 301555 - DNA, 54 bp, Artificial
  Synthetic oligonucleotide
aaccttccgagtttttcagtcgtatcggagtaaagtcagactcgttgatcttac

SEQ ID NO: 301556 - DNA, 59 bp, Artificial
  Synthetic oligonucleotide
aaccttcctggccaaattatccggtatctgatcatgtcaggatctccaggtagacgttc

SEQ ID NO: 301557 - DNA, 52 bp, Artificial
  Synthetic oligonucleotide
aaccttccttctgatactaacaaacctcgtttcggaggtgagctttgggttc

SEQ ID NO: 301558 - DNA, 58 bp, Artificial
  Synthetic oligonucleotide
aaccttcgcaggatgtagttttcagcaattccctagatctcacgctccttccaaccgc

SEQ ID NO: 301559 - DNA, 52 bp, Artificial
  Synthetic oligonucleotide
aaccttcgggtggtgctttaaactggtccctttgccacctgaggaggtggag

SEQ ID NO: 301560 - DNA, 54 bp, Artificial
  Synthetic oligonucleotide
aaccttcttccgtctccagacggtggtgattggctaagattcggtgtaaggttc

SEQ ID NO: 301561 - DNA, 53 bp, Artificial
  Synthetic oligonucleotide
aaccttctttaggaagtgtaaaatccctatctaaattaagatctaataatgga

SEQ ID NO: 301562 - DNA, 52 bp, Artificial
  Synthetic oligonucleotide
aaccttgaaagtcaagccaggacagaccatcgcttctttcatgcaagaaact

SEQ ID NO: 301563 - DNA, 55 bp, Artificial
  Synthetic oligonucleotide
aaccttgaagtctgtgactacccttaattatatcttgacccttaacacagctaaa

SEQ ID NO: 301564 - DNA, 52 bp, Artificial
  Synthetic oligonucleotide
aaccttgacgaaatcaagcgtggtgctccgaaggaacgtatggagctttgga

SEQ ID NO: 301565 - DNA, 59 bp, Artificial
  Synthetic oligonucleotide
aaccttgactgacgaccaagtagaagtggtcgccgcacaagaactggtggaatcacaga

SEQ ID NO: 301566 - DNA, 60 bp, Artificial
  Synthetic oligonucleotide
aaccttgatggctgcaaattatccaaatagagttagtatgcacgtttttgacaccatgat

SEQ ID NO: 301567 - DNA, 55 bp, Artificial
  Synthetic oligonucleotide
aaccttgcaacaatggcggccctgggtgcagttgcaacgaaagcttttcagggcg

SEQ ID NO: 301568 - DNA, 57 bp, Artificial
  Synthetic oligonucleotide
aaccttgcacacatgaatcaatcagaatcggcctttcatgtggcattgtagtagatt

SEQ ID NO: 301569 - DNA, 59 bp, Artificial
  Synthetic oligonucleotide
aaccttgcactgcctactaagagagtcacctgggtagcgccactaggtgtccgcggagc

SEQ ID NO: 301570 - DNA, 55 bp, Artificial
  Synthetic oligonucleotide
aaccttgcgtcgcttaactttagagcaggctcgagcaaagaagcggcaattgcaa

SEQ ID NO: 301571 - DNA, 50 bp, Artificial
  Synthetic oligonucleotide
aaccttggcctggtattcgtagcagatatcacgataatgattcttattca

SEQ ID NO: 301572 - DNA, 58 bp, Artificial
  Synthetic oligonucleotide
aaccttgggactcaagtctaggtgaccacataaataattgtgtggtccaagagatctg

SEQ ID NO: 301573 - DNA, 60 bp, Artificial
  Synthetic oligonucleotide
aaccttggtcataccttggatctctgcatcacattttagaggagtcagtaatgacgatgt

SEQ ID NO: 301574 - DNA, 60 bp, Artificial
  Synthetic oligonucleotide
aaccttggtgtgtcagcatctgctaccgtcctcaagtactgctgcaagagccagccatta

SEQ ID NO: 301575 - DNA, 55 bp, Artificial
  Synthetic oligonucleotide
aaccttgtaagcctcttttttgcttatgcttgtaagttcctctccaatggacaag

SEQ ID NO: 301576 - DNA, 55 bp, Artificial
  Synthetic oligonucleotide
aaccttgtggccgagtcagcactactcctacatattctggtggagcacagaggaa

SEQ ID NO: 301577 - DNA, 51 bp, Artificial
  Synthetic oligonucleotide
aaccttgtttgtgcgtgcaatagcagcgacgcgtataactgtttagcacac

SEQ ID NO: 301578 - DNA, 51 bp, Artificial
  Synthetic oligonucleotide
aacctttaatcgccctcaagagttccacgccctgttactgagtataaatat

SEQ ID NO: 301579 - DNA, 50 bp, Artificial
  Synthetic oligonucleotide
aacctttacccggttgcccggcaacggccaggtctgggccaagggtttgc

SEQ ID NO: 301580 - DNA, 58 bp, Artificial
  Synthetic oligonucleotide
aacctttccaagggcgaaccaacaattgtaatacatgctggtgcaaatactgcgctta

SEQ ID NO: 301581 - DNA, 51 bp, Artificial
  Synthetic oligonucleotide
aacctttctgcggagaactgtaacccgtgatccagctggttggtttggtaa

SEQ ID NO: 301582 - DNA, 57 bp, Artificial
  Synthetic oligonucleotide
aacctttcttcttacttttgatcacaattcccttatgtttgtcacacaaatgctcaa

SEQ ID NO: 301583 - DNA, 54 bp, Artificial
  Synthetic oligonucleotide
aacctttgacacagagtatccaaaaacgaaactcacagactgggattttgtggt

SEQ ID NO: 301584 - DNA, 55 bp, Artificial
  Synthetic oligonucleotide
aacctttgcacggtaaggtcttgaccttcactcagtccgacaaggaagctctgct

SEQ ID NO: 301585 - DNA, 55 bp, Artificial
  Synthetic oligonucleotide
aacctttggacttaagtctaaatgaccacataagtaattatgtggccctaatgac

SEQ ID NO: 301586 - DNA, 50 bp, Artificial
  Synthetic oligonucleotide
aacctttggccccgtccactttcgaaatcaggttaaaatacgccgcaggg

SEQ ID NO: 301587 - DNA, 58 bp, Artificial
  Synthetic oligonucleotide
aacctttttactgcaagcggccaatggaaacccttcccgatgtcatgttgctatgcaa

SEQ ID NO: 301588 - DNA, 56 bp, Artificial
  Synthetic oligonucleotide
aacgaaaagtttgtaaggagacgtttggtcgagctgtgcacactgttcaaggcgga

SEQ ID NO: 301589 - DNA, 55 bp, Artificial
  Synthetic oligonucleotide
aacgaaacctcagggacatcagtttagccaggtatgctttcgatttctatgagat

SEQ ID NO: 301590 - DNA, 56 bp, Artificial
  Synthetic oligonucleotide
aacgaaacgcgtcatcctccccgtcggaaagatatcttctctagagatcaaagact

SEQ ID NO: 301591 - DNA, 60 bp, Artificial
  Synthetic oligonucleotide
aacgaaagaacattagacttgcatgacgcgaatgtgaagaacctgtatgaaagagtcagg

SEQ ID NO: 301592 - DNA, 57 bp, Artificial
  Synthetic oligonucleotide
aacgaaagaactctggatttccatgatccaaatgtcaggaacttatacgataaggtc

SEQ ID NO: 301593 - DNA, 60 bp, Artificial
  Synthetic oligonucleotide
aacgaaagatctgtaattgtcgatgatgggatgtggtgggttaccacagctgctaggaca

SEQ ID NO: 301594 - DNA, 54 bp, Artificial
  Synthetic oligonucleotide
aacgaaagccctcccatcgctatagggagtccgtccgcgtcccgtaacaatagc

SEQ ID NO: 301595 - DNA, 54 bp, Artificial
  Synthetic oligonucleotide
aacgaaagcgcagaacttaaatgtgtatgtttacaattcctatataatgtgact

SEQ ID NO: 301596 - DNA, 55 bp, Artificial
  Synthetic oligonucleotide
aacgaaaggaattagggtttcgtggcatatttcgtaaatatgcatcgggacacca

SEQ ID NO: 301597 - DNA, 55 bp, Artificial
  Synthetic oligonucleotide
aacgaaatcgaggagccataccggatacattttgcgggcaagtccgccatccggt

SEQ ID NO: 301598 - DNA, 50 bp, Artificial
  Synthetic oligonucleotide
aacgaaattaattcagtcgacgatttagtccccgacgtgggttccacgtt

SEQ ID NO: 301599 - DNA, 55 bp, Artificial
  Synthetic oligonucleotide
aacgaaattgcggctaaggtagacttcctacaaggtaatgccattgggtacaagc

SEQ ID NO: 301600 - DNA, 51 bp, Artificial
  Synthetic oligonucleotide
aacgaacaaagcaatcaagcatccaaactcctttgcgattgaagaattcac

SEQ ID NO: 301601 - DNA, 60 bp, Artificial
  Synthetic oligonucleotide
aacgaacaacaaaatctctaccagaatgctaatgcgtatgtctcagttgggtcatcaaaa

SEQ ID NO: 301602 - DNA, 57 bp, Artificial
  Synthetic oligonucleotide
aacgaacaatagctcagcaggtacaatttatcctctttagtgaggctaaaagaggaa

SEQ ID NO: 301603 - DNA, 60 bp, Artificial
  Synthetic oligonucleotide
aacgaacagatctacaggtagctcaagagctactagattctggtattagtatacgacaag

SEQ ID NO: 301604 - DNA, 52 bp, Artificial
  Synthetic oligonucleotide
aacgaaccgacacctctttgaacggaataacggtgaactcgtaataaaatca

SEQ ID NO: 301605 - DNA, 53 bp, Artificial
  Synthetic oligonucleotide
aacgaaccgacaccttttcgaaaggaacaacggagagctactcataaaatcgc

SEQ ID NO: 301606 - DNA, 54 bp, Artificial
  Synthetic oligonucleotide
aacgaacgattcaactacaattgaaccaattttagatggaccatacccaccaac

SEQ ID NO: 301607 - DNA, 55 bp, Artificial
  Synthetic oligonucleotide
aacgaacgttttggttcactggcgaacggcactcatttcatgattggaactgtcc

SEQ ID NO: 301608 - DNA, 51 bp, Artificial
  Synthetic oligonucleotide
aacgaactcgaccaagcagacattcgtttccaacatcatacgctaaacgaa

SEQ ID NO: 301609 - DNA, 55 bp, Artificial
  Synthetic oligonucleotide
aacgaacttcggtcggtttgtcgtcgctatggacccgcgaatgaatctatcagac

SEQ ID NO: 301610 - DNA, 55 bp, Artificial
  Synthetic oligonucleotide
aacgaactttaaaatctgtgtagctgtcgctcggctgcatgcctagtgcacttac

SEQ ID NO: 301611 - DNA, 58 bp, Artificial
  Synthetic oligonucleotide
aacgaagacgtagcaccacgtgccgcaagatgcggcttcaccatttgggccggcaagg

SEQ ID NO: 301612 - DNA, 51 bp, Artificial
  Synthetic oligonucleotide
aacgaagagatccaaaactgcctcctctcgctatgccaagacagcacatca

SEQ ID NO: 301613 - DNA, 59 bp, Artificial
  Synthetic oligonucleotide
aacgaagatatatggtatagcatagacctaacaaaaggcgaggctaactgtacacgcga

SEQ ID NO: 301614 - DNA, 58 bp, Artificial
  Synthetic oligonucleotide
aacgaagcacagcctacagcaactgttacccttattatgtgccggattatgcctccct

SEQ ID NO: 301615 - DNA, 59 bp, Artificial
  Synthetic oligonucleotide
aacgaaggtgagtagaggattttgtcatgatttagcgcaactaatattaatgcttaaga

SEQ ID NO: 301616 - DNA, 59 bp, Artificial
  Synthetic oligonucleotide
aacgaaggttgatgggcgaacaatgcaacttgggagaaccactattgagacgcatggta

SEQ ID NO: 301617 - DNA, 56 bp, Artificial
  Synthetic oligonucleotide
aacgaagtgccagtagtcctcccgcgccttccgcctttcacgcgccgtcatcccca

SEQ ID NO: 301618 - DNA, 53 bp, Artificial
  Synthetic oligonucleotide
aacgaagttacccatcctgccggcagatgttttcaaaactttcgagaaatcgg

SEQ ID NO: 301619 - DNA, 58 bp, Artificial
  Synthetic oligonucleotide
aacgaagttcgcaagaatccaagtagcgcatttactcggaaggagagcacaacgtgat

SEQ ID NO: 301620 - DNA, 56 bp, Artificial
  Synthetic oligonucleotide
aacgaagttgaatgaagcagcccactctgacgtccgtgagtccttagggaggttta

SEQ ID NO: 301621 - DNA, 52 bp, Artificial
  Synthetic oligonucleotide
aacgaataaacaatctttcgattcttactcgttagttactcctgataaactt

SEQ ID NO: 301622 - DNA, 53 bp, Artificial
  Synthetic oligonucleotide
aacgaatccattaactttactctgcaaccaaataccaacatttcgggtaagaa

SEQ ID NO: 301623 - DNA, 56 bp, Artificial
  Synthetic oligonucleotide
aacgaatcctgccgctattcaaccactggaggggcttttgcggagaccgacgttga

SEQ ID NO: 301624 - DNA, 50 bp, Artificial
  Synthetic oligonucleotide
aacgaatgggccgaagggtcgttttgatttccgacccttcgtcgtccgaa

SEQ ID NO: 301625 - DNA, 57 bp, Artificial
  Synthetic oligonucleotide
aacgaatgggcgcgttgcaccagtgtaagcgtggtttcggtcggagtagcaaatggc

SEQ ID NO: 301626 - DNA, 51 bp, Artificial
  Synthetic oligonucleotide
aacgaattaaaagtcctatttctctagtaacatcccctttgcgggtttaga

SEQ ID NO: 301627 - DNA, 58 bp, Artificial
  Synthetic oligonucleotide
aacgaattcgctcaactcaccagcaaaactcaggccgtcattatgggcaacgcccgcc

SEQ ID NO: 301628 - DNA, 56 bp, Artificial
  Synthetic oligonucleotide
aacgaattctcaagcaaactttaagactcttaatttgtgtgatattacaatttcca

SEQ ID NO: 301629 - DNA, 52 bp, Artificial
  Synthetic oligonucleotide
aacgaatttagatagtatgtatttcgcgccggtatttaatttagtttcacct

SEQ ID NO: 301630 - DNA, 58 bp, Artificial
  Synthetic oligonucleotide
aacgacaacagagatcgctttcaagttctgcgccgttttcaggcgactgttactggtg

SEQ ID NO: 301631 - DNA, 50 bp, Artificial
  Synthetic oligonucleotide
aacgacaacgaggaccttcacaatctgcaggaaaaacccaacacacctgc

SEQ ID NO: 301632 - DNA, 53 bp, Artificial
  Synthetic oligonucleotide
aacgacaacttgtactatacgcaactgtaagaagttgggaccaagagaaaacg

SEQ ID NO: 301633 - DNA, 53 bp, Artificial
  Synthetic oligonucleotide
aacgacaagtacagtccattatccaaaggtgtataaaacctattttgagaagg

SEQ ID NO: 301634 - DNA, 54 bp, Artificial
  Synthetic oligonucleotide
aacgacagtcgaattggagaacaaatcttctcgggaaacatccccgattttgga

SEQ ID NO: 301635 - DNA, 50 bp, Artificial
  Synthetic oligonucleotide
aacgacatggtggcattggaaaaggtcgtagcagtcacagcactaatcct

SEQ ID NO: 301636 - DNA, 60 bp, Artificial
  Synthetic oligonucleotide
aacgacatgtttgaggatgttggcgtctccgatctgccgtatgccgcgctgcacatttat

SEQ ID NO: 301637 - DNA, 55 bp, Artificial
  Synthetic oligonucleotide
aacgaccaataggtggcaattaaccaaattgtcaacggtcaagcacttctgtttc

SEQ ID NO: 301638 - DNA, 60 bp, Artificial
  Synthetic oligonucleotide
aacgaccaggtctcaggctatcctgcgcgtgctattagcagtctcgtaagtggaaactgg

SEQ ID NO: 301639 - DNA, 54 bp, Artificial
  Synthetic oligonucleotide
aacgaccgtccccggttgaaacgctactactcagacctctggctgtcgtacctc

SEQ ID NO: 301640 - DNA, 50 bp, Artificial
  Synthetic oligonucleotide
aacgacctggcacgaatactcagccaagatgaggctaaaggacacaatgg

SEQ ID NO: 301641 - DNA, 59 bp, Artificial
  Synthetic oligonucleotide
aacgacgataacgcgcatagggaaaggcaagactgtaggaaggtcacttgatcctgaga

SEQ ID NO: 301642 - DNA, 58 bp, Artificial
  Synthetic oligonucleotide
aacgacgcaggccggtgttgcacccgaaggcgatagctctggagcattagcatggaac

SEQ ID NO: 301643 - DNA, 53 bp, Artificial
  Synthetic oligonucleotide
aacgacgctgaccgctatcggttcggggaccttcaataaacatatttggaacg

SEQ ID NO: 301644 - DNA, 53 bp, Artificial
  Synthetic oligonucleotide
aacgacgtagactgccgcgtcttggaccgttgacttggtgtgatccacaagca

SEQ ID NO: 301645 - DNA, 54 bp, Artificial
  Synthetic oligonucleotide
aacgacgtagtttgtagtggcggtgactacagttttgcattaccggtgggtgcg

SEQ ID NO: 301646 - DNA, 55 bp, Artificial
  Synthetic oligonucleotide
aacgactacctcaagatccgtactggcagcgcctacaacacatactcgaccgtcc

SEQ ID NO: 301647 - DNA, 60 bp, Artificial
  Synthetic oligonucleotide
aacgactaggtagctacatctagccaatgccattactcaggattgctagtaacgctaaat

SEQ ID NO: 301648 - DNA, 60 bp, Artificial
  Synthetic oligonucleotide
aacgactagttctgatgatgagggattgaaatggctagtcaattattccatggtggaaga

SEQ ID NO: 301649 - DNA, 58 bp, Artificial
  Synthetic oligonucleotide
aacgactcaggactaggatccgtcacttcatcagctccatcggtacctgacagagccg

SEQ ID NO: 301650 - DNA, 55 bp, Artificial
  Synthetic oligonucleotide
aacgactctcatcagagcctggcgctctgcgagggcgtgttggtcgtgcaccctg

SEQ ID NO: 301651 - DNA, 58 bp, Artificial
  Synthetic oligonucleotide
aacgactctttctctccaggtaatgattttactcatatgactaccactttcccatcag

SEQ ID NO: 301652 - DNA, 54 bp, Artificial
  Synthetic oligonucleotide
aacgactgggtcgccatcaccaaggtaaagaagggcggagccaataaggtggtg

SEQ ID NO: 301653 - DNA, 54 bp, Artificial
  Synthetic oligonucleotide
aacgacttaccttaagaacatcgtaatggtgtacaaccaagggtctgccaatgg

SEQ ID NO: 301654 - DNA, 54 bp, Artificial
  Synthetic oligonucleotide
aacgacttccgtgacgagtgccaaattgcctacgaatatgcacggcttgccacg

SEQ ID NO: 301655 - DNA, 55 bp, Artificial
  Synthetic oligonucleotide
aacgacttcgttttaaagggactgtcaagatagaacgtgttcagccagatgtcaa

SEQ ID NO: 301656 - DNA, 60 bp, Artificial
  Synthetic oligonucleotide
aacgacttctatggtcacacctggaagctatgacaacacgctctgaaatgaacaaagaat

SEQ ID NO: 301657 - DNA, 55 bp, Artificial
  Synthetic oligonucleotide
aacgacttgactggctttgttaccacacttgtaaggttactggaattgtatggtg

SEQ ID NO: 301658 - DNA, 53 bp, Artificial
  Synthetic oligonucleotide
aacgacttttcggttaggttgctgaaagattctccgtttgtggagcaaaccgc

SEQ ID NO: 301659 - DNA, 60 bp, Artificial
  Synthetic oligonucleotide
aacgagaggtctacagccgagagggagcatggaacgtcttcgcgggacacagcggagatg

SEQ ID NO: 301660 - DNA, 58 bp, Artificial
  Synthetic oligonucleotide
aacgagagtcagcaacgcgctggtatcgaccccaaccaagcaggttccgcaggagtag

SEQ ID NO: 301661 - DNA, 55 bp, Artificial
  Synthetic oligonucleotide
aacgagatagaggcgtatactttattacatgagtgtttaaattcggttcacttag

SEQ ID NO: 301662 - DNA, 56 bp, Artificial
  Synthetic oligonucleotide
aacgagatcggcaagccggcagggcggccgctctacccatcacacctcttgcacta

SEQ ID NO: 301663 - DNA, 58 bp, Artificial
  Synthetic oligonucleotide
aacgagcaagataaacctagtgatagtcaactacctaaataagagtacactgtcatag

SEQ ID NO: 301664 - DNA, 56 bp, Artificial
  Synthetic oligonucleotide
aacgagcaagccttggttaggcgtttctggaaggtgaacaaccatgttgtgtataa

SEQ ID NO: 301665 - DNA, 59 bp, Artificial
  Synthetic oligonucleotide
aacgagcaattcgccaatgaagctcttcatcctacgacaaaggttatattcaatggtct

SEQ ID NO: 301666 - DNA, 50 bp, Artificial
  Synthetic oligonucleotide
aacgagcagacggtgctagactcgtttgagcgcggaaccgccgatcaact

SEQ ID NO: 301667 - DNA, 59 bp, Artificial
  Synthetic oligonucleotide
aacgagcagcgataagattacttggagaattgctacttgaccgcgaagaccgtggtctc

SEQ ID NO: 301668 - DNA, 56 bp, Artificial
  Synthetic oligonucleotide
aacgagcaggcgttggtgaagcgtttctggaaggtcaataactacgtggtgtacaa

SEQ ID NO: 301669 - DNA, 56 bp, Artificial
  Synthetic oligonucleotide
aacgagcaggctatagtcaaacgcttctggaaggtcaacaatcatgtggtgtacaa

SEQ ID NO: 301670 - DNA, 58 bp, Artificial
  Synthetic oligonucleotide
aacgagcagtcaagctagccaaatctatggctaggggggcgactggtcttttaaatga

SEQ ID NO: 301671 - DNA, 58 bp, Artificial
  Synthetic oligonucleotide
aacgagcagtcctcacgctattttatcccaacacatcccaacataacctgtgccggaa

SEQ ID NO: 301672 - DNA, 60 bp, Artificial
  Synthetic oligonucleotide
aacgagccacacccacggaagaaattgcttgaacgcagattcaggctgatctcttctgtt

SEQ ID NO: 301673 - DNA, 60 bp, Artificial
  Synthetic oligonucleotide
aacgagcccagtacagctacaatcaagaatgatctcagagaccgttatcaagtgctgcgt

SEQ ID NO: 301674 - DNA, 60 bp, Artificial
  Synthetic oligonucleotide
aacgagcctagcactgccactgtgaagaatatgcatagagatcgttatcaggtattgagg

SEQ ID NO: 301675 - DNA, 55 bp, Artificial
  Synthetic oligonucleotide
aacgagcctataaccgacaacaagacagcgatagtaaatatgtgacgtcaatcta

SEQ ID NO: 301676 - DNA, 50 bp, Artificial
  Synthetic oligonucleotide
aacgagctaaactatgttctctgggaaggcggacatgaccttacagtagt

SEQ ID NO: 301677 - DNA, 58 bp, Artificial
  Synthetic oligonucleotide
aacgagctaaaggcaaatctcgtgcagcgcttgatgcgctaatttcggtcggtgggtt

SEQ ID NO: 301678 - DNA, 60 bp, Artificial
  Synthetic oligonucleotide
aacgaggaagatgatctttggtgcagatccatctcgtttgataccgagacggtctcaatt

SEQ ID NO: 301679 - DNA, 59 bp, Artificial
  Synthetic oligonucleotide
aacgaggagaatcaataattgtggagtctggtgatccaaatgcattattaaaacaccga

SEQ ID NO: 301680 - DNA, 55 bp, Artificial
  Synthetic oligonucleotide
aacgaggcaggggaaatggactatataacactctggggtcgagtaccaccacagg

SEQ ID NO: 301681 - DNA, 55 bp, Artificial
  Synthetic oligonucleotide
aacgaggccgtacttgcaattaatactagcaagtttcccaacatgtacatccccg

SEQ ID NO: 301682 - DNA, 56 bp, Artificial
  Synthetic oligonucleotide
aacgagggaagttgatggagtgaaaggatattactgggaagataccgatcacaggt

SEQ ID NO: 301683 - DNA, 50 bp, Artificial
  Synthetic oligonucleotide
aacgagggagagttcttatgttagaaccaacacgcccactcactgaaaac

SEQ ID NO: 301684 - DNA, 54 bp, Artificial
  Synthetic oligonucleotide
aacgagggcgtggctgccccgtcgtttccaagacccctagccagccgacttctc

SEQ ID NO: 301685 - DNA, 58 bp, Artificial
  Synthetic oligonucleotide
aacgagggttggaacgcctcagaggatgctcttaccgctgttattactgcagcgtact

SEQ ID NO: 301686 - DNA, 59 bp, Artificial
  Synthetic oligonucleotide
aacgaggttcctcccagtggctggtggaacaagcagtgtatatattgaggtgttgcact

SEQ ID NO: 301687 - DNA, 55 bp, Artificial
  Synthetic oligonucleotide
aacgagtatcacacgcagggcggaggttccagccgttggggcggtgagacgcctt

SEQ ID NO: 301688 - DNA, 53 bp, Artificial
  Synthetic oligonucleotide
aacgagtccagatccggcaggttagaaaacactggtgtatccccaatgctttc

SEQ ID NO: 301689 - DNA, 57 bp, Artificial
  Synthetic oligonucleotide
aacgagtccgtaagcatttcagagtaacgtaccgtagcaagcgctagtccgccgcga

SEQ ID NO: 301690 - DNA, 60 bp, Artificial
  Synthetic oligonucleotide
aacgagtctgttgctgagctcggccccactgagtctataggtactagcccaccggctgag

SEQ ID NO: 301691 - DNA, 54 bp, Artificial
  Synthetic oligonucleotide
aacgagttcgttgagcccctgatgaacgcccgtggggtgaccgacgagggctcg

SEQ ID NO: 301692 - DNA, 53 bp, Artificial
  Synthetic oligonucleotide
aacgataaaggtgaatataggtgggcctttcttgacggggaagctgtatgttc

SEQ ID NO: 301693 - DNA, 53 bp, Artificial
  Synthetic oligonucleotide
aacgataaggtgtcggatggaccaacgtatgtggtcccttcggttaacggcaa

SEQ ID NO: 301694 - DNA, 56 bp, Artificial
  Synthetic oligonucleotide
aacgataatcgtttgagagcgtaaacccatttctctagttagtgagtcaacgagag

SEQ ID NO: 301695 - DNA, 60 bp, Artificial
  Synthetic oligonucleotide
aacgatacaaccatgtgcaccaaggaggtgttgtacactgcactctctcgcgcagttgac

SEQ ID NO: 301696 - DNA, 55 bp, Artificial
  Synthetic oligonucleotide
aacgatacagcgagttaatcgcgcgccaatcagaaaccggcggcggatctgcgag

SEQ ID NO: 301697 - DNA, 60 bp, Artificial
  Synthetic oligonucleotide
aacgatagaccagttgtgcaaggactgcaacctttgtatgcacagtttgcagattttatg

SEQ ID NO: 301698 - DNA, 55 bp, Artificial
  Synthetic oligonucleotide
aacgatagcgatagcagtgtacatcctgtatcgttggggcaagcgttatgaatgg

SEQ ID NO: 301699 - DNA, 55 bp, Artificial
  Synthetic oligonucleotide
aacgataggagcttcgacctcaagggatgccctcccgaacaccgagcccagtggt

SEQ ID NO: 301700 - DNA, 60 bp, Artificial
  Synthetic oligonucleotide
aacgatatgcactctgatcatatagccatgcttggtcatttggacacacatcgacaaaag

SEQ ID NO: 301701 - DNA, 56 bp, Artificial
  Synthetic oligonucleotide
aacgatcagcgtgatcgtttccaggttataaggaggttccaggcaactgttactgg

SEQ ID NO: 301702 - DNA, 55 bp, Artificial
  Synthetic oligonucleotide
aacgatccgtggtgcactaacccgtttgccgtccctggctacggacctggctctc

SEQ ID NO: 301703 - DNA, 55 bp, Artificial
  Synthetic oligonucleotide
aacgatcctgttctcagagccgatttcgaccctaacaggtcgggttgggtggctg

SEQ ID NO: 301704 - DNA, 60 bp, Artificial
  Synthetic oligonucleotide
aacgatcgaaattcttgctgatggatgccctgaaactaagcattgaagacccgagtcatg

SEQ ID NO: 301705 - DNA, 59 bp, Artificial
  Synthetic oligonucleotide
aacgatcgggatagtatcctgactcttttgcttttgtctacgcttgctgatgtttatac

SEQ ID NO: 301706 - DNA, 60 bp, Artificial
  Synthetic oligonucleotide
aacgatctacgtgatcgttatcaggtcatgcaccggttctatggcaaggtgacgggtgga

SEQ ID NO: 301707 - DNA, 51 bp, Artificial
  Synthetic oligonucleotide
aacgatctactgccgccacgacacagaggcggggacgccgcaggaaaaccc

SEQ ID NO: 301708 - DNA, 54 bp, Artificial
  Synthetic oligonucleotide
aacgatctcaatcaagacattcgtgggtatggaaaaactcgcgataataaatcc

SEQ ID NO: 301709 - DNA, 56 bp, Artificial
  Synthetic oligonucleotide
aacgatcttgaactatgtcccattaaccgtgaaccatccacaagacgccttgtttg

SEQ ID NO: 301710 - DNA, 51 bp, Artificial
  Synthetic oligonucleotide
aacgatgaagcggtccccacggtttgcctccgtcccccgacgcggaacctc

SEQ ID NO: 301711 - DNA, 59 bp, Artificial
  Synthetic oligonucleotide
aacgatgaccttacaggtagtactatgcttatgtgggaggcagtgtctgtgaaaaccga

SEQ ID NO: 301712 - DNA, 58 bp, Artificial
  Synthetic oligonucleotide
aacgatgagcaaatgggtgtgattatgaatggttttatggtttggtgtatcgataacg

SEQ ID NO: 301713 - DNA, 55 bp, Artificial
  Synthetic oligonucleotide
aacgatgagtccctatacatgatatccaacatattcctaatcccttcttccaaac

SEQ ID NO: 301714 - DNA, 56 bp, Artificial
  Synthetic oligonucleotide
aacgatggactccagtactctagaattgaggagcagatattgggctataaggacca

SEQ ID NO: 301715 - DNA, 57 bp, Artificial
  Synthetic oligonucleotide
aacgatggagactctttgccaacgtttaaatgtgtgtcaggacaaaatactaacaca

SEQ ID NO: 301716 - DNA, 52 bp, Artificial
  Synthetic oligonucleotide
aacgatgggagcccttgctaatactactcctctctcggagaagtctaattcc

SEQ ID NO: 301717 - DNA, 56 bp, Artificial
  Synthetic oligonucleotide
aacgatgggattttagctctaaaaggctaccatattcaacacatcaatgaacctgc

SEQ ID NO: 301718 - DNA, 51 bp, Artificial
  Synthetic oligonucleotide
aacgatgtcgactcgtcagcgctgccgtttctcgctgagcagttctcggtt

SEQ ID NO: 301719 - DNA, 53 bp, Artificial
  Synthetic oligonucleotide
aacgatgtctatggggaaggaaagttattcgttgaccctaaatcgaatgtggg

SEQ ID NO: 301720 - DNA, 60 bp, Artificial
  Synthetic oligonucleotide
aacgatgttgtgtcagttggtgccccgtcgtatgcgcatggttcgggcactgcgcacacc

SEQ ID NO: 301721 - DNA, 56 bp, Artificial
  Synthetic oligonucleotide
aacgattaagctctctatacggatgtaactcggagtccgtttccgtgtgaggccta

SEQ ID NO: 301722 - DNA, 57 bp, Artificial
  Synthetic oligonucleotide
aacgattctacgacctacgatagcctgtcgttctcatacatcgacccggatactaac

SEQ ID NO: 301723 - DNA, 56 bp, Artificial
  Synthetic oligonucleotide
aacgattgcgactgactggtctccatcccctgaggacgctacgaactacgcagaca

SEQ ID NO: 301724 - DNA, 60 bp, Artificial
  Synthetic oligonucleotide
aacgattgggatcatggtcctggcatgatggtgctgaaatcatctactttaagtaggaat

SEQ ID NO: 301725 - DNA, 60 bp, Artificial
  Synthetic oligonucleotide
aacgattgtcgcaagaaattttgacaccatcagactatcatttcagcttatgagaccacc

SEQ ID NO: 301726 - DNA, 53 bp, Artificial
  Synthetic oligonucleotide
aacgattgtgaggggggtagtggaacccataccagattgaggggcctttgccc

SEQ ID NO: 301727 - DNA, 60 bp, Artificial
  Synthetic oligonucleotide
aacgattgttcattctccaatggagcctcacaagggttcaagttgcaggatgcagcgccg

SEQ ID NO: 301728 - DNA, 51 bp, Artificial
  Synthetic oligonucleotide
aacgatttagcttttcatgatcgtgtatgtacctatttttggaaacgagcg

SEQ ID NO: 301729 - DNA, 51 bp, Artificial
  Synthetic oligonucleotide
aacgatttgtcggcatgtcggctggacttttgtgcgcgtttgggctcccga

SEQ ID NO: 301730 - DNA, 55 bp, Artificial
  Synthetic oligonucleotide
aacgcaaatggttgcgagcataatactgaaggcaagtctgttgaaagtatcctcc

SEQ ID NO: 301731 - DNA, 50 bp, Artificial
  Synthetic oligonucleotide
aacgcaaccagataacgaagaagcgcacaacaacggcggtgggactaaac

SEQ ID NO: 301732 - DNA, 60 bp, Artificial
  Synthetic oligonucleotide
aacgcaactctgcagcttagtgtgtcgccttccgcacacaacatgctgagtaagttaaca

SEQ ID NO: 301733 - DNA, 60 bp, Artificial
  Synthetic oligonucleotide
aacgcaactgcggcacagcaggatgtgttagaagcaacctatgccatggtacagcatgtg

SEQ ID NO: 301734 - DNA, 55 bp, Artificial
  Synthetic oligonucleotide
aacgcaagacatatatccacagaatctacttttaccgactcacctttcatgatag

SEQ ID NO: 301735 - DNA, 55 bp, Artificial
  Synthetic oligonucleotide
aacgcaaggagatgtcgcgtgatagcttcaaacgagctaaaggcaaatctcgtgc

SEQ ID NO: 301736 - DNA, 52 bp, Artificial
  Synthetic oligonucleotide
aacgcaaggagcaattcggtgcttgcaaaattcgttcgtacctcatcgcaag

SEQ ID NO: 301737 - DNA, 59 bp, Artificial
  Synthetic oligonucleotide
aacgcaaggtgtgctggagctgcttaaggcgagcaacataagggccaccatactgagta

SEQ ID NO: 301738 - DNA, 58 bp, Artificial
  Synthetic oligonucleotide
aacgcaaggttggacgcacaacaatgttggtgtgtccaattacaggtactgagtccca

SEQ ID NO: 301739 - DNA, 55 bp, Artificial
  Synthetic oligonucleotide
aacgcaagtctgaggacgtaaacgagtccagatctggaagattagaacacattgg

SEQ ID NO: 301740 - DNA, 57 bp, Artificial
  Synthetic oligonucleotide
aacgcacacccggcattcctccacgtattaggtccaccaccattggtacgcgtgtca

SEQ ID NO: 301741 - DNA, 53 bp, Artificial
  Synthetic oligonucleotide
aacgcacagttgaatgaagtacgtattatctctgaccatactacgccactgaa

SEQ ID NO: 301742 - DNA, 56 bp, Artificial
  Synthetic oligonucleotide
aacgcacctcaggtggtccctcctctaagctccccactaagcgcaaacgcaggaag

SEQ ID NO: 301743 - DNA, 53 bp, Artificial
  Synthetic oligonucleotide
aacgcactcaacgagcgacatctgcagcgtgcgcctccaggtatcaaacacgt

SEQ ID NO: 301744 - DNA, 59 bp, Artificial
  Synthetic oligonucleotide
aacgcagagttgaagactttagcggaacgaatggaagaggaggagctgactgaggatat

SEQ ID NO: 301745 - DNA, 52 bp, Artificial
  Synthetic oligonucleotide
aacgcagataggttttggaaaggtttggatggtaattgggcgaagtttcgcc

SEQ ID NO: 301746 - DNA, 60 bp, Artificial
  Synthetic oligonucleotide
aacgcagcatcaggaccggcctcccttctcaaagctggaataaatgctgctgctaggatt

SEQ ID NO: 301747 - DNA, 60 bp, Artificial
  Synthetic oligonucleotide
aacgcagcggcagctcgcattgactatactggcaagtatttcgacgggacaacgcactat

SEQ ID NO: 301748 - DNA, 60 bp, Artificial
  Synthetic oligonucleotide
aacgcaggatcggaaattcaagtcgctggatttgactactcatgtgctattaacgcacca

SEQ ID NO: 301749 - DNA, 59 bp, Artificial
  Synthetic oligonucleotide
aacgcaggctggtgtaacagttagcgtcggaggtgttgacatgagggcaggacgtataa

SEQ ID NO: 301750 - DNA, 57 bp, Artificial
  Synthetic oligonucleotide
aacgcataagaaggaggtcgtgctaaccgtgccgactgaagggctcgaggtcacgtg

SEQ ID NO: 301751 - DNA, 55 bp, Artificial
  Synthetic oligonucleotide
aacgcataatggaaaattgtgcaaactgaacggagtccctccattggaattgggg

SEQ ID NO: 301752 - DNA, 55 bp, Artificial
  Synthetic oligonucleotide
aacgcatatcctctagagatattcttcagactcgtgatctgcattccttgtgtat

SEQ ID NO: 301753 - DNA, 59 bp, Artificial
  Synthetic oligonucleotide
aacgcatgaactaaactgccgagttggagtacggcaaccagccataataggagttggca

SEQ ID NO: 301754 - DNA, 55 bp, Artificial
  Synthetic oligonucleotide
aacgcatgaactagtagctcattccgaaagggaaagcacgagcgagacttatcag

SEQ ID NO: 301755 - DNA, 60 bp, Artificial
  Synthetic oligonucleotide
aacgcatgatgatatgcctctcactaatgaacatatacctggtcatcttaccctttatgt

SEQ ID NO: 301756 - DNA, 50 bp, Artificial
  Synthetic oligonucleotide
aacgcatggcctgacgcctgggacgcgatcactactttaactccactaac

SEQ ID NO: 301757 - DNA, 58 bp, Artificial
  Synthetic oligonucleotide
aacgccaaatcgtagcaccgcttgacatataagcggcgcttctctaacgtgggaccta

SEQ ID NO: 301758 - DNA, 57 bp, Artificial
  Synthetic oligonucleotide
aacgccacattttgggaacgcgtccgatccatcctgaaatctgggctcaactttgct

SEQ ID NO: 301759 - DNA, 60 bp, Artificial
  Synthetic oligonucleotide
aacgccacgacatctctcatgtgggaaaggtcatgtgcatctccgatgtgacacgtggta

SEQ ID NO: 301760 - DNA, 56 bp, Artificial
  Synthetic oligonucleotide
aacgccacgccctctcagattacctgatggacctccctgttcccaacgatcaaaat

SEQ ID NO: 301761 - DNA, 60 bp, Artificial
  Synthetic oligonucleotide
aacgccactgtgagacaggcaagaacgatggcacatttcgaactgtctccattttacacg

SEQ ID NO: 301762 - DNA, 54 bp, Artificial
  Synthetic oligonucleotide
aacgccagcttaatgatttacgagaggagtttatttcattgtcacaagaaatag

SEQ ID NO: 301763 - DNA, 53 bp, Artificial
  Synthetic oligonucleotide
aacgccagtggcagacatctcgtcacaggagtcacagccggagcccaatccga

SEQ ID NO: 301764 - DNA, 54 bp, Artificial
  Synthetic oligonucleotide
aacgccatcccacaacgttacatgtggcatgaaagatacaacgagtttcgggta

SEQ ID NO: 301765 - DNA, 55 bp, Artificial
  Synthetic oligonucleotide
aacgccattgtacgaggtctcttattctttgtatgtgtcgtggctgccttgctat

SEQ ID NO: 301766 - DNA, 59 bp, Artificial
  Synthetic oligonucleotide
aacgccatttctgtccatagcagacgaaaacgtgtacgcagtgtagttcacctgaaggc

SEQ ID NO: 301767 - DNA, 53 bp, Artificial
  Synthetic oligonucleotide
aacgccccggagttgacccttggttcggagctgtactacatcggatttttgga

SEQ ID NO: 301768 - DNA, 58 bp, Artificial
  Synthetic oligonucleotide
aacgccctgttagtttattactgttggatgtctgacaccgtgtccaaggcatcgacat

SEQ ID NO: 301769 - DNA, 57 bp, Artificial
  Synthetic oligonucleotide
aacgccctgttagtttattattgttggatgtcggatatcccgtctaaggcatcgaca

SEQ ID NO: 301770 - DNA, 56 bp, Artificial
  Synthetic oligonucleotide
aacgcccttgctatacagactgggcgctgttcagaatgagatcaccctgacgcacc

SEQ ID NO: 301771 - DNA, 57 bp, Artificial
  Synthetic oligonucleotide
aacgccggaacaagtcatgaacctgattgttcagtattttgagtgggcggagctaaa

SEQ ID NO: 301772 - DNA, 52 bp, Artificial
  Synthetic oligonucleotide
aacgccggggccgcggcctgatcggcggtcggtttcaggagcgggcggttcg

SEQ ID NO: 301773 - DNA, 60 bp, Artificial
  Synthetic oligonucleotide
aacgccgtgtgcggtgacgcataatcccccagagcacacaattggcagaaagtctctgag

SEQ ID NO: 301774 - DNA, 55 bp, Artificial
  Synthetic oligonucleotide
aacgccgtgtgcggtgacgcataatccctcagaggccacgacaaccgggctctga

SEQ ID NO: 301775 - DNA, 51 bp, Artificial
  Synthetic oligonucleotide
aacgcctacacaacgggcccctgtaccccacttcccgcgccgaactattcg

SEQ ID NO: 301776 - DNA, 55 bp, Artificial
  Synthetic oligonucleotide
aacgcctcaaagctctattgccgaagctgaactgacagattatggcacgatcacg

SEQ ID NO: 301777 - DNA, 60 bp, Artificial
  Synthetic oligonucleotide
aacgcctcacacgtggccacgatgctttatgaacatccagttaatttctccaatcgacgc

SEQ ID NO: 301778 - DNA, 58 bp, Artificial
  Synthetic oligonucleotide
aacgcctcactggcattttcgacgccacaccaaactccctgcccgacgctgttgcctc

SEQ ID NO: 301779 - DNA, 60 bp, Artificial
  Synthetic oligonucleotide
aacgcctcatctacagggatacgctaatcttatcaaacccatgcgctttagtacaatcaa

SEQ ID NO: 301780 - DNA, 55 bp, Artificial
  Synthetic oligonucleotide
aacgcctcgagtagataggcacaccatgacggataccgaagatggaaccttaccg

SEQ ID NO: 301781 - DNA, 60 bp, Artificial
  Synthetic oligonucleotide
aacgcctcttcgcccacgaatctgaggagtatggtggcgggtcttatagctgatgtgact

SEQ ID NO: 301782 - DNA, 53 bp, Artificial
  Synthetic oligonucleotide
aacgcctctttttgtgggtcaccatattcttggaaacctcgaaaaggcatggg

SEQ ID NO: 301783 - DNA, 57 bp, Artificial
  Synthetic oligonucleotide
aacgcctgaaagcctatggatcagcatacaggagggtgtgtcaacaaaaattcacac

SEQ ID NO: 301784 - DNA, 59 bp, Artificial
  Synthetic oligonucleotide
aacgcctggagatgtccagtccctctcttaagtggtgcttcactctgaattactcctcc

SEQ ID NO: 301785 - DNA, 54 bp, Artificial
  Synthetic oligonucleotide
aacgcctgggctagcgttgccgccccaggtccagagggttccaactttgccaaa

SEQ ID NO: 301786 - DNA, 53 bp, Artificial
  Synthetic oligonucleotide
aacgccttaacaaaggaaggcctgcccctatctccggaaaagactcaggccac

SEQ ID NO: 301787 - DNA, 57 bp, Artificial
  Synthetic oligonucleotide
aacgccttcctcaggttgtggttgaaccttatttggaatgatatgatgtcttggttc

SEQ ID NO: 301788 - DNA, 50 bp, Artificial
  Synthetic oligonucleotide
aacgccttgcaaaccgttgtacgtctccgacattaccgattcagacgatg

SEQ ID NO: 301789 - DNA, 59 bp, Artificial
  Synthetic oligonucleotide
aacgcctttacctctcaatatctcatggatattgcgagaagcttaagcgtacccgtgaa

SEQ ID NO: 301790 - DNA, 54 bp, Artificial
  Synthetic oligonucleotide
aacgcctttggcagaccctcagaggttggctgggttcgcaccttattcaggcta

SEQ ID NO: 301791 - DNA, 56 bp, Artificial
  Synthetic oligonucleotide
aacgcgaacgctttagcgcgaagtgatttcttgaacgtcgtgggtaatttccatgc

SEQ ID NO: 301792 - DNA, 56 bp, Artificial
  Synthetic oligonucleotide
aacgcgaagagtcacgcgtggggtgtggcggaagatgccaaccacaagttggttat

SEQ ID NO: 301793 - DNA, 54 bp, Artificial
  Synthetic oligonucleotide
aacgcgactgttataccaagtccacaaacattatttcattattataacgttaac

SEQ ID NO: 301794 - DNA, 51 bp, Artificial
  Synthetic oligonucleotide
aacgcgagacgcgaacccgtgagtggaaacccgctttattcactggggtcg

SEQ ID NO: 301795 - DNA, 55 bp, Artificial
  Synthetic oligonucleotide
aacgcgaggtcagtctaatcctctggaattaaggacatttggacaaatactttta

SEQ ID NO: 301796 - DNA, 60 bp, Artificial
  Synthetic oligonucleotide
aacgcgagttgaccccgatatcgtgatgcaagaatctgagttctccttctatggtgatga

SEQ ID NO: 301797 - DNA, 60 bp, Artificial
  Synthetic oligonucleotide
aacgcgatatttcatctctcgccgccacccctggacttcgctcacaaccattcactccat

SEQ ID NO: 301798 - DNA, 55 bp, Artificial
  Synthetic oligonucleotide
aacgcgatgataacatcgcagataacatgaacgccattgctagggcgttgggagg

SEQ ID NO: 301799 - DNA, 57 bp, Artificial
  Synthetic oligonucleotide
aacgcgatggctggcgtcccgagaatcacgtaccgagtccgcgtgcccgtgcacaca

SEQ ID NO: 301800 - DNA, 55 bp, Artificial
  Synthetic oligonucleotide
aacgcgcaaactattgaatttcccgattgcattttagacgacgaaagtggagtgc

SEQ ID NO: 301801 - DNA, 59 bp, Artificial
  Synthetic oligonucleotide
aacgcgcatagggaaaggcaagactgtaggaaggtcacttgatcctgagatcaggaaac

SEQ ID NO: 301802 - DNA, 55 bp, Artificial
  Synthetic oligonucleotide
aacgcgccactcagcgaagccgaacgttacctggtacaccaacagggcgcgtacg

SEQ ID NO: 301803 - DNA, 55 bp, Artificial
  Synthetic oligonucleotide
aacgcgccgggtcgatgcaaaccgcgattggcgggccgtggatgacggtcaacga

SEQ ID NO: 301804 - DNA, 57 bp, Artificial
  Synthetic oligonucleotide
aacgcgccggtgccttctaccgtcgcgtcatgattatagacgtctccaactatgcag

SEQ ID NO: 301805 - DNA, 54 bp, Artificial
  Synthetic oligonucleotide
aacgcgcgcggcaagaggcgaggggtacggcgactggtgagtacgccaaaattt

SEQ ID NO: 301806 - DNA, 59 bp, Artificial
  Synthetic oligonucleotide
aacgcgcttgcggttagcgttttgtcaaagaatcgcgcgatacaagagaatcataagga

SEQ ID NO: 301807 - DNA, 59 bp, Artificial
  Synthetic oligonucleotide
aacgcggatcttatgaaacgcaggttcggtaatacaatgggctcgcgcattgttgaagc

SEQ ID NO: 301808 - DNA, 54 bp, Artificial
  Synthetic oligonucleotide
aacgcgggactgcgatagtgccaccccacgtctttcccactcctaacccgactc

SEQ ID NO: 301809 - DNA, 55 bp, Artificial
  Synthetic oligonucleotide
aacgcggggctgaggtattcgtattctcagtcgacaaccttaaggccaactcctc

SEQ ID NO: 301810 - DNA, 52 bp, Artificial
  Synthetic oligonucleotide
aacgcggtgacgcagaagggggcggagccccctcataccccgggggggctgc

SEQ ID NO: 301811 - DNA, 57 bp, Artificial
  Synthetic oligonucleotide
aacgcgtaattgcttgcgcacgtctgatcgggcacttccgggggctcacatggtcag

SEQ ID NO: 301812 - DNA, 55 bp, Artificial
  Synthetic oligonucleotide
aacgcgtccgagttatctcgaagcgtagggcacgcatcttcaccgtaggtcgtca

SEQ ID NO: 301813 - DNA, 56 bp, Artificial
  Synthetic oligonucleotide
aacgcgtctaacaaacaccaggcgctccagacgctgttgtcccgctacaccaagcg

SEQ ID NO: 301814 - DNA, 53 bp, Artificial
  Synthetic oligonucleotide
aacgcgttaagcggaatagatctttcgcacttacgaaccccgaagatagaacc

SEQ ID NO: 301815 - DNA, 58 bp, Artificial
  Synthetic oligonucleotide
aacgcgttaagtgggattgatttatcgcatatgaggagtccgaagattgaacccacta

SEQ ID NO: 301816 - DNA, 55 bp, Artificial
  Synthetic oligonucleotide
aacgcgttacccggtaagccaatcgggtgtacacggtcgtcatactgcagacagg

SEQ ID NO: 301817 - DNA, 55 bp, Artificial
  Synthetic oligonucleotide
aacgcgttacttggagctcacgtcgccccttactccgctggagctattaaccagt

SEQ ID NO: 301818 - DNA, 58 bp, Artificial
  Synthetic oligonucleotide
aacgcgttccatacacccgacgatgtactgttatgcggaaaggcagactaccgcacac

SEQ ID NO: 301819 - DNA, 55 bp, Artificial
  Synthetic oligonucleotide
aacgcgttctaacagtcccgtattgtcgttgtgtggcaacccaacagttggccgc

SEQ ID NO: 301820 - DNA, 58 bp, Artificial
  Synthetic oligonucleotide
aacgcgttgaagtaagaaatcgagagatctggaaacagattcgacgaaatcaagttga

SEQ ID NO: 301821 - DNA, 53 bp, Artificial
  Synthetic oligonucleotide
aacgctaacactgctcctgtatatgctcccacgaaaattaatcgtatgaaggc

SEQ ID NO: 301822 - DNA, 57 bp, Artificial
  Synthetic oligonucleotide
aacgctaactcggagttggacaggtcagaattagcagatttgatacttaacgaatgg

SEQ ID NO: 301823 - DNA, 60 bp, Artificial
  Synthetic oligonucleotide
aacgctagcggatcgtgtgtgcgatgtcaagtgactcgtactcggtaccgcttgtgctgt

SEQ ID NO: 301824 - DNA, 56 bp, Artificial
  Synthetic oligonucleotide
aacgctataaggaccgacggcaaggactcagagttgaaggaattagccgtgggaga

SEQ ID NO: 301825 - DNA, 60 bp, Artificial
  Synthetic oligonucleotide
aacgctattacgacgatccctacaccaggtgcgtcatcatctctgattgttcattgggat

SEQ ID NO: 301826 - DNA, 54 bp, Artificial
  Synthetic oligonucleotide
aacgctcagtcctgtaccggtaggtctattcgtgtacgagtaccaagggggatg

SEQ ID NO: 301827 - DNA, 55 bp, Artificial
  Synthetic oligonucleotide
aacgctcatatagtccgcctcgttgcagaacttagccacccgttctacggcccgc

SEQ ID NO: 301828 - DNA, 60 bp, Artificial
  Synthetic oligonucleotide
aacgctccagtatcccttaagactccatatgttttcagcagagtcaggatttctgccgga

SEQ ID NO: 301829 - DNA, 52 bp, Artificial
  Synthetic oligonucleotide
aacgctcgagtgtactccgtaccccttcacacttcggtgggagggcggagtt

SEQ ID NO: 301830 - DNA, 56 bp, Artificial
  Synthetic oligonucleotide
aacgctcgctcaaagcttgtatatgtgtggtccccctttaagtacttgggcaacaa

SEQ ID NO: 301831 - DNA, 60 bp, Artificial
  Synthetic oligonucleotide
aacgctctcttcacctacactcgcgcagtccgcactcttcgcacttccgacccagccgga

SEQ ID NO: 301832 - DNA, 50 bp, Artificial
  Synthetic oligonucleotide
aacgctctgtctatgaaccccgacatcagggttgtgaaatacgaggtttg

SEQ ID NO: 301833 - DNA, 56 bp, Artificial
  Synthetic oligonucleotide
aacgctgaaggaacgtccttgtcgtccagtcgtccgtcttgtttcatgcgaaggag

SEQ ID NO: 301834 - DNA, 52 bp, Artificial
  Synthetic oligonucleotide
aacgctgaccatacgacattaaatgtcatgggtacagagacgatatataaaa

SEQ ID NO: 301835 - DNA, 50 bp, Artificial
  Synthetic oligonucleotide
aacgctgcagaaacgatcttcaaaaggcgatagacgttgtgaagagatcc

SEQ ID NO: 301836 - DNA, 60 bp, Artificial
  Synthetic oligonucleotide
aacgctgcatcaggaccaacatctcttctcaaggctggaattaatgctgctgcaaaaatt

SEQ ID NO: 301837 - DNA, 60 bp, Artificial
  Synthetic oligonucleotide
aacgctgcgaatcgcaacgataggcctggtcatagggacatccgcttcctgtgcgatgtc

SEQ ID NO: 301838 - DNA, 60 bp, Artificial
  Synthetic oligonucleotide
aacgctggaatcacatagtcgccaacggcgatgatcgacatacccacagtgtagcgcttg

SEQ ID NO: 301839 - DNA, 50 bp, Artificial
  Synthetic oligonucleotide
aacgctggcttgcgttatcgatccatgcttctgggtaacggacgttatgt

SEQ ID NO: 301840 - DNA, 52 bp, Artificial
  Synthetic oligonucleotide
aacgctggggattccgttcaggtgtgcctcccaaggtagtcagctatgaagc

SEQ ID NO: 301841 - DNA, 55 bp, Artificial
  Synthetic oligonucleotide
aacgctgttgcacagatcaggttagcattcatggagaaatgggacataggtgaac

SEQ ID NO: 301842 - DNA, 54 bp, Artificial
  Synthetic oligonucleotide
aacgcttaagcgggagcagggagggccggccacacaggggttgcggggcactct

SEQ ID NO: 301843 - DNA, 54 bp, Artificial
  Synthetic oligonucleotide
aacgcttcaaggccatgcctttcactttaacgctcggtataaaaataactcctc

SEQ ID NO: 301844 - DNA, 60 bp, Artificial
  Synthetic oligonucleotide
aacgcttcatctatagttgagactgtatcacaaatgttcccaaacttccgtggagatatc

SEQ ID NO: 301845 - DNA, 60 bp, Artificial
  Synthetic oligonucleotide
aacgcttcggctgcgatcccgatcgctgccaagatgctgggtgtcacccccgacgcttta

SEQ ID NO: 301846 - DNA, 56 bp, Artificial
  Synthetic oligonucleotide
aacgcttgaccaattctggggcgtccatctcggcaggaagcaacaacgggtcttct

SEQ ID NO: 301847 - DNA, 60 bp, Artificial
  Synthetic oligonucleotide
aacgctttcagctaagtatgaactagaaaactattatcagtgctcactatcaagtgatta

SEQ ID NO: 301848 - DNA, 56 bp, Artificial
  Synthetic oligonucleotide
aacgctttgtactactgaatcaaacctcacttgtcgtcaataccccacattcaaac

SEQ ID NO: 301849 - DNA, 55 bp, Artificial
  Synthetic oligonucleotide
aacggaaaggagaaccagttagcagatacactaagcagactagtatacaccacat

SEQ ID NO: 301850 - DNA, 56 bp, Artificial
  Synthetic oligonucleotide
aacggaacaatacatgatagaatcccccatcggacccttttgatgaatgaactggg

SEQ ID NO: 301851 - DNA, 56 bp, Artificial
  Synthetic oligonucleotide
aacggaacggataagtattataaattagaccaatatgcgaatcatatgggtatttc

SEQ ID NO: 301852 - DNA, 59 bp, Artificial
  Synthetic oligonucleotide
aacggaacttgtgcccaaagtatcaggcaatcaatttagagttttcagattgcagttgc

SEQ ID NO: 301853 - DNA, 55 bp, Artificial
  Synthetic oligonucleotide
aacggaagcaggtgcaagcactcgaagacagactgatggcacgggccttagtgga

SEQ ID NO: 301854 - DNA, 58 bp, Artificial
  Synthetic oligonucleotide
aacggaagtagaccacacagagtgaagaaggatttgcctgatagagtgaatccggtta

SEQ ID NO: 301855 - DNA, 52 bp, Artificial
  Synthetic oligonucleotide
aacggaatataaacgtcatatggcgccgatattatattttcctggtcacttg

SEQ ID NO: 301856 - DNA, 59 bp, Artificial
  Synthetic oligonucleotide
aacggaatgactatgatggccggagaaaggctagacgttcttgattatcaccacgtggc

SEQ ID NO: 301857 - DNA, 59 bp, Artificial
  Synthetic oligonucleotide
aacggaatggagtcttggaagtagctcgagaagaggcggactatactctcctcgataca

SEQ ID NO: 301858 - DNA, 58 bp, Artificial
  Synthetic oligonucleotide
aacggaattccgattcaggcacttccggtcatcaattcacgacacgcgcggcggtgtg

SEQ ID NO: 301859 - DNA, 51 bp, Artificial
  Synthetic oligonucleotide
aacggacaaagaggattcgttacacgagacactagacctgtaccttacctc

SEQ ID NO: 301860 - DNA, 55 bp, Artificial
  Synthetic oligonucleotide
aacggacatgattatgcacacccccgggtgcgtgccctgtgttcgggagggggac

SEQ ID NO: 301861 - DNA, 60 bp, Artificial
  Synthetic oligonucleotide
aacggacattgtgcattgccgtatggcggcacacagtcagcgtaaggcggtcctgtcgac

SEQ ID NO: 301862 - DNA, 50 bp, Artificial
  Synthetic oligonucleotide
aacggaccccagggccacgaaggaccttgagtaaacggaccagctggacc

SEQ ID NO: 301863 - DNA, 55 bp, Artificial
  Synthetic oligonucleotide
aacggacctcatgccggaatatatgacgactggggaagtgcaaaggcggcgacaa

SEQ ID NO: 301864 - DNA, 58 bp, Artificial
  Synthetic oligonucleotide
aacggacgaagctcgacacaagcagaggagacaagcgctgggcctagccaacggggcc

SEQ ID NO: 301865 - DNA, 56 bp, Artificial
  Synthetic oligonucleotide
aacggactaacgtaagtttggggcggagcctggaagattctatctgcgttagcaga

SEQ ID NO: 301866 - DNA, 60 bp, Artificial
  Synthetic oligonucleotide
aacggactcgtgttgatgcgcatgatggggattttatggcatgccgtagcaggcactgcc

SEQ ID NO: 301867 - DNA, 56 bp, Artificial
  Synthetic oligonucleotide
aacggagaagtacgtggacgagtagtaatgcaaattgcagttacattttatcggaa

SEQ ID NO: 301868 - DNA, 52 bp, Artificial
  Synthetic oligonucleotide
aacggagacattccagacaaaaggccctacattccgttaacctggtggttta

SEQ ID NO: 301869 - DNA, 60 bp, Artificial
  Synthetic oligonucleotide
aacggagagcagtttatggacctgtgcgtcatgtgcggcacagactttaaccagagggtg

SEQ ID NO: 301870 - DNA, 59 bp, Artificial
  Synthetic oligonucleotide
aacggagcgaggtcatacaatcccacactacaggactgagggcctcttcatggagttta

SEQ ID NO: 301871 - DNA, 59 bp, Artificial
  Synthetic oligonucleotide
aacggagctgacctcgagctcaatagagtcacacaagtactcttccaagtacaagagtt

SEQ ID NO: 301872 - DNA, 55 bp, Artificial
  Synthetic oligonucleotide
aacggaggaacccatcgttctggaggtttgtgaaataggcgctcaatgttagcct

SEQ ID NO: 301873 - DNA, 57 bp, Artificial
  Synthetic oligonucleotide
aacggaggagcccatggttccggagccttagtaaagagtcgctctatgttagctcta

SEQ ID NO: 301874 - DNA, 53 bp, Artificial
  Synthetic oligonucleotide
aacggaggaggtgagctttggtacgtcagatctggttggttcgcaggctccaa

SEQ ID NO: 301875 - DNA, 55 bp, Artificial
  Synthetic oligonucleotide
aacggaggccttccggtcaccaaatcacgacacgcgcggcagtaccaacacggag

SEQ ID NO: 301876 - DNA, 59 bp, Artificial
  Synthetic oligonucleotide
aacggagtaacgagcatgtggggaagagttacgagcacattctcacgcttgacaaacgc

SEQ ID NO: 301877 - DNA, 51 bp, Artificial
  Synthetic oligonucleotide
aacggagttcagttgggaatgactgtaagtccaactgcggaatatttccac

SEQ ID NO: 301878 - DNA, 58 bp, Artificial
  Synthetic oligonucleotide
aacggatcccctggtagataggattctcagactatctgttctaactgggggctctcca

SEQ ID NO: 301879 - DNA, 51 bp, Artificial
  Synthetic oligonucleotide
aacggatcgggcaacttttgattcacgcaaagtgcacaatgtcacatcaca

SEQ ID NO: 301880 - DNA, 53 bp, Artificial
  Synthetic oligonucleotide
aacggatgaaattaacaggagtttcagacctaacataggaccacgacccctgg

SEQ ID NO: 301881 - DNA, 60 bp, Artificial
  Synthetic oligonucleotide
aacggatgatcagattgaagtaactaatgcgactgaactggttcagagctcctcaacagg

SEQ ID NO: 301882 - DNA, 56 bp, Artificial
  Synthetic oligonucleotide
aacggattgtgtccgtaaacacacgtgatgcgtacgataacgcatagtgtttttcc

SEQ ID NO: 301883 - DNA, 60 bp, Artificial
  Synthetic oligonucleotide
aacggatttgaacggaacttggcgccagattctaccgaatctgtggatctcacatcagta

SEQ ID NO: 301884 - DNA, 60 bp, Artificial
  Synthetic oligonucleotide
aacggcaatcgaattgatagactcgagcgagatgtctccggcatatcggctagcgttagc

SEQ ID NO: 301885 - DNA, 55 bp, Artificial
  Synthetic oligonucleotide
aacggcaattttctggtactcgtccatttcagattttactaactcagattaacta

SEQ ID NO: 301886 - DNA, 55 bp, Artificial
  Synthetic oligonucleotide
aacggcacatattttctcctgaggggcccttatgatgctccttgggcactcagct

SEQ ID NO: 301887 - DNA, 55 bp, Artificial
  Synthetic oligonucleotide
aacggcaccctacgaccagctatgttacacggtgcaatccgcggcccttctcccg

SEQ ID NO: 301888 - DNA, 55 bp, Artificial
  Synthetic oligonucleotide
aacggcactcattagactaggaataagctttatagacctctcagaaccatgggta

SEQ ID NO: 301889 - DNA, 51 bp, Artificial
  Synthetic oligonucleotide
aacggcagccaaatggcgtcgccaggggaaacaaatagtgggtccagtagc

SEQ ID NO: 301890 - DNA, 55 bp, Artificial
  Synthetic oligonucleotide
aacggcagtcactacaaggcgtatggcggcgatcgcacggcaggccaaccgatca

SEQ ID NO: 301891 - DNA, 60 bp, Artificial
  Synthetic oligonucleotide
aacggcatagctgaggctatccggaagcggtatctgagggactacacacagcagaacata

SEQ ID NO: 301892 - DNA, 56 bp, Artificial
  Synthetic oligonucleotide
aacggccaagagtcatgcatggggtgttgttgaaacccacgcgaggaagtatcatg

SEQ ID NO: 301893 - DNA, 52 bp, Artificial
  Synthetic oligonucleotide
aacggccggggtctggtgcttcctggctacaagtacctcggacccttcaacg

SEQ ID NO: 301894 - DNA, 59 bp, Artificial
  Synthetic oligonucleotide
aacggcctgcgattttagagtacataacatgtgtaaagccttgattcagaaaattgcag

SEQ ID NO: 301895 - DNA, 55 bp, Artificial
  Synthetic oligonucleotide
aacggcctggatgaaaatagaacgatcgatgtatgttttgtagccgcggccgtga

SEQ ID NO: 301896 - DNA, 57 bp, Artificial
  Synthetic oligonucleotide
aacggcgaatatataaatacagggtacagtgcatagagttcagaatttttcggagaa

SEQ ID NO: 301897 - DNA, 54 bp, Artificial
  Synthetic oligonucleotide
aacggcgatagcggagaagtggcccctacagaaggagcccctgacccttcccca

SEQ ID NO: 301898 - DNA, 52 bp, Artificial
  Synthetic oligonucleotide
aacggcgttcgacagaacacctccccggttacggagctcgggtcggtgacta

SEQ ID NO: 301899 - DNA, 55 bp, Artificial
  Synthetic oligonucleotide
aacggctacaagtcggttgaccaagtgacacctgaggtggtccagaagcacgcta

SEQ ID NO: 301900 - DNA, 59 bp, Artificial
  Synthetic oligonucleotide
aacggctacgcttgcgtggtcggagggaagttattcaggccgatgcatgtggaaagcaa

SEQ ID NO: 301901 - DNA, 59 bp, Artificial
  Synthetic oligonucleotide
aacggctccacaatcgtggaccaaagactcggtagcgaactaggctgctacacaatcaa

SEQ ID NO: 301902 - DNA, 60 bp, Artificial
  Synthetic oligonucleotide
aacggctgctcctacagttaaggccccagtagcagtgaattcggtagcagcaagagcgcc

SEQ ID NO: 301903 - DNA, 53 bp, Artificial
  Synthetic oligonucleotide
aacggcttggcgcatgcaagcccttggaacacttccagcagggatggggccct

SEQ ID NO: 301904 - DNA, 53 bp, Artificial
  Synthetic oligonucleotide
aacgggaaactatgcaaactaagagaggtagccccattacatttgggtaaatg

SEQ ID NO: 301905 - DNA, 51 bp, Artificial
  Synthetic oligonucleotide
aacgggaccgttcgccattctaaccgggtcaaccccaactgcgcaacaact

SEQ ID NO: 301906 - DNA, 50 bp, Artificial
  Synthetic oligonucleotide
aacgggacttcaccctcgttagctagcctcccggatttggtacgggacgc

SEQ ID NO: 301907 - DNA, 55 bp, Artificial
  Synthetic oligonucleotide
aacgggagagcacaacgcgcgtgtgcgagaaggttcgaaactcgcaaacgggcac

SEQ ID NO: 301908 - DNA, 51 bp, Artificial
  Synthetic oligonucleotide
aacgggatcacggttaacctacctaacggtggacgagtggttgttggtgta

SEQ ID NO: 301909 - DNA, 57 bp, Artificial
  Synthetic oligonucleotide
aacgggattacaaacaaggtgaactctataatcgagaaaatgaacactcaattcaca

SEQ ID NO: 301910 - DNA, 55 bp, Artificial
  Synthetic oligonucleotide
aacgggcagatgcagatcgcaggcccatgactgggcgtcttgcgaattgggcctg

SEQ ID NO: 301911 - DNA, 60 bp, Artificial
  Synthetic oligonucleotide
aacgggcctctgcaactgatttatataaaacatgtaaacaatctggcacatgtccgcctg

SEQ ID NO: 301912 - DNA, 50 bp, Artificial
  Synthetic oligonucleotide
aacgggcggaactttactgtccccgccctttgttgaccacgtacgaccac

SEQ ID NO: 301913 - DNA, 60 bp, Artificial
  Synthetic oligonucleotide
aacgggctcactgtggtggtgagccgtcgcatcacttgtatgtgctccaatattggttgt

SEQ ID NO: 301914 - DNA, 54 bp, Artificial
  Synthetic oligonucleotide
aacgggctgataccggtgtcaattttcgacacgcgcggcggtgtgtacccctgg

SEQ ID NO: 301915 - DNA, 56 bp, Artificial
  Synthetic oligonucleotide
aacggggaggcctcatgttgaccagtcaattggagacaccccccagatcactaacc

SEQ ID NO: 301916 - DNA, 54 bp, Artificial
  Synthetic oligonucleotide
aacggggaggtaagtggttcgagaccactcataggtacaaggtgacagcgggac

SEQ ID NO: 301917 - DNA, 58 bp, Artificial
  Synthetic oligonucleotide
aacggggcgaatcaataatcgtagaatctggtgatccaaatgcattactgaagcaccg

SEQ ID NO: 301918 - DNA, 50 bp, Artificial
  Synthetic oligonucleotide
aacggggcgcatttattgattgtgggtgggggcccggtgctgcattctct

SEQ ID NO: 301919 - DNA, 53 bp, Artificial
  Synthetic oligonucleotide
aacggggctagcgagtggatgttccgcctccccggggccccgagtgaggctta

SEQ ID NO: 301920 - DNA, 52 bp, Artificial
  Synthetic oligonucleotide
aacgggggccgtcaaacatcttttggatgtcgaaacgcgcccaccgacaacg

SEQ ID NO: 301921 - DNA, 57 bp, Artificial
  Synthetic oligonucleotide
aacggggtataatggttgggcgacgattgatgttgagtatagagagcccgcgcctta

SEQ ID NO: 301922 - DNA, 57 bp, Artificial
  Synthetic oligonucleotide
aacggggtccagtcaatatcctgttcgatccggttatcgttagctctatccagcact

SEQ ID NO: 301923 - DNA, 56 bp, Artificial
  Synthetic oligonucleotide
aacggggtgcaatatataggtgtaccccaaatggatatcgtaatgggagaaatcat

SEQ ID NO: 301924 - DNA, 55 bp, Artificial
  Synthetic oligonucleotide
aacggggttaaagaggatacttggaagtctgctagatggtcgtggacctgtgcgg

SEQ ID NO: 301925 - DNA, 51 bp, Artificial
  Synthetic oligonucleotide
aacggggttgagcgaacggtgcagtagggttccgtccctatttcgtaagtc

SEQ ID NO: 301926 - DNA, 54 bp, Artificial
  Synthetic oligonucleotide
aacgggtaatgagtttgttcgacatctagctggttttattaatggtactctacc

SEQ ID NO: 301927 - DNA, 56 bp, Artificial
  Synthetic oligonucleotide
aacgggtgcttctcgagcacggagtcccgactcgtcctggagtcaaaaggccacga

SEQ ID NO: 301928 - DNA, 55 bp, Artificial
  Synthetic oligonucleotide
aacgggttattcactggtgtgagattgagatcatcaaatgaaccacagtggatca

SEQ ID NO: 301929 - DNA, 52 bp, Artificial
  Synthetic oligonucleotide
aacgggttcaccaatttcaatacgaacttggtgaacgaatttgttggcggaa

SEQ ID NO: 301930 - DNA, 49 bp, Artificial
  Synthetic oligonucleotide
aacggtaaaacgatgaagcggtccccacggtttgcctccgtcccccgac

SEQ ID NO: 301931 - DNA, 52 bp, Artificial
  Synthetic oligonucleotide
aacggtaagtagcaagttccttgttccttgtaccaggtgcggtattgggatt

SEQ ID NO: 301932 - DNA, 52 bp, Artificial
  Synthetic oligonucleotide
aacggtaagttattctgcaccgggtgcggtcactgtattactcactatgtgg

SEQ ID NO: 301933 - DNA, 55 bp, Artificial
  Synthetic oligonucleotide
aacggtagcaagcaagattgcggtgcgccaactttcgattttgaacgttccgctt

SEQ ID NO: 301934 - DNA, 58 bp, Artificial
  Synthetic oligonucleotide
aacggtcagtacatccgctagtttgaatgtaaatatgccagttccgaatttgaaatca

SEQ ID NO: 301935 - DNA, 60 bp, Artificial
  Synthetic oligonucleotide
aacggtcagttcggtgcggccatgcagggtctgtcctctgtgctgggcagtgtcctcaac

SEQ ID NO: 301936 - DNA, 50 bp, Artificial
  Synthetic oligonucleotide
aacggtcatcagatcgtggacttgattaacaacgcttttgaaggtcgtgt

SEQ ID NO: 301937 - DNA, 55 bp, Artificial
  Synthetic oligonucleotide
aacggtcccagcccagaggtaggcgccagcccataccaaaggcgcgcccgccaac

SEQ ID NO: 301938 - DNA, 60 bp, Artificial
  Synthetic oligonucleotide
aacggtcccctctggaggagtatgtgacctcatcaacacctatgcccgaggatctgacga

SEQ ID NO: 301939 - DNA, 53 bp, Artificial
  Synthetic oligonucleotide
aacggtccggaatcggttctagttaacacctaccaatggataatcagaaattg

SEQ ID NO: 301940 - DNA, 54 bp, Artificial
  Synthetic oligonucleotide
aacggtcctttcgctcctaaacaggaggagagcaccggtaacgccactatcaag

SEQ ID NO: 301941 - DNA, 55 bp, Artificial
  Synthetic oligonucleotide
aacggtcgttgttacggattcactggtgaggacgttaacgatctcattgaggagt

SEQ ID NO: 301942 - DNA, 57 bp, Artificial
  Synthetic oligonucleotide
aacggtctatgtcaaggaagccatagaccgtaggttgcatttcaaagttgaggtgaa

SEQ ID NO: 301943 - DNA, 55 bp, Artificial
  Synthetic oligonucleotide
aacggtcttgattggtcaggtgtttccctttgctctggcttgtgatagaatagtc

SEQ ID NO: 301944 - DNA, 51 bp, Artificial
  Synthetic oligonucleotide
aacggtgacagagtgtttatcgataagtggtgcaacccaagctgtgccaga

SEQ ID NO: 301945 - DNA, 56 bp, Artificial
  Synthetic oligonucleotide
aacggtgacctcccagtgtggttagcttacaaagtagcctctaatggacacagtta

SEQ ID NO: 301946 - DNA, 58 bp, Artificial
  Synthetic oligonucleotide
aacggtgataacgatatcaccgcaacgaagctgtcggagtaacggtccataacagcga

SEQ ID NO: 301947 - DNA, 60 bp, Artificial
  Synthetic oligonucleotide
aacggtgcaaatggcagtaaagatggacgtattggtggcttgcaatggacgggtgctaca

SEQ ID NO: 301948 - DNA, 55 bp, Artificial
  Synthetic oligonucleotide
aacggtggagcagtcggacccgccacggttatcgatagcatcgacgttgacggaa

SEQ ID NO: 301949 - DNA, 57 bp, Artificial
  Synthetic oligonucleotide
aacggtggtgcttggatgtatgggaaaccatccagatttgggcacagttacggtgtg

SEQ ID NO: 301950 - DNA, 58 bp, Artificial
  Synthetic oligonucleotide
aacggtgtaatctctacaattatggtgcacaagtgaagttacctgacggcattactac

SEQ ID NO: 301951 - DNA, 58 bp, Artificial
  Synthetic oligonucleotide
aacggtgttcgggtgcaactatcgagggatcatagaatcttgtactatggtgatttat

SEQ ID NO: 301952 - DNA, 56 bp, Artificial
  Synthetic oligonucleotide
aacggttatcaaagcttgtaacactctaaaggaggtgagaattgtggtcgagtcaa

SEQ ID NO: 301953 - DNA, 56 bp, Artificial
  Synthetic oligonucleotide
aacggttcatgttttaccataatgaccgatggcccgagtgatgggccggcctcgta

SEQ ID NO: 301954 - DNA, 59 bp, Artificial
  Synthetic oligonucleotide
aacggttgaagtcacagcagggaagaatacaatacctcaggattcaattgtcattgaat

SEQ ID NO: 301955 - DNA, 51 bp, Artificial
  Synthetic oligonucleotide
aacggttgcttgaggggacaccccgggcatgcgctctcaggatgatgatcg

SEQ ID NO: 301956 - DNA, 55 bp, Artificial
  Synthetic oligonucleotide
aacggttgtgccttggaaattactatgatgtacgacctgctatgcatggacgcgc

SEQ ID NO: 301957 - DNA, 50 bp, Artificial
  Synthetic oligonucleotide
aacggtttaactactccgataccactgttagctgcggttgcgtttagatc

SEQ ID NO: 301958 - DNA, 53 bp, Artificial
  Synthetic oligonucleotide
aacggtttggcaactatagggacaggatacacaattctagaaacccctaatgg

SEQ ID NO: 301959 - DNA, 60 bp, Artificial
  Synthetic oligonucleotide
aacgtaaagacaagagccgctcttattctcctcgtgagattgagttgagatacagttcag

SEQ ID NO: 301960 - DNA, 55 bp, Artificial
  Synthetic oligonucleotide
aacgtaacaacaagtttgctcaaatcatgtacagtgcgacaggctagagtgatga

SEQ ID NO: 301961 - DNA, 51 bp, Artificial
  Synthetic oligonucleotide
aacgtaagctccacgttgcctgacatcacttatatcacgcggctgagccgt

SEQ ID NO: 301962 - DNA, 60 bp, Artificial
  Synthetic oligonucleotide
aacgtaataaaatgtgatagtgggctgatatattatactgaccagagagatgggcaggat

SEQ ID NO: 301963 - DNA, 52 bp, Artificial
  Synthetic oligonucleotide
aacgtaatctttgggtgctaattctctcaacactttcaatgcatcttccttg

SEQ ID NO: 301964 - DNA, 52 bp, Artificial
  Synthetic oligonucleotide
aacgtaattgaaaacgttcgtaagtcttctgctcctaaacgaaagaacacag

SEQ ID NO: 301965 - DNA, 57 bp, Artificial
  Synthetic oligonucleotide
aacgtacactgctgttccccttgtctgggtatccgcgataagatgcgccacgcggaa

SEQ ID NO: 301966 - DNA, 55 bp, Artificial
  Synthetic oligonucleotide
aacgtacatacacactttttggacaacaagtacaattaacggtatcaaatgactc

SEQ ID NO: 301967 - DNA, 55 bp, Artificial
  Synthetic oligonucleotide
aacgtaccaccgtcacgtgaagacctgtcgtatgacgaattcacgcgtgagacgc

SEQ ID NO: 301968 - DNA, 51 bp, Artificial
  Synthetic oligonucleotide
aacgtaccgaaaagttatcagcgagaagacccaaaggagggaattacggga

SEQ ID NO: 301969 - DNA, 59 bp, Artificial
  Synthetic oligonucleotide
aacgtacgccgtaatccatggacctcgagtcagccgaagattagtctcctatgtggtga

SEQ ID NO: 301970 - DNA, 55 bp, Artificial
  Synthetic oligonucleotide
aacgtactacaagctgtgttcactgcaatggacggagccgttcttcttcaaaccg

SEQ ID NO: 301971 - DNA, 59 bp, Artificial
  Synthetic oligonucleotide
aacgtactacgcttgctgctatatctccggatggtttcgtgatttatactaccatatcc

SEQ ID NO: 301972 - DNA, 54 bp, Artificial
  Synthetic oligonucleotide
aacgtactattgtctcccgaagaagtcagtgaaacgcaaggaactgagaagttg

SEQ ID NO: 301973 - DNA, 59 bp, Artificial
  Synthetic oligonucleotide
aacgtactgtcctttgtagagtctatcaggtcgagagtcataattaatggggtcacagc

SEQ ID NO: 301974 - DNA, 54 bp, Artificial
  Synthetic oligonucleotide
aacgtacttggccagaggcgtgtcgagccggattgtcccgcccaacacgttttc

SEQ ID NO: 301975 - DNA, 55 bp, Artificial
  Synthetic oligonucleotide
aacgtagagtgagtaacgccccatcaataggcgatattaagttagttatcaacgg

SEQ ID NO: 301976 - DNA, 55 bp, Artificial
  Synthetic oligonucleotide
aacgtagcggagcgacgtatgtgtctaatgcatcaactggtagtggatcacgtgt

SEQ ID NO: 301977 - DNA, 56 bp, Artificial
  Synthetic oligonucleotide
aacgtagtaatacgtcttgttctttgtgagcttgagtgtaatggttcttaaccata

SEQ ID NO: 301978 - DNA, 60 bp, Artificial
  Synthetic oligonucleotide
aacgtataatgagatttaagaagcacgtagttcaacatgaagaaacgatgcaagcaatag

SEQ ID NO: 301979 - DNA, 60 bp, Artificial
  Synthetic oligonucleotide
aacgtatccctcctgatcgctggtgatgactgtctgatcatatgtgagaggcccatgtgc

SEQ ID NO: 301980 - DNA, 55 bp, Artificial
  Synthetic oligonucleotide
aacgtatcctctttcatcgagagaagagagactcgcctcataagctgctgaagcg

SEQ ID NO: 301981 - DNA, 60 bp, Artificial
  Synthetic oligonucleotide
aacgtatctgtcagtgaacagatgggcaagacagtctttacagtcgtcatgcgctgggtt

SEQ ID NO: 301982 - DNA, 50 bp, Artificial
  Synthetic oligonucleotide
aacgtattgtctcgcgtcgtgtcagttcgacatttagagaacttagtact

SEQ ID NO: 301983 - DNA, 60 bp, Artificial
  Synthetic oligonucleotide
aacgtcaaaggcaacgccaccagtgctaacattatctgaaatttgcgtcactctgcactc

SEQ ID NO: 301984 - DNA, 56 bp, Artificial
  Synthetic oligonucleotide
aacgtcaacatcacgggtaacacagaaaatttagcaaactgctctttcaatataac

SEQ ID NO: 301985 - DNA, 59 bp, Artificial
  Synthetic oligonucleotide
aacgtcaacctgacgagagcataatatacgattatttaatgacgattcaaacaagagct

SEQ ID NO: 301986 - DNA, 57 bp, Artificial
  Synthetic oligonucleotide
aacgtcaactctttctggaaaatctattggtaggagtgaacaatacatttcaccaga

SEQ ID NO: 301987 - DNA, 55 bp, Artificial
  Synthetic oligonucleotide
aacgtcaagagcctttacgacaaggttcgactacagcttaaggataatgcaaggg

SEQ ID NO: 301988 - DNA, 60 bp, Artificial
  Synthetic oligonucleotide
aacgtcaatacattgagtctaaacctcgtatttggacatgggaccagatccttcatgaga

SEQ ID NO: 301989 - DNA, 55 bp, Artificial
  Synthetic oligonucleotide
aacgtcaatggaggacccggagtgaaggggtttggttttagagctggcaatgatg

SEQ ID NO: 301990 - DNA, 50 bp, Artificial
  Synthetic oligonucleotide
aacgtcaatgttcaaccccgtctttacaccagcaacaactcaaccgagcg

SEQ ID NO: 301991 - DNA, 57 bp, Artificial
  Synthetic oligonucleotide
aacgtcaatttcggccgtcgtgacacggaagctgagtgtcgtcgcctttgggcgaga

SEQ ID NO: 301992 - DNA, 54 bp, Artificial
  Synthetic oligonucleotide
aacgtcacaacaacaacgtgcaccatacgcaactgtaaaaaattaggaccaagg

SEQ ID NO: 301993 - DNA, 54 bp, Artificial
  Synthetic oligonucleotide
aacgtcactactacaacatgtaccgttagaaattgtaaaaagctgggacctaga

SEQ ID NO: 301994 - DNA, 53 bp, Artificial
  Synthetic oligonucleotide
aacgtcagaaaacaccggtgtattcccaacgctttcctcaggttgtggttgaa

SEQ ID NO: 301995 - DNA, 55 bp, Artificial
  Synthetic oligonucleotide
aacgtcagatagttccattaaaacctccttaatctaacctcattagtgtgttgaa

SEQ ID NO: 301996 - DNA, 60 bp, Artificial
  Synthetic oligonucleotide
aacgtcagatccagatacagacgtgccatcatgataccggttggtgaatcgtaccatatc

SEQ ID NO: 301997 - DNA, 60 bp, Artificial
  Synthetic oligonucleotide
aacgtcagttgaatgttttgccgatgacagcttcaatttccctagcatcttacagaagtg

SEQ ID NO: 301998 - DNA, 59 bp, Artificial
  Synthetic oligonucleotide
aacgtcattgcgctcgaagattgtgacccttggttacgaatgtaactatggctcaccaa

SEQ ID NO: 301999 - DNA, 55 bp, Artificial
  Synthetic oligonucleotide
aacgtccatgctcactgatccctcccatataacagcagagacggctgcgaggagg

SEQ ID NO: 302000 - DNA, 53 bp, Artificial
  Synthetic oligonucleotide
aacgtcccacgctagggcgtatggcgtccacttccgatggtacaagccatcat

SEQ ID NO: 302001 - DNA, 55 bp, Artificial
  Synthetic oligonucleotide
aacgtccttaatacacataactttgtatacgtctaaatctacgactccgctttga

SEQ ID NO: 302002 - DNA, 51 bp, Artificial
  Synthetic oligonucleotide
aacgtcgcacacacggtgcacaagcgatggccgatacccacttacgttgct

SEQ ID NO: 302003 - DNA, 55 bp, Artificial
  Synthetic oligonucleotide
aacgtcgcgtacatacaacacgtcgtcgattttgtcgtacactagctgtatagcg

SEQ ID NO: 302004 - DNA, 56 bp, Artificial
  Synthetic oligonucleotide
aacgtcggcactagtgtggtcatggatgtcgtagaacagcatacgatccataccca

SEQ ID NO: 302005 - DNA, 52 bp, Artificial
  Synthetic oligonucleotide
aacgtctacaacgaaagtttataaacaggtaccacaacaatttgattttaga

SEQ ID NO: 302006 - DNA, 59 bp, Artificial
  Synthetic oligonucleotide
aacgtctacatgatgccgaaccaagtatgggactcggcgcaaatctccagatataaccc

SEQ ID NO: 302007 - DNA, 53 bp, Artificial
  Synthetic oligonucleotide
aacgtctatgggaatgctcaacattgactgccaaaccaatcgaagaaccttaa

SEQ ID NO: 302008 - DNA, 60 bp, Artificial
  Synthetic oligonucleotide
aacgtctccgtggcccacgatggctctggacagagatactactacctcactcgtgaccca

SEQ ID NO: 302009 - DNA, 53 bp, Artificial
  Synthetic oligonucleotide
aacgtctcctggccaagttcgacgtttctttggctgccaaacacatgtcaaac

SEQ ID NO: 302010 - DNA, 59 bp, Artificial
  Synthetic oligonucleotide
aacgtctgaggagccggcacgcattggaattactatagagggggtcatgagtcaaaata

SEQ ID NO: 302011 - DNA, 56 bp, Artificial
  Synthetic oligonucleotide
aacgtctggcatggcaggtttcccatcaacgctaccacgaccggtcctagcgtacc

SEQ ID NO: 302012 - DNA, 57 bp, Artificial
  Synthetic oligonucleotide
aacgtcttcactatttttttacagatggctatgtggcggcctggtgacggcaaggta

SEQ ID NO: 302013 - DNA, 60 bp, Artificial
  Synthetic oligonucleotide
aacgtcttcccatgtaacaagccccagcagagacattccagccacatccagcagcatttg

SEQ ID NO: 302014 - DNA, 54 bp, Artificial
  Synthetic oligonucleotide
aacgtctttggttgagacgggtacaattactgttaatacattcttgaactgtcg

SEQ ID NO: 302015 - DNA, 56 bp, Artificial
  Synthetic oligonucleotide
aacgtgacacgtgtaatcgcattataagttgtcggtacttggaaacttacatagga

SEQ ID NO: 302016 - DNA, 57 bp, Artificial
  Synthetic oligonucleotide
aacgtgacactgctgagaatttgtatagacactgtaaagctactggcaactgtcctc

SEQ ID NO: 302017 - DNA, 55 bp, Artificial
  Synthetic oligonucleotide
aacgtgacatctgtttgcggtcaccgctacaccctttgcgctcctcgtgaaagga

SEQ ID NO: 302018 - DNA, 50 bp, Artificial
  Synthetic oligonucleotide
aacgtgagatgaaggtcttgcgtactgagttggccaacttgggtggcttt

SEQ ID NO: 302019 - DNA, 51 bp, Artificial
  Synthetic oligonucleotide
aacgtgagccatatgcaggcaacgcttcctggtggaactccgttcaactgg

SEQ ID NO: 302020 - DNA, 57 bp, Artificial
  Synthetic oligonucleotide
aacgtgagttgggagtacacgcattatcttaccgttataaccttgttgtggcgcata

SEQ ID NO: 302021 - DNA, 57 bp, Artificial
  Synthetic oligonucleotide
aacgtgatccatcgaagggtcgtgcctatagaaaagagttggtgacgccggctcgag

SEQ ID NO: 302022 - DNA, 57 bp, Artificial
  Synthetic oligonucleotide
aacgtgattcctaaatacgcttaagaaaagaccagtctgaggctgtaagctcgtcca

SEQ ID NO: 302023 - DNA, 55 bp, Artificial
  Synthetic oligonucleotide
aacgtgatttcaagatggctggaatacaatcaaggctgtgggttttgcgtcaaag

SEQ ID NO: 302024 - DNA, 54 bp, Artificial
  Synthetic oligonucleotide
aacgtgattttttacctgcttagggatagaaggccttatggcaatgcgccccaa

SEQ ID NO: 302025 - DNA, 60 bp, Artificial
  Synthetic oligonucleotide
aacgtgcagtggctgtctatagacagcttttaggctgcgggcaacgtcagttccataagg

SEQ ID NO: 302026 - DNA, 50 bp, Artificial
  Synthetic oligonucleotide
aacgtgccctccgttgtgaccgcgagatatggaccgctcaaacccaccgt

SEQ ID NO: 302027 - DNA, 56 bp, Artificial
  Synthetic oligonucleotide
aacgtgcctctttagattcaacgtttttacgacatgtattctcctactctatagta

SEQ ID NO: 302028 - DNA, 60 bp, Artificial
  Synthetic oligonucleotide
aacgtgcgcctacactctggtgatgtgtatcgggacatggcctcgtatggcggatcgtgg

SEQ ID NO: 302029 - DNA, 55 bp, Artificial
  Synthetic oligonucleotide
aacgtgcgtactattagcctagtgaaaagtcgtttctagaattcctaactgcgga

SEQ ID NO: 302030 - DNA, 55 bp, Artificial
  Synthetic oligonucleotide
aacgtgcgttccccactagcgctggaaaaacaaagcgcagtgtctacatggacct

SEQ ID NO: 302031 - DNA, 50 bp, Artificial
  Synthetic oligonucleotide
aacgtgctcctcttacacacgaagaaatggacactcggtttactatcatg

SEQ ID NO: 302032 - DNA, 58 bp, Artificial
  Synthetic oligonucleotide
aacgtgcttaaatactatgactgggaccctcacttcaggcttgtgattgaccccaata

SEQ ID NO: 302033 - DNA, 54 bp, Artificial
  Synthetic oligonucleotide
aacgtgcttaaatactatgattgggatccccacatcagattggttatcaacccc

SEQ ID NO: 302034 - DNA, 55 bp, Artificial
  Synthetic oligonucleotide
aacgtggattgccccgccgactgtgacaggagccgatttaacccacgacttggat

SEQ ID NO: 302035 - DNA, 53 bp, Artificial
  Synthetic oligonucleotide
aacgtggctctgtaccttccagatgcttacaagtacacgccagccaacattac

SEQ ID NO: 302036 - DNA, 54 bp, Artificial
  Synthetic oligonucleotide
aacgtgggccagagttcagtacgaaccctttgttgtgcgtggtagtttggcaaa

SEQ ID NO: 302037 - DNA, 60 bp, Artificial
  Synthetic oligonucleotide
aacgtgggcgaagttcttccgcagctgcgcctgggcacagcgctcactcggcgagccagc

SEQ ID NO: 302038 - DNA, 57 bp, Artificial
  Synthetic oligonucleotide
aacgtggttcctacagccaggggactatagaaaggcggatcagcagttctggttcgc

SEQ ID NO: 302039 - DNA, 53 bp, Artificial
  Synthetic oligonucleotide
aacgtggttttgttcgaccaatcgtgtgtctttgatgccggttcacgactcat

SEQ ID NO: 302040 - DNA, 56 bp, Artificial
  Synthetic oligonucleotide
aacgtgtaagaaggtactcatcatacttagttgacttactgtttgataaatacacc

SEQ ID NO: 302041 - DNA, 55 bp, Artificial
  Synthetic oligonucleotide
aacgtgtattcgtatgattggacgcgcatagttaataagcttaaacgcgttggtg

SEQ ID NO: 302042 - DNA, 60 bp, Artificial
  Synthetic oligonucleotide
aacgtgtccggggtgtaccatgtcacgaacgactgctccaactcaagcatagtgtatgag

SEQ ID NO: 302043 - DNA, 55 bp, Artificial
  Synthetic oligonucleotide
aacgtgtcgttttcaatcaacctcacagccgttgtatgtacccctagttggaata

SEQ ID NO: 302044 - DNA, 60 bp, Artificial
  Synthetic oligonucleotide
aacgtgtgattggacgtgtgctctcaacagctgatgtcctggttgagggttcacgtgtgg

SEQ ID NO: 302045 - DNA, 55 bp, Artificial
  Synthetic oligonucleotide
aacgtgttacagctctggggcgaaccgcaggtgaaccgtgccacgggcctggtta

SEQ ID NO: 302046 - DNA, 53 bp, Artificial
  Synthetic oligonucleotide
aacgtgttaggggcgggggatgagattccggatccgttaagtccaggtgagcg

SEQ ID NO: 302047 - DNA, 54 bp, Artificial
  Synthetic oligonucleotide
aacgtgttattctggttggttagagatagacgacctggttcaaccccttatgga

SEQ ID NO: 302048 - DNA, 56 bp, Artificial
  Synthetic oligonucleotide
aacgtgttcaaaatcgggcattgaccggaggtcaagattaatggtcaacaatattc

SEQ ID NO: 302049 - DNA, 54 bp, Artificial
  Synthetic oligonucleotide
aacgtgttgaacattgaggggtgtacgtcactctacaagttcaacccgtttaga

SEQ ID NO: 302050 - DNA, 57 bp, Artificial
  Synthetic oligonucleotide
aacgttaacttcatcgcaattggcaaacttagaacatgactatgagccgacttttgt

SEQ ID NO: 302051 - DNA, 53 bp, Artificial
  Synthetic oligonucleotide
aacgttagtctggacaccccataacgtttgcaacccggtttactggcagccac

SEQ ID NO: 302052 - DNA, 54 bp, Artificial
  Synthetic oligonucleotide
aacgttataatactaatgataactcaagaggtatgaactttgaaacatctatgt

SEQ ID NO: 302053 - DNA, 55 bp, Artificial
  Synthetic oligonucleotide
aacgttcattctacatttatacgccaaattagaaattattaactatgctataaaa

SEQ ID NO: 302054 - DNA, 55 bp, Artificial
  Synthetic oligonucleotide
aacgttcccacttatactacaacatttggaataactgattgctcagactttactt

SEQ ID NO: 302055 - DNA, 53 bp, Artificial
  Synthetic oligonucleotide
aacgttccgaatcggctatatcggtcgagctaccggaaccccagtccgccgta

SEQ ID NO: 302056 - DNA, 58 bp, Artificial
  Synthetic oligonucleotide
aacgttctgatcagtacgtggagccaaatcccttgaagcgtaagcgcttcgagaagga

SEQ ID NO: 302057 - DNA, 60 bp, Artificial
  Synthetic oligonucleotide
aacgttctgtagcagcaatcatcactggcttaacatgcactcccaccaacaaaatggtgt

SEQ ID NO: 302058 - DNA, 55 bp, Artificial
  Synthetic oligonucleotide
aacgttgaagacttcctccgctggaaccattgtgagtacagacttccttgccagg

SEQ ID NO: 302059 - DNA, 60 bp, Artificial
  Synthetic oligonucleotide
aacgttgagcgccacttaaatagagctgtcttgattatgcaatctgtggccactgtggta

SEQ ID NO: 302060 - DNA, 60 bp, Artificial
  Synthetic oligonucleotide
aacgttgattttcagagcgtcatgggaatgcattgcgcttgtctgtatggcaatcgtagt

SEQ ID NO: 302061 - DNA, 56 bp, Artificial
  Synthetic oligonucleotide
aacgttgcatgatcgtaaaacatgcccggcttaccgtgagccgcctttgaaagaaa

SEQ ID NO: 302062 - DNA, 55 bp, Artificial
  Synthetic oligonucleotide
aacgttgccacctgtacctgaggaagtaccgatagggaatgttggtggaccacgc

SEQ ID NO: 302063 - DNA, 55 bp, Artificial
  Synthetic oligonucleotide
aacgttgcccagtgtaacatgaccaaagactggttcctggtacaaatgctagcta

SEQ ID NO: 302064 - DNA, 60 bp, Artificial
  Synthetic oligonucleotide
aacgttgccgtaggcccagacggcatgcctctggcaccaggaatgccacaatacagatca

SEQ ID NO: 302065 - DNA, 55 bp, Artificial
  Synthetic oligonucleotide
aacgttggacaacaccaccaatccaacggcgtaccacaaggcaccgctcactcgg

SEQ ID NO: 302066 - DNA, 55 bp, Artificial
  Synthetic oligonucleotide
aacgttggagctttcatagaggtccggcatgtactcggcaaacgtgcacgtgggg

SEQ ID NO: 302067 - DNA, 57 bp, Artificial
  Synthetic oligonucleotide
aacgttgtaattactgggacaatgtataccgtatgcacttagctcatgtttcctctc

SEQ ID NO: 302068 - DNA, 60 bp, Artificial
  Synthetic oligonucleotide
aacgttgtattgccgcgtggtctgctcttgctcctatgcagggagacccggacatcaaca

SEQ ID NO: 302069 - DNA, 59 bp, Artificial
  Synthetic oligonucleotide
aacgtttacaggataagcataccatagagttagttcaggcggaagcgagagagctgttc

SEQ ID NO: 302070 - DNA, 54 bp, Artificial
  Synthetic oligonucleotide
aacgtttactggggtgagctaaaattaaaaccaggatcatctttgtcagagacc

SEQ ID NO: 302071 - DNA, 56 bp, Artificial
  Synthetic oligonucleotide
aacgtttatagttttagagatcccacttggcacgcgctgcgtacggctattctaaa

SEQ ID NO: 302072 - DNA, 54 bp, Artificial
  Synthetic oligonucleotide
aacgtttatggtagtatggtggggggtcgtcatgtgttagcccttcctccaaca

SEQ ID NO: 302073 - DNA, 51 bp, Artificial
  Synthetic oligonucleotide
aacgtttggtatgggcctgtgtaggtttggaggtaggccgaggtcaacctt

SEQ ID NO: 302074 - DNA, 55 bp, Artificial
  Synthetic oligonucleotide
aacgtttgttgaacatgcgtaaagctatattgaacgaccctcagactttcgaagg

SEQ ID NO: 302075 - DNA, 55 bp, Artificial
  Synthetic oligonucleotide
aacgttttaaccgtgcacgaggctcaaggcgaaacatacgcgcgtgtgaacctag

SEQ ID NO: 302076 - DNA, 55 bp, Artificial
  Synthetic oligonucleotide
aacgttttgcgtgcgacccctctgctgtccgttcgcccggtcgccagtctgtctt

SEQ ID NO: 302077 - DNA, 56 bp, Artificial
  Synthetic oligonucleotide
aactaaaaaggcttgtgagatatttccatcacgttccgcaagtcatcttgcagcga

SEQ ID NO: 302078 - DNA, 59 bp, Artificial
  Synthetic oligonucleotide
aactaaaaggagaagccatgcatggacaagtagactgtagtccaggaatacggcaatta

SEQ ID NO: 302079 - DNA, 54 bp, Artificial
  Synthetic oligonucleotide
aactaaaccaaacgaagattatatcgtaaagtatgatggtatttatacatacct

SEQ ID NO: 302080 - DNA, 57 bp, Artificial
  Synthetic oligonucleotide
aactaaaggatggccgactgggtccgtttatttcaaagagtacacagacatagcatc

SEQ ID NO: 302081 - DNA, 57 bp, Artificial
  Synthetic oligonucleotide
aactaaatcaatcttcatgtgacaaagttgctttacccttaatatgggaaggatata

SEQ ID NO: 302082 - DNA, 54 bp, Artificial
  Synthetic oligonucleotide
aactaaatccctagcaccccaggcaggaatccaaaatctccttctacgcctcct

SEQ ID NO: 302083 - DNA, 60 bp, Artificial
  Synthetic oligonucleotide
aactaaatctggtagtgagtgtgaatgccgacacactaactactagcaatagaccatctc

SEQ ID NO: 302084 - DNA, 58 bp, Artificial
  Synthetic oligonucleotide
aactaaatgccagtccgaaattggagggatcaacactaataggagcttccacaatgtc

SEQ ID NO: 302085 - DNA, 51 bp, Artificial
  Synthetic oligonucleotide
aactaacaccactctccttgttttggagacctgtatacaccccccagtacc

SEQ ID NO: 302086 - DNA, 57 bp, Artificial
  Synthetic oligonucleotide
aactaacagcctaacttcatggacagatcaaacaagaaaaatgacgtagactcgaaa

SEQ ID NO: 302087 - DNA, 55 bp, Artificial
  Synthetic oligonucleotide
aactaacatgcctagcgggatagcggctaggggcgcgccaatgccggcttgggtt

SEQ ID NO: 302088 - DNA, 56 bp, Artificial
  Synthetic oligonucleotide
aactaacatgctcaaccacagttctcattcgtgtgctaggctgcagctgataatag

SEQ ID NO: 302089 - DNA, 53 bp, Artificial
  Synthetic oligonucleotide
aactaacattggccccacagggtggctttgacaagaacgggaacaccccacac

SEQ ID NO: 302090 - DNA, 53 bp, Artificial
  Synthetic oligonucleotide
aactaaccagcgtgaacgctttgagaccatctaccctagacatcgagccagtg

SEQ ID NO: 302091 - DNA, 51 bp, Artificial
  Synthetic oligonucleotide
aactaacccatccaaactaagctattcctcaaacaacagtgctcaacagtt

SEQ ID NO: 302092 - DNA, 56 bp, Artificial
  Synthetic oligonucleotide
aactaacccatctgataaacaaacttcgtcatatggtgtatagccgtttggttgga

SEQ ID NO: 302093 - DNA, 55 bp, Artificial
  Synthetic oligonucleotide
aactaacggagcagacgtctccggggtgagagccgtgcgagtaggatactcgacg

SEQ ID NO: 302094 - DNA, 58 bp, Artificial
  Synthetic oligonucleotide
aactaacggtgatgccaaaccacgagatggaattactgacgacattaatatagttgag

SEQ ID NO: 302095 - DNA, 60 bp, Artificial
  Synthetic oligonucleotide
aactaactcataccggcctgaatcgagcgtctcttgactagattcacctcatggcgttag

SEQ ID NO: 302096 - DNA, 55 bp, Artificial
  Synthetic oligonucleotide
aactaagcagcggctacaaagatgtgatactttggtttagcttcggggcgtcatg

SEQ ID NO: 302097 - DNA, 56 bp, Artificial
  Synthetic oligonucleotide
aactaagcattcgaagacaggcagacccgaaattgtgtggagagtgtaaccaaccc

SEQ ID NO: 302098 - DNA, 56 bp, Artificial
  Synthetic oligonucleotide
aactaagccgaaagtacaaatagtgttggaccacaacacccaagtgtgtagcgcga

SEQ ID NO: 302099 - DNA, 52 bp, Artificial
  Synthetic oligonucleotide
aactaaggagggttgtagtgaaccgacgcatgcggcgtaccttagctaaact

SEQ ID NO: 302100 - DNA, 59 bp, Artificial
  Synthetic oligonucleotide
aactaaggggttaaatgacactggaattaatggcacaatcatactcccatgcagaataa

SEQ ID NO: 302101 - DNA, 56 bp, Artificial
  Synthetic oligonucleotide
aactaaggtcactttttagctctgctagttcttaccaaagaatccagatctttcca

SEQ ID NO: 302102 - DNA, 59 bp, Artificial
  Synthetic oligonucleotide
aactaataacacagcaacaatagtaataccctatattaactcagtgcccatggactcaa

SEQ ID NO: 302103 - DNA, 60 bp, Artificial
  Synthetic oligonucleotide
aactaatattgaattcacattccaattgaatttgacagatagtcctgagacccatcacta

SEQ ID NO: 302104 - DNA, 57 bp, Artificial
  Synthetic oligonucleotide
aactaatcaaaagatgcgtattcaatacgcaactaggtctattaatagggttgtctc

SEQ ID NO: 302105 - DNA, 57 bp, Artificial
  Synthetic oligonucleotide
aactaatcggtaagcacgttcaatatgagttacattctgacaatttggcttacaaaa

SEQ ID NO: 302106 - DNA, 55 bp, Artificial
  Synthetic oligonucleotide
aactaatgagcatgtagactcgctctgtcgtttagcctggcattgcggggaacag

SEQ ID NO: 302107 - DNA, 60 bp, Artificial
  Synthetic oligonucleotide
aactaatgctggtgcaattcatgcccccactgtttcagattctaaagccctagctaggag

SEQ ID NO: 302108 - DNA, 50 bp, Artificial
  Synthetic oligonucleotide
aactaatggaagcgttaatgcaattatctagacaacaatttccaaccatg

SEQ ID NO: 302109 - DNA, 54 bp, Artificial
  Synthetic oligonucleotide
aactaatggacgaagattaccagggtaggctgtgtaatcccctgaatccgtttg

SEQ ID NO: 302110 - DNA, 60 bp, Artificial
  Synthetic oligonucleotide
aactacaagctttgttgcttttagatagagttcccgcactgcaagaggtggatgacattg

SEQ ID NO: 302111 - DNA, 57 bp, Artificial
  Synthetic oligonucleotide
aactacaaggttatactatgccttggaccctacaggaatgctgggaaatggatacta

SEQ ID NO: 302112 - DNA, 60 bp, Artificial
  Synthetic oligonucleotide
aactacacatctgcacactcccaatgcacgtgtaggtggtacacccatcaatttcgatcg

SEQ ID NO: 302113 - DNA, 55 bp, Artificial
  Synthetic oligonucleotide
aactacagatgcttcgttttggcatgcttgcagggcttagtaggcttgtttgtcc

SEQ ID NO: 302114 - DNA, 55 bp, Artificial
  Synthetic oligonucleotide
aactacagcgccacagactgagaggatgatgcgtattaattggaagaagtggtgg

SEQ ID NO: 302115 - DNA, 58 bp, Artificial
  Synthetic oligonucleotide
aactacataactaaattaaaggggccgaaggcagccgctctgtatgcaaagactcaca

SEQ ID NO: 302116 - DNA, 55 bp, Artificial
  Synthetic oligonucleotide
aactacatcggacagtgtcctcacctttgaactaactgacatcgtgcactgccgt

SEQ ID NO: 302117 - DNA, 60 bp, Artificial
  Synthetic oligonucleotide
aactaccacgcgggtacatagaggcgtacgtgcaaaattctccaatgctagacctgctga

SEQ ID NO: 302118 - DNA, 53 bp, Artificial
  Synthetic oligonucleotide
aactaccaggcttgaacaggatgtgcgtatggagactgtccatgtgcaagtta

SEQ ID NO: 302119 - DNA, 60 bp, Artificial
  Synthetic oligonucleotide
aactaccagtatgtaggctggttcaaagtccttagtgagcctgaacagatgctcaccgat

SEQ ID NO: 302120 - DNA, 60 bp, Artificial
  Synthetic oligonucleotide
aactaccagtccccgtgtgcgatacctgagtttgatgtcactccacccatagatatacca

SEQ ID NO: 302121 - DNA, 53 bp, Artificial
  Synthetic oligonucleotide
aactacccgccaatcaacatgtggtaaccgttaattcggtgtttgatttggcc

SEQ ID NO: 302122 - DNA, 54 bp, Artificial
  Synthetic oligonucleotide
aactaccggacagtgggtatggccaaacacaggtggatacggacacgggaccaa

SEQ ID NO: 302123 - DNA, 55 bp, Artificial
  Synthetic oligonucleotide
aactaccggatagcataaggtacgcgcaaatcgcgactaaccccggctcaatact

SEQ ID NO: 302124 - DNA, 53 bp, Artificial
  Synthetic oligonucleotide
aactacctcaaataacgcgtaaactgtacattttccagtagcccaagcgtaaa

SEQ ID NO: 302125 - DNA, 59 bp, Artificial
  Synthetic oligonucleotide
aactacgaacatcgatgaaaataatttaagatggctgataataagaaatcaatgtctcg

SEQ ID NO: 302126 - DNA, 56 bp, Artificial
  Synthetic oligonucleotide
aactacgaagtcttactgactaatgtgatttagtacgtgaaaaattattagatctg

SEQ ID NO: 302127 - DNA, 55 bp, Artificial
  Synthetic oligonucleotide
aactacgacggtgagctttgcactcacgtagcagtgaaacataacaatgagttga

SEQ ID NO: 302128 - DNA, 60 bp, Artificial
  Synthetic oligonucleotide
aactacgactcagcctcgctgttatctgagatgccgtcgagggaaattgcagaacaattt

SEQ ID NO: 302129 - DNA, 60 bp, Artificial
  Synthetic oligonucleotide
aactacgactgtagggttgtccatttgcgccgctataatagcattatcgtgtggcgcaac

SEQ ID NO: 302130 - DNA, 55 bp, Artificial
  Synthetic oligonucleotide
aactacgagcacctgcatgaagcggatggcttcatttggtgaccccgatgtgata

SEQ ID NO: 302131 - DNA, 54 bp, Artificial
  Synthetic oligonucleotide
aactacgcaattaaccgctacggttcgttgtccgctgcgtatgaccgagccggg

SEQ ID NO: 302132 - DNA, 55 bp, Artificial
  Synthetic oligonucleotide
aactacgcacgcgaggccaaggacctctcccgatttgaaacccttgacacagccg

SEQ ID NO: 302133 - DNA, 59 bp, Artificial
  Synthetic oligonucleotide
aactacgtcacttatgggcccgacattctaaacgctctcaacatgaaggcagcaatggg

SEQ ID NO: 302134 - DNA, 55 bp, Artificial
  Synthetic oligonucleotide
aactacgtgcatgcaagcgcctttgttaaattagtcgccaatccattaataagta

SEQ ID NO: 302135 - DNA, 53 bp, Artificial
  Synthetic oligonucleotide
aactacgttaaaacagattcgtcagacttagggcaactaaaagtctatgtttg

SEQ ID NO: 302136 - DNA, 55 bp, Artificial
  Synthetic oligonucleotide
aactacgttgatggattcaaagaagtcaataaatacatttgcgcccaaacgccgt

SEQ ID NO: 302137 - DNA, 55 bp, Artificial
  Synthetic oligonucleotide
aactactaaccatcaacgctgcagtggacattaattgcaaagtgagtgtcggtag

SEQ ID NO: 302138 - DNA, 58 bp, Artificial
  Synthetic oligonucleotide
aactactactgaaacgattcggcaagtgccgtggatcattggacaccactgaacgttc

SEQ ID NO: 302139 - DNA, 54 bp, Artificial
  Synthetic oligonucleotide
aactactatcatataccgctctagatgtaccgaacaggaagctagacaacaacg

SEQ ID NO: 302140 - DNA, 60 bp, Artificial
  Synthetic oligonucleotide
aactactcacttgtgtatcggaattgtcaggactttgctctagatgtattacgggttgca

SEQ ID NO: 302141 - DNA, 58 bp, Artificial
  Synthetic oligonucleotide
aactactgagaagttgcaactaacgtcagttacatctctatgtatgttaatagggaac

SEQ ID NO: 302142 - DNA, 55 bp, Artificial
  Synthetic oligonucleotide
aactactgagaccgtattaagtatacggtttgtgttggcgcattgttctcagagc

SEQ ID NO: 302143 - DNA, 53 bp, Artificial
  Synthetic oligonucleotide
aactactgccgttaagagtgttacccaaaaaaagttcctgtgcgacaggacca

SEQ ID NO: 302144 - DNA, 59 bp, Artificial
  Synthetic oligonucleotide
aactactgcttcagcagttaactcgtttgcttattcttactgtaatgttccagtggaga

SEQ ID NO: 302145 - DNA, 52 bp, Artificial
  Synthetic oligonucleotide
aactactgtacaacagcagttcagtgatctgtttaagactgttcccactagg

SEQ ID NO: 302146 - DNA, 58 bp, Artificial
  Synthetic oligonucleotide
aactactgtcgatatacaaacatggtatgatgatatttttccgggaaattctgtgagg

SEQ ID NO: 302147 - DNA, 55 bp, Artificial
  Synthetic oligonucleotide
aactacttaatgctgagttctcttctttgtcgaggaaacatttatagctggcccc

SEQ ID NO: 302148 - DNA, 56 bp, Artificial
  Synthetic oligonucleotide
aactacttatgattctaaattccaaagccaaagagttaataatgtagagcttgtag

SEQ ID NO: 302149 - DNA, 55 bp, Artificial
  Synthetic oligonucleotide
aactacttgccacgtccttgactatgtgggtaggctgcgccccgagggcagcgca

SEQ ID NO: 302150 - DNA, 60 bp, Artificial
  Synthetic oligonucleotide
aactagaaggctgattcagttgatagtaagtggaagagacgaacaatcaatcgctgaggc

SEQ ID NO: 302151 - DNA, 51 bp, Artificial
  Synthetic oligonucleotide
aactagacaaagcgtactttgatgaggcatacatgattcattctgggcaat

SEQ ID NO: 302152 - DNA, 58 bp, Artificial
  Synthetic oligonucleotide
aactagacggtaagcatctacacttacgtggtatagatgctggtctctccataactgc

SEQ ID NO: 302153 - DNA, 56 bp, Artificial
  Synthetic oligonucleotide
aactagagaaactctagaggcactcagtatggggacaccaaaggctaagcagatca

SEQ ID NO: 302154 - DNA, 60 bp, Artificial
  Synthetic oligonucleotide
aactagagacagatgccgctctgcctcgactgcgacaaatggtggaagacggcaagctta

SEQ ID NO: 302155 - DNA, 60 bp, Artificial
  Synthetic oligonucleotide
aactagaggactcttcggagctatcgcaggcttcatcgaaggaggatggactggaatgat

SEQ ID NO: 302156 - DNA, 55 bp, Artificial
  Synthetic oligonucleotide
aactagaggacttttcggagctatcgcaggttttattgaagggggatggactgga

SEQ ID NO: 302157 - DNA, 58 bp, Artificial
  Synthetic oligonucleotide
aactagcacccagcaagagcaagtccactggactaccaggcctaacaaccctatccca

SEQ ID NO: 302158 - DNA, 56 bp, Artificial
  Synthetic oligonucleotide
aactagcatttaatgtcgacgagtttcggcattctaactgtagacttaactttaga

SEQ ID NO: 302159 - DNA, 57 bp, Artificial
  Synthetic oligonucleotide
aactagccctggacgccctatccaacacaagtcacagggatccctcccttcatccag

SEQ ID NO: 302160 - DNA, 58 bp, Artificial
  Synthetic oligonucleotide
aactagcggttgccaagtatgtggccggtctatgtaaggaacaacatctggtggcgtc

SEQ ID NO: 302161 - DNA, 52 bp, Artificial
  Synthetic oligonucleotide
aactagctaaccactttaaaatcgccgccagttccttacaaaaccgctatac

SEQ ID NO: 302162 - DNA, 60 bp, Artificial
  Synthetic oligonucleotide
aactagctcagtggaactagtcgaaacagaacacactgggtcattctgttcaatcaatgg

SEQ ID NO: 302163 - DNA, 55 bp, Artificial
  Synthetic oligonucleotide
aactagctcgaagcaaagcggacgcttttcctttgctaaaaaacccagaatgtca

SEQ ID NO: 302164 - DNA, 57 bp, Artificial
  Synthetic oligonucleotide
aactaggagctggaacacaagtgatagtagagctgggggcatatgttcaggctgaga

SEQ ID NO: 302165 - DNA, 59 bp, Artificial
  Synthetic oligonucleotide
aactaggataatgcagttcaatgcagacaaatatggtatgaaacttacgtttcagaacg

SEQ ID NO: 302166 - DNA, 55 bp, Artificial
  Synthetic oligonucleotide
aactaggctgctattcagccacgtcgaccatgtactatatggatgacagctgtca

SEQ ID NO: 302167 - DNA, 56 bp, Artificial
  Synthetic oligonucleotide
aactaggctgttcactataaggcaagaaatggccagtaggggtctatgggattcct

SEQ ID NO: 302168 - DNA, 60 bp, Artificial
  Synthetic oligonucleotide
aactagggtgccgtacttcgtgcgcgctcaagggctcattcgtgcatgcatgctggtgcg

SEQ ID NO: 302169 - DNA, 55 bp, Artificial
  Synthetic oligonucleotide
aactagggtgttacactataaatagagtaaagtcatttaagctttgcgagaacag

SEQ ID NO: 302170 - DNA, 51 bp, Artificial
  Synthetic oligonucleotide
aactaggtaacaagtatgcatatgacctcattgggccaaataacccagggg

SEQ ID NO: 302171 - DNA, 55 bp, Artificial
  Synthetic oligonucleotide
aactaggtacacaagacttagatgatgaatgcacaatgttaaccctatttggacc

SEQ ID NO: 302172 - DNA, 60 bp, Artificial
  Synthetic oligonucleotide
aactaggtatgctccagtcaattggggtcatggagagataaatgattcaaccacagtaga

SEQ ID NO: 302173 - DNA, 55 bp, Artificial
  Synthetic oligonucleotide
aactagtacaggtggagtcaatgatggagataaacaatgtcgctggttcaagcgg

SEQ ID NO: 302174 - DNA, 58 bp, Artificial
  Synthetic oligonucleotide
aactagtgagcaattcctaatgaattactcgggcaggaagctgactatttaccgagaa

SEQ ID NO: 302175 - DNA, 60 bp, Artificial
  Synthetic oligonucleotide
aactagtgatcgattactaactgtaggccatccatattttgatgtaagatcacaagatgg

SEQ ID NO: 302176 - DNA, 50 bp, Artificial
  Synthetic oligonucleotide
aactagtggttacgtaaccgggtacgttacgtacgactagatacgtaaca

SEQ ID NO: 302177 - DNA, 51 bp, Artificial
  Synthetic oligonucleotide
aactataaaaacgttaataagaacgctatactcgttagttatgtgtgggtt

SEQ ID NO: 302178 - DNA, 60 bp, Artificial
  Synthetic oligonucleotide
aactataaagttcagattaagctccaaaacccgactgcatgcacgaaggacgcatgtgac

SEQ ID NO: 302179 - DNA, 56 bp, Artificial
  Synthetic oligonucleotide
aactataaatgaatttgtgagttattacccatatgacaatacttacacggtagaaa

SEQ ID NO: 302180 - DNA, 55 bp, Artificial
  Synthetic oligonucleotide
aactataaggacagagaggcttgtagcagaagagttcatcgcatcagaggttggt

SEQ ID NO: 302181 - DNA, 55 bp, Artificial
  Synthetic oligonucleotide
aactataagtcagttggatcataatcttagcttacaggtatgggaggcggattcc

SEQ ID NO: 302182 - DNA, 58 bp, Artificial
  Synthetic oligonucleotide
aactataatggaaaagcattattgggatttagacgatagtgatgttacgtatgagttc

SEQ ID NO: 302183 - DNA, 54 bp, Artificial
  Synthetic oligonucleotide
aactatactgctttggattatttcaaagtagagctccctaacgatttttacgcg

SEQ ID NO: 302184 - DNA, 57 bp, Artificial
  Synthetic oligonucleotide
aactatacttgtcgacggttggaggcgagcactgacgggccatggggcggtgacacc

SEQ ID NO: 302185 - DNA, 60 bp, Artificial
  Synthetic oligonucleotide
aactatagaagattgcacttaatctcgaccaataggcagtagtgatccacactacttacg

SEQ ID NO: 302186 - DNA, 55 bp, Artificial
  Synthetic oligonucleotide
aactatatcaagggtattatatggcacaattgcccagaaatcctaagaagtctgg

SEQ ID NO: 302187 - DNA, 54 bp, Artificial
  Synthetic oligonucleotide
aactatcagccagacgcgagacactgttaaacacgtcgttgtaaccatacacga

SEQ ID NO: 302188 - DNA, 59 bp, Artificial
  Synthetic oligonucleotide
aactatcagctaatatagctttgtcacagttaatagatttagcactattgccacttgat

SEQ ID NO: 302189 - DNA, 59 bp, Artificial
  Synthetic oligonucleotide
aactatcatctgggtgtatggaagcaagggcaatgaaggaaagactacgtatgtgaagg

SEQ ID NO: 302190 - DNA, 59 bp, Artificial
  Synthetic oligonucleotide
aactatcatgaagagcagaatatcctacttcgtcctggacgtgttggtggcgtgttatt

SEQ ID NO: 302191 - DNA, 60 bp, Artificial
  Synthetic oligonucleotide
aactatcatgacgaagagatgcataagtggcttgatggccgcaagactacaaattatgat

SEQ ID NO: 302192 - DNA, 53 bp, Artificial
  Synthetic oligonucleotide
aactatcctcgcgcgttcggtgtgttccacacgtcgtactatctcgaactgat

SEQ ID NO: 302193 - DNA, 57 bp, Artificial
  Synthetic oligonucleotide
aactatcgagcgtgatacgatcgtagccacttccaacgagacctaaacgcgtcattg

SEQ ID NO: 302194 - DNA, 56 bp, Artificial
  Synthetic oligonucleotide
aactatcggtgatacaacagttgtttcgaagatgtatgaaaccttcttatggttcc

SEQ ID NO: 302195 - DNA, 55 bp, Artificial
  Synthetic oligonucleotide
aactatcggttgtggttacgcagcccctggggactgtggtggcatcctacggtgt

SEQ ID NO: 302196 - DNA, 53 bp, Artificial
  Synthetic oligonucleotide
aactatctaccagaggaatccagattgcatccaatgagaacatggagaccata

SEQ ID NO: 302197 - DNA, 55 bp, Artificial
  Synthetic oligonucleotide
aactatctcaagaaattgcagtttcgcagctaattgacttagcattgctgccact

SEQ ID NO: 302198 - DNA, 59 bp, Artificial
  Synthetic oligonucleotide
aactatgacagaccatacatgccacgttatggtcttcagcgtaatttaaccgacatgag

SEQ ID NO: 302199 - DNA, 60 bp, Artificial
  Synthetic oligonucleotide
aactatgacatggcctcgatcattgttcgcggatgaggttaataagcataaagggctcta

SEQ ID NO: 302200 - DNA, 60 bp, Artificial
  Synthetic oligonucleotide
aactatgacgacagatctgttgaaacaatattaatagagtccggagttgtgtgtccagga

SEQ ID NO: 302201 - DNA, 60 bp, Artificial
  Synthetic oligonucleotide
aactatgactaaactttacaacatggatcagcactctcgtgcatgtaagatgaaattcac

SEQ ID NO: 302202 - DNA, 60 bp, Artificial
  Synthetic oligonucleotide
aactatgagacattaatggcatgtataacgatgaatatgcaacacgtacaaacattaacg

SEQ ID NO: 302203 - DNA, 56 bp, Artificial
  Synthetic oligonucleotide
aactatgagctaactcctggaaagttagatctaggtgaaagaaccttgaattacag

SEQ ID NO: 302204 - DNA, 56 bp, Artificial
  Synthetic oligonucleotide
aactatgaggcaacatatgccgcattttcgaatcctaacacgtacgctagaaacag

SEQ ID NO: 302205 - DNA, 60 bp, Artificial
  Synthetic oligonucleotide
aactatgattacatagtgctgattgatccagagtaccgcaagttcgaacaatggatcaaa

SEQ ID NO: 302206 - DNA, 52 bp, Artificial
  Synthetic oligonucleotide
aactatgcacccagaggtacataaaatactaacaccatacaagctacgtgac

SEQ ID NO: 302207 - DNA, 55 bp, Artificial
  Synthetic oligonucleotide
aactatgcactaatttacttatacgggtaatactggcattattatcagggttaag

SEQ ID NO: 302208 - DNA, 55 bp, Artificial
  Synthetic oligonucleotide
aactatgcaggtggtgcggttttgacttcaaggagcccgatgggctcccacacta

SEQ ID NO: 302209 - DNA, 56 bp, Artificial
  Synthetic oligonucleotide
aactatgctctcttgttgcctcggattttttgaatttcctagcgcagaaccagggt

SEQ ID NO: 302210 - DNA, 60 bp, Artificial
  Synthetic oligonucleotide
aactatggaaaaccaacctacagcttctaacccatcagatgcaccaccaactgctactca

SEQ ID NO: 302211 - DNA, 57 bp, Artificial
  Synthetic oligonucleotide
aactatggacaccacacaacccgacgccctgttgctctcaatccccgaagcccgcgc

SEQ ID NO: 302212 - DNA, 60 bp, Artificial
  Synthetic oligonucleotide
aactatggatgggacattaagctcaacatgggaaggatgggtgtgttgtgagtggtatga

SEQ ID NO: 302213 - DNA, 55 bp, Artificial
  Synthetic oligonucleotide
aactatggatgttatcaattatttgactttaattcaccggacttagaaaagctaa

SEQ ID NO: 302214 - DNA, 60 bp, Artificial
  Synthetic oligonucleotide
aactatggcccctagacatagggctatttatccagaagggtggatgctgaggtatgcgta

SEQ ID NO: 302215 - DNA, 56 bp, Artificial
  Synthetic oligonucleotide
aactatgggagtatgtaagttgacactggatccaaaggtctctttacctttgccac

SEQ ID NO: 302216 - DNA, 59 bp, Artificial
  Synthetic oligonucleotide
aactatgggtgtagcaggttttgggattgctctgttcctagcaggttggaaagcatgta

SEQ ID NO: 302217 - DNA, 55 bp, Artificial
  Synthetic oligonucleotide
aactatgtcagcacagctcacaaatagaccatctcctttgcataatgggcctact

SEQ ID NO: 302218 - DNA, 58 bp, Artificial
  Synthetic oligonucleotide
aactatgttctctgggaaggaggacatgacctcactgtagtggccggggatgtgaaag

SEQ ID NO: 302219 - DNA, 56 bp, Artificial
  Synthetic oligonucleotide
aactattaagtatggctcaaatagaacattgcagggcccaagtgttactccagtta

SEQ ID NO: 302220 - DNA, 55 bp, Artificial
  Synthetic oligonucleotide
aactattacgacgcaatggacaactatattcgtaaccttcgtgaccctgtaagac

SEQ ID NO: 302221 - DNA, 57 bp, Artificial
  Synthetic oligonucleotide
aactattcgaaaagacgaggcggcaactgagggagaatgctgaagatatgggtaacg

SEQ ID NO: 302222 - DNA, 57 bp, Artificial
  Synthetic oligonucleotide
aactattgaagaggaaggttatccggccatctacaagtcggcacaggactaatgcct

SEQ ID NO: 302223 - DNA, 60 bp, Artificial
  Synthetic oligonucleotide
aactattgactcttttcaatccttcaacaccagtactatgcactttactgatgagagaat

SEQ ID NO: 302224 - DNA, 60 bp, Artificial
  Synthetic oligonucleotide
aactatttggggagtgcccagcaggtgaatttccgatgcaccatatgatgctcagaagat

SEQ ID NO: 302225 - DNA, 60 bp, Artificial
  Synthetic oligonucleotide
aactatttgtaaagccagtaattggaaatacaacagctgctcaggatgggcgtgagccca

SEQ ID NO: 302226 - DNA, 51 bp, Artificial
  Synthetic oligonucleotide
aactcaaaataatagcttatggggatgatgtgattttttcttacaagtatg

SEQ ID NO: 302227 - DNA, 50 bp, Artificial
  Synthetic oligonucleotide
aactcaaagccgcgtggcacgtccaacatcccgacgacgcacagttcccc

SEQ ID NO: 302228 - DNA, 55 bp, Artificial
  Synthetic oligonucleotide
aactcaaagtgttctatgagatgaagtacaagaaatctggcgatgagtgttatgc

SEQ ID NO: 302229 - DNA, 56 bp, Artificial
  Synthetic oligonucleotide
aactcaaattgttgccagagcaggaaacgacgactttacctttggttggatgatag

SEQ ID NO: 302230 - DNA, 60 bp, Artificial
  Synthetic oligonucleotide
aactcaacaatataatgctccccatagtttggctggagctctgcgaatagcggagcatta

SEQ ID NO: 302231 - DNA, 54 bp, Artificial
  Synthetic oligonucleotide
aactcaaccccaggaggactgggttaccaaagccgcgaggtgatccacgtaagc

SEQ ID NO: 302232 - DNA, 53 bp, Artificial
  Synthetic oligonucleotide
aactcaacgcaattttagtgaaaggtcccatggcaactagggctgagttcacg

SEQ ID NO: 302233 - DNA, 55 bp, Artificial
  Synthetic oligonucleotide
aactcaagaggccagtcatgcggctaccgcaggtgtcgtgctagcggcgtgctca

SEQ ID NO: 302234 - DNA, 55 bp, Artificial
  Synthetic oligonucleotide
aactcaaggacgtgtttctaattgggcacagatcaaatactactggatatatgac

SEQ ID NO: 302235 - DNA, 55 bp, Artificial
  Synthetic oligonucleotide
aactcaagggttgagttcggtttgcatcttttgccgtgatgaaagatgaggtagc

SEQ ID NO: 302236 - DNA, 54 bp, Artificial
  Synthetic oligonucleotide
aactcaagttggaacttaagtgtcactataagttaatacttgagttcgaactta

SEQ ID NO: 302237 - DNA, 60 bp, Artificial
  Synthetic oligonucleotide
aactcaatattcattgtgcgaggtcgtgatggggatgatctagtggatgctcgtgaattt

SEQ ID NO: 302238 - DNA, 55 bp, Artificial
  Synthetic oligonucleotide
aactcaatcgagcgtaggagtcacctacgggtactccactggagaggaccacgtt

SEQ ID NO: 302239 - DNA, 60 bp, Artificial
  Synthetic oligonucleotide
aactcaatcggctatatgcagtaagtaagagggatgcatattggtccaactatgctcacc

SEQ ID NO: 302240 - DNA, 57 bp, Artificial
  Synthetic oligonucleotide
aactcaatcgggtgggagcatgcctcagaaagcttggggcccctccattgagagcgt

SEQ ID NO: 302241 - DNA, 55 bp, Artificial
  Synthetic oligonucleotide
aactcaatgcgcacagcaggtagaaccgccactatcacttatgatctatccagac

SEQ ID NO: 302242 - DNA, 56 bp, Artificial
  Synthetic oligonucleotide
aactcaatggttcaattctcgaatgctgagaacttttggaagggtttggatggtaa

SEQ ID NO: 302243 - DNA, 57 bp, Artificial
  Synthetic oligonucleotide
aactcaatgtaccagggccccataccaaaaattgacattgatgccagtaaagctttg

SEQ ID NO: 302244 - DNA, 60 bp, Artificial
  Synthetic oligonucleotide
aactcacaaatgccgctgagagattcgagaccatataccccaggcatagggctagtgata

SEQ ID NO: 302245 - DNA, 60 bp, Artificial
  Synthetic oligonucleotide
aactcacaagcgaagcgcttgtgtctgtgcggatgcagtgttgtaactttcgttcatgca

SEQ ID NO: 302246 - DNA, 60 bp, Artificial
  Synthetic oligonucleotide
aactcacagagatcacaacggacacagcatacatcggtgacactctgcacttcttggatc

SEQ ID NO: 302247 - DNA, 56 bp, Artificial
  Synthetic oligonucleotide
aactcaccctggaggttgtggccttccgtacactgatgacaacggtagagttactg

SEQ ID NO: 302248 - DNA, 52 bp, Artificial
  Synthetic oligonucleotide
aactcaccgataaggttgacgggacgaaccctaacggagctaccgtagaaga

SEQ ID NO: 302249 - DNA, 50 bp, Artificial
  Synthetic oligonucleotide
aactcaccgatacgaacatagccacgcttagtagcataacgttttgcagt

SEQ ID NO: 302250 - DNA, 56 bp, Artificial
  Synthetic oligonucleotide
aactcacgaaccaatcacgagctgggacgggtacacgaatatctcggcttccccca

SEQ ID NO: 302251 - DNA, 59 bp, Artificial
  Synthetic oligonucleotide
aactcacgactacagcctctagagagcagtcaaacgccgaagtccctagtggctttgta

SEQ ID NO: 302252 - DNA, 57 bp, Artificial
  Synthetic oligonucleotide
aactcacgataatcgtacttcactggtgtatcacaataacactaaacgcataaggtt

SEQ ID NO: 302253 - DNA, 51 bp, Artificial
  Synthetic oligonucleotide
aactcacgatcgatgagggcggacttaccgcgtcgagactgccaccgtcta

SEQ ID NO: 302254 - DNA, 60 bp, Artificial
  Synthetic oligonucleotide
aactcacggtctggggcattaagcagctccaggcaagagtcctggctatcgaaagatacc

SEQ ID NO: 302255 - DNA, 59 bp, Artificial
  Synthetic oligonucleotide
aactcagaatatcaagccgtttggcgcgtaatcttaactcaggcgactcggttgctctc

SEQ ID NO: 302256 - DNA, 50 bp, Artificial
  Synthetic oligonucleotide
aactcagacctacctacagtgttagccaccttggcactgcttgggtgtag

SEQ ID NO: 302257 - DNA, 60 bp, Artificial
  Synthetic oligonucleotide
aactcagacttcgcaaacatttacaataaggttctgaataagcgcatctctaatacgcta

SEQ ID NO: 302258 - DNA, 53 bp, Artificial
  Synthetic oligonucleotide
aactcagagtatgaagaggatgtagctgagttagatgagggtattgagtacct

SEQ ID NO: 302259 - DNA, 54 bp, Artificial
  Synthetic oligonucleotide
aactcagatatcttgacttatgactccggtctaactggtcatgacactagtgca

SEQ ID NO: 302260 - DNA, 60 bp, Artificial
  Synthetic oligonucleotide
aactcagatctcgtcccgcatgatgacaggcttggtcaattatttcaagcgtttctgccc

SEQ ID NO: 302261 - DNA, 55 bp, Artificial
  Synthetic oligonucleotide
aactcagcaaatcatacacgaacaacaaggggaaagaagtgcttgtactttgggg

SEQ ID NO: 302262 - DNA, 55 bp, Artificial
  Synthetic oligonucleotide
aactcagccatttcaacgtttattacatttcctagcctcggtaagaccgagccta

SEQ ID NO: 302263 - DNA, 57 bp, Artificial
  Synthetic oligonucleotide
aactcagccatttcgactttcatcagttatcccagcctcggtaagtccgagcctaac

SEQ ID NO: 302264 - DNA, 60 bp, Artificial
  Synthetic oligonucleotide
aactcagcgactatgaggggaggctaatccagaacagcataacaatagagagaatggttc

SEQ ID NO: 302265 - DNA, 60 bp, Artificial
  Synthetic oligonucleotide
aactcagctgtgagtggtactgtggctcgtgtcagccttaacatgaccactgggcccact

SEQ ID NO: 302266 - DNA, 58 bp, Artificial
  Synthetic oligonucleotide
aactcaggcgactcggttgctctcgttcttcgtcccacgtacacgacaggcacagagg

SEQ ID NO: 302267 - DNA, 59 bp, Artificial
  Synthetic oligonucleotide
aactcaggtacaaaagcgatggtcaagtaatcgatccatacgagagccacagaggtaaa

SEQ ID NO: 302268 - DNA, 57 bp, Artificial
  Synthetic oligonucleotide
aactcagtaaccttattcgtattggagtgcgatagagaaaaattagcggatacacac

SEQ ID NO: 302269 - DNA, 60 bp, Artificial
  Synthetic oligonucleotide
aactcagtcactatctatatcagttgagagttctacatatcagaacaactttgttccagt

SEQ ID NO: 302270 - DNA, 59 bp, Artificial
  Synthetic oligonucleotide
aactcagtcgagcgttggggtcacatacgggtacgcaacaactgaggatagcacgtcag

SEQ ID NO: 302271 - DNA, 55 bp, Artificial
  Synthetic oligonucleotide
aactcagtggtttattcgttctgactatcttattagacagaaaaccctatctacc

SEQ ID NO: 302272 - DNA, 57 bp, Artificial
  Synthetic oligonucleotide
aactcagtttggactccagtatctacaaataagattaggggatggtgcgttgagtgt

SEQ ID NO: 302273 - DNA, 60 bp, Artificial
  Synthetic oligonucleotide
aactcagtttttgccatcacaagaccttctggactagagtagcgcctagctggcaaaata

SEQ ID NO: 302274 - DNA, 55 bp, Artificial
  Synthetic oligonucleotide
aactcatacacccacagacattaaaacgtaagaagaaaatcagtggaccgtagtg

SEQ ID NO: 302275 - DNA, 60 bp, Artificial
  Synthetic oligonucleotide
aactcatattccacataactcatctcaaggcagtgactttgagttctgtgtggcatcatt

SEQ ID NO: 302276 - DNA, 60 bp, Artificial
  Synthetic oligonucleotide
aactcatccggagactcaatggcacggccctcgagtctggtggagtcgctagaggaggaa

SEQ ID NO: 302277 - DNA, 55 bp, Artificial
  Synthetic oligonucleotide
aactcatcgacgaccggcccgacttctgacctcctgattccatcgaccccgccac

SEQ ID NO: 302278 - DNA, 55 bp, Artificial
  Synthetic oligonucleotide
aactcatgagcaagccttgggacgccatcaccagtgtcaccactatggccatgac

SEQ ID NO: 302279 - DNA, 50 bp, Artificial
  Synthetic oligonucleotide
aactcatggcgctcccgaagattccttccaacgaatcgctcactactgga

SEQ ID NO: 302280 - DNA, 51 bp, Artificial
  Synthetic oligonucleotide
aactcatggtcgaatttgggtaatcactcaggacgaacatgatattccatc

SEQ ID NO: 302281 - DNA, 55 bp, Artificial
  Synthetic oligonucleotide
aactcattatagagtagacatagtgattgacgatggggcccgaagagcacccgga

SEQ ID NO: 302282 - DNA, 55 bp, Artificial
  Synthetic oligonucleotide
aactcattcgtgccttgaatgaaggtattactaagtttagaaccgagaagagaaa

SEQ ID NO: 302283 - DNA, 50 bp, Artificial
  Synthetic oligonucleotide
aactcatttgccgcgccaggattttcgcagcgcgatgggatgctactgcg

SEQ ID NO: 302284 - DNA, 56 bp, Artificial
  Synthetic oligonucleotide
aactcattttaccggagcatgagatggctaactcacaagagtaattcctacccttt

SEQ ID NO: 302285 - DNA, 59 bp, Artificial
  Synthetic oligonucleotide
aactcattttgttaagtatgatggaagcatgcacccagaaatccacaaactcctcaaac

SEQ ID NO: 302286 - DNA, 59 bp, Artificial
  Synthetic oligonucleotide
aactccaaatcgcaggtcaatagacagatcatagttgacaacaacaattggtccggtta

SEQ ID NO: 302287 - DNA, 55 bp, Artificial
  Synthetic oligonucleotide
aactccaagtgcttggctctcaagaaatcacctacaagttttggtctaaacccca

SEQ ID NO: 302288 - DNA, 60 bp, Artificial
  Synthetic oligonucleotide
aactccacagacacagtgaacactctcatagaacagaatgtgccagtcacccaaacaatg

SEQ ID NO: 302289 - DNA, 54 bp, Artificial
  Synthetic oligonucleotide
aactccagaagtcgatgcttatcgtttctctaaaattgctacggacgctattac

SEQ ID NO: 302290 - DNA, 60 bp, Artificial
  Synthetic oligonucleotide
aactccaggtgcaatcgcacttgaagtggatacatcctgctcccaaacaacaacaggctc

SEQ ID NO: 302291 - DNA, 60 bp, Artificial
  Synthetic oligonucleotide
aactccatagcaaatctagcgctaattaagactgtcttatcacgtatctctaacaaatac

SEQ ID NO: 302292 - DNA, 55 bp, Artificial
  Synthetic oligonucleotide
aactccatcaccaaatatggctgaaattgacttaaaagttgtcgcatataaaaat

SEQ ID NO: 302293 - DNA, 55 bp, Artificial
  Synthetic oligonucleotide
aactccatcccgagtagatcacatcaagggctagtcttctacagccacatatgtc

SEQ ID NO: 302294 - DNA, 60 bp, Artificial
  Synthetic oligonucleotide
aactccatgagaccagtggctgatgataacattgatcactcaagccatactccaagcgga

SEQ ID NO: 302295 - DNA, 54 bp, Artificial
  Synthetic oligonucleotide
aactccccctttaatttgaactggcttcccgtatttgcaatttgattgccagtc

SEQ ID NO: 302296 - DNA, 55 bp, Artificial
  Synthetic oligonucleotide
aactcccgcatcgaaggtacgtcgacgtctgaacttcgacagcccatatgtatcc

SEQ ID NO: 302297 - DNA, 55 bp, Artificial
  Synthetic oligonucleotide
aactcccgggcttggccgtccaccgcaagaaggccggagcactgcgcacgcgcat

SEQ ID NO: 302298 - DNA, 56 bp, Artificial
  Synthetic oligonucleotide
aactccctgctttaccgctcattaagctcaacccagaagagcttaccagcaaaaac

SEQ ID NO: 302299 - DNA, 57 bp, Artificial
  Synthetic oligonucleotide
aactcccttacaagcgtgaaccgcttgattggcatgaagtaggtggttttctcaggc

SEQ ID NO: 302300 - DNA, 57 bp, Artificial
  Synthetic oligonucleotide
aactccgaccaaaatattcagcaacccaatgttgcatatcctcaggaacgttgttaa

SEQ ID NO: 302301 - DNA, 55 bp, Artificial
  Synthetic oligonucleotide
aactccgagggtgcgcaaagtcaagacacgccccataacaaagttgacggaaagc

SEQ ID NO: 302302 - DNA, 60 bp, Artificial
  Synthetic oligonucleotide
aactccgattggtctactccatgctctgggtcatggttacgagacatctgggactgggtg

SEQ ID NO: 302303 - DNA, 55 bp, Artificial
  Synthetic oligonucleotide
aactccgccctggcgaatgctgtggtggttcggccgtttttatctcgtgtccaaa

SEQ ID NO: 302304 - DNA, 59 bp, Artificial
  Synthetic oligonucleotide
aactccgcgctcgatagtagcggctctgtacctgtcgtttcggtttctgatgagaggcc

SEQ ID NO: 302305 - DNA, 60 bp, Artificial
  Synthetic oligonucleotide
aactccgctacaagctcgtcagtgtatcagcaggctatcactaataccactggtgattgg

SEQ ID NO: 302306 - DNA, 55 bp, Artificial
  Synthetic oligonucleotide
aactccgcttcagatgaactaggttttagttcaatgcctaagttgcaatttgggc

SEQ ID NO: 302307 - DNA, 54 bp, Artificial
  Synthetic oligonucleotide
aactccggtatacaaacatctgaaaccccggcagttccggtcaccagctcaaaa

SEQ ID NO: 302308 - DNA, 54 bp, Artificial
  Synthetic oligonucleotide
aactccgtaaacaagtgcataatcgagaggccgtcgtggacaacctctttttaa

SEQ ID NO: 302309 - DNA, 55 bp, Artificial
  Synthetic oligonucleotide
aactcctacaggtgacttgggggatacggacggagagaactcccagccggagaca

SEQ ID NO: 302310 - DNA, 56 bp, Artificial
  Synthetic oligonucleotide
aactcctaccgatattggctcgtctcaccttcaaccggttacagaagatgttggag

SEQ ID NO: 302311 - DNA, 60 bp, Artificial
  Synthetic oligonucleotide
aactcctcattgtgcattgatggactgcattatgtttgatgcagcagtctcgggagggct

SEQ ID NO: 302312 - DNA, 60 bp, Artificial
  Synthetic oligonucleotide
aactcctctccagctaaagtctctgctaacctcctcatgatgaacccacacatcaaagac

SEQ ID NO: 302313 - DNA, 58 bp, Artificial
  Synthetic oligonucleotide
aactcctctcctggcccacaatccaatccaaactgcatctccgcttcaagaccgaaac

SEQ ID NO: 302314 - DNA, 59 bp, Artificial
  Synthetic oligonucleotide
aactcctcttggtcagctggttctaatggatttacattcacactgtcaaatttcatctt

SEQ ID NO: 302315 - DNA, 55 bp, Artificial
  Synthetic oligonucleotide
aactcctgatccccaaggtctgggttcctcctgaggacccattggcaagccctag

SEQ ID NO: 302316 - DNA, 55 bp, Artificial
  Synthetic oligonucleotide
aactcctgatccctaaggtctgggtgccacctgaggaccccctggccagccctag

SEQ ID NO: 302317 - DNA, 55 bp, Artificial
  Synthetic oligonucleotide
aactcctgccccgagaataaccaaatccgtgccaacctcttcagagaagttacca

SEQ ID NO: 302318 - DNA, 53 bp, Artificial
  Synthetic oligonucleotide
aactcctgctacaggggttaagttcccgcttcatccgaaaccatgactaaccc

SEQ ID NO: 302319 - DNA, 58 bp, Artificial
  Synthetic oligonucleotide
aactccttcagaagtgggatcaagacatcgacaagttgaaacgaaaggtctgtcacga

SEQ ID NO: 302320 - DNA, 56 bp, Artificial
  Synthetic oligonucleotide
aactccttgagcagacactaccgatcaaccctccaaagaacgaggacccagacctc

SEQ ID NO: 302321 - DNA, 55 bp, Artificial
  Synthetic oligonucleotide
aactccttgccgtgcgggcagcgtcccacccacggcgactgcttgtcctcgtgct

SEQ ID NO: 302322 - DNA, 60 bp, Artificial
  Synthetic oligonucleotide
aactccttgtaccacatgctattgtaaagtgtgttgctttcattgctaccgctgctttac

SEQ ID NO: 302323 - DNA, 56 bp, Artificial
  Synthetic oligonucleotide
aactccttgtaccagatgttattgtaaacggtgttgctttcattgttactcgtgct

SEQ ID NO: 302324 - DNA, 56 bp, Artificial
  Synthetic oligonucleotide
aactcgaatcaaaacttaatgcgacgcttccggcttcgggttggtctggaactgca

SEQ ID NO: 302325 - DNA, 60 bp, Artificial
  Synthetic oligonucleotide
aactcgagccgagagcagtgttcacagcaggagttccatggagggcattcatcttcgtcc

SEQ ID NO: 302326 - DNA, 55 bp, Artificial
  Synthetic oligonucleotide
aactcgagctacgaattaatggtaagcttttccgcggagtacttgatacaggggc

SEQ ID NO: 302327 - DNA, 57 bp, Artificial
  Synthetic oligonucleotide
aactcgagtattgtgtacgagacaaccgatgccatcctacacaccccggggtgcgtc

SEQ ID NO: 302328 - DNA, 56 bp, Artificial
  Synthetic oligonucleotide
aactcgcgcgggaggctctcaaccgactccttacggcgctggcaagctttcgtcgg

SEQ ID NO: 302329 - DNA, 55 bp, Artificial
  Synthetic oligonucleotide
aactcgcggggcatcaacgtcgcagaggcgaccctcgctagcgatatcggtacga

SEQ ID NO: 302330 - DNA, 60 bp, Artificial
  Synthetic oligonucleotide
aactcgctttcctatgagtacatgcattacatagctaactcagctaatgacacgtgggac

SEQ ID NO: 302331 - DNA, 60 bp, Artificial
  Synthetic oligonucleotide
aactcggaatgctacaccacgcactgagccggtctcgcctctcagggcaaccatagggag

SEQ ID NO: 302332 - DNA, 60 bp, Artificial
  Synthetic oligonucleotide
aactcggatggacgtcacacggcaaggtcatgaaaccatacgctttcagagccccagtca

SEQ ID NO: 302333 - DNA, 59 bp, Artificial
  Synthetic oligonucleotide
aactcggctcctattggcctcatctccacctttactaaggcaatctgatagtcctcaaa

SEQ ID NO: 302334 - DNA, 46 bp, Artificial
  Synthetic oligonucleotide
aactcggtccacaagacccccggggggccccaacggggcccccacg

SEQ ID NO: 302335 - DNA, 55 bp, Artificial
  Synthetic oligonucleotide
aactcggttccagatattgcgcaaaggttgaaagtactcaatggtgggacggctt

SEQ ID NO: 302336 - DNA, 58 bp, Artificial
  Synthetic oligonucleotide
aactcgtccagatccggaaggttagccaacatttgtgaagtcccagtgctctcctcag

SEQ ID NO: 302337 - DNA, 51 bp, Artificial
  Synthetic oligonucleotide
aactcgtccggcaacgtgttacaacgacctgcgcttttgtttggaaacgcg

SEQ ID NO: 302338 - DNA, 58 bp, Artificial
  Synthetic oligonucleotide
aactcgtgatgcccaacgttgtcagagcgctgtgtaaacctcgtagcccaaagtcgcc

SEQ ID NO: 302339 - DNA, 51 bp, Artificial
  Synthetic oligonucleotide
aactcgtgccctgcaattccgtcacccgatccccatgcacgctccggttac

SEQ ID NO: 302340 - DNA, 55 bp, Artificial
  Synthetic oligonucleotide
aactcgtgtcgtcgccaatgtcaattttagttgcgttagtagacataaatggtac

SEQ ID NO: 302341 - DNA, 55 bp, Artificial
  Synthetic oligonucleotide
aactcgttttccacctcggagtccgcatctgaatgccccgttcccaccgcactcc

SEQ ID NO: 302342 - DNA, 51 bp, Artificial
  Synthetic oligonucleotide
aactctaacatagcacatggggacataggtaaagattcccgggacaacata

SEQ ID NO: 302343 - DNA, 56 bp, Artificial
  Synthetic oligonucleotide
aactctaagagccgagcaagcttcacaggaggtaaaaaattggatgacagaaacct

SEQ ID NO: 302344 - DNA, 57 bp, Artificial
  Synthetic oligonucleotide
aactctaagagcctctgccttacttccagagttaattgctgcggcgtaagcgtcgtt

SEQ ID NO: 302345 - DNA, 55 bp, Artificial
  Synthetic oligonucleotide
aactctaccgcagatggtatagcggtaaattgaccgagctcgttacggataacgg

SEQ ID NO: 302346 - DNA, 59 bp, Artificial
  Synthetic oligonucleotide
aactctacctgatttgaaagatccagagagagtcacggaagataccaagaagctaatac

SEQ ID NO: 302347 - DNA, 60 bp, Artificial
  Synthetic oligonucleotide
aactctactactcagatcgtcgtcagtgcgaattgatcaattcgtttaattgcgtagagt

SEQ ID NO: 302348 - DNA, 60 bp, Artificial
  Synthetic oligonucleotide
aactctactgctctcatagtctgagcatgacttagtgattcccctgtgcgtgaatccatg

SEQ ID NO: 302349 - DNA, 54 bp, Artificial
  Synthetic oligonucleotide
aactctagcggggtgggtggtacagcaaccttacccgccgtctctacgtgtgcc

SEQ ID NO: 302350 - DNA, 60 bp, Artificial
  Synthetic oligonucleotide
aactctagctaggagcatttgtgagaagcttgaacagtctggacttccagttggaggtaa

SEQ ID NO: 302351 - DNA, 55 bp, Artificial
  Synthetic oligonucleotide
aactctaggctttccggatggcttctaattatccgaggcccgtacgtgggctcga

SEQ ID NO: 302352 - DNA, 59 bp, Artificial
  Synthetic oligonucleotide
aactctatacaacagggcctactataggagtaaatacgaaacacgatgaactgtgcaca

SEQ ID NO: 302353 - DNA, 58 bp, Artificial
  Synthetic oligonucleotide
aactctatcataccagtgtaactatggcgcgcccaaacgcccgctcgccaaattagtc

SEQ ID NO: 302354 - DNA, 59 bp, Artificial
  Synthetic oligonucleotide
aactctcaacactcgacccgctctatgcagatcgtaaccgaagagttgtgttcgtacat

SEQ ID NO: 302355 - DNA, 57 bp, Artificial
  Synthetic oligonucleotide
aactctcaagcattacttgcctgtaagctctcgtaaattccctatttgggcaacatt

SEQ ID NO: 302356 - DNA, 54 bp, Artificial
  Synthetic oligonucleotide
aactctcagccggccttcctatgtacactgtgccccgtcgcggtgttaacacct

SEQ ID NO: 302357 - DNA, 60 bp, Artificial
  Synthetic oligonucleotide
aactctccaaacattgaggcatgtggatatagtgacagagtcatgcaactcacccttgga

SEQ ID NO: 302358 - DNA, 53 bp, Artificial
  Synthetic oligonucleotide
aactctccaaatttggaggtttactataccacatagattttaatccgcccctc

SEQ ID NO: 302359 - DNA, 58 bp, Artificial
  Synthetic oligonucleotide
aactctccccattcgatggtgtctccgtccttatcgatgtaggacttgacgtcggagc

SEQ ID NO: 302360 - DNA, 52 bp, Artificial
  Synthetic oligonucleotide
aactctccccttcaatccttccctcttcgctgaatgcatagctctcaacgac

SEQ ID NO: 302361 - DNA, 55 bp, Artificial
  Synthetic oligonucleotide
aactctcctacaaactcagttaactcaataatatgccttctttcagtgctaaccc

SEQ ID NO: 302362 - DNA, 55 bp, Artificial
  Synthetic oligonucleotide
aactctcgtactataaggagacagtttagaagaagtctgtctcaatctttagagg

SEQ ID NO: 302363 - DNA, 51 bp, Artificial
  Synthetic oligonucleotide
aactctcgttcctagcctcccggcgacagataagactccgttcgtagttct

SEQ ID NO: 302364 - DNA, 60 bp, Artificial
  Synthetic oligonucleotide
aactctctcaattctgagatagtctcatccattgcgcatcaaaaagcctaggatcctcgg

SEQ ID NO: 302365 - DNA, 55 bp, Artificial
  Synthetic oligonucleotide
aactctgacgttgcgacgttcttcctatccgttaagaagaggctacgcttcatgg

SEQ ID NO: 302366 - DNA, 60 bp, Artificial
  Synthetic oligonucleotide
aactctgactcgaatgacttctaccttgtagcgaactatgattggattccaacgtctaca

SEQ ID NO: 302367 - DNA, 55 bp, Artificial
  Synthetic oligonucleotide
aactctgagcgaatttggtgcccttgaatgtttgcaatttgaatctttgcaagag

SEQ ID NO: 302368 - DNA, 58 bp, Artificial
  Synthetic oligonucleotide
aactctgaggagtatgacgagagtctacgacacggggtggaatatgcggagtacgact

SEQ ID NO: 302369 - DNA, 55 bp, Artificial
  Synthetic oligonucleotide
aactctgccaagactgcattagaagttgatttgacaccacataacccactcaagg

SEQ ID NO: 302370 - DNA, 60 bp, Artificial
  Synthetic oligonucleotide
aactctgcttaatatatggagtacgaaagagatacacagtcaggtgtttccagcgtgatg

SEQ ID NO: 302371 - DNA, 55 bp, Artificial
  Synthetic oligonucleotide
aactctgtagtggtaacactacgcctataatacatttaaaaggtgacagaaacag

SEQ ID NO: 302372 - DNA, 60 bp, Artificial
  Synthetic oligonucleotide
aactctgtcgtcctctctcggaagtacacctccttcccatggctgctaggttgtgctgcc

SEQ ID NO: 302373 - DNA, 59 bp, Artificial
  Synthetic oligonucleotide
aactctgtctcaaggtctgaagaaatactatggtaaaatactgaagcttctgcacctta

SEQ ID NO: 302374 - DNA, 53 bp, Artificial
  Synthetic oligonucleotide
aactctgttgaaatcactaacggtcgctccgaccctattggtccccttattac

SEQ ID NO: 302375 - DNA, 52 bp, Artificial
  Synthetic oligonucleotide
aactcttacaagagttgaagttgcctttgagagttactccttgctctcttcg

SEQ ID NO: 302376 - DNA, 53 bp, Artificial
  Synthetic oligonucleotide
aactcttacagacctatccggtcctgtggaatttcgtatgggtaggcaacacc

SEQ ID NO: 302377 - DNA, 55 bp, Artificial
  Synthetic oligonucleotide
aactcttagaagcacttgcacacagacgaataggcagccaacactccacgttggt

SEQ ID NO: 302378 - DNA, 60 bp, Artificial
  Synthetic oligonucleotide
aactcttatagatagtgaagtcgagtcattcctagtccacaagatggtggatgatctaga

SEQ ID NO: 302379 - DNA, 55 bp, Artificial
  Synthetic oligonucleotide
aactcttcaatgagcctttgaattctataacctctggagccatctagccagtcct

SEQ ID NO: 302380 - DNA, 51 bp, Artificial
  Synthetic oligonucleotide
aactcttcatacgtgctagcctcacccgtgcgttgatggtagtagtctcca

SEQ ID NO: 302381 - DNA, 54 bp, Artificial
  Synthetic oligonucleotide
aactcttgagacacttccaaaaggatgcaaaagtgcttttccaaaactggggag

SEQ ID NO: 302382 - DNA, 53 bp, Artificial
  Synthetic oligonucleotide
aactcttgttcctgcagaggaactggagataacggaaactgtaatgccaaact

SEQ ID NO: 302383 - DNA, 60 bp, Artificial
  Synthetic oligonucleotide
aactctttaaagtgcttgaggaagtgcggatctacgtcatcaatgacgttataccatgcg

SEQ ID NO: 302384 - DNA, 58 bp, Artificial
  Synthetic oligonucleotide
aactctttataggaggatgtcggaccaggattgcagaggaagattgttgggatcccgc

SEQ ID NO: 302385 - DNA, 60 bp, Artificial
  Synthetic oligonucleotide
aactgaaaaagcgaagttgaattcatatgcgcctgtctccttagagaagcgtcgtgctca

SEQ ID NO: 302386 - DNA, 60 bp, Artificial
  Synthetic oligonucleotide
aactgaaagaaaggcaggatgtattttgtgactcaaaactcatgtcagcagccataaaag

SEQ ID NO: 302387 - DNA, 58 bp, Artificial
  Synthetic oligonucleotide
aactgaaagcaagagggataccatttagttagagacaggaacagctatatttggccag

SEQ ID NO: 302388 - DNA, 60 bp, Artificial
  Synthetic oligonucleotide
aactgaaagcatgaattttgccaggagcccagaaattgcggcaaggcctgctgtgaatgg

SEQ ID NO: 302389 - DNA, 54 bp, Artificial
  Synthetic oligonucleotide
aactgaactgcaagtgaaaccggggaagtcaactacttactattatgaagggga

SEQ ID NO: 302390 - DNA, 60 bp, Artificial
  Synthetic oligonucleotide
aactgaagatacacatagcgggatcataatttacgatacggactttccatatgctaagtg

SEQ ID NO: 302391 - DNA, 60 bp, Artificial
  Synthetic oligonucleotide
aactgaagctgtgcggagttcttggacttagacttatggatggaacatgggtcgcgattc

SEQ ID NO: 302392 - DNA, 57 bp, Artificial
  Synthetic oligonucleotide
aactgaaggatttatatctctgtcgaccgccacctacacggtagcttcttactttga

SEQ ID NO: 302393 - DNA, 52 bp, Artificial
  Synthetic oligonucleotide
aactgacaaacaagttaatgtaacttttgaaggttctaatggcacgccactc

SEQ ID NO: 302394 - DNA, 58 bp, Artificial
  Synthetic oligonucleotide
aactgacaaactcgaaagactctggctctggacgctcgaaaatttattcgaagctcca

SEQ ID NO: 302395 - DNA, 57 bp, Artificial
  Synthetic oligonucleotide
aactgacatccccaccaccggtgtctgtgagcctgaccgtgggagttccaggggctc

SEQ ID NO: 302396 - DNA, 54 bp, Artificial
  Synthetic oligonucleotide
aactgaccaagctccttcattaattcctatagttccagggtctccacaatatac

SEQ ID NO: 302397 - DNA, 55 bp, Artificial
  Synthetic oligonucleotide
aactgaccacccacaagtgcacaacttggttcattaacgggaaacaattgacgat

SEQ ID NO: 302398 - DNA, 57 bp, Artificial
  Synthetic oligonucleotide
aactgaccctgatataacagcactgaacattatacaatcaagaagtgcacaatgtgc

SEQ ID NO: 302399 - DNA, 50 bp, Artificial
  Synthetic oligonucleotide
aactgaccctttcaagcatgaccgaatccctaaaccgttttcatggggtt

SEQ ID NO: 302400 - DNA, 58 bp, Artificial
  Synthetic oligonucleotide
aactgacgcgaccttagggcaagaccttatgataggcgcggagaatcaccccaagagc

SEQ ID NO: 302401 - DNA, 55 bp, Artificial
  Synthetic oligonucleotide
aactgacgtatatagaacacccacagttcagatcaatcctccgcctgcgaggtgc

SEQ ID NO: 302402 - DNA, 56 bp, Artificial
  Synthetic oligonucleotide
aactgactatctactacctggatggaaattaacgtatgtaggatataatgggaaaa

SEQ ID NO: 302403 - DNA, 60 bp, Artificial
  Synthetic oligonucleotide
aactgactcccgtactgccatttcaatggccctgccatacgtgtttatgccgtgtcgcac

SEQ ID NO: 302404 - DNA, 50 bp, Artificial
  Synthetic oligonucleotide
aactgactgaaactacctcgaccgaccttagaacccaagaaccctacggg

SEQ ID NO: 302405 - DNA, 55 bp, Artificial
  Synthetic oligonucleotide
aactgagagagagccgcggtgatgcgtgggcgcccaatgggtatacgcgcacaac

SEQ ID NO: 302406 - DNA, 59 bp, Artificial
  Synthetic oligonucleotide
aactgagcagaaaacgtgactgtgtgagttctaatcggagtcacatgtcactgcgtagg

SEQ ID NO: 302407 - DNA, 52 bp, Artificial
  Synthetic oligonucleotide
aactgagctcaattctagcccaccaaatcacaaccatggagaggctagaggg

SEQ ID NO: 302408 - DNA, 57 bp, Artificial
  Synthetic oligonucleotide
aactgaggagaccttccaaccggggagatggtttatgcgcgccgctcaagcggtgac

SEQ ID NO: 302409 - DNA, 60 bp, Artificial
  Synthetic oligonucleotide
aactgaggagactttccaacctggaagatggttcatgcgcgccgctcaagcggtagctgc

SEQ ID NO: 302410 - DNA, 57 bp, Artificial
  Synthetic oligonucleotide
aactgaggcagcaaatgaaatcgcacgtgttacgggtgaaacttcaacatggggccc

SEQ ID NO: 302411 - DNA, 55 bp, Artificial
  Synthetic oligonucleotide
aactgaggtcataggggtgacaactttaatgaatgtgcactctaatggtcaagca

SEQ ID NO: 302412 - DNA, 58 bp, Artificial
  Synthetic oligonucleotide
aactgagtccaaggctagacgccataaagctggggagacagtcagcaaaggccaaacg

SEQ ID NO: 302413 - DNA, 60 bp, Artificial
  Synthetic oligonucleotide
aactgatattaaacctgtcgtgactgacaccctgcatatagaacgggccatagctgctac

SEQ ID NO: 302414 - DNA, 52 bp, Artificial
  Synthetic oligonucleotide
aactgatctaaatacaacaagacataatgtttgaatctatttaaatatgtcg

SEQ ID NO: 302415 - DNA, 60 bp, Artificial
  Synthetic oligonucleotide
aactgatgaagatctttatacggatgtaatgtgctatgtccttgggagtcagcatctgtg

SEQ ID NO: 302416 - DNA, 55 bp, Artificial
  Synthetic oligonucleotide
aactgatgacatcgagatttctacagggggactttccgctggggactttccaggg

SEQ ID NO: 302417 - DNA, 54 bp, Artificial
  Synthetic oligonucleotide
aactgatgagacagagtatggtgtcaagactgactccggatgtccagatggtgc

SEQ ID NO: 302418 - DNA, 59 bp, Artificial
  Synthetic oligonucleotide
aactgatgctgaagaaccacggaaagcatttcaactggttgaattagctaaagaggcga

SEQ ID NO: 302419 - DNA, 57 bp, Artificial
  Synthetic oligonucleotide
aactgatggtgactggtttcacaactggaagaatccaaagtttcctggtgtgttaga

SEQ ID NO: 302420 - DNA, 56 bp, Artificial
  Synthetic oligonucleotide
aactgatgtcagaagtctcgttctcgataagacctatagctgatggtgacactaac

SEQ ID NO: 302421 - DNA, 53 bp, Artificial
  Synthetic oligonucleotide
aactgattacaactactgtttcaatttcccaaaacccattgtagagggatttg

SEQ ID NO: 302422 - DNA, 56 bp, Artificial
  Synthetic oligonucleotide
aactgattgcgttactaggcaacgacgagcattcttttatatcctaccccgtgtat

SEQ ID NO: 302423 - DNA, 55 bp, Artificial
  Synthetic oligonucleotide
aactgattggatctactgaactcttagtgacctttgaactcttgaatgccttgga

SEQ ID NO: 302424 - DNA, 55 bp, Artificial
  Synthetic oligonucleotide
aactgattggttgggctaaactccctatccgtagtcagacaactatcgacaagtg

SEQ ID NO: 302425 - DNA, 57 bp, Artificial
  Synthetic oligonucleotide
aactgcaaacatggcggatcctaaaggtagtacatctaaagacgggttggatgattg

SEQ ID NO: 302426 - DNA, 59 bp, Artificial
  Synthetic oligonucleotide
aactgcaaatcgactatcccggacatgaggtaatgacagccgcggcctcacaagggcta

SEQ ID NO: 302427 - DNA, 50 bp, Artificial
  Synthetic oligonucleotide
aactgcaatgcgaagggatgacacagtcgtacgcgctacataagtctaat

SEQ ID NO: 302428 - DNA, 60 bp, Artificial
  Synthetic oligonucleotide
aactgcacacctcagcacatgcaggctgtgatgtactacctgctcacacgccgatggacg

SEQ ID NO: 302429 - DNA, 60 bp, Artificial
  Synthetic oligonucleotide
aactgcacactgatagatgctctattgggagaccctcattgtgatggcttccaaaatgag

SEQ ID NO: 302430 - DNA, 53 bp, Artificial
  Synthetic oligonucleotide
aactgcacagtacaacccaacaaaaatgttagggtgtggcaagacaagagggg

SEQ ID NO: 302431 - DNA, 60 bp, Artificial
  Synthetic oligonucleotide
aactgcacccgtcaacacatgcaggcggctatgtactacatcctcactagagggtggtca

SEQ ID NO: 302432 - DNA, 60 bp, Artificial
  Synthetic oligonucleotide
aactgcacgcgtcaacacatgcaggccgccatgtactacatcctcaccagaggatggtcc

SEQ ID NO: 302433 - DNA, 60 bp, Artificial
  Synthetic oligonucleotide
aactgcactcgccaacacatgcaagccgcaatgtactacatcctcactagagggtggtcc

SEQ ID NO: 302434 - DNA, 57 bp, Artificial
  Synthetic oligonucleotide
aactgcagaacgtaatcttttggtgctaattcctttatcactttcaacgcatcttct

SEQ ID NO: 302435 - DNA, 55 bp, Artificial
  Synthetic oligonucleotide
aactgcagacggcgctcccgtgatcgcgacccgcgtcagcaaacgctacatggag

SEQ ID NO: 302436 - DNA, 59 bp, Artificial
  Synthetic oligonucleotide
aactgcagattggtatactattggagtttatgtgataggctttacactccctattatct

SEQ ID NO: 302437 - DNA, 58 bp, Artificial
  Synthetic oligonucleotide
aactgcaggcaaaaactggcaatacacatacactcctttaatgagcaaagtataccac

SEQ ID NO: 302438 - DNA, 51 bp, Artificial
  Synthetic oligonucleotide
aactgcaggcccctacacgcaactagggagcggcatggaaagcttctcgcc

SEQ ID NO: 302439 - DNA, 59 bp, Artificial
  Synthetic oligonucleotide
aactgcagtatataagttacaaccacgacaatttgattttacacagtctctatttcagc

SEQ ID NO: 302440 - DNA, 51 bp, Artificial
  Synthetic oligonucleotide
aactgcagttgttgggtcagcattctggcgatgcaactattgtccaaggtc

SEQ ID NO: 302441 - DNA, 60 bp, Artificial
  Synthetic oligonucleotide
aactgcataagacgtagctgcaaactcggatacctctgataagatataacatacgaatac

SEQ ID NO: 302442 - DNA, 59 bp, Artificial
  Synthetic oligonucleotide
aactgcatctagagaggcggtgaggaagctacgaagcgtatatcgggtatttatagact

SEQ ID NO: 302443 - DNA, 60 bp, Artificial
  Synthetic oligonucleotide
aactgcattagctaatactatagaggtcttcagatcgaacggtttggcggccaatgaatc

SEQ ID NO: 302444 - DNA, 55 bp, Artificial
  Synthetic oligonucleotide
aactgcattatatgtagctgggttacctgaattgggtgccttctttgcgattttg

SEQ ID NO: 302445 - DNA, 55 bp, Artificial
  Synthetic oligonucleotide
aactgccaatctttggggttatagacacgccttgctggatagtaaaagcagcccc

SEQ ID NO: 302446 - DNA, 57 bp, Artificial
  Synthetic oligonucleotide
aactgccaatttgccgactccgccaccccttacaccatggtctatcgacctagtcac

SEQ ID NO: 302447 - DNA, 54 bp, Artificial
  Synthetic oligonucleotide
aactgccagggggcgggctcgagccttcgggcgagtccgcccttggacggctta

SEQ ID NO: 302448 - DNA, 55 bp, Artificial
  Synthetic oligonucleotide
aactgccataggtcaagtgtcaaggcctatgttcctatatgtgaggacaaatggg

SEQ ID NO: 302449 - DNA, 55 bp, Artificial
  Synthetic oligonucleotide
aactgcccaaaatatattggggtaaagagtctcaaattagcagttggtctgagga

SEQ ID NO: 302450 - DNA, 55 bp, Artificial
  Synthetic oligonucleotide
aactgcccgaaaattcgcgcaccgttatctcgcgaattactatcacatggtgcgg

SEQ ID NO: 302451 - DNA, 55 bp, Artificial
  Synthetic oligonucleotide
aactgcccgagcttcccatagggtgggttagagtcgtgtgcgtacgccacttagt

SEQ ID NO: 302452 - DNA, 55 bp, Artificial
  Synthetic oligonucleotide
aactgcccggtacagaccgtaatcgtcataccctcactttaagcaacttaagaga

SEQ ID NO: 302453 - DNA, 50 bp, Artificial
  Synthetic oligonucleotide
aactgccgagagaggcccctttactcgacagcgactaccggccgttcgaa

SEQ ID NO: 302454 - DNA, 54 bp, Artificial
  Synthetic oligonucleotide
aactgccgagtttggagagcactccgggccgtacggtcgagtgttccccagagg

SEQ ID NO: 302455 - DNA, 55 bp, Artificial
  Synthetic oligonucleotide
aactgccgctctcgcccttggtaacgccctgatcgcccaacacgaggctactgga

SEQ ID NO: 302456 - DNA, 51 bp, Artificial
  Synthetic oligonucleotide
aactgccggatggagtgtaaatgatactataggatactcgagtatatacgt

SEQ ID NO: 302457 - DNA, 56 bp, Artificial
  Synthetic oligonucleotide
aactgccgggtaggtgttctggcgcccgccatgataggtgtgggcaacgaaacctg

SEQ ID NO: 302458 - DNA, 55 bp, Artificial
  Synthetic oligonucleotide
aactgccgggtcttgagcctcccgccagtcgtcaaaatcgagtggagtataacct

SEQ ID NO: 302459 - DNA, 51 bp, Artificial
  Synthetic oligonucleotide
aactgcctcataggaccctcaactcgtgccgcttgaaccaggcatcgacta

SEQ ID NO: 302460 - DNA, 56 bp, Artificial
  Synthetic oligonucleotide
aactgcctgaagtcactaaacgctttgcggtgaacgggttgtccatccagcttacg

SEQ ID NO: 302461 - DNA, 60 bp, Artificial
  Synthetic oligonucleotide
aactgcgacacaccaaaaaggggtgcgagcagtgtgcctccgaagcagcacaagagacct

SEQ ID NO: 302462 - DNA, 60 bp, Artificial
  Synthetic oligonucleotide
aactgcgagagatgcccgcgagagcggagcgattccagatgttttgaagtaccgagtgag

SEQ ID NO: 302463 - DNA, 60 bp, Artificial
  Synthetic oligonucleotide
aactgcgttgtttcatgacaatcaattggggcatgcggaagacaatcaagatagtgtagc

SEQ ID NO: 302464 - DNA, 55 bp, Artificial
  Synthetic oligonucleotide
aactgctagagatcttccattccatagccaaccccactctgaaacatacctatgg

SEQ ID NO: 302465 - DNA, 54 bp, Artificial
  Synthetic oligonucleotide
aactgctagctcccggaggtggtactgatacaacgctcaccggtttgggtaacg

SEQ ID NO: 302466 - DNA, 50 bp, Artificial
  Synthetic oligonucleotide
aactgctcactgagcgtagtgctctcatattccggtatgcttgcacgcca

SEQ ID NO: 302467 - DNA, 60 bp, Artificial
  Synthetic oligonucleotide
aactgctctttcaatatcaccacaagcataagagataacataaagaaagaacatgcactt

SEQ ID NO: 302468 - DNA, 53 bp, Artificial
  Synthetic oligonucleotide
aactgctgacaagggactttctacttggggactttccagcagggactttccgg

SEQ ID NO: 302469 - DNA, 60 bp, Artificial
  Synthetic oligonucleotide
aactgctgcaaggactcgaaaaacaatagcgtgttttgacttgtcctgtaatcagacagc

SEQ ID NO: 302470 - DNA, 53 bp, Artificial
  Synthetic oligonucleotide
aactgctgctaatctaatggcagctttggtgatctctgggatcgccatctgca

SEQ ID NO: 302471 - DNA, 55 bp, Artificial
  Synthetic oligonucleotide
aactgctggccttatgtcaaccattaaaacaccagtaaatcctaccacaatcaaa

SEQ ID NO: 302472 - DNA, 58 bp, Artificial
  Synthetic oligonucleotide
aactgctgtacaatgagcagtttgccgtccaaggtttgttgagataccatacttatgc

SEQ ID NO: 302473 - DNA, 59 bp, Artificial
  Synthetic oligonucleotide
aactgctgtcccagctgtagaagctctctatcggaggattacttccttggtattttgga

SEQ ID NO: 302474 - DNA, 54 bp, Artificial
  Synthetic oligonucleotide
aactgctgttcggaccaggattgcacaggaagattgtcggtatcccgcctttaa

SEQ ID NO: 302475 - DNA, 59 bp, Artificial
  Synthetic oligonucleotide
aactgcttaacccgcaaggctgcgcagttattactggcctccagaaagctaaagagcgc

SEQ ID NO: 302476 - DNA, 55 bp, Artificial
  Synthetic oligonucleotide
aactgctttcaagaggtcctcactgttgcttggcttgattaaaatggactccagc

SEQ ID NO: 302477 - DNA, 59 bp, Artificial
  Synthetic oligonucleotide
aactggaagggctctaataggcccgttatagatataaatatggcagattatagtattga

SEQ ID NO: 302478 - DNA, 56 bp, Artificial
  Synthetic oligonucleotide
aactggaagtttccttacaaagtcaaccaggcgatgagctacgaggctgtgtaccc

SEQ ID NO: 302479 - DNA, 59 bp, Artificial
  Synthetic oligonucleotide
aactggaatgtgcaatctagataccttgttggaccgcggtctggctggtggggtatgga

SEQ ID NO: 302480 - DNA, 55 bp, Artificial
  Synthetic oligonucleotide
aactggacaagagactcactcacagaggtatggtcttacaatgctgaactccttg

SEQ ID NO: 302481 - DNA, 51 bp, Artificial
  Synthetic oligonucleotide
aactggacacaccagtaatatacaacctgaggatactattgagaccagata

SEQ ID NO: 302482 - DNA, 55 bp, Artificial
  Synthetic oligonucleotide
aactggacacggggcgagcgttgcgatctgtcagacagggacaggtccgagctca

SEQ ID NO: 302483 - DNA, 57 bp, Artificial
  Synthetic oligonucleotide
aactggactgtttcaacactgactgtaggcttctccacaaaagaggcgtgcggttcg

SEQ ID NO: 302484 - DNA, 59 bp, Artificial
  Synthetic oligonucleotide
aactggagaactccgcaaagttctaaaactatgcagatgggctagcgacccagctcttc

SEQ ID NO: 302485 - DNA, 53 bp, Artificial
  Synthetic oligonucleotide
aactggagagccttagtcggactgcccgtgttaattgctgcggcgtaagcgtc

SEQ ID NO: 302486 - DNA, 60 bp, Artificial
  Synthetic oligonucleotide
aactggagatagcagacagtcggtgtaccacgagctcaatgccgaggcttacatcgccac

SEQ ID NO: 302487 - DNA, 56 bp, Artificial
  Synthetic oligonucleotide
aactggagggtgatcattggactgtctctgtgacccctgggatgtccccttctttg

SEQ ID NO: 302488 - DNA, 60 bp, Artificial
  Synthetic oligonucleotide
aactggatagcaatgattaagcgtaattttgattgtccagaactaagtggtgatgttgat

SEQ ID NO: 302489 - DNA, 60 bp, Artificial
  Synthetic oligonucleotide
aactggatcaaaggattatattgctgttcatgacagaatggggatctgatattgtcaatc

SEQ ID NO: 302490 - DNA, 60 bp, Artificial
  Synthetic oligonucleotide
aactggatcagtctactttaaagaatataccgatatcgcttcattctcaattgatccaca

SEQ ID NO: 302491 - DNA, 57 bp, Artificial
  Synthetic oligonucleotide
aactggatcctgcgcgggacgtcctttgtctacgtcccgtcagcgctgaatcccgcg

SEQ ID NO: 302492 - DNA, 60 bp, Artificial
  Synthetic oligonucleotide
aactggatctccagacaggtagatggctgtgaactcttcgtgaagctcacccaactttaa

SEQ ID NO: 302493 - DNA, 55 bp, Artificial
  Synthetic oligonucleotide
aactggatgcaatactatgactctataggacctgtagaacaatctggaggagggg

SEQ ID NO: 302494 - DNA, 56 bp, Artificial
  Synthetic oligonucleotide
aactggattcaccaaagtgtgcggagcgcccccctgtgccatcggaggggtgggta

SEQ ID NO: 302495 - DNA, 56 bp, Artificial
  Synthetic oligonucleotide
aactggatttaccaaagtgtgcggagcgcctccttgtgtcatcggaggggtgggta

SEQ ID NO: 302496 - DNA, 52 bp, Artificial
  Synthetic oligonucleotide
aactggcagcgcgcgaacgagggactcaagtcacacgagcagagccggcccc

SEQ ID NO: 302497 - DNA, 59 bp, Artificial
  Synthetic oligonucleotide
aactggccccatcccctggattgcacagcacgattgatgggatgccgcctttaatttta

SEQ ID NO: 302498 - DNA, 55 bp, Artificial
  Synthetic oligonucleotide
aactggcccctcctggtgggcgttcagcggaccatgtgccgggaaacactgtctc

SEQ ID NO: 302499 - DNA, 60 bp, Artificial
  Synthetic oligonucleotide
aactggcgagctaggactatgcatccagtacagcaattaaacgttgttaacgaatggaca

SEQ ID NO: 302500 - DNA, 57 bp, Artificial
  Synthetic oligonucleotide
aactggcttgacaacgaatcacttatttgtacccggaatgaaagaacacatccaaga

SEQ ID NO: 302501 - DNA, 50 bp, Artificial
  Synthetic oligonucleotide
aactggcttgccgtacttacaatttgactgccagtccttctggccccaga

SEQ ID NO: 302502 - DNA, 55 bp, Artificial
  Synthetic oligonucleotide
aactggcttgcgagacttacgcttgcgagatgttgtcatgtttgaatcaagcctg

SEQ ID NO: 302503 - DNA, 53 bp, Artificial
  Synthetic oligonucleotide
aactggctttgtaatccctggagacgtcaacgtacagtcaacgctgctgtcgc

SEQ ID NO: 302504 - DNA, 54 bp, Artificial
  Synthetic oligonucleotide
aactgggcaacgttcatcaaacgtttcccctcacaatccacgcgactgggacag

SEQ ID NO: 302505 - DNA, 57 bp, Artificial
  Synthetic oligonucleotide
aactgggcggagccgaaggtgccgactcctataaattcactaggttcggcacgctca

SEQ ID NO: 302506 - DNA, 51 bp, Artificial
  Synthetic oligonucleotide
aactggggctgcccaagggctgtttggtactgcctttagtatcctaggata

SEQ ID NO: 302507 - DNA, 57 bp, Artificial
  Synthetic oligonucleotide
aactgggggaacatatatactagaaccctctatagaacttttaatctcattcacaca

SEQ ID NO: 302508 - DNA, 54 bp, Artificial
  Synthetic oligonucleotide
aactggggtaacctttgagttctctcagttgggggcgtagggtcgccgacatga

SEQ ID NO: 302509 - DNA, 54 bp, Artificial
  Synthetic oligonucleotide
aactgggtacactattaaactggactaaagctgagcggcttgatacgatacgac

SEQ ID NO: 302510 - DNA, 54 bp, Artificial
  Synthetic oligonucleotide
aactgggtggtcatcttcctcccggacagccgccggaagacccctgtaagcaac

SEQ ID NO: 302511 - DNA, 51 bp, Artificial
  Synthetic oligonucleotide
aactggtaccttcaagggtgcccctgggttttgcacgcggtcccgagaggg

SEQ ID NO: 302512 - DNA, 55 bp, Artificial
  Synthetic oligonucleotide
aactggtacttatgtattgtgatgtaatagagggccgtctcatggtggaaaccac

SEQ ID NO: 302513 - DNA, 60 bp, Artificial
  Synthetic oligonucleotide
aactggtatcgcaatcaatccatcattccgttcagccctcgctaagcaaaaagacttgca

SEQ ID NO: 302514 - DNA, 53 bp, Artificial
  Synthetic oligonucleotide
aactggtcacagttgccgcggacggagatcatcccccggttaccccctttcga

SEQ ID NO: 302515 - DNA, 51 bp, Artificial
  Synthetic oligonucleotide
aactggtcacataaaagcggcgtgatacaaactatagaataatgtaaccgt

SEQ ID NO: 302516 - DNA, 60 bp, Artificial
  Synthetic oligonucleotide
aactggtcagggtactcaggagcgttcatcgattattgggctgatagagagtgctttaac

SEQ ID NO: 302517 - DNA, 55 bp, Artificial
  Synthetic oligonucleotide
aactggtcccctacaacagcgctggtagtatctcagctgctcagggtcccgcagg

SEQ ID NO: 302518 - DNA, 60 bp, Artificial
  Synthetic oligonucleotide
aactggtcgggatactcaggagcattcatagattactgggcgaacaaagaatgcttcaat

SEQ ID NO: 302519 - DNA, 55 bp, Artificial
  Synthetic oligonucleotide
aactggtctaaacctagtcactaatcaccaattaagtgaacggttagccaagata

SEQ ID NO: 302520 - DNA, 57 bp, Artificial
  Synthetic oligonucleotide
aactggtctcttcttcgcgattttgtgttggaccttgatcggtacttgagtacaatg

SEQ ID NO: 302521 - DNA, 51 bp, Artificial
  Synthetic oligonucleotide
aactggtgagccccatgggacgagcgacctgctccccagcctctgccttct

SEQ ID NO: 302522 - DNA, 56 bp, Artificial
  Synthetic oligonucleotide
aactggtgccacgcacccaagaccatgaatgcactgtcgattacagcaatgagcag

SEQ ID NO: 302523 - DNA, 60 bp, Artificial
  Synthetic oligonucleotide
aactggtgcgactcgaacgaattcctcactgagcaatcaggtaggaacgtcagatatgaa

SEQ ID NO: 302524 - DNA, 60 bp, Artificial
  Synthetic oligonucleotide
aactggtgcgcggagcttcccagcgaagatgatcaacgggttagagtggcacccctcaga

SEQ ID NO: 302525 - DNA, 56 bp, Artificial
  Synthetic oligonucleotide
aactggtggtataccaggtcagagtttcccttccggtctagcgacaccatgataag

SEQ ID NO: 302526 - DNA, 55 bp, Artificial
  Synthetic oligonucleotide
aactggttcaagaaaggaagttctatcggccaaatgtttgagacaacaatgaggg

SEQ ID NO: 302527 - DNA, 57 bp, Artificial
  Synthetic oligonucleotide
aactggttcggctgtacatggatgaatggcactgggttcaccaaaacgtgcgggggc

SEQ ID NO: 302528 - DNA, 55 bp, Artificial
  Synthetic oligonucleotide
aactggttgaaaataagcacactggatctttctgctcaatagacgggaaagcgcc

SEQ ID NO: 302529 - DNA, 60 bp, Artificial
  Synthetic oligonucleotide
aactggttgaaaatgagtacactggatcattctgctcaatcgatgggaaagcaccaataa

SEQ ID NO: 302530 - DNA, 60 bp, Artificial
  Synthetic oligonucleotide
aactggttggattgataatcgatcggctggcatacggagtataggaggtcgctgagtggt

SEQ ID NO: 302531 - DNA, 55 bp, Artificial
  Synthetic oligonucleotide
aactgtaagatctcacggcagctagcgcgattcaagaatccactctccaacatcc

SEQ ID NO: 302532 - DNA, 55 bp, Artificial
  Synthetic oligonucleotide
aactgtaagcgacgggaccctaggcttagccataaagcgcccacttattgttcag

SEQ ID NO: 302533 - DNA, 51 bp, Artificial
  Synthetic oligonucleotide
aactgtacaatgagagtgaagcagagcatcaccaacttgccacaaggtctc

SEQ ID NO: 302534 - DNA, 55 bp, Artificial
  Synthetic oligonucleotide
aactgtacgatatccccaactttgcccataggagtgactgcaatccccgtagcac

SEQ ID NO: 302535 - DNA, 54 bp, Artificial
  Synthetic oligonucleotide
aactgtagcttcctgacttgaagttaaggcccttaatcctaactgagttaaaca

SEQ ID NO: 302536 - DNA, 60 bp, Artificial
  Synthetic oligonucleotide
aactgtatctgattttgtctctctttcacgtgaggtatctgagaaaattgttcgtgatgc

SEQ ID NO: 302537 - DNA, 60 bp, Artificial
  Synthetic oligonucleotide
aactgtatggcgactgaggtagcttggtgacacactcatcaaggtgaactcatagctgga

SEQ ID NO: 302538 - DNA, 55 bp, Artificial
  Synthetic oligonucleotide
aactgtcaaaggtttcgatcagctctaaactgattgtgatttgttcgtaacgaac

SEQ ID NO: 302539 - DNA, 60 bp, Artificial
  Synthetic oligonucleotide
aactgtcaacgataaattggatccagatgtgttgcgcgttagaaatttgattagagcgca

SEQ ID NO: 302540 - DNA, 53 bp, Artificial
  Synthetic oligonucleotide
aactgtcatcggtccgggtgtcggacgatacggcagcatgggtgtgcggacgg

SEQ ID NO: 302541 - DNA, 50 bp, Artificial
  Synthetic oligonucleotide
aactgtcgtatatacgagaaacggggcgtttgagtttgtcaaatgtgttg

SEQ ID NO: 302542 - DNA, 58 bp, Artificial
  Synthetic oligonucleotide
aactgtctttccagattgaggtgagatattttctctatagtggtgtcaaagaaagaag

SEQ ID NO: 302543 - DNA, 58 bp, Artificial
  Synthetic oligonucleotide
aactgtgactcactcagttaatttactcgaagacaaccataatggaaaactctgcaac

SEQ ID NO: 302544 - DNA, 60 bp, Artificial
  Synthetic oligonucleotide
aactgtgcggctcctgagttacaagagaacgttcacgaatcagttctggtggatgagact

SEQ ID NO: 302545 - DNA, 55 bp, Artificial
  Synthetic oligonucleotide
aactgtggacaacaacatggtaaattgctggttgacaaactttgagttagcatat

SEQ ID NO: 302546 - DNA, 51 bp, Artificial
  Synthetic oligonucleotide
aactgtggagtacgttgactaactggagtggttctaaggatttcgtattcc

SEQ ID NO: 302547 - DNA, 54 bp, Artificial
  Synthetic oligonucleotide
aactgtggctactgttgatcaaccaatggtagaaatagtccctgggcaaaatct

SEQ ID NO: 302548 - DNA, 56 bp, Artificial
  Synthetic oligonucleotide
aactgtggggatttagatattttggttgtttattatacaatagccactcagttcag

SEQ ID NO: 302549 - DNA, 51 bp, Artificial
  Synthetic oligonucleotide
aactgtgggtcacccctattttcccgttataaaaccaggcaatcacaccgt

SEQ ID NO: 302550 - DNA, 59 bp, Artificial
  Synthetic oligonucleotide
aactgtgtagatgcgcgaccaatctatgcacttggtagcggcagcggaaatacacttac

SEQ ID NO: 302551 - DNA, 59 bp, Artificial
  Synthetic oligonucleotide
aactgtgtgggggatcttcgcgcctaaagcaacagcgcaccaatttgttaatggcatgt

SEQ ID NO: 302552 - DNA, 55 bp, Artificial
  Synthetic oligonucleotide
aactgtgttaattgcacaggtggtgaaacctgggttctacattgactataaggtg

SEQ ID NO: 302553 - DNA, 55 bp, Artificial
  Synthetic oligonucleotide
aactgtgttgtcccatgctctacccttgatctgtgagcgtgatgcaatgtagggc

SEQ ID NO: 302554 - DNA, 55 bp, Artificial
  Synthetic oligonucleotide
aactgtgtttcgatctggtctgttgaataccgctgaccagcatacttttctcggc

SEQ ID NO: 302555 - DNA, 60 bp, Artificial
  Synthetic oligonucleotide
aactgttaaatctctcaatgtactcactagtattgcaattccaaaggtgattcactctga

SEQ ID NO: 302556 - DNA, 56 bp, Artificial
  Synthetic oligonucleotide
aactgttaagcgtatgaatgtagtagcaggtgtaagtcagactgcatgcgttacag

SEQ ID NO: 302557 - DNA, 57 bp, Artificial
  Synthetic oligonucleotide
aactgttagtaaaccttcgcttagccaattagctcataatcttagtattgttagaga

SEQ ID NO: 302558 - DNA, 58 bp, Artificial
  Synthetic oligonucleotide
aactgttctagttgttgcgctagttattctaccgttgtagtccatagtgaattcatgt

SEQ ID NO: 302559 - DNA, 56 bp, Artificial
  Synthetic oligonucleotide
aactgttcttttaatatgaccacagtagtaagagataggacgcagcaggtccatgc

SEQ ID NO: 302560 - DNA, 60 bp, Artificial
  Synthetic oligonucleotide
aactgttgaagcaagcaacacagccttgctcatcaggggtatcataaattccacttttgt

SEQ ID NO: 302561 - DNA, 54 bp, Artificial
  Synthetic oligonucleotide
aactgttggtgcccggaaaggaatatctacggagtgtttagctgtggatagttt

SEQ ID NO: 302562 - DNA, 52 bp, Artificial
  Synthetic oligonucleotide
aactgttggttctattggaaaatgaaagaacgttggattatcacgattcaaa

SEQ ID NO: 302563 - DNA, 50 bp, Artificial
  Synthetic oligonucleotide
aactgtttaatagtacatacaatagtacagacaatagtacagacaggtct

SEQ ID NO: 302564 - DNA, 53 bp, Artificial
  Synthetic oligonucleotide
aactgtttactgtggggagaagctaacgttactaattatatttctcggctacg

SEQ ID NO: 302565 - DNA, 56 bp, Artificial
  Synthetic oligonucleotide
aactgtttactgtggggagaagctaatgtaactaactatatttctcgattgcgtac

SEQ ID NO: 302566 - DNA, 53 bp, Artificial
  Synthetic oligonucleotide
aactgtttactgtggggagaagctactgtaacaaactatatttcccgcctccg

SEQ ID NO: 302567 - DNA, 58 bp, Artificial
  Synthetic oligonucleotide
aactgtttatggcaatggggtccccagatttgattacttatgtcatttagctagtaga

SEQ ID NO: 302568 - DNA, 58 bp, Artificial
  Synthetic oligonucleotide
aactgtttcattattacccacctcttcagttgaggcgccggtgtgttgagatcttaca

SEQ ID NO: 302569 - DNA, 56 bp, Artificial
  Synthetic oligonucleotide
aactgtttggataggatctttactgttggtgccctgaacggaatgtccacggagtg

SEQ ID NO: 302570 - DNA, 56 bp, Artificial
  Synthetic oligonucleotide
aactgttttcccacaccaatggattaatttgaggacaaacaacagtgctaccatta

SEQ ID NO: 302571 - DNA, 49 bp, Artificial
  Synthetic oligonucleotide
aacttaaaacccgttgcccgtagtgttcttgcccctattttggggactc

SEQ ID NO: 302572 - DNA, 55 bp, Artificial
  Synthetic oligonucleotide
aacttaaaatggagtgtccgcacactattgggctaggtcaaggccttgttgtagg

SEQ ID NO: 302573 - DNA, 55 bp, Artificial
  Synthetic oligonucleotide
aacttaaaatgtccatggacagttggcatgaccaagttttatgggggttgggata

SEQ ID NO: 302574 - DNA, 60 bp, Artificial
  Synthetic oligonucleotide
aacttaaagcccactgtgtcacactccctgtcagagttggtatgaacatgaatgaggatg

SEQ ID NO: 302575 - DNA, 52 bp, Artificial
  Synthetic oligonucleotide
aacttaaattgccataaacttcgacctcaattttaggccttccggactacaa

SEQ ID NO: 302576 - DNA, 54 bp, Artificial
  Synthetic oligonucleotide
aacttaagagtcgagaaacgtccattaatcatctcaactgatcagacacagtca

SEQ ID NO: 302577 - DNA, 52 bp, Artificial
  Synthetic oligonucleotide
aacttaagccgcactacaagacagagctgcttaaggttgctcaaagttcgaa

SEQ ID NO: 302578 - DNA, 55 bp, Artificial
  Synthetic oligonucleotide
aacttaatcctaatagctctttgagtaccaatgatactgctactatcacactccc

SEQ ID NO: 302579 - DNA, 52 bp, Artificial
  Synthetic oligonucleotide
aacttaattcggtagtcttcgaaattcagtgttggtgggttcggtgtgtttg

SEQ ID NO: 302580 - DNA, 60 bp, Artificial
  Synthetic oligonucleotide
aacttacaagatccttaccatttattctactgtcgcctcatctcttgtgcttgcaatggg

SEQ ID NO: 302581 - DNA, 54 bp, Artificial
  Synthetic oligonucleotide
aacttacaaggcctttctacgcacacaatatctgaccctttaccccgttgctcg

SEQ ID NO: 302582 - DNA, 55 bp, Artificial
  Synthetic oligonucleotide
aacttacgcgcctggagtgcacaatcaaattcgcttagtgagaggcacgcgaatc

SEQ ID NO: 302583 - DNA, 60 bp, Artificial
  Synthetic oligonucleotide
aacttacgcttccatcgagagtctcgcattcgttatcgagcggacaacttagaggagctc

SEQ ID NO: 302584 - DNA, 52 bp, Artificial
  Synthetic oligonucleotide
aacttactcacacatggcaaaccaacagacacttggcatgcctccaaggaat

SEQ ID NO: 302585 - DNA, 50 bp, Artificial
  Synthetic oligonucleotide
aacttactcgtgctctcactattctactgaatcaaagttcaaagtcattc

SEQ ID NO: 302586 - DNA, 60 bp, Artificial
  Synthetic oligonucleotide
aacttactgtagaggttgtactatatatcatgtttgtcaatggtgtagtcaatatggtag

SEQ ID NO: 302587 - DNA, 52 bp, Artificial
  Synthetic oligonucleotide
aacttagaagccataaatccaagttcaacagaagggggcacaaaccagtgcc

SEQ ID NO: 302588 - DNA, 58 bp, Artificial
  Synthetic oligonucleotide
aacttagagggcgcctcaagctcgaattcgtccacgacatttcactagatgcaaatgt

SEQ ID NO: 302589 - DNA, 59 bp, Artificial
  Synthetic oligonucleotide
aacttagcatagaacccacaaacgtagaatcacaatataattcactactttcagctata

SEQ ID NO: 302590 - DNA, 58 bp, Artificial
  Synthetic oligonucleotide
aacttagcggagaggccataccccggttggagtgctcagagtgaccgtgtcacgcgta

SEQ ID NO: 302591 - DNA, 56 bp, Artificial
  Synthetic oligonucleotide
aacttagggtttgatgggagagatagtgtttgaaggaatgacagcaggtgttcttt

SEQ ID NO: 302592 - DNA, 51 bp, Artificial
  Synthetic oligonucleotide
aacttaggtatgtagaaggaattctttggtcctttcacactagggaatggc

SEQ ID NO: 302593 - DNA, 54 bp, Artificial
  Synthetic oligonucleotide
aacttagtgctaaatgcggccttaggatttccgacgggaatttacatatcgccc

SEQ ID NO: 302594 - DNA, 60 bp, Artificial
  Synthetic oligonucleotide
aacttataactgtgcataggtatgtagatgtggacacttggaataaatatatacctatca

SEQ ID NO: 302595 - DNA, 60 bp, Artificial
  Synthetic oligonucleotide
aacttatcatcgaggatactggtttgtgcacctctttcatgctactagacaacattccat

SEQ ID NO: 302596 - DNA, 60 bp, Artificial
  Synthetic oligonucleotide
aacttatccgctgcatgaataaagctctatattgttgtttacactccttagataagatat

SEQ ID NO: 302597 - DNA, 53 bp, Artificial
  Synthetic oligonucleotide
aacttatcgtaaggagggttgtcgtatgagtggggatataaacacttcgttgg

SEQ ID NO: 302598 - DNA, 58 bp, Artificial
  Synthetic oligonucleotide
aacttatctgcaccactaatgtgccttggaactctagttggagtaataaatctcagga

SEQ ID NO: 302599 - DNA, 55 bp, Artificial
  Synthetic oligonucleotide
aacttatgcccggtgggtggagacagtgcgtgccaaggcacactcccgcggtgta

SEQ ID NO: 302600 - DNA, 60 bp, Artificial
  Synthetic oligonucleotide
aacttatggatttggcagtttcatggaatctcagtgcaaatatcatgaaggaacgaatca

SEQ ID NO: 302601 - DNA, 55 bp, Artificial
  Synthetic oligonucleotide
aacttatgtgggttaccatttatggatgcgtaaatcttgtgaccaagccagttat

SEQ ID NO: 302602 - DNA, 53 bp, Artificial
  Synthetic oligonucleotide
aacttatttaggtataagaacattaggaggtctaggaaatttaagcgaccaga

SEQ ID NO: 302603 - DNA, 51 bp, Artificial
  Synthetic oligonucleotide
aacttcaacaagtaccgcatcactgcgcttactgtgaagtactcacccgcg

SEQ ID NO: 302604 - DNA, 51 bp, Artificial
  Synthetic oligonucleotide
aacttcaactcatacctcaagaatgaagtggtatccgttactaagtctgga

SEQ ID NO: 302605 - DNA, 53 bp, Artificial
  Synthetic oligonucleotide
aacttcaactggcgcggatttccaagagttagttggcggcgcattagtataat

SEQ ID NO: 302606 - DNA, 53 bp, Artificial
  Synthetic oligonucleotide
aacttcacaagagctaggaaaagcaacaaagcagttattggagatgacaaggt

SEQ ID NO: 302607 - DNA, 50 bp, Artificial
  Synthetic oligonucleotide
aacttcagccgctgtcaatcaactaggctatccttcctgcaccatcagct

SEQ ID NO: 302608 - DNA, 53 bp, Artificial
  Synthetic oligonucleotide
aacttcatggggtatgtgattggaagttggggaaccttaccccaggaacatat

SEQ ID NO: 302609 - DNA, 57 bp, Artificial
  Synthetic oligonucleotide
aacttcatgggttacgtaattggaagttggggaacattgccacaggatcatattgta

SEQ ID NO: 302610 - DNA, 59 bp, Artificial
  Synthetic oligonucleotide
aacttccaacctcgtcccctcccctacagagctcgcagccatagccgatgcctggacca

SEQ ID NO: 302611 - DNA, 57 bp, Artificial
  Synthetic oligonucleotide
aacttccaaggaggtccttgaaagcattcttctcctggtctttgacagattcatccg

SEQ ID NO: 302612 - DNA, 55 bp, Artificial
  Synthetic oligonucleotide
aacttccactatgagaacactgaaatcccagcagcttctgtccagaaagtgcagg

SEQ ID NO: 302613 - DNA, 59 bp, Artificial
  Synthetic oligonucleotide
aacttccagccacatctatactactacatttccctacaacaaagatacagtcagaatgt

SEQ ID NO: 302614 - DNA, 56 bp, Artificial
  Synthetic oligonucleotide
aacttccctgcgactgcaagctgacaggtggctccaacggatggagtccgcacaaa

SEQ ID NO: 302615 - DNA, 52 bp, Artificial
  Synthetic oligonucleotide
aacttccgcgcgaagttgttgggtgtcgattataaattaaagactacccggc

SEQ ID NO: 302616 - DNA, 55 bp, Artificial
  Synthetic oligonucleotide
aacttccggctggagacatccccgcctcgggtgtgggccaccgtaagctgagcgc

SEQ ID NO: 302617 - DNA, 51 bp, Artificial
  Synthetic oligonucleotide
aacttccgggacttttcgggtaaagacagtgcatcttcacagggagggtat

SEQ ID NO: 302618 - DNA, 56 bp, Artificial
  Synthetic oligonucleotide
aacttcctgacgcgttaagtaaaatccaagatgcgattgataacgactaccggatc

SEQ ID NO: 302619 - DNA, 55 bp, Artificial
  Synthetic oligonucleotide
aacttcctgtgcagggccgcatgtgtgtacataacaacgtacaaatcagccgggg

SEQ ID NO: 302620 - DNA, 52 bp, Artificial
  Synthetic oligonucleotide
aacttcgaaacgggtacccgcgtccacgcgcaacgaggcgtacccatccctg

SEQ ID NO: 302621 - DNA, 50 bp, Artificial
  Synthetic oligonucleotide
aacttcgatcaggtggtacattccgcgtacaaaagactaaatcattacgg

SEQ ID NO: 302622 - DNA, 55 bp, Artificial
  Synthetic oligonucleotide
aacttcgcattaccagttggacagtggcccgtaatgactggtggcgcggtatctt

SEQ ID NO: 302623 - DNA, 55 bp, Artificial
  Synthetic oligonucleotide
aacttcgccgggccgcgcgcataccgcttcctcaacaaggtgtggagctactacg

SEQ ID NO: 302624 - DNA, 58 bp, Artificial
  Synthetic oligonucleotide
aacttcgctacggggacattgaagtatggaactgccataattatggctttggtagcca

SEQ ID NO: 302625 - DNA, 57 bp, Artificial
  Synthetic oligonucleotide
aacttcggtccctgcaaacgcacgtctatgatgaacttcagacccttcgtattggtg

SEQ ID NO: 302626 - DNA, 53 bp, Artificial
  Synthetic oligonucleotide
aacttctactttagtgcttaatattgcgtaaacgctttcgccgtatctttctt

SEQ ID NO: 302627 - DNA, 60 bp, Artificial
  Synthetic oligonucleotide
aacttctagcccctctaccaactgcagggaaccttcagcatcgattggatgatagcataa

SEQ ID NO: 302628 - DNA, 59 bp, Artificial
  Synthetic oligonucleotide
aacttctcaagcagtatggttgaaatgatggacgtttatgtgcaaaccggagcccatcg

SEQ ID NO: 302629 - DNA, 59 bp, Artificial
  Synthetic oligonucleotide
aacttctgaaagagtgtgtggacaactatttgtttgaggcaatattcgcctacagatta

SEQ ID NO: 302630 - DNA, 60 bp, Artificial
  Synthetic oligonucleotide
aacttctgcgatactcctattgcatcagaaaataacacttgtgatgttgtgcctatcaat

SEQ ID NO: 302631 - DNA, 58 bp, Artificial
  Synthetic oligonucleotide
aacttgaacctgaaagaatcgtggccatccttgagtgggacaaatctaagcttccaga

SEQ ID NO: 302632 - DNA, 59 bp, Artificial
  Synthetic oligonucleotide
aacttgaacgttctcacgactcaaggagcgctatgccaaccaagaaccttactgatgaa

SEQ ID NO: 302633 - DNA, 55 bp, Artificial
  Synthetic oligonucleotide
aacttgaagcgaaggacggcgcagataaattccgtgactcaacgtttgtggaccc

SEQ ID NO: 302634 - DNA, 60 bp, Artificial
  Synthetic oligonucleotide
aacttgacaatgcagtgggcagccctcctgttataatatctgtcactatggaagagtctg

SEQ ID NO: 302635 - DNA, 58 bp, Artificial
  Synthetic oligonucleotide
aacttgactccctgtcagtccagacacgttcccccatcactagaattgctgaaagggc

SEQ ID NO: 302636 - DNA, 60 bp, Artificial
  Synthetic oligonucleotide
aacttgactgtaggagattatggaggtgaggttgggagacacttaattgcttcactagca

SEQ ID NO: 302637 - DNA, 56 bp, Artificial
  Synthetic oligonucleotide
aacttgagccacaatgatcgaacagatgcaatgaaccactgtggcactgtagctaa

SEQ ID NO: 302638 - DNA, 50 bp, Artificial
  Synthetic oligonucleotide
aacttgaggctcaaggtgattcgatgacaacgctcgttgtcgctccgcac

SEQ ID NO: 302639 - DNA, 55 bp, Artificial
  Synthetic oligonucleotide
aacttgagtcttaaagactcgtaagaaaatcccagtctgaatccgtgaacgagtc

SEQ ID NO: 302640 - DNA, 60 bp, Artificial
  Synthetic oligonucleotide
aacttgatgtacatagtaacttctacctcataatgcatgtcgtctggttgaggttgtagg

SEQ ID NO: 302641 - DNA, 60 bp, Artificial
  Synthetic oligonucleotide
aacttgcaacgtgtattcacagtggcttccattagaagcatgcttatcaaatgaggacca

SEQ ID NO: 302642 - DNA, 50 bp, Artificial
  Synthetic oligonucleotide
aacttgcactgaatatagaacaaacggtctttttgtaacaggattaaata

SEQ ID NO: 302643 - DNA, 56 bp, Artificial
  Synthetic oligonucleotide
aacttgcatagtttaattggtggactaggacttggagctaaaaatctagtagaaga

SEQ ID NO: 302644 - DNA, 59 bp, Artificial
  Synthetic oligonucleotide
aacttgcatatcccagaaatagtgttgaagtacaatctaatggaccctgaatacagagg

SEQ ID NO: 302645 - DNA, 55 bp, Artificial
  Synthetic oligonucleotide
aacttgccatcaacagcaagatatattagaccaaatctgttgcaagatagactaa

SEQ ID NO: 302646 - DNA, 57 bp, Artificial
  Synthetic oligonucleotide
aacttgccatctcttatgtccgttataacggtgacagcgaaacattcgtaccaacag

SEQ ID NO: 302647 - DNA, 56 bp, Artificial
  Synthetic oligonucleotide
aacttgcccttgaatttggcgaaatgggtcctttggtgcacattcgtatcgctaac

SEQ ID NO: 302648 - DNA, 57 bp, Artificial
  Synthetic oligonucleotide
aacttgccgacccttaagctacgactcctgaacgctctgggtatcgacaccgctggc

SEQ ID NO: 302649 - DNA, 59 bp, Artificial
  Synthetic oligonucleotide
aacttgcctaacggtggcttgcttgatccctatttcactcgtcagttacatagtccaga

SEQ ID NO: 302650 - DNA, 60 bp, Artificial
  Synthetic oligonucleotide
aacttgcgcacaaacaatagtgccacaatagtaatgccgtacattaatagtgtacccatg

SEQ ID NO: 302651 - DNA, 55 bp, Artificial
  Synthetic oligonucleotide
aacttgcgggtgcggtcaaagatgagcagcgggcaggcgttcttgccgcccagaa

SEQ ID NO: 302652 - DNA, 60 bp, Artificial
  Synthetic oligonucleotide
aacttgctagctgcgaaattagaggacacagtcaaagctcaacaatttgctagttctagt

SEQ ID NO: 302653 - DNA, 60 bp, Artificial
  Synthetic oligonucleotide
aacttgctatgagcattctagccaaaaataacgcgataacggcaaacacgagagagatcc

SEQ ID NO: 302654 - DNA, 54 bp, Artificial
  Synthetic oligonucleotide
aacttgctcagaatattaatcgagaatacggaaatatgcgtcagaccctttcag

SEQ ID NO: 302655 - DNA, 58 bp, Artificial
  Synthetic oligonucleotide
aacttgctccgccaaccatgactctcctgacgccgagctcatagaagccaatctccta

SEQ ID NO: 302656 - DNA, 54 bp, Artificial
  Synthetic oligonucleotide
aacttgctggggccgcgaaggccccaagaatcctttcaggtgagtgcccggaac

SEQ ID NO: 302657 - DNA, 55 bp, Artificial
  Synthetic oligonucleotide
aacttgctgtgtacacccctttcgattggaaagtatgtcaaagaattgtgggtct

SEQ ID NO: 302658 - DNA, 58 bp, Artificial
  Synthetic oligonucleotide
aacttggaaaacaggtgacctggaagaggaagcattgatcccataggccctccagctc

SEQ ID NO: 302659 - DNA, 57 bp, Artificial
  Synthetic oligonucleotide
aacttggaaccgctgtcattgaatttatctcgttgagacgaatcgaatgaaccctaa

SEQ ID NO: 302660 - DNA, 56 bp, Artificial
  Synthetic oligonucleotide
aacttggaatccgctaagagggttcttaatttggtgtgtaagcattgcggacagaa

SEQ ID NO: 302661 - DNA, 58 bp, Artificial
  Synthetic oligonucleotide
aacttggacaaacaatatctagactaagggatatatctgttccagctggtttctccaa

SEQ ID NO: 302662 - DNA, 55 bp, Artificial
  Synthetic oligonucleotide
aacttggagtatgctcatcacaacaaccaggacaaccgccaatcgtcctatactg

SEQ ID NO: 302663 - DNA, 50 bp, Artificial
  Synthetic oligonucleotide
aacttggcaacatctcgtgaggtacgatttacagttcctgtgaatgcacc

SEQ ID NO: 302664 - DNA, 57 bp, Artificial
  Synthetic oligonucleotide
aacttggcaagttaaatctaaggttaaagctgatgatcccgatgaatacgaaatgac

SEQ ID NO: 302665 - DNA, 60 bp, Artificial
  Synthetic oligonucleotide
aacttggctatgcaatcggtgtctggtgtcttatttatacttggacactaaatggcataa

SEQ ID NO: 302666 - DNA, 50 bp, Artificial
  Synthetic oligonucleotide
aacttggctgtcttttctgcacagtttagccagataaatgtcctttaaac

SEQ ID NO: 302667 - DNA, 58 bp, Artificial
  Synthetic oligonucleotide
aacttgggcgacactcttatccctgtgtggaatgcgtctggtgatataaggtcaacgg

SEQ ID NO: 302668 - DNA, 50 bp, Artificial
  Synthetic oligonucleotide
aacttgggctaactttaggggtacccaggataaggcggacctggtcaaag

SEQ ID NO: 302669 - DNA, 55 bp, Artificial
  Synthetic oligonucleotide
aacttggggtcccacctttgcgagtctggatacatcgggccaaaagtgtccgcgc

SEQ ID NO: 302670 - DNA, 59 bp, Artificial
  Synthetic oligonucleotide
aacttgggttctagtctgggacgcttgttgggcattcagcactacaagtggaatccagc

SEQ ID NO: 302671 - DNA, 56 bp, Artificial
  Synthetic oligonucleotide
aacttggtcaaatgaagaggctgggaagggagacacatatacctcgggaggaggtg

SEQ ID NO: 302672 - DNA, 57 bp, Artificial
  Synthetic oligonucleotide
aacttgtacacagaaatcgtttacacgcccatattgacgccagacggatcggttgtc

SEQ ID NO: 302673 - DNA, 53 bp, Artificial
  Synthetic oligonucleotide
aacttgtaggtcaatagtttcaaacgtgtccttagtaatcgcaccacggttag

SEQ ID NO: 302674 - DNA, 55 bp, Artificial
  Synthetic oligonucleotide
aacttgtgattggatgttcggtcacaacaatggtaactatttagtgttggtcact

SEQ ID NO: 302675 - DNA, 59 bp, Artificial
  Synthetic oligonucleotide
aacttgtgctcagagtgttaccaaggccatatatgccaagttatctactctaacaaccc

SEQ ID NO: 302676 - DNA, 57 bp, Artificial
  Synthetic oligonucleotide
aacttgttacaccctatgagccagcatggaatagaggacccggaggaagaagtgtta

SEQ ID NO: 302677 - DNA, 55 bp, Artificial
  Synthetic oligonucleotide
aacttgttcggaaaacaaggttcctcccagtggctggtggaacgagcagtgtgta

SEQ ID NO: 302678 - DNA, 60 bp, Artificial
  Synthetic oligonucleotide
aacttgttgctgaattaagatggcagtataacagatttgctgtaataacacatggtaaag

SEQ ID NO: 302679 - DNA, 55 bp, Artificial
  Synthetic oligonucleotide
aactttaaccttaactataactgctaggccaacactgtacacttagtaaagcatg

SEQ ID NO: 302680 - DNA, 55 bp, Artificial
  Synthetic oligonucleotide
aactttaagtaatgcggagagacgtcatcaatgacgttatacagtacatcgtttg

SEQ ID NO: 302681 - DNA, 56 bp, Artificial
  Synthetic oligonucleotide
aactttaatggctccgctaccgtaagagcatgggttacagacacgcgaggaaaaca

SEQ ID NO: 302682 - DNA, 60 bp, Artificial
  Synthetic oligonucleotide
aactttacgagagttcgcatcaagcgtgtgtgagtggatgacgccatacactggcgatct

SEQ ID NO: 302683 - DNA, 51 bp, Artificial
  Synthetic oligonucleotide
aactttacgtagtttcgtactcgtcgataatggcggtacggggaatgttac

SEQ ID NO: 302684 - DNA, 57 bp, Artificial
  Synthetic oligonucleotide
aactttagaagacttgtcaccgcacaataggttatgcttaccatccatattttcttc

SEQ ID NO: 302685 - DNA, 60 bp, Artificial
  Synthetic oligonucleotide
aactttagatattgcggtccaacgtcatcgatgacgttatacatcacattattagagtaa

SEQ ID NO: 302686 - DNA, 53 bp, Artificial
  Synthetic oligonucleotide
aactttatagaggatgttttcataagggttcctgtccccaacttggtctgaaa

SEQ ID NO: 302687 - DNA, 55 bp, Artificial
  Synthetic oligonucleotide
aactttatagtaggacagaactgttcactagtgattcctggctttaacgcgcagg

SEQ ID NO: 302688 - DNA, 55 bp, Artificial
  Synthetic oligonucleotide
aactttatcgtgggacccggccaatgacaggcctagcaaagccaggatgggcggg

SEQ ID NO: 302689 - DNA, 56 bp, Artificial
  Synthetic oligonucleotide
aactttcacctaaactttaaattctaggcatgcactgtacacttagcggagtccat

SEQ ID NO: 302690 - DNA, 57 bp, Artificial
  Synthetic oligonucleotide
aactttcatgagtgtatagataattacgctattgaggtttcctacgcctataattta

SEQ ID NO: 302691 - DNA, 59 bp, Artificial
  Synthetic oligonucleotide
aactttccagagagctggcgataaactgagttttttcttccataatgagagcactctta

SEQ ID NO: 302692 - DNA, 55 bp, Artificial
  Synthetic oligonucleotide
aactttccatggactgactgtggcaatagaaacatcatttgggctgaagagtgtg

SEQ ID NO: 302693 - DNA, 53 bp, Artificial
  Synthetic oligonucleotide
aactttccccccttggcccttgccactgctccacacagaccccacaccactta

SEQ ID NO: 302694 - DNA, 57 bp, Artificial
  Synthetic oligonucleotide
aactttccctggtaccaccggtgctacatttcatgatccatatgttctggattccgg

SEQ ID NO: 302695 - DNA, 51 bp, Artificial
  Synthetic oligonucleotide
aactttcgttcaacgttagagtgcccagaccatctgtacctaagaaaggat

SEQ ID NO: 302696 - DNA, 60 bp, Artificial
  Synthetic oligonucleotide
aactttctgttcagagcaatgaaagtcgttcagatgatgtggcacgaagacatgctgagt

SEQ ID NO: 302697 - DNA, 53 bp, Artificial
  Synthetic oligonucleotide
aactttgaaatggtcacacggcgaccaacccagtgggacataggacagcacat

SEQ ID NO: 302698 - DNA, 59 bp, Artificial
  Synthetic oligonucleotide
aactttgactggggactaagagctttatgtatactcagagataacatgcacttaggaac

SEQ ID NO: 302699 - DNA, 60 bp, Artificial
  Synthetic oligonucleotide
aactttgagtatgtgagaggattcgtgcaaggcaggcacaaatgtcaactgtgcttccta

SEQ ID NO: 302700 - DNA, 58 bp, Artificial
  Synthetic oligonucleotide
aactttgatagaggggggagtcgaggaagatgaatttcgcattatgtattgtccagtg

SEQ ID NO: 302701 - DNA, 58 bp, Artificial
  Synthetic oligonucleotide
aactttgattatcagtcatccgatattaaaagatgctttttctcgactagaacaatta

SEQ ID NO: 302702 - DNA, 53 bp, Artificial
  Synthetic oligonucleotide
aactttgctcttaatttcaaagaataaaggccagcattaattcacttagtggt

SEQ ID NO: 302703 - DNA, 57 bp, Artificial
  Synthetic oligonucleotide
aactttgcttcggtggttgcccctgacgcgcctttctggattaacgcaactctgcaa

SEQ ID NO: 302704 - DNA, 55 bp, Artificial
  Synthetic oligonucleotide
aactttggaccacgccccagcattcatgtttcgcaaggaactggggactttggct

SEQ ID NO: 302705 - DNA, 54 bp, Artificial
  Synthetic oligonucleotide
aactttggaggcaattctaaaaacgccgcggggagagaacgtacaagatgcctc

SEQ ID NO: 302706 - DNA, 56 bp, Artificial
  Synthetic oligonucleotide
aactttggattgcttgggacaacacttttgaatctagacgctaattacgttgagac

SEQ ID NO: 302707 - DNA, 55 bp, Artificial
  Synthetic oligonucleotide
aactttggcgcttagatccaaatggccgcacaaataattgtgccgaccgagcgac

SEQ ID NO: 302708 - DNA, 60 bp, Artificial
  Synthetic oligonucleotide
aactttgtctcgatgacagcatagctgtaaaaagactaagacgacaacaatgtcgtagtc

SEQ ID NO: 302709 - DNA, 57 bp, Artificial
  Synthetic oligonucleotide
aactttgttcaatactgataggagtctctcatacaccgtgtttttgtttatgagtct

SEQ ID NO: 302710 - DNA, 55 bp, Artificial
  Synthetic oligonucleotide
aacttttagcttacctttgttaaacagtgtcaaacaataactcagcaagtctcta

SEQ ID NO: 302711 - DNA, 59 bp, Artificial
  Synthetic oligonucleotide
aacttttagtcaggcaggatttcataccatcaatgctacatggtgggctaatataactt

SEQ ID NO: 302712 - DNA, 60 bp, Artificial
  Synthetic oligonucleotide
aacttttctcgtgtggtcagtacagagcacaccaggcttatcaccgatgcgtatccggag

SEQ ID NO: 302713 - DNA, 53 bp, Artificial
  Synthetic oligonucleotide
aacttttctgggaaacccactttaaggtgacactgatactggtactcaaatac

SEQ ID NO: 302714 - DNA, 58 bp, Artificial
  Synthetic oligonucleotide
aacttttctgggattgttgcacatcaagcctatgatccgattcgcagggaccacatgc

SEQ ID NO: 302715 - DNA, 53 bp, Artificial
  Synthetic oligonucleotide
aacttttgacccctcgtcagaggttccagacccggactttatggatatagttc

SEQ ID NO: 302716 - DNA, 55 bp, Artificial
  Synthetic oligonucleotide
aacttttgaggtcttcctcagaaaggttgctagtttgaaggctggtcactgtgtg

SEQ ID NO: 302717 - DNA, 51 bp, Artificial
  Synthetic oligonucleotide
aactttttcctggactcagactggggggggaagaggtgtcgatggggtcat

SEQ ID NO: 302718 - DNA, 48 bp, Artificial
  Synthetic oligonucleotide
aactttttgtggtaagtttgttggaactttaaaccaatagcccaaccc

SEQ ID NO: 302719 - DNA, 60 bp, Artificial
  Synthetic oligonucleotide
aacttttttgaagagacaggcgattcaaatgaatgttgagatgctgagagcgtttgtacc

SEQ ID NO: 302720 - DNA, 53 bp, Artificial
  Synthetic oligonucleotide
aagaaaaacctaaagcgccacggacaccgaaaggaccttttcagctctcacgc

SEQ ID NO: 302721 - DNA, 54 bp, Artificial
  Synthetic oligonucleotide
aagaaaacggggtctaaatcccgctttctatgtggctcacatcgcgttggaaac

SEQ ID NO: 302722 - DNA, 58 bp, Artificial
  Synthetic oligonucleotide
aagaaaacgtgccagagaccgagggcctagctacaaccgtggcatctctcctggtgac

SEQ ID NO: 302723 - DNA, 53 bp, Artificial
  Synthetic oligonucleotide
aagaaaactaaggatactgatgaggaggaacccaagtacgctctgatgtttgt

SEQ ID NO: 302724 - DNA, 50 bp, Artificial
  Synthetic oligonucleotide
aagaaaactcttggcccggttcggggaccagaggggacccactagggtgc

SEQ ID NO: 302725 - DNA, 50 bp, Artificial
  Synthetic oligonucleotide
aagaaaagatacaaagttagactacagcgatttagaactcacgtacctaa

SEQ ID NO: 302726 - DNA, 56 bp, Artificial
  Synthetic oligonucleotide
aagaaaaggtgtgaacccgtagctgtggtgatacatggtgaacctggaactggcaa

SEQ ID NO: 302727 - DNA, 56 bp, Artificial
  Synthetic oligonucleotide
aagaaaagttcaaccacagaaagcactagtgcaggtgcaacaacattcgaggccaa

SEQ ID NO: 302728 - DNA, 53 bp, Artificial
  Synthetic oligonucleotide
aagaaaattgtactcttggtattgtaaacctccttacagattttttgaagcac

SEQ ID NO: 302729 - DNA, 55 bp, Artificial
  Synthetic oligonucleotide
aagaaacaagatcaccacatatggaggtagccctagatttggcgcagtctacacc

SEQ ID NO: 302730 - DNA, 60 bp, Artificial
  Synthetic oligonucleotide
aagaaacaatgctgcgaccacgtcagccgaactatcagtgcactatgatgagccaacgat

SEQ ID NO: 302731 - DNA, 55 bp, Artificial
  Synthetic oligonucleotide
aagaaacatcaatcacacattcggacggtcacacatcaattagtaagacgccaaa

SEQ ID NO: 302732 - DNA, 55 bp, Artificial
  Synthetic oligonucleotide
aagaaacatcgaaggctgagcttttgatccaacaaatgacaattttggagaaagc

SEQ ID NO: 302733 - DNA, 55 bp, Artificial
  Synthetic oligonucleotide
aagaaaccaaaacctacctggccacgccctctgaaatgagatcatttccaccttg

SEQ ID NO: 302734 - DNA, 59 bp, Artificial
  Synthetic oligonucleotide
aagaaacccacagccgagaggtgctgcgaacggattagggcaagcaggtaagactcaga

SEQ ID NO: 302735 - DNA, 60 bp, Artificial
  Synthetic oligonucleotide
aagaaacctaaccagtttctcgttgatcagcgatcatggattctatcccgtatgtgatcc

SEQ ID NO: 302736 - DNA, 53 bp, Artificial
  Synthetic oligonucleotide
aagaaacctacgtctgttggcgttcccccgcagcgcggtgtgctttcttttcc

SEQ ID NO: 302737 - DNA, 56 bp, Artificial
  Synthetic oligonucleotide
aagaaacgaccagtcggaggctgtgaggtcatccagagtcggtaggttaggaaaca

SEQ ID NO: 302738 - DNA, 57 bp, Artificial
  Synthetic oligonucleotide
aagaaacgccaggtctgaggatgtaaacgagtccagattcggcagattagaaaacat

SEQ ID NO: 302739 - DNA, 60 bp, Artificial
  Synthetic oligonucleotide
aagaaacgcctcagattccgcgcttcttcctccccatattccatcactccatctgatcaa

SEQ ID NO: 302740 - DNA, 60 bp, Artificial
  Synthetic oligonucleotide
aagaaacggttctgagcgctgaagagaatgctcgtcagaaacttcgtgcaagtggagtaa

SEQ ID NO: 302741 - DNA, 55 bp, Artificial
  Synthetic oligonucleotide
aagaaacgtatcactgactgcaaagagagggtttcctcaaaccgtaatcatgatc

SEQ ID NO: 302742 - DNA, 60 bp, Artificial
  Synthetic oligonucleotide
aagaaactcaagcattttcgattagccaataatggtgatgattgtatgcttgttgttgaa

SEQ ID NO: 302743 - DNA, 58 bp, Artificial
  Synthetic oligonucleotide
aagaaactcaagctttcgataaacgcttgtgggcacattgcagacaactagccttgcg

SEQ ID NO: 302744 - DNA, 57 bp, Artificial
  Synthetic oligonucleotide
aagaaactgctctttcaatataaccacagaattaagagataagcaaaagaaagaata

SEQ ID NO: 302745 - DNA, 57 bp, Artificial
  Synthetic oligonucleotide
aagaaactgtcgatctaattcacaaaaacttgacagacgggcaggctcacttacaag

SEQ ID NO: 302746 - DNA, 55 bp, Artificial
  Synthetic oligonucleotide
aagaaagaagttaacccacaagtaatggctgccgtggctcaaactgaagaaatct

SEQ ID NO: 302747 - DNA, 60 bp, Artificial
  Synthetic oligonucleotide
aagaaagaatctagctgatgtggtatgccgatgctatgaatgtatgtcattgcttgattt

SEQ ID NO: 302748 - DNA, 53 bp, Artificial
  Synthetic oligonucleotide
aagaaagaccgtattatcttgttacctgggccaattcagctatagaaatgttg

SEQ ID NO: 302749 - DNA, 56 bp, Artificial
  Synthetic oligonucleotide
aagaaagagacgtttgactatagacctaacaccagctcgagtcggatcgttcttac

SEQ ID NO: 302750 - DNA, 53 bp, Artificial
  Synthetic oligonucleotide
aagaaagagcctttataggcttagatagtcctaaatggcctcctacatatccc

SEQ ID NO: 302751 - DNA, 60 bp, Artificial
  Synthetic oligonucleotide
aagaaagaggacgactctgtgatagatgagtcttctcctttcagcactcccatccaaggg

SEQ ID NO: 302752 - DNA, 60 bp, Artificial
  Synthetic oligonucleotide
aagaaagaggatagctgagttagaaggtgcctcaacatcaatcatattaacggcacaaga

SEQ ID NO: 302753 - DNA, 55 bp, Artificial
  Synthetic oligonucleotide
aagaaagagttaagtcaaagggtgcctgaaagtaatataagatatgaaacacaat

SEQ ID NO: 302754 - DNA, 60 bp, Artificial
  Synthetic oligonucleotide
aagaaagatggctgacggtagcgtactgcgcgcacggattattctgccactgtaaagacc

SEQ ID NO: 302755 - DNA, 53 bp, Artificial
  Synthetic oligonucleotide
aagaaagcaacggggctagcgagtgggtgttcctccccccgagaggagacgag

SEQ ID NO: 302756 - DNA, 53 bp, Artificial
  Synthetic oligonucleotide
aagaaaggatgacaacatcactaccaatagcaagactttcaaatcgcgtattt

SEQ ID NO: 302757 - DNA, 57 bp, Artificial
  Synthetic oligonucleotide
aagaaaggctacactcaatacgagacgagaatagtgccgaacgggtcacgaaagctc

SEQ ID NO: 302758 - DNA, 53 bp, Artificial
  Synthetic oligonucleotide
aagaaaggtttacacggactctgttgcgttacgcacgtacctaacttgtgccg

SEQ ID NO: 302759 - DNA, 55 bp, Artificial
  Synthetic oligonucleotide
aagaaagtcgctcgtcgaccgatcgcactcaaaccattgacaatcctctgcacag

SEQ ID NO: 302760 - DNA, 54 bp, Artificial
  Synthetic oligonucleotide
aagaaagttagacatttaaggactgagggcgctttcgttttacacaatatacca

SEQ ID NO: 302761 - DNA, 57 bp, Artificial
  Synthetic oligonucleotide
aagaaagttgggtaacgatgggtatgagttgatcaagaccgtagaacctatgtgcaa

SEQ ID NO: 302762 - DNA, 52 bp, Artificial
  Synthetic oligonucleotide
aagaaagtttgcacccctatatgcagctgaggcccgcagaattttcaaactg

SEQ ID NO: 302763 - DNA, 50 bp, Artificial
  Synthetic oligonucleotide
aagaaatacaaacgagttccaatctcaaaagtttaccccctaccgtagtc

SEQ ID NO: 302764 - DNA, 59 bp, Artificial
  Synthetic oligonucleotide
aagaaatcgacgtattagagttctgtactaggatgctcgatccgaggacacgtgaagcg

SEQ ID NO: 302765 - DNA, 51 bp, Artificial
  Synthetic oligonucleotide
aagaaatcgatgggatcgactccatctgttcgtactactattgtcaatcca

SEQ ID NO: 302766 - DNA, 60 bp, Artificial
  Synthetic oligonucleotide
aagaaatctgctgctgaggcatcgaagaagcctcgccaaaaacgtactgctactaaacag

SEQ ID NO: 302767 - DNA, 55 bp, Artificial
  Synthetic oligonucleotide
aagaaatggaagcttcaaaatatgtaggacaaggcttccaaccacctgcagaaaa

SEQ ID NO: 302768 - DNA, 57 bp, Artificial
  Synthetic oligonucleotide
aagaaatggccagtagaggtctctgggactcctttcgtcagtccgagagaggcgaag

SEQ ID NO: 302769 - DNA, 59 bp, Artificial
  Synthetic oligonucleotide
aagaaatgtatcgttctaatcgtcgtaggagatgataagctcgacccgcaggtacgctc

SEQ ID NO: 302770 - DNA, 60 bp, Artificial
  Synthetic oligonucleotide
aagaaatgtgacgagctcgccgcaaagctgtcatccctcggaatgaacgccgtagcgtat

SEQ ID NO: 302771 - DNA, 60 bp, Artificial
  Synthetic oligonucleotide
aagaaatgttgggcctcattcactattccctgattgtgatggataatttgcttgtgatga

SEQ ID NO: 302772 - DNA, 57 bp, Artificial
  Synthetic oligonucleotide
aagaaattcccacgccttacatgtggagttatcaaccccaaatgggactggcagcag

SEQ ID NO: 302773 - DNA, 60 bp, Artificial
  Synthetic oligonucleotide
aagaaattgctcaaagcgctacagtggcaggacatcaccatggtggtaacagtcgcggac

SEQ ID NO: 302774 - DNA, 51 bp, Artificial
  Synthetic oligonucleotide
aagaaattgtggaggaagtctacccaccggttgcccactaagtttattaac

SEQ ID NO: 302775 - DNA, 60 bp, Artificial
  Synthetic oligonucleotide
aagaaatttggtaatcgagctcactgggaaattgcgagaggcagcgattctcagaatcgc

SEQ ID NO: 302776 - DNA, 51 bp, Artificial
  Synthetic oligonucleotide
aagaaattttcgttgggtaggcatgttggtcagaggacccgattgactctc

SEQ ID NO: 302777 - DNA, 53 bp, Artificial
  Synthetic oligonucleotide
aagaacaacactggtttatttgcccatagcaaagttttacgaaattggatcat

SEQ ID NO: 302778 - DNA, 56 bp, Artificial
  Synthetic oligonucleotide
aagaacaacgcacactacgcgtcctagagatgacatctgactggttgcaccgagga

SEQ ID NO: 302779 - DNA, 54 bp, Artificial
  Synthetic oligonucleotide
aagaacaactggaccggccggtagtgcctcaccctttccgagtcggtgacacag

SEQ ID NO: 302780 - DNA, 58 bp, Artificial
  Synthetic oligonucleotide
aagaacaagaagcgcaagcttgatgtcggacacgcttcaacccaaaccagcggtggtg

SEQ ID NO: 302781 - DNA, 54 bp, Artificial
  Synthetic oligonucleotide
aagaacaagctaaacagttcacctcctacttcgacgcaatctacaagtggggcg

SEQ ID NO: 302782 - DNA, 60 bp, Artificial
  Synthetic oligonucleotide
aagaacaagtcctatcctgttcatattgcgaacctaacaagagcagtgcgagtaggcacc

SEQ ID NO: 302783 - DNA, 58 bp, Artificial
  Synthetic oligonucleotide
aagaacaatataataagacaatagtctttaagcaatcatcaggaggagacccagaaat

SEQ ID NO: 302784 - DNA, 60 bp, Artificial
  Synthetic oligonucleotide
aagaacactggacctgcatgacgcgaatgtgaaaaacctatatgaaaaggtcaaatcaca

SEQ ID NO: 302785 - DNA, 57 bp, Artificial
  Synthetic oligonucleotide
aagaacagagtgcgagcgcctaccagagttatttacagtatacctacacgttaagtc

SEQ ID NO: 302786 - DNA, 60 bp, Artificial
  Synthetic oligonucleotide
aagaacagccccactctgttcgacgaggcattgcatagagacctagcaggcttccggatc

SEQ ID NO: 302787 - DNA, 53 bp, Artificial
  Synthetic oligonucleotide
aagaacagtaccaggagaggtactatatatgactcaacgagacagtcctgtaa

SEQ ID NO: 302788 - DNA, 57 bp, Artificial
  Synthetic oligonucleotide
aagaacagtttttggctgaacctcctaaaaccaggagcactgctgcagcgttatact

SEQ ID NO: 302789 - DNA, 55 bp, Artificial
  Synthetic oligonucleotide
aagaacataggattatgctcaacagacctgacggaaggtagacgaggcaaattgt

SEQ ID NO: 302790 - DNA, 60 bp, Artificial
  Synthetic oligonucleotide
aagaacattgagaacagaggatacctgggaaagatgttctccgagctaagttatgagagc

SEQ ID NO: 302791 - DNA, 55 bp, Artificial
  Synthetic oligonucleotide
aagaaccaatctcacgggggtatgatcaccaacgatcaacgtttgtttgtcgagt

SEQ ID NO: 302792 - DNA, 60 bp, Artificial
  Synthetic oligonucleotide
aagaaccaatggagcgacaagtgcctgcacaagatcaggttcttctttctatgcagagtt

SEQ ID NO: 302793 - DNA, 60 bp, Artificial
  Synthetic oligonucleotide
aagaaccagagcccagatcgctagcaagctggatccaaagtgaattcaacaaggcgtgcg

SEQ ID NO: 302794 - DNA, 59 bp, Artificial
  Synthetic oligonucleotide
aagaaccattgcttgagttccctttagtacaagatattggtgctcgagtgaaggatcca

SEQ ID NO: 302795 - DNA, 58 bp, Artificial
  Synthetic oligonucleotide
aagaaccccctgcgagagtcaacctttgaggataaccgcccagaagctgctacacata

SEQ ID NO: 302796 - DNA, 54 bp, Artificial
  Synthetic oligonucleotide
aagaaccccgagaccttcgtccacacgtccgagagtaccgatgaaatcttctga

SEQ ID NO: 302797 - DNA, 52 bp, Artificial
  Synthetic oligonucleotide
aagaaccctcaaagtcaacgtagtgaagaagtacggtagcgtacttccgaaa

SEQ ID NO: 302798 - DNA, 60 bp, Artificial
  Synthetic oligonucleotide
aagaaccctgctgagacggtggagattataactgagactgaattcatccctgcaccaggt

SEQ ID NO: 302799 - DNA, 60 bp, Artificial
  Synthetic oligonucleotide
aagaaccgtccactcatggcagccatgttgggcttttcaaacgtagcagccacctcatta

SEQ ID NO: 302800 - DNA, 60 bp, Artificial
  Synthetic oligonucleotide
aagaaccgtgaaagatgacttcacggagggtggatacatcagcatgttctaccagactcg

SEQ ID NO: 302801 - DNA, 58 bp, Artificial
  Synthetic oligonucleotide
aagaacctagtcacagaatatggccgatttgacccaggagccatgaactacacaaaac

SEQ ID NO: 302802 - DNA, 56 bp, Artificial
  Synthetic oligonucleotide
aagaacctcaaaccgatggaggagtacatctacagacagttggcatgttacaatat

SEQ ID NO: 302803 - DNA, 57 bp, Artificial
  Synthetic oligonucleotide
aagaacctcaagggctggtcagggctaccgatatttgaggcatcgagtggaagggta

SEQ ID NO: 302804 - DNA, 53 bp, Artificial
  Synthetic oligonucleotide
aagaacctctctcttttcgacgtggttggaattaacatcatttccgacgaaag

SEQ ID NO: 302805 - DNA, 55 bp, Artificial
  Synthetic oligonucleotide
aagaacctgtacatggagtatattatgacccaacaaaagacttagtggcagaaat

SEQ ID NO: 302806 - DNA, 57 bp, Artificial
  Synthetic oligonucleotide
aagaacgagcccacattgtcttgccggttctactctcgccctcgattacaatactat

SEQ ID NO: 302807 - DNA, 59 bp, Artificial
  Synthetic oligonucleotide
aagaacgaggtgaacacacaggttacttgcactggcaggttttggtggtgctgcgacga

SEQ ID NO: 302808 - DNA, 60 bp, Artificial
  Synthetic oligonucleotide
aagaacgagtccaaagtgcatgttgaggtgtctgttcggagcgctgtctgataagaaatt

SEQ ID NO: 302809 - DNA, 56 bp, Artificial
  Synthetic oligonucleotide
aagaacgatcagcaaggatttacgctcaggttatgaaacctttaaagtcattggtg

SEQ ID NO: 302810 - DNA, 60 bp, Artificial
  Synthetic oligonucleotide
aagaacgatctacgcgatcgttaccaggtcatgcacaagttctatggcaaggtgacaggt

SEQ ID NO: 302811 - DNA, 60 bp, Artificial
  Synthetic oligonucleotide
aagaacgctatactcgttagttatgtgtgggtttcgctatgttggagcacgtgtgatgtg

SEQ ID NO: 302812 - DNA, 57 bp, Artificial
  Synthetic oligonucleotide
aagaacgctgcgggagagttagtagtgcctcccaaaccaatccaaaatgcatttgac

SEQ ID NO: 302813 - DNA, 53 bp, Artificial
  Synthetic oligonucleotide
aagaacggaaacatgcggtgcactatttgtatataagtttggaaaaaacaccc

SEQ ID NO: 302814 - DNA, 55 bp, Artificial
  Synthetic oligonucleotide
aagaacgtggtcgagtgcaacaagttcttcgagaagctgcgtgttaagaccgagt

SEQ ID NO: 302815 - DNA, 58 bp, Artificial
  Synthetic oligonucleotide
aagaactaaaagatcatctgaagttaacatccccaccctcaagacattcctttgctga

SEQ ID NO: 302816 - DNA, 60 bp, Artificial
  Synthetic oligonucleotide
aagaactacattgactacttaagtgcgtcgctgtcagctacagtctcaaatctctgtaag

SEQ ID NO: 302817 - DNA, 57 bp, Artificial
  Synthetic oligonucleotide
aagaactactcttaaaatctgtgttgatagctattggtcagtcaaaagaaatcgaaa

SEQ ID NO: 302818 - DNA, 51 bp, Artificial
  Synthetic oligonucleotide
aagaactagataactatagtaagttactagaaaagatcttagaactaaagc

SEQ ID NO: 302819 - DNA, 60 bp, Artificial
  Synthetic oligonucleotide
aagaactcacttaccacttagcgtgggagagaatgagttatgcgttagtgatctcagggc

SEQ ID NO: 302820 - DNA, 60 bp, Artificial
  Synthetic oligonucleotide
aagaactcaggaatcatcatgcacttgcattcaaggtgaatgttattgggtaatgacaga

SEQ ID NO: 302821 - DNA, 58 bp, Artificial
  Synthetic oligonucleotide
aagaagaaatgcttacaggcaacctccaaacattgagaataagggtacatgaaggata

SEQ ID NO: 302822 - DNA, 51 bp, Artificial
  Synthetic oligonucleotide
aagaagaaccgacgtcctcgtgggcgttcggtggagccccggcttcaacgg

SEQ ID NO: 302823 - DNA, 57 bp, Artificial
  Synthetic oligonucleotide
aagaagaacgatggaggtcgtgagctttctgaccaatccggtcgcaccttctttcgc

SEQ ID NO: 302824 - DNA, 52 bp, Artificial
  Synthetic oligonucleotide
aagaagaacttcaccgaccggtacgggatcgtcgggcccggagtcagggcca

SEQ ID NO: 302825 - DNA, 56 bp, Artificial
  Synthetic oligonucleotide
aagaagaagtgcttaccggcaaccttcaaacactgaaaatacgagtgcatgagggg

SEQ ID NO: 302826 - DNA, 58 bp, Artificial
  Synthetic oligonucleotide
aagaagaagtgcttacgggcaatcttcaaacattgaagataagggtgcatgagggata

SEQ ID NO: 302827 - DNA, 55 bp, Artificial
  Synthetic oligonucleotide
aagaagaagtggagaactcatttgatgtctactggtactggctatggaggcaagg

SEQ ID NO: 302828 - DNA, 56 bp, Artificial
  Synthetic oligonucleotide
aagaagaattttacacgactccattgagtttagaccaggccacagatttcgtgaaa

SEQ ID NO: 302829 - DNA, 55 bp, Artificial
  Synthetic oligonucleotide
aagaagacccctgtctaaggaagacgttgaagagctggtgatcaaaatcagcgaa

SEQ ID NO: 302830 - DNA, 51 bp, Artificial
  Synthetic oligonucleotide
aagaagactccgacgccccccccaaggagacgtcggacagtgggtctaaac

SEQ ID NO: 302831 - DNA, 52 bp, Artificial
  Synthetic oligonucleotide
aagaagacttcttctacgaacttgacggcaaggttcacaaattagcaaaagg

SEQ ID NO: 302832 - DNA, 58 bp, Artificial
  Synthetic oligonucleotide
aagaagactttcgcaagctacaaagtgcgcaattacaaagttgagaagtggttagaca

SEQ ID NO: 302833 - DNA, 58 bp, Artificial
  Synthetic oligonucleotide
aagaagagagagtaattgcaaaaaggtgcaccaatgtggtgacaggcagtggggggaa

SEQ ID NO: 302834 - DNA, 60 bp, Artificial
  Synthetic oligonucleotide
aagaagagcaacagtatcagcagacccactagcgtctttattggagatgtgccacagcac

SEQ ID NO: 302835 - DNA, 57 bp, Artificial
  Synthetic oligonucleotide
aagaagaggcctacaaatccatccggaccacacttcaagccgccaaacatctcaacc

SEQ ID NO: 302836 - DNA, 60 bp, Artificial
  Synthetic oligonucleotide
aagaagaggcgacatgaaagacatgagggacagttattgaaagaaatgcttggccttgtc

SEQ ID NO: 302837 - DNA, 58 bp, Artificial
  Synthetic oligonucleotide
aagaagatagcacccaggttgatatgtccccgcaacaaaagatataatgttgaattgg

SEQ ID NO: 302838 - DNA, 52 bp, Artificial
  Synthetic oligonucleotide
aagaagatcactattagtcccgggattacgggagaaaccgtgggatacgcgg

SEQ ID NO: 302839 - DNA, 56 bp, Artificial
  Synthetic oligonucleotide
aagaagattattccccgaagaaactatggataataacgggtcacaagcaagcacga

SEQ ID NO: 302840 - DNA, 60 bp, Artificial
  Synthetic oligonucleotide
aagaagcagactaagctatttagaatatttgaaccgagacagctgccaatttatagagcg

SEQ ID NO: 302841 - DNA, 51 bp, Artificial
  Synthetic oligonucleotide
aagaagcagataatttctgcatgttacagattcaggatgtggaaaagtttg

SEQ ID NO: 302842 - DNA, 60 bp, Artificial
  Synthetic oligonucleotide
aagaagcagttggccgcttgccagagccctacctcaactcagacacctatcgctccgtct

SEQ ID NO: 302843 - DNA, 59 bp, Artificial
  Synthetic oligonucleotide
aagaagcatagggtgcatccactggcgagcctaccagattgggaacaatcgtaccccga

SEQ ID NO: 302844 - DNA, 58 bp, Artificial
  Synthetic oligonucleotide
aagaagcatcgtgggaataatagtggtcaaccatcaacggttgtggataacactataa

SEQ ID NO: 302845 - DNA, 49 bp, Artificial
  Synthetic oligonucleotide
aagaagcccccacctgtcggggcgggggttcaaccgacaaccgagaggg

SEQ ID NO: 302846 - DNA, 54 bp, Artificial
  Synthetic oligonucleotide
aagaagcgagcccccccgtggaccccatgatagtgtgttattcaaggttaccta

SEQ ID NO: 302847 - DNA, 59 bp, Artificial
  Synthetic oligonucleotide
aagaagcgagctgcaccattgcgggtagcgtaccaacatgggaaattgcgactagaaaa

SEQ ID NO: 302848 - DNA, 50 bp, Artificial
  Synthetic oligonucleotide
aagaagcgatcctatattcacaagaactcggaatgcatcaccatagtttg

SEQ ID NO: 302849 - DNA, 53 bp, Artificial
  Synthetic oligonucleotide
aagaagcgttccaagcccttgcaaggactacaagagagactcttgcaggcgcg

SEQ ID NO: 302850 - DNA, 60 bp, Artificial
  Synthetic oligonucleotide
aagaagctaagatgctcttggataacatcaacacgcctgaaggaatcattcccagcatgt

SEQ ID NO: 302851 - DNA, 60 bp, Artificial
  Synthetic oligonucleotide
aagaagctaatactcaaaggctgtgtttacatcgcatatcatcaccccttagagactgac

SEQ ID NO: 302852 - DNA, 55 bp, Artificial
  Synthetic oligonucleotide
aagaagctatgggatcaaacccaatcaagggcaggactgttggtgtcagatgggg

SEQ ID NO: 302853 - DNA, 59 bp, Artificial
  Synthetic oligonucleotide
aagaagctccgctacggaagaatgacaattagcgggcatcaattcaggattccttactg

SEQ ID NO: 302854 - DNA, 55 bp, Artificial
  Synthetic oligonucleotide
aagaagctcggactatcaagcgataagtggctgttcacagttcaagacggtaacg

SEQ ID NO: 302855 - DNA, 54 bp, Artificial
  Synthetic oligonucleotide
aagaagctgtgggaacaaacccgctcaaaggcaggactactggtttcagacggg

SEQ ID NO: 302856 - DNA, 55 bp, Artificial
  Synthetic oligonucleotide
aagaagctttcccggcgtgtgagaccgagcagaactcaatcgttcataagagttc

SEQ ID NO: 302857 - DNA, 51 bp, Artificial
  Synthetic oligonucleotide
aagaaggaaactcactgctagacaatctgctgtcccgtctcctgaacaagt

SEQ ID NO: 302858 - DNA, 55 bp, Artificial
  Synthetic oligonucleotide
aagaaggaaagctggatttcctacctttgtgtttccattgtcgaagcattggtca

SEQ ID NO: 302859 - DNA, 55 bp, Artificial
  Synthetic oligonucleotide
aagaaggaaccatacatgccacgctatggtctaatccggaatttgcgagacttga

SEQ ID NO: 302860 - DNA, 56 bp, Artificial
  Synthetic oligonucleotide
aagaaggacccagtactcttgaaccaaggtgctccaaccgtccacagcgtgtcaac

SEQ ID NO: 302861 - DNA, 54 bp, Artificial
  Synthetic oligonucleotide
aagaaggacgaattacccacgagcaatacgaaaacataataagtgggactaagc

SEQ ID NO: 302862 - DNA, 55 bp, Artificial
  Synthetic oligonucleotide
aagaaggacgccattactcacgggacaatcactctggcaacggaacaagccatct

SEQ ID NO: 302863 - DNA, 60 bp, Artificial
  Synthetic oligonucleotide
aagaaggactgaataatgtggatgaaggacccagagagcagaacaaccctgcaagagcag

SEQ ID NO: 302864 - DNA, 55 bp, Artificial
  Synthetic oligonucleotide
aagaaggagaaaatatccactggcaaaacaagagtcattgaagctagtagtgtga

SEQ ID NO: 302865 - DNA, 60 bp, Artificial
  Synthetic oligonucleotide
aagaaggaggagtttgctgagatcattaagatctgttccaccattgaagagctcagacgg

SEQ ID NO: 302866 - DNA, 51 bp, Artificial
  Synthetic oligonucleotide
aagaaggcaactgagacatgtgaagattgctccccaatcaacttccaaaaa

SEQ ID NO: 302867 - DNA, 60 bp, Artificial
  Synthetic oligonucleotide
aagaaggcagggtgagggtcagtcgattgggaacaaaagccagcatgcgcacacgcagtg

SEQ ID NO: 302868 - DNA, 60 bp, Artificial
  Synthetic oligonucleotide
aagaaggccaaactggcaaatgttgtgagaaaaatgatgactaattcacaagacacagag

SEQ ID NO: 302869 - DNA, 55 bp, Artificial
  Synthetic oligonucleotide
aagaaggcctaccaccccggttatgacctgcacgctcgtgcgtcggcggaagcaa

SEQ ID NO: 302870 - DNA, 59 bp, Artificial
  Synthetic oligonucleotide
aagaaggcgcggattggtacccctgacgagtctgacccggccttgcttctgcagcctca

SEQ ID NO: 302871 - DNA, 59 bp, Artificial
  Synthetic oligonucleotide
aagaaggcgcggattggtacccctgaggagtctgaaccaaccttgcttctgcagtctga

SEQ ID NO: 302872 - DNA, 54 bp, Artificial
  Synthetic oligonucleotide
aagaaggctgtttattaaacagcaaagtaccatcaaacagcaacctaagggggc

SEQ ID NO: 302873 - DNA, 55 bp, Artificial
  Synthetic oligonucleotide
aagaaggcttgatgaagaatggctggtgtcagtctaacacgcactgctggtgtcc

SEQ ID NO: 302874 - DNA, 60 bp, Artificial
  Synthetic oligonucleotide
aagaagggaagatcattcatatcagtccattgtcgggaagtgctcagcatgtggaggagt

SEQ ID NO: 302875 - DNA, 54 bp, Artificial
  Synthetic oligonucleotide
aagaagggacgacaacgacctgaaacgactgagagacctaaaccaggcagttaa

SEQ ID NO: 302876 - DNA, 55 bp, Artificial
  Synthetic oligonucleotide
aagaagggataccctgagctcaaagaggtcattaagacaacatgtaaaataaagg

SEQ ID NO: 302877 - DNA, 55 bp, Artificial
  Synthetic oligonucleotide
aagaagggcattgggtgttggccatggtagtgccatacactactgtgcgatctac

SEQ ID NO: 302878 - DNA, 55 bp, Artificial
  Synthetic oligonucleotide
aagaagggcggaatattgacagaaataaattggctgaaacggaacgaagcaatcg

SEQ ID NO: 302879 - DNA, 55 bp, Artificial
  Synthetic oligonucleotide
aagaaggggccttggaaattacatctgggagaacatgatagatccgagggatcta

SEQ ID NO: 302880 - DNA, 56 bp, Artificial
  Synthetic oligonucleotide
aagaagggtataagcaggagaattcgcggtattattgagaggaggtcaaataacac

SEQ ID NO: 302881 - DNA, 52 bp, Artificial
  Synthetic oligonucleotide
aagaaggtaacggcaaccccccaaactaggaaagtcatatcttcatgggagt

SEQ ID NO: 302882 - DNA, 58 bp, Artificial
  Synthetic oligonucleotide
aagaagtaatctgatgccgaccgtagacgccactcccggttcgatcacggccaacagc

SEQ ID NO: 302883 - DNA, 59 bp, Artificial
  Synthetic oligonucleotide
aagaagtacacctgctgccttgtactggtacaagacatccatgggtaatgggagtgagg

SEQ ID NO: 302884 - DNA, 60 bp, Artificial
  Synthetic oligonucleotide
aagaagtagcgctcagttattctgctggtgcacttgccagttgtatgggcctcatataca

SEQ ID NO: 302885 - DNA, 58 bp, Artificial
  Synthetic oligonucleotide
aagaagtagtaccatctaagtttcagtatggaggattgctcgattctcggagttataa

SEQ ID NO: 302886 - DNA, 56 bp, Artificial
  Synthetic oligonucleotide
aagaagtattgtgagaaacctgaatctagggtttctggtccatgggtatttggtga

SEQ ID NO: 302887 - DNA, 60 bp, Artificial
  Synthetic oligonucleotide
aagaagtcaatgggatacgtaagccaagacatctgtatgtttctatgccaactgcccagt

SEQ ID NO: 302888 - DNA, 60 bp, Artificial
  Synthetic oligonucleotide
aagaagtcaggccggattaagccatagcacggtaagagctatgctgcctgtgagccccgt

SEQ ID NO: 302889 - DNA, 55 bp, Artificial
  Synthetic oligonucleotide
aagaagtcctacataaacaggacagggacatttgagttcacaagttttttctatc

SEQ ID NO: 302890 - DNA, 60 bp, Artificial
  Synthetic oligonucleotide
aagaagtcctccaaaatatatcaagccgcgcaaatcgctcgcatcgcatttatgcttcta

SEQ ID NO: 302891 - DNA, 57 bp, Artificial
  Synthetic oligonucleotide
aagaagtcgcaaccaagtatggaaattggatgggacaaggaagtggaacgatcacta

SEQ ID NO: 302892 - DNA, 58 bp, Artificial
  Synthetic oligonucleotide
aagaagtctagtactgtgagggggttctctgctggtcttgaaagatcacgaggattac

SEQ ID NO: 302893 - DNA, 60 bp, Artificial
  Synthetic oligonucleotide
aagaagtgccataggccatgtgtcaaggcctatgttcttgtatgtgaggacaaatggaac

SEQ ID NO: 302894 - DNA, 55 bp, Artificial
  Synthetic oligonucleotide
aagaagtgcttacaggcaatctccaaacattaaaaataagggtacatgaggggta

SEQ ID NO: 302895 - DNA, 60 bp, Artificial
  Synthetic oligonucleotide
aagaagtgcttccactcgttttactatgccactgaacatgcgttactcaggacgcaattc

SEQ ID NO: 302896 - DNA, 55 bp, Artificial
  Synthetic oligonucleotide
aagaagtggaaggtaaatttcacccttgtcttttatctgaagtacattatatgga

SEQ ID NO: 302897 - DNA, 60 bp, Artificial
  Synthetic oligonucleotide
aagaagtgttagtatggaggtttgacagccgcctagcatttcagcacgtagcccgagagc

SEQ ID NO: 302898 - DNA, 56 bp, Artificial
  Synthetic oligonucleotide
aagaagttaaggaacctgcaggagacagaaatcaatactcaaaccctgcagaaact

SEQ ID NO: 302899 - DNA, 56 bp, Artificial
  Synthetic oligonucleotide
aagaagttcaaaggaataatagtggacaaccatccacagtcgtagataatacgctc

SEQ ID NO: 302900 - DNA, 57 bp, Artificial
  Synthetic oligonucleotide
aagaagtttaatttgctgttcgattcatggcataagacgggtggaagcgctttagta

SEQ ID NO: 302901 - DNA, 52 bp, Artificial
  Synthetic oligonucleotide
aagaagtttctaactgggactttccgctggggactttccagggaggtgtcac

SEQ ID NO: 302902 - DNA, 60 bp, Artificial
  Synthetic oligonucleotide
aagaagttttgggatcacatcgcgcagttgtttgcactgcacatatgagaggtttacgaa

SEQ ID NO: 302903 - DNA, 55 bp, Artificial
  Synthetic oligonucleotide
aagaataacgtcaacccgcgacagcgattcgaaggcgaggggtcaactacgcaac

SEQ ID NO: 302904 - DNA, 60 bp, Artificial
  Synthetic oligonucleotide
aagaataccaaggaccattaccactatgttcgcttgataaatacatgcacatggtgaaga

SEQ ID NO: 302905 - DNA, 55 bp, Artificial
  Synthetic oligonucleotide
aagaatagcgatcaacaggctgccgtttaacatgtacgctaaggtatggaacgac

SEQ ID NO: 302906 - DNA, 56 bp, Artificial
  Synthetic oligonucleotide
aagaatatacagacttgcttgataatgttaatactcctcgtgaacttttgtctgct

SEQ ID NO: 302907 - DNA, 58 bp, Artificial
  Synthetic oligonucleotide
aagaatatggttgcccctatcaccttctactaccctgacaaggctgaagtgacccaga

SEQ ID NO: 302908 - DNA, 55 bp, Artificial
  Synthetic oligonucleotide
aagaatcactctcagatgtcatcggactccttgacgtcgtcttatcctacaagcc

SEQ ID NO: 302909 - DNA, 56 bp, Artificial
  Synthetic oligonucleotide
aagaatcactggtattacagttctgattgacactgagggtggttccgcaaaaaaag

SEQ ID NO: 302910 - DNA, 60 bp, Artificial
  Synthetic oligonucleotide
aagaatcagaatgtgtgtgccataaggggatctgcccagtagtcatgacagatggcccag

SEQ ID NO: 302911 - DNA, 57 bp, Artificial
  Synthetic oligonucleotide
aagaatcagacagggcttcgaaaaggctttgcaataacatggggggcaaatggtcaa

SEQ ID NO: 302912 - DNA, 51 bp, Artificial
  Synthetic oligonucleotide
aagaatcatactaatactgtcatgttctttttagtacgtgatagaagacct

SEQ ID NO: 302913 - DNA, 58 bp, Artificial
  Synthetic oligonucleotide
aagaatcccacccagggatctttgaaaactcatgtcttgagacgatggaaattgttca

SEQ ID NO: 302914 - DNA, 59 bp, Artificial
  Synthetic oligonucleotide
aagaatcctcacaataccacagagtctagactcgtggtggacttctctcagttttctag

SEQ ID NO: 302915 - DNA, 57 bp, Artificial
  Synthetic oligonucleotide
aagaatcgaactccagggacgcagcaacaaatgaccgccaaatattacagccccgac

SEQ ID NO: 302916 - DNA, 57 bp, Artificial
  Synthetic oligonucleotide
aagaatcgcgcgtcaaagcttagataagcgtttttgtccttataaacttgctcgcca

SEQ ID NO: 302917 - DNA, 60 bp, Artificial
  Synthetic oligonucleotide
aagaatctcccagaagagtacagacttcctactataatgatgtcatccttctatgtgaag

SEQ ID NO: 302918 - DNA, 57 bp, Artificial
  Synthetic oligonucleotide
aagaatctgttatttgtgcactggtactttccttcgaactgaataagggtatgcaaa

SEQ ID NO: 302919 - DNA, 55 bp, Artificial
  Synthetic oligonucleotide
aagaatgaagctgttagacacttccctaggatatggcttcatggtttagggcaac

SEQ ID NO: 302920 - DNA, 58 bp, Artificial
  Synthetic oligonucleotide
aagaatgacaatagagataggtttcaagttctccgtcgatttcaggctacggtgactg

SEQ ID NO: 302921 - DNA, 55 bp, Artificial
  Synthetic oligonucleotide
aagaatgaccaacgtgatcgctatcaagtcttgcggaggtttcaggcaacggtga

SEQ ID NO: 302922 - DNA, 51 bp, Artificial
  Synthetic oligonucleotide
aagaatgataggcggtttgtgtgtttaaacttgggcgggaaaaggtggcgg

SEQ ID NO: 302923 - DNA, 50 bp, Artificial
  Synthetic oligonucleotide
aagaatgatcctgtgtactgacccagtgtttactaggataggtgcagcat

SEQ ID NO: 302924 - DNA, 60 bp, Artificial
  Synthetic oligonucleotide
aagaatgccgaagatcacttttcaaatatgaaatagtgatcttcgatgattcgtgtattt

SEQ ID NO: 302925 - DNA, 60 bp, Artificial
  Synthetic oligonucleotide
aagaatgccgactgtcactgcgtggcatgccggccgcttgaacgcccctgtgattgtgag

SEQ ID NO: 302926 - DNA, 55 bp, Artificial
  Synthetic oligonucleotide
aagaatggaagaagcggaccccaaccacataaaaggtgggtgttcacgctcaata

SEQ ID NO: 302927 - DNA, 55 bp, Artificial
  Synthetic oligonucleotide
aagaatggaagagatggatgagccaagggaatatctcgtaggagaaccatctgaa

SEQ ID NO: 302928 - DNA, 55 bp, Artificial
  Synthetic oligonucleotide
aagaatggactttaacaacattccgcacgaaatgcggatttacccgcaatgggtc

SEQ ID NO: 302929 - DNA, 60 bp, Artificial
  Synthetic oligonucleotide
aagaatggcagatgttgtgtccaggaaaaagatggatactaagcctgctgacccgactgg

SEQ ID NO: 302930 - DNA, 54 bp, Artificial
  Synthetic oligonucleotide
aagaatggggaaattttttcctactctataggtcttcttgagtctgttggagcc

SEQ ID NO: 302931 - DNA, 55 bp, Artificial
  Synthetic oligonucleotide
aagaatggggaagtcggggcatatttgtaaatttatgttcaggactccagcccag

SEQ ID NO: 302932 - DNA, 60 bp, Artificial
  Synthetic oligonucleotide
aagaatggggatggaactgtatgtcaggtatgatggagacccatggactgacagtgacgc

SEQ ID NO: 302933 - DNA, 59 bp, Artificial
  Synthetic oligonucleotide
aagaatggggctgcttagcaataggcacggggtgcgtatatgggtcttgccaagatgtc

SEQ ID NO: 302934 - DNA, 54 bp, Artificial
  Synthetic oligonucleotide
aagaatggtaattaactataaaaagttaaatgaccatacaaagggagatggcta

SEQ ID NO: 302935 - DNA, 56 bp, Artificial
  Synthetic oligonucleotide
aagaatgtaacagtaacgcactctgtcaaccttctagaaaacaaacataatggaaa

SEQ ID NO: 302936 - DNA, 60 bp, Artificial
  Synthetic oligonucleotide
aagaatgtacgtgaatcatgagctatcagataagttcttcgacaaaatgccccaaatcat

SEQ ID NO: 302937 - DNA, 60 bp, Artificial
  Synthetic oligonucleotide
aagaatgtcaatatgcatgtcaggaccgaacaacaatgcatcagcagtagtgtggtacgg

SEQ ID NO: 302938 - DNA, 60 bp, Artificial
  Synthetic oligonucleotide
aagaatgtcacgatcccgtagtgtacatcccatttatcttgggtcgatgcattatgatat

SEQ ID NO: 302939 - DNA, 57 bp, Artificial
  Synthetic oligonucleotide
aagaatgttattcagacgggggcattctcaccgtatgaagcgactgatgcaatgacg

SEQ ID NO: 302940 - DNA, 58 bp, Artificial
  Synthetic oligonucleotide
aagaatgtttccgtaaactccctgttaacaggcctatcgattggaatcagcgcatgcg

SEQ ID NO: 302941 - DNA, 55 bp, Artificial
  Synthetic oligonucleotide
aagaatgttttcgaacaaagctgcaccctaaccccggccgaacgtgctacactgc

SEQ ID NO: 302942 - DNA, 55 bp, Artificial
  Synthetic oligonucleotide
aagaattaccactcgaggtcagaatccaccattgaaaattttctaagtagatcgg

SEQ ID NO: 302943 - DNA, 50 bp, Artificial
  Synthetic oligonucleotide
aagaattacttttggagatggggcatcttgctccttgggatgttaatgat

SEQ ID NO: 302944 - DNA, 55 bp, Artificial
  Synthetic oligonucleotide
aagaattagggtttctatttattgacagtcgaagatgtcattctaagaataaaag

SEQ ID NO: 302945 - DNA, 60 bp, Artificial
  Synthetic oligonucleotide
aagaattatcagcacttgtggtggagatggggcatcacgctccttgggatgttgatgatc

SEQ ID NO: 302946 - DNA, 58 bp, Artificial
  Synthetic oligonucleotide
aagaattatgtcgaagcgaccagccgatattatcatttcaactcccgcgtcgaaggta

SEQ ID NO: 302947 - DNA, 60 bp, Artificial
  Synthetic oligonucleotide
aagaattgatggtggctacgatttcaactgtcctgcaagtactacagatgttactcatta

SEQ ID NO: 302948 - DNA, 58 bp, Artificial
  Synthetic oligonucleotide
aagaattggcagcctagaataattggagggataggaggcactatgaatgtaaaattac

SEQ ID NO: 302949 - DNA, 60 bp, Artificial
  Synthetic oligonucleotide
aagaattggctccaaaggagacgtatttgtcataagagagccatttatttcatgctctca

SEQ ID NO: 302950 - DNA, 52 bp, Artificial
  Synthetic oligonucleotide
aagaattggggtagagattttggcagccattttgacccatctggcagtgaac

SEQ ID NO: 302951 - DNA, 55 bp, Artificial
  Synthetic oligonucleotide
aagaattggttccaaaggagatgtttttgtcataagagaaccttttatatcatgt

SEQ ID NO: 302952 - DNA, 60 bp, Artificial
  Synthetic oligonucleotide
aagaattggttccaagggggatgtgtttgtcataagagagccattcatttcatgctccca

SEQ ID NO: 302953 - DNA, 54 bp, Artificial
  Synthetic oligonucleotide
aagaattggttccagaggacatgtttttgtcataagggagcccttcgtttcttg

SEQ ID NO: 302954 - DNA, 55 bp, Artificial
  Synthetic oligonucleotide
aagaattgtaggactgggaagctcctacccgccatgaacatgccctggaaagcct

SEQ ID NO: 302955 - DNA, 55 bp, Artificial
  Synthetic oligonucleotide
aagaattgtgtcaaggcatgggcagtttaccattgagaagacacatagcttacca

SEQ ID NO: 302956 - DNA, 60 bp, Artificial
  Synthetic oligonucleotide
aagaatttgaaagttgatatgcgagagactatgaggacatggaggggacccagctccgat

SEQ ID NO: 302957 - DNA, 60 bp, Artificial
  Synthetic oligonucleotide
aagaatttggctgcctggcaattaatactgggtgtgtttttggctcatgccaggacatta

SEQ ID NO: 302958 - DNA, 60 bp, Artificial
  Synthetic oligonucleotide
aagaatttgtagagctatctccaacatacctacaagaatcagacagggccttgaaatagc

SEQ ID NO: 302959 - DNA, 57 bp, Artificial
  Synthetic oligonucleotide
aagaattttcgaaggaattgagatacacgtcagtatgacttcaataatacacgtaag

SEQ ID NO: 302960 - DNA, 50 bp, Artificial
  Synthetic oligonucleotide
aagaattttgcaacagttattgtttgttcatttcagaattgggtgtcagc

SEQ ID NO: 302961 - DNA, 58 bp, Artificial
  Synthetic oligonucleotide
aagacaaaattaactccagactgggtcattgaggaggaatgtgaactggattatttca

SEQ ID NO: 302962 - DNA, 56 bp, Artificial
  Synthetic oligonucleotide
aagacaaactgtcggtgagtttttggtctccttcggagtgtggattcgcactcctc

SEQ ID NO: 302963 - DNA, 53 bp, Artificial
  Synthetic oligonucleotide
aagacaacaaaggaaccaggataaggtttaaggatgattcttcctttgaagag

SEQ ID NO: 302964 - DNA, 60 bp, Artificial
  Synthetic oligonucleotide
aagacaaccagaggtctgtttggtgcaattgctggctttatagagaatggctggcaaggc

SEQ ID NO: 302965 - DNA, 56 bp, Artificial
  Synthetic oligonucleotide
aagacaaccctaacatgactgacaaaactccagtccactcgtgggaagacatacct

SEQ ID NO: 302966 - DNA, 53 bp, Artificial
  Synthetic oligonucleotide
aagacaactacggccggcggtaaagctattaagaaacggcgacaaacaactgc

SEQ ID NO: 302967 - DNA, 57 bp, Artificial
  Synthetic oligonucleotide
aagacaagagattctagacctttgggtttatcacacacaaggaatcttccctgactg

SEQ ID NO: 302968 - DNA, 58 bp, Artificial
  Synthetic oligonucleotide
aagacaagcacactgtaacattagtagaacaggatggaagaacactttaaacaagata

SEQ ID NO: 302969 - DNA, 56 bp, Artificial
  Synthetic oligonucleotide
aagacaagcacattgtaacattagtggagaaaaatggcataacactttaaaacagg

SEQ ID NO: 302970 - DNA, 54 bp, Artificial
  Synthetic oligonucleotide
aagacaagcacattgtaaccttagtgaagcaagttggaataaaactttaaaaca

SEQ ID NO: 302971 - DNA, 56 bp, Artificial
  Synthetic oligonucleotide
aagacaagcacattgtaatgttagtggaaaagactggggtaagatgttacaagagg

SEQ ID NO: 302972 - DNA, 54 bp, Artificial
  Synthetic oligonucleotide
aagacaaggaaagatgccatgctaggaacacatgttgtctgggacattgggttg

SEQ ID NO: 302973 - DNA, 56 bp, Artificial
  Synthetic oligonucleotide
aagacaagtgacggtttagctgttaacatcggtacaaaagatgttaagtatgctaa

SEQ ID NO: 302974 - DNA, 57 bp, Artificial
  Synthetic oligonucleotide
aagacaagtgatgctgggtcagacagagtgatggtgtcccccctagctgtgacttgg

SEQ ID NO: 302975 - DNA, 58 bp, Artificial
  Synthetic oligonucleotide
aagacaataaatggattgtaccagcagaatgtaagatagaaagagaccttaatatagc

SEQ ID NO: 302976 - DNA, 52 bp, Artificial
  Synthetic oligonucleotide
aagacaatattcttggccaccacctcttcaactcactctgccgagcttatca

SEQ ID NO: 302977 - DNA, 55 bp, Artificial
  Synthetic oligonucleotide
aagacacacagcaggagatgtcaaccgtgatatgcacaccatgcttggtgttcgt

SEQ ID NO: 302978 - DNA, 54 bp, Artificial
  Synthetic oligonucleotide
aagacacaccgcacttggtcttggaattggaggagaagaaaacataaatccaac

SEQ ID NO: 302979 - DNA, 54 bp, Artificial
  Synthetic oligonucleotide
aagacacacgattcggttcgtgccggttgaccgattacgcgcagagccgcaacc

SEQ ID NO: 302980 - DNA, 59 bp, Artificial
  Synthetic oligonucleotide
aagacacccaatcaatataccaagactcagcattaactgaaggtttggaggatgacttg

SEQ ID NO: 302981 - DNA, 57 bp, Artificial
  Synthetic oligonucleotide
aagacacgcaacaatccacgacgacctacttctagaactccaaacaattgaggataa

SEQ ID NO: 302982 - DNA, 60 bp, Artificial
  Synthetic oligonucleotide
aagacacggctctgtacctagtagatggaatgaccaacactatagagaatgccagacagg

SEQ ID NO: 302983 - DNA, 50 bp, Artificial
  Synthetic oligonucleotide
aagacacgtgaggttgaggacctgaagagtcaattaagtcagcttagaat

SEQ ID NO: 302984 - DNA, 57 bp, Artificial
  Synthetic oligonucleotide
aagacactaaaatagatctatggtcttacaacgcggagcttcttgtggccctggaaa

SEQ ID NO: 302985 - DNA, 51 bp, Artificial
  Synthetic oligonucleotide
aagacacttaaatttctggaccgttagcaaccaagacctagacctagccag

SEQ ID NO: 302986 - DNA, 60 bp, Artificial
  Synthetic oligonucleotide
aagacagaaacagatccatacgattggtgagcggattcttgccacttatctgggaagatc

SEQ ID NO: 302987 - DNA, 59 bp, Artificial
  Synthetic oligonucleotide
aagacagaagcccatatcgaaccctaatgagctgtcctattggtgaagttccctctcca

SEQ ID NO: 302988 - DNA, 59 bp, Artificial
  Synthetic oligonucleotide
aagacagaagcccctatagaactctaatgagtgtagaaatagggcaatcacctaatgtg

SEQ ID NO: 302989 - DNA, 55 bp, Artificial
  Synthetic oligonucleotide
aagacagaagccctcacagaacattaatgagttgtcctatgggtgaggctccctc

SEQ ID NO: 302990 - DNA, 55 bp, Artificial
  Synthetic oligonucleotide
aagacagaattaacggatccaaaggaataaatgggacgctctggggagagcttaa

SEQ ID NO: 302991 - DNA, 60 bp, Artificial
  Synthetic oligonucleotide
aagacagagcctgtggctgttatggagcgttatattgctcttgccatagacgcttacccg

SEQ ID NO: 302992 - DNA, 60 bp, Artificial
  Synthetic oligonucleotide
aagacagaggccatagtgtgtgtagaacttaccagtcaggaaaggcagtgtagcttgatt

SEQ ID NO: 302993 - DNA, 60 bp, Artificial
  Synthetic oligonucleotide
aagacagatgcttgacaacatgagaaaagctgggttaactgatatacctaagatgataca

SEQ ID NO: 302994 - DNA, 53 bp, Artificial
  Synthetic oligonucleotide
aagacagccttagacaactctatagggtctttcggttacgaggacaccccgag

SEQ ID NO: 302995 - DNA, 51 bp, Artificial
  Synthetic oligonucleotide
aagacagcgtcttatacaccgacactcccagacttcttgccttttcacctg

SEQ ID NO: 302996 - DNA, 60 bp, Artificial
  Synthetic oligonucleotide
aagacagctcatgcaaagaagcaggaagtagtcgtactggggtcacaagaaggagcaatg

SEQ ID NO: 302997 - DNA, 60 bp, Artificial
  Synthetic oligonucleotide
aagacagctgaatcaaaccaatttatgcctaagagtaggttgatcattatcggaccaaga

SEQ ID NO: 302998 - DNA, 59 bp, Artificial
  Synthetic oligonucleotide
aagacaggatgtgctgaaaattctttccaagggttgtatgtctgtttcataggaaagca

SEQ ID NO: 302999 - DNA, 55 bp, Artificial
  Synthetic oligonucleotide
aagacagtatgagcagatacctatggaaatctgcggacataaagctataggtaca

SEQ ID NO: 303000 - DNA, 54 bp, Artificial
  Synthetic oligonucleotide
aagacagtgcccctaacatggactgggtttctagcagtttcaggagagatagaa

SEQ ID NO: 303001 - DNA, 60 bp, Artificial
  Synthetic oligonucleotide
aagacagtggaaatgagagtgagggggataccgatgaattggcaactcttgtggacatgg

SEQ ID NO: 303002 - DNA, 60 bp, Artificial
  Synthetic oligonucleotide
aagacagtggcaatgagagtgatggggatacagaggaattgtcaaaactggtggagatgg

SEQ ID NO: 303003 - DNA, 51 bp, Artificial
  Synthetic oligonucleotide
aagacagttaagcagaggaaatgcagaaatgaacttgataaatcatggtac

SEQ ID NO: 303004 - DNA, 56 bp, Artificial
  Synthetic oligonucleotide
aagacataaacaagggactggtttccgtcccaaccaggatcatccatctcccgcta

SEQ ID NO: 303005 - DNA, 55 bp, Artificial
  Synthetic oligonucleotide
aagacatattgtgtgtcaggacaattaattgaagggaattgctttaacccgctgc

SEQ ID NO: 303006 - DNA, 60 bp, Artificial
  Synthetic oligonucleotide
aagacatcaactcatgttactctctcattcagacctcaaatgattgcaatgagtaagcat

SEQ ID NO: 303007 - DNA, 60 bp, Artificial
  Synthetic oligonucleotide
aagacatctatgcctattgccccctgtaggagtgcactagatgttgcgtgaagatatttc

SEQ ID NO: 303008 - DNA, 57 bp, Artificial
  Synthetic oligonucleotide
aagacatggtcagagataccatacctcccgaagacgaaggacataaactgtggaagt

SEQ ID NO: 303009 - DNA, 58 bp, Artificial
  Synthetic oligonucleotide
aagacattattcagactctgtgtatggagacacattggaaaaactaactaacactggg

SEQ ID NO: 303010 - DNA, 59 bp, Artificial
  Synthetic oligonucleotide
aagacatttgcttcgtggtggagtcatcagttaagtagagggttcacaatcccacacta

SEQ ID NO: 303011 - DNA, 55 bp, Artificial
  Synthetic oligonucleotide
aagaccaaaacctttcctgctagaaaagcgggtgtcacaccactggtggtcacat

SEQ ID NO: 303012 - DNA, 60 bp, Artificial
  Synthetic oligonucleotide
aagaccaatgcaattgatgaaggaaatggatgttttgaactcctccacaaatgtaatgac

SEQ ID NO: 303013 - DNA, 57 bp, Artificial
  Synthetic oligonucleotide
aagaccaatttatacggattcatcataaaaggaagatctcacttaaggaatgacacc

SEQ ID NO: 303014 - DNA, 55 bp, Artificial
  Synthetic oligonucleotide
aagaccacacctaatctccactttcggtgtgtgaccctaagccattggacttctt

SEQ ID NO: 303015 - DNA, 60 bp, Artificial
  Synthetic oligonucleotide
aagaccacaggcaatcgtccgaaatctccctggtgttatctcatcagccttcatagttga

SEQ ID NO: 303016 - DNA, 55 bp, Artificial
  Synthetic oligonucleotide
aagaccaccgtgatccacagctccactcatccaggcctgtcattatccgtcacgg

SEQ ID NO: 303017 - DNA, 59 bp, Artificial
  Synthetic oligonucleotide
aagaccacctagacttctgggagagagtgtttaccggactgactcatatagatgcccac

SEQ ID NO: 303018 - DNA, 55 bp, Artificial
  Synthetic oligonucleotide
aagaccacgtcttaaagcctgggtccatctaaaggatgccacattatcggaagtc

SEQ ID NO: 303019 - DNA, 52 bp, Artificial
  Synthetic oligonucleotide
aagaccactcggagggtgtaaggccgtccagattcggaaggttagaaaacac

SEQ ID NO: 303020 - DNA, 51 bp, Artificial
  Synthetic oligonucleotide
aagaccagatttacttcaacgctcgctgtcagtcgcgacgtggtgacctgt

SEQ ID NO: 303021 - DNA, 56 bp, Artificial
  Synthetic oligonucleotide
aagaccaggagaatctactggacgatctgaccgaattaaagactacggtacaacca

SEQ ID NO: 303022 - DNA, 55 bp, Artificial
  Synthetic oligonucleotide
aagaccagtctgaggctgtaaggtcgtccagattcggaaggttagaaaacacttg

SEQ ID NO: 303023 - DNA, 59 bp, Artificial
  Synthetic oligonucleotide
aagaccagtctgagggtgtaaggtcgtccagattcggtatgtcagaaaacatttgtgca

SEQ ID NO: 303024 - DNA, 60 bp, Artificial
  Synthetic oligonucleotide
aagaccatctcctagcttacttaaacgagcatgtgtgcgtgaacgccaaggaccatgaga

SEQ ID NO: 303025 - DNA, 60 bp, Artificial
  Synthetic oligonucleotide
aagaccattttaagggcattaggaccagcagctacattagaagaaatgatgacagcatgt

SEQ ID NO: 303026 - DNA, 51 bp, Artificial
  Synthetic oligonucleotide
aagacccaagcaaattcacgcaaccggtagtggacttaatgaaggaatccg

SEQ ID NO: 303027 - DNA, 52 bp, Artificial
  Synthetic oligonucleotide
aagaccccatgttgaagttcccatagggtcgaaaaccgtttggaaagtgcac

SEQ ID NO: 303028 - DNA, 54 bp, Artificial
  Synthetic oligonucleotide
aagaccccgcaaatctaatgattcagtggctaacatccgggaatagaccctcga

SEQ ID NO: 303029 - DNA, 55 bp, Artificial
  Synthetic oligonucleotide
aagacccctaagtattcctctgttacacttgctcctgcctacaaagttggacgtc

SEQ ID NO: 303030 - DNA, 55 bp, Artificial
  Synthetic oligonucleotide
aagacccgaagaggctaaatacgtatggtggacaagtaatagtctaattgccctg

SEQ ID NO: 303031 - DNA, 54 bp, Artificial
  Synthetic oligonucleotide
aagacccggactacgtccctccggtggtgcatgggtgcccgctaccacccacca

SEQ ID NO: 303032 - DNA, 55 bp, Artificial
  Synthetic oligonucleotide
aagacccggccaagcagaaaacacagggtggtcatcagggtgggcgccccaagac

SEQ ID NO: 303033 - DNA, 54 bp, Artificial
  Synthetic oligonucleotide
aagacccggttcatttttccgcggtgatggagaggcctcgctgcaaccagacaa

SEQ ID NO: 303034 - DNA, 51 bp, Artificial
  Synthetic oligonucleotide
aagaccctaatgatttcaagttgttagggacgaagtaccgtgacggacggg

SEQ ID NO: 303035 - DNA, 58 bp, Artificial
  Synthetic oligonucleotide
aagaccctcagtttcaagacagcgattacattggtcggctttgactagccgaccatca

SEQ ID NO: 303036 - DNA, 60 bp, Artificial
  Synthetic oligonucleotide
aagaccctgatcgcagcaatgttaagtcaaagaaccatgtcgcttgatttcgtgactaca

SEQ ID NO: 303037 - DNA, 53 bp, Artificial
  Synthetic oligonucleotide
aagacccttaagaaaagaccagtccgaggctgtaaggtcgtcaagatccggaa

SEQ ID NO: 303038 - DNA, 59 bp, Artificial
  Synthetic oligonucleotide
aagaccctttcacaacacctactgttatatccatccaacattcttagtagagcggatgc

SEQ ID NO: 303039 - DNA, 53 bp, Artificial
  Synthetic oligonucleotide
aagaccgaaaggaggagaaagccccccgcctcattgtcttcccgcctctggac

SEQ ID NO: 303040 - DNA, 58 bp, Artificial
  Synthetic oligonucleotide
aagaccgaaagtcagcagccattatgctcttatccaccgctaaagctatgttgccttt

SEQ ID NO: 303041 - DNA, 57 bp, Artificial
  Synthetic oligonucleotide
aagaccgaataatgttgaagtagaatttttgttgaatggacaaattatcaatacata

SEQ ID NO: 303042 - DNA, 54 bp, Artificial
  Synthetic oligonucleotide
aagaccggagccctatcgtacttcaacgtacagcaggggcgtcgtatcatagtc

SEQ ID NO: 303043 - DNA, 54 bp, Artificial
  Synthetic oligonucleotide
aagaccggttcagagtgtagcttcaagtaggagacacaagagatttgcgggagt

SEQ ID NO: 303044 - DNA, 60 bp, Artificial
  Synthetic oligonucleotide
aagacctaagtgaaacaccatgtcaaattgatttagcaacagcctctatagatggagcat

SEQ ID NO: 303045 - DNA, 50 bp, Artificial
  Synthetic oligonucleotide
aagacctacgaaaaggcgttaattgggggaacaggcagcatagtcatctt

SEQ ID NO: 303046 - DNA, 58 bp, Artificial
  Synthetic oligonucleotide
aagacctacggaacctgtgccttttcagctgccaccgattgagagacttcgccttgat

SEQ ID NO: 303047 - DNA, 51 bp, Artificial
  Synthetic oligonucleotide
aagacctagcaatgcaaatagcaaaatatgggtttatgttaccggaagaca

SEQ ID NO: 303048 - DNA, 56 bp, Artificial
  Synthetic oligonucleotide
aagacctagcccacgtggtcttccccgttctactatcaccctctgtgacaatacgc

SEQ ID NO: 303049 - DNA, 57 bp, Artificial
  Synthetic oligonucleotide
aagacctatacaaaaaagacagttcctatgtagcagtgggttcagagacctacaaca

SEQ ID NO: 303050 - DNA, 60 bp, Artificial
  Synthetic oligonucleotide
aagacctcaacgccagacataggctatacacgtacccagcttacagatctcacagagaag

SEQ ID NO: 303051 - DNA, 55 bp, Artificial
  Synthetic oligonucleotide
aagacctcaagatcgaccaggctggcacctcgacgtcgggcaagaggtaccgcgt

SEQ ID NO: 303052 - DNA, 60 bp, Artificial
  Synthetic oligonucleotide
aagacctctcctaatagatggcacagcctcactgagtcctggaatgatgatgggcatgtt

SEQ ID NO: 303053 - DNA, 56 bp, Artificial
  Synthetic oligonucleotide
aagacctctttgagatgatgtttgcgggttttactggttccgagtgtcttctaata

SEQ ID NO: 303054 - DNA, 57 bp, Artificial
  Synthetic oligonucleotide
aagacctgatcatacttacctgcgaatggagctacttgacggtcgaatccttgtgca

SEQ ID NO: 303055 - DNA, 59 bp, Artificial
  Synthetic oligonucleotide
aagacctgcaataggagaactaaggtgtgagactacggcattgaaactagggatcaagc

SEQ ID NO: 303056 - DNA, 50 bp, Artificial
  Synthetic oligonucleotide
aagacctggataaatatggagcacttacaagcagcaacacagacaccaat

SEQ ID NO: 303057 - DNA, 59 bp, Artificial
  Synthetic oligonucleotide
aagacctggcccacattgtcttgcccgtacgactatcaccctcaatgacaatactcttg

SEQ ID NO: 303058 - DNA, 54 bp, Artificial
  Synthetic oligonucleotide
aagacctggctaaaagccaagctcgtgccacaactccccgggattcccttcgtg

SEQ ID NO: 303059 - DNA, 57 bp, Artificial
  Synthetic oligonucleotide
aagacctggctaaaggccaagctcgtgccacaactgcctggaatcccctttgtgtcc

SEQ ID NO: 303060 - DNA, 55 bp, Artificial
  Synthetic oligonucleotide
aagacctgtttacaagactgcataacgcagtggaggcttacgacatacggcagtc

SEQ ID NO: 303061 - DNA, 59 bp, Artificial
  Synthetic oligonucleotide
aagacctgtttgtttgatatgtttcagtgagtacctaaactcatacatcttacatccgc

SEQ ID NO: 303062 - DNA, 58 bp, Artificial
  Synthetic oligonucleotide
aagaccttactatggcttgggaataacaccctcgatcagatgagagccaccacaagag

SEQ ID NO: 303063 - DNA, 55 bp, Artificial
  Synthetic oligonucleotide
aagaccttccgcacatcaataactgatggcgcccacctcgaggtcaacggccctg

SEQ ID NO: 303064 - DNA, 54 bp, Artificial
  Synthetic oligonucleotide
aagaccttgcggtattgtgcccgcaaagagcgtgtgtggcccagtatattgttt

SEQ ID NO: 303065 - DNA, 59 bp, Artificial
  Synthetic oligonucleotide
aagacctttgtgtgtataacactcaagttatgaccaatcttacgttggcgagagatata

SEQ ID NO: 303066 - DNA, 55 bp, Artificial
  Synthetic oligonucleotide
aagacgaagaatcacactaacaacgtgttattctggttagttagggatagacgtc

SEQ ID NO: 303067 - DNA, 58 bp, Artificial
  Synthetic oligonucleotide
aagacgaagggttgacataaaccctggccacgctgacctcagtgccaaagaggcacag

SEQ ID NO: 303068 - DNA, 53 bp, Artificial
  Synthetic oligonucleotide
aagacgaagtaaagaatagtggaaaacgcgtaaagaataagcgtactcagtac

SEQ ID NO: 303069 - DNA, 55 bp, Artificial
  Synthetic oligonucleotide
aagacgacgtcgcagaaaataaacgtcatgaggcatgcacacgtgtcccgtcgca

SEQ ID NO: 303070 - DNA, 60 bp, Artificial
  Synthetic oligonucleotide
aagacgatcctggagattcaattgcctacacaattcccgaatggtcgagtaatactgata

SEQ ID NO: 303071 - DNA, 53 bp, Artificial
  Synthetic oligonucleotide
aagacgcaagcatcaatggcaacgcaagcaatcatggttggagaattcaagat

SEQ ID NO: 303072 - DNA, 60 bp, Artificial
  Synthetic oligonucleotide
aagacgcagcgaatgtgatgaacaatgcacttttgacaccactcccaagcaaccgtctcg

SEQ ID NO: 303073 - DNA, 54 bp, Artificial
  Synthetic oligonucleotide
aagacgccaccgggtaggtcgctggagaaaactatttaggcgggtgaagagcag

SEQ ID NO: 303074 - DNA, 55 bp, Artificial
  Synthetic oligonucleotide
aagacgccagcccatccccaaagatcggcgttccgctggcaagtcctggggacgt

SEQ ID NO: 303075 - DNA, 50 bp, Artificial
  Synthetic oligonucleotide
aagacgcccgccaaaatagtgtatttgcaatggggctcccattgctacga

SEQ ID NO: 303076 - DNA, 53 bp, Artificial
  Synthetic oligonucleotide
aagacgcgcttggagcttgagaagagtgcactcaaggggaaactcgggcccct

SEQ ID NO: 303077 - DNA, 51 bp, Artificial
  Synthetic oligonucleotide
aagacgcgtctttgaaccctgttctgaaccactcagtacaacccctccaag

SEQ ID NO: 303078 - DNA, 55 bp, Artificial
  Synthetic oligonucleotide
aagacgcgtggcgcgtcatatgtcgcctgtgaattgctcgggttctcacgcccgg

SEQ ID NO: 303079 - DNA, 57 bp, Artificial
  Synthetic oligonucleotide
aagacgctaaagcgaccgtagctgtagataataataaggatagagacgtagtatttg

SEQ ID NO: 303080 - DNA, 60 bp, Artificial
  Synthetic oligonucleotide
aagacgctatgacaaatgtacgggaatatgattgtgtatcttaacgcataagggccgcag

SEQ ID NO: 303081 - DNA, 57 bp, Artificial
  Synthetic oligonucleotide
aagacgctatgacaaatgtacgggtacctgattaggtatcctaacgatctagggcca

SEQ ID NO: 303082 - DNA, 55 bp, Artificial
  Synthetic oligonucleotide
aagacgctcgaggcggtacaagatataccgaaattctacaatcacatttcggagt

SEQ ID NO: 303083 - DNA, 54 bp, Artificial
  Synthetic oligonucleotide
aagacgcttagatggacagctgacttagttgtcgaagatatccgtcgtagaggg

SEQ ID NO: 303084 - DNA, 52 bp, Artificial
  Synthetic oligonucleotide
aagacggctgaccccgtctatgggaaagtgttcaatcccccccgcaacctgt

SEQ ID NO: 303085 - DNA, 53 bp, Artificial
  Synthetic oligonucleotide
aagacgggggactccaggggaggactccaggatagctctcgtctaaaacctac

SEQ ID NO: 303086 - DNA, 55 bp, Artificial
  Synthetic oligonucleotide
aagacgtcacaccgttagttggtaaactcaattccacagtattttctcgtgtgcg

SEQ ID NO: 303087 - DNA, 60 bp, Artificial
  Synthetic oligonucleotide
aagacgtcaggatggctctctttggagcctcagattcaaaagaagcttgtactttcgtga

SEQ ID NO: 303088 - DNA, 53 bp, Artificial
  Synthetic oligonucleotide
aagacgtccggaaacaaccctacaacctgaccatcgcttggtttcggatggga

SEQ ID NO: 303089 - DNA, 57 bp, Artificial
  Synthetic oligonucleotide
aagacgtgccctcacaacagctacaattactctattaccggacgctgaaagatttag

SEQ ID NO: 303090 - DNA, 54 bp, Artificial
  Synthetic oligonucleotide
aagacgtgtcgcgagttaggggcctggccaaaatttggtgaggttttgcgagcc

SEQ ID NO: 303091 - DNA, 51 bp, Artificial
  Synthetic oligonucleotide
aagacgtgtgggggccccccatgtaacatcggggggacgggcaacaacacc

SEQ ID NO: 303092 - DNA, 55 bp, Artificial
  Synthetic oligonucleotide
aagacgtgtgtttaagactacgttagacaaatatctgagtctatcagaggcggag

SEQ ID NO: 303093 - DNA, 51 bp, Artificial
  Synthetic oligonucleotide
aagacgttacgactcacatccctcgttacattgagggtgaggctcgtttca

SEQ ID NO: 303094 - DNA, 52 bp, Artificial
  Synthetic oligonucleotide
aagacgttactcgtttggaccttcccaagggtgtcggagacgctaaacttca

SEQ ID NO: 303095 - DNA, 57 bp, Artificial
  Synthetic oligonucleotide
aagacgttcttcacaagggctatgctgatccgtgtttacgggaagtagccaagtatg

SEQ ID NO: 303096 - DNA, 60 bp, Artificial
  Synthetic oligonucleotide
aagacgttgagagtgtgctgaatcctgtccgtcatggcaatctgctagacacgtatcttg

SEQ ID NO: 303097 - DNA, 53 bp, Artificial
  Synthetic oligonucleotide
aagacgtttgagggcgctatgaagaatgttaagggcgccctgggttatttggg

SEQ ID NO: 303098 - DNA, 55 bp, Artificial
  Synthetic oligonucleotide
aagacgtttgtgacacaactttggttaacttagacgttgtactctgcaacttgcg

SEQ ID NO: 303099 - DNA, 57 bp, Artificial
  Synthetic oligonucleotide
aagactaaaagtcgcatagttcttaggaatcttactgaattcacctgggattctcaa

SEQ ID NO: 303100 - DNA, 48 bp, Artificial
  Synthetic oligonucleotide
aagactaaatcgtgtccgggtacacccccggggggccccacaggggcc

SEQ ID NO: 303101 - DNA, 51 bp, Artificial
  Synthetic oligonucleotide
aagactaagttccattctggacgtgttaggattttatttgttcctggtgac

SEQ ID NO: 303102 - DNA, 55 bp, Artificial
  Synthetic oligonucleotide
aagactacacgaagttccttagagacgagttggtgaaacggctcggcaagtggcc

SEQ ID NO: 303103 - DNA, 57 bp, Artificial
  Synthetic oligonucleotide
aagactacataggccagccataacatcacggcgtggtcttgttaggtttagtagaat

SEQ ID NO: 303104 - DNA, 54 bp, Artificial
  Synthetic oligonucleotide
aagactactaccagtcctccgcgacccacaaaagaggtggagactcttaaacta

SEQ ID NO: 303105 - DNA, 60 bp, Artificial
  Synthetic oligonucleotide
aagactaggtacatctataactgcgatacagtatcatacctattcttcgattacatctta

SEQ ID NO: 303106 - DNA, 55 bp, Artificial
  Synthetic oligonucleotide
aagactagtatacccctgttggtgaaagtactatattgcccctggatattattgt

SEQ ID NO: 303107 - DNA, 57 bp, Artificial
  Synthetic oligonucleotide
aagactataacagggacctcttagttagtacaaccaccgctcatgggtgtgatacta

SEQ ID NO: 303108 - DNA, 55 bp, Artificial
  Synthetic oligonucleotide
aagactatcaggaaccatctccactacgtccctgagtccaatcactcctcggctt

SEQ ID NO: 303109 - DNA, 55 bp, Artificial
  Synthetic oligonucleotide
aagactatgggatcatgcattcaaatgagtatcttagcgaactgaaggaatcagg

SEQ ID NO: 303110 - DNA, 55 bp, Artificial
  Synthetic oligonucleotide
aagactatgttgatgtgcagtttgcagatcgtgttacggctcactggaaacgggg

SEQ ID NO: 303111 - DNA, 60 bp, Artificial
  Synthetic oligonucleotide
aagactcatccagatcactgaatgagctgcctagtagtgagaatcgtggcaggatgccct

SEQ ID NO: 303112 - DNA, 57 bp, Artificial
  Synthetic oligonucleotide
aagactcattatcacaaatgtttcttataaaaggttggccaacaggatcagtctatt

SEQ ID NO: 303113 - DNA, 55 bp, Artificial
  Synthetic oligonucleotide
aagactccctgggatactggaccggaggatacggccacctacagcgtcccggaga

SEQ ID NO: 303114 - DNA, 57 bp, Artificial
  Synthetic oligonucleotide
aagactccgtatcagattgcctgcgaccgtgccaataccaggatgatggacctactc

SEQ ID NO: 303115 - DNA, 60 bp, Artificial
  Synthetic oligonucleotide
aagactctagaattgaagtccagatgtccactcaagtaattatgtgggcctaaagcacga

SEQ ID NO: 303116 - DNA, 55 bp, Artificial
  Synthetic oligonucleotide
aagactctatacttgaggacttcttctcaggtgacctaccttatttcgaaatccc

SEQ ID NO: 303117 - DNA, 60 bp, Artificial
  Synthetic oligonucleotide
aagactctcattgtcaggcaatggcaaccagacgttataaagagatgctttatcacaggg

SEQ ID NO: 303118 - DNA, 55 bp, Artificial
  Synthetic oligonucleotide
aagactcttaagaaacgaccagtctgaggccgtaaggtcgtccagatcgtgaagt

SEQ ID NO: 303119 - DNA, 60 bp, Artificial
  Synthetic oligonucleotide
aagactgagagagagttgctagccatggtctcctccatccaaataaattggtcagtcaca

SEQ ID NO: 303120 - DNA, 53 bp, Artificial
  Synthetic oligonucleotide
aagactgatagcccctgctcccttacccctgaatatgccaaatttggaagcaa

SEQ ID NO: 303121 - DNA, 60 bp, Artificial
  Synthetic oligonucleotide
aagactgcattcttgattgcccactgcttcaatgctgcattcttctcttcgtccaaatat

SEQ ID NO: 303122 - DNA, 52 bp, Artificial
  Synthetic oligonucleotide
aagactgcgacccgtctgcatgaggtataatgcgaacagggggcatgctgaa

SEQ ID NO: 303123 - DNA, 55 bp, Artificial
  Synthetic oligonucleotide
aagactggagcttgagcacgcacagaagtttataacacgtctttacagctggttg

SEQ ID NO: 303124 - DNA, 55 bp, Artificial
  Synthetic oligonucleotide
aagactggatgatgacagatccagacagttatatagaaatgatggctcaaaccgg

SEQ ID NO: 303125 - DNA, 60 bp, Artificial
  Synthetic oligonucleotide
aagactggcaacttacagactctgttatctcaactacagggctacatgccaaagacctgg

SEQ ID NO: 303126 - DNA, 55 bp, Artificial
  Synthetic oligonucleotide
aagactgtgatagatactgaacctttaaaatcatgtctggcagccatagacggag

SEQ ID NO: 303127 - DNA, 56 bp, Artificial
  Synthetic oligonucleotide
aagactgtggttgtttttagatggccatatctaactttcatgtatgattctacagt

SEQ ID NO: 303128 - DNA, 51 bp, Artificial
  Synthetic oligonucleotide
aagactgttccagtgggggtcatggggtccggggggggggctacaccagtg

SEQ ID NO: 303129 - DNA, 60 bp, Artificial
  Synthetic oligonucleotide
aagactgttctcgagatgcttcagacgcacttggttgccgggccagatgcatctgaaaca

SEQ ID NO: 303130 - DNA, 55 bp, Artificial
  Synthetic oligonucleotide
aagactgtttcagagaacccgctgccactcagctgttggtctgaagtgcaaaact

SEQ ID NO: 303131 - DNA, 57 bp, Artificial
  Synthetic oligonucleotide
aagacttaaagccactgggcttaatgtgggagaagttctcctagtgtaagagatgaa

SEQ ID NO: 303132 - DNA, 60 bp, Artificial
  Synthetic oligonucleotide
aagacttagatagacatggagcacttacaagcagcaacacagtcaccaataatgctgatt

SEQ ID NO: 303133 - DNA, 58 bp, Artificial
  Synthetic oligonucleotide
aagacttccccttgagtctgtacctgcccccaactgtctcatacatcactgtgttctt

SEQ ID NO: 303134 - DNA, 56 bp, Artificial
  Synthetic oligonucleotide
aagacttccgagcgatcgcaacctcgaggtagacgccagcctatccccaaggcacg

SEQ ID NO: 303135 - DNA, 55 bp, Artificial
  Synthetic oligonucleotide
aagacttcggagcggtcccagccacgtggaagacgccagcccatccccaaagatc

SEQ ID NO: 303136 - DNA, 53 bp, Artificial
  Synthetic oligonucleotide
aagacttctccgcagttagattcgtagatccactcacaggggcgacgatagat

SEQ ID NO: 303137 - DNA, 60 bp, Artificial
  Synthetic oligonucleotide
aagacttgcaagataatgcacttttccctgagttgaaatggggcgcaacgcctgatacta

SEQ ID NO: 303138 - DNA, 59 bp, Artificial
  Synthetic oligonucleotide
aagacttgccgctttctggacaactagcaatggaagagccgttcttaatgagattacca

SEQ ID NO: 303139 - DNA, 57 bp, Artificial
  Synthetic oligonucleotide
aagacttgggccctaagttgtttgacgagtatataattaagtcactcatgacgtcag

SEQ ID NO: 303140 - DNA, 57 bp, Artificial
  Synthetic oligonucleotide
aagacttgtacaaaaaggacagttcttatgtagcagtgggttcagagagttacaaca

SEQ ID NO: 303141 - DNA, 55 bp, Artificial
  Synthetic oligonucleotide
aagactttaaagagtccacgcattgccaaacttaaccagctctcgccccggtgtg

SEQ ID NO: 303142 - DNA, 55 bp, Artificial
  Synthetic oligonucleotide
aagactttattatcaactacttactatgcaaaataccacctaaagaagctaagta

SEQ ID NO: 303143 - DNA, 60 bp, Artificial
  Synthetic oligonucleotide
aagacttttgcagcactcacagttgaagatgagggcttcagattgtcatttatgatccca

SEQ ID NO: 303144 - DNA, 57 bp, Artificial
  Synthetic oligonucleotide
aagagaaacaagagggctatttggggctatagcaggctttatagaaggagggtggca

SEQ ID NO: 303145 - DNA, 52 bp, Artificial
  Synthetic oligonucleotide
aagagaaacgtatcatgccccgcaacacggccctcaatcgagtgctcgcgcg

SEQ ID NO: 303146 - DNA, 56 bp, Artificial
  Synthetic oligonucleotide
aagagaaagtcgaaacccaggaaacgctgagattgaagacctcattttcctggcac

SEQ ID NO: 303147 - DNA, 55 bp, Artificial
  Synthetic oligonucleotide
aagagaacatagtcaaatggagaagggccaacctctcaatctgacacaatacatg

SEQ ID NO: 303148 - DNA, 53 bp, Artificial
  Synthetic oligonucleotide
aagagaagacaacgggacgccgtcgttagatccccggtacgaatggcggaaga

SEQ ID NO: 303149 - DNA, 60 bp, Artificial
  Synthetic oligonucleotide
aagagaagagcaattgcaacacccggtatgcagatcagagggttcgtgtactttgtcgaa

SEQ ID NO: 303150 - DNA, 57 bp, Artificial
  Synthetic oligonucleotide
aagagaagcaggagaaaactggctctcccttagccatccgagtggacgtttgtcctc

SEQ ID NO: 303151 - DNA, 57 bp, Artificial
  Synthetic oligonucleotide
aagagaagccatgcatagacaaatagactgtagtccaggaatatggcagctaaattg

SEQ ID NO: 303152 - DNA, 50 bp, Artificial
  Synthetic oligonucleotide
aagagaagtatatagctcgcgagtttcgtctgcgatataatcgtcttggt

SEQ ID NO: 303153 - DNA, 60 bp, Artificial
  Synthetic oligonucleotide
aagagaagtattaaggtggaagtttgacagccacctagcacacagacatgtggcccgcga

SEQ ID NO: 303154 - DNA, 58 bp, Artificial
  Synthetic oligonucleotide
aagagaagtattcgcacactcccaaacaatcgtatcttgagtggactaggtgtagacg

SEQ ID NO: 303155 - DNA, 55 bp, Artificial
  Synthetic oligonucleotide
aagagaagtgaacgagaaagggtgatagtcgaacggggaagaagacgtgagtgaa

SEQ ID NO: 303156 - DNA, 58 bp, Artificial
  Synthetic oligonucleotide
aagagaagtgtcgtttcagggaggtcacattgaagagtgttcttgctatcccaacttg

SEQ ID NO: 303157 - DNA, 55 bp, Artificial
  Synthetic oligonucleotide
aagagaatgaccaatacatattcacgggccagcccctcaataatgatgaagacca

SEQ ID NO: 303158 - DNA, 55 bp, Artificial
  Synthetic oligonucleotide
aagagacaaaacaggatgtattcggcgcaccacaagatattcagctagagcttgg

SEQ ID NO: 303159 - DNA, 50 bp, Artificial
  Synthetic oligonucleotide
aagagacaggaacaatttcaggcatgcaaccttcttggactgaagtccag

SEQ ID NO: 303160 - DNA, 60 bp, Artificial
  Synthetic oligonucleotide
aagagacaggacacatttcaggcattagtcctacttggaatgaagtccagaattcaacaa

SEQ ID NO: 303161 - DNA, 58 bp, Artificial
  Synthetic oligonucleotide
aagagacatacacgatgtttgttcacttgagcttggcagtttgcaagtaattctgtgt

SEQ ID NO: 303162 - DNA, 52 bp, Artificial
  Synthetic oligonucleotide
aagagacatctagtgatcgggaatactggtgatacaaagtatgtcgatttac

SEQ ID NO: 303163 - DNA, 55 bp, Artificial
  Synthetic oligonucleotide
aagagaccacggcacaccgcttttaccacggacgctacgagaactctgtgtgtgg

SEQ ID NO: 303164 - DNA, 59 bp, Artificial
  Synthetic oligonucleotide
aagagaccccatcggagaccccaggactctctgacttggttgaagagacactggctgga

SEQ ID NO: 303165 - DNA, 57 bp, Artificial
  Synthetic oligonucleotide
aagagacctagaggaggtgcgctatgttccccaccacaaggtgggatgggcgtggtg

SEQ ID NO: 303166 - DNA, 51 bp, Artificial
  Synthetic oligonucleotide
aagagacggacggtaagtcgatccgttgtgcggcccctatgtcggcggagt

SEQ ID NO: 303167 - DNA, 58 bp, Artificial
  Synthetic oligonucleotide
aagagactccggttgcaagtgagtgcaacaagtagccagagggctgattgttctactc

SEQ ID NO: 303168 - DNA, 57 bp, Artificial
  Synthetic oligonucleotide
aagagacttaatacagttaagtctcttgcaggaggaaacaattggcactgggaggtc

SEQ ID NO: 303169 - DNA, 60 bp, Artificial
  Synthetic oligonucleotide
aagagacttctgtggtgtgccccttctaactgtcaacgcaaccgcatgcaacttgcggta

SEQ ID NO: 303170 - DNA, 53 bp, Artificial
  Synthetic oligonucleotide
aagagagaagagtgggacgcatgctaaggccgctgagaaaggaaggcgcagac

SEQ ID NO: 303171 - DNA, 60 bp, Artificial
  Synthetic oligonucleotide
aagagagaatgactacatctcttccaattgctagattatcaaatcgcgtatttagagaca

SEQ ID NO: 303172 - DNA, 55 bp, Artificial
  Synthetic oligonucleotide
aagagagaggcgcgggcgagctgatgcagggaacctactggctcacagtcctacc

SEQ ID NO: 303173 - DNA, 58 bp, Artificial
  Synthetic oligonucleotide
aagagagaggtgaatgatgagtctaatacctaaaaagggaaatagactgtgtcataaa

SEQ ID NO: 303174 - DNA, 55 bp, Artificial
  Synthetic oligonucleotide
aagagagcaacggggctagcgagtggatgttccgcccctcgttggctccgagtga

SEQ ID NO: 303175 - DNA, 55 bp, Artificial
  Synthetic oligonucleotide
aagagagccatttatttcgtgttctcatctggaatgtagaacctttttcttaacc

SEQ ID NO: 303176 - DNA, 56 bp, Artificial
  Synthetic oligonucleotide
aagagagcccgataacatctggcaccaacatcatcaatccaacaagtgaagccgac

SEQ ID NO: 303177 - DNA, 60 bp, Artificial
  Synthetic oligonucleotide
aagagagcctcaggtctgggatagagacaacaactccctctcagaagcaggagccaatag

SEQ ID NO: 303178 - DNA, 52 bp, Artificial
  Synthetic oligonucleotide
aagagagcgtcgggtttggggtggagacaaccccctctcagaaacaggaacc

SEQ ID NO: 303179 - DNA, 55 bp, Artificial
  Synthetic oligonucleotide
aagagagctaagggatggttctacagacatcattttgaaagcagacatccaagag

SEQ ID NO: 303180 - DNA, 54 bp, Artificial
  Synthetic oligonucleotide
aagagagcttcaggttcggggaggagacaacaactccccctcgaaagccggagc

SEQ ID NO: 303181 - DNA, 60 bp, Artificial
  Synthetic oligonucleotide
aagagagcttcaggtttggggaagagacaccaactccctctcagaagcaggagccgctga

SEQ ID NO: 303182 - DNA, 59 bp, Artificial
  Synthetic oligonucleotide
aagagagcttcaggtttggggaagagacagcaaccccatctcagaagcaggggccaaca

SEQ ID NO: 303183 - DNA, 55 bp, Artificial
  Synthetic oligonucleotide
aagagaggaagcgtataagagcgcttttgcgtattatgcaagaaatgagatgcac

SEQ ID NO: 303184 - DNA, 53 bp, Artificial
  Synthetic oligonucleotide
aagagaggaccccagatttttgcgaaggttgaattctgtagcgtccaggactt

SEQ ID NO: 303185 - DNA, 60 bp, Artificial
  Synthetic oligonucleotide
aagagaggacgtggcacgaatggccatgacagacactacggcatttggacaacagagggt

SEQ ID NO: 303186 - DNA, 55 bp, Artificial
  Synthetic oligonucleotide
aagagaggagattggtcttcatattgcgaggtttccctgacacagagtactaagg

SEQ ID NO: 303187 - DNA, 54 bp, Artificial
  Synthetic oligonucleotide
aagagaggccgcaacacggcaggtggtacctctacttattataacctggtaggg

SEQ ID NO: 303188 - DNA, 55 bp, Artificial
  Synthetic oligonucleotide
aagagagtagagcaaggatcaaaaccagactattcaccataagacaagaaatggc

SEQ ID NO: 303189 - DNA, 50 bp, Artificial
  Synthetic oligonucleotide
aagagataaacaataccccagcacgcagttgcttccattaggaactggcg

SEQ ID NO: 303190 - DNA, 60 bp, Artificial
  Synthetic oligonucleotide
aagagatcaggctgaacatcttaagacagcggtccaaatggcagtattcatccacaattt

SEQ ID NO: 303191 - DNA, 56 bp, Artificial
  Synthetic oligonucleotide
aagagatcaggtatgtgcaacagctttttggaagggttccaacgggtgaatttcca

SEQ ID NO: 303192 - DNA, 60 bp, Artificial
  Synthetic oligonucleotide
aagagatcatggtcctacattgcagaaacaccaaactctgagaatggagcatgttatcca

SEQ ID NO: 303193 - DNA, 50 bp, Artificial
  Synthetic oligonucleotide
aagagatccaaataagttgaggagattgtatcgttcgttctcaaccgatt

SEQ ID NO: 303194 - DNA, 55 bp, Artificial
  Synthetic oligonucleotide
aagagatcgaaattagctagctcagtgtccacactaacagagtcactatctgatg

SEQ ID NO: 303195 - DNA, 55 bp, Artificial
  Synthetic oligonucleotide
aagagatcgcacaatggcctggacagtggtgaacagcatctgcaataccacgggg

SEQ ID NO: 303196 - DNA, 59 bp, Artificial
  Synthetic oligonucleotide
aagagatctaatgtcacagtcccgcacccgcgagatactcgccaagaccactgtggacc

SEQ ID NO: 303197 - DNA, 60 bp, Artificial
  Synthetic oligonucleotide
aagagatctagatcactaaattcatcagcattctattacagaatataggtacatcttaga

SEQ ID NO: 303198 - DNA, 60 bp, Artificial
  Synthetic oligonucleotide
aagagatgaaatgagcattgaaagtttcctcggaagatcaggttgtgcaacaattatgag

SEQ ID NO: 303199 - DNA, 58 bp, Artificial
  Synthetic oligonucleotide
aagagatgacatttcttctcccagaaccggagtggacataccctcgtttatcttgcca

SEQ ID NO: 303200 - DNA, 58 bp, Artificial
  Synthetic oligonucleotide
aagagatgacctgttggatcattgaaacccttggcgccctatggaataaaatgactgg

SEQ ID NO: 303201 - DNA, 56 bp, Artificial
  Synthetic oligonucleotide
aagagatgcggaggatgtttttcttgcatacgaaggtgagcgggtttaccggccaa

SEQ ID NO: 303202 - DNA, 55 bp, Artificial
  Synthetic oligonucleotide
aagagatgctgctcgaaccctgtcgtgcggccagtgtgtcatgggcttgcccgtg

SEQ ID NO: 303203 - DNA, 57 bp, Artificial
  Synthetic oligonucleotide
aagagatgctttggatagggtaacagcggcggatattggtgagttgttaagacaaaa

SEQ ID NO: 303204 - DNA, 58 bp, Artificial
  Synthetic oligonucleotide
aagagatggaacttcgagggaggttagcttggccgcttctggagtgaagaaggtcaca

SEQ ID NO: 303205 - DNA, 59 bp, Artificial
  Synthetic oligonucleotide
aagagatggagagggtgatactaaggaaaatgagaccttcaggcctggaggaggagata

SEQ ID NO: 303206 - DNA, 58 bp, Artificial
  Synthetic oligonucleotide
aagagatggtgggggtactgaggataatactacagaagtcttcagacctggaggagga

SEQ ID NO: 303207 - DNA, 53 bp, Artificial
  Synthetic oligonucleotide
aagagatggtgttgagcgctacagaacaaatagggagagtgatcgtttggcat

SEQ ID NO: 303208 - DNA, 60 bp, Artificial
  Synthetic oligonucleotide
aagagatgtgctgatgttcatgtctgttgccctgtggttgatattaaagacgctcagagg

SEQ ID NO: 303209 - DNA, 55 bp, Artificial
  Synthetic oligonucleotide
aagagattaagggacagttccaagccctttcagttctagaagggttggcaacaca

SEQ ID NO: 303210 - DNA, 52 bp, Artificial
  Synthetic oligonucleotide
aagagattattggggggtgggtaagtacttttaaagtgatgatggttacaaa

SEQ ID NO: 303211 - DNA, 57 bp, Artificial
  Synthetic oligonucleotide
aagagattcaaccattatcgttaatggtaataagttaaatatagtagatctgattag

SEQ ID NO: 303212 - DNA, 55 bp, Artificial
  Synthetic oligonucleotide
aagagattgacaattactcagatgtaatatataggttaattgaagagtcgcagaa

SEQ ID NO: 303213 - DNA, 52 bp, Artificial
  Synthetic oligonucleotide
aagagatttagtgggaaagtgctggggtcgtttttgagtaaacaggctaaag

SEQ ID NO: 303214 - DNA, 55 bp, Artificial
  Synthetic oligonucleotide
aagagatttgcgggagtagtcctggcaggtgcggccctaggcgttgccacagctg

SEQ ID NO: 303215 - DNA, 55 bp, Artificial
  Synthetic oligonucleotide
aagagcaatcgatccgcttgacttttgtgcaatgatttcacggaatgagacgcga

SEQ ID NO: 303216 - DNA, 60 bp, Artificial
  Synthetic oligonucleotide
aagagcacccaggcagccattgaccaaatcaatgggaaattgaacagagtgattgaaaag

SEQ ID NO: 303217 - DNA, 52 bp, Artificial
  Synthetic oligonucleotide
aagagcacggcctctttaggagttatcagggttggggcgggcctgtttgtgc

SEQ ID NO: 303218 - DNA, 56 bp, Artificial
  Synthetic oligonucleotide
aagagcaggtctgcaacaaccacgacgagaacctacgggacgagatcacccgaggg

SEQ ID NO: 303219 - DNA, 60 bp, Artificial
  Synthetic oligonucleotide
aagagcatcgtatatccatgactgaatccaacctagttcaattaatagacaactatcctc

SEQ ID NO: 303220 - DNA, 60 bp, Artificial
  Synthetic oligonucleotide
aagagcatggaatatgatgctgttgcaactacacactcctggattcctaagaggaaccgc

SEQ ID NO: 303221 - DNA, 60 bp, Artificial
  Synthetic oligonucleotide
aagagcatggttgcatgtttgtgttactggggacgacagaaatgcaactgccagtttcat

SEQ ID NO: 303222 - DNA, 60 bp, Artificial
  Synthetic oligonucleotide
aagagcattattgctccctgagtactccacactgtaccgccgttggctcgattcatttta

SEQ ID NO: 303223 - DNA, 59 bp, Artificial
  Synthetic oligonucleotide
aagagccacttgtgcgaatcatgcgagataaatttcccggaactctcggaaaccatgaa

SEQ ID NO: 303224 - DNA, 51 bp, Artificial
  Synthetic oligonucleotide
aagagccgggttcccgtggtgtccagtccctccccgtgtcgagtgaagggg

SEQ ID NO: 303225 - DNA, 60 bp, Artificial
  Synthetic oligonucleotide
aagagcctgatagcattccgcaaccagaagctcctgttacagcagttccggttgagacat

SEQ ID NO: 303226 - DNA, 60 bp, Artificial
  Synthetic oligonucleotide
aagagcgaaatgaagctatacctgatgttggagctcatcagtttgcttgtgtgcctccgt

SEQ ID NO: 303227 - DNA, 60 bp, Artificial
  Synthetic oligonucleotide
aagagcgaccagccaacgtgtattaccatgctggccactcccctcttgagatgtccgagt

SEQ ID NO: 303228 - DNA, 50 bp, Artificial
  Synthetic oligonucleotide
aagagcgacggtaacggtaagtttcaaccgggtgcggtcaaaacaactta

SEQ ID NO: 303229 - DNA, 58 bp, Artificial
  Synthetic oligonucleotide
aagagcgctcgaacaatccggagataagctagaagcctctagaacacgttacgaaggc

SEQ ID NO: 303230 - DNA, 60 bp, Artificial
  Synthetic oligonucleotide
aagagcggcgtgacacagactatcgagtaatgtaaaggttactatgctgcgtgggaatac

SEQ ID NO: 303231 - DNA, 57 bp, Artificial
  Synthetic oligonucleotide
aagagcggtaatgtaccctctgcgcctgggacctaatcgcgttttgctgtagctaat

SEQ ID NO: 303232 - DNA, 58 bp, Artificial
  Synthetic oligonucleotide
aagagcggtataccaagcgagttgcgcgatagcattgtcagattcttcgttaatggcg

SEQ ID NO: 303233 - DNA, 53 bp, Artificial
  Synthetic oligonucleotide
aagagcgtacggttcaacccctgcctcccctgatttaccaacttctcagttta

SEQ ID NO: 303234 - DNA, 60 bp, Artificial
  Synthetic oligonucleotide
aagagcgtccgagcgagggtcaagagatttgagggctcggtgcaattgttcgcaagtgtg

SEQ ID NO: 303235 - DNA, 58 bp, Artificial
  Synthetic oligonucleotide
aagagcgtggtgaccggggcggagtaccctcagctggtggcgtgcgcactagcgggca

SEQ ID NO: 303236 - DNA, 51 bp, Artificial
  Synthetic oligonucleotide
aagagctaagattaccgggaaggcaaagacagtttttattcccgaaggtcc

SEQ ID NO: 303237 - DNA, 59 bp, Artificial
  Synthetic oligonucleotide
aagagctaatcgtaatatgactagaggttacatggagcgttcagaaggaacaggacgat

SEQ ID NO: 303238 - DNA, 55 bp, Artificial
  Synthetic oligonucleotide
aagagctagaagaccagaggtgccattctttgctggtgtgatctcgggtgtgcca

SEQ ID NO: 303239 - DNA, 55 bp, Artificial
  Synthetic oligonucleotide
aagagctatcaacctcttccgtcccaatgaggcttcgaaatttcttaccaagcct

SEQ ID NO: 303240 - DNA, 60 bp, Artificial
  Synthetic oligonucleotide
aagagctatcccaagatttgacaggactgtgttcataattcttctactgatcccactggc

SEQ ID NO: 303241 - DNA, 55 bp, Artificial
  Synthetic oligonucleotide
aagagctcattaggaggtcttcaggcagggagtagcgcccctgggcaggtcgagg

SEQ ID NO: 303242 - DNA, 50 bp, Artificial
  Synthetic oligonucleotide
aagagctcgggctcaagtggttcatgctgcggtctaggcgaagttatgtg

SEQ ID NO: 303243 - DNA, 52 bp, Artificial
  Synthetic oligonucleotide
aagagctctacacatggtggtattttaaaaccaaaatggcacgggtcccatc

SEQ ID NO: 303244 - DNA, 55 bp, Artificial
  Synthetic oligonucleotide
aagagctggggttctcacgtgagatggcagcggagcagacggaagcgcttcgcac

SEQ ID NO: 303245 - DNA, 54 bp, Artificial
  Synthetic oligonucleotide
aagagcttacttgtccacgccggggttacctgtctgccaagaccacttggaatt

SEQ ID NO: 303246 - DNA, 60 bp, Artificial
  Synthetic oligonucleotide
aagagcttcgtgcttactgccagtgttaagcgcctgggcgtaagcatcattagctgtctg

SEQ ID NO: 303247 - DNA, 55 bp, Artificial
  Synthetic oligonucleotide
aagagcttgaatgcagattcaaacttaaggaaaagaggtttctgaaatcacaggg

SEQ ID NO: 303248 - DNA, 57 bp, Artificial
  Synthetic oligonucleotide
aagagctttggcagctcttcaacttccggtattacaggcgacaatacgacaacgtcc

SEQ ID NO: 303249 - DNA, 60 bp, Artificial
  Synthetic oligonucleotide
aagagcttttacatctgattgatcatatctaggtccaggggtaaacggcagcttgagggc

SEQ ID NO: 303250 - DNA, 54 bp, Artificial
  Synthetic oligonucleotide
aagaggaaactatatcaaaaggcggctgactctttggagaagaaacccgtacaa

SEQ ID NO: 303251 - DNA, 56 bp, Artificial
  Synthetic oligonucleotide
aagaggaaatattaccccatttcagtttgtggacccacattccagtacatggaagc

SEQ ID NO: 303252 - DNA, 60 bp, Artificial
  Synthetic oligonucleotide
aagaggaacttcagcgcgtgcgagatgacagagataagtcagagaaactacagaaagcga

SEQ ID NO: 303253 - DNA, 57 bp, Artificial
  Synthetic oligonucleotide
aagaggaagaccacaggagactagggtgtggtggacttcaaatagcataattgtatt

SEQ ID NO: 303254 - DNA, 52 bp, Artificial
  Synthetic oligonucleotide
aagaggaagttggccgttacgctccatcgggggttcctctttttcgccgcta

SEQ ID NO: 303255 - DNA, 56 bp, Artificial
  Synthetic oligonucleotide
aagaggaatgaggaactgaagagggaggaagagcgataaataggtaaacgcggata

SEQ ID NO: 303256 - DNA, 59 bp, Artificial
  Synthetic oligonucleotide
aagaggacgtttacgtcttcataggcctagtgctgcacgtaaattgtcatatgaccgag

SEQ ID NO: 303257 - DNA, 60 bp, Artificial
  Synthetic oligonucleotide
aagaggagagctgaaatgcttgctggatacactccagcgatcctagccttcaccccccga

SEQ ID NO: 303258 - DNA, 60 bp, Artificial
  Synthetic oligonucleotide
aagaggagtagatctggatccccagacgtctgacatactggaagctactcaccaggtcct

SEQ ID NO: 303259 - DNA, 58 bp, Artificial
  Synthetic oligonucleotide
aagaggataacggaaatgattcctgagagaaatgagcaaggacaaactttatggagta

SEQ ID NO: 303260 - DNA, 59 bp, Artificial
  Synthetic oligonucleotide
aagaggataatggaaatgattcccgagagaaatgaacaagggcagaccctctggagcaa

SEQ ID NO: 303261 - DNA, 58 bp, Artificial
  Synthetic oligonucleotide
aagaggatcacgaagccataggaagtgaggagaccaagaggattcttcctaaaactgc

SEQ ID NO: 303262 - DNA, 59 bp, Artificial
  Synthetic oligonucleotide
aagaggatgcctttggctattggtggaggggctggtaccaaagacgctattctgatgaa

SEQ ID NO: 303263 - DNA, 56 bp, Artificial
  Synthetic oligonucleotide
aagaggattgttcggagcaatagccggttttatagaaggcggatggcaagggatgg

SEQ ID NO: 303264 - DNA, 58 bp, Artificial
  Synthetic oligonucleotide
aagaggcaattctccggtgttcaattacaacaaggccagcaagaggcttacagtcctc

SEQ ID NO: 303265 - DNA, 55 bp, Artificial
  Synthetic oligonucleotide
aagaggccaataaaggagagaataccagtctgctacaccctgtgagcctgcatgg

SEQ ID NO: 303266 - DNA, 58 bp, Artificial
  Synthetic oligonucleotide
aagaggccaataaaggagagaatggttgtttgctacaccctatgagcctgcatggaat

SEQ ID NO: 303267 - DNA, 52 bp, Artificial
  Synthetic oligonucleotide
aagaggccactggggcggcgcttaattcctcccctacgagcgggcagtacat

SEQ ID NO: 303268 - DNA, 60 bp, Artificial
  Synthetic oligonucleotide
aagaggccaggttgcagagaatgcggtactccgattctcaatttgttgctgggctggcgc

SEQ ID NO: 303269 - DNA, 60 bp, Artificial
  Synthetic oligonucleotide
aagaggccgcaactggttgctgagcgactcattatagccatagagcgcgggaacttggcg

SEQ ID NO: 303270 - DNA, 57 bp, Artificial
  Synthetic oligonucleotide
aagaggcgaaagggcgtacgctcagcgaagcgtatcgtgagtttttaaatctgtcta

SEQ ID NO: 303271 - DNA, 60 bp, Artificial
  Synthetic oligonucleotide
aagaggcgagtttcaggaagtcgcttccagctcgctatactggctacgagacattacggc

SEQ ID NO: 303272 - DNA, 58 bp, Artificial
  Synthetic oligonucleotide
aagaggcgcttggaattgcagatgccgtggatatatcgccttacatcaccactgagac

SEQ ID NO: 303273 - DNA, 50 bp, Artificial
  Synthetic oligonucleotide
aagaggcggtgaagtattcacaaaaattgggctcgcacgatcgtagatta

SEQ ID NO: 303274 - DNA, 53 bp, Artificial
  Synthetic oligonucleotide
aagaggcgttctgtatcgccaagaaaggtgcctaatcagttaggcatagcgtt

SEQ ID NO: 303275 - DNA, 60 bp, Artificial
  Synthetic oligonucleotide
aagaggctgcgaagtatgataaccatacagagaacgctttactgttgtatatggcttgta

SEQ ID NO: 303276 - DNA, 55 bp, Artificial
  Synthetic oligonucleotide
aagagggaatctgcggagcgagaagcacaacccggcttgaacacaagatgtggga

SEQ ID NO: 303277 - DNA, 51 bp, Artificial
  Synthetic oligonucleotide
aagagggaattttgagttttatggtagaacttgtttcagagtttaaattcc

SEQ ID NO: 303278 - DNA, 53 bp, Artificial
  Synthetic oligonucleotide
aagagggcccctgtttaatacgcggtctgccgtgtttggatatttcacgaccc

SEQ ID NO: 303279 - DNA, 55 bp, Artificial
  Synthetic oligonucleotide
aagagggtgctatagggcattatcaatgtttagatacagaagtcgctgttttgta

SEQ ID NO: 303280 - DNA, 50 bp, Artificial
  Synthetic oligonucleotide
aagagggtggcctgtaactctagcttgagtctgtcgtctcattggatcag

SEQ ID NO: 303281 - DNA, 57 bp, Artificial
  Synthetic oligonucleotide
aagagggtttgtcgctcagtcggagtgaatttcactgaactaaataagaggctaaga

SEQ ID NO: 303282 - DNA, 53 bp, Artificial
  Synthetic oligonucleotide
aagaggtactagaggccttagcacagtcaggcccctttgcataccactcagac

SEQ ID NO: 303283 - DNA, 60 bp, Artificial
  Synthetic oligonucleotide
aagaggtaggcatgcaaatgggactatacatgacagaagcccgttcagggcattaataag

SEQ ID NO: 303284 - DNA, 60 bp, Artificial
  Synthetic oligonucleotide
aagaggtcaataaaggagagaacaactgcctgttacaccctatgagccagcatgggatag

SEQ ID NO: 303285 - DNA, 60 bp, Artificial
  Synthetic oligonucleotide
aagaggtcagaaggcgtgatattgaaaatcacaacagcctcatagctgagggattcaccc

SEQ ID NO: 303286 - DNA, 60 bp, Artificial
  Synthetic oligonucleotide
aagaggtccaggtcactagattctgcagcgttttattatagagtgtaggtattatgtaga

SEQ ID NO: 303287 - DNA, 59 bp, Artificial
  Synthetic oligonucleotide
aagaggtcctagccttccttgtactgagtcctgcgcacattgccaaactgaacaaacta

SEQ ID NO: 303288 - DNA, 57 bp, Artificial
  Synthetic oligonucleotide
aagaggtgagaattgtggttgagtcaaatgtattagaaattttgggaatcgcaatta

SEQ ID NO: 303289 - DNA, 52 bp, Artificial
  Synthetic oligonucleotide
aagaggtggccgaatttagatcaaaattgagagtagagcgagatatgaaacg

SEQ ID NO: 303290 - DNA, 56 bp, Artificial
  Synthetic oligonucleotide
aagaggtgggatactgtaagacatacccagcgcaactcctggctaacagctatagc

SEQ ID NO: 303291 - DNA, 55 bp, Artificial
  Synthetic oligonucleotide
aagaggttagcgctagtgggttgtttcatatgagtttcaattccaaccgggccta

SEQ ID NO: 303292 - DNA, 60 bp, Artificial
  Synthetic oligonucleotide
aagaggttctgtgtgaagtccgtttatgttttgggcaagatctggatggatgagaacatc

SEQ ID NO: 303293 - DNA, 55 bp, Artificial
  Synthetic oligonucleotide
aagaggtttcccctggcgctacctatatgggcacgcccggactacaatccaccac

SEQ ID NO: 303294 - DNA, 60 bp, Artificial
  Synthetic oligonucleotide
aagagtaatcctgatttggtatgtagtgataggccgacgatgggttcagtatggtctatg

SEQ ID NO: 303295 - DNA, 55 bp, Artificial
  Synthetic oligonucleotide
aagagtacacagacatagcatccttttcagttgatccacaattgtattgcgacta

SEQ ID NO: 303296 - DNA, 51 bp, Artificial
  Synthetic oligonucleotide
aagagtacagaatcaacgattttggtgccaaccaggctacgagaatgaccg

SEQ ID NO: 303297 - DNA, 55 bp, Artificial
  Synthetic oligonucleotide
aagagtatagagattcctacgtgcgtggcatccgatccattctttaagtgcaaag

SEQ ID NO: 303298 - DNA, 60 bp, Artificial
  Synthetic oligonucleotide
aagagtatattgcctgttttgactgcggagcatcgtgctatggtgcagcatatattagac

SEQ ID NO: 303299 - DNA, 53 bp, Artificial
  Synthetic oligonucleotide
aagagtatctcctacaagagtatctcctatgaacacgtatccgacaagcgtct

SEQ ID NO: 303300 - DNA, 58 bp, Artificial
  Synthetic oligonucleotide
aagagtatggacatttcatggtgaaacaccaagagctactactgacagttcaagtact

SEQ ID NO: 303301 - DNA, 55 bp, Artificial
  Synthetic oligonucleotide
aagagtcaactgatatggatggcatgccattctgcagcatatgaagacctgagag

SEQ ID NO: 303302 - DNA, 60 bp, Artificial
  Synthetic oligonucleotide
aagagtcaattggtatggatggcatgccattcagcagcatttgaggacttgagagtctca

SEQ ID NO: 303303 - DNA, 55 bp, Artificial
  Synthetic oligonucleotide
aagagtcataaaacatgctgccatagctgggtagcgtctattattggtgtgcaag

SEQ ID NO: 303304 - DNA, 60 bp, Artificial
  Synthetic oligonucleotide
aagagtcatcaggaagcgcaataaagtcattagtcagtttgatggccgatcacgtgacaa

SEQ ID NO: 303305 - DNA, 55 bp, Artificial
  Synthetic oligonucleotide
aagagtccaagttgaatcgagaggagatagatggagtgaaattggaatcaatggg

SEQ ID NO: 303306 - DNA, 60 bp, Artificial
  Synthetic oligonucleotide
aagagtccatgatgcgaccgattctgtcatccgattcacatttaggaggtgttgtgcgct

SEQ ID NO: 303307 - DNA, 52 bp, Artificial
  Synthetic oligonucleotide
aagagtcccgatgttcccaagggttgtgaagggccgtgtaaggttcagtctt

SEQ ID NO: 303308 - DNA, 56 bp, Artificial
  Synthetic oligonucleotide
aagagtcctagctgtggaaagatacctaagtgatcaacggttcctagggatgtggg

SEQ ID NO: 303309 - DNA, 57 bp, Artificial
  Synthetic oligonucleotide
aagagtcctggctgtggaaagatacctaaaggatcaacagctcatggggatttgggg

SEQ ID NO: 303310 - DNA, 55 bp, Artificial
  Synthetic oligonucleotide
aagagtcgctagcaatagcatcctccgttgacggcaaggactcggaaaccatgct

SEQ ID NO: 303311 - DNA, 60 bp, Artificial
  Synthetic oligonucleotide
aagagtcgcttgtgggacaagactctatactggagaagtcactcaaagccctagtgaaga

SEQ ID NO: 303312 - DNA, 58 bp, Artificial
  Synthetic oligonucleotide
aagagtcggaagcatccacaccgcctagcacgctgccttgcttgtgcatccatgctat

SEQ ID NO: 303313 - DNA, 54 bp, Artificial
  Synthetic oligonucleotide
aagagtcgtacactgtggatgactttgtatcctattggatggagcaggagtcat

SEQ ID NO: 303314 - DNA, 60 bp, Artificial
  Synthetic oligonucleotide
aagagtcgtgacattccctatgtctcctggcatttactcctgtctgagaggtaatacttc

SEQ ID NO: 303315 - DNA, 57 bp, Artificial
  Synthetic oligonucleotide
aagagtctcaagtttcattagagggacaagagtaatcccaagaggacaactatccac

SEQ ID NO: 303316 - DNA, 60 bp, Artificial
  Synthetic oligonucleotide
aagagtctgaatgtgcctgtgtaaatggttcatgttttactataatgactgatggcccga

SEQ ID NO: 303317 - DNA, 51 bp, Artificial
  Synthetic oligonucleotide
aagagtgagtttatcacgtagtggccgaggtacggcaatgtttgttgttcc

SEQ ID NO: 303318 - DNA, 59 bp, Artificial
  Synthetic oligonucleotide
aagagtgatattctaccagggttccctaaaaagtcgtatatcatagaagcattgcagaa

SEQ ID NO: 303319 - DNA, 56 bp, Artificial
  Synthetic oligonucleotide
aagagtgcacgaagggtacgaagaatttacaatggttgggaaaagagcaacagcta

SEQ ID NO: 303320 - DNA, 57 bp, Artificial
  Synthetic oligonucleotide
aagagtggaaatttgagggtgtcagtgtaacgcctatggctactagggtacaacata

SEQ ID NO: 303321 - DNA, 55 bp, Artificial
  Synthetic oligonucleotide
aagagtggaggaaatttcggaaagcctctcccaagaagaactgggacgctctcaa

SEQ ID NO: 303322 - DNA, 53 bp, Artificial
  Synthetic oligonucleotide
aagagtggtggaacttctaagacgcagcagtctcaaaggactacagaaggggt

SEQ ID NO: 303323 - DNA, 60 bp, Artificial
  Synthetic oligonucleotide
aagagtgtaatgtcgtacctcggtgttactggcttacttggcatctatggagacgatata

SEQ ID NO: 303324 - DNA, 60 bp, Artificial
  Synthetic oligonucleotide
aagagtgtatgcatcccatgggaacagatgatcctctggggaagcgtattgcttctgata

SEQ ID NO: 303325 - DNA, 57 bp, Artificial
  Synthetic oligonucleotide
aagagtgtcggtatactgagatttcataaggttattgacaatatcaattttcggaaa

SEQ ID NO: 303326 - DNA, 60 bp, Artificial
  Synthetic oligonucleotide
aagagttaagacagataaaatctaaggatacaatgagatatgtataccttgcagctactg

SEQ ID NO: 303327 - DNA, 57 bp, Artificial
  Synthetic oligonucleotide
aagagttacacgatttaattctaactgaaccagatgatcgtactatcatctgggttt

SEQ ID NO: 303328 - DNA, 60 bp, Artificial
  Synthetic oligonucleotide
aagagttagagatgcacataggaataggtttgtgttagtccagcagaagaagtgcgttgt

SEQ ID NO: 303329 - DNA, 59 bp, Artificial
  Synthetic oligonucleotide
aagagttatgtcgaagcgaccaggagatataataatctcaacacccgtatccaaggtgc

SEQ ID NO: 303330 - DNA, 56 bp, Artificial
  Synthetic oligonucleotide
aagagttccctaatcttcttctctgtaagttgcctgacggtagacatggtgtttac

SEQ ID NO: 303331 - DNA, 58 bp, Artificial
  Synthetic oligonucleotide
aagagttgatggtgatgacaactacgccgtactacaatttaatacagaagtgactaaa

SEQ ID NO: 303332 - DNA, 58 bp, Artificial
  Synthetic oligonucleotide
aagagtttatagagctattctccacatacctagaaggataagacagggcctagaaatg

SEQ ID NO: 303333 - DNA, 60 bp, Artificial
  Synthetic oligonucleotide
aagagtttgtggagctatccgctatccgcaacatacttagaagaatcagacagggctttg

SEQ ID NO: 303334 - DNA, 50 bp, Artificial
  Synthetic oligonucleotide
aagagttttgaggacctggtcgcggctatttacactaaatccgatttcta

SEQ ID NO: 303335 - DNA, 55 bp, Artificial
  Synthetic oligonucleotide
aagataaaagggctggagtcagcatgcccataagtttccaacgacgtactggtga

SEQ ID NO: 303336 - DNA, 52 bp, Artificial
  Synthetic oligonucleotide
aagataaaagtccccgggtgcaaccactgggcacaggactccaacaacgccc

SEQ ID NO: 303337 - DNA, 56 bp, Artificial
  Synthetic oligonucleotide
aagataacacaggacaacctttacaggttcctggatatgatttggaacctgggata

SEQ ID NO: 303338 - DNA, 60 bp, Artificial
  Synthetic oligonucleotide
aagataacagatggattgtacctgttgattgtagattggagagagatcttaactatgcca

SEQ ID NO: 303339 - DNA, 60 bp, Artificial
  Synthetic oligonucleotide
aagataaccgtgggtacaccacaatcatctggcctgcgctctatccgcgtagccgtgagg

SEQ ID NO: 303340 - DNA, 60 bp, Artificial
  Synthetic oligonucleotide
aagataacttgcaacgtatatttacagcagcatccatccggagcatgattattaagtaga

SEQ ID NO: 303341 - DNA, 60 bp, Artificial
  Synthetic oligonucleotide
aagataagctgcgttctgtcatggaagacatgaaatcaactgggaaacgtccagttgagt

SEQ ID NO: 303342 - DNA, 58 bp, Artificial
  Synthetic oligonucleotide
aagataatatgcatatcagcaacaggaatgacactatccgtagtaagtctgctaatag

SEQ ID NO: 303343 - DNA, 60 bp, Artificial
  Synthetic oligonucleotide
aagatacaaccattcagttgttttcgcatcagcaagcaaaggatgagaccctcctctggg

SEQ ID NO: 303344 - DNA, 60 bp, Artificial
  Synthetic oligonucleotide
aagatacacgagcaagaggtgtcctcgcgacgtgacgcattacctcaacgaggtttatgc

SEQ ID NO: 303345 - DNA, 55 bp, Artificial
  Synthetic oligonucleotide
aagatacatccgagagtaatgatgaagttcaaggttccacgatcgcaacagcctc

SEQ ID NO: 303346 - DNA, 57 bp, Artificial
  Synthetic oligonucleotide
aagatacatctgtaccaggaacgtgtttttagcacttttgaccgcaataacacactc

SEQ ID NO: 303347 - DNA, 55 bp, Artificial
  Synthetic oligonucleotide
aagatacccatacatcacagttcacaactaataaaagcaaagttacttaacttag

SEQ ID NO: 303348 - DNA, 60 bp, Artificial
  Synthetic oligonucleotide
aagatacgaggaagacactctggttgagagttggacacgtatcaccactaggtatgcata

SEQ ID NO: 303349 - DNA, 60 bp, Artificial
  Synthetic oligonucleotide
aagatacgataagcctctgtgcagattacgatttaatcggctggtaatttgagatgaaga

SEQ ID NO: 303350 - DNA, 60 bp, Artificial
  Synthetic oligonucleotide
aagatacgtttcaatggttccactcagcggcttatactactacaatggcgcctcttcata

SEQ ID NO: 303351 - DNA, 58 bp, Artificial
  Synthetic oligonucleotide
aagatactctccccgagactgaacctgatgaacagctcaccttggctcctcggtttac

SEQ ID NO: 303352 - DNA, 59 bp, Artificial
  Synthetic oligonucleotide
aagatagaagcccctatagaaccttaatgagctgtcctgttggtgaagctccctctcca

SEQ ID NO: 303353 - DNA, 60 bp, Artificial
  Synthetic oligonucleotide
aagatagacaggtgcacagagaaaggccctatgcagtgtccgtgccatgtaagcgctgta

SEQ ID NO: 303354 - DNA, 59 bp, Artificial
  Synthetic oligonucleotide
aagatagagcgtcatataccacgtgtttacccctttgctcggtactgatgcttgactaa

SEQ ID NO: 303355 - DNA, 55 bp, Artificial
  Synthetic oligonucleotide
aagatagagctttgccaccaacatggacccctaaaggacaagccaggctgtttag

SEQ ID NO: 303356 - DNA, 54 bp, Artificial
  Synthetic oligonucleotide
aagatagatggaatcaccaccagaagatcaggggccacccagagaaccatacaa

SEQ ID NO: 303357 - DNA, 60 bp, Artificial
  Synthetic oligonucleotide
aagatagatggagtgaaattggaaccaatggggatgtatcagattctggcgatctactca

SEQ ID NO: 303358 - DNA, 60 bp, Artificial
  Synthetic oligonucleotide
aagatagcactcttcagcatggtctttagatgcctcattttggttgcaaacacacttgtc

SEQ ID NO: 303359 - DNA, 56 bp, Artificial
  Synthetic oligonucleotide
aagatagcctattcacgtgagtttagttcgtggcccactcctttgaaggccatagt

SEQ ID NO: 303360 - DNA, 56 bp, Artificial
  Synthetic oligonucleotide
aagatagggtctttcctggtggttacagtgtgtatagtgatatgttacctagtaaa

SEQ ID NO: 303361 - DNA, 60 bp, Artificial
  Synthetic oligonucleotide
aagatagtagatcaggtatcgtttgagcaaaatgagattgtgtcgaaatctttgatgcga

SEQ ID NO: 303362 - DNA, 50 bp, Artificial
  Synthetic oligonucleotide
aagatagtatctcgcacggttacaccccatccttcgggagggctttaggg

SEQ ID NO: 303363 - DNA, 58 bp, Artificial
  Synthetic oligonucleotide
aagatagtcagttcacgggatcatgcactagccccatgggaaaccaggggtatggagt

SEQ ID NO: 303364 - DNA, 55 bp, Artificial
  Synthetic oligonucleotide
aagatagtgggaattccacctttaatcatgaccggctttccgtacttggtattgc

SEQ ID NO: 303365 - DNA, 51 bp, Artificial
  Synthetic oligonucleotide
aagatagtggggatcccgcctttaatttgaactggtttcccgtacttggtg

SEQ ID NO: 303366 - DNA, 51 bp, Artificial
  Synthetic oligonucleotide
aagatagtgggtattccacctttaatttgaataggtttcccgtacttcgtg

SEQ ID NO: 303367 - DNA, 52 bp, Artificial
  Synthetic oligonucleotide
aagatagttggaattccacctttaatttgaactggctttccgtactttgtat

SEQ ID NO: 303368 - DNA, 56 bp, Artificial
  Synthetic oligonucleotide
aagatatcgacggccaagggtgacccagcacctagggtgatacagcctcgaaaccc

SEQ ID NO: 303369 - DNA, 58 bp, Artificial
  Synthetic oligonucleotide
aagatatcgtcattttggttcgctacttacactattttcacaactgtctactctccta

SEQ ID NO: 303370 - DNA, 56 bp, Artificial
  Synthetic oligonucleotide
aagatatggccctattttgtcaaatggtttctacagttgattttattcctccaatg

SEQ ID NO: 303371 - DNA, 60 bp, Artificial
  Synthetic oligonucleotide
aagatattcgttaccatgaggaataccacatggacgaatcagtgtgtcatgagtcatact

SEQ ID NO: 303372 - DNA, 60 bp, Artificial
  Synthetic oligonucleotide
aagatattgtcaacattgagtgatcctgtgtcaaggttgccagacatacaatctctgtgg

SEQ ID NO: 303373 - DNA, 59 bp, Artificial
  Synthetic oligonucleotide
aagatcaaaaacatttgtgcagtgaccacaaattgcaccttcgtttatagcaaggcaac

SEQ ID NO: 303374 - DNA, 54 bp, Artificial
  Synthetic oligonucleotide
aagatcaaaggagacgtttggatttttcttaccgttttatgctctcctggctgt

SEQ ID NO: 303375 - DNA, 56 bp, Artificial
  Synthetic oligonucleotide
aagatcaacagttgtattttcccaagacctacctttcacttgagacctggagccta

SEQ ID NO: 303376 - DNA, 60 bp, Artificial
  Synthetic oligonucleotide
aagatcaaccatagattatacgatcaccaatgtatgtactcctatcttggagagatgagc

SEQ ID NO: 303377 - DNA, 58 bp, Artificial
  Synthetic oligonucleotide
aagatcaatgatccttcttcttgtgttggggtttatggctctggttactgggagccag

SEQ ID NO: 303378 - DNA, 60 bp, Artificial
  Synthetic oligonucleotide
aagatcaatgctccactagacaaagctggtactggttgtacaccaatatgcatagatggc

SEQ ID NO: 303379 - DNA, 55 bp, Artificial
  Synthetic oligonucleotide
aagatcacacgaggatttaggatacatgacccgtagtaagaaaaacttagggtga

SEQ ID NO: 303380 - DNA, 59 bp, Artificial
  Synthetic oligonucleotide
aagatcacctctataaccccgctgtgaatcccagcactcccttccgatacgcaaactga

SEQ ID NO: 303381 - DNA, 58 bp, Artificial
  Synthetic oligonucleotide
aagatcagaaatagcgtcgtcgacggtataacagtttggttgaagaagcatgtaagct

SEQ ID NO: 303382 - DNA, 55 bp, Artificial
  Synthetic oligonucleotide
aagatcagaaatagcgtcgtcgagggaataacagttgggttgaagaagaaggtac

SEQ ID NO: 303383 - DNA, 58 bp, Artificial
  Synthetic oligonucleotide
aagatcagtcccgctaccaggttggacgtcataggatccaccccgttgtattggagca

SEQ ID NO: 303384 - DNA, 53 bp, Artificial
  Synthetic oligonucleotide
aagatcatctgacaccccacctaagccccgttaccgatgaaccttcggtaacg

SEQ ID NO: 303385 - DNA, 60 bp, Artificial
  Synthetic oligonucleotide
aagatccagatgaaggtacagctggagtggagtctgctgttctaagaggattcctcattc

SEQ ID NO: 303386 - DNA, 60 bp, Artificial
  Synthetic oligonucleotide
aagatccagcatccagagaatcactagtcagttatgttaacactaatatgggcctaaagt

SEQ ID NO: 303387 - DNA, 60 bp, Artificial
  Synthetic oligonucleotide
aagatccagcatctagagacctagtagtcagttatgtcaacactaatatgggcttaaagt

SEQ ID NO: 303388 - DNA, 59 bp, Artificial
  Synthetic oligonucleotide
aagatcccactgggtcgagctaggccatcacccctgggccgctcccctggagctctctc

SEQ ID NO: 303389 - DNA, 50 bp, Artificial
  Synthetic oligonucleotide
aagatccctcatcatgggagctggagttcgatgttaaaattgaaggacct

SEQ ID NO: 303390 - DNA, 56 bp, Artificial
  Synthetic oligonucleotide
aagatccgtctctttgaacagtctcccgaacaccccccatggaattgcatagtagt

SEQ ID NO: 303391 - DNA, 60 bp, Artificial
  Synthetic oligonucleotide
aagatccgtgaattccatagaacattgataaggctggagatgacgccacaacaactttgt

SEQ ID NO: 303392 - DNA, 55 bp, Artificial
  Synthetic oligonucleotide
aagatcctccaatatcaggagcagaaacgtggtatatagatggaggtagaaagct

SEQ ID NO: 303393 - DNA, 59 bp, Artificial
  Synthetic oligonucleotide
aagatcgaaacaaacaaatttgcagcgatatgcacacacatggaagtatgcttcatgta

SEQ ID NO: 303394 - DNA, 55 bp, Artificial
  Synthetic oligonucleotide
aagatcgagaaaataagacctctactaatagatggcacagcctcattgagtcctg

SEQ ID NO: 303395 - DNA, 57 bp, Artificial
  Synthetic oligonucleotide
aagatcgataagatcgattttaactagcggaatgcctagacagagaaaaacagtttg

SEQ ID NO: 303396 - DNA, 60 bp, Artificial
  Synthetic oligonucleotide
aagatcgatcgggtcatctgtatcagcgtggacggatatatctacgcaagtaacagatat

SEQ ID NO: 303397 - DNA, 59 bp, Artificial
  Synthetic oligonucleotide
aagatcgcgagcaagtgtgagtgatattatagcatgtggacaagctacacagccagcat

SEQ ID NO: 303398 - DNA, 55 bp, Artificial
  Synthetic oligonucleotide
aagatcggaagtaggacgagccaggattgacgcaatagagatgacttttcctcgg

SEQ ID NO: 303399 - DNA, 60 bp, Artificial
  Synthetic oligonucleotide
aagatcgggacaacgctctgtgcttgatgacctatatgcgaatacgcaagtgatttccat

SEQ ID NO: 303400 - DNA, 51 bp, Artificial
  Synthetic oligonucleotide
aagatcgggccacagcaatgctgggtacacacgtcatctgggattttgggc

SEQ ID NO: 303401 - DNA, 56 bp, Artificial
  Synthetic oligonucleotide
aagatcgtaagcaatgacgtcttacggaagtggtggacccataccagctggaatcg

SEQ ID NO: 303402 - DNA, 60 bp, Artificial
  Synthetic oligonucleotide
aagatcgtcactaaccacgtgactctccacagcgaaccactggtgtacgtgattcacttc

SEQ ID NO: 303403 - DNA, 59 bp, Artificial
  Synthetic oligonucleotide
aagatcgtcactaaccacgtgacttccgcaggccaatacaagtctatgtcgttcacttc

SEQ ID NO: 303404 - DNA, 55 bp, Artificial
  Synthetic oligonucleotide
aagatcgtcgagaaacaagcactcgagatctctcaacaacttgagcagaaactag

SEQ ID NO: 303405 - DNA, 55 bp, Artificial
  Synthetic oligonucleotide
aagatcgtcgtgggagtgttgatttcttcgcttatgggttctggactttggagtt

SEQ ID NO: 303406 - DNA, 58 bp, Artificial
  Synthetic oligonucleotide
aagatctagcccacatggtctttcctgttctactatcaccctctatgataatactcat

SEQ ID NO: 303407 - DNA, 57 bp, Artificial
  Synthetic oligonucleotide
aagatctatactggaagcacttagtggcatttgtgtaataagggatgttcccccaat

SEQ ID NO: 303408 - DNA, 53 bp, Artificial
  Synthetic oligonucleotide
aagatctcaagttaaatgattgccagttcacagatggacaaatagttgaaagg

SEQ ID NO: 303409 - DNA, 60 bp, Artificial
  Synthetic oligonucleotide
aagatctcgtagcaataactgattggtcaggatatagcgggagtttcgttcagcatccag

SEQ ID NO: 303410 - DNA, 55 bp, Artificial
  Synthetic oligonucleotide
aagatctcttctcccatggaggtcaaacaacttcctgatgtcatcggatccctga

SEQ ID NO: 303411 - DNA, 58 bp, Artificial
  Synthetic oligonucleotide
aagatctggaaattttttaagaagcgattacatcctcctaccatgctatcaattatta

SEQ ID NO: 303412 - DNA, 55 bp, Artificial
  Synthetic oligonucleotide
aagatctgggcatgcttactcctgctgtcaacaatagcgatgggctaacggcact

SEQ ID NO: 303413 - DNA, 53 bp, Artificial
  Synthetic oligonucleotide
aagatctgtcttttgtagcgagttgccggattttgcatgcagtggatctaaaa

SEQ ID NO: 303414 - DNA, 55 bp, Artificial
  Synthetic oligonucleotide
aagatcttagaggcggtgaaatattcgcaaaatttaggctcgcacgatcgtaggc

SEQ ID NO: 303415 - DNA, 60 bp, Artificial
  Synthetic oligonucleotide
aagatcttataccagagcagtaagtattgttaagtggtatatgtaatgtcagatttgtta

SEQ ID NO: 303416 - DNA, 54 bp, Artificial
  Synthetic oligonucleotide
aagatcttcggggacatgactgtgatgagtcacatagcgcattcatcaccactg

SEQ ID NO: 303417 - DNA, 53 bp, Artificial
  Synthetic oligonucleotide
aagatcttgaaaaaggcccctcttgacctaaaaggatgtaccattgagggttg

SEQ ID NO: 303418 - DNA, 60 bp, Artificial
  Synthetic oligonucleotide
aagatctttgttcagctctgctaggtcctataagaggatccagatgttcccagatagaat

SEQ ID NO: 303419 - DNA, 60 bp, Artificial
  Synthetic oligonucleotide
aagatgaaacatgggacctttatgtagagcgcagcaatgcattcagcaactgctacccat

SEQ ID NO: 303420 - DNA, 59 bp, Artificial
  Synthetic oligonucleotide
aagatgaaacatgggaccttttcatagaacgcagcaatgctttcagcaattgttaccct

SEQ ID NO: 303421 - DNA, 51 bp, Artificial
  Synthetic oligonucleotide
aagatgaaactcttggaacttgatgccaccatcgacgtctccttccctcgc

SEQ ID NO: 303422 - DNA, 55 bp, Artificial
  Synthetic oligonucleotide
aagatgaaatcagacgaactctagactacagatgggtcaatttggcaagcttcgg

SEQ ID NO: 303423 - DNA, 60 bp, Artificial
  Synthetic oligonucleotide
aagatgaagcggtgcggggtgcagctgctcgaagattaccgtaaaagtgggatgatggat

SEQ ID NO: 303424 - DNA, 60 bp, Artificial
  Synthetic oligonucleotide
aagatgaaggagagagcattgacgtggatatagaaatagataatctccttgagatttctt

SEQ ID NO: 303425 - DNA, 58 bp, Artificial
  Synthetic oligonucleotide
aagatgacctctaagtttcccaaagttctcagatcagagctgcaggtttacttattaa

SEQ ID NO: 303426 - DNA, 60 bp, Artificial
  Synthetic oligonucleotide
aagatgagcgcgcagcaccacactgcaacgtatttgcgcgattacaatgacaatgggaat

SEQ ID NO: 303427 - DNA, 58 bp, Artificial
  Synthetic oligonucleotide
aagatgagctcgggaggtgatcccagcgaagacacgggggcgggagacggagagcagg

SEQ ID NO: 303428 - DNA, 60 bp, Artificial
  Synthetic oligonucleotide
aagatgagtgttaatgttgaaggttgtcacaacatgtttataacacgtgatgaggcaatt

SEQ ID NO: 303429 - DNA, 54 bp, Artificial
  Synthetic oligonucleotide
aagatgattaatttgcagactatccatatgttaacgactggtggacgagtagag

SEQ ID NO: 303430 - DNA, 60 bp, Artificial
  Synthetic oligonucleotide
aagatgattacctgagtgtggatgagcagtactttaactttatcactatagagaacaaca

SEQ ID NO: 303431 - DNA, 54 bp, Artificial
  Synthetic oligonucleotide
aagatgattcgagagtgaggtcgacatttctggcagactaaacaacggcaggaa

SEQ ID NO: 303432 - DNA, 60 bp, Artificial
  Synthetic oligonucleotide
aagatgcagatgtggatagacgcatacatactgcagtgggatctggatcaagcacaaaag

SEQ ID NO: 303433 - DNA, 55 bp, Artificial
  Synthetic oligonucleotide
aagatgcattggggttgaaaatcgagacttcattgaaggcatttccggtggcaca

SEQ ID NO: 303434 - DNA, 58 bp, Artificial
  Synthetic oligonucleotide
aagatgccatggatgcaagggagcccgtagtcgggtccatccttgagcaggatgacca

SEQ ID NO: 303435 - DNA, 60 bp, Artificial
  Synthetic oligonucleotide
aagatgccatgtgaatgtctgctaccatttttgaatcccttctcatcatgtggctttcta

SEQ ID NO: 303436 - DNA, 55 bp, Artificial
  Synthetic oligonucleotide
aagatgccgccatcgttgattacaagactacaaagaatgttctagcggctattcc

SEQ ID NO: 303437 - DNA, 50 bp, Artificial
  Synthetic oligonucleotide
aagatgcgtctcgatgacctacgagaaccgcattggaatagtgtacgagt

SEQ ID NO: 303438 - DNA, 60 bp, Artificial
  Synthetic oligonucleotide
aagatgcgtgcttcgagcgagaccaaatgacgtgtctcttgcagcttctctctatcaagt

SEQ ID NO: 303439 - DNA, 60 bp, Artificial
  Synthetic oligonucleotide
aagatgctacgattgcacgtacagataccactatattgctgcgaacgattaatgatacta

SEQ ID NO: 303440 - DNA, 56 bp, Artificial
  Synthetic oligonucleotide
aagatgctagttttagagtacgggtgtgctttgcgggggtctctctaaggagacca

SEQ ID NO: 303441 - DNA, 57 bp, Artificial
  Synthetic oligonucleotide
aagatgcttaataagtaacggattgtgtccgtaatcacacgtggtgcgtacgataac

SEQ ID NO: 303442 - DNA, 55 bp, Artificial
  Synthetic oligonucleotide
aagatgcttacgggcaccataacgcaacaacaagccgttagacaggctatcgcac

SEQ ID NO: 303443 - DNA, 60 bp, Artificial
  Synthetic oligonucleotide
aagatggaagtttgacagtagcctggcacgcagacacctagccagagagatgcatccgga

SEQ ID NO: 303444 - DNA, 60 bp, Artificial
  Synthetic oligonucleotide
aagatggacaaagccactatggcaagcactagtctgaaaagtgctttgatgtgccaggac

SEQ ID NO: 303445 - DNA, 60 bp, Artificial
  Synthetic oligonucleotide
aagatggattcattccctatgctagcgtacgtgcgccaagactggttatagaggaattga

SEQ ID NO: 303446 - DNA, 50 bp, Artificial
  Synthetic oligonucleotide
aagatggattcatttcctacgttagcatacgtgctccaagactggttata

SEQ ID NO: 303447 - DNA, 55 bp, Artificial
  Synthetic oligonucleotide
aagatggccgcaaaggtaattgtgatgtgggctcaacgacctggcccacatggtc

SEQ ID NO: 303448 - DNA, 60 bp, Artificial
  Synthetic oligonucleotide
aagatggcggtcaatctctttcgggtcaaaggtcgcgcatacgtcataagtcacatgtct

SEQ ID NO: 303449 - DNA, 58 bp, Artificial
  Synthetic oligonucleotide
aagatgggaacgatgagaccaaatcttcctgcgatagttaggttatcaatgggtgatt

SEQ ID NO: 303450 - DNA, 60 bp, Artificial
  Synthetic oligonucleotide
aagatgggagtggatgaatactccagcactgagagggtggttgtgagcattgatcgtttc

SEQ ID NO: 303451 - DNA, 55 bp, Artificial
  Synthetic oligonucleotide
aagatgggctacatcatgcatggagaaggggacacaattgagcacttctttggtg

SEQ ID NO: 303452 - DNA, 55 bp, Artificial
  Synthetic oligonucleotide
aagatgggctcgacacacttcacctttggcaacacatgcgaaactggcagcctac

SEQ ID NO: 303453 - DNA, 55 bp, Artificial
  Synthetic oligonucleotide
aagatgggctttacttgcccaaactctgattgtctctactcgcgtagcgagtgga

SEQ ID NO: 303454 - DNA, 56 bp, Artificial
  Synthetic oligonucleotide
aagatggggatattcccttaacttcatgggatatgtaattgggtgtttgggcacat

SEQ ID NO: 303455 - DNA, 50 bp, Artificial
  Synthetic oligonucleotide
aagatgggtggcaagtggtcaaaacgtagtgtgcctggatggtctcagat

SEQ ID NO: 303456 - DNA, 55 bp, Artificial
  Synthetic oligonucleotide
aagatgggtggcaagtggtcaaaactgggtgggtggactactgtgagggaaagaa

SEQ ID NO: 303457 - DNA, 54 bp, Artificial
  Synthetic oligonucleotide
aagatgggtggtaggtggtcaaaaggtagtctggttggatggcctaacataagg

SEQ ID NO: 303458 - DNA, 55 bp, Artificial
  Synthetic oligonucleotide
aagatggtcccgattgaacaagtaccgtcggtcaagcttccgtcgtcgaaagcag

SEQ ID NO: 303459 - DNA, 60 bp, Artificial
  Synthetic oligonucleotide
aagatggtgacaagcttgggttggaacttgatcaagttcagagcgggaatggatgtgttc

SEQ ID NO: 303460 - DNA, 54 bp, Artificial
  Synthetic oligonucleotide
aagatggtgattttcctcttacttgcaggaaaggtttgccccaagcctttggga

SEQ ID NO: 303461 - DNA, 55 bp, Artificial
  Synthetic oligonucleotide
aagatgtacacaacggccaacaggcggtggttatccaaaccatcaaaggtcaagc

SEQ ID NO: 303462 - DNA, 59 bp, Artificial
  Synthetic oligonucleotide
aagatgtagaggacaatccaggtgatatggctaaaaaatggccaggaacttcaggacaa

SEQ ID NO: 303463 - DNA, 55 bp, Artificial
  Synthetic oligonucleotide
aagatgtagggccgaaggccctaatgacgcgtgtcatattctctatagtggtggg

SEQ ID NO: 303464 - DNA, 60 bp, Artificial
  Synthetic oligonucleotide
aagatgtcagctccagaagctccgaccgaagatgtggcagaaccgggtccatctggctcc

SEQ ID NO: 303465 - DNA, 59 bp, Artificial
  Synthetic oligonucleotide
aagatgtggtatgagatttaaaactgagcaagtttctaatgtgaagcaccttgtgttgt

SEQ ID NO: 303466 - DNA, 60 bp, Artificial
  Synthetic oligonucleotide
aagatgtgtctaaattgattgccacagaagactatcgtggtaatggctggttggtttgga

SEQ ID NO: 303467 - DNA, 51 bp, Artificial
  Synthetic oligonucleotide
aagatgtgtctaagctcatagccacagacgattatcgaggtaatggctggt

SEQ ID NO: 303468 - DNA, 60 bp, Artificial
  Synthetic oligonucleotide
aagattaatacattgggagtataaactgctcaacgatgtacgagaagtgtgcataaagga

SEQ ID NO: 303469 - DNA, 59 bp, Artificial
  Synthetic oligonucleotide
aagattacaaggaagatgaatcttccaatggttgaagggaagatcattctcagtttgga

SEQ ID NO: 303470 - DNA, 59 bp, Artificial
  Synthetic oligonucleotide
aagattacagctaacttctgtcacatccttatgtatgttaattggaaataccacagtaa

SEQ ID NO: 303471 - DNA, 55 bp, Artificial
  Synthetic oligonucleotide
aagattacaggactgctattaacaagagatggggggattaaaaacagcacgaacg

SEQ ID NO: 303472 - DNA, 55 bp, Artificial
  Synthetic oligonucleotide
aagattacgacaaagatcaagatgtcgggcatttctgtctaagtcctagatgcag

SEQ ID NO: 303473 - DNA, 55 bp, Artificial
  Synthetic oligonucleotide
aagattacgctgaacatctaaataaaaccatggaaggggtcttgcaaggaacaaa

SEQ ID NO: 303474 - DNA, 57 bp, Artificial
  Synthetic oligonucleotide
aagattactggcggaggctgtcgatcccccagtaatacttgtcaggggggatgctaa

SEQ ID NO: 303475 - DNA, 56 bp, Artificial
  Synthetic oligonucleotide
aagattagacttattcactatagtagcctcaaccgtaaacaaatatggtgtaccaa

SEQ ID NO: 303476 - DNA, 57 bp, Artificial
  Synthetic oligonucleotide
aagattcacgctcaggttatgagaccttcagggtaatcggtggttggaccacggcta

SEQ ID NO: 303477 - DNA, 57 bp, Artificial
  Synthetic oligonucleotide
aagattcctgagatgtttgcttacgatatcaaagatgaggggatacgggaagcactc

SEQ ID NO: 303478 - DNA, 60 bp, Artificial
  Synthetic oligonucleotide
aagattctattggggttacacaggtagagtctgtctctccagattgccagacagtagacg

SEQ ID NO: 303479 - DNA, 57 bp, Artificial
  Synthetic oligonucleotide
aagattctcaatctgttcggggttaaaattaaccatggtgtgctggctcaggttgga

SEQ ID NO: 303480 - DNA, 60 bp, Artificial
  Synthetic oligonucleotide
aagattctccattacttaaagcagcactccatgctgatattcagccggtctgtgcccctc

SEQ ID NO: 303481 - DNA, 60 bp, Artificial
  Synthetic oligonucleotide
aagattctgcccaaagataggtggacacagcatacaacaactggaggttcacgggcttgc

SEQ ID NO: 303482 - DNA, 55 bp, Artificial
  Synthetic oligonucleotide
aagattctgcgtgaagaacagatgctcagagcacatttcgtttccttctgcgatc

SEQ ID NO: 303483 - DNA, 52 bp, Artificial
  Synthetic oligonucleotide
aagattctgtatatgcgttcataatggggaacgtttctaacgtccactgtac

SEQ ID NO: 303484 - DNA, 60 bp, Artificial
  Synthetic oligonucleotide
aagattcttacactctggcctttgagtatgaattgatgaagtaccttggtgtctccaaca

SEQ ID NO: 303485 - DNA, 58 bp, Artificial
  Synthetic oligonucleotide
aagattgaattttattatacttgagaatgttgtttcaattgtcccttctaatacatca

SEQ ID NO: 303486 - DNA, 60 bp, Artificial
  Synthetic oligonucleotide
aagattgacctatggtcttacaatgctgaattcttggtggcattagaaaatcaacatact

SEQ ID NO: 303487 - DNA, 58 bp, Artificial
  Synthetic oligonucleotide
aagattgattgcagcttgccatctaataccaaaccattttccggctggtatacaaaac

SEQ ID NO: 303488 - DNA, 60 bp, Artificial
  Synthetic oligonucleotide
aagattgcaaggtctcggtgcaacataagttcggagtatcttcgactattgtcacctcta

SEQ ID NO: 303489 - DNA, 60 bp, Artificial
  Synthetic oligonucleotide
aagattgcatttacatgggcatgggtttggtagcctctacgtgtattgtggccctcatag

SEQ ID NO: 303490 - DNA, 52 bp, Artificial
  Synthetic oligonucleotide
aagattgcgcagggaggggtgcatacgccagtagttacaaccaagctagaca

SEQ ID NO: 303491 - DNA, 59 bp, Artificial
  Synthetic oligonucleotide
aagattgctgtctgaccactactaccaccccaagtattatgaattacttgactcgacga

SEQ ID NO: 303492 - DNA, 58 bp, Artificial
  Synthetic oligonucleotide
aagattgctgttgacgaggtcgttagttacggtgctacaacaagaggtgttgtacagc

SEQ ID NO: 303493 - DNA, 58 bp, Artificial
  Synthetic oligonucleotide
aagattgcttgtcagtttcgtgatcctgaaggatttaacgtgggtactcccatgttga

SEQ ID NO: 303494 - DNA, 60 bp, Artificial
  Synthetic oligonucleotide
aagattggcacttcatgatcaatgccctgaatgactacaattatgaaatggattactctc

SEQ ID NO: 303495 - DNA, 55 bp, Artificial
  Synthetic oligonucleotide
aagattgggaagagtgggacgctgtaagccaggattcgctctcagagttgggcat

SEQ ID NO: 303496 - DNA, 59 bp, Artificial
  Synthetic oligonucleotide
aagattgggagtgacgaagaggacacggaaaggcatacatcgaccgatgtgcgtcggaa

SEQ ID NO: 303497 - DNA, 55 bp, Artificial
  Synthetic oligonucleotide
aagattgtataaacagccaaagtacccaagaataatgactggaccagtactctgt

SEQ ID NO: 303498 - DNA, 60 bp, Artificial
  Synthetic oligonucleotide
aagattgtgatgttgcggtatgtccactagacacaacaatgaatggtatcggatgtacgc

SEQ ID NO: 303499 - DNA, 55 bp, Artificial
  Synthetic oligonucleotide
aagattgtgggtatgccgcctttaatttgaactggcttcccgtattttgtgttgc

SEQ ID NO: 303500 - DNA, 60 bp, Artificial
  Synthetic oligonucleotide
aagattgtgtacaccgtgaaggttgagccacacactggaacatatgtggcagcgaacgag

SEQ ID NO: 303501 - DNA, 60 bp, Artificial
  Synthetic oligonucleotide
aagattgttcacattagcccattgtcaggaagtgctcaacatatagaggaatgttcctgt

SEQ ID NO: 303502 - DNA, 57 bp, Artificial
  Synthetic oligonucleotide
aagattgttctcgaacagtgtgaacgtcttattgctgatggccataaacttttgcga

SEQ ID NO: 303503 - DNA, 56 bp, Artificial
  Synthetic oligonucleotide
aagatttacccgaaggttattatgacagagataaagctttagctttcgctaatgtc

SEQ ID NO: 303504 - DNA, 58 bp, Artificial
  Synthetic oligonucleotide
aagatttacgactccgttaagtaccgcacaggtaactctgatatggcaatgcaacagg

SEQ ID NO: 303505 - DNA, 55 bp, Artificial
  Synthetic oligonucleotide
aagatttatagcacaatcggaaaggcggcggagcggtttgctgagagtgagatcg

SEQ ID NO: 303506 - DNA, 50 bp, Artificial
  Synthetic oligonucleotide
aagatttattgcagatatgagacagcaagttcaagctgacaggaacattg

SEQ ID NO: 303507 - DNA, 57 bp, Artificial
  Synthetic oligonucleotide
aagattttagagctactgtcgcttttttgcgcacccatgttataacaggcaaaataa

SEQ ID NO: 303508 - DNA, 51 bp, Artificial
  Synthetic oligonucleotide
aagatttttcggtcggccagtagatagcgtactcggtaaccggggttagcc

SEQ ID NO: 303509 - DNA, 54 bp, Artificial
  Synthetic oligonucleotide
aagattttttggagttatatgaacgtcaactgatatcctgatcgtttgaagcag

SEQ ID NO: 303510 - DNA, 51 bp, Artificial
  Synthetic oligonucleotide
aagcaaaacaggcttttaccttctcgccaacttacaaggcctttttacgta

SEQ ID NO: 303511 - DNA, 59 bp, Artificial
  Synthetic oligonucleotide
aagcaaaatgggaaatctggagcttgcaagagggcaaatgtgaatgatttctttaacag

SEQ ID NO: 303512 - DNA, 56 bp, Artificial
  Synthetic oligonucleotide
aagcaaacaatacaagtgtaatgatacagaaaagcaattttaaaggccctagaaga

SEQ ID NO: 303513 - DNA, 54 bp, Artificial
  Synthetic oligonucleotide
aagcaaaccacccccgtgttgagagaccccgaagtttggactggattcattcaa

SEQ ID NO: 303514 - DNA, 51 bp, Artificial
  Synthetic oligonucleotide
aagcaaacggccctacaagttgccagacctgtgcacagaattgaatacttc

SEQ ID NO: 303515 - DNA, 60 bp, Artificial
  Synthetic oligonucleotide
aagcaaactatgccggaaatagaccgaacacgagcatttggatgcatcagcagtctgatt

SEQ ID NO: 303516 - DNA, 52 bp, Artificial
  Synthetic oligonucleotide
aagcaaagaaggggaggaatctcgaaaaagaactcccaagaagaaccgagaa

SEQ ID NO: 303517 - DNA, 58 bp, Artificial
  Synthetic oligonucleotide
aagcaaagagaaataggcctcctctacccagtgtccagaagttaacagaggatagatg

SEQ ID NO: 303518 - DNA, 51 bp, Artificial
  Synthetic oligonucleotide
aagcaaagcggacaagggtgcagcgaaagcaaccacagatctgttgcttaa

SEQ ID NO: 303519 - DNA, 53 bp, Artificial
  Synthetic oligonucleotide
aagcaaaggcctcagtgatgaagagtacgacgagtacaagaggatcagagaag

SEQ ID NO: 303520 - DNA, 52 bp, Artificial
  Synthetic oligonucleotide
aagcaaagtcgtaaatagttggatcgagaatatggtggagactttcctcagc

SEQ ID NO: 303521 - DNA, 53 bp, Artificial
  Synthetic oligonucleotide
aagcaaagtctgggatacacgtacgtagccaggtggagaaaaaaacgttatta

SEQ ID NO: 303522 - DNA, 58 bp, Artificial
  Synthetic oligonucleotide
aagcaaataaccaacgagctaaactatgttctctgggaaggaggacatgacctcactg

SEQ ID NO: 303523 - DNA, 54 bp, Artificial
  Synthetic oligonucleotide
aagcaaataagatgtgaaggagcgtacccgattttaccgcactatgttacggac

SEQ ID NO: 303524 - DNA, 50 bp, Artificial
  Synthetic oligonucleotide
aagcaaatacaagaccaaggggtccacagcaaggcaatagaaggcctaac

SEQ ID NO: 303525 - DNA, 52 bp, Artificial
  Synthetic oligonucleotide
aagcaaatcttcgtggctgttctcccttcccgttggcccgctcagacccagg

SEQ ID NO: 303526 - DNA, 60 bp, Artificial
  Synthetic oligonucleotide
aagcaaatgacttttggcgagggtacacggatgcatacgttgcaaatagagctatctcga

SEQ ID NO: 303527 - DNA, 54 bp, Artificial
  Synthetic oligonucleotide
aagcaacaaatgcatctgtactgatgcagagaagtaactttaagggccaaagaa

SEQ ID NO: 303528 - DNA, 51 bp, Artificial
  Synthetic oligonucleotide
aagcaacaaatttggctactgcagtaatgatgcagagaggcaattttaagg

SEQ ID NO: 303529 - DNA, 58 bp, Artificial
  Synthetic oligonucleotide
aagcaacaaggtccttgcagaatataaagtccctggcgaaattgtgatgtctgttaaa

SEQ ID NO: 303530 - DNA, 56 bp, Artificial
  Synthetic oligonucleotide
aagcaacacatgcttgcggtactaacattggtactaacctgcctttccaagtaggt

SEQ ID NO: 303531 - DNA, 59 bp, Artificial
  Synthetic oligonucleotide
aagcaacaggactagtgctagtaggcgacttaactagcccaccataccatgagttcgcc

SEQ ID NO: 303532 - DNA, 60 bp, Artificial
  Synthetic oligonucleotide
aagcaacaggatcacctgcagtaatgatgcagagaggcaattttaagggcccaagaaaaa

SEQ ID NO: 303533 - DNA, 58 bp, Artificial
  Synthetic oligonucleotide
aagcaacattcctggccctatcggtgtcgccgcaagcggtatcagtggactgtcggcc

SEQ ID NO: 303534 - DNA, 58 bp, Artificial
  Synthetic oligonucleotide
aagcaaccaggagattaattcaactaatagtaagtggaagagacgaacagtcaattgc

SEQ ID NO: 303535 - DNA, 59 bp, Artificial
  Synthetic oligonucleotide
aagcaacccaaggtctgtgagtgcttgcacaacgtcattaagtgaggtttgtgattgtt

SEQ ID NO: 303536 - DNA, 51 bp, Artificial
  Synthetic oligonucleotide
aagcaaccctgctggcaatctcaggggtgtatccaatgtcaataccggcga

SEQ ID NO: 303537 - DNA, 51 bp, Artificial
  Synthetic oligonucleotide
aagcaaccgcagatcggtatccccgacgcacacccggtcgtctcgaacggt

SEQ ID NO: 303538 - DNA, 60 bp, Artificial
  Synthetic oligonucleotide
aagcaacgccgaagagtatggccaaggaaccgagaatggctactggctcagttcctctga

SEQ ID NO: 303539 - DNA, 50 bp, Artificial
  Synthetic oligonucleotide
aagcaacgctttttgcaactacagacaggagtcctcgagtagaaaaattc

SEQ ID NO: 303540 - DNA, 55 bp, Artificial
  Synthetic oligonucleotide
aagcaactcactgtgttcgagcgtggtgactctatctacctgatggacacgaccg

SEQ ID NO: 303541 - DNA, 60 bp, Artificial
  Synthetic oligonucleotide
aagcaactcggaatcaggctagacgtagttgtgtcaagcctcaacaacatgagcgaacga

SEQ ID NO: 303542 - DNA, 58 bp, Artificial
  Synthetic oligonucleotide
aagcaactcgtggtgcggtcgtggccaagtggtgggaaagcagaacagtccgaccaca

SEQ ID NO: 303543 - DNA, 55 bp, Artificial
  Synthetic oligonucleotide
aagcaagaacaaaattaaacctggggcaaataaccatggagttgctgatccacag

SEQ ID NO: 303544 - DNA, 53 bp, Artificial
  Synthetic oligonucleotide
aagcaagatctgcgtttcccacgtggagaaggagtgcccataagtcaaggtgt

SEQ ID NO: 303545 - DNA, 57 bp, Artificial
  Synthetic oligonucleotide
aagcaagcgtcgttcgtggacttatcggcccatgtatcgaaagcccagaatgtaccg

SEQ ID NO: 303546 - DNA, 56 bp, Artificial
  Synthetic oligonucleotide
aagcaagctccctgaatgactcagtcgctatgagacaggcctttgggcatttgtat

SEQ ID NO: 303547 - DNA, 53 bp, Artificial
  Synthetic oligonucleotide
aagcaagctccgcctattaacgtgtccgccgtgtgtgataaccaacccgccgt

SEQ ID NO: 303548 - DNA, 55 bp, Artificial
  Synthetic oligonucleotide
aagcaaggaatttgatcagccccgtcatgagtgtgattggtttcttaacccttgc

SEQ ID NO: 303549 - DNA, 60 bp, Artificial
  Synthetic oligonucleotide
aagcaaggccgataggccatccctccaaattcagacactcttgcatgcgggggccacaat

SEQ ID NO: 303550 - DNA, 55 bp, Artificial
  Synthetic oligonucleotide
aagcaagtacatgcccgtaggtcacagcctcaacctgacccacgaaatcagcggc

SEQ ID NO: 303551 - DNA, 55 bp, Artificial
  Synthetic oligonucleotide
aagcaagttatgacggttatcgccaccatgatcaacagattgtgtggtggatcgc

SEQ ID NO: 303552 - DNA, 60 bp, Artificial
  Synthetic oligonucleotide
aagcaataattgtggccatggtattttcacaagaggattgcatgatcaaggcagtccggg

SEQ ID NO: 303553 - DNA, 55 bp, Artificial
  Synthetic oligonucleotide
aagcaatacgtgaaggctatctcgcagaacgagataaatatatgcgtgttgctgg

SEQ ID NO: 303554 - DNA, 56 bp, Artificial
  Synthetic oligonucleotide
aagcaatagaaggggcatggggttctggtgtagggtttacacttacatgtactgtc

SEQ ID NO: 303555 - DNA, 56 bp, Artificial
  Synthetic oligonucleotide
aagcaataggccaaaatgaacaatgctaccctcaactatacaaacattaaccctat

SEQ ID NO: 303556 - DNA, 60 bp, Artificial
  Synthetic oligonucleotide
aagcaatagtagaaaggactacagaaaatactatatcagacgatgaggatgaaaatgtag

SEQ ID NO: 303557 - DNA, 60 bp, Artificial
  Synthetic oligonucleotide
aagcaatctgatgccactaatgcttggttcgacgcatgggacgccatcactactctgacg

SEQ ID NO: 303558 - DNA, 60 bp, Artificial
  Synthetic oligonucleotide
aagcaatgagaaccattggaactcatccaagttccagtgctggcttgaaagatgacctcc

SEQ ID NO: 303559 - DNA, 50 bp, Artificial
  Synthetic oligonucleotide
aagcaatgtcagcagatacctgggtctgagcgggccaacgggaagggaga

SEQ ID NO: 303560 - DNA, 55 bp, Artificial
  Synthetic oligonucleotide
aagcaattagtcttgtagatcgatcctctaatgtcagatacagcttagaccagtt

SEQ ID NO: 303561 - DNA, 55 bp, Artificial
  Synthetic oligonucleotide
aagcaattcagttagcatacgatcatcaatatcgtgtcaccgctcgctatctctc

SEQ ID NO: 303562 - DNA, 60 bp, Artificial
  Synthetic oligonucleotide
aagcaattctgcggcaggttcccaacttgcatgtcttgcctcagcctcgacagcaattaa

SEQ ID NO: 303563 - DNA, 58 bp, Artificial
  Synthetic oligonucleotide
aagcacaacaacagtggtgacaatgaagtagagttctcagaaattggtgtagttgtac

SEQ ID NO: 303564 - DNA, 59 bp, Artificial
  Synthetic oligonucleotide
aagcacaacaactgggggattgctatcctccccctagcgccactagactttgccactga

SEQ ID NO: 303565 - DNA, 60 bp, Artificial
  Synthetic oligonucleotide
aagcacaactgtatgatatgtatagattcactaagctgcgatttacatatattccgacta

SEQ ID NO: 303566 - DNA, 58 bp, Artificial
  Synthetic oligonucleotide
aagcacaaggggaagtggaaagcagccaagggaacatgttttgcgagccagagctgtt

SEQ ID NO: 303567 - DNA, 60 bp, Artificial
  Synthetic oligonucleotide
aagcacaaggggaagtggaaagcagccactctggctcgtcaccagctggccatggttctt

SEQ ID NO: 303568 - DNA, 60 bp, Artificial
  Synthetic oligonucleotide
aagcacaagtgtcaccagctggccatggttcttcgccagctgtcacgtaaggcttctgtg

SEQ ID NO: 303569 - DNA, 55 bp, Artificial
  Synthetic oligonucleotide
aagcacacaatacccggattcgttccaggcattcccctaggtcctgcagtacccc

SEQ ID NO: 303570 - DNA, 56 bp, Artificial
  Synthetic oligonucleotide
aagcacacactcaggtccgaaacctcgacctacaacttgactgtcggggacacagg

SEQ ID NO: 303571 - DNA, 56 bp, Artificial
  Synthetic oligonucleotide
aagcacacccggattggtcgttgtgttagtgatgttactcgtggatctgggattac

SEQ ID NO: 303572 - DNA, 59 bp, Artificial
  Synthetic oligonucleotide
aagcacactataaagattaactgctgctagtaattgaactgtttaagccggtgttgcca

SEQ ID NO: 303573 - DNA, 55 bp, Artificial
  Synthetic oligonucleotide
aagcacagcataggtttcaaaactcatctggaatagtgaatagtgatagacgtgg

SEQ ID NO: 303574 - DNA, 60 bp, Artificial
  Synthetic oligonucleotide
aagcacaggggatcaaacatcctttatccaagagagggatgatagatgcaaaacatggtt

SEQ ID NO: 303575 - DNA, 54 bp, Artificial
  Synthetic oligonucleotide
aagcacatagaagcccggtgcaagtcgttcgacgtgagcgtccacccgttcacg

SEQ ID NO: 303576 - DNA, 60 bp, Artificial
  Synthetic oligonucleotide
aagcacatcgaagaatgctcatgctacggggaacaagcagggattacttgcacatgcagg

SEQ ID NO: 303577 - DNA, 60 bp, Artificial
  Synthetic oligonucleotide
aagcacatgctattggaggagccgcacatagcattctttggcctcgtctcaccgagcata

SEQ ID NO: 303578 - DNA, 54 bp, Artificial
  Synthetic oligonucleotide
aagcacattgtaaccttagtaaagcggaatggaataacactttaccacagatag

SEQ ID NO: 303579 - DNA, 60 bp, Artificial
  Synthetic oligonucleotide
aagcaccacattcccatacactggagatcctccatacagccacggaacgggaacaggata

SEQ ID NO: 303580 - DNA, 54 bp, Artificial
  Synthetic oligonucleotide
aagcaccactttcccttatacgggatatcctccataccgccgtggaacaggaac

SEQ ID NO: 303581 - DNA, 56 bp, Artificial
  Synthetic oligonucleotide
aagcaccccaaaccacctgcgcacttcgttgctactttctcacatcgttttgggga

SEQ ID NO: 303582 - DNA, 60 bp, Artificial
  Synthetic oligonucleotide
aagcaccctaatgggtacaagtccttatcaactctgcatagattgaatgcatatgaccag

SEQ ID NO: 303583 - DNA, 55 bp, Artificial
  Synthetic oligonucleotide
aagcaccctataatgggagcttgccatggactcgtggctttgtcaagacacaagt

SEQ ID NO: 303584 - DNA, 58 bp, Artificial
  Synthetic oligonucleotide
aagcaccgaatcctcaatctcattgatcagttatccagatgaagggggggagaccccc

SEQ ID NO: 303585 - DNA, 55 bp, Artificial
  Synthetic oligonucleotide
aagcacgacccggattaatcagttttctgagtatatacccgttagaactcaatgg

SEQ ID NO: 303586 - DNA, 59 bp, Artificial
  Synthetic oligonucleotide
aagcacgaggcagtagagatgttgtgcgttcaccggcatattctgtggcgggggaagaa

SEQ ID NO: 303587 - DNA, 58 bp, Artificial
  Synthetic oligonucleotide
aagcacgatttggaactatcgtagctagaaatttcgatactattcgtttatcatttca

SEQ ID NO: 303588 - DNA, 55 bp, Artificial
  Synthetic oligonucleotide
aagcacgcaacaaggccgttgaaagttggcaagccaccagacatggttctaggcc

SEQ ID NO: 303589 - DNA, 55 bp, Artificial
  Synthetic oligonucleotide
aagcacgcgccgacctagccgatgttgatcgtagacgtaaagttgaggccgatcg

SEQ ID NO: 303590 - DNA, 56 bp, Artificial
  Synthetic oligonucleotide
aagcacggacacaaactagagaggccgcccgaacgcagcggtccttcacgtcttgt

SEQ ID NO: 303591 - DNA, 59 bp, Artificial
  Synthetic oligonucleotide
aagcacgggagtggtcgtttgccgctatgcgagtacggctgttgccagaccctcttata

SEQ ID NO: 303592 - DNA, 55 bp, Artificial
  Synthetic oligonucleotide
aagcacgggtcaggaagctttgccattatagatgatccatattccccagagcctc

SEQ ID NO: 303593 - DNA, 53 bp, Artificial
  Synthetic oligonucleotide
aagcacgggtgtgtgaaccccacaccgacgtatcaccccccttggacttagta

SEQ ID NO: 303594 - DNA, 55 bp, Artificial
  Synthetic oligonucleotide
aagcacgtagttcaacatgaagaaacgatgcaagcaatagcacagagatactatg

SEQ ID NO: 303595 - DNA, 54 bp, Artificial
  Synthetic oligonucleotide
aagcacgtcgttctcctagtcgtcgtaaaggtgcccgcctttggtatgtaggcg

SEQ ID NO: 303596 - DNA, 56 bp, Artificial
  Synthetic oligonucleotide
aagcacgtgggtatagttcgttgtgttagtgatgtgacccgtgggtccggtctgac

SEQ ID NO: 303597 - DNA, 60 bp, Artificial
  Synthetic oligonucleotide
aagcactacggctaaagctgtggagcagatggctggatcgagtgagcaagcagcggaggc

SEQ ID NO: 303598 - DNA, 59 bp, Artificial
  Synthetic oligonucleotide
aagcactagtgacattgatgaacgaagaatttttgagaactttctggatagttcggctg

SEQ ID NO: 303599 - DNA, 59 bp, Artificial
  Synthetic oligonucleotide
aagcactatgggcgcggcgtcaataacgctgacggtacaggccagaaaactattgtctg

SEQ ID NO: 303600 - DNA, 60 bp, Artificial
  Synthetic oligonucleotide
aagcactctaatggcacagtgaaagatcggagcccctatagaactctaatgagtgtagaa

SEQ ID NO: 303601 - DNA, 54 bp, Artificial
  Synthetic oligonucleotide
aagcactctggggaacccggcaccctgttatggaatacggtttggaacatgacg

SEQ ID NO: 303602 - DNA, 60 bp, Artificial
  Synthetic oligonucleotide
aagcactgagcagcataatatttgggcatcacaagcctgcgttcccacagatcccagtcc

SEQ ID NO: 303603 - DNA, 60 bp, Artificial
  Synthetic oligonucleotide
aagcactgggaccaggggctacattagaagaaatgatgacagcatgtcagggagtgggag

SEQ ID NO: 303604 - DNA, 60 bp, Artificial
  Synthetic oligonucleotide
aagcactgggtgcacagagagctttcgaggccaaacatggaatcaagggagggtcattag

SEQ ID NO: 303605 - DNA, 59 bp, Artificial
  Synthetic oligonucleotide
aagcactgtgaatcaggtttatgcgaagatggtgaggagaaaacggcaagatcttgcct

SEQ ID NO: 303606 - DNA, 56 bp, Artificial
  Synthetic oligonucleotide
aagcactgtgcaaaccttccccagagcttccttagtgttgtacttagttggttcaa

SEQ ID NO: 303607 - DNA, 55 bp, Artificial
  Synthetic oligonucleotide
aagcacttctgtttccccggagcggagtatagatggccaccgctgtcaaaagctc

SEQ ID NO: 303608 - DNA, 52 bp, Artificial
  Synthetic oligonucleotide
aagcacttctgtttccccggtccgcaaggatcgttacccgcccgtcccacta

SEQ ID NO: 303609 - DNA, 57 bp, Artificial
  Synthetic oligonucleotide
aagcacttgtttacagtttgttctataatgctttcaatgtcctttttcgacatggac

SEQ ID NO: 303610 - DNA, 60 bp, Artificial
  Synthetic oligonucleotide
aagcacttttggcgttgaagaaaaggaacatggctgcaccgaagctacaagaagctgtga

SEQ ID NO: 303611 - DNA, 60 bp, Artificial
  Synthetic oligonucleotide
aagcagaagctagcagaactcgaagcagagatcaacaatctcagatcaacattagccata

SEQ ID NO: 303612 - DNA, 60 bp, Artificial
  Synthetic oligonucleotide
aagcagacaagctgcggacatgcgcgacatgatcttggagggaattaacgggctagagga

SEQ ID NO: 303613 - DNA, 50 bp, Artificial
  Synthetic oligonucleotide
aagcagacaatacacctgaatttgaactcactgaccaaagctggaaatct

SEQ ID NO: 303614 - DNA, 50 bp, Artificial
  Synthetic oligonucleotide
aagcagactgcaactactcagcccaataccgggagtgtggttccccatta

SEQ ID NO: 303615 - DNA, 59 bp, Artificial
  Synthetic oligonucleotide
aagcagagagaggacctgttcaacgcatacatgcccgggaaaatcgcagggtcgttgtg

SEQ ID NO: 303616 - DNA, 60 bp, Artificial
  Synthetic oligonucleotide
aagcagagcacataccggacggcggtaggtatgtcatccggcggtctcggggattgcagc

SEQ ID NO: 303617 - DNA, 60 bp, Artificial
  Synthetic oligonucleotide
aagcagagttttctctaaatctctatgagcttggtccacacttcaatagatttcaagcaa

SEQ ID NO: 303618 - DNA, 58 bp, Artificial
  Synthetic oligonucleotide
aagcagatcctatatcaagttgaaacgactccgtttcaaagggactgtgaagattgaa

SEQ ID NO: 303619 - DNA, 50 bp, Artificial
  Synthetic oligonucleotide
aagcagattccattcatcaacagggtcatgacttttgattaccctgaatg

SEQ ID NO: 303620 - DNA, 60 bp, Artificial
  Synthetic oligonucleotide
aagcagcactaagggcatcatccgtgctaatctgggcttatggggacaacgaagtgaact

SEQ ID NO: 303621 - DNA, 57 bp, Artificial
  Synthetic oligonucleotide
aagcagcacttcaaataattatggctttggttgagggaattacaacagctttaccaa

SEQ ID NO: 303622 - DNA, 60 bp, Artificial
  Synthetic oligonucleotide
aagcagcagatcttaagagtacccaagcagctatcaaccaaatcaatgggaaactgaata

SEQ ID NO: 303623 - DNA, 53 bp, Artificial
  Synthetic oligonucleotide
aagcagccaaatctaaagaaaccggtcccgggcactataaattgcctaacaag

SEQ ID NO: 303624 - DNA, 55 bp, Artificial
  Synthetic oligonucleotide
aagcagccgttactaccatcaaaactggtgaagaccttgtccctaaattgaaaca

SEQ ID NO: 303625 - DNA, 59 bp, Artificial
  Synthetic oligonucleotide
aagcagcctgccaaatcccggaacaccaatagttggcttgatgaagacagaaggtagta

SEQ ID NO: 303626 - DNA, 58 bp, Artificial
  Synthetic oligonucleotide
aagcagcgaaagtaccaaaagcaactccagcggggaatcaacaagctcctcaacagat

SEQ ID NO: 303627 - DNA, 58 bp, Artificial
  Synthetic oligonucleotide
aagcagctatagatcaaataaccgggaaattgaacaggctaatagagaagacaaacac

SEQ ID NO: 303628 - DNA, 60 bp, Artificial
  Synthetic oligonucleotide
aagcagctcatatagaagaccagttggaatatccagtatggtagaggccatggtctccag

SEQ ID NO: 303629 - DNA, 60 bp, Artificial
  Synthetic oligonucleotide
aagcagctccaaacaagagtcctggctatagaaagatacctaaaggatcaacagctccta

SEQ ID NO: 303630 - DNA, 60 bp, Artificial
  Synthetic oligonucleotide
aagcagctccagacaagagtcttggctatagaaagatacctaagagatcaacagctccta

SEQ ID NO: 303631 - DNA, 58 bp, Artificial
  Synthetic oligonucleotide
aagcagctccgtattcctggatccgcgaggttcgtttgagtggccccgaggtgctata

SEQ ID NO: 303632 - DNA, 54 bp, Artificial
  Synthetic oligonucleotide
aagcagctcgaccctgggagcctcgtttacactcccgggaaacgccagtcttta

SEQ ID NO: 303633 - DNA, 60 bp, Artificial
  Synthetic oligonucleotide
aagcagctggtaaagtgactgctgaatctaccggatcattattgccaaaggttactacac

SEQ ID NO: 303634 - DNA, 60 bp, Artificial
  Synthetic oligonucleotide
aagcagctgttctatattcgaactatattgtgaatagacttcgaggatttgaaactgaca

SEQ ID NO: 303635 - DNA, 55 bp, Artificial
  Synthetic oligonucleotide
aagcagcttacgctcatgtacgccccgtcctcaaagaagcattagttaattgccc

SEQ ID NO: 303636 - DNA, 56 bp, Artificial
  Synthetic oligonucleotide
aagcagcttatgccagggccctacgccaagagttggcctctctagttcaggttgac

SEQ ID NO: 303637 - DNA, 59 bp, Artificial
  Synthetic oligonucleotide
aagcagcttattacaatgcgtgtaaatgggaagaagctaatgtgacatttcagtgtcac

SEQ ID NO: 303638 - DNA, 52 bp, Artificial
  Synthetic oligonucleotide
aagcaggcatttccgcgattgttgacatgttgacaggtccggagtatggtat

SEQ ID NO: 303639 - DNA, 59 bp, Artificial
  Synthetic oligonucleotide
aagcaggccgtcgcagatgctctgtgggccgcccacaacggcggaactccctgggacta

SEQ ID NO: 303640 - DNA, 60 bp, Artificial
  Synthetic oligonucleotide
aagcagggagctccagcagttggaagagctggagcagtttcacttccagtgattgcaaga

SEQ ID NO: 303641 - DNA, 52 bp, Artificial
  Synthetic oligonucleotide
aagcaggggatgttgaagaaaaccccgggccctctttgtccaaattgtacca

SEQ ID NO: 303642 - DNA, 51 bp, Artificial
  Synthetic oligonucleotide
aagcaggggtaatcgctaccccgtgcgatagcctgaccgggtgacctccgc

SEQ ID NO: 303643 - DNA, 52 bp, Artificial
  Synthetic oligonucleotide
aagcaggtaaagaacagttaggtcctataagtggtttaacaaacactgttac

SEQ ID NO: 303644 - DNA, 60 bp, Artificial
  Synthetic oligonucleotide
aagcaggtatggctcaattgagaaaatacaaccaatctggagcgatgctagaatgtttgc

SEQ ID NO: 303645 - DNA, 55 bp, Artificial
  Synthetic oligonucleotide
aagcaggtgttttgccgttgtcatcaagaggcatggttatcttggacatccaggg

SEQ ID NO: 303646 - DNA, 60 bp, Artificial
  Synthetic oligonucleotide
aagcaggttatgaccagaggctgggtacctatgagcacagaagtagggccagatttggat

SEQ ID NO: 303647 - DNA, 54 bp, Artificial
  Synthetic oligonucleotide
aagcaggtttggagcagtttgtttccggagttggactgcttttttgaatttgcc

SEQ ID NO: 303648 - DNA, 54 bp, Artificial
  Synthetic oligonucleotide
aagcagtaagtaaatcaagtagcatatgtaatgatacctttgcaaatagcagca

SEQ ID NO: 303649 - DNA, 51 bp, Artificial
  Synthetic oligonucleotide
aagcagtaatacagcagctactaatgctagttgcgcctggctggaagcgca

SEQ ID NO: 303650 - DNA, 55 bp, Artificial
  Synthetic oligonucleotide
aagcagtactggcaataaataccagtaagtttccaaacatgttcataccagtggg

SEQ ID NO: 303651 - DNA, 60 bp, Artificial
  Synthetic oligonucleotide
aagcagtagatcactatgctggacagctaatgtcactggacatcagtactgagcagatgt

SEQ ID NO: 303652 - DNA, 58 bp, Artificial
  Synthetic oligonucleotide
aagcagtcaggggtgcgagttggagtcaacgaatttgttgtcataaaaccaggtgcat

SEQ ID NO: 303653 - DNA, 58 bp, Artificial
  Synthetic oligonucleotide
aagcagtccagaccataggcaaccccctaagactcatctatcatttgtacggggtgta

SEQ ID NO: 303654 - DNA, 60 bp, Artificial
  Synthetic oligonucleotide
aagcagtctgactgggctgcgtcagctagaatagacttgattaacaacctctcgaacaaa

SEQ ID NO: 303655 - DNA, 55 bp, Artificial
  Synthetic oligonucleotide
aagcagtgctttcagcaattgctacccatatgacatccctgactatgcatctctc

SEQ ID NO: 303656 - DNA, 57 bp, Artificial
  Synthetic oligonucleotide
aagcagtggtcacaagttgttgggcacactggttccgggaagtccacacgactacca

SEQ ID NO: 303657 - DNA, 60 bp, Artificial
  Synthetic oligonucleotide
aagcataacagttcgaatgaatgctcagctgaattatgaggcttcagcagttgaacaagc

SEQ ID NO: 303658 - DNA, 52 bp, Artificial
  Synthetic oligonucleotide
aagcataacattagtactaaatacggtgggaacgttgaacaaatagggaacg

SEQ ID NO: 303659 - DNA, 60 bp, Artificial
  Synthetic oligonucleotide
aagcatatctttcagacacatcgttatgcaatcaagagatcgagtgctgcgggtagacac

SEQ ID NO: 303660 - DNA, 51 bp, Artificial
  Synthetic oligonucleotide
aagcatcaaatgccaatgctgctgtaatgatgcagagaggcaattttaagg

SEQ ID NO: 303661 - DNA, 60 bp, Artificial
  Synthetic oligonucleotide
aagcatcagaggagcactgtaagccccaccacagtccgctggtcctcaagcggtgtcacg

SEQ ID NO: 303662 - DNA, 60 bp, Artificial
  Synthetic oligonucleotide
aagcatcatggcagcacggcgagacagcggagcccgtcgctggtgctttactctgaataa

SEQ ID NO: 303663 - DNA, 55 bp, Artificial
  Synthetic oligonucleotide
aagcatcttttgagaggtgactctagacacaacatctcagagctagagtggttgt

SEQ ID NO: 303664 - DNA, 55 bp, Artificial
  Synthetic oligonucleotide
aagcatgaagatgcatacaagagagagatgaagattaggtaagagggtgcagggg

SEQ ID NO: 303665 - DNA, 55 bp, Artificial
  Synthetic oligonucleotide
aagcatgacgactgtggagcgacttaagataatactaccatgatgtttatatgcg

SEQ ID NO: 303666 - DNA, 60 bp, Artificial
  Synthetic oligonucleotide
aagcatgacttcacttcagtaaggtatattcgtgacgctatggcatgtactagcggcatt

SEQ ID NO: 303667 - DNA, 55 bp, Artificial
  Synthetic oligonucleotide
aagcatgcctacgcacctcactagaagtgccacgttgcaagatgatgatatcttg

SEQ ID NO: 303668 - DNA, 60 bp, Artificial
  Synthetic oligonucleotide
aagcatgcgctctcgtctcttaccaatgctggtgcaaataaactcatggaggctgtcggc

SEQ ID NO: 303669 - DNA, 59 bp, Artificial
  Synthetic oligonucleotide
aagcatggtccaatgacatggtatcatctgaattcttgaagtttggtaacgaaaccaaa

SEQ ID NO: 303670 - DNA, 60 bp, Artificial
  Synthetic oligonucleotide
aagcatgtaagcttcgggactgacctgatagatgttaggctggagccaatctttgattgt

SEQ ID NO: 303671 - DNA, 57 bp, Artificial
  Synthetic oligonucleotide
aagcatgtaccacattaaagggaacctcaaccactttatgtatatgccaactaagga

SEQ ID NO: 303672 - DNA, 54 bp, Artificial
  Synthetic oligonucleotide
aagcatgtcccacctttctctgtttcgacgatgggaaaccgtacgtcgttacgc

SEQ ID NO: 303673 - DNA, 57 bp, Artificial
  Synthetic oligonucleotide
aagcatgtggttatagtgatagggttgcccaacttacagtaggtaactcgactatta

SEQ ID NO: 303674 - DNA, 55 bp, Artificial
  Synthetic oligonucleotide
aagcattaccatgatgtactacaggagattaaggcacgagcatccactgtgacgg

SEQ ID NO: 303675 - DNA, 55 bp, Artificial
  Synthetic oligonucleotide
aagcattagtacaagttgaaaacacagctattaaaaaggtgacgtattgtaacag

SEQ ID NO: 303676 - DNA, 60 bp, Artificial
  Synthetic oligonucleotide
aagcattcacaccaaaggctgaatttgaattttacgatcaatattctaatagatacattc

SEQ ID NO: 303677 - DNA, 55 bp, Artificial
  Synthetic oligonucleotide
aagcattccaagcattcgcaaagactacgagagagactcttgcgagcgcatgggg

SEQ ID NO: 303678 - DNA, 58 bp, Artificial
  Synthetic oligonucleotide
aagcattctaggcaacgtaacggtgaaacaggcacgaacgatgtctgtgtttgaaata

SEQ ID NO: 303679 - DNA, 60 bp, Artificial
  Synthetic oligonucleotide
aagcattgaggacccaagtcatgaaggagaggggataccgctatatgatgcgatcaaatg

SEQ ID NO: 303680 - DNA, 55 bp, Artificial
  Synthetic oligonucleotide
aagcattgcagacggaggaacaactgaggacggaagacgagatcgcaatgattag

SEQ ID NO: 303681 - DNA, 56 bp, Artificial
  Synthetic oligonucleotide
aagcatttactggacaatagtgaagccgggggatgtactagtaattaacagtaatg

SEQ ID NO: 303682 - DNA, 58 bp, Artificial
  Synthetic oligonucleotide
aagccaaacaatggacaaggtgtgaagagccccgtgtgctcgctttgagtcctccggc

SEQ ID NO: 303683 - DNA, 55 bp, Artificial
  Synthetic oligonucleotide
aagccaaaccactctctatagcacctgtagcagtaacactctatccacattggag

SEQ ID NO: 303684 - DNA, 56 bp, Artificial
  Synthetic oligonucleotide
aagccaaacgacggctgtttgataaggcccaaccgccaccaaatggccatactgac

SEQ ID NO: 303685 - DNA, 55 bp, Artificial
  Synthetic oligonucleotide
aagccaacattagtccgggatccccgtgtgagccgataggcgaggatcgaaagcc

SEQ ID NO: 303686 - DNA, 60 bp, Artificial
  Synthetic oligonucleotide
aagccaaggcacaacactcaggggccgacatgcaaatgggactatacatgataggagtcc

SEQ ID NO: 303687 - DNA, 57 bp, Artificial
  Synthetic oligonucleotide
aagccaagtgggagtgaaatcagtaagttcataacggctgaagctgttaagggcatt

SEQ ID NO: 303688 - DNA, 60 bp, Artificial
  Synthetic oligonucleotide
aagccaattgtgcacgaaatttgataatcgctttcgagtagccaaggctgctcagagtat

SEQ ID NO: 303689 - DNA, 50 bp, Artificial
  Synthetic oligonucleotide
aagccacaaaggcaactgtcatggtgcagaaaagcaactttcagggccaa

SEQ ID NO: 303690 - DNA, 52 bp, Artificial
  Synthetic oligonucleotide
aagccacgaggaggcgacatcgagtttgacttagagatagcgggaccaaaca

SEQ ID NO: 303691 - DNA, 54 bp, Artificial
  Synthetic oligonucleotide
aagccacggacgggattcagcgcgtcccgagggcgggagccgaaggtgagttta

SEQ ID NO: 303692 - DNA, 56 bp, Artificial
  Synthetic oligonucleotide
aagccacggagggagctcagcgcgtcccgagggcgggtgccgtaggtgagtttaca

SEQ ID NO: 303693 - DNA, 60 bp, Artificial
  Synthetic oligonucleotide
aagccactaggcaggacacggttgtagcgattcacagatggttcctcacagggttgcgtg

SEQ ID NO: 303694 - DNA, 55 bp, Artificial
  Synthetic oligonucleotide
aagccactgacaatagcagcattcattggctgcaggaatgagctcaccaccacac

SEQ ID NO: 303695 - DNA, 58 bp, Artificial
  Synthetic oligonucleotide
aagccactgggaacttaatagcaccatggtacgccttcgcattgaataagggctctgg

SEQ ID NO: 303696 - DNA, 60 bp, Artificial
  Synthetic oligonucleotide
aagccagagggaatataattggtgccagacctgtcatgctagacaagagaggtagaggac

SEQ ID NO: 303697 - DNA, 60 bp, Artificial
  Synthetic oligonucleotide
aagccagcagtctgaacgactcagtctaccttaggatgacttttgggcatctctatgaga

SEQ ID NO: 303698 - DNA, 56 bp, Artificial
  Synthetic oligonucleotide
aagccagcatagagtaaaaatagaggaattaagggctcacttattgaaatggggat

SEQ ID NO: 303699 - DNA, 59 bp, Artificial
  Synthetic oligonucleotide
aagccagctcgtctcatcgtgtttcccgacctgggtgtacgcgtgtgcgagaaaatggc

SEQ ID NO: 303700 - DNA, 57 bp, Artificial
  Synthetic oligonucleotide
aagccaggacgtttacaaaactatcttgcgtgctaatcttgacgcctttatgatgtt

SEQ ID NO: 303701 - DNA, 60 bp, Artificial
  Synthetic oligonucleotide
aagccaggcaggctataaggtcgctcacagagcggctttacatcgggggtcctctgacca

SEQ ID NO: 303702 - DNA, 59 bp, Artificial
  Synthetic oligonucleotide
aagccaggcttcgcactaagagtgggtcatactgaaaaaggagtagaagagataccaga

SEQ ID NO: 303703 - DNA, 54 bp, Artificial
  Synthetic oligonucleotide
aagccagtgggtatctagtcgtaatgagaaattgcgggacgggaccgactactt

SEQ ID NO: 303704 - DNA, 59 bp, Artificial
  Synthetic oligonucleotide
aagccagtttgacgcagtgtttcttgacgaatcccacctcataaccacgcatgcccttg

SEQ ID NO: 303705 - DNA, 53 bp, Artificial
  Synthetic oligonucleotide
aagccataagaggtctttacctagattctacatagactgtgacctggacacct

SEQ ID NO: 303706 - DNA, 57 bp, Artificial
  Synthetic oligonucleotide
aagccatcacgggtaaggtggctaactttctctgactttattacaggcataggagtc

SEQ ID NO: 303707 - DNA, 53 bp, Artificial
  Synthetic oligonucleotide
aagccatcatatctggtggcttttgtatttttgacgtcctaattcaggagaca

SEQ ID NO: 303708 - DNA, 51 bp, Artificial
  Synthetic oligonucleotide
aagccatccattgacgtatggcttgaggacatctttcaggaaagcccggct

SEQ ID NO: 303709 - DNA, 60 bp, Artificial
  Synthetic oligonucleotide
aagccatcttaagagcattaggacccggggctacattagaagaaatgatgacagcatgtc

SEQ ID NO: 303710 - DNA, 55 bp, Artificial
  Synthetic oligonucleotide
aagccatgaccaaatcaaacagaatcaaaatcaactctggggcaaataacaatgg

SEQ ID NO: 303711 - DNA, 60 bp, Artificial
  Synthetic oligonucleotide
aagccatggaagaatcttgaagactgatttgagcagtggcgactgcgtagtgcagtgtca

SEQ ID NO: 303712 - DNA, 50 bp, Artificial
  Synthetic oligonucleotide
aagccatgggggtgatcgcagcagctgaaatgttcgcacgcgcacctgat

SEQ ID NO: 303713 - DNA, 60 bp, Artificial
  Synthetic oligonucleotide
aagccatgtgtaaagctgaccccgctctgtgtcactttaaactgtagcaatgcaaatgtc

SEQ ID NO: 303714 - DNA, 55 bp, Artificial
  Synthetic oligonucleotide
aagccattcttatgctatagatgcagctaatcattgcggcacagtcgcgaatggc

SEQ ID NO: 303715 - DNA, 54 bp, Artificial
  Synthetic oligonucleotide
aagcccaaaactcgctgacgctaccgcaccgacgattagggccgtgcccgaaaa

SEQ ID NO: 303716 - DNA, 50 bp, Artificial
  Synthetic oligonucleotide
aagcccaagatatatcggatgtatagaacccccgatgttccaaggggttg

SEQ ID NO: 303717 - DNA, 54 bp, Artificial
  Synthetic oligonucleotide
aagcccacaactatttggattgagggtggcccttattacccaagtagatatcag

SEQ ID NO: 303718 - DNA, 60 bp, Artificial
  Synthetic oligonucleotide
aagcccagctatacaatccgctttggcgaaacgctacactggcgctttgaaagacatcat

SEQ ID NO: 303719 - DNA, 60 bp, Artificial
  Synthetic oligonucleotide
aagcccagtctatggagcagtggaagttaagatgggtccagcagtcctgagcaaatcaga

SEQ ID NO: 303720 - DNA, 59 bp, Artificial
  Synthetic oligonucleotide
aagcccagtgaggtctcgcatagaggccaagaagtacactacccccattagacatggga

SEQ ID NO: 303721 - DNA, 60 bp, Artificial
  Synthetic oligonucleotide
aagcccatacagcggcatggttcactcacacccagtgtgcaagactctagaaaattacat

SEQ ID NO: 303722 - DNA, 59 bp, Artificial
  Synthetic oligonucleotide
aagcccatgacccactactataattgttgacttggtcaacatgctatagtgtgttcctt

SEQ ID NO: 303723 - DNA, 58 bp, Artificial
  Synthetic oligonucleotide
aagcccatgatgtaccggatgtacagaagccctgatgttccaaggggttgtgaaggcc

SEQ ID NO: 303724 - DNA, 59 bp, Artificial
  Synthetic oligonucleotide
aagcccattcaaggtcagacaatcgtattaaacactgactggagtggttacagtggatc

SEQ ID NO: 303725 - DNA, 55 bp, Artificial
  Synthetic oligonucleotide
aagccccaccacagtccgctggtcctcgagcggtgtcacgtcaacatccaccaac

SEQ ID NO: 303726 - DNA, 57 bp, Artificial
  Synthetic oligonucleotide
aagccccacggagccgtctcatgccaggctaccaacagcggaacccttcaaatctta

SEQ ID NO: 303727 - DNA, 55 bp, Artificial
  Synthetic oligonucleotide
aagccccaggccaatttccacccttaagggatcctcaggcggtccgctgttgtgc

SEQ ID NO: 303728 - DNA, 54 bp, Artificial
  Synthetic oligonucleotide
aagccccaggttgaagctgccaaactaaggcgggctaaaccatatggaaagttc

SEQ ID NO: 303729 - DNA, 53 bp, Artificial
  Synthetic oligonucleotide
aagccccgacacggtgaaataggcagtctcaggcttggaacccaccgcgaatg

SEQ ID NO: 303730 - DNA, 57 bp, Artificial
  Synthetic oligonucleotide
aagccccgactatacagaatgtacagaacccctgatgtgcccaaaggttgtgaaggc

SEQ ID NO: 303731 - DNA, 55 bp, Artificial
  Synthetic oligonucleotide
aagccccgtgacttcaaaacggaagtcatagtgctgaccggccctagtgggtgtg

SEQ ID NO: 303732 - DNA, 52 bp, Artificial
  Synthetic oligonucleotide
aagccccgtggcgttcaatagcgggagtgttaaaggcccgccgtactcttaa

SEQ ID NO: 303733 - DNA, 52 bp, Artificial
  Synthetic oligonucleotide
aagccccgtgtctttttatggacttcagcgactatctctctggagtttttga

SEQ ID NO: 303734 - DNA, 56 bp, Artificial
  Synthetic oligonucleotide
aagcccctcaacgttctgaacttactatctaactgtgattggacattcatgggggt

SEQ ID NO: 303735 - DNA, 51 bp, Artificial
  Synthetic oligonucleotide
aagcccctcacattcggcctctacggggccagttacaggggacagcagatc

SEQ ID NO: 303736 - DNA, 49 bp, Artificial
  Synthetic oligonucleotide
aagcccgctggtagggtaccttccagtaacctctttagtggtttcggtt

SEQ ID NO: 303737 - DNA, 57 bp, Artificial
  Synthetic oligonucleotide
aagcccggatgttcctagaggttgtgaagggccttgtaaggtccagtcatttgagca

SEQ ID NO: 303738 - DNA, 60 bp, Artificial
  Synthetic oligonucleotide
aagcccggcgatgagctagagcagccagaccctacgctggccggtagcgatacgtgatat

SEQ ID NO: 303739 - DNA, 55 bp, Artificial
  Synthetic oligonucleotide
aagcccggtctatcctgcgacctgccttagctattcccgccagtaatatcacccc

SEQ ID NO: 303740 - DNA, 52 bp, Artificial
  Synthetic oligonucleotide
aagcccgtatcgctgccgagatggagccagatctgccttggggttaagccct

SEQ ID NO: 303741 - DNA, 58 bp, Artificial
  Synthetic oligonucleotide
aagcccgtccagatctggaacattagaacacatttgtgaagccccagtgctttccgca

SEQ ID NO: 303742 - DNA, 56 bp, Artificial
  Synthetic oligonucleotide
aagcccgttagcgccatcatcaacggaagagaccgtcaaagtcccgactttgacga

SEQ ID NO: 303743 - DNA, 50 bp, Artificial
  Synthetic oligonucleotide
aagcccgtttgtattttaagtctgttgggaatcagtgattcccacttcaa

SEQ ID NO: 303744 - DNA, 60 bp, Artificial
  Synthetic oligonucleotide
aagccctcacttactacttacacacatctgatcaatcgagtgtagccatcctgttacagc

SEQ ID NO: 303745 - DNA, 56 bp, Artificial
  Synthetic oligonucleotide
aagccctcattccccccagtgctttgacggctagacaaagactagacataaataac

SEQ ID NO: 303746 - DNA, 56 bp, Artificial
  Synthetic oligonucleotide
aagccctctctctctgcacgcccccccgtcctgccaaatcaacctccccgtgcaac

SEQ ID NO: 303747 - DNA, 60 bp, Artificial
  Synthetic oligonucleotide
aagccctgatgtccctagaggatgtgagggtccatgtaaggtccagtcgtttgatgctaa

SEQ ID NO: 303748 - DNA, 59 bp, Artificial
  Synthetic oligonucleotide
aagccctgatgtgcccaaaggttgtgaaggcccatgtaaggtccaatcgtatgaacaga

SEQ ID NO: 303749 - DNA, 55 bp, Artificial
  Synthetic oligonucleotide
aagcccttaaatatctgggaaatcttgtgctatattggggtctggagctaaaggg

SEQ ID NO: 303750 - DNA, 54 bp, Artificial
  Synthetic oligonucleotide
aagcccttaagtatctgggaaatcttgggcagtattggggtctggagctaaaaa

SEQ ID NO: 303751 - DNA, 54 bp, Artificial
  Synthetic oligonucleotide
aagcccttaagtatctggggagtcttgtgcagtactggggtctggaactaaaag

SEQ ID NO: 303752 - DNA, 53 bp, Artificial
  Synthetic oligonucleotide
aagcccttacggggcttagtactggcactagccaaaacaccagaatttcccta

SEQ ID NO: 303753 - DNA, 55 bp, Artificial
  Synthetic oligonucleotide
aagcccttatccgcccttttatgagccttttgaatcaatacgatacttctagttg

SEQ ID NO: 303754 - DNA, 55 bp, Artificial
  Synthetic oligonucleotide
aagcccttgagtcaaagacgtagtcgttgcaagtccgcacgaggtactggtatcc

SEQ ID NO: 303755 - DNA, 55 bp, Artificial
  Synthetic oligonucleotide
aagcccttgctacgagacgaggtgtcgttcagagtaggactacacgattacccgg

SEQ ID NO: 303756 - DNA, 57 bp, Artificial
  Synthetic oligonucleotide
aagcccttgtccgcctttttatgagcgaattgaatcaacgctatacttctagttgta

SEQ ID NO: 303757 - DNA, 57 bp, Artificial
  Synthetic oligonucleotide
aagccctttaggttacctccgagtctgtgatctgagcaagaaggttgatgacggtat

SEQ ID NO: 303758 - DNA, 60 bp, Artificial
  Synthetic oligonucleotide
aagccgaccgacatgtctggggtcatcaacgggctgtccgatgtggcgaataagactcag

SEQ ID NO: 303759 - DNA, 55 bp, Artificial
  Synthetic oligonucleotide
aagccgagtagcaggtagcattaccatgcgttctggaagcttaccagctcttcag

SEQ ID NO: 303760 - DNA, 58 bp, Artificial
  Synthetic oligonucleotide
aagccgataggtggtgggtagcgcatggcggctcccgtcctatgcctaagacgcccat

SEQ ID NO: 303761 - DNA, 58 bp, Artificial
  Synthetic oligonucleotide
aagccgatgagacgctggtatggcagtacatggcgcgagaagtatctccgaacttaag

SEQ ID NO: 303762 - DNA, 57 bp, Artificial
  Synthetic oligonucleotide
aagccgcatgcctgagtgccacccgagacttactcatgactttagcggagttggggt

SEQ ID NO: 303763 - DNA, 60 bp, Artificial
  Synthetic oligonucleotide
aagccgcatttgagtcccacaggcaacttgcacacatttgatgagttatttggtgcaaga

SEQ ID NO: 303764 - DNA, 55 bp, Artificial
  Synthetic oligonucleotide
aagccgccctcaactggagaaaggatgtcggcttctccattggggagtacaccag

SEQ ID NO: 303765 - DNA, 56 bp, Artificial
  Synthetic oligonucleotide
aagccgccctgtcgaccagggtactggcagaaactacaaaacctcaagagccaatc

SEQ ID NO: 303766 - DNA, 51 bp, Artificial
  Synthetic oligonucleotide
aagccgcctgtcatgtatggccgctgtagcagcacgctccaaggacccagt

SEQ ID NO: 303767 - DNA, 57 bp, Artificial
  Synthetic oligonucleotide
aagccgccttggtctgacgacttaacttatgctaacccgtccaatatgcctgaacag

SEQ ID NO: 303768 - DNA, 51 bp, Artificial
  Synthetic oligonucleotide
aagccgcgccactgggcttaaattccacatacccgtctttattgtacacgc

SEQ ID NO: 303769 - DNA, 60 bp, Artificial
  Synthetic oligonucleotide
aagccgctacagtcaaactcttacggcgtgctatgctcgacgattgcatccaaagcaaaa

SEQ ID NO: 303770 - DNA, 51 bp, Artificial
  Synthetic oligonucleotide
aagccgctagaacgactcgagagtgatcccagcatggaacgtcctggtatc

SEQ ID NO: 303771 - DNA, 60 bp, Artificial
  Synthetic oligonucleotide
aagccgctcagatgagattggaattccaacaggacaaggacttcctccggatcacttaca

SEQ ID NO: 303772 - DNA, 60 bp, Artificial
  Synthetic oligonucleotide
aagccgctgggtttgatgaccagccttgttgattgcgcaccacctggtgccatcgctgac

SEQ ID NO: 303773 - DNA, 58 bp, Artificial
  Synthetic oligonucleotide
aagccggaaggtttgaaagagtcgaagcgcccgccaatctgcaattggcaatcactaa

SEQ ID NO: 303774 - DNA, 60 bp, Artificial
  Synthetic oligonucleotide
aagccggaatcctgggaatgcagaaattgaagacctcatctttcttgcacgatctgctct

SEQ ID NO: 303775 - DNA, 55 bp, Artificial
  Synthetic oligonucleotide
aagccggacctggcggcatgggttgcagctgtccaggcgatcaaagcgcggtatc

SEQ ID NO: 303776 - DNA, 55 bp, Artificial
  Synthetic oligonucleotide
aagccggactccagggaatccctcgcatggcaaactgctaccaatccctcggttt

SEQ ID NO: 303777 - DNA, 60 bp, Artificial
  Synthetic oligonucleotide
aagccggatgttgaagaccctgatactgatgattcaacagacatggcagtattgaatgcg

SEQ ID NO: 303778 - DNA, 50 bp, Artificial
  Synthetic oligonucleotide
aagccggccaaactttggcctgcttccaacatattgtcttgttcagattc

SEQ ID NO: 303779 - DNA, 51 bp, Artificial
  Synthetic oligonucleotide
aagccggtcgagctttaccacggccattaccaccgcgcctatcagtcctta

SEQ ID NO: 303780 - DNA, 55 bp, Artificial
  Synthetic oligonucleotide
aagccgtagagatctccacgttaatcaagccatccctagaagtcggagagcatgg

SEQ ID NO: 303781 - DNA, 55 bp, Artificial
  Synthetic oligonucleotide
aagccgtcttgtttgtggtttggatcccactgaccagaaatctatgtcgttaacg

SEQ ID NO: 303782 - DNA, 55 bp, Artificial
  Synthetic oligonucleotide
aagccgtgacggggcaacaggttgcggtgaatgggatacgtcctgttagcaagaa

SEQ ID NO: 303783 - DNA, 59 bp, Artificial
  Synthetic oligonucleotide
aagccgtgatgttcctcgtgggtgtgaaggcccgtgtaaggttcagtcctatgagcagc

SEQ ID NO: 303784 - DNA, 55 bp, Artificial
  Synthetic oligonucleotide
aagcctaaagccatgtgtaaagttgaccccactctgtgttacattgaactgcagt

SEQ ID NO: 303785 - DNA, 56 bp, Artificial
  Synthetic oligonucleotide
aagcctaaattcctcccagatttgtatgattacaaagagaaccgattcattgaaat

SEQ ID NO: 303786 - DNA, 52 bp, Artificial
  Synthetic oligonucleotide
aagcctaatccgccggccgagaactgatttattgttgcggtgatgtgtcaat

SEQ ID NO: 303787 - DNA, 60 bp, Artificial
  Synthetic oligonucleotide
aagcctaattattgacaaggtgcgaagagccgcgtgtgctcagtgtgcttcctccggccc

SEQ ID NO: 303788 - DNA, 60 bp, Artificial
  Synthetic oligonucleotide
aagcctaattccaagtccaatcataattgtagattattgtctcaggcaatatcttactca

SEQ ID NO: 303789 - DNA, 60 bp, Artificial
  Synthetic oligonucleotide
aagcctacaatgcatatgattgttcctgttcattcctgtaacatgatgaaaagctgtctt

SEQ ID NO: 303790 - DNA, 56 bp, Artificial
  Synthetic oligonucleotide
aagcctagaacagtcagaataacaggagcccctgtaaagaagaggtcaggggtcag

SEQ ID NO: 303791 - DNA, 53 bp, Artificial
  Synthetic oligonucleotide
aagcctagctcactaggcttaactcccaatttgggagttgtccttacggacgt

SEQ ID NO: 303792 - DNA, 55 bp, Artificial
  Synthetic oligonucleotide
aagcctagtaacaccccacgatataggatggttggtcgctccaccagtgtacccc

SEQ ID NO: 303793 - DNA, 58 bp, Artificial
  Synthetic oligonucleotide
aagcctagtaccaccttggaatctccgatgcgttgcgctccacactctaccccgagtg

SEQ ID NO: 303794 - DNA, 57 bp, Artificial
  Synthetic oligonucleotide
aagcctagtacctcctttgacggtatttgtctggtcgctcaggtgcttccccagcac

SEQ ID NO: 303795 - DNA, 57 bp, Artificial
  Synthetic oligonucleotide
aagcctagtagcatcactgaagctgtgaagcgttacgatcagcacaaccccagtgta

SEQ ID NO: 303796 - DNA, 53 bp, Artificial
  Synthetic oligonucleotide
aagcctatactggatagagcgacagcgttatcgctcagccgaagagaagatct

SEQ ID NO: 303797 - DNA, 59 bp, Artificial
  Synthetic oligonucleotide
aagcctattatggccatttgttttagaagttgtcataacagcattagcaatacagttta

SEQ ID NO: 303798 - DNA, 59 bp, Artificial
  Synthetic oligonucleotide
aagcctcacgtcaaacaggcagtctatgtttctggtacgactgcatgtcggttttgaac

SEQ ID NO: 303799 - DNA, 60 bp, Artificial
  Synthetic oligonucleotide
aagcctccaagctgtgccttggatggctttggggcatggacatagatccctataaagaat

SEQ ID NO: 303800 - DNA, 55 bp, Artificial
  Synthetic oligonucleotide
aagcctccgcagaaagcccggaccaccacacccaactcaaggtactctgcagcgc

SEQ ID NO: 303801 - DNA, 54 bp, Artificial
  Synthetic oligonucleotide
aagcctccgtcctaaataaaggatggcaaacaaaagagttaagcgtgccaatcc

SEQ ID NO: 303802 - DNA, 55 bp, Artificial
  Synthetic oligonucleotide
aagcctcgcggcaaccttgtcggggttccacctgctaaggcaagtgtttgtacga

SEQ ID NO: 303803 - DNA, 58 bp, Artificial
  Synthetic oligonucleotide
aagcctctaaaggttcaaatcgatggtgttagcatactcacgagtgaaaaatatggta

SEQ ID NO: 303804 - DNA, 60 bp, Artificial
  Synthetic oligonucleotide
aagcctctgaacaattgttggccatgacaagatggtggaagaaccatatgacactaacaa

SEQ ID NO: 303805 - DNA, 56 bp, Artificial
  Synthetic oligonucleotide
aagcctctgcagcaataggtgttggtacgaattctcgaacgccgtttcaaaccact

SEQ ID NO: 303806 - DNA, 56 bp, Artificial
  Synthetic oligonucleotide
aagcctgagaccgtaacgttcgaggcagcaactcagggtgtcggtacggtcaagct

SEQ ID NO: 303807 - DNA, 59 bp, Artificial
  Synthetic oligonucleotide
aagcctgaggacttccactatgccatcgttggacgggagagcggtgagaaacagcaaac

SEQ ID NO: 303808 - DNA, 57 bp, Artificial
  Synthetic oligonucleotide
aagcctgaggctatggaagactgaaaggctgacttgtttattgactctgcgagaatc

SEQ ID NO: 303809 - DNA, 53 bp, Artificial
  Synthetic oligonucleotide
aagcctggacaaaccgaccaatagaggcgttgtagccagcagcgcaacggtca

SEQ ID NO: 303810 - DNA, 60 bp, Artificial
  Synthetic oligonucleotide
aagcctggttggaagctaccaagggctggcacgatctcgactgccgctgcggtaactggc

SEQ ID NO: 303811 - DNA, 60 bp, Artificial
  Synthetic oligonucleotide
aagcctgtggctacagtgacagggtgtgccaaatgacagtcggtaactccaccatcacga

SEQ ID NO: 303812 - DNA, 54 bp, Artificial
  Synthetic oligonucleotide
aagccttacaattactattaatacattcttggaccgttgtcctaactagctcgt

SEQ ID NO: 303813 - DNA, 60 bp, Artificial
  Synthetic oligonucleotide
aagccttacgcgattggtgagatcggtattcacgcatcaacttacaaatatctggatcta

SEQ ID NO: 303814 - DNA, 57 bp, Artificial
  Synthetic oligonucleotide
aagccttatacatgctttcaacgcgtgggagacagaccgtgaaagagaataaaggga

SEQ ID NO: 303815 - DNA, 60 bp, Artificial
  Synthetic oligonucleotide
aagccttccaacgcttcgcctacgcagtgccatttatgtcacaacgcgcattgtgggcat

SEQ ID NO: 303816 - DNA, 53 bp, Artificial
  Synthetic oligonucleotide
aagccttcgcccccctattcgcgtctaacgcgatgttcacccgtaaccaacgc

SEQ ID NO: 303817 - DNA, 51 bp, Artificial
  Synthetic oligonucleotide
aagccttctaatggcagtaaggctacgcacaatctttacgaagatacacgc

SEQ ID NO: 303818 - DNA, 55 bp, Artificial
  Synthetic oligonucleotide
aagccttctgcgggtcccgtactttgtgcgtgcacatgcactattgcgggtgtgc

SEQ ID NO: 303819 - DNA, 52 bp, Artificial
  Synthetic oligonucleotide
aagccttgcgagagctttttacaaaccttacacaagtcaactttacagtaag

SEQ ID NO: 303820 - DNA, 53 bp, Artificial
  Synthetic oligonucleotide
aagccttgctatgtatcctttggtgctaagggacaacaatggcgatcatactg

SEQ ID NO: 303821 - DNA, 56 bp, Artificial
  Synthetic oligonucleotide
aagcgaaaattttgcattgggtcacgtaagtgacataattttagaggaattatgag

SEQ ID NO: 303822 - DNA, 58 bp, Artificial
  Synthetic oligonucleotide
aagcgaaatccgcagcaccttatcacgtgcgaaagccagtttgattattcgtaaactg

SEQ ID NO: 303823 - DNA, 55 bp, Artificial
  Synthetic oligonucleotide
aagcgaagttagccaatagcatggccggaagctataacgcattgtcagcacaata

SEQ ID NO: 303824 - DNA, 60 bp, Artificial
  Synthetic oligonucleotide
aagcgaataagagtaacagcttccatactgacacaagctgggttcagtggatgattaaag

SEQ ID NO: 303825 - DNA, 55 bp, Artificial
  Synthetic oligonucleotide
aagcgaattggaggcatcatgggcaggactaagcttgtgtggaaaattgtctgca

SEQ ID NO: 303826 - DNA, 60 bp, Artificial
  Synthetic oligonucleotide
aagcgacacacgcaagctcatatgccctaccttcaccttacttcgtagtctcagggtgcc

SEQ ID NO: 303827 - DNA, 60 bp, Artificial
  Synthetic oligonucleotide
aagcgaccagcagatatcataatttctactccaggctcgaaggttcgtcgccgtctgaac

SEQ ID NO: 303828 - DNA, 59 bp, Artificial
  Synthetic oligonucleotide
aagcgacctgcagatatagtcatttccactcccgcctccaaggtacgccggaggctgaa

SEQ ID NO: 303829 - DNA, 57 bp, Artificial
  Synthetic oligonucleotide
aagcgactcggagagagcctgcagtccaacacctacaacggattctccaccccctgg

SEQ ID NO: 303830 - DNA, 60 bp, Artificial
  Synthetic oligonucleotide
aagcgacttagcgcgcttaagaaaatgctgccgcgagctcattttgagcgcgctaaaggg

SEQ ID NO: 303831 - DNA, 60 bp, Artificial
  Synthetic oligonucleotide
aagcgagaaagccagctcacgcgtggagtagcatcgaatcttttgagcaggataaagatg

SEQ ID NO: 303832 - DNA, 56 bp, Artificial
  Synthetic oligonucleotide
aagcgaggagcgagtaggccccagtgttatacgtgggtatttcctacggcactgcg

SEQ ID NO: 303833 - DNA, 60 bp, Artificial
  Synthetic oligonucleotide
aagcgagtgcgactcagtgccgtggacagtgttgacagaggggtctactctacatctgac

SEQ ID NO: 303834 - DNA, 57 bp, Artificial
  Synthetic oligonucleotide
aagcgagtggtggctcccgggttagtggactgctacattaaccttggagcacgctgg

SEQ ID NO: 303835 - DNA, 55 bp, Artificial
  Synthetic oligonucleotide
aagcgataagactgtatgcggagactgggttgctgggatatcgggagtgcattgt

SEQ ID NO: 303836 - DNA, 58 bp, Artificial
  Synthetic oligonucleotide
aagcgatcactcgttctgtccacgtgcttctttggtacttcagggctttccgctggcc

SEQ ID NO: 303837 - DNA, 60 bp, Artificial
  Synthetic oligonucleotide
aagcgatcgagaatgctgcgagaattcttgaaccgcatattgatgtcatcatggaggatt

SEQ ID NO: 303838 - DNA, 56 bp, Artificial
  Synthetic oligonucleotide
aagcgatgaaagattcttccgaacctttacggggatctgatcgtcccaatgctaaa

SEQ ID NO: 303839 - DNA, 60 bp, Artificial
  Synthetic oligonucleotide
aagcgatggattgggcggaatcacaattcaagacatgtactcatggatgcgattggaaga

SEQ ID NO: 303840 - DNA, 60 bp, Artificial
  Synthetic oligonucleotide
aagcgattctgcactatatcatactatgttctcaaacactcataccaggatgcccaggtg

SEQ ID NO: 303841 - DNA, 59 bp, Artificial
  Synthetic oligonucleotide
aagcgattgatcccttcaaattgatacgagaattttttgagatatgtttgccgcatcct

SEQ ID NO: 303842 - DNA, 52 bp, Artificial
  Synthetic oligonucleotide
aagcgattggaagactatgagttatgggtctttaagaatagagacctatacg

SEQ ID NO: 303843 - DNA, 55 bp, Artificial
  Synthetic oligonucleotide
aagcgattggtagtgagtttgaggatggtttaaactgcaatagaaagccgccttc

SEQ ID NO: 303844 - DNA, 52 bp, Artificial
  Synthetic oligonucleotide
aagcgcaactgcacgtgtgggtccccccccttaacatccggggggggcgtga

SEQ ID NO: 303845 - DNA, 52 bp, Artificial
  Synthetic oligonucleotide
aagcgcaactgcacgtgtgggttccccccctcgacgtccggggggggcgtga

SEQ ID NO: 303846 - DNA, 51 bp, Artificial
  Synthetic oligonucleotide
aagcgcaatatgccaacgcaggaccccattcacgtgctgtgccgtgtcgtt

SEQ ID NO: 303847 - DNA, 60 bp, Artificial
  Synthetic oligonucleotide
aagcgcaatccaggagagcttgacttctcattgctcgcagacagcagatgcatagagtct

SEQ ID NO: 303848 - DNA, 60 bp, Artificial
  Synthetic oligonucleotide
aagcgcaatggtactcacagaattctgtggaagcagtaccaatgtttatctacccagttc

SEQ ID NO: 303849 - DNA, 58 bp, Artificial
  Synthetic oligonucleotide
aagcgcaattttattgatacgcgcgttaaggtgagactaaatggctaagtcagattac

SEQ ID NO: 303850 - DNA, 54 bp, Artificial
  Synthetic oligonucleotide
aagcgcaccaaggcacagggaacgaaggtcgaggtgtcgaaaatggcgtcaacg

SEQ ID NO: 303851 - DNA, 59 bp, Artificial
  Synthetic oligonucleotide
aagcgcactcggcaagaggcgagagcggcgactggtgagtacgccaaattttatttgac

SEQ ID NO: 303852 - DNA, 52 bp, Artificial
  Synthetic oligonucleotide
aagcgcagatgaaaccaagtagtgataactatgttcagcgcgtatgtgacta

SEQ ID NO: 303853 - DNA, 56 bp, Artificial
  Synthetic oligonucleotide
aagcgcaggcacgtgcgttagaggactggaagaagcacccacgtaaccgtttattc

SEQ ID NO: 303854 - DNA, 60 bp, Artificial
  Synthetic oligonucleotide
aagcgcattcacgatagcttggttattgaactggttatgttcctctaaccatagcgcaag

SEQ ID NO: 303855 - DNA, 58 bp, Artificial
  Synthetic oligonucleotide
aagcgccaatttgagcgggatgtactccacgcgctcgtggctacccagccggtagtag

SEQ ID NO: 303856 - DNA, 60 bp, Artificial
  Synthetic oligonucleotide
aagcgccgaaaggcataatccacacaactccaagggtgcgcaagatcaagacgcactccg

SEQ ID NO: 303857 - DNA, 58 bp, Artificial
  Synthetic oligonucleotide
aagcgcgatgctccgtggcgattgatgggggggacctcaaaagtgagccggtcctcca

SEQ ID NO: 303858 - DNA, 55 bp, Artificial
  Synthetic oligonucleotide
aagcgcgccgctgtggctgctaagcatggcgaagtcgtagctaacgcgctgtcag

SEQ ID NO: 303859 - DNA, 55 bp, Artificial
  Synthetic oligonucleotide
aagcgcgcgagatttgagccatgggaaggttctctgattgctgtgtctcgtgatg

SEQ ID NO: 303860 - DNA, 56 bp, Artificial
  Synthetic oligonucleotide
aagcgcggatgataaacggggtagaatggcacgattcgtcagaggatcagtgccgg

SEQ ID NO: 303861 - DNA, 58 bp, Artificial
  Synthetic oligonucleotide
aagcgcgggctgtctaagttctacatgacccgccacgaaaagcactgcacgttaagcc

SEQ ID NO: 303862 - DNA, 57 bp, Artificial
  Synthetic oligonucleotide
aagcgcggggacccaagaggacgcggcagccctacgagtcttcacggaggctatgac

SEQ ID NO: 303863 - DNA, 57 bp, Artificial
  Synthetic oligonucleotide
aagcgcggggacccaagaggatgcggctaacctacgagtctttgtggaggctatgac

SEQ ID NO: 303864 - DNA, 57 bp, Artificial
  Synthetic oligonucleotide
aagcgcgggtacccaggaggacgaggcgagcctacgagtcttcacggaggctatgac

SEQ ID NO: 303865 - DNA, 56 bp, Artificial
  Synthetic oligonucleotide
aagcgcgggttttttactcctgtctagtcctggtgcattagcctcgacccatattg

SEQ ID NO: 303866 - DNA, 56 bp, Artificial
  Synthetic oligonucleotide
aagcgcgtgcaaatgcgccaaaaaagtagactttctctctcctaaaactcgccgga

SEQ ID NO: 303867 - DNA, 59 bp, Artificial
  Synthetic oligonucleotide
aagcgctataataacacatgccccgatgaacaggattaccaagttcggatggctaagtc

SEQ ID NO: 303868 - DNA, 60 bp, Artificial
  Synthetic oligonucleotide
aagcgctatctttcggctgacttgtttcgcaatcttcggatgtaagccaacagctcgagg

SEQ ID NO: 303869 - DNA, 59 bp, Artificial
  Synthetic oligonucleotide
aagcgctatgacgaaaggcaaattcttaatctcttatactccgcctggagcaggagaac

SEQ ID NO: 303870 - DNA, 60 bp, Artificial
  Synthetic oligonucleotide
aagcgctgactattctattgatctggatcatgttagacttcggcaatctgatctcattgc

SEQ ID NO: 303871 - DNA, 60 bp, Artificial
  Synthetic oligonucleotide
aagcgctgttgatatggttccagatgtttcgttatgcagatttgtgggtctaagaagaca

SEQ ID NO: 303872 - DNA, 51 bp, Artificial
  Synthetic oligonucleotide
aagcgctttcagactcggctccccgtgagtgtctgacgtgaggaggttggc

SEQ ID NO: 303873 - DNA, 56 bp, Artificial
  Synthetic oligonucleotide
aagcggaaaccaaagctgcaatgaattgcggtagttgacgctaaaaaagggcctca

SEQ ID NO: 303874 - DNA, 56 bp, Artificial
  Synthetic oligonucleotide
aagcggaacaggcgtcagcaatttaataaattcggtgacgctagtcaagtcgaaag

SEQ ID NO: 303875 - DNA, 60 bp, Artificial
  Synthetic oligonucleotide
aagcggaaccggttgatgaagatagcttatctttgcggtttcagcgagctctcgatgaga

SEQ ID NO: 303876 - DNA, 54 bp, Artificial
  Synthetic oligonucleotide
aagcggacggtggtcctcactgaatcatccgtgtctactgccttggcagaactt

SEQ ID NO: 303877 - DNA, 54 bp, Artificial
  Synthetic oligonucleotide
aagcggagagcggtggtagccgcgtttaatccgtcagactgtgggttaccgaat

SEQ ID NO: 303878 - DNA, 55 bp, Artificial
  Synthetic oligonucleotide
aagcggagatgatagccgaggataacgccattataactgcaaatgtgcgggaagg

SEQ ID NO: 303879 - DNA, 52 bp, Artificial
  Synthetic oligonucleotide
aagcggaggggtggcgttacgcggtgcgcacacgcaacgtttcggtggtgcg

SEQ ID NO: 303880 - DNA, 56 bp, Artificial
  Synthetic oligonucleotide
aagcggatatctaaacatttggtcacatttaaaggtcagccttataagtgggaaca

SEQ ID NO: 303881 - DNA, 55 bp, Artificial
  Synthetic oligonucleotide
aagcggcaggatacgatgtattagatgtaacaccaggcaattgtgattctaatac

SEQ ID NO: 303882 - DNA, 57 bp, Artificial
  Synthetic oligonucleotide
aagcggcattttactgctttgcctacggtttacctgttatggctgaaggagtctcac

SEQ ID NO: 303883 - DNA, 52 bp, Artificial
  Synthetic oligonucleotide
aagcggcccagacccctgggaatccgatggtgggatgggaccccagggaaaa

SEQ ID NO: 303884 - DNA, 55 bp, Artificial
  Synthetic oligonucleotide
aagcggcccattcagcctacagatgttgcttaccatacagtaacggatgttaagc

SEQ ID NO: 303885 - DNA, 50 bp, Artificial
  Synthetic oligonucleotide
aagcggcgtcgcgcctcaaggtcacgaaaaactcagagggtcgcgcttta

SEQ ID NO: 303886 - DNA, 55 bp, Artificial
  Synthetic oligonucleotide
aagcggcgtttggtgccgctagtgatatggcttatagctcaacggagtttgcagg

SEQ ID NO: 303887 - DNA, 55 bp, Artificial
  Synthetic oligonucleotide
aagcggctagacgttacggttcccttggtatagtaaggaagcgtcacacgcgcgc

SEQ ID NO: 303888 - DNA, 54 bp, Artificial
  Synthetic oligonucleotide
aagcgggaatacaatcagtgttcaggcaaggcaaacggtaggacagtctcagtc

SEQ ID NO: 303889 - DNA, 55 bp, Artificial
  Synthetic oligonucleotide
aagcgggactacttcatttcggtcaagtcctggcagtggcagctatctgtaaggc

SEQ ID NO: 303890 - DNA, 51 bp, Artificial
  Synthetic oligonucleotide
aagcgggagagaagggtaaagcccgattctttgttggggaacccggagcac

SEQ ID NO: 303891 - DNA, 52 bp, Artificial
  Synthetic oligonucleotide
aagcgggaggcgggctctctcttcagggaaactccctctccgtgaacgccgg

SEQ ID NO: 303892 - DNA, 56 bp, Artificial
  Synthetic oligonucleotide
aagcgggccgtaactccagtggtgacatggggaacggacattagcttactccgcta

SEQ ID NO: 303893 - DNA, 60 bp, Artificial
  Synthetic oligonucleotide
aagcgggcggtgcaaatgagttgcgtctgaacaggcagaggagtttcaatgttgagaatc

SEQ ID NO: 303894 - DNA, 55 bp, Artificial
  Synthetic oligonucleotide
aagcggggatcgggtttgagacgttaaacgctgctattcaggttctcgctgaacg

SEQ ID NO: 303895 - DNA, 55 bp, Artificial
  Synthetic oligonucleotide
aagcgggtaatagtgtggggtgccgacactgctgcgtgcggcgatatcatcgggg

SEQ ID NO: 303896 - DNA, 60 bp, Artificial
  Synthetic oligonucleotide
aagcgggtatgcacaaacagattgtgtgctggaagcaatggctttccttgaagaatccca

SEQ ID NO: 303897 - DNA, 57 bp, Artificial
  Synthetic oligonucleotide
aagcgggtcacagaagctcagcttgtcgtaggcgatcctttaaaggggatccaggga

SEQ ID NO: 303898 - DNA, 59 bp, Artificial
  Synthetic oligonucleotide
aagcgggtcatcaatcaaaagagaggaagaagtgcttacgggcaatctccaaacattga

SEQ ID NO: 303899 - DNA, 60 bp, Artificial
  Synthetic oligonucleotide
aagcggtaatggaagtgtccccggagccggtacgagcaatcatggatctagcgcactcac

SEQ ID NO: 303900 - DNA, 53 bp, Artificial
  Synthetic oligonucleotide
aagcggtacgctacagccgctacccactaaaagcctgaccacttacgggtttg

SEQ ID NO: 303901 - DNA, 57 bp, Artificial
  Synthetic oligonucleotide
aagcggtatctatggattaccagcggcgaacccaaataataacgtggagtattatga

SEQ ID NO: 303902 - DNA, 56 bp, Artificial
  Synthetic oligonucleotide
aagcggtggcgttttgctgatgctcgggcttccggttccatccatcgcattcgatc

SEQ ID NO: 303903 - DNA, 54 bp, Artificial
  Synthetic oligonucleotide
aagcggtgggtcaggtgttaggtagactaacggtggccctgcagcccgctaagg

SEQ ID NO: 303904 - DNA, 58 bp, Artificial
  Synthetic oligonucleotide
aagcggttagagctatatgttttggagattctgaacaaatcgctttcaattcaaggga

SEQ ID NO: 303905 - DNA, 55 bp, Artificial
  Synthetic oligonucleotide
aagcggttattagtatgtttgatatttcaaacgttactaataattagtgaagctg

SEQ ID NO: 303906 - DNA, 55 bp, Artificial
  Synthetic oligonucleotide
aagcgtaaggaggctgaatggaagcgtaaatgctctgatctccataaagaattct

SEQ ID NO: 303907 - DNA, 60 bp, Artificial
  Synthetic oligonucleotide
aagcgtacacccagagtatgagtatatccttgacactatggcagacaactttcgtgaatt

SEQ ID NO: 303908 - DNA, 55 bp, Artificial
  Synthetic oligonucleotide
aagcgtatagttgatcgtcacgtgaaagagttacgagagaaaacggtgagccagg

SEQ ID NO: 303909 - DNA, 60 bp, Artificial
  Synthetic oligonucleotide
aagcgtatgatcgcttgatggggaagcctctccatacgtgggagctacaaggcttgttgt

SEQ ID NO: 303910 - DNA, 52 bp, Artificial
  Synthetic oligonucleotide
aagcgtcaaagttggctcggttacttcgggcgacacaacgacggtaactaac

SEQ ID NO: 303911 - DNA, 56 bp, Artificial
  Synthetic oligonucleotide
aagcgtcaagaatttctcccgcttgcagttaatccttatagggtggcactttgtgt

SEQ ID NO: 303912 - DNA, 55 bp, Artificial
  Synthetic oligonucleotide
aagcgtcccgccgatatagtcatttccactcccgcatccaaggtacgtcgacggc

SEQ ID NO: 303913 - DNA, 58 bp, Artificial
  Synthetic oligonucleotide
aagcgtcgagaggccaagagggttcagctggcaggttattggattgccatttccaaac

SEQ ID NO: 303914 - DNA, 56 bp, Artificial
  Synthetic oligonucleotide
aagcgtcggattacgccatgaaagaagaaacaagagttgcaggtccttggacttac

SEQ ID NO: 303915 - DNA, 58 bp, Artificial
  Synthetic oligonucleotide
aagcgtcgggggatgccagcacttggcgccccaactgatttgggtggcatgaccggta

SEQ ID NO: 303916 - DNA, 55 bp, Artificial
  Synthetic oligonucleotide
aagcgtcgttgcaactcttacgagtagtgttaagcgtgagtttgtaatacgcggc

SEQ ID NO: 303917 - DNA, 60 bp, Artificial
  Synthetic oligonucleotide
aagcgtcgtttgtcagagcgtattcaacgcgatttgactgtatatagcctccaacgccca

SEQ ID NO: 303918 - DNA, 55 bp, Artificial
  Synthetic oligonucleotide
aagcgtctatcgattctttttagatagcgcaaaccctaagatgcgaagcgagtat

SEQ ID NO: 303919 - DNA, 56 bp, Artificial
  Synthetic oligonucleotide
aagcgtctcaggttcaccggccaaaaggttccgcatctggccaggagacgagaccc

SEQ ID NO: 303920 - DNA, 55 bp, Artificial
  Synthetic oligonucleotide
aagcgtctgctcaagtctgagtactcccggaacttcactaagtccggtggcgtac

SEQ ID NO: 303921 - DNA, 55 bp, Artificial
  Synthetic oligonucleotide
aagcgtctgtttacggacgccattttgtccattgtgcggcaactgccgggtgacc

SEQ ID NO: 303922 - DNA, 56 bp, Artificial
  Synthetic oligonucleotide
aagcgtgaacaggtttatgcccgtcacttttttacacgggatggcactattggtga

SEQ ID NO: 303923 - DNA, 58 bp, Artificial
  Synthetic oligonucleotide
aagcgtgagatatcagaatctgacacagaggagagatatcaagaatcaaaccgagaca

SEQ ID NO: 303924 - DNA, 51 bp, Artificial
  Synthetic oligonucleotide
aagcgtgagccattgacattggaatttagaaaggataatgaaggtcaatgc

SEQ ID NO: 303925 - DNA, 55 bp, Artificial
  Synthetic oligonucleotide
aagcgtgattcgggggcaccagaagttggtgtgaacctcgacttgggcggggtca

SEQ ID NO: 303926 - DNA, 55 bp, Artificial
  Synthetic oligonucleotide
aagcgtgccagttggccgtgctctgctcctgccggagtactctactcttcgcagg

SEQ ID NO: 303927 - DNA, 55 bp, Artificial
  Synthetic oligonucleotide
aagcgtgcctgcaccgagaactgcgtgccagtctcgcgcgacttcacttcgagga

SEQ ID NO: 303928 - DNA, 58 bp, Artificial
  Synthetic oligonucleotide
aagcgtgggacacgtcaaaacagtgataacctggtcggcggagctacaaatctgcttg

SEQ ID NO: 303929 - DNA, 51 bp, Artificial
  Synthetic oligonucleotide
aagcgtggtggtaagcgtccgtttggttcgaagtatcatgatcattgtggt

SEQ ID NO: 303930 - DNA, 56 bp, Artificial
  Synthetic oligonucleotide
aagcgtgtctcttgaaaatcggagcctggaccggtacgtacatctacaaccaccta

SEQ ID NO: 303931 - DNA, 55 bp, Artificial
  Synthetic oligonucleotide
aagcgtgtggttacgagagcagaggcagaaagcggtgaaggtgtgtggacggaag

SEQ ID NO: 303932 - DNA, 55 bp, Artificial
  Synthetic oligonucleotide
aagcgtgttggactgcacggtggggcccaaccccaggatatcgcgtagcatctgc

SEQ ID NO: 303933 - DNA, 60 bp, Artificial
  Synthetic oligonucleotide
aagcgttaaaccaagaattggctaaagctcgtgtcgaacagcaggacatgatgactcaat

SEQ ID NO: 303934 - DNA, 60 bp, Artificial
  Synthetic oligonucleotide
aagcgttgagtagcactcagagggaggaatccactcggagaagaacagagaaatcacctc

SEQ ID NO: 303935 - DNA, 60 bp, Artificial
  Synthetic oligonucleotide
aagcgttgcttctgaagtgtcagacaggaggtcctatagctcaagtaagagtagaattcg

SEQ ID NO: 303936 - DNA, 51 bp, Artificial
  Synthetic oligonucleotide
aagcgtttggagcccacggtgctgtcgttactgtgcccgcaccattaccgt

SEQ ID NO: 303937 - DNA, 56 bp, Artificial
  Synthetic oligonucleotide
aagcgtttttggaaggttaacaactatgtggtctacaatcatcaggaagcggcaaa

SEQ ID NO: 303938 - DNA, 57 bp, Artificial
  Synthetic oligonucleotide
aagctaaaatgtctggtaatcctatcaatagccttaaggagaaatgtgaggtggtta

SEQ ID NO: 303939 - DNA, 60 bp, Artificial
  Synthetic oligonucleotide
aagctaaacaatcagaagaagagcacaattctgaacactgcaattcccataggctcatgt

SEQ ID NO: 303940 - DNA, 55 bp, Artificial
  Synthetic oligonucleotide
aagctaaacacgtcaaagcctggtgccctagagctcctagagcagtcccttacac

SEQ ID NO: 303941 - DNA, 55 bp, Artificial
  Synthetic oligonucleotide
aagctaaccaataatgccatgtcttgtgattcgccactgccacctacatggttgc

SEQ ID NO: 303942 - DNA, 59 bp, Artificial
  Synthetic oligonucleotide
aagctaacgctgtgacgcttgataagtatcacgcgtggttgtctaagaagtctccatca

SEQ ID NO: 303943 - DNA, 53 bp, Artificial
  Synthetic oligonucleotide
aagctaacttggcccaagccggcctagactcggtaaaactcgtcgaagctaac

SEQ ID NO: 303944 - DNA, 56 bp, Artificial
  Synthetic oligonucleotide
aagctaatgtgttgatagggcaaggagacgtagtgttggtgatgaaacggaaacgg

SEQ ID NO: 303945 - DNA, 58 bp, Artificial
  Synthetic oligonucleotide
aagctacatacgacctgcgatacccagtccgaaattgaggatattggctgggctaaaa

SEQ ID NO: 303946 - DNA, 60 bp, Artificial
  Synthetic oligonucleotide
aagctaccaaaggctggcacgatctagactgccgctgcggtaactggcaggaccacctat

SEQ ID NO: 303947 - DNA, 58 bp, Artificial
  Synthetic oligonucleotide
aagctaccagaaaaagacagctggactgtcaatgacatacagaagttagtgggaaaac

SEQ ID NO: 303948 - DNA, 60 bp, Artificial
  Synthetic oligonucleotide
aagctacggaagaaatcatcattctatcagtcttatctcaggcgaacccaatcaatggga

SEQ ID NO: 303949 - DNA, 54 bp, Artificial
  Synthetic oligonucleotide
aagctacggtagaaataccgaattttgcaagatacttgtccgacaagggtctaa

SEQ ID NO: 303950 - DNA, 59 bp, Artificial
  Synthetic oligonucleotide
aagctacgtcatccataattgcatattggccttatctagcggcgggtggtggtttctta

SEQ ID NO: 303951 - DNA, 60 bp, Artificial
  Synthetic oligonucleotide
aagctactggatcgcgtgtgatggatgctgctgattgttttcgtaactctgctgaccgtg

SEQ ID NO: 303952 - DNA, 55 bp, Artificial
  Synthetic oligonucleotide
aagctagaaatggcgaaagcacagctgaaagagttcagtaatttgggtggtactg

SEQ ID NO: 303953 - DNA, 59 bp, Artificial
  Synthetic oligonucleotide
aagctagcaactggggaaggaagctggaagtctattctcacattctttaactatcagaa

SEQ ID NO: 303954 - DNA, 60 bp, Artificial
  Synthetic oligonucleotide
aagctagcatgttcaccaatctaaccttctcaggcgcagcatataccggtcttggcgaca

SEQ ID NO: 303955 - DNA, 53 bp, Artificial
  Synthetic oligonucleotide
aagctagccagcgccactgattttactaaccctgtcggtcgcgccgtctcttt

SEQ ID NO: 303956 - DNA, 59 bp, Artificial
  Synthetic oligonucleotide
aagctagcttggcccaagacgacctggactcgataaacctaatcttatctcatcgagat

SEQ ID NO: 303957 - DNA, 54 bp, Artificial
  Synthetic oligonucleotide
aagctaggctttggggtaataactttcccaatcgggttgtgctcgtagatgatt

SEQ ID NO: 303958 - DNA, 60 bp, Artificial
  Synthetic oligonucleotide
aagctagttgcttgctgaacacgctatgacaatcgtacgctatgacaaaaggggaccaca

SEQ ID NO: 303959 - DNA, 60 bp, Artificial
  Synthetic oligonucleotide
aagctatagaccgtacgctaatgtgtcactgactgtaagcgcgctctaccgattccctcc

SEQ ID NO: 303960 - DNA, 55 bp, Artificial
  Synthetic oligonucleotide
aagctatcaaataacaatcacgggcaagaaccgggcatactatggtgatgcgagg

SEQ ID NO: 303961 - DNA, 55 bp, Artificial
  Synthetic oligonucleotide
aagctatcaacgtaagtagtgatggtggtgtagaaacaatacaagtagaggtgcc

SEQ ID NO: 303962 - DNA, 60 bp, Artificial
  Synthetic oligonucleotide
aagctatcttatccatcagagtgtcagcctctctgggcgaggacccagtgttgactgtac

SEQ ID NO: 303963 - DNA, 51 bp, Artificial
  Synthetic oligonucleotide
aagctattacgaactagaagcggaaaatatattagtgaaggctggtataga

SEQ ID NO: 303964 - DNA, 55 bp, Artificial
  Synthetic oligonucleotide
aagctattctgtgttggggtgagttaatgaatctagccacccgggtgggaagtaa

SEQ ID NO: 303965 - DNA, 58 bp, Artificial
  Synthetic oligonucleotide
aagctattgcccatgctgtacccttctatggctgtgttaactggactaatgagaactt

SEQ ID NO: 303966 - DNA, 57 bp, Artificial
  Synthetic oligonucleotide
aagctattgctaaaagccgacccgcgatggccctacaaagggccatggttgatttga

SEQ ID NO: 303967 - DNA, 55 bp, Artificial
  Synthetic oligonucleotide
aagctattgcttattaccatgagcttgagatggtaaatacgcgtaatctgagagg

SEQ ID NO: 303968 - DNA, 54 bp, Artificial
  Synthetic oligonucleotide
aagctattgtgcagacaacggtccgtggactgtacatcggtggggctcgtccct

SEQ ID NO: 303969 - DNA, 60 bp, Artificial
  Synthetic oligonucleotide
aagctatttaaaagacctgcaggagagattatgcgtatgtctagtggaaacattggcgta

SEQ ID NO: 303970 - DNA, 60 bp, Artificial
  Synthetic oligonucleotide
aagctatttgtggcagtctatggtgatgacaatctagttgcagttcccatggaattgcat

SEQ ID NO: 303971 - DNA, 53 bp, Artificial
  Synthetic oligonucleotide
aagctcaaactcactccattgccggaggcacgcctcctggatttatccagctg

SEQ ID NO: 303972 - DNA, 59 bp, Artificial
  Synthetic oligonucleotide
aagctcaaactcgagagtaccttctgccgagatgtcctctgtattcgatgaatacgagc

SEQ ID NO: 303973 - DNA, 58 bp, Artificial
  Synthetic oligonucleotide
aagctcaacaagattattgaccgcttggttcaagtctctcagcctcttgaggtctgaa

SEQ ID NO: 303974 - DNA, 60 bp, Artificial
  Synthetic oligonucleotide
aagctcaaggaggtgctactgggttggcgaatgccattcaaccaattgtcaagcatggtc

SEQ ID NO: 303975 - DNA, 50 bp, Artificial
  Synthetic oligonucleotide
aagctcacaggtttaccgttgccacccgaccttaacggttgcgtcacaca

SEQ ID NO: 303976 - DNA, 54 bp, Artificial
  Synthetic oligonucleotide
aagctcaggagacagtggatacactctgtgcatcattccaggtcgaccctggac

SEQ ID NO: 303977 - DNA, 60 bp, Artificial
  Synthetic oligonucleotide
aagctcaggctgtgagaaaacatgccatagatgctggttgtactatcattgatcacattg

SEQ ID NO: 303978 - DNA, 60 bp, Artificial
  Synthetic oligonucleotide
aagctcagggggagaataccatttctcccccggctgcattacatatatcatgcagtttgc

SEQ ID NO: 303979 - DNA, 53 bp, Artificial
  Synthetic oligonucleotide
aagctcaggtggacgccctcgccagcaggattcttcactatcgtctgggtgga

SEQ ID NO: 303980 - DNA, 54 bp, Artificial
  Synthetic oligonucleotide
aagctccaatatctggcatatacccgtgaccgtgttaaacgtcacagccacatc

SEQ ID NO: 303981 - DNA, 60 bp, Artificial
  Synthetic oligonucleotide
aagctccaatcatcctgcctgacggccgaatgtacagacgtcactttgctggaatacctt

SEQ ID NO: 303982 - DNA, 58 bp, Artificial
  Synthetic oligonucleotide
aagctccaccagtggttggttccgagtgccaccacaaaagaacactgaaggagctcat

SEQ ID NO: 303983 - DNA, 51 bp, Artificial
  Synthetic oligonucleotide
aagctccactggttgctgttggcgcgtccgacgcaactccgtccaagaatc

SEQ ID NO: 303984 - DNA, 52 bp, Artificial
  Synthetic oligonucleotide
aagctccagaaaatccgtatgactcacgacattactaaagagttcttgctga

SEQ ID NO: 303985 - DNA, 60 bp, Artificial
  Synthetic oligonucleotide
aagctccaggactgcacaatgctcgtgaacggtgacgaccttgtcgttatctgcgagagc

SEQ ID NO: 303986 - DNA, 55 bp, Artificial
  Synthetic oligonucleotide
aagctccattatacgcattttgtgacatagtgaagtactgtctgactgaagttga

SEQ ID NO: 303987 - DNA, 54 bp, Artificial
  Synthetic oligonucleotide
aagctcccagtcgtgggagttcgcttccaagtgccacggcggcgtgccatccct

SEQ ID NO: 303988 - DNA, 55 bp, Artificial
  Synthetic oligonucleotide
aagctccccgggcacaaaactgacgatgaagtgaactctgagccagtcaagcccg

SEQ ID NO: 303989 - DNA, 50 bp, Artificial
  Synthetic oligonucleotide
aagctcccggtctaaggctcagatacccctccccccctttagcgggtggg

SEQ ID NO: 303990 - DNA, 60 bp, Artificial
  Synthetic oligonucleotide
aagctccgatgtggaccatgctataacaacagctagggtggctccctatgcagggcttac

SEQ ID NO: 303991 - DNA, 60 bp, Artificial
  Synthetic oligonucleotide
aagctccgattgcacggattactatgagtgtgaacaacaagagcacaaaattagccgtag

SEQ ID NO: 303992 - DNA, 56 bp, Artificial
  Synthetic oligonucleotide
aagctccgcccctatataccaggtgggtggagctaggtaggattcagctaggttcc

SEQ ID NO: 303993 - DNA, 59 bp, Artificial
  Synthetic oligonucleotide
aagctccggtcatacaatggcaccctcctagccggagaacatgcactataactgggttc

SEQ ID NO: 303994 - DNA, 57 bp, Artificial
  Synthetic oligonucleotide
aagctcctacggattccagtactcaccaagacagcgggttgaattcctcgtgcaagc

SEQ ID NO: 303995 - DNA, 59 bp, Artificial
  Synthetic oligonucleotide
aagctcctacgtcggaaatacagctgacagactacggagctttaacactggactgttca

SEQ ID NO: 303996 - DNA, 60 bp, Artificial
  Synthetic oligonucleotide
aagctcctgatatctaatcccgtgcaatttatcttgtaaccctttgaatggatagtcatg

SEQ ID NO: 303997 - DNA, 58 bp, Artificial
  Synthetic oligonucleotide
aagctcgagacatgtcaaggggattgcgttgatttcggtggataggaatcaaaaggta

SEQ ID NO: 303998 - DNA, 55 bp, Artificial
  Synthetic oligonucleotide
aagctcgccgggcctgcgccgtggagccaggttaggagcgttttcgaccatgcgt

SEQ ID NO: 303999 - DNA, 57 bp, Artificial
  Synthetic oligonucleotide
aagctcggattcaccgacacaacaggactcgacaacaatggttacctctataaccgc

SEQ ID NO: 304000 - DNA, 55 bp, Artificial
  Synthetic oligonucleotide
aagctcggcgagacaacagaatggactgcagtaagtgccaacttaccatttgtgc

SEQ ID NO: 304001 - DNA, 53 bp, Artificial
  Synthetic oligonucleotide
aagctcggggtacaagaaagtgagtgaggaattcatcaaaaacgtcatttcgt

SEQ ID NO: 304002 - DNA, 56 bp, Artificial
  Synthetic oligonucleotide
aagctcggtggtaatagaggcgtaagttcctcctcatagagcttcccatctaacac

SEQ ID NO: 304003 - DNA, 60 bp, Artificial
  Synthetic oligonucleotide
aagctcgtatggaattgctgagaacgaaaaagttgtaatgacaactcgtggcgtcagcaa

SEQ ID NO: 304004 - DNA, 60 bp, Artificial
  Synthetic oligonucleotide
aagctcgtcaggttaaactggacccgacacgcatgctcgaatttctgctgctactagtag

SEQ ID NO: 304005 - DNA, 55 bp, Artificial
  Synthetic oligonucleotide
aagctctaagattgaaggagttttcactctagtggttgtaattgaccgtaaacca

SEQ ID NO: 304006 - DNA, 60 bp, Artificial
  Synthetic oligonucleotide
aagctctacaagaatcctgacactctttcgtcggtcacaacggatgaaatcaacagaatc

SEQ ID NO: 304007 - DNA, 55 bp, Artificial
  Synthetic oligonucleotide
aagctctacagtttgtgcaccatcagtccaaacatgcaatgtcaggagcgctcgg

SEQ ID NO: 304008 - DNA, 58 bp, Artificial
  Synthetic oligonucleotide
aagctctcctttcatttatcacagtctttgaggtaaatgaggttttcattgaattcac

SEQ ID NO: 304009 - DNA, 55 bp, Artificial
  Synthetic oligonucleotide
aagctctcgttccgcgacttccctctgccggtcatgtggtgcaagcagacgaccg

SEQ ID NO: 304010 - DNA, 60 bp, Artificial
  Synthetic oligonucleotide
aagctctcgttttagagagagaagctattggtgacatccaccgattgccatttactcctg

SEQ ID NO: 304011 - DNA, 59 bp, Artificial
  Synthetic oligonucleotide
aagctctctagtggagctcaacctggctctagcggagggtgaggcaaacctgactgttg

SEQ ID NO: 304012 - DNA, 60 bp, Artificial
  Synthetic oligonucleotide
aagctctctatatggatgtaatgcattctccacctctgagtccgcatctgtatgggttaa

SEQ ID NO: 304013 - DNA, 55 bp, Artificial
  Synthetic oligonucleotide
aagctctgaagaactagctggtctcgagtttagagaagttactttctactgtacc

SEQ ID NO: 304014 - DNA, 55 bp, Artificial
  Synthetic oligonucleotide
aagctcttaaggttcggatgtttgctgccggcattacttcacagaaatgacggga

SEQ ID NO: 304015 - DNA, 59 bp, Artificial
  Synthetic oligonucleotide
aagctcttcgagctttatggattcaagtggcaccttcgattggaagggcggatctatac

SEQ ID NO: 304016 - DNA, 59 bp, Artificial
  Synthetic oligonucleotide
aagctcttctactccgttgaagtcgaatggtggaaccatctggacgtatgtgtatggta

SEQ ID NO: 304017 - DNA, 55 bp, Artificial
  Synthetic oligonucleotide
aagctcttggaatgaggaaaacgggcgggatggtagaaaagagcgagcctcccga

SEQ ID NO: 304018 - DNA, 55 bp, Artificial
  Synthetic oligonucleotide
aagctgaactcttagcccatcaaaccgcaaaacaagtagccctccatcgcgacgc

SEQ ID NO: 304019 - DNA, 60 bp, Artificial
  Synthetic oligonucleotide
aagctgaatcaatcagcaatactaaccctcttactgagaaagctgtggcttcagtaacat

SEQ ID NO: 304020 - DNA, 52 bp, Artificial
  Synthetic oligonucleotide
aagctgaatcttactcctccatgccccctctcgagggggaaccgggggaccc

SEQ ID NO: 304021 - DNA, 57 bp, Artificial
  Synthetic oligonucleotide
aagctgaattaataaacaatagcacaacagacatcgtcctcaagatacgagatatta

SEQ ID NO: 304022 - DNA, 55 bp, Artificial
  Synthetic oligonucleotide
aagctgacgcccccacattcggccagatctaaatttggctacggggctaaggacg

SEQ ID NO: 304023 - DNA, 55 bp, Artificial
  Synthetic oligonucleotide
aagctgaggcagaggaactaggaaacaagtgtgagagggctagcctcctgcatcc

SEQ ID NO: 304024 - DNA, 52 bp, Artificial
  Synthetic oligonucleotide
aagctgagtttttaagtagaaaccaaatttactttatgaagagacaggaagt

SEQ ID NO: 304025 - DNA, 60 bp, Artificial
  Synthetic oligonucleotide
aagctgatatagaaggtgggaaatattatgagcatgctccaatagaactgatttatgcat

SEQ ID NO: 304026 - DNA, 54 bp, Artificial
  Synthetic oligonucleotide
aagctgccactaatggcaactccatcacctttgaatacatctcctgcttagcag

SEQ ID NO: 304027 - DNA, 58 bp, Artificial
  Synthetic oligonucleotide
aagctgccagaaaaggataactggactgtcaatgatatacagaagttagtgggaaaat

SEQ ID NO: 304028 - DNA, 55 bp, Artificial
  Synthetic oligonucleotide
aagctggagcatggcataaaccgcattgagggtgcgaagaaaggccctgactcag

SEQ ID NO: 304029 - DNA, 60 bp, Artificial
  Synthetic oligonucleotide
aagctggatagagctcgatgaaattggggaggatattgccccaatagaatacattgcgag

SEQ ID NO: 304030 - DNA, 60 bp, Artificial
  Synthetic oligonucleotide
aagctggcctctaggatatccaagcacaaacttcattcaattagccggctgtccaggaca

SEQ ID NO: 304031 - DNA, 60 bp, Artificial
  Synthetic oligonucleotide
aagctggcgcgcaatatggctaattcagtgcaattcccggagtcgtccgcttatgctcac

SEQ ID NO: 304032 - DNA, 57 bp, Artificial
  Synthetic oligonucleotide
aagctgggacattaagtagaagtcgtagcacagtgggggctactcctgacttacgta

SEQ ID NO: 304033 - DNA, 60 bp, Artificial
  Synthetic oligonucleotide
aagctgggatctcggtgtagaagacgcctctgagtctaaactgcttacagtctctgtcat

SEQ ID NO: 304034 - DNA, 59 bp, Artificial
  Synthetic oligonucleotide
aagctggtttgtatccagggagtaaatcagatgaagatattcacccatattccctcaaa

SEQ ID NO: 304035 - DNA, 53 bp, Artificial
  Synthetic oligonucleotide
aagctgtatataaagcacagtaccagaaagcatacaccacaggtcctagcata

SEQ ID NO: 304036 - DNA, 55 bp, Artificial
  Synthetic oligonucleotide
aagctgtcacggagagattgtttcttttggccgagactgaattgcacggcctcag

SEQ ID NO: 304037 - DNA, 60 bp, Artificial
  Synthetic oligonucleotide
aagctgtcagacattttcctaggccgtggctccatggattaggacaacacatctatgaaa

SEQ ID NO: 304038 - DNA, 59 bp, Artificial
  Synthetic oligonucleotide
aagctgtcaggtattagattcaagagaataaattttgataattcgtcggagtatataga

SEQ ID NO: 304039 - DNA, 60 bp, Artificial
  Synthetic oligonucleotide
aagctgtcatcttgtccaagcatgtgggcgactcactgcagcttccatggggcattcgat

SEQ ID NO: 304040 - DNA, 55 bp, Artificial
  Synthetic oligonucleotide
aagctgtcgcacagcttagtccgcgacttcagtcaatttcattgtcacctcagca

SEQ ID NO: 304041 - DNA, 57 bp, Artificial
  Synthetic oligonucleotide
aagctgtcgccgagaagttcatgaaatcctatttaaatgggaacgttctagcgcaaa

SEQ ID NO: 304042 - DNA, 53 bp, Artificial
  Synthetic oligonucleotide
aagctgtcttgtggggttaggaccttaccgagttcaagtcgtttatgaaagaa

SEQ ID NO: 304043 - DNA, 55 bp, Artificial
  Synthetic oligonucleotide
aagctgtggcaaagagtgagagccaacttgtgacaaagcacattgtgaagggccc

SEQ ID NO: 304044 - DNA, 55 bp, Artificial
  Synthetic oligonucleotide
aagctgttgagagaggaggacgcaagcagaagaagagagctcatggtgacgcgca

SEQ ID NO: 304045 - DNA, 57 bp, Artificial
  Synthetic oligonucleotide
aagctgtttaatagtacttggaatgatactaaagggtggaatgatactaacaggtca

SEQ ID NO: 304046 - DNA, 58 bp, Artificial
  Synthetic oligonucleotide
aagctgtttaatagtacttggccttggaatgatactaaagggtcacatgacactaatg

SEQ ID NO: 304047 - DNA, 57 bp, Artificial
  Synthetic oligonucleotide
aagctgtttatactcggatcatgatgaatggaggccgattaaagagatcacacatca

SEQ ID NO: 304048 - DNA, 52 bp, Artificial
  Synthetic oligonucleotide
aagcttaacccgcgtaattggccctccaccctggtgtatcagaaaatccccg

SEQ ID NO: 304049 - DNA, 55 bp, Artificial
  Synthetic oligonucleotide
aagcttacgggcagatgtggttgctgagttacttccatcggcgtgacttgaggac

SEQ ID NO: 304050 - DNA, 60 bp, Artificial
  Synthetic oligonucleotide
aagcttaggatggtctctgatggcatcctagtggccctcgcaacggtgattggtcggccg

SEQ ID NO: 304051 - DNA, 54 bp, Artificial
  Synthetic oligonucleotide
aagcttataagacaagaaccgtcaataaggaattcgatatctttactacgtggt

SEQ ID NO: 304052 - DNA, 60 bp, Artificial
  Synthetic oligonucleotide
aagcttatgagcactatgttctcaatggtccagacggttgggaagacactgacactttga

SEQ ID NO: 304053 - DNA, 60 bp, Artificial
  Synthetic oligonucleotide
aagcttatggtgctggtcaaacaatgctgaggtggggagtcatcgccaggtcatctaaca

SEQ ID NO: 304054 - DNA, 58 bp, Artificial
  Synthetic oligonucleotide
aagcttattatcgaatgtgatgcatccggtaaatattggggtggtattcttaaagcaa

SEQ ID NO: 304055 - DNA, 60 bp, Artificial
  Synthetic oligonucleotide
aagcttcaattggactggagtcgctcagaatggaacaagctatgcttgcaaaaggggatc

SEQ ID NO: 304056 - DNA, 60 bp, Artificial
  Synthetic oligonucleotide
aagcttcacaatgagactcttaaggctacaacctaccaggacgccgagacatctcttgtg

SEQ ID NO: 304057 - DNA, 59 bp, Artificial
  Synthetic oligonucleotide
aagcttcagcttcgtccatggcagaaagagttacacgatttaattctaactgaaccaga

SEQ ID NO: 304058 - DNA, 60 bp, Artificial
  Synthetic oligonucleotide
aagcttcttgtgctactagaaaatgataaaaccctagacatgcatgatgccaatgttaga

SEQ ID NO: 304059 - DNA, 60 bp, Artificial
  Synthetic oligonucleotide
aagcttgacgtggtttgttgctcgactgtgaggggacctacccactgtgctgccacacag

SEQ ID NO: 304060 - DNA, 54 bp, Artificial
  Synthetic oligonucleotide
aagcttgatagggttgaaaccctaatagctaaggttgaacggtgggttcattca

SEQ ID NO: 304061 - DNA, 55 bp, Artificial
  Synthetic oligonucleotide
aagcttgatgtacctagaacaccgtggtcacgtttcgatgtcttaaaccggaaga

SEQ ID NO: 304062 - DNA, 56 bp, Artificial
  Synthetic oligonucleotide
aagcttgcacctggtcattaaagcacttggcacaccgccaagacaagctccaacga

SEQ ID NO: 304063 - DNA, 57 bp, Artificial
  Synthetic oligonucleotide
aagcttgccggaaggttcaggcttgcaaattggcgggatgttattgctactttccgc

SEQ ID NO: 304064 - DNA, 57 bp, Artificial
  Synthetic oligonucleotide
aagcttgcgggggcaacatctcattcacccggcgctacctgctctttcaccgcgggg

SEQ ID NO: 304065 - DNA, 56 bp, Artificial
  Synthetic oligonucleotide
aagcttggaagcaagtattagcagaactacaagaccttgagaacgaagaaaaagac

SEQ ID NO: 304066 - DNA, 57 bp, Artificial
  Synthetic oligonucleotide
aagcttggatctgtcaacctcggccggtgccctcgctcctgggaagaccaaaagaga

SEQ ID NO: 304067 - DNA, 55 bp, Artificial
  Synthetic oligonucleotide
aagcttgtcagaacaccaaggggtcatttcagattacttcacccagttgggtaat

SEQ ID NO: 304068 - DNA, 59 bp, Artificial
  Synthetic oligonucleotide
aagcttgtggaagagcaagcttttaaactaacaacagacctcaggagtcaagtcctgca

SEQ ID NO: 304069 - DNA, 55 bp, Artificial
  Synthetic oligonucleotide
aagcttgtgttcaatatggttcagtcattacaaccaggtaacccaaacaaacgga

SEQ ID NO: 304070 - DNA, 59 bp, Artificial
  Synthetic oligonucleotide
aagcttgttagacagattctcttatgccacctttgtgtacaagcacaaaccgcgttcaa

SEQ ID NO: 304071 - DNA, 55 bp, Artificial
  Synthetic oligonucleotide
aagctttaaacgcacctacaacgcgtctccgaatcagcgcaccgctgtctaccgc

SEQ ID NO: 304072 - DNA, 56 bp, Artificial
  Synthetic oligonucleotide
aagctttactgattatgcttataagtatacattcctatagtatattgcttatatta

SEQ ID NO: 304073 - DNA, 60 bp, Artificial
  Synthetic oligonucleotide
aagctttcacacactatgatgcatagcgcattgctgaaagaaccaagggccagaactctt

SEQ ID NO: 304074 - DNA, 59 bp, Artificial
  Synthetic oligonucleotide
aagctttccttacataatgatctgatccaacaccattttaggccgctaagtaatatgcc

SEQ ID NO: 304075 - DNA, 60 bp, Artificial
  Synthetic oligonucleotide
aagctttgacatcggacgatgatttagctccctgaatgttcggatggaactgtgatgatc

SEQ ID NO: 304076 - DNA, 58 bp, Artificial
  Synthetic oligonucleotide
aagctttgcgcatgtaccaagagtatcagtgtttacagtttaaggttatcagaactcc

SEQ ID NO: 304077 - DNA, 60 bp, Artificial
  Synthetic oligonucleotide
aagctttggaccctgaattgattgcctcggcatatgcgtcgttgcagactgggcaacctc

SEQ ID NO: 304078 - DNA, 53 bp, Artificial
  Synthetic oligonucleotide
aaggaaaagcagtatccaacacagcaatgtgttgggggttacacccttcgggg

SEQ ID NO: 304079 - DNA, 55 bp, Artificial
  Synthetic oligonucleotide
aaggaaacagtgttgcgcttaattacacccacgtagttctttcgctagcaccgac

SEQ ID NO: 304080 - DNA, 54 bp, Artificial
  Synthetic oligonucleotide
aaggaaaccgtgcaagtgctcgacccaaatctagtccatgtgatacgtgtactg

SEQ ID NO: 304081 - DNA, 57 bp, Artificial
  Synthetic oligonucleotide
aaggaaactatgtgtattatgtggacttctcaaccgacgcgggacgttttgctgcta

SEQ ID NO: 304082 - DNA, 50 bp, Artificial
  Synthetic oligonucleotide
aaggaaactgcgtccagtctgcactaggtgtatgcatgtctgacaaggat

SEQ ID NO: 304083 - DNA, 59 bp, Artificial
  Synthetic oligonucleotide
aaggaaagaatcgagacttggaagtggggagatcctctgtccccgcagccacaagcagc

SEQ ID NO: 304084 - DNA, 60 bp, Artificial
  Synthetic oligonucleotide
aaggaaagatcagcactaagctacgggaatacactggacctgaatagtcttgacattgat

SEQ ID NO: 304085 - DNA, 54 bp, Artificial
  Synthetic oligonucleotide
aaggaaaggttggttacagacgcgacaaaagagtcgggagattcgtgtttgatg

SEQ ID NO: 304086 - DNA, 53 bp, Artificial
  Synthetic oligonucleotide
aaggaaagtgaagcaccaagggaacttaagaacgaagcacatcttgaacccgg

SEQ ID NO: 304087 - DNA, 55 bp, Artificial
  Synthetic oligonucleotide
aaggaaagttgtgcaacgcagacgagttgtggatctccgtgttacaccgctcccg

SEQ ID NO: 304088 - DNA, 52 bp, Artificial
  Synthetic oligonucleotide
aaggaaatagtaaacagatgctcagcatgccaaacacatggagaaccaaaac

SEQ ID NO: 304089 - DNA, 60 bp, Artificial
  Synthetic oligonucleotide
aaggaaatccgagtggacaatattcaacaactgtggacaacaatatgataaatgtctggc

SEQ ID NO: 304090 - DNA, 59 bp, Artificial
  Synthetic oligonucleotide
aaggaaatcgaacgcctacccattgatccaccccaagagcagagaatgtcacgcaagcc

SEQ ID NO: 304091 - DNA, 55 bp, Artificial
  Synthetic oligonucleotide
aaggaaatcgctgggcttcaatctatcacttcacgcgaaaatactaaggatgctg

SEQ ID NO: 304092 - DNA, 60 bp, Artificial
  Synthetic oligonucleotide
aaggaaatgatggcatggacctagtcagatactttggctgcatagtgtacctgtacccat

SEQ ID NO: 304093 - DNA, 59 bp, Artificial
  Synthetic oligonucleotide
aaggaaatgtggagggcacagcagaggctatctgtggttactggttacgtaccatgtcc

SEQ ID NO: 304094 - DNA, 55 bp, Artificial
  Synthetic oligonucleotide
aaggaaattagttaagtatgcgagaggcaaaccattagaagcggatttaacagta

SEQ ID NO: 304095 - DNA, 58 bp, Artificial
  Synthetic oligonucleotide
aaggaaattgtaacttgatgggcatctcgttgtttgtcagtctgtattcgcaactctt

SEQ ID NO: 304096 - DNA, 55 bp, Artificial
  Synthetic oligonucleotide
aaggaacacaacttcaagcagtgcgtttgacgtatatgaaatggtggtcgaagat

SEQ ID NO: 304097 - DNA, 55 bp, Artificial
  Synthetic oligonucleotide
aaggaacactgtaaacagtgcctcctgttagcgagatcaggtgacgatccaagcc

SEQ ID NO: 304098 - DNA, 55 bp, Artificial
  Synthetic oligonucleotide
aaggaacagaaattggcttgctgatacttctagagcagctaagttggatgaggat

SEQ ID NO: 304099 - DNA, 60 bp, Artificial
  Synthetic oligonucleotide
aaggaacagatagaattatagaggtagcacagagagttttaagagctattatccacatac

SEQ ID NO: 304100 - DNA, 60 bp, Artificial
  Synthetic oligonucleotide
aaggaacagccgaagccatatgtgcttattggctaaaatcaatgtcattagtaaagacta

SEQ ID NO: 304101 - DNA, 55 bp, Artificial
  Synthetic oligonucleotide
aaggaacagctaagttgaagacagtacgtaagctagtggatgctgtgaatcatgc

SEQ ID NO: 304102 - DNA, 55 bp, Artificial
  Synthetic oligonucleotide
aaggaaccaattggttcaacggagattattccagatttgatggaataacacctcg

SEQ ID NO: 304103 - DNA, 56 bp, Artificial
  Synthetic oligonucleotide
aaggaaccatgttcaagacggacaatgattttttcgatatggtttggcagaacaat

SEQ ID NO: 304104 - DNA, 50 bp, Artificial
  Synthetic oligonucleotide
aaggaacccgcgtgcaccgtcagtacgttcgtctctaacgacgccgtgta

SEQ ID NO: 304105 - DNA, 54 bp, Artificial
  Synthetic oligonucleotide
aaggaaccgcgacatcatggcacttctctcgaagaacgacatcctctccgtcga

SEQ ID NO: 304106 - DNA, 58 bp, Artificial
  Synthetic oligonucleotide
aaggaacgacctatggagtatgcgcaaaagccttcaagttttctgggaatccagctga

SEQ ID NO: 304107 - DNA, 55 bp, Artificial
  Synthetic oligonucleotide
aaggaactcggattcgattcaaggatgatagctccttcgaggatgtcaatggcat

SEQ ID NO: 304108 - DNA, 55 bp, Artificial
  Synthetic oligonucleotide
aaggaactgggaactctggctttcaagcaaggggagcgtgtggcatattctttcg

SEQ ID NO: 304109 - DNA, 57 bp, Artificial
  Synthetic oligonucleotide
aaggaagaagggatataaagctgatcgacatttccctcaataaagcggactcaagga

SEQ ID NO: 304110 - DNA, 58 bp, Artificial
  Synthetic oligonucleotide
aaggaagaatagtggactgggtcaatgcaagtgggcctcaaatgaattgggcttggac

SEQ ID NO: 304111 - DNA, 57 bp, Artificial
  Synthetic oligonucleotide
aaggaagacgaatttcgcattgtgctttgtccaattatttagacttgcattttcttc

SEQ ID NO: 304112 - DNA, 60 bp, Artificial
  Synthetic oligonucleotide
aaggaagactaatccaaaacagcataacaatagagagaatggttctctcggcatttgatg

SEQ ID NO: 304113 - DNA, 55 bp, Artificial
  Synthetic oligonucleotide
aaggaagatagtagagtagctggtccctgggagtatgggttgtttattaagagag

SEQ ID NO: 304114 - DNA, 57 bp, Artificial
  Synthetic oligonucleotide
aaggaagatattttcaaggtcttatggcacaaattagagccagacaaccgattatag

SEQ ID NO: 304115 - DNA, 55 bp, Artificial
  Synthetic oligonucleotide
aaggaagattaaaggtgaaaccgtatttgatatgtctgagtgagctaaaaactta

SEQ ID NO: 304116 - DNA, 53 bp, Artificial
  Synthetic oligonucleotide
aaggaagccacccctccctagtgtccagatattgacacaagatatatggagca

SEQ ID NO: 304117 - DNA, 56 bp, Artificial
  Synthetic oligonucleotide
aaggaagcctttacaagtacttacccactgaagctagctgatattccgttggtatc

SEQ ID NO: 304118 - DNA, 55 bp, Artificial
  Synthetic oligonucleotide
aaggaagggaaaatactaaaatgggaacctctgactggaactgctaagcacattg

SEQ ID NO: 304119 - DNA, 57 bp, Artificial
  Synthetic oligonucleotide
aaggaagggtagtagccatagtgctaggaggagtaaacgaaggttcacgcactgcac

SEQ ID NO: 304120 - DNA, 60 bp, Artificial
  Synthetic oligonucleotide
aaggaaggtggcatggatttttacgtgcccagacaagagccaatgttcagatggatgagg

SEQ ID NO: 304121 - DNA, 55 bp, Artificial
  Synthetic oligonucleotide
aaggaaggtttatcgagttctcaagggaccgagcagctcaagtggcaaacgaaat

SEQ ID NO: 304122 - DNA, 52 bp, Artificial
  Synthetic oligonucleotide
aaggaagtctggttactgggaccccagaagcaagagttgaaattgggggcgg

SEQ ID NO: 304123 - DNA, 55 bp, Artificial
  Synthetic oligonucleotide
aaggaagtgtcggggaaggtatctcgatggatcaggtctttacaccgccgcgttc

SEQ ID NO: 304124 - DNA, 58 bp, Artificial
  Synthetic oligonucleotide
aaggaagttcccaccacgtgcagagcgacgataccagaggatggtgaccattacgtgg

SEQ ID NO: 304125 - DNA, 57 bp, Artificial
  Synthetic oligonucleotide
aaggaagttcggtgcagagttggaggagatttaccaatttatgaatggcgaaatgcg

SEQ ID NO: 304126 - DNA, 57 bp, Artificial
  Synthetic oligonucleotide
aaggaatcagccgaaagaacgcaggacgaaaacgctctcgtcgcgtatgtttcgaga

SEQ ID NO: 304127 - DNA, 60 bp, Artificial
  Synthetic oligonucleotide
aaggaatcgtgatgcgtttaggatgatgctattcatcatgtccaccgcggttgcggcgaa

SEQ ID NO: 304128 - DNA, 58 bp, Artificial
  Synthetic oligonucleotide
aaggaatcgttccattctcaatacgagtcaaaggggaattcttgaggatgaacagatg

SEQ ID NO: 304129 - DNA, 53 bp, Artificial
  Synthetic oligonucleotide
aaggaatcgttggaaccgtagatacttcccaagaacacgccgaacctggagac

SEQ ID NO: 304130 - DNA, 60 bp, Artificial
  Synthetic oligonucleotide
aaggaatctgctatccagggtcaatagagaatcaggaagagttgagatcattgttctctt

SEQ ID NO: 304131 - DNA, 56 bp, Artificial
  Synthetic oligonucleotide
aaggaatctttgtctgacttctacattcttggcctcctaccattcagatgggggga

SEQ ID NO: 304132 - DNA, 60 bp, Artificial
  Synthetic oligonucleotide
aaggaatgagctgaagctgagcttctttgccctgcgggaccagatacccgaggtggccaa

SEQ ID NO: 304133 - DNA, 53 bp, Artificial
  Synthetic oligonucleotide
aaggaatgtgcctgctacatcaggtagagggcttttcggtgccatagctggat

SEQ ID NO: 304134 - DNA, 60 bp, Artificial
  Synthetic oligonucleotide
aaggaattatttcactgcagaggtgtcccattgtagagccactgaatacataatgaaggg

SEQ ID NO: 304135 - DNA, 60 bp, Artificial
  Synthetic oligonucleotide
aaggaattggagttgctaattcagagtatcaacaacacactagttgatcttgaatggctt

SEQ ID NO: 304136 - DNA, 52 bp, Artificial
  Synthetic oligonucleotide
aaggaattgggtatactgggtccttatttatactagaaggtcctatagaact

SEQ ID NO: 304137 - DNA, 59 bp, Artificial
  Synthetic oligonucleotide
aaggaattggtgcagatgtccatcacctaggccattggtttgatgcccggcttaattta

SEQ ID NO: 304138 - DNA, 50 bp, Artificial
  Synthetic oligonucleotide
aaggaatttagtacttcacacacctgagatttctgagatctattttaacg

SEQ ID NO: 304139 - DNA, 56 bp, Artificial
  Synthetic oligonucleotide
aaggaatttggtctgcagccaggggacaacattgataggtacttttcactggtacc

SEQ ID NO: 304140 - DNA, 55 bp, Artificial
  Synthetic oligonucleotide
aaggaatttttcaaccatgccatagatggagatgagcaaggcttgtcattgcttg

SEQ ID NO: 304141 - DNA, 59 bp, Artificial
  Synthetic oligonucleotide
aaggacaaagaggcatgtgcgaaagccccgttagaggcatacaacagaacactgaccac

SEQ ID NO: 304142 - DNA, 59 bp, Artificial
  Synthetic oligonucleotide
aaggacaaatgtgttcaatagcagcagttacctggtggaatacatatgggcccataggg

SEQ ID NO: 304143 - DNA, 58 bp, Artificial
  Synthetic oligonucleotide
aaggacaaggattgcatatgaaagaatgtgtaacattctcaaagggaaatttcaaaca

SEQ ID NO: 304144 - DNA, 59 bp, Artificial
  Synthetic oligonucleotide
aaggacaataaagggactcggattcgattcaaagatgatagctccttcgaggatgtcaa

SEQ ID NO: 304145 - DNA, 54 bp, Artificial
  Synthetic oligonucleotide
aaggacacatcatcaatttcacagactgaggcactaacagaagggttgggagaa

SEQ ID NO: 304146 - DNA, 60 bp, Artificial
  Synthetic oligonucleotide
aaggacagaactgccaccagctggcaccaataacccagtgctggtcaacaccccatattg

SEQ ID NO: 304147 - DNA, 58 bp, Artificial
  Synthetic oligonucleotide
aaggacagaagcccttatagggccttaatgagctgtcctctcggtgaagctccgtctc

SEQ ID NO: 304148 - DNA, 58 bp, Artificial
  Synthetic oligonucleotide
aaggacagctggactgtcaatgacatacaaaagttagtgggaaaattgaattgggcaa

SEQ ID NO: 304149 - DNA, 55 bp, Artificial
  Synthetic oligonucleotide
aaggacaggcctaccctgctaacttcccctatccgcttataggcaagaccgcagt

SEQ ID NO: 304150 - DNA, 55 bp, Artificial
  Synthetic oligonucleotide
aaggacagtaccctatacactattcagctaatgcggaagaagttcctagcacagg

SEQ ID NO: 304151 - DNA, 54 bp, Artificial
  Synthetic oligonucleotide
aaggacataggtttccgtgttaatgcaaatacggcggccttaagccataaggtc

SEQ ID NO: 304152 - DNA, 52 bp, Artificial
  Synthetic oligonucleotide
aaggacatcggcgagtgggagccatccatcggtttcgctaggtgggaggaag

SEQ ID NO: 304153 - DNA, 55 bp, Artificial
  Synthetic oligonucleotide
aaggacatgaccaaggaattctttgagaacaaatcagagacatggcccattgggg

SEQ ID NO: 304154 - DNA, 60 bp, Artificial
  Synthetic oligonucleotide
aaggacattgtatcagaatgtcgggacctatgtatctgtaggaacatcgacattgaacaa

SEQ ID NO: 304155 - DNA, 60 bp, Artificial
  Synthetic oligonucleotide
aaggacattttcactgaaatggcggcgccactgaagtccccatctgctgaggcgtgtggt

SEQ ID NO: 304156 - DNA, 54 bp, Artificial
  Synthetic oligonucleotide
aaggaccaatatcaatggaagtacctcccccccctgccataacagatctattac

SEQ ID NO: 304157 - DNA, 56 bp, Artificial
  Synthetic oligonucleotide
aaggaccagaagtggaggaaacactaatcaacaaagggcctctgcgggccaaatca

SEQ ID NO: 304158 - DNA, 55 bp, Artificial
  Synthetic oligonucleotide
aaggaccagaggttagaggagacccccccagacaaaaaacacagcatattgacgc

SEQ ID NO: 304159 - DNA, 60 bp, Artificial
  Synthetic oligonucleotide
aaggaccaggagtggggggaacaccagtcaacagagagcatctgcaggacagataagtgt

SEQ ID NO: 304160 - DNA, 51 bp, Artificial
  Synthetic oligonucleotide
aaggaccagtcggcagcactaggtgactccctttatggtgcagcatctcta

SEQ ID NO: 304161 - DNA, 56 bp, Artificial
  Synthetic oligonucleotide
aaggaccctgattgggtcctggattaagcaaacgcctaattggcttgggcttctca

SEQ ID NO: 304162 - DNA, 52 bp, Artificial
  Synthetic oligonucleotide
aaggaccgagtgtagtcggcacaacccggtaaacattttcgaacaatgttcc

SEQ ID NO: 304163 - DNA, 55 bp, Artificial
  Synthetic oligonucleotide
aaggacctaccccaagggtgacacttcaccaggagtataccgtatcatgagccgt

SEQ ID NO: 304164 - DNA, 60 bp, Artificial
  Synthetic oligonucleotide
aaggacctgatgtcaatgtcagatggagagtttgagagtttatttaaatgtctgtcgcat

SEQ ID NO: 304165 - DNA, 56 bp, Artificial
  Synthetic oligonucleotide
aaggaccttgaccgtgatacatgtaacggggtttatgctaacataggcaagaacgc

SEQ ID NO: 304166 - DNA, 60 bp, Artificial
  Synthetic oligonucleotide
aaggaccttgtaaggtccagtcgtatgaacagagacatgatatctctcatgtcggtaagg

SEQ ID NO: 304167 - DNA, 52 bp, Artificial
  Synthetic oligonucleotide
aaggacgaaacagtaaatggcgaacgataaacttcgattcgagaaggaaaaa

SEQ ID NO: 304168 - DNA, 60 bp, Artificial
  Synthetic oligonucleotide
aaggacgcctgacattcccagaggctgtgaagggccatgcaaagtccagtcttatgaaca

SEQ ID NO: 304169 - DNA, 60 bp, Artificial
  Synthetic oligonucleotide
aaggacgctactggaagtactcagtttgggccagtgcaggcgctaggtgctcagtattca

SEQ ID NO: 304170 - DNA, 55 bp, Artificial
  Synthetic oligonucleotide
aaggacggcacgtataccaattccatcaatcgcccaaatatgtggaagccctact

SEQ ID NO: 304171 - DNA, 60 bp, Artificial
  Synthetic oligonucleotide
aaggacggggctgacacgttcatcgtcggcactcactctgcaggaggcaacggagttgga

SEQ ID NO: 304172 - DNA, 53 bp, Artificial
  Synthetic oligonucleotide
aaggacgtccttattaagaccgctcccatgctaaactccccaaacattgaggc

SEQ ID NO: 304173 - DNA, 57 bp, Artificial
  Synthetic oligonucleotide
aaggacgtctccgtctttctccatgtatttcttaacatccgaactgctcttagctcc

SEQ ID NO: 304174 - DNA, 57 bp, Artificial
  Synthetic oligonucleotide
aaggacgtgtccctattctgtcaaatggtgtcaagtgtagactttgtcccaccaatg

SEQ ID NO: 304175 - DNA, 55 bp, Artificial
  Synthetic oligonucleotide
aaggactaatgggggccttacttctctggatgggtgtcaacgcacgagaccggtc

SEQ ID NO: 304176 - DNA, 55 bp, Artificial
  Synthetic oligonucleotide
aaggactagtcactgctgtccaatccatttggggcaaagacagaaaatctgacta

SEQ ID NO: 304177 - DNA, 59 bp, Artificial
  Synthetic oligonucleotide
aaggactcaatcttgagtgccgaactcttgaaagcgcaggttacatccgaggtgctacg

SEQ ID NO: 304178 - DNA, 60 bp, Artificial
  Synthetic oligonucleotide
aaggactcagagattatagtggcatttctactttgatctgccaactcacgaactcttcag

SEQ ID NO: 304179 - DNA, 60 bp, Artificial
  Synthetic oligonucleotide
aaggactcctctggtatgatataccatcaaaaggtgccacaccagcatccaaattcttct

SEQ ID NO: 304180 - DNA, 56 bp, Artificial
  Synthetic oligonucleotide
aaggactcctgaggacatggaccgttgggcccgcgagcattggaattttaacagac

SEQ ID NO: 304181 - DNA, 54 bp, Artificial
  Synthetic oligonucleotide
aaggactcgagtttgctgacgtttccaacggacggtcacgcggaaagatccttg

SEQ ID NO: 304182 - DNA, 55 bp, Artificial
  Synthetic oligonucleotide
aaggactctagattttcatgactcaaacgtcaagaacctttacgacaaggttcga

SEQ ID NO: 304183 - DNA, 55 bp, Artificial
  Synthetic oligonucleotide
aaggactctagggccaaaattttgcatttcgacgaggcattgatggcgcatgctg

SEQ ID NO: 304184 - DNA, 51 bp, Artificial
  Synthetic oligonucleotide
aaggactcttgatttccatgactccaatgtgagaaatttgtacgagaaagt

SEQ ID NO: 304185 - DNA, 53 bp, Artificial
  Synthetic oligonucleotide
aaggactgcagcgtagacgctttgtccaaaatgccctaaacgggaacggggac

SEQ ID NO: 304186 - DNA, 60 bp, Artificial
  Synthetic oligonucleotide
aaggactgcttgcaactgccctcgttgataagacagctcatgagcagctggaggagcaat

SEQ ID NO: 304187 - DNA, 55 bp, Artificial
  Synthetic oligonucleotide
aaggactggtcaaacagtcgcaacattaggccataacaatgttggcacaccgcct

SEQ ID NO: 304188 - DNA, 55 bp, Artificial
  Synthetic oligonucleotide
aaggactggtctatggcaacccttcttgtgacctgctattgggagggaaaaaatg

SEQ ID NO: 304189 - DNA, 52 bp, Artificial
  Synthetic oligonucleotide
aaggacttcggtccgtgtacctctaacacaatgtgctagttttagggtacgg

SEQ ID NO: 304190 - DNA, 56 bp, Artificial
  Synthetic oligonucleotide
aaggacttcggtccgtgtacttctagcacaagatgctagttttagggtacggcatc

SEQ ID NO: 304191 - DNA, 59 bp, Artificial
  Synthetic oligonucleotide
aaggacttgaacgttgctgtgttgaagaactatctttccgctgtgaacaactcatacat

SEQ ID NO: 304192 - DNA, 50 bp, Artificial
  Synthetic oligonucleotide
aaggagaacacatactatgctggacgtttccgtactccaattgctcaaga

SEQ ID NO: 304193 - DNA, 53 bp, Artificial
  Synthetic oligonucleotide
aaggagaatctgctttaatgttccgacataacagaagatttctctagatagta

SEQ ID NO: 304194 - DNA, 60 bp, Artificial
  Synthetic oligonucleotide
aaggagaatggtggatatcgcgcgagagttcagcgagatctacgtcaagtatgggcgtgg

SEQ ID NO: 304195 - DNA, 60 bp, Artificial
  Synthetic oligonucleotide
aaggagacactattataatgggagcacaagtatcatctcagaaggtgggcgctcatgaga

SEQ ID NO: 304196 - DNA, 57 bp, Artificial
  Synthetic oligonucleotide
aaggagacatagtgttggtaatgaaacggaaacgggactctagcatacttactgaca

SEQ ID NO: 304197 - DNA, 55 bp, Artificial
  Synthetic oligonucleotide
aaggagaccgctcggaaggctacgcagcgccgcgatatacgggcctatgcgtatg

SEQ ID NO: 304198 - DNA, 57 bp, Artificial
  Synthetic oligonucleotide
aaggagacgaaattgcacatggtctagccactaggagtattgtgacataccctatta

SEQ ID NO: 304199 - DNA, 57 bp, Artificial
  Synthetic oligonucleotide
aaggagacgctcataatcttccaaacaaggatgaattactcacccttgtaagaggaa

SEQ ID NO: 304200 - DNA, 55 bp, Artificial
  Synthetic oligonucleotide
aaggagacggcctatttattagctgtgcagacatagtggggtttctgtttaaaac

SEQ ID NO: 304201 - DNA, 59 bp, Artificial
  Synthetic oligonucleotide
aaggagacttacaaggctccttctatgcctaattacaagaagccgatgaatatgagtgt

SEQ ID NO: 304202 - DNA, 60 bp, Artificial
  Synthetic oligonucleotide
aaggagagaacaactgcttgttacaccctatgagccagcatgggatggaggacccggaga

SEQ ID NO: 304203 - DNA, 60 bp, Artificial
  Synthetic oligonucleotide
aaggagagaaccagctctgatagtctggggaatccatcattcaggatcaaccaccgagca

SEQ ID NO: 304204 - DNA, 54 bp, Artificial
  Synthetic oligonucleotide
aaggagagaaggtgtcaaaacgtgatcgccaaaagtggcgtaacgtttgggatg

SEQ ID NO: 304205 - DNA, 60 bp, Artificial
  Synthetic oligonucleotide
aaggagagccatcaggggagaaaagatattgtcctactgcaactacccatcagctcacga

SEQ ID NO: 304206 - DNA, 60 bp, Artificial
  Synthetic oligonucleotide
aaggagagccgcacaagcagtccaaactcgatgaggggcgctaccgcctcataatgagcg

SEQ ID NO: 304207 - DNA, 54 bp, Artificial
  Synthetic oligonucleotide
aaggagaggtccgggtcttcgagtggtgcaaccccatatgctcacctatcactg

SEQ ID NO: 304208 - DNA, 60 bp, Artificial
  Synthetic oligonucleotide
aaggagagtcgcgacccgattgcgaaggatcatagctatgatggttgagggagatcagcg

SEQ ID NO: 304209 - DNA, 60 bp, Artificial
  Synthetic oligonucleotide
aaggagataggctcagatagtgtaagcgtgccattcgtaggcgatgacgagactcatgtg

SEQ ID NO: 304210 - DNA, 55 bp, Artificial
  Synthetic oligonucleotide
aaggagatatcgagggttttaagaaggggactattgcttcgtcaatagttgagac

SEQ ID NO: 304211 - DNA, 58 bp, Artificial
  Synthetic oligonucleotide
aaggagatctccgatctaagagctgaagttgaacgacttaccgctgaaaataatatgt

SEQ ID NO: 304212 - DNA, 57 bp, Artificial
  Synthetic oligonucleotide
aaggagcaagccatggttaacaagtacttccgtgttaacaatcatgtggtgtataac

SEQ ID NO: 304213 - DNA, 60 bp, Artificial
  Synthetic oligonucleotide
aaggagccagaagatataaatgtggaaggtcctagcagtggatttcacaccgcaagtgtg

SEQ ID NO: 304214 - DNA, 50 bp, Artificial
  Synthetic oligonucleotide
aaggagccaggaccaaacttacccttgccattatggaaacatatagcaga

SEQ ID NO: 304215 - DNA, 55 bp, Artificial
  Synthetic oligonucleotide
aaggagcccgcaggtgggaggatcagctaccggagagggacgcgatggcaagagt

SEQ ID NO: 304216 - DNA, 58 bp, Artificial
  Synthetic oligonucleotide
aaggagcgctattagggaccaaacatagcaatggaaccatcaaagacagaacgccgta

SEQ ID NO: 304217 - DNA, 55 bp, Artificial
  Synthetic oligonucleotide
aaggagcggaaggtttatacaacaacgtacaagcgatgaaagacacagcaacaac

SEQ ID NO: 304218 - DNA, 56 bp, Artificial
  Synthetic oligonucleotide
aaggagctaccccacaagacttaaacaccatgctaaacacaatagggggacatcaa

SEQ ID NO: 304219 - DNA, 58 bp, Artificial
  Synthetic oligonucleotide
aaggagctataaacagtagtcttcctttccagaatgtacacccagtcacaataggaga

SEQ ID NO: 304220 - DNA, 54 bp, Artificial
  Synthetic oligonucleotide
aaggagcttagttatgacaatgtcacatttctcaagagaggtttcaaacaggat

SEQ ID NO: 304221 - DNA, 52 bp, Artificial
  Synthetic oligonucleotide
aaggaggaacaaatacctggagggacatcccagtgcggggaaggacccgaaa

SEQ ID NO: 304222 - DNA, 60 bp, Artificial
  Synthetic oligonucleotide
aaggaggaacagcactagtactggtgttggacacattctgctggggaatgatagtgtgca

SEQ ID NO: 304223 - DNA, 55 bp, Artificial
  Synthetic oligonucleotide
aaggaggaggaacaagagtctaccttaagttccgaggcatcgggctccgagcaag

SEQ ID NO: 304224 - DNA, 50 bp, Artificial
  Synthetic oligonucleotide
aaggaggaggagttaaggggatcagccagacatattgaggaatgctcctg

SEQ ID NO: 304225 - DNA, 59 bp, Artificial
  Synthetic oligonucleotide
aaggaggcacataatgtttgggccacatatgcctgtgtacccacggaccccagcccaca

SEQ ID NO: 304226 - DNA, 60 bp, Artificial
  Synthetic oligonucleotide
aaggaggcactgacaaaggactgcgacacgacagtagctgcgtcacttgtcgagcggctg

SEQ ID NO: 304227 - DNA, 56 bp, Artificial
  Synthetic oligonucleotide
aaggaggccgtaagccagctcgccttatcgtattcccagacttgggagtccgtgtg

SEQ ID NO: 304228 - DNA, 60 bp, Artificial
  Synthetic oligonucleotide
aaggagggcacattccactacgagaaagtgggaggcagatgctcgggagatagtgatacc

SEQ ID NO: 304229 - DNA, 56 bp, Artificial
  Synthetic oligonucleotide
aaggaggtcaggggttgacataccatagttgtcatggcaacagtcaaaagggaaac

SEQ ID NO: 304230 - DNA, 60 bp, Artificial
  Synthetic oligonucleotide
aaggaggtcgccatagtgcagctggtgagagcaatgaatgctcttgacattgacatgaca

SEQ ID NO: 304231 - DNA, 54 bp, Artificial
  Synthetic oligonucleotide
aaggaggtgattacatgaacgcacaggaagcacgggagctgtccaaagccaggc

SEQ ID NO: 304232 - DNA, 60 bp, Artificial
  Synthetic oligonucleotide
aaggaggtgtggacagtcaatgacatccaaaagctagtaggtgtcctaaattgggcagca

SEQ ID NO: 304233 - DNA, 57 bp, Artificial
  Synthetic oligonucleotide
aaggaggttacgaaccctgattttggctcctacgagagtggtggcagccgagatgga

SEQ ID NO: 304234 - DNA, 53 bp, Artificial
  Synthetic oligonucleotide
aaggaggttctagaggctatagtacaaagcggaccgttcgggtacaagggcga

SEQ ID NO: 304235 - DNA, 55 bp, Artificial
  Synthetic oligonucleotide
aaggagtaaaacgaaggcttattttatcagacctacaagacagcgggtatggcaa

SEQ ID NO: 304236 - DNA, 57 bp, Artificial
  Synthetic oligonucleotide
aaggagtacaaaaggagaggcgaatcgagtaatgaattcagtctgttttgaacattc

SEQ ID NO: 304237 - DNA, 54 bp, Artificial
  Synthetic oligonucleotide
aaggagtaccacgggtcccgtcagttctatagtcttgccgacttccgtcaggac

SEQ ID NO: 304238 - DNA, 60 bp, Artificial
  Synthetic oligonucleotide
aaggagtcagcaaggaatgttccatgcctaccctgttttgctgagcagcaggcagcgtga

SEQ ID NO: 304239 - DNA, 53 bp, Artificial
  Synthetic oligonucleotide
aaggagtgctggaatcataaacagcaatggagttttggcagcgaaacatggtg

SEQ ID NO: 304240 - DNA, 53 bp, Artificial
  Synthetic oligonucleotide
aaggagtggactgaacactgaagcgttttacgtcatgaccgtggggtcaaagt

SEQ ID NO: 304241 - DNA, 54 bp, Artificial
  Synthetic oligonucleotide
aaggagtggccgcactcgaggaactggcgctgtaaccccacttggtgttggggg

SEQ ID NO: 304242 - DNA, 60 bp, Artificial
  Synthetic oligonucleotide
aaggagtggctgagcagacggagagactgagagatctgcggcgaaaagagaagagtggga

SEQ ID NO: 304243 - DNA, 58 bp, Artificial
  Synthetic oligonucleotide
aaggagttactacgctgtggtatgagattcaaaacagagcaagttaactcttcacgta

SEQ ID NO: 304244 - DNA, 55 bp, Artificial
  Synthetic oligonucleotide
aaggagttccaggcagatgccggttactgccgtgacgcgctcgaattcgtgcccg

SEQ ID NO: 304245 - DNA, 57 bp, Artificial
  Synthetic oligonucleotide
aaggagttgattccaaaaccggagccacgaaagatacagatgaagtggataatattg

SEQ ID NO: 304246 - DNA, 60 bp, Artificial
  Synthetic oligonucleotide
aaggagttgggacaatggtgatggaattgatccgaatgatcaagcggggaatcaatgatc

SEQ ID NO: 304247 - DNA, 58 bp, Artificial
  Synthetic oligonucleotide
aaggagtttcaattgactttaatggccttgatgacacagagcctgggaagaatatagt

SEQ ID NO: 304248 - DNA, 57 bp, Artificial
  Synthetic oligonucleotide
aaggagtttcacaactgttatacaagatggtcacttgggtgcccacttttgtcagag

SEQ ID NO: 304249 - DNA, 51 bp, Artificial
  Synthetic oligonucleotide
aaggagtttcactttgagttaccagccccgctgggtaaacggcaagacggt

SEQ ID NO: 304250 - DNA, 56 bp, Artificial
  Synthetic oligonucleotide
aaggagttttacgacgagcataccccgctcgtcgtgactccagcaaacaaaacaga

SEQ ID NO: 304251 - DNA, 53 bp, Artificial
  Synthetic oligonucleotide
aaggagttttcactctagtggttgtaattgaccgtaaaccacatttgagttcc

SEQ ID NO: 304252 - DNA, 51 bp, Artificial
  Synthetic oligonucleotide
aaggataaacaacacatttaaagacgaaccaaaagtaggatttaaagacat

SEQ ID NO: 304253 - DNA, 56 bp, Artificial
  Synthetic oligonucleotide
aaggataaaccttgactggatgaccccctacacacacgtcaggtacaatccactag

SEQ ID NO: 304254 - DNA, 60 bp, Artificial
  Synthetic oligonucleotide
aaggataaaggtgtctgcggcataagatcagtgggcagacttgagcacgagatgtgggag

SEQ ID NO: 304255 - DNA, 55 bp, Artificial
  Synthetic oligonucleotide
aaggataactcatatctggggttgtcaattaacgcccattaccctgctgtgggcc

SEQ ID NO: 304256 - DNA, 57 bp, Artificial
  Synthetic oligonucleotide
aaggataagagtacgacattttacccacagagtgcttcgaagagagacacctaagtg

SEQ ID NO: 304257 - DNA, 55 bp, Artificial
  Synthetic oligonucleotide
aaggataatccttctatacatgttggaatggggaaaagaaatggtggaccacttc

SEQ ID NO: 304258 - DNA, 60 bp, Artificial
  Synthetic oligonucleotide
aaggatacactacagaggaggtagcacagcacatttggagcgcatggaatcaattccaga

SEQ ID NO: 304259 - DNA, 52 bp, Artificial
  Synthetic oligonucleotide
aaggatacagatggtgagacatgtcaagtgtacgctgcacttggtgacttac

SEQ ID NO: 304260 - DNA, 51 bp, Artificial
  Synthetic oligonucleotide
aaggatacctgtgtccgcccagagcgcagtggacaccttgtgtgcagcgtt

SEQ ID NO: 304261 - DNA, 56 bp, Artificial
  Synthetic oligonucleotide
aaggatacgagggtcaagacttagaagaattcatgcgtggacttaaatactataaa

SEQ ID NO: 304262 - DNA, 54 bp, Artificial
  Synthetic oligonucleotide
aaggataggaccaggacgagtattccatacaacaggaaacataaatggtgatat

SEQ ID NO: 304263 - DNA, 60 bp, Artificial
  Synthetic oligonucleotide
aaggataggagcccattcagaactctcatgagtgtcgaagtgggccaatcacccaatgta

SEQ ID NO: 304264 - DNA, 60 bp, Artificial
  Synthetic oligonucleotide
aaggatagtttctagattgtacgggagctcttcactactcgctgcgtcgagagtgtacga

SEQ ID NO: 304265 - DNA, 58 bp, Artificial
  Synthetic oligonucleotide
aaggatataatcagtctatgggatgagagcctaaagccatgtgtgaaattaacccccc

SEQ ID NO: 304266 - DNA, 60 bp, Artificial
  Synthetic oligonucleotide
aaggatatatcctcatacctaggagacacataaggagagttccagagccctgtactcttc

SEQ ID NO: 304267 - DNA, 58 bp, Artificial
  Synthetic oligonucleotide
aaggatatggatcgcccacagaatatcattgaacccactaacttttacctacaacaga

SEQ ID NO: 304268 - DNA, 58 bp, Artificial
  Synthetic oligonucleotide
aaggatcaaaaccagactattcaccataagacaagaaatggccagtagaggtctctgg

SEQ ID NO: 304269 - DNA, 55 bp, Artificial
  Synthetic oligonucleotide
aaggatcaaccttgttggttgattaggcttaaagaaggacataatcatggtgcaa

SEQ ID NO: 304270 - DNA, 58 bp, Artificial
  Synthetic oligonucleotide
aaggatcacccaccatatttcaatacacttcagatcagctgttaaggaagtttaggga

SEQ ID NO: 304271 - DNA, 57 bp, Artificial
  Synthetic oligonucleotide
aaggatcatccaggttattagcctgagcaaaactagcaattaggttccagttacaac

SEQ ID NO: 304272 - DNA, 60 bp, Artificial
  Synthetic oligonucleotide
aaggatcattcctgtgcggttgatagtaaaggtgctgatagcaattgtaccggacataag

SEQ ID NO: 304273 - DNA, 60 bp, Artificial
  Synthetic oligonucleotide
aaggatccaaagaatactcaagatcatgtgcgctcgctatgtctattggcctggcacaac

SEQ ID NO: 304274 - DNA, 56 bp, Artificial
  Synthetic oligonucleotide
aaggatcgaaagatagtgggaaaagctatagacggtgcaaatgtcaaggttacagt

SEQ ID NO: 304275 - DNA, 60 bp, Artificial
  Synthetic oligonucleotide
aaggatcggtgggtcacagtatactatggagtacctgtgtggaaagatgcagacaccacc

SEQ ID NO: 304276 - DNA, 55 bp, Artificial
  Synthetic oligonucleotide
aaggatctaatcaagtagcagaggcccaagcactaaatatggctttaaaagcggg

SEQ ID NO: 304277 - DNA, 57 bp, Artificial
  Synthetic oligonucleotide
aaggatctggaacgcgactcatgcaatggtgtctatgacaacattagcaaaaactcg

SEQ ID NO: 304278 - DNA, 55 bp, Artificial
  Synthetic oligonucleotide
aaggatcttccgattcagtcttccctaggactcggatgctgttggggtgattggg

SEQ ID NO: 304279 - DNA, 57 bp, Artificial
  Synthetic oligonucleotide
aaggatcttgaatgcgactcatgcaaaggtgtctatgacaacattagcaagaacgcc

SEQ ID NO: 304280 - DNA, 55 bp, Artificial
  Synthetic oligonucleotide
aaggatgaattcatggaggaacttagcataggaactcttgggttagcatatgaga

SEQ ID NO: 304281 - DNA, 60 bp, Artificial
  Synthetic oligonucleotide
aaggatgactcgtgatgctgctgagatgagttctcgctccctcaatgaacttgaggatca

SEQ ID NO: 304282 - DNA, 57 bp, Artificial
  Synthetic oligonucleotide
aaggatgagacagtgtccatacccttggatcatggaaatcccacccctagtcttaaa

SEQ ID NO: 304283 - DNA, 60 bp, Artificial
  Synthetic oligonucleotide
aaggatgcactgcggctgcagatgcttgctgacacatgccccgtcacgctcaactgtgac

SEQ ID NO: 304284 - DNA, 60 bp, Artificial
  Synthetic oligonucleotide
aaggatgccatgttaggcactcatgtggtgtgggatgttgggctccaatccagctgcgtg

SEQ ID NO: 304285 - DNA, 60 bp, Artificial
  Synthetic oligonucleotide
aaggatgcgacgcagaaagctctcaaggtggaccttacaccacacaacccattgcgtgta

SEQ ID NO: 304286 - DNA, 52 bp, Artificial
  Synthetic oligonucleotide
aaggatggaagggttaacagcctttttaggaataacacataaatttggaata

SEQ ID NO: 304287 - DNA, 55 bp, Artificial
  Synthetic oligonucleotide
aaggatggccttgtcggtaggtgtaaggactgcgttagcgcctactgtcgccgct

SEQ ID NO: 304288 - DNA, 52 bp, Artificial
  Synthetic oligonucleotide
aaggatggctggtttttaacaaatactaaatcagaagcacatatgtgtattg

SEQ ID NO: 304289 - DNA, 60 bp, Artificial
  Synthetic oligonucleotide
aaggatggggatggggctgtatgtcaagtatgatggagacccatgggctgacagtgatgc

SEQ ID NO: 304290 - DNA, 57 bp, Artificial
  Synthetic oligonucleotide
aaggatgggtagtggtggccaaggacaatgccataagattcggtgaaagtgaacaaa

SEQ ID NO: 304291 - DNA, 60 bp, Artificial
  Synthetic oligonucleotide
aaggatgtcatatacagatcagatagacagtattttgagaggagatgttattatgagggg

SEQ ID NO: 304292 - DNA, 56 bp, Artificial
  Synthetic oligonucleotide
aaggatgtggatgcaacagggttccactttgaagaatgttcctgttacccgagcgg

SEQ ID NO: 304293 - DNA, 55 bp, Artificial
  Synthetic oligonucleotide
aaggattaattgattatctagtcaaaagacaaaaacgagaagcagaaaatccgga

SEQ ID NO: 304294 - DNA, 55 bp, Artificial
  Synthetic oligonucleotide
aaggattacaatccttgagcgagaagtaagacgaagagtagtagtgcaggttaca

SEQ ID NO: 304295 - DNA, 59 bp, Artificial
  Synthetic oligonucleotide
aaggattacagatatacgtatcgctgccaccgaggggacacgcaaatccagacgaggag

SEQ ID NO: 304296 - DNA, 56 bp, Artificial
  Synthetic oligonucleotide
aaggattacatttcaaccaaagtttttgaccgcttgtacgaaatgctggacacaga

SEQ ID NO: 304297 - DNA, 57 bp, Artificial
  Synthetic oligonucleotide
aaggattacgtattcacaagaggttctgactgactttaggagacaggacacgatttg

SEQ ID NO: 304298 - DNA, 53 bp, Artificial
  Synthetic oligonucleotide
aaggattagagtcaaccgttaccgttcctggctatactcccagaacaaagacc

SEQ ID NO: 304299 - DNA, 57 bp, Artificial
  Synthetic oligonucleotide
aaggattagattcgtacacaggtcaaatggctccggatgttaacgcgcctctagatt

SEQ ID NO: 304300 - DNA, 56 bp, Artificial
  Synthetic oligonucleotide
aaggattagctaaacaacatggaccaacagttgttaataacgtccaacaaatggca

SEQ ID NO: 304301 - DNA, 55 bp, Artificial
  Synthetic oligonucleotide
aaggattaggattgttggaacgattgtctttaataaagcggtcgtggcgagtgcg

SEQ ID NO: 304302 - DNA, 55 bp, Artificial
  Synthetic oligonucleotide
aaggattatcgtgttaacggcctactccatcattttggagttgttcctataacat

SEQ ID NO: 304303 - DNA, 60 bp, Artificial
  Synthetic oligonucleotide
aaggattcagcaataccacatgcaagcacgaaggattggctaacagtgcgcgaatacaat

SEQ ID NO: 304304 - DNA, 59 bp, Artificial
  Synthetic oligonucleotide
aaggattcaggaaatacactgcattcactatacctagtgtaaacaatgaaacaccagga

SEQ ID NO: 304305 - DNA, 52 bp, Artificial
  Synthetic oligonucleotide
aaggattcagtttaaacagacacaaaatatacgggaacctggcacgtttaag

SEQ ID NO: 304306 - DNA, 55 bp, Artificial
  Synthetic oligonucleotide
aaggattccaacttcttgtacccttgttgttgtgtcacacgtgacgatgggagtg

SEQ ID NO: 304307 - DNA, 59 bp, Artificial
  Synthetic oligonucleotide
aaggattcgttgtccgtcatcctcttgtcatggatctccaccactacggatcccgtggc

SEQ ID NO: 304308 - DNA, 54 bp, Artificial
  Synthetic oligonucleotide
aaggattctagttgaccacaagactaaaaccatgcatgttgttgattcctatgg

SEQ ID NO: 304309 - DNA, 54 bp, Artificial
  Synthetic oligonucleotide
aaggattggttccaaaggagacatttttgtcataagggaaccattcatttcgtg

SEQ ID NO: 304310 - DNA, 55 bp, Artificial
  Synthetic oligonucleotide
aaggattgtagattccggcaagaatgaacgttagtggatgggccgctattctctg

SEQ ID NO: 304311 - DNA, 55 bp, Artificial
  Synthetic oligonucleotide
aaggatttaccagattttggcgatctattcaactgtcgccagctcattggtactg

SEQ ID NO: 304312 - DNA, 59 bp, Artificial
  Synthetic oligonucleotide
aaggattttcatatctggatggagataatacttggctagggaggacaataagtacagct

SEQ ID NO: 304313 - DNA, 58 bp, Artificial
  Synthetic oligonucleotide
aaggcaaacacagtatcccaactcataaagtttgcggatttgtcgttagcatctgaaa

SEQ ID NO: 304314 - DNA, 57 bp, Artificial
  Synthetic oligonucleotide
aaggcaaactggtaaagctcagcctatagatataagcgaaatacccaaagctaatac

SEQ ID NO: 304315 - DNA, 60 bp, Artificial
  Synthetic oligonucleotide
aaggcaacagacagtgtcagcactggaggataaacttgcggacttcaagagaagaatggc

SEQ ID NO: 304316 - DNA, 60 bp, Artificial
  Synthetic oligonucleotide
aaggcaacatgcaactaaccttccagctcctcgaatccaaaggcgcaaatcacttgttca

SEQ ID NO: 304317 - DNA, 54 bp, Artificial
  Synthetic oligonucleotide
aaggcaaccccaagcaagctggcccagagccaaccctaattccggaagtcccgc

SEQ ID NO: 304318 - DNA, 55 bp, Artificial
  Synthetic oligonucleotide
aaggcaacgaacccgatcgtgccttcctttgacatgagtaatgaagggtcttatt

SEQ ID NO: 304319 - DNA, 60 bp, Artificial
  Synthetic oligonucleotide
aaggcaacttactgacagaatgtggagctcctagatctcaaggacaacggagtgacctct

SEQ ID NO: 304320 - DNA, 60 bp, Artificial
  Synthetic oligonucleotide
aaggcaacttcgcaccggggtgcagcccattcagcctgttcctcatgtggagtccacgca

SEQ ID NO: 304321 - DNA, 60 bp, Artificial
  Synthetic oligonucleotide
aaggcaagaaaatgtactgttgaactttgccagaaggcatggaatacagatgctgggcct

SEQ ID NO: 304322 - DNA, 60 bp, Artificial
  Synthetic oligonucleotide
aaggcaagatctatggaactgcagtcaccaatgatatgggaactatatgtgtcagaattg

SEQ ID NO: 304323 - DNA, 52 bp, Artificial
  Synthetic oligonucleotide
aaggcaagccattagaagccacggtaataaagagtcaggacaatcagtggtc

SEQ ID NO: 304324 - DNA, 54 bp, Artificial
  Synthetic oligonucleotide
aaggcaagctcgaggatggttgtatagacatcactacgactgcttacacccaaa

SEQ ID NO: 304325 - DNA, 58 bp, Artificial
  Synthetic oligonucleotide
aaggcaagcttgcgacttgcagttgggcttaggaatacgccttctgttgaacccagag

SEQ ID NO: 304326 - DNA, 55 bp, Artificial
  Synthetic oligonucleotide
aaggcaaggacacaccagggggatattgtctgaccagatggatgctaattgaagc

SEQ ID NO: 304327 - DNA, 60 bp, Artificial
  Synthetic oligonucleotide
aaggcaagttcatggcccaatcatgaaacgaacagaggtgtgacggcagcatgtccttat

SEQ ID NO: 304328 - DNA, 59 bp, Artificial
  Synthetic oligonucleotide
aaggcacaaacaagcgacgatcatggacgtacaggcccatgtaccgaaagcccagaata

SEQ ID NO: 304329 - DNA, 60 bp, Artificial
  Synthetic oligonucleotide
aaggcacaacactcagaggacgacacgcgaatgggactatacatgatcggagcccgttca

SEQ ID NO: 304330 - DNA, 60 bp, Artificial
  Synthetic oligonucleotide
aaggcacaacgcagtgcattgctcaggttgttctgctttgtgtgctacggatatgcgccg

SEQ ID NO: 304331 - DNA, 57 bp, Artificial
  Synthetic oligonucleotide
aaggcacacccttccccaatgctggttaatctcaaatgggtcttacttgaatgagac

SEQ ID NO: 304332 - DNA, 54 bp, Artificial
  Synthetic oligonucleotide
aaggcacacggcactgtcacattgacacgtgaaactgctgaaggttgttgtgtt

SEQ ID NO: 304333 - DNA, 52 bp, Artificial
  Synthetic oligonucleotide
aaggcacagacgttcattgctcatactaagccctgatgcctcttacaccgcc

SEQ ID NO: 304334 - DNA, 60 bp, Artificial
  Synthetic oligonucleotide
aaggcaccagactccacgtgtcgccagcacatgttgacgactacgaggagtgcacccacc

SEQ ID NO: 304335 - DNA, 53 bp, Artificial
  Synthetic oligonucleotide
aaggcaccaggaccctgtgcacaaagaacatatgttgcttgccatatacgatc

SEQ ID NO: 304336 - DNA, 56 bp, Artificial
  Synthetic oligonucleotide
aaggcacccccgtggttggcgtgatcaacaacgctgacgtcgggagactgattttc

SEQ ID NO: 304337 - DNA, 60 bp, Artificial
  Synthetic oligonucleotide
aaggcacggtaagactctgcgagtttgcgcaccagctgagcggtgactatgacatcttgc

SEQ ID NO: 304338 - DNA, 54 bp, Artificial
  Synthetic oligonucleotide
aaggcactagtaagagaattaggtgtaagattaatacggtaaattgtattacca

SEQ ID NO: 304339 - DNA, 54 bp, Artificial
  Synthetic oligonucleotide
aaggcactatggcccccgagcggtctacttgcgttcgataaagtgatactgtcg

SEQ ID NO: 304340 - DNA, 54 bp, Artificial
  Synthetic oligonucleotide
aaggcagaaaagcttactccaggtaggtttcggacaattgtgtgtggtcttttc

SEQ ID NO: 304341 - DNA, 59 bp, Artificial
  Synthetic oligonucleotide
aaggcagaataattggccagacggatatcagttttaatggaggacatattgaagagtgt

SEQ ID NO: 304342 - DNA, 55 bp, Artificial
  Synthetic oligonucleotide
aaggcagacttatacgcacaggagtgttgaggacaggccatcgtggctcttcgca

SEQ ID NO: 304343 - DNA, 55 bp, Artificial
  Synthetic oligonucleotide
aaggcagagaatgatagccggcataaataatgaagcgttattaggaagcatggcg

SEQ ID NO: 304344 - DNA, 59 bp, Artificial
  Synthetic oligonucleotide
aaggcagatgagattacaccgggtcggttcaggactgcaatttgtggactatacccagc

SEQ ID NO: 304345 - DNA, 57 bp, Artificial
  Synthetic oligonucleotide
aaggcagccaataccgggagtggaccatcctctggactgacatggcgcgtgcaacgc

SEQ ID NO: 304346 - DNA, 55 bp, Artificial
  Synthetic oligonucleotide
aaggcagcctctgaatcttttgggtctacttacgagagagaagtgaagttctcag

SEQ ID NO: 304347 - DNA, 59 bp, Artificial
  Synthetic oligonucleotide
aaggcaggagagactcggggatttgccacagtgtgctacgcctagagacctgtggggtg

SEQ ID NO: 304348 - DNA, 55 bp, Artificial
  Synthetic oligonucleotide
aaggcagtatgacagtgatgaaccaaagcctagatcactagcaagctggatccag

SEQ ID NO: 304349 - DNA, 55 bp, Artificial
  Synthetic oligonucleotide
aaggcagtcctccctaagtgtgaattcccagaagggcacagcaaggtagggtctt

SEQ ID NO: 304350 - DNA, 51 bp, Artificial
  Synthetic oligonucleotide
aaggcataaacaaacgacggtcgtggacttaccggcccagttaccgaaagc

SEQ ID NO: 304351 - DNA, 60 bp, Artificial
  Synthetic oligonucleotide
aaggcatctaggatgtttggtcttgacggcaatgtatcagcccaatcggagaacacagag

SEQ ID NO: 304352 - DNA, 60 bp, Artificial
  Synthetic oligonucleotide
aaggcatgcggaccgctttatggtataaccctgtgagaaatgatggatttgtgctaccgc

SEQ ID NO: 304353 - DNA, 60 bp, Artificial
  Synthetic oligonucleotide
aaggcatgtgactctgcaatgtgttatggttcgactacagcaaatctagcaagaggacaa

SEQ ID NO: 304354 - DNA, 55 bp, Artificial
  Synthetic oligonucleotide
aaggccaaaagtccatctaattataaaggataggaggaaagttttgccagagcat

SEQ ID NO: 304355 - DNA, 59 bp, Artificial
  Synthetic oligonucleotide
aaggccaacgacggggactatgcaagactctacatatggggagttcatcatccttcgac

SEQ ID NO: 304356 - DNA, 54 bp, Artificial
  Synthetic oligonucleotide
aaggccaacgaggtaggagtgggagcgttcggtcccgggctcactccgccacac

SEQ ID NO: 304357 - DNA, 52 bp, Artificial
  Synthetic oligonucleotide
aaggccaataataatgatacctacggtaatttcgatgctgctatcactgggg

SEQ ID NO: 304358 - DNA, 58 bp, Artificial
  Synthetic oligonucleotide
aaggccactcgtgagaggacaacaggggagaatggattactactgggctgtcctcaaa

SEQ ID NO: 304359 - DNA, 58 bp, Artificial
  Synthetic oligonucleotide
aaggccagagggaaagaaacactatatgctaaaacatctagtatgggcaagcagggag

SEQ ID NO: 304360 - DNA, 55 bp, Artificial
  Synthetic oligonucleotide
aaggccagttacactgtcttttcagtccaaaccttacccagtctggacgcagagc

SEQ ID NO: 304361 - DNA, 49 bp, Artificial
  Synthetic oligonucleotide
aaggccagttacccaccccggtggacccgtaccccgcgtcacccctgtc

SEQ ID NO: 304362 - DNA, 60 bp, Artificial
  Synthetic oligonucleotide
aaggccataatgcgtgagcagaaagtcccaagtctcattccaacaagctttgacaagtat

SEQ ID NO: 304363 - DNA, 53 bp, Artificial
  Synthetic oligonucleotide
aaggccatacaactaatggacaagtacaccagacaaagattctcagtagatga

SEQ ID NO: 304364 - DNA, 57 bp, Artificial
  Synthetic oligonucleotide
aaggccatgtgtaaagttaacccctctctgcgtcacgttagattgcaatgacgtcag

SEQ ID NO: 304365 - DNA, 54 bp, Artificial
  Synthetic oligonucleotide
aaggccattgtgtttgttaccaagtctgtattgctaggagggaaaagtttgaaa

SEQ ID NO: 304366 - DNA, 59 bp, Artificial
  Synthetic oligonucleotide
aaggcccatgtaaggttcagtcgttcgagtctagacatgacatatcccatattgggaag

SEQ ID NO: 304367 - DNA, 60 bp, Artificial
  Synthetic oligonucleotide
aaggcccctcctaatagatggtaccgcctcattgagccctggaatgatgatgggcatgtt

SEQ ID NO: 304368 - DNA, 56 bp, Artificial
  Synthetic oligonucleotide
aaggcccctgttcctggatagtatagtcaaaggcatgaaaaatccgctaaactcca

SEQ ID NO: 304369 - DNA, 56 bp, Artificial
  Synthetic oligonucleotide
aaggcccgctacatggtggcgtacgtcccgcctggtgtcgagacaccaccggacac

SEQ ID NO: 304370 - DNA, 51 bp, Artificial
  Synthetic oligonucleotide
aaggccctcaattaatagcattctcggctctgtctgaactaggaaggctag

SEQ ID NO: 304371 - DNA, 60 bp, Artificial
  Synthetic oligonucleotide
aaggccctcggcctattgcatactgcgtcccgccaggcagaggttatcacccctgctgtc

SEQ ID NO: 304372 - DNA, 60 bp, Artificial
  Synthetic oligonucleotide
aaggcccttggagaaggcatatttgcagaaatgaactggggtctcggcaactctgtgata

SEQ ID NO: 304373 - DNA, 57 bp, Artificial
  Synthetic oligonucleotide
aaggccgcgcagcggcacacacaacatttgacgtaacccaatcgacgaggtcttccg

SEQ ID NO: 304374 - DNA, 55 bp, Artificial
  Synthetic oligonucleotide
aaggccgctaccgcctcatcatgagcgtctctctagtcgaccaattggtagcccg

SEQ ID NO: 304375 - DNA, 54 bp, Artificial
  Synthetic oligonucleotide
aaggccggagggtggtcttgatcggggatgttcagggccccatcggccctgtgg

SEQ ID NO: 304376 - DNA, 53 bp, Artificial
  Synthetic oligonucleotide
aaggccggcgtgtggagcgggagtgaagaggcctccgggtgaaggtaagtacc

SEQ ID NO: 304377 - DNA, 50 bp, Artificial
  Synthetic oligonucleotide
aaggccgtggacagcggcttggctaacatggatatggaggacccgtacga

SEQ ID NO: 304378 - DNA, 55 bp, Artificial
  Synthetic oligonucleotide
aaggccgtgggcgtgatcgagtgcaagaccgccggggacgatgagcactgggagt

SEQ ID NO: 304379 - DNA, 60 bp, Artificial
  Synthetic oligonucleotide
aaggcctcttctaatagatggtacagcttcattgagtcccggaatgatgatgggaatgtt

SEQ ID NO: 304380 - DNA, 54 bp, Artificial
  Synthetic oligonucleotide
aaggccttagtaggacagagcaaaagaagaccacccttacctagtgtgactaaa

SEQ ID NO: 304381 - DNA, 55 bp, Artificial
  Synthetic oligonucleotide
aaggccttggacacttacatggcgtgtcaagagactacatccaagcttcgccggc

SEQ ID NO: 304382 - DNA, 51 bp, Artificial
  Synthetic oligonucleotide
aaggcctttaacttccgggtgcgtatgggggccgtcattttagcttcggcc

SEQ ID NO: 304383 - DNA, 55 bp, Artificial
  Synthetic oligonucleotide
aaggcctttgcaggagaccccgtcgcagccggcaacaatatggccctacaggtct

SEQ ID NO: 304384 - DNA, 56 bp, Artificial
  Synthetic oligonucleotide
aaggcctttttcttttcagcggcgttcgtgcctgattaggagaagaagctccttca

SEQ ID NO: 304385 - DNA, 56 bp, Artificial
  Synthetic oligonucleotide
aaggcgaatgtaaatgaattgaaacatcttgatttgtcatagctaactgtccatag

SEQ ID NO: 304386 - DNA, 60 bp, Artificial
  Synthetic oligonucleotide
aaggcgacccaagcatttatatgtctcaatgccgactgcacagtctactatgaaagctga

SEQ ID NO: 304387 - DNA, 60 bp, Artificial
  Synthetic oligonucleotide
aaggcgagctggctgtctccattgaatagtcacgtacatagcgacggtgcgagtatgact

SEQ ID NO: 304388 - DNA, 59 bp, Artificial
  Synthetic oligonucleotide
aaggcgagtacatctatggctgaaaacgttgtcgctacgcaagattcacccaaggtgcc

SEQ ID NO: 304389 - DNA, 58 bp, Artificial
  Synthetic oligonucleotide
aaggcgattcatgtgctgatggtgatgtgcctgtctgtgctggcaagtcgtgtaaagc

SEQ ID NO: 304390 - DNA, 54 bp, Artificial
  Synthetic oligonucleotide
aaggcgcatggccatcttgggagatacagcctgggactttggatcagtgggtgg

SEQ ID NO: 304391 - DNA, 60 bp, Artificial
  Synthetic oligonucleotide
aaggcgccatatacggccattttgaaccagcgtcccaaaagcatcccagctgacatacac

SEQ ID NO: 304392 - DNA, 60 bp, Artificial
  Synthetic oligonucleotide
aaggcgcgagtgtcatacatcaacgcagattagcgcgttcgcgaggtgcgcacccgattt

SEQ ID NO: 304393 - DNA, 54 bp, Artificial
  Synthetic oligonucleotide
aaggcgctactcgactaatcgcagtaacgagaccgtgtcgttttcggatttgtt

SEQ ID NO: 304394 - DNA, 57 bp, Artificial
  Synthetic oligonucleotide
aaggcgcttgtacagcggaagccctgggtggaacgtgtagtcaagaccgctccgaca

SEQ ID NO: 304395 - DNA, 55 bp, Artificial
  Synthetic oligonucleotide
aaggcggaacaggctgacaccccgtgtcaaaggtcaggggtcagcctccgctttg

SEQ ID NO: 304396 - DNA, 56 bp, Artificial
  Synthetic oligonucleotide
aaggcggagaaattaaacctcacactcaagacagacccctgtcctagggtcataca

SEQ ID NO: 304397 - DNA, 50 bp, Artificial
  Synthetic oligonucleotide
aaggcggctctaccagcgggacaaaagacgtgtacgcacgcctcaacaga

SEQ ID NO: 304398 - DNA, 58 bp, Artificial
  Synthetic oligonucleotide
aaggcgggactaagggatcatctcaagtgggtgaaaatgtgagtgagaactatactgg

SEQ ID NO: 304399 - DNA, 52 bp, Artificial
  Synthetic oligonucleotide
aaggcgggctgccaggctcaattactgctacaagtgtgggcaccctctctac

SEQ ID NO: 304400 - DNA, 58 bp, Artificial
  Synthetic oligonucleotide
aaggcggtatgactcagtttgtggctaaaacattgatcataacaagtaaccgcgagcc

SEQ ID NO: 304401 - DNA, 55 bp, Artificial
  Synthetic oligonucleotide
aaggcggttccaacaccagagccaaagggatatgtattagaaatcaatgatgtgg

SEQ ID NO: 304402 - DNA, 57 bp, Artificial
  Synthetic oligonucleotide
aaggcgtactgtggctcaagggtacattcaggatatgttagaaagaggtacttggaa

SEQ ID NO: 304403 - DNA, 55 bp, Artificial
  Synthetic oligonucleotide
aaggcgtatactttagtataggtagtagattacgtagtggtgtatcgtggactag

SEQ ID NO: 304404 - DNA, 55 bp, Artificial
  Synthetic oligonucleotide
aaggcgtccgcggccattaaggcggcgggcttgaaagactgcaccatgctggtct

SEQ ID NO: 304405 - DNA, 54 bp, Artificial
  Synthetic oligonucleotide
aaggcgtggaagaatttagagacccccttgtggcctcctaggttttccatgcac

SEQ ID NO: 304406 - DNA, 55 bp, Artificial
  Synthetic oligonucleotide
aaggcgtgtcaaaataccagtccaactgtgaataacaccagtcagacgggttgta

SEQ ID NO: 304407 - DNA, 53 bp, Artificial
  Synthetic oligonucleotide
aaggcgttaccaacgaaaggttgtcatatcctgcatttggttaacctcccgaa

SEQ ID NO: 304408 - DNA, 55 bp, Artificial
  Synthetic oligonucleotide
aaggcgttgtcacgtacgggtcgcgcaacacttatcggccagacgtggcgtttat

SEQ ID NO: 304409 - DNA, 55 bp, Artificial
  Synthetic oligonucleotide
aaggctaacgcagtacaacagctatgtcgatttggcgatgtcgatttggagagtg

SEQ ID NO: 304410 - DNA, 55 bp, Artificial
  Synthetic oligonucleotide
aaggctaacggatccgacgaacaaaaccaggcttactgttcgaagacaggcatat

SEQ ID NO: 304411 - DNA, 51 bp, Artificial
  Synthetic oligonucleotide
aaggctacactcaatatgagacaaggacggtaccaaatgggtcacgtaagc

SEQ ID NO: 304412 - DNA, 60 bp, Artificial
  Synthetic oligonucleotide
aaggctacgctcagtacgagacgaggatagtgccaaacggatcacgaaggcttgcaattg

SEQ ID NO: 304413 - DNA, 60 bp, Artificial
  Synthetic oligonucleotide
aaggctactatgataatctggcgttagaagcagcatgggaccccgagggttatgatgaaa

SEQ ID NO: 304414 - DNA, 59 bp, Artificial
  Synthetic oligonucleotide
aaggctacttccctgattagcagaactacacaccagggccagggatcagatacccactg

SEQ ID NO: 304415 - DNA, 55 bp, Artificial
  Synthetic oligonucleotide
aaggctagcataaagtttcaaactatggtaaactggttgtgtgaaaacagagtgt

SEQ ID NO: 304416 - DNA, 60 bp, Artificial
  Synthetic oligonucleotide
aaggctaggcaaatgattagcccagtcatgagtgtgattggattcctagcactggcaaaa

SEQ ID NO: 304417 - DNA, 60 bp, Artificial
  Synthetic oligonucleotide
aaggctaggcgtagatggagtgctatacaattcagaagtgcccaatgttgaattctattc

SEQ ID NO: 304418 - DNA, 53 bp, Artificial
  Synthetic oligonucleotide
aaggctatcatgggaacaaaacacttccttgggtaaaacctgggtgcacttat

SEQ ID NO: 304419 - DNA, 56 bp, Artificial
  Synthetic oligonucleotide
aaggctcacacattcgtgttttcaaaggacggcatcaatggtagttccaagggaag

SEQ ID NO: 304420 - DNA, 57 bp, Artificial
  Synthetic oligonucleotide
aaggctccagcacctacaaacaaggcccaaggctcccagaaattctcaatggataga

SEQ ID NO: 304421 - DNA, 57 bp, Artificial
  Synthetic oligonucleotide
aaggctcccactttccagatccctcctaaatctgctaaaaagtgaattgatgccaaa

SEQ ID NO: 304422 - DNA, 51 bp, Artificial
  Synthetic oligonucleotide
aaggctcgatggtgcaatggcgctgcacatgcaagccagcagtgtcctcca

SEQ ID NO: 304423 - DNA, 58 bp, Artificial
  Synthetic oligonucleotide
aaggctcgcagattaatattcgtcctaagaagatcatcgttacttccaactatcaccc

SEQ ID NO: 304424 - DNA, 55 bp, Artificial
  Synthetic oligonucleotide
aaggctctctctacgaagttgaattctgttctcacgtagtgaggcaaagccgctg

SEQ ID NO: 304425 - DNA, 56 bp, Artificial
  Synthetic oligonucleotide
aaggctcttaaaaagctccctcgctgtgttcttcgccaggacacaaaacaatgtcg

SEQ ID NO: 304426 - DNA, 58 bp, Artificial
  Synthetic oligonucleotide
aaggctgacacagataagcgaagaattcttaacccggctgtcattaaagaggttatga

SEQ ID NO: 304427 - DNA, 60 bp, Artificial
  Synthetic oligonucleotide
aaggctgacatgctgtgcgtcttacttgcaatcgccagctatgtttgggcaccccttacc

SEQ ID NO: 304428 - DNA, 60 bp, Artificial
  Synthetic oligonucleotide
aaggctgatggctgaaattgctgacaggtatgaccttgagccccgcagaaagaagcctaa

SEQ ID NO: 304429 - DNA, 60 bp, Artificial
  Synthetic oligonucleotide
aaggctgcagatttgtgggtcacagtatactatggagtacctgtgtggagagatgcagat

SEQ ID NO: 304430 - DNA, 60 bp, Artificial
  Synthetic oligonucleotide
aaggctgccaacgcacccttagagacacaacatgcacccaatccacattctgctggcact

SEQ ID NO: 304431 - DNA, 57 bp, Artificial
  Synthetic oligonucleotide
aaggctggattgctggtttctgacggaggccccaacctgtacaacatcagaaacctc

SEQ ID NO: 304432 - DNA, 56 bp, Artificial
  Synthetic oligonucleotide
aaggctggccggaatgggttagcaacatagccgaaaagctgggactgggtgaagat

SEQ ID NO: 304433 - DNA, 60 bp, Artificial
  Synthetic oligonucleotide
aaggctggtccattgctttaatatatgtacgatcatcttttgttagcacccacatgtgag

SEQ ID NO: 304434 - DNA, 60 bp, Artificial
  Synthetic oligonucleotide
aaggctggtgtctggaagatgaccatctagcactgattggaacatgatgcaatccagaag

SEQ ID NO: 304435 - DNA, 60 bp, Artificial
  Synthetic oligonucleotide
aaggctgttgagtcgttagagatgcatcccgtgagggaaaaggatgcctggcttagcacg

SEQ ID NO: 304436 - DNA, 59 bp, Artificial
  Synthetic oligonucleotide
aaggcttaagtcagaagcacagcagagcctaaacctaataacaaaggcagtgaactcat

SEQ ID NO: 304437 - DNA, 60 bp, Artificial
  Synthetic oligonucleotide
aaggcttactgttagaaatttgggagacagtcactgtgagataatatccaataacattga

SEQ ID NO: 304438 - DNA, 53 bp, Artificial
  Synthetic oligonucleotide
aaggcttatgaaactctacagcgattgtactatccgttgcgttttaaaggggg

SEQ ID NO: 304439 - DNA, 56 bp, Artificial
  Synthetic oligonucleotide
aaggcttatgctttaattagagggtatcgtggtgttaaaccacttctctatgtaga

SEQ ID NO: 304440 - DNA, 59 bp, Artificial
  Synthetic oligonucleotide
aaggcttcaatattaagctgaccgtaacatcggagagcctcgccgaactgaacaagcca

SEQ ID NO: 304441 - DNA, 55 bp, Artificial
  Synthetic oligonucleotide
aaggcttcggaattgcgttctaagttaatagggattcgaaagaatcgtgcacgtg

SEQ ID NO: 304442 - DNA, 60 bp, Artificial
  Synthetic oligonucleotide
aaggcttctgcggcagcgtcgttagcagtttggctgcctcctctagcacttctgccgtcg

SEQ ID NO: 304443 - DNA, 51 bp, Artificial
  Synthetic oligonucleotide
aaggcttgcatattggtttactgaactgtcagtatttagtacacgtgcgtc

SEQ ID NO: 304444 - DNA, 54 bp, Artificial
  Synthetic oligonucleotide
aaggcttggtagggcttctttggtagggctccgagaggagaccccattgaagac

SEQ ID NO: 304445 - DNA, 60 bp, Artificial
  Synthetic oligonucleotide
aaggcttgtgacatactggaaataccatacgtcatgcgccaaggtgatagttggctgaaa

SEQ ID NO: 304446 - DNA, 55 bp, Artificial
  Synthetic oligonucleotide
aaggctttcatggagtggtttgctatttagcgtacgtgtaccataggcagcccca

SEQ ID NO: 304447 - DNA, 56 bp, Artificial
  Synthetic oligonucleotide
aaggctttgtggagatccaacgctctcctcaggttgtggttgaaccgtatttgtac

SEQ ID NO: 304448 - DNA, 49 bp, Artificial
  Synthetic oligonucleotide
aaggctttttcgtactgaaggacaaaaaggggttttcgaggcaggttcg

SEQ ID NO: 304449 - DNA, 56 bp, Artificial
  Synthetic oligonucleotide
aagggaaaagcaggtgcttcgtcgttgttactgagaggtatggttatattggacat

SEQ ID NO: 304450 - DNA, 54 bp, Artificial
  Synthetic oligonucleotide
aagggaaaaggccaacagacctgggacaatgtggactcctaggaacactaatag

SEQ ID NO: 304451 - DNA, 59 bp, Artificial
  Synthetic oligonucleotide
aagggaaaggcaattatgaacttaaatcatttggcacattacagtcctgcacaagttga

SEQ ID NO: 304452 - DNA, 55 bp, Artificial
  Synthetic oligonucleotide
aagggaacaaatgcagggagaatcaattggagaacaccctttgactgttgaatgc

SEQ ID NO: 304453 - DNA, 60 bp, Artificial
  Synthetic oligonucleotide
aagggaacagcttgcggagtacactagaattaggagatcccttggactcacagcagcaaa

SEQ ID NO: 304454 - DNA, 60 bp, Artificial
  Synthetic oligonucleotide
aagggaaccaacaggaagtgacatcgctgggacaactagcacccagcaagagcaagttca

SEQ ID NO: 304455 - DNA, 52 bp, Artificial
  Synthetic oligonucleotide
aagggaacgccgcacgttggcgcgagacggcccgacggccccccgaacggca

SEQ ID NO: 304456 - DNA, 52 bp, Artificial
  Synthetic oligonucleotide
aagggaacgcgggaggaaggatcagcgcccgagagggagtaacggtaaagag

SEQ ID NO: 304457 - DNA, 51 bp, Artificial
  Synthetic oligonucleotide
aagggaagaggtaggcgtgccaattataatgccttctcaagaagaggcctc

SEQ ID NO: 304458 - DNA, 55 bp, Artificial
  Synthetic oligonucleotide
aagggaagccaattcgttatgcgtccttgttcctgctaccaagaaggaggcttaa

SEQ ID NO: 304459 - DNA, 53 bp, Artificial
  Synthetic oligonucleotide
aagggaaggatattctctggtcgggatagaccccttcaaactacttcaaaaca

SEQ ID NO: 304460 - DNA, 51 bp, Artificial
  Synthetic oligonucleotide
aagggaagggcagtgctgccgcgaattctagtacccgagcgccagaatgac

SEQ ID NO: 304461 - DNA, 51 bp, Artificial
  Synthetic oligonucleotide
aagggaagtaaccacaagcttacaaccgcctaccccggtgttaatgggatg

SEQ ID NO: 304462 - DNA, 57 bp, Artificial
  Synthetic oligonucleotide
aagggaatcatggagtgaaaggctgggccttcgacgatggaaatgacgtttggatgg

SEQ ID NO: 304463 - DNA, 55 bp, Artificial
  Synthetic oligonucleotide
aagggaatctttctgcaatcagacccaaagacaaaccattacaagggaaatatcc

SEQ ID NO: 304464 - DNA, 50 bp, Artificial
  Synthetic oligonucleotide
aagggaatttgaaagataagtcttccgtcataaccggaaactttgggtcc

SEQ ID NO: 304465 - DNA, 60 bp, Artificial
  Synthetic oligonucleotide
aagggacagataggattatagaaatagtgcatagggcttttagagctttgctccacatac

SEQ ID NO: 304466 - DNA, 55 bp, Artificial
  Synthetic oligonucleotide
aagggaccttgggaccagaccccattacgtgtggtgagagagccgtgccctggga

SEQ ID NO: 304467 - DNA, 55 bp, Artificial
  Synthetic oligonucleotide
aagggacgccgacgtggcaaaggatctgacctcccgtacatgggggaagcagcgt

SEQ ID NO: 304468 - DNA, 57 bp, Artificial
  Synthetic oligonucleotide
aagggacggtgaagattgaacaggtaccattggcgatgaacatggacggatctaccc

SEQ ID NO: 304469 - DNA, 54 bp, Artificial
  Synthetic oligonucleotide
aagggactaacaataccaatcgttggctagctaccattttagtagaaccaggag

SEQ ID NO: 304470 - DNA, 60 bp, Artificial
  Synthetic oligonucleotide
aagggactactctacgcagaacatagagactttacagcaggctcggtctcaactgctcga

SEQ ID NO: 304471 - DNA, 57 bp, Artificial
  Synthetic oligonucleotide
aagggactaggattcgattcaaggatgacagctcctttgaggatgttaacgggattc

SEQ ID NO: 304472 - DNA, 55 bp, Artificial
  Synthetic oligonucleotide
aagggactggagtggttcgaaaagaatgcaggaaccattaaatcctgggatgaaa

SEQ ID NO: 304473 - DNA, 51 bp, Artificial
  Synthetic oligonucleotide
aagggacttgacgacgtcccgtcgacgacgcagtacgacacgcacccggac

SEQ ID NO: 304474 - DNA, 53 bp, Artificial
  Synthetic oligonucleotide
aagggagaaacagaggcgcaaccaataagaagacaaccgggaagtatccgaaa

SEQ ID NO: 304475 - DNA, 57 bp, Artificial
  Synthetic oligonucleotide
aagggagaacgtagcagttatacaggtaggcggcgcgaatattttagacatcacggc

SEQ ID NO: 304476 - DNA, 54 bp, Artificial
  Synthetic oligonucleotide
aagggagaatgccgaagacatggggaatggctgtttcaagatataccacaaatg

SEQ ID NO: 304477 - DNA, 51 bp, Artificial
  Synthetic oligonucleotide
aagggagacatctagtgatataagtgtgaactacacttatcttaaatgatg

SEQ ID NO: 304478 - DNA, 57 bp, Artificial
  Synthetic oligonucleotide
aagggagactcgggagttgccgcctgtgacacggggtctgagataaagggtcacata

SEQ ID NO: 304479 - DNA, 55 bp, Artificial
  Synthetic oligonucleotide
aagggagagcgaatgttcattcttgctgcccaattttagatgtgcgcgatggtgc

SEQ ID NO: 304480 - DNA, 58 bp, Artificial
  Synthetic oligonucleotide
aagggagcccgtggtggggtctatccttgagcaggatgatcacaaattctaccactac

SEQ ID NO: 304481 - DNA, 52 bp, Artificial
  Synthetic oligonucleotide
aagggagccctgaaacgaggcacccttaagactgaaggtggaattcaaaaag

SEQ ID NO: 304482 - DNA, 60 bp, Artificial
  Synthetic oligonucleotide
aagggaggagtttaatatgttgtcacagaatatcgcagtgtctcaattaatagatttggc

SEQ ID NO: 304483 - DNA, 60 bp, Artificial
  Synthetic oligonucleotide
aagggaggctgatccagaacagcataacaatagagagaatggtactctctgcatttgatg

SEQ ID NO: 304484 - DNA, 60 bp, Artificial
  Synthetic oligonucleotide
aagggagggtttcataggagaagttaggtgctcctctgagtcagcagctgtgatggcaca

SEQ ID NO: 304485 - DNA, 54 bp, Artificial
  Synthetic oligonucleotide
aagggaggtcaacacgtcgacgcctgttcccctccttggctagcctgtgcttca

SEQ ID NO: 304486 - DNA, 60 bp, Artificial
  Synthetic oligonucleotide
aagggagtatacataaacacagctttactcaacgcttcttgtgcagcaatggatgatttt

SEQ ID NO: 304487 - DNA, 54 bp, Artificial
  Synthetic oligonucleotide
aagggagtctctcttagtttcgtgcgtgtcggcctaatttagttatgtcccgag

SEQ ID NO: 304488 - DNA, 55 bp, Artificial
  Synthetic oligonucleotide
aagggagtctggccctaattgatgtacgactcttctttggttgcgacccgagtcc

SEQ ID NO: 304489 - DNA, 55 bp, Artificial
  Synthetic oligonucleotide
aagggagttgggacgatggtaatggaactaattcggatgataaagcgagggatta

SEQ ID NO: 304490 - DNA, 53 bp, Artificial
  Synthetic oligonucleotide
aagggagttggtccgcaaaacgaggttcctcccagtggccggtggaacaagca

SEQ ID NO: 304491 - DNA, 57 bp, Artificial
  Synthetic oligonucleotide
aagggataaaaaacagcaagtgtctgcacttttttatagatctgatgtagtaccact

SEQ ID NO: 304492 - DNA, 51 bp, Artificial
  Synthetic oligonucleotide
aagggatgaaaaaggaaggattataagtaaattactttcaccgagtgaaag

SEQ ID NO: 304493 - DNA, 54 bp, Artificial
  Synthetic oligonucleotide
aagggatgcccctctcccaccaaaatttcccccccgctatctcagaatggtcaa

SEQ ID NO: 304494 - DNA, 54 bp, Artificial
  Synthetic oligonucleotide
aagggatggaagaaaatcctatatatgactctactgccgctactaacactgcaa

SEQ ID NO: 304495 - DNA, 55 bp, Artificial
  Synthetic oligonucleotide
aagggattctctctaaaatcgcatctagggcaatgcaggctttcattggtgaccc

SEQ ID NO: 304496 - DNA, 60 bp, Artificial
  Synthetic oligonucleotide
aagggattgctggcgttgattcgttggacgatcttaccaaatgggtgctgaactcagatc

SEQ ID NO: 304497 - DNA, 55 bp, Artificial
  Synthetic oligonucleotide
aagggattggatggcgcctgtgccaagggtgctaccaagcacctggagtgccgat

SEQ ID NO: 304498 - DNA, 55 bp, Artificial
  Synthetic oligonucleotide
aagggattgttcaccaagaggatgctctgaagctttcagaagacgcttgcatgga

SEQ ID NO: 304499 - DNA, 52 bp, Artificial
  Synthetic oligonucleotide
aagggatttctctcgtacgggtacgatctacggaccagctacgggtttgaag

SEQ ID NO: 304500 - DNA, 57 bp, Artificial
  Synthetic oligonucleotide
aagggcaagattccgcagagtgaagggcaatttggaccaagtatcgtcttggaaagc

SEQ ID NO: 304501 - DNA, 55 bp, Artificial
  Synthetic oligonucleotide
aagggcacccctgtggcgtcaatgatactaggcatggaattcgacatacatgctc

SEQ ID NO: 304502 - DNA, 51 bp, Artificial
  Synthetic oligonucleotide
aagggcacgtgcgctgaggaagacgcgctgtgcgcatacgtagccttccgc

SEQ ID NO: 304503 - DNA, 60 bp, Artificial
  Synthetic oligonucleotide
aagggcaggagtgctttgagttcaccattctgaaggacaatagcgcaaggctagattaca

SEQ ID NO: 304504 - DNA, 59 bp, Artificial
  Synthetic oligonucleotide
aagggcattaccatcccacacgatatagatctgggtgactcccgtgtggttattcagga

SEQ ID NO: 304505 - DNA, 55 bp, Artificial
  Synthetic oligonucleotide
aagggccaaaagggtctattgcagatacaagctaatagaagagcttattcaggca

SEQ ID NO: 304506 - DNA, 57 bp, Artificial
  Synthetic oligonucleotide
aagggccagcggtctctcagggaccatatagctccatacctcaccattttaggaaac

SEQ ID NO: 304507 - DNA, 54 bp, Artificial
  Synthetic oligonucleotide
aagggccagctgctgcttctccaacttaaggaaataaggtaggtggcaaaaaaa

SEQ ID NO: 304508 - DNA, 55 bp, Artificial
  Synthetic oligonucleotide
aagggccatcgtttcgacgttctccccgtcggactatggttcggtgttcgctgca

SEQ ID NO: 304509 - DNA, 55 bp, Artificial
  Synthetic oligonucleotide
aagggccctccggggtgtgctcagcacttaacctaagtcaagttcatatgcccac

SEQ ID NO: 304510 - DNA, 57 bp, Artificial
  Synthetic oligonucleotide
aagggccctgttatccagatgtataccaatgtggacaaagacctcgtgggctggccc

SEQ ID NO: 304511 - DNA, 60 bp, Artificial
  Synthetic oligonucleotide
aagggcccttgcgactgcacaagtacagggttacaatgtgcgtgcagtgcaacaaggaaa

SEQ ID NO: 304512 - DNA, 60 bp, Artificial
  Synthetic oligonucleotide
aagggcctccagtgcgtcttccagcagctaataaagacgcagcagggggttcacatagac

SEQ ID NO: 304513 - DNA, 57 bp, Artificial
  Synthetic oligonucleotide
aagggcctgtaattgttgggggatatgtgtgttaaatatgcattgctggtttgtgtt

SEQ ID NO: 304514 - DNA, 55 bp, Artificial
  Synthetic oligonucleotide
aagggcctttgacttacagccaacgataagtgctgcggcgtaagcgtcgttggct

SEQ ID NO: 304515 - DNA, 55 bp, Artificial
  Synthetic oligonucleotide
aagggcgagttgtgtgcagtcttcagagccgaccctgggcgaaatggaccatggc

SEQ ID NO: 304516 - DNA, 59 bp, Artificial
  Synthetic oligonucleotide
aagggcgatctatatattactacaacgagcccagattcgatcgaaactagtactagtgc

SEQ ID NO: 304517 - DNA, 60 bp, Artificial
  Synthetic oligonucleotide
aagggcgcactgttggaggtcaaatgggcatgctcctaacaggatccaacgccaagagta

SEQ ID NO: 304518 - DNA, 57 bp, Artificial
  Synthetic oligonucleotide
aagggcgcggtgtgtaagtctacaccagttaatacaggggattgtccacctcttgca

SEQ ID NO: 304519 - DNA, 51 bp, Artificial
  Synthetic oligonucleotide
aagggcgctccccttgcgaaaagacgcatcgacgggggcaaggtcgaagcg

SEQ ID NO: 304520 - DNA, 54 bp, Artificial
  Synthetic oligonucleotide
aagggcggaagatagttaccctagcaaaggctactacccgccaattgctgcccg

SEQ ID NO: 304521 - DNA, 53 bp, Artificial
  Synthetic oligonucleotide
aagggcggcaggaaccaaccacgacggagtgctcctataaaggcgcgggtcgg

SEQ ID NO: 304522 - DNA, 58 bp, Artificial
  Synthetic oligonucleotide
aagggcgtcttgtgcctgcgtgtgcctacatgacactgggaatgtggccgtttctctt

SEQ ID NO: 304523 - DNA, 55 bp, Artificial
  Synthetic oligonucleotide
aagggcgtgtacggcagtctcatggactcgtacgcctacatgcgaaatgggtggg

SEQ ID NO: 304524 - DNA, 55 bp, Artificial
  Synthetic oligonucleotide
aagggctatggacgtaggatacctttgtgaggatactatcacttatgaatgtccg

SEQ ID NO: 304525 - DNA, 60 bp, Artificial
  Synthetic oligonucleotide
aagggcttatgaggattgctgggcctatcactgcaaaagtgccatccactgagactacag

SEQ ID NO: 304526 - DNA, 54 bp, Artificial
  Synthetic oligonucleotide
aagggcttatgctttccaacacgtgaccgttctacacggaagtgaggcggaaac

SEQ ID NO: 304527 - DNA, 49 bp, Artificial
  Synthetic oligonucleotide
aaggggaaaaatccttcgggtgacccctggtggcaatcccttcccttag

SEQ ID NO: 304528 - DNA, 57 bp, Artificial
  Synthetic oligonucleotide
aaggggaaaatggcaagcactcaggatttagtacggtaatagtgtagtcttctcatc

SEQ ID NO: 304529 - DNA, 54 bp, Artificial
  Synthetic oligonucleotide
aaggggaaaatggtcagcggggtacagcaacgggacaaaatgttccagcaacac

SEQ ID NO: 304530 - DNA, 55 bp, Artificial
  Synthetic oligonucleotide
aaggggaagacgatcaacgagtgggccgatgccggggacattctggccgtcagcc

SEQ ID NO: 304531 - DNA, 60 bp, Artificial
  Synthetic oligonucleotide
aaggggaagccatgcatgggcagatcaattgtagtccaggagtgtggcagttagattgta

SEQ ID NO: 304532 - DNA, 60 bp, Artificial
  Synthetic oligonucleotide
aaggggaaggcgatggattgaaagagcttttacatctgattgatcatatctaggtccagg

SEQ ID NO: 304533 - DNA, 56 bp, Artificial
  Synthetic oligonucleotide
aaggggaagtgacatagcaggaactactagtacccttcaagaacaaataggatgga

SEQ ID NO: 304534 - DNA, 55 bp, Artificial
  Synthetic oligonucleotide
aaggggaatccacagggattcaaagtgaagtgccagttgacgccaattgtgaagg

SEQ ID NO: 304535 - DNA, 60 bp, Artificial
  Synthetic oligonucleotide
aaggggacagccattcaatgtcagcccaactttgcgcatgcgtggtctgagtacttttgg

SEQ ID NO: 304536 - DNA, 57 bp, Artificial
  Synthetic oligonucleotide
aaggggacctcagagtaacattcaattttgggatggattgtgcacgtcttgaaatct

SEQ ID NO: 304537 - DNA, 55 bp, Artificial
  Synthetic oligonucleotide
aaggggaggttaatttagttttggattcatacttcctagagcatttgtatgctta

SEQ ID NO: 304538 - DNA, 60 bp, Artificial
  Synthetic oligonucleotide
aaggggagtgctatagagcatgcttctatgttgagctgatccgtgggaggccaaaggagg

SEQ ID NO: 304539 - DNA, 51 bp, Artificial
  Synthetic oligonucleotide
aaggggagtttacaatgttaggggttcatgataatgtagccatcttaccaa

SEQ ID NO: 304540 - DNA, 54 bp, Artificial
  Synthetic oligonucleotide
aaggggataaacccgaactatcttttggcatggaaacaggtactagcagaacta

SEQ ID NO: 304541 - DNA, 58 bp, Artificial
  Synthetic oligonucleotide
aaggggatagggcgctccaaagtgaaagaaggatagagctcagacatgtaaaggaatg

SEQ ID NO: 304542 - DNA, 57 bp, Artificial
  Synthetic oligonucleotide
aaggggatcacgcaatttaccactgtatcgcacctggtattcccatggttcaaagtc

SEQ ID NO: 304543 - DNA, 60 bp, Artificial
  Synthetic oligonucleotide
aaggggatgactctgttgtgctttgtagtgactaccggcagagtcgtgatgcagctgttt

SEQ ID NO: 304544 - DNA, 56 bp, Artificial
  Synthetic oligonucleotide
aaggggatttggtacctcccaaataaaaacggaattctctgcctgatgcacagtga

SEQ ID NO: 304545 - DNA, 56 bp, Artificial
  Synthetic oligonucleotide
aaggggcattccggcaccggatcatatcaagtatgggacccgaaatttcatactta

SEQ ID NO: 304546 - DNA, 55 bp, Artificial
  Synthetic oligonucleotide
aaggggccgcaatgctggttggtactccaaagatgggaggccctattcttacaac

SEQ ID NO: 304547 - DNA, 50 bp, Artificial
  Synthetic oligonucleotide
aaggggcctcaaaagactgatatgatcacgataagcttctggatgactta

SEQ ID NO: 304548 - DNA, 55 bp, Artificial
  Synthetic oligonucleotide
aaggggctcggtcctaaactagatagtgagctgtacatcgtgaacggcgactgtg

SEQ ID NO: 304549 - DNA, 52 bp, Artificial
  Synthetic oligonucleotide
aagggggaaagtggtcaaatcagtcgagttgaatgctcctaattatcactac

SEQ ID NO: 304550 - DNA, 53 bp, Artificial
  Synthetic oligonucleotide
aagggggaatccactttaaattattgtacctctacaattattgtaagagtgtg

SEQ ID NO: 304551 - DNA, 52 bp, Artificial
  Synthetic oligonucleotide
aagggggagaccaaacgacagctggtactgaagtcctcattcagacaggatg

SEQ ID NO: 304552 - DNA, 50 bp, Artificial
  Synthetic oligonucleotide
aagggggcggggtatgggggcgtatgcttgaaactcaatccccagcgtta

SEQ ID NO: 304553 - DNA, 57 bp, Artificial
  Synthetic oligonucleotide
aaggggtaacatggtcagcattgcattctgtgggggtatcccagggggagtatcaac

SEQ ID NO: 304554 - DNA, 55 bp, Artificial
  Synthetic oligonucleotide
aaggggtaaccaacagctacataaggaggtcctaaatggataagtatgacaagaa

SEQ ID NO: 304555 - DNA, 51 bp, Artificial
  Synthetic oligonucleotide
aaggggtacagcacagtagagggagcactctactcgtacctagagggaaca

SEQ ID NO: 304556 - DNA, 52 bp, Artificial
  Synthetic oligonucleotide
aaggggtacggcattgatgatgttccggaaccaattgatgcccagacccgaa

SEQ ID NO: 304557 - DNA, 55 bp, Artificial
  Synthetic oligonucleotide
aaggggtcaaaggtaggacagggaggcaatccaccaggagatttcggacaactca

SEQ ID NO: 304558 - DNA, 54 bp, Artificial
  Synthetic oligonucleotide
aaggggtcgggacaatggtgatggaattgattcgaatgattaaacgaggaatca

SEQ ID NO: 304559 - DNA, 55 bp, Artificial
  Synthetic oligonucleotide
aaggggtgcaaaccagtacctctatgaacaagcacttctgtttccccggtgacat

SEQ ID NO: 304560 - DNA, 51 bp, Artificial
  Synthetic oligonucleotide
aaggggtggctccaggtagcactgttcttaagcagtggctccctgagggta

SEQ ID NO: 304561 - DNA, 59 bp, Artificial
  Synthetic oligonucleotide
aaggggtgtcatagccttatgccactgagatcttatacaaaagctattttggccgagcg

SEQ ID NO: 304562 - DNA, 55 bp, Artificial
  Synthetic oligonucleotide
aaggggttcgcatttaaagatattacagttgacagtacaggcactgttactggag

SEQ ID NO: 304563 - DNA, 60 bp, Artificial
  Synthetic oligonucleotide
aaggggttggaacaatggtgatggaattgatccggatgatcaagagagggatcaatgata

SEQ ID NO: 304564 - DNA, 56 bp, Artificial
  Synthetic oligonucleotide
aaggggttgttatgatgacttccccgtattttttgtgtgcaatggtccgattgctc

SEQ ID NO: 304565 - DNA, 59 bp, Artificial
  Synthetic oligonucleotide
aagggtaacaggttttaatcaaattgactcagataaggtatatgatgatggtgctcctc

SEQ ID NO: 304566 - DNA, 52 bp, Artificial
  Synthetic oligonucleotide
aagggtaagagaaccttaaatcaggtgaaggccctatttggggatttgaatc

SEQ ID NO: 304567 - DNA, 55 bp, Artificial
  Synthetic oligonucleotide
aagggtaatagattcatgacgtggggtctgactacagcagcgctactatgggccc

SEQ ID NO: 304568 - DNA, 57 bp, Artificial
  Synthetic oligonucleotide
aagggtaatcaaatcacaaccatcttcaatacatgcctaaaagatgaacttaggaaa

SEQ ID NO: 304569 - DNA, 60 bp, Artificial
  Synthetic oligonucleotide
aagggtactctgtggatgagatagggaaacatatctcagaggcgtgggattcattccact

SEQ ID NO: 304570 - DNA, 56 bp, Artificial
  Synthetic oligonucleotide
aagggtagtgatgcggataatgagaagtattgcagtaaggaaggggacgttatact

SEQ ID NO: 304571 - DNA, 53 bp, Artificial
  Synthetic oligonucleotide
aagggtatcgttcgcgccccctgccgtcctgaacccagctaccctactaccag

SEQ ID NO: 304572 - DNA, 52 bp, Artificial
  Synthetic oligonucleotide
aagggtatgatgcatctttgatgtactattctaatgttggtaccaatcaaat

SEQ ID NO: 304573 - DNA, 56 bp, Artificial
  Synthetic oligonucleotide
aagggtatgcttcaagagttatgtgttaaacgtggattggaactgcctgtttacga

SEQ ID NO: 304574 - DNA, 58 bp, Artificial
  Synthetic oligonucleotide
aagggtatggatcccgcgagcacctaggctatgtccctacgagaaagcagggagcgtg

SEQ ID NO: 304575 - DNA, 58 bp, Artificial
  Synthetic oligonucleotide
aagggtattggtggggtcgagtttccccactgcctctctgatgacagcttcttgtatc

SEQ ID NO: 304576 - DNA, 60 bp, Artificial
  Synthetic oligonucleotide
aagggtcagatcacggtgctggacatgcacccaggctctgggaagacccacagagtcctc

SEQ ID NO: 304577 - DNA, 57 bp, Artificial
  Synthetic oligonucleotide
aagggtcagtctctaatcctgaaatacgccgagttgaattaatggtgagaatacgcg

SEQ ID NO: 304578 - DNA, 60 bp, Artificial
  Synthetic oligonucleotide
aagggtcattgcaatgctggagctttcagagtgattacatcacgtgcactgtccgaggta

SEQ ID NO: 304579 - DNA, 54 bp, Artificial
  Synthetic oligonucleotide
aagggtccattgttccccgggatacccaaccacttccccgactcgtgtgcatca

SEQ ID NO: 304580 - DNA, 57 bp, Artificial
  Synthetic oligonucleotide
aagggtcgagtggctgtcctggaaaaggatgctgccgtgacggttgattaccttctc

SEQ ID NO: 304581 - DNA, 52 bp, Artificial
  Synthetic oligonucleotide
aagggtcgggcggtccccttggccgcttattccctcactggcttgtggccct

SEQ ID NO: 304582 - DNA, 60 bp, Artificial
  Synthetic oligonucleotide
aagggtctacatcgctgtctaataggcgattcaattgctgggcatcgttcaaggatcttg

SEQ ID NO: 304583 - DNA, 55 bp, Artificial
  Synthetic oligonucleotide
aagggtgacaacaactatatgtatatgtcagctaaagataagtcgcgcaacgcag

SEQ ID NO: 304584 - DNA, 59 bp, Artificial
  Synthetic oligonucleotide
aagggtgatgattcggtggtcctttgtagtgactaccgacagagccgtaatgcggctgc

SEQ ID NO: 304585 - DNA, 60 bp, Artificial
  Synthetic oligonucleotide
aagggtgcatgaggggtatgaggaattcacaatggttgggcggagagcaacagctatcct

SEQ ID NO: 304586 - DNA, 53 bp, Artificial
  Synthetic oligonucleotide
aagggtgccaatatatactagaagttcctaaggtaacaattggtaccccaata

SEQ ID NO: 304587 - DNA, 54 bp, Artificial
  Synthetic oligonucleotide
aagggtgcccagtgcacccatataatagcaacatctaacgtctcatgttcaata

SEQ ID NO: 304588 - DNA, 55 bp, Artificial
  Synthetic oligonucleotide
aagggtgccgcgaacggtgtcgcaccgctgaattcgtcgacgaaactggcgacgt

SEQ ID NO: 304589 - DNA, 57 bp, Artificial
  Synthetic oligonucleotide
aagggtggaaaaacaagttcgacacacttcatccacacaacaaggatcacatttgtg

SEQ ID NO: 304590 - DNA, 55 bp, Artificial
  Synthetic oligonucleotide
aagggtggaagcgagtgggacgtgaggacactggttgaaccaggagtacaagcag

SEQ ID NO: 304591 - DNA, 55 bp, Artificial
  Synthetic oligonucleotide
aagggtggatcggatgggaagagtatatcctacgggaatccgcgatcccccctca

SEQ ID NO: 304592 - DNA, 54 bp, Artificial
  Synthetic oligonucleotide
aagggtggcccgatacaacagtaccaacgtacaagccaatcttgaccgccttac

SEQ ID NO: 304593 - DNA, 53 bp, Artificial
  Synthetic oligonucleotide
aagggtgggtcagttaatctactgtgggcgggtttagttccaggctgccttaa

SEQ ID NO: 304594 - DNA, 57 bp, Artificial
  Synthetic oligonucleotide
aagggtggttgcacaaggtccagaagaagagtttggtcgctcaataatcaaacacaa

SEQ ID NO: 304595 - DNA, 55 bp, Artificial
  Synthetic oligonucleotide
aagggtgtcaacagaggagcgaatggtggtgtcaagtatgaggagattcgcaagg

SEQ ID NO: 304596 - DNA, 60 bp, Artificial
  Synthetic oligonucleotide
aagggtgtctccaattgagctcctctcaaacttgctgaatgaattggagtattggaagta

SEQ ID NO: 304597 - DNA, 50 bp, Artificial
  Synthetic oligonucleotide
aagggtgtgaatcttatacttaaagtaagccaggttaaccctaacacacc

SEQ ID NO: 304598 - DNA, 60 bp, Artificial
  Synthetic oligonucleotide
aagggtgtgcttagtcggagtgaattttcagcagaactatagcacatgtatcgtatcgga

SEQ ID NO: 304599 - DNA, 54 bp, Artificial
  Synthetic oligonucleotide
aagggtgttatcaagcgcaccctagacgagcggcgtgtgccctcttggtacttc

SEQ ID NO: 304600 - DNA, 58 bp, Artificial
  Synthetic oligonucleotide
aagggtgttgttgtggtaacaagcacaactaccctgacgagctgaacccattctcaga

SEQ ID NO: 304601 - DNA, 54 bp, Artificial
  Synthetic oligonucleotide
aagggttacatttaattttggccttgattgtgctaggttggagattttctggga

SEQ ID NO: 304602 - DNA, 56 bp, Artificial
  Synthetic oligonucleotide
aagggttatgtcttgaacgtcccggggccaggtgcttatagaatacaggatggaca

SEQ ID NO: 304603 - DNA, 53 bp, Artificial
  Synthetic oligonucleotide
aagggttccggtttgaatgcgagcaggtaccgccgagccttcgggttgagtcg

SEQ ID NO: 304604 - DNA, 55 bp, Artificial
  Synthetic oligonucleotide
aagggttccttgcctcaggtcagaaatgggatgaccttcactagctccattgaca

SEQ ID NO: 304605 - DNA, 56 bp, Artificial
  Synthetic oligonucleotide
aagggttcgcttcagcacttgtcccgaaagttgggacgcaagtaggttctgtgata

SEQ ID NO: 304606 - DNA, 54 bp, Artificial
  Synthetic oligonucleotide
aagggttgagctccctaatgggtgtactgtacctaccctggacgatttctggac

SEQ ID NO: 304607 - DNA, 58 bp, Artificial
  Synthetic oligonucleotide
aagggttgccatgttgacccagtttcctgggagggcatgtcctttgggcaatgcagta

SEQ ID NO: 304608 - DNA, 56 bp, Artificial
  Synthetic oligonucleotide
aagggttgtgaagggccttgtaaagtccagtcatacgagtctcgtcatgacgtttc

SEQ ID NO: 304609 - DNA, 54 bp, Artificial
  Synthetic oligonucleotide
aagggttgtgcgttgcgtcactgtcggctgcatcttctaggccaaggtcttgac

SEQ ID NO: 304610 - DNA, 57 bp, Artificial
  Synthetic oligonucleotide
aagggtttgagccatactgtatgaaaagttcctcaaatagcaactgtccgaaataca

SEQ ID NO: 304611 - DNA, 52 bp, Artificial
  Synthetic oligonucleotide
aagggttttcgtttagatatggcaatggtgtttggataggaagaactaaaag

SEQ ID NO: 304612 - DNA, 56 bp, Artificial
  Synthetic oligonucleotide
aaggtaaaatggggcaagatgccagattcttttgtccaactggttctgtagtgact

SEQ ID NO: 304613 - DNA, 55 bp, Artificial
  Synthetic oligonucleotide
aaggtaaacgtcgttgggtgtactcaaagcttgatgacacaatatgttcctcaac

SEQ ID NO: 304614 - DNA, 59 bp, Artificial
  Synthetic oligonucleotide
aaggtaaatgaaaatatgtactctctccaaaacgttatatcacaacagcagagccagat

SEQ ID NO: 304615 - DNA, 55 bp, Artificial
  Synthetic oligonucleotide
aaggtaaattgaagggatcttttagtggtgcaatggcaactttccatgttaacaa

SEQ ID NO: 304616 - DNA, 60 bp, Artificial
  Synthetic oligonucleotide
aaggtaacccagatgttactttacactttgagcagcccacaatacataatgcacctgatc

SEQ ID NO: 304617 - DNA, 57 bp, Artificial
  Synthetic oligonucleotide
aaggtaaccgatgagataagaaatgaaatcgcgctttactatacgcttgactatgaa

SEQ ID NO: 304618 - DNA, 60 bp, Artificial
  Synthetic oligonucleotide
aaggtaagaatcatattgtactagctacacacgcagggatatggacaggaacagtattaa

SEQ ID NO: 304619 - DNA, 53 bp, Artificial
  Synthetic oligonucleotide
aaggtaatcaggccatccacaagcaaacaccggacgactgcgataattgttca

SEQ ID NO: 304620 - DNA, 56 bp, Artificial
  Synthetic oligonucleotide
aaggtaatctagcaagatactacagatcaataagtaaagaaggaggttacttttca

SEQ ID NO: 304621 - DNA, 55 bp, Artificial
  Synthetic oligonucleotide
aaggtaatgtgtatttccgatgttacgcgtggagtcggtttgacccatcgtatag

SEQ ID NO: 304622 - DNA, 50 bp, Artificial
  Synthetic oligonucleotide
aaggtaattacggagttagccatatggcaactttacgcagtttcgtactc

SEQ ID NO: 304623 - DNA, 51 bp, Artificial
  Synthetic oligonucleotide
aaggtacaaacaatggggacgatagtgaggagggacggagcgcatgcgggt

SEQ ID NO: 304624 - DNA, 59 bp, Artificial
  Synthetic oligonucleotide
aaggtacaatcgtttgtgtcgacacctgatgttgtccatattggtaaggtgatgtgtat

SEQ ID NO: 304625 - DNA, 54 bp, Artificial
  Synthetic oligonucleotide
aaggtacagtcgtttgaatctcgacatgatttcgtttcctttggtaaggtaatg

SEQ ID NO: 304626 - DNA, 58 bp, Artificial
  Synthetic oligonucleotide
aaggtaccacactaaggggtcgacatgcaaatgggactatacatgacagaagcccatt

SEQ ID NO: 304627 - DNA, 55 bp, Artificial
  Synthetic oligonucleotide
aaggtaccacgcaggtagggccgctgttcgaaggcccacatgtcgcagacgcaca

SEQ ID NO: 304628 - DNA, 58 bp, Artificial
  Synthetic oligonucleotide
aaggtaccgtcactgcggactccaacggtctgcatgtcgtggacgacgtgcgtaacta

SEQ ID NO: 304629 - DNA, 60 bp, Artificial
  Synthetic oligonucleotide
aaggtacctcaatgaggaaggtctgagcatgcccggcttatacatgctatgtaagaacat

SEQ ID NO: 304630 - DNA, 53 bp, Artificial
  Synthetic oligonucleotide
aaggtactacgtcgtacattaaatcgggatggtgcggttggtctagctttact

SEQ ID NO: 304631 - DNA, 54 bp, Artificial
  Synthetic oligonucleotide
aaggtactagttgtataaagaacgtttctaacgttagctatatgactgataccg

SEQ ID NO: 304632 - DNA, 50 bp, Artificial
  Synthetic oligonucleotide
aaggtagaattaaagtctggacaagatggaccacgagtaaaacaatggcc

SEQ ID NO: 304633 - DNA, 59 bp, Artificial
  Synthetic oligonucleotide
aaggtagattatagaataggagtaggagccctgataatagcagtaatcttagctatagt

SEQ ID NO: 304634 - DNA, 56 bp, Artificial
  Synthetic oligonucleotide
aaggtagccctcgactatcatttcgtggctactgcaggtgcctgcaagtattcaag

SEQ ID NO: 304635 - DNA, 53 bp, Artificial
  Synthetic oligonucleotide
aaggtagggtttaagaatatatatgattggacctttctaccaacagattttac

SEQ ID NO: 304636 - DNA, 51 bp, Artificial
  Synthetic oligonucleotide
aaggtagtaggaggtataggaggagggattcatgtcaaagaatatcagggg

SEQ ID NO: 304637 - DNA, 52 bp, Artificial
  Synthetic oligonucleotide
aaggtagtcttgatgtggattcgcagagaatgctcggaccatgatagcgcga

SEQ ID NO: 304638 - DNA, 56 bp, Artificial
  Synthetic oligonucleotide
aaggtagttaagcataaaggcatggagacaaagtgctataacgaagtattggatat

SEQ ID NO: 304639 - DNA, 60 bp, Artificial
  Synthetic oligonucleotide
aaggtagttgctgtgtgtaacgtcatcgagccagacaaggtcagactctgcctgttctcg

SEQ ID NO: 304640 - DNA, 57 bp, Artificial
  Synthetic oligonucleotide
aaggtatcactctcaagggcgagtttctacagccctaaatgtaccataacctggtga

SEQ ID NO: 304641 - DNA, 60 bp, Artificial
  Synthetic oligonucleotide
aaggtatgtcacctgaggacaaatgtcaggctttaactacacatctactccagactgtcg

SEQ ID NO: 304642 - DNA, 53 bp, Artificial
  Synthetic oligonucleotide
aaggtatgttaatgttcaaggctttgccaccacacaaatttaacaaagcagtg

SEQ ID NO: 304643 - DNA, 54 bp, Artificial
  Synthetic oligonucleotide
aaggtattaatgttagtgctagtcttgattcatgcgtatcaatttcaactaacc

SEQ ID NO: 304644 - DNA, 55 bp, Artificial
  Synthetic oligonucleotide
aaggtattacgttcagacaacgagaacgttcgtgctttaggttatgacctcgtgc

SEQ ID NO: 304645 - DNA, 51 bp, Artificial
  Synthetic oligonucleotide
aaggtatttgccgtgtttgtctttatttaagtagaagggttattgggggca

SEQ ID NO: 304646 - DNA, 58 bp, Artificial
  Synthetic oligonucleotide
aaggtattttgaatggctgagatcaaaataggaatttcaccttcatctgaccgttcga

SEQ ID NO: 304647 - DNA, 54 bp, Artificial
  Synthetic oligonucleotide
aaggtcaagcgatccgccctcgatttcctttcaatgaatgggtctaaaataacc

SEQ ID NO: 304648 - DNA, 60 bp, Artificial
  Synthetic oligonucleotide
aaggtcaatgggcactcaatccacaagatagagtcccatttcaacacttcatggatgtca

SEQ ID NO: 304649 - DNA, 58 bp, Artificial
  Synthetic oligonucleotide
aaggtcaatggggatgagctgtcgaggtttcacatcccgtatgtagccggtaacagtg

SEQ ID NO: 304650 - DNA, 56 bp, Artificial
  Synthetic oligonucleotide
aaggtcacagaagggcgggtggtgtgtcagaacgaaaggagcatccgtaaccctga

SEQ ID NO: 304651 - DNA, 60 bp, Artificial
  Synthetic oligonucleotide
aaggtcactatagagtcgttaaatattcatcagttgctaatcatgcagatagagtcttcg

SEQ ID NO: 304652 - DNA, 59 bp, Artificial
  Synthetic oligonucleotide
aaggtcagattctgagttattaatgggatttgttgcttcaattctttgatgttgacgcc

SEQ ID NO: 304653 - DNA, 59 bp, Artificial
  Synthetic oligonucleotide
aaggtcagccaaaattaccctatagtgcaaaatgcacaagggcaaatggtacatcagcc

SEQ ID NO: 304654 - DNA, 57 bp, Artificial
  Synthetic oligonucleotide
aaggtcatcgataccctaacgtgcggcttcgccgacctcatggggtacataccgctc

SEQ ID NO: 304655 - DNA, 55 bp, Artificial
  Synthetic oligonucleotide
aaggtcatcgataccctcacgtgtggttttgccgacctcatggggtacatacccg

SEQ ID NO: 304656 - DNA, 58 bp, Artificial
  Synthetic oligonucleotide
aaggtcatcgtgtcccagtactgcgacgccggtagcgtgaaaacggggcagctgccgc

SEQ ID NO: 304657 - DNA, 51 bp, Artificial
  Synthetic oligonucleotide
aaggtcatgctaccacatgagcgtggcgtctacaagttctgcgaattggac

SEQ ID NO: 304658 - DNA, 57 bp, Artificial
  Synthetic oligonucleotide
aaggtcattagctgctaatttaaactctgttatatgtactgggggtgattatagctt

SEQ ID NO: 304659 - DNA, 53 bp, Artificial
  Synthetic oligonucleotide
aaggtcatttgaacaaacaacatgacgtcatggtctcattttaagcaaaaccc

SEQ ID NO: 304660 - DNA, 57 bp, Artificial
  Synthetic oligonucleotide
aaggtccaggtgtccacacaggtaattgtgtgggcctaaagatctggcccacatcgt

SEQ ID NO: 304661 - DNA, 60 bp, Artificial
  Synthetic oligonucleotide
aaggtccagtcgtatgagcaacgccacgacatctctcatgtgggaaaggtcatgtgcatc

SEQ ID NO: 304662 - DNA, 60 bp, Artificial
  Synthetic oligonucleotide
aaggtccatgtaaggtacagtcatttgaacagcgtcatgatatagcccatgtgggtaagg

SEQ ID NO: 304663 - DNA, 51 bp, Artificial
  Synthetic oligonucleotide
aaggtccatgtataaaatccgggtcccagtaccaaccagttggagggggtg

SEQ ID NO: 304664 - DNA, 53 bp, Artificial
  Synthetic oligonucleotide
aaggtccgggtctcgtagaggtacaggagagcggatattaccctaagaggtac

SEQ ID NO: 304665 - DNA, 60 bp, Artificial
  Synthetic oligonucleotide
aaggtcctttagtgcgcttaactggcattggagcagtagcagcaacccacaatgccgtgc

SEQ ID NO: 304666 - DNA, 60 bp, Artificial
  Synthetic oligonucleotide
aaggtcgatcatgctgatgggctgaagtatatacccatggatgagagatactctccatca

SEQ ID NO: 304667 - DNA, 52 bp, Artificial
  Synthetic oligonucleotide
aaggtcgattcgaagtcgtcttctatgtgctcatattcctgggcgtctacac

SEQ ID NO: 304668 - DNA, 55 bp, Artificial
  Synthetic oligonucleotide
aaggtcgcagtcgggaagcgtaggctcatctggggctgcgatgttggcgtcagca

SEQ ID NO: 304669 - DNA, 55 bp, Artificial
  Synthetic oligonucleotide
aaggtcggagtttcccaacgcttggggtatgacggatttctgtcatactacagtg

SEQ ID NO: 304670 - DNA, 56 bp, Artificial
  Synthetic oligonucleotide
aaggtcgtttgatcttaacgcgagctttactgtcggctcgttgccttgtacacctg

SEQ ID NO: 304671 - DNA, 56 bp, Artificial
  Synthetic oligonucleotide
aaggtctacatccgaaatgttttggatgtaaaggactccgagatcatccggagtcg

SEQ ID NO: 304672 - DNA, 60 bp, Artificial
  Synthetic oligonucleotide
aaggtctattataaaggccagactacacacgagagttctagtgctgttaatatgcagcaa

SEQ ID NO: 304673 - DNA, 55 bp, Artificial
  Synthetic oligonucleotide
aaggtctcacgtcagaaaccggcgagcgaggggttacaaaagtcccagcgagaga

SEQ ID NO: 304674 - DNA, 58 bp, Artificial
  Synthetic oligonucleotide
aaggtctccacaaagaactgctggatctgtagcttatacaaaagagagttggcggaag

SEQ ID NO: 304675 - DNA, 50 bp, Artificial
  Synthetic oligonucleotide
aaggtctcccttctgggttcccgtgcacttcccaagttaattctattaac

SEQ ID NO: 304676 - DNA, 58 bp, Artificial
  Synthetic oligonucleotide
aaggtctctcaaaagacctacattccctaacagacctagcaggtgtcggagccgctca

SEQ ID NO: 304677 - DNA, 57 bp, Artificial
  Synthetic oligonucleotide
aaggtctctgaacttaaaatttacccactctggcataaaactgttgtcataatcaca

SEQ ID NO: 304678 - DNA, 60 bp, Artificial
  Synthetic oligonucleotide
aaggtctctttacctttgccacgtgtagccacagatgcaacattaacacatggcgcaata

SEQ ID NO: 304679 - DNA, 58 bp, Artificial
  Synthetic oligonucleotide
aaggtctgggcatgaatcccaccctagaagagatgttaacagcatgtcaaggggttgg

SEQ ID NO: 304680 - DNA, 55 bp, Artificial
  Synthetic oligonucleotide
aaggtcttctcattgagcccggatgtgcaagtgaccataccttataggagattca

SEQ ID NO: 304681 - DNA, 60 bp, Artificial
  Synthetic oligonucleotide
aaggtcttctggttcatagactgacacatcatactctttcataaggactgagacatcaga

SEQ ID NO: 304682 - DNA, 57 bp, Artificial
  Synthetic oligonucleotide
aaggtcttgattgtgatactactttttgccggcgtcgacggggagactcatgtgacg

SEQ ID NO: 304683 - DNA, 53 bp, Artificial
  Synthetic oligonucleotide
aaggtcttggttagggacttgtacgtagtggtaagtgatttaccacgagtaca

SEQ ID NO: 304684 - DNA, 59 bp, Artificial
  Synthetic oligonucleotide
aaggtcttgttaacgacttacaagagtatctatcagagcactattctgctccacgtggg

SEQ ID NO: 304685 - DNA, 58 bp, Artificial
  Synthetic oligonucleotide
aaggtgaagccaacaaataagtttgtcgttgcattatattcactgtcgaatgaaaata

SEQ ID NO: 304686 - DNA, 55 bp, Artificial
  Synthetic oligonucleotide
aaggtgaagtatgtggggagtcacaaatacgtcgtcgaagggaagacatacaccg

SEQ ID NO: 304687 - DNA, 60 bp, Artificial
  Synthetic oligonucleotide
aaggtgacactgatactggtactcaatcactggtgacaggctaaggatgcccttcaggta

SEQ ID NO: 304688 - DNA, 60 bp, Artificial
  Synthetic oligonucleotide
aaggtgactttatctatgatgcaacaagacctacagcagagcaaatagccgaattaaaac

SEQ ID NO: 304689 - DNA, 55 bp, Artificial
  Synthetic oligonucleotide
aaggtgagtacactgccattgggaagcttattgtgtattgttataacagactgac

SEQ ID NO: 304690 - DNA, 55 bp, Artificial
  Synthetic oligonucleotide
aaggtgatagctctggagcattagcatggaacgcagatgtaattaatactcgcgg

SEQ ID NO: 304691 - DNA, 59 bp, Artificial
  Synthetic oligonucleotide
aaggtgatatactttcttcatgaaaggtaacttcataataacgtcagcaacgacatcag

SEQ ID NO: 304692 - DNA, 54 bp, Artificial
  Synthetic oligonucleotide
aaggtgatgaccaacgtgatagattctatttcctctgtgatggagtttgttata

SEQ ID NO: 304693 - DNA, 58 bp, Artificial
  Synthetic oligonucleotide
aaggtgatgtgtatatccgatattactcgtggtaatggtattacccatcgtgtgggta

SEQ ID NO: 304694 - DNA, 59 bp, Artificial
  Synthetic oligonucleotide
aaggtgattatgcacgagttctgcccagatttttggaatacacggctcccactgtgaat

SEQ ID NO: 304695 - DNA, 55 bp, Artificial
  Synthetic oligonucleotide
aaggtgcaacaaactttgaccttctcaagttggctggagacgtcgaatccaaccc

SEQ ID NO: 304696 - DNA, 59 bp, Artificial
  Synthetic oligonucleotide
aaggtgcaccctcaccctttggcatcatggaggcatgtgggaaccatgtgaatgaacct

SEQ ID NO: 304697 - DNA, 60 bp, Artificial
  Synthetic oligonucleotide
aaggtgcactcaatcttcgtgttgtgaatgaccacgtgtcaactatcagctgtgcaatac

SEQ ID NO: 304698 - DNA, 60 bp, Artificial
  Synthetic oligonucleotide
aaggtgcagcctatcgtccaatcgatgttgacaattacgcaatgaatagtaatcatctag

SEQ ID NO: 304699 - DNA, 60 bp, Artificial
  Synthetic oligonucleotide
aaggtgccaaatgcattgaccgacgataggtcaaagcccactcaaggtcagacaatcgta

SEQ ID NO: 304700 - DNA, 54 bp, Artificial
  Synthetic oligonucleotide
aaggtgcctgatgagttgttcacagctataagtaatgttacatatgagatggtt

SEQ ID NO: 304701 - DNA, 56 bp, Artificial
  Synthetic oligonucleotide
aaggtgcggggctacgccttatgattttgtcgactttcgcgtgttgacaacttcat

SEQ ID NO: 304702 - DNA, 56 bp, Artificial
  Synthetic oligonucleotide
aaggtgcggtttgtgcgagactctagtgcggatagtgggaaagtcgttgactacgg

SEQ ID NO: 304703 - DNA, 58 bp, Artificial
  Synthetic oligonucleotide
aaggtgcgtattctggcggccccaagcaagtactcaagagacctgttctccgcacggc

SEQ ID NO: 304704 - DNA, 57 bp, Artificial
  Synthetic oligonucleotide
aaggtgctagacataccaattgtcccgcaacatttattgaccagtacgaatataacg

SEQ ID NO: 304705 - DNA, 53 bp, Artificial
  Synthetic oligonucleotide
aaggtgctattgttgaaggtcggattagagcagctgtaacggtgagtaacaag

SEQ ID NO: 304706 - DNA, 55 bp, Artificial
  Synthetic oligonucleotide
aaggtgctcaggacacccgatgtgccgtatggttgtgaagggccttgtaaggtcc

SEQ ID NO: 304707 - DNA, 56 bp, Artificial
  Synthetic oligonucleotide
aaggtgctgggcgctcccagccgggtggacggacgctctttgcacccccattacaa

SEQ ID NO: 304708 - DNA, 57 bp, Artificial
  Synthetic oligonucleotide
aaggtgctttgcaccaagctttagccggagcgatccctgttgagttctcaagtaaca

SEQ ID NO: 304709 - DNA, 58 bp, Artificial
  Synthetic oligonucleotide
aaggtggacgtatatggagcagccgcagttaagatcaattcgtctacggcgagttacc

SEQ ID NO: 304710 - DNA, 60 bp, Artificial
  Synthetic oligonucleotide
aaggtggagctggatgccctagctgatgagcgggttgagtctcaggctaatgctcacgtg

SEQ ID NO: 304711 - DNA, 60 bp, Artificial
  Synthetic oligonucleotide
aaggtggatgcctagtggcgttggggtgcacagtttgtactgaccgatgctggccactgt

SEQ ID NO: 304712 - DNA, 60 bp, Artificial
  Synthetic oligonucleotide
aaggtggcacttgctgtacgttaagaaaatgttccttgatcttacctcgaagcatgctgc

SEQ ID NO: 304713 - DNA, 54 bp, Artificial
  Synthetic oligonucleotide
aaggtggcagttactaccctagtagatttcaatcaggggtaatgaagggtgttg

SEQ ID NO: 304714 - DNA, 59 bp, Artificial
  Synthetic oligonucleotide
aaggtggccgcaagccagctcgccttatcgtgttcccagatctgggggttcgtgtgtgc

SEQ ID NO: 304715 - DNA, 56 bp, Artificial
  Synthetic oligonucleotide
aaggtggctaatttaatttgtgaagcacttaattcaattaaagttactcaatctga

SEQ ID NO: 304716 - DNA, 60 bp, Artificial
  Synthetic oligonucleotide
aaggtggctatatggtggaggacgtggacttagctgtaacatgtggatcagaccacgatg

SEQ ID NO: 304717 - DNA, 60 bp, Artificial
  Synthetic oligonucleotide
aaggtgggcattctggctcactgtttaaatgctgccatgatactgattgcactgaggagg

SEQ ID NO: 304718 - DNA, 60 bp, Artificial
  Synthetic oligonucleotide
aaggtgggtggggttgttacaacctgagtgactggcaccagggcactcatgtctgccaca

SEQ ID NO: 304719 - DNA, 55 bp, Artificial
  Synthetic oligonucleotide
aaggtggtacggtcatggtatgatcgcgccttattaggaaggcaacagacgggtc

SEQ ID NO: 304720 - DNA, 53 bp, Artificial
  Synthetic oligonucleotide
aaggtggtcaaggtctccgctattccattccgagctcctttctttcccaccgg

SEQ ID NO: 304721 - DNA, 58 bp, Artificial
  Synthetic oligonucleotide
aaggtggtcagcactgatgaatatgtgcaacgcaccaactacttttaccatgccagca

SEQ ID NO: 304722 - DNA, 54 bp, Artificial
  Synthetic oligonucleotide
aaggtggtccctcccattgaggtaaagactctggtgagtcctcaacgttactcg

SEQ ID NO: 304723 - DNA, 53 bp, Artificial
  Synthetic oligonucleotide
aaggtggtgttctatttactcagagcactgacacggtgaatcgtgagtcattt

SEQ ID NO: 304724 - DNA, 53 bp, Artificial
  Synthetic oligonucleotide
aaggtggttccagtcagtgataaacggaacgccgtccgactcatacgggcacg

SEQ ID NO: 304725 - DNA, 53 bp, Artificial
  Synthetic oligonucleotide
aaggtgtagtgtgtggcaccaataggtaccggttccattggggtacgcaaaac

SEQ ID NO: 304726 - DNA, 55 bp, Artificial
  Synthetic oligonucleotide
aaggtgtatgcagggtcattgtttgagtcggactgcgactggctggttaatgcgt

SEQ ID NO: 304727 - DNA, 53 bp, Artificial
  Synthetic oligonucleotide
aaggtgtccgcctttcaatatagagtgtttagggtgcggttgcccgacccaaa

SEQ ID NO: 304728 - DNA, 60 bp, Artificial
  Synthetic oligonucleotide
aaggtgtccggagcgccatctgtggaagaattgtgtgcaaatcacaaggagtacacgcgc

SEQ ID NO: 304729 - DNA, 60 bp, Artificial
  Synthetic oligonucleotide
aaggtgtcgagccacccaatattcaagcagatctcaatcccttcacagaagtccgtgttg

SEQ ID NO: 304730 - DNA, 53 bp, Artificial
  Synthetic oligonucleotide
aaggtgtcgtatcttacgtacccggcgaagtctaggtcggagttcagcaaccg

SEQ ID NO: 304731 - DNA, 55 bp, Artificial
  Synthetic oligonucleotide
aaggtgtgaaatcttctctatagttgtatcaaaaaaagatggagatttcccctta

SEQ ID NO: 304732 - DNA, 55 bp, Artificial
  Synthetic oligonucleotide
aaggtgtgagcatggtgtcatcggtattgttactatgggaggtgagggagtcgtg

SEQ ID NO: 304733 - DNA, 55 bp, Artificial
  Synthetic oligonucleotide
aaggtgttccgaccctagtgccctcagacgaaaagaggaggttgtacatgggcac

SEQ ID NO: 304734 - DNA, 55 bp, Artificial
  Synthetic oligonucleotide
aaggtgttgacggcttgccgacggcattagacacagttgcctctactactgaaaa

SEQ ID NO: 304735 - DNA, 58 bp, Artificial
  Synthetic oligonucleotide
aaggtgttgctggccgtcgtaggatccatgtatctcctccaagaaagccttctgcggg

SEQ ID NO: 304736 - DNA, 58 bp, Artificial
  Synthetic oligonucleotide
aaggtgttggtagacaacatagtggacgacttgcgagattattggacgacgctaggga

SEQ ID NO: 304737 - DNA, 55 bp, Artificial
  Synthetic oligonucleotide
aaggttaagcagttctagggctatatacctagagaatttacaggtattggagaag

SEQ ID NO: 304738 - DNA, 60 bp, Artificial
  Synthetic oligonucleotide
aaggttaattgtcagtgagtcctcaacatcagttattcgccaaggagcaatgatctcact

SEQ ID NO: 304739 - DNA, 52 bp, Artificial
  Synthetic oligonucleotide
aaggttacacccagtacgagacaagagtggtaccaaatggttcacggaaact

SEQ ID NO: 304740 - DNA, 52 bp, Artificial
  Synthetic oligonucleotide
aaggttacactaaatggtgcagacaaggcactattaccattagtacctatta

SEQ ID NO: 304741 - DNA, 60 bp, Artificial
  Synthetic oligonucleotide
aaggttacagagtatctcacaaacatcaatgttctatactgttatgaatgttcaatgtat

SEQ ID NO: 304742 - DNA, 60 bp, Artificial
  Synthetic oligonucleotide
aaggttacagtactgactatgttatcatgtgtgtgatagtgagtgtatctttaggtttcg

SEQ ID NO: 304743 - DNA, 54 bp, Artificial
  Synthetic oligonucleotide
aaggttaggtacgtgacccggcgcgtcgctgaaatttatgcggcgcggttggcg

SEQ ID NO: 304744 - DNA, 52 bp, Artificial
  Synthetic oligonucleotide
aaggttatatggtcagagaacgacgatgtggatctagcactgatgttagggc

SEQ ID NO: 304745 - DNA, 55 bp, Artificial
  Synthetic oligonucleotide
aaggttatatgtttgtccgatgttacgaggggaaatggtttgactcatcgagttg

SEQ ID NO: 304746 - DNA, 55 bp, Artificial
  Synthetic oligonucleotide
aaggttatcaacgatgatggctcgactgacggaaccatcccatcctgggaccaga

SEQ ID NO: 304747 - DNA, 55 bp, Artificial
  Synthetic oligonucleotide
aaggttatgaagatattcgcatctttactcggtaaggaggtagtggatgaggagg

SEQ ID NO: 304748 - DNA, 58 bp, Artificial
  Synthetic oligonucleotide
aaggttatgacaatgaagcgtttgaggggtcggatgttgaccctgctgaggaagctac

SEQ ID NO: 304749 - DNA, 58 bp, Artificial
  Synthetic oligonucleotide
aaggttatgtgtctatctgatgttacgcgtggagttggtttgacccatcgagtaggga

SEQ ID NO: 304750 - DNA, 58 bp, Artificial
  Synthetic oligonucleotide
aaggttcaatcgtttgaacaacgtcatgacgtgtctcatgttggcaaggttatttgta

SEQ ID NO: 304751 - DNA, 54 bp, Artificial
  Synthetic oligonucleotide
aaggttcactggttttcaggaccaggtccagacggttgaaactgaggaagagtc

SEQ ID NO: 304752 - DNA, 55 bp, Artificial
  Synthetic oligonucleotide
aaggttcagtcattgtgcacaactgtgcactgcccaaaacagagcataagcacca

SEQ ID NO: 304753 - DNA, 55 bp, Artificial
  Synthetic oligonucleotide
aaggttccgacaagaggtgatccactgagggtttgcggagaaaccacctccagaa

SEQ ID NO: 304754 - DNA, 57 bp, Artificial
  Synthetic oligonucleotide
aaggttcctctggtggccctgtcatgtgtccttcggggcatgttgcggggatcttta

SEQ ID NO: 304755 - DNA, 55 bp, Artificial
  Synthetic oligonucleotide
aaggttcctgggcttgagacgcagcgtgggtactgcggcctcccgtatgtcaaca

SEQ ID NO: 304756 - DNA, 60 bp, Artificial
  Synthetic oligonucleotide
aaggttcgtcgaccccataacagggcacactatggatgagagcccacgtgttgatatcag

SEQ ID NO: 304757 - DNA, 50 bp, Artificial
  Synthetic oligonucleotide
aaggttctctttcagtgagaagttcacagagttcaaggccaactctggct

SEQ ID NO: 304758 - DNA, 57 bp, Artificial
  Synthetic oligonucleotide
aaggttgaactagtagtgacaaacttccgagagaaactaatagcagcttcaaggcat

SEQ ID NO: 304759 - DNA, 53 bp, Artificial
  Synthetic oligonucleotide
aaggttgaattcctagaggcaaatataactcaaatgttggaggaagcacgact

SEQ ID NO: 304760 - DNA, 57 bp, Artificial
  Synthetic oligonucleotide
aaggttgacgggcattcttaattatgttgctccttttaccaaatgtggttatgctgc

SEQ ID NO: 304761 - DNA, 52 bp, Artificial
  Synthetic oligonucleotide
aaggttgacgttctgtcgaagggtagttgcgctggtgcgatatcaatttaca

SEQ ID NO: 304762 - DNA, 55 bp, Artificial
  Synthetic oligonucleotide
aaggttgatggatgtaggatgagtggggacgtgaacactgctatgggtaactgtc

SEQ ID NO: 304763 - DNA, 60 bp, Artificial
  Synthetic oligonucleotide
aaggttgattcactgctgatagcacagataactacgacgttggtggtttggactgaactg

SEQ ID NO: 304764 - DNA, 55 bp, Artificial
  Synthetic oligonucleotide
aaggttgcattcttaactgcccaggcttttaatgcggaattcttttcttcgtcca

SEQ ID NO: 304765 - DNA, 53 bp, Artificial
  Synthetic oligonucleotide
aaggttgcattttttactgcccaattctttaatgcggaattcttttcttcgtc

SEQ ID NO: 304766 - DNA, 59 bp, Artificial
  Synthetic oligonucleotide
aaggttgcgcagcgtttcgctccgcacaaccccagtgtagatcaggtcgatgagtcacc

SEQ ID NO: 304767 - DNA, 57 bp, Artificial
  Synthetic oligonucleotide
aaggttggagagcttgacagaactaagaggggcattcatattaaggattatcaaagg

SEQ ID NO: 304768 - DNA, 52 bp, Artificial
  Synthetic oligonucleotide
aaggttggatccaagacggtggactcccgttacaactacgtagtgggaaaga

SEQ ID NO: 304769 - DNA, 53 bp, Artificial
  Synthetic oligonucleotide
aaggttgggtcgtccaccgctgatacgcggtataactacgtagtagggaagaa

SEQ ID NO: 304770 - DNA, 55 bp, Artificial
  Synthetic oligonucleotide
aaggttgtaatacgctatccggccaatgcattcacggggttaacgtgggttatga

SEQ ID NO: 304771 - DNA, 60 bp, Artificial
  Synthetic oligonucleotide
aaggttgtgaagaagcaagtaagttgatgagagaaagtgtgctacattgttcaaagactg

SEQ ID NO: 304772 - DNA, 50 bp, Artificial
  Synthetic oligonucleotide
aaggttgttttgggtcaaggtgttctcggttctgtaagctttaccgcccc

SEQ ID NO: 304773 - DNA, 54 bp, Artificial
  Synthetic oligonucleotide
aaggtttaagcgggttatggctattatacttaaaatagatccgaagaagatgga

SEQ ID NO: 304774 - DNA, 60 bp, Artificial
  Synthetic oligonucleotide
aaggtttatcttcagctttacatgatgtgatccctgcatatagttctacttatggatggt

SEQ ID NO: 304775 - DNA, 59 bp, Artificial
  Synthetic oligonucleotide
aaggtttcacaacagtcagcacaatctctagtacacaatggtcagaagaggtaagttta

SEQ ID NO: 304776 - DNA, 51 bp, Artificial
  Synthetic oligonucleotide
aaggtttccaaagagcagagcaatgagatagtccactactctgacccaggc

SEQ ID NO: 304777 - DNA, 57 bp, Artificial
  Synthetic oligonucleotide
aaggtttccaactactacgctagcgatgtcacgctttacacagggctagaagtagaa

SEQ ID NO: 304778 - DNA, 55 bp, Artificial
  Synthetic oligonucleotide
aaggtttctattacacgaacatgttagaggccccaccagaaatagatcgtgtagt

SEQ ID NO: 304779 - DNA, 56 bp, Artificial
  Synthetic oligonucleotide
aaggtttgatagtgaaataacaatagtccctacaattaggctatacacgtctactg

SEQ ID NO: 304780 - DNA, 52 bp, Artificial
  Synthetic oligonucleotide
aaggtttgccccaagcctttgggagttgtcccttttcaataaagttcagcaa

SEQ ID NO: 304781 - DNA, 50 bp, Artificial
  Synthetic oligonucleotide
aaggttttcaataccaatcgagcgagcgttcatgtctccgttaccagcgt

SEQ ID NO: 304782 - DNA, 52 bp, Artificial
  Synthetic oligonucleotide
aagtaaaacaatggatgacagacaagctcttaatacagaatgctaatccgga

SEQ ID NO: 304783 - DNA, 56 bp, Artificial
  Synthetic oligonucleotide
aagtaaacgagatgacgagatcaagttaacggttaactcacgcactcggagtaaga

SEQ ID NO: 304784 - DNA, 53 bp, Artificial
  Synthetic oligonucleotide
aagtaaagaatttgatggaactggcagagattgacacaatgatccccatggat

SEQ ID NO: 304785 - DNA, 53 bp, Artificial
  Synthetic oligonucleotide
aagtaaagaatttgtccctttgttcacagcgcacgcgggggaaccagtcaact

SEQ ID NO: 304786 - DNA, 54 bp, Artificial
  Synthetic oligonucleotide
aagtaaagagagcaacggggctagccggcaggtgttccacctcccgacagggga

SEQ ID NO: 304787 - DNA, 54 bp, Artificial
  Synthetic oligonucleotide
aagtaaagcaactgtgtaaacccctcaggggaaccaaagcactaacagacatag

SEQ ID NO: 304788 - DNA, 57 bp, Artificial
  Synthetic oligonucleotide
aagtaaatactgcaggcataatgatgcagaaaggcaactttaaaggccccagaaaaa

SEQ ID NO: 304789 - DNA, 54 bp, Artificial
  Synthetic oligonucleotide
aagtaaattctttgtgggcttggtctggtgtttattattggttatggagctaat

SEQ ID NO: 304790 - DNA, 50 bp, Artificial
  Synthetic oligonucleotide
aagtaacaaatccaactgtaatgatgcagaaaagtaactttaagggccaa

SEQ ID NO: 304791 - DNA, 60 bp, Artificial
  Synthetic oligonucleotide
aagtaacaagctcatcaaaatgtcaacattagtttgccaagcagttgcagcaccggtttg

SEQ ID NO: 304792 - DNA, 55 bp, Artificial
  Synthetic oligonucleotide
aagtaacaccaagtaaggggacaatccggcgactagttctccaaccctggcagca

SEQ ID NO: 304793 - DNA, 59 bp, Artificial
  Synthetic oligonucleotide
aagtaacagcacacacaacatgttctgtaaatggaatgaatgacttcaactttaacgga

SEQ ID NO: 304794 - DNA, 57 bp, Artificial
  Synthetic oligonucleotide
aagtaaccatggatgaaccgtcaggtggatccgtgggccagcagaataagggccgtc

SEQ ID NO: 304795 - DNA, 58 bp, Artificial
  Synthetic oligonucleotide
aagtaaccttatgcaattcggtaatcacacagctctccccgactcgtatctcgaaaca

SEQ ID NO: 304796 - DNA, 60 bp, Artificial
  Synthetic oligonucleotide
aagtaaccttcacagaagcatacagattactgattagagatttggccagcctagatttaa

SEQ ID NO: 304797 - DNA, 55 bp, Artificial
  Synthetic oligonucleotide
aagtaaccttgacaaggtgctgagagattactggtcacaatcgaatgagacgtac

SEQ ID NO: 304798 - DNA, 56 bp, Artificial
  Synthetic oligonucleotide
aagtaacgcccaatagtcactcgtatgagtgttcgcaaatccgttgtcggtgtaaa

SEQ ID NO: 304799 - DNA, 57 bp, Artificial
  Synthetic oligonucleotide
aagtaacggttgactatgtctattcggatggctacaaactgaactttgcttcagtgg

SEQ ID NO: 304800 - DNA, 57 bp, Artificial
  Synthetic oligonucleotide
aagtaactgcactgccaataatcgaaatgacaatcagtgatatagcaactatgaaag

SEQ ID NO: 304801 - DNA, 56 bp, Artificial
  Synthetic oligonucleotide
aagtaactgtattagacataggggatgcctactttaccattcccctcgatccagat

SEQ ID NO: 304802 - DNA, 56 bp, Artificial
  Synthetic oligonucleotide
aagtaagatgaagaaatgcaaccacacgaatttagacatgttacgtagtttaacga

SEQ ID NO: 304803 - DNA, 58 bp, Artificial
  Synthetic oligonucleotide
aagtaagctaaataggatatgcctaaacctctcattggcccattctggaaacaaatca

SEQ ID NO: 304804 - DNA, 60 bp, Artificial
  Synthetic oligonucleotide
aagtaaggatgcgtctacgcattcgctacacagagtaatcactcagatggcgtagtgaga

SEQ ID NO: 304805 - DNA, 60 bp, Artificial
  Synthetic oligonucleotide
aagtaagtgggatctacgtcatcaatgacgttgtattccacttcatcataatacgttcta

SEQ ID NO: 304806 - DNA, 55 bp, Artificial
  Synthetic oligonucleotide
aagtaatcacgcggcaccaagctttcccgacccgtcaaccacgaggcgcaatgtg

SEQ ID NO: 304807 - DNA, 54 bp, Artificial
  Synthetic oligonucleotide
aagtaatcactaactaccttattaccaataacgttacgctctggaacatatccg

SEQ ID NO: 304808 - DNA, 60 bp, Artificial
  Synthetic oligonucleotide
aagtaatcatccgcccaagcttgcatatctactggaacgttagtgaacgacgagagagga

SEQ ID NO: 304809 - DNA, 60 bp, Artificial
  Synthetic oligonucleotide
aagtaatccgtgtgggtcgtgcttatgtatgtacacaatgtggtggtatgctttattatg

SEQ ID NO: 304810 - DNA, 55 bp, Artificial
  Synthetic oligonucleotide
aagtaatcgcagcacgctaacggcacgcaacgtgttgagacgcacagcgtctctg

SEQ ID NO: 304811 - DNA, 58 bp, Artificial
  Synthetic oligonucleotide
aagtaatgaggaagtttcatgctacggttgttggaggtccgtcagggatgaaggagca

SEQ ID NO: 304812 - DNA, 58 bp, Artificial
  Synthetic oligonucleotide
aagtaatgatgactatcagataccaatagcaaactcagttacggtaagacaggacttg

SEQ ID NO: 304813 - DNA, 57 bp, Artificial
  Synthetic oligonucleotide
aagtaatgcggacgtcgtggcggttgctgacaacatactcgtgtatgttgcaagtta

SEQ ID NO: 304814 - DNA, 60 bp, Artificial
  Synthetic oligonucleotide
aagtaatggagatctatgttgcatctaatgggaaatgtccatgacgcctgtaacgattcg

SEQ ID NO: 304815 - DNA, 57 bp, Artificial
  Synthetic oligonucleotide
aagtaattcttagaatttattctaaaacgctttgctggagccatcttggtcaatgta

SEQ ID NO: 304816 - DNA, 55 bp, Artificial
  Synthetic oligonucleotide
aagtaattgagggaatgccaagaaccatagcatggatggtccaaagatccttagc

SEQ ID NO: 304817 - DNA, 55 bp, Artificial
  Synthetic oligonucleotide
aagtacaatttgtcgtatgcttacaactatggaaaagcttatgacttgacgggag

SEQ ID NO: 304818 - DNA, 58 bp, Artificial
  Synthetic oligonucleotide
aagtacacccaacaacaaatgtggctgtaatggaggtggaatctgtaaatgtagcacc

SEQ ID NO: 304819 - DNA, 52 bp, Artificial
  Synthetic oligonucleotide
aagtacaccgcggtggtaacggcgaacgtggcgtgcgagtactacaagtcgg

SEQ ID NO: 304820 - DNA, 55 bp, Artificial
  Synthetic oligonucleotide
aagtacagagacagattgtcgaaactcgtcaccatcacggcattggccgggaaga

SEQ ID NO: 304821 - DNA, 60 bp, Artificial
  Synthetic oligonucleotide
aagtacaggcggattacctagcagcgacgagggaggcggatttcacagtgccagatgttc

SEQ ID NO: 304822 - DNA, 55 bp, Artificial
  Synthetic oligonucleotide
aagtacagggttattatctctgcattgtaggagctaactcttcccctgtttatgc

SEQ ID NO: 304823 - DNA, 60 bp, Artificial
  Synthetic oligonucleotide
aagtacagtccagcatttgtgaagctgcctatcaacatgttcgacctgtacttaaagaat

SEQ ID NO: 304824 - DNA, 55 bp, Artificial
  Synthetic oligonucleotide
aagtacatagaactgtggggaagagtacccccacaaggagactcagaactaccca

SEQ ID NO: 304825 - DNA, 55 bp, Artificial
  Synthetic oligonucleotide
aagtacattagcccatatgtaagtcctatacaatactcagaaccgtctatagacg

SEQ ID NO: 304826 - DNA, 60 bp, Artificial
  Synthetic oligonucleotide
aagtaccatctagagtgctccaatacatgtatgttcctcctggggcacctaaaccagatg

SEQ ID NO: 304827 - DNA, 51 bp, Artificial
  Synthetic oligonucleotide
aagtacccacaaggtactataacccctaaaaaccctacagctcagtcccag

SEQ ID NO: 304828 - DNA, 59 bp, Artificial
  Synthetic oligonucleotide
aagtacccctcctcatcatgcgccttggagctccgtaaatcagtgtcccactatgtggt

SEQ ID NO: 304829 - DNA, 52 bp, Artificial
  Synthetic oligonucleotide
aagtacccctggaagagcacggacacgcccgtgttctggacccggacgtagg

SEQ ID NO: 304830 - DNA, 53 bp, Artificial
  Synthetic oligonucleotide
aagtacctaatcatacagaatactacatgggaagaccactgcactatgtctag

SEQ ID NO: 304831 - DNA, 50 bp, Artificial
  Synthetic oligonucleotide
aagtacctcaacttttgagggatcagtcctgccgacatctaaggagcggt

SEQ ID NO: 304832 - DNA, 55 bp, Artificial
  Synthetic oligonucleotide
aagtacgagcctcttatggcccctttggttaattgtattcatgttgtagttatgt

SEQ ID NO: 304833 - DNA, 60 bp, Artificial
  Synthetic oligonucleotide
aagtacgagtacccatggcatactgcaaagtgtcactatgaacgagattaccaatatgag

SEQ ID NO: 304834 - DNA, 58 bp, Artificial
  Synthetic oligonucleotide
aagtacgccgacgtctcaacttcgacagcccctatggagctcgtgcagttgtccccat

SEQ ID NO: 304835 - DNA, 55 bp, Artificial
  Synthetic oligonucleotide
aagtacggacgcggactggtggacctcagaaagcagctacgcctcgacagcgacc

SEQ ID NO: 304836 - DNA, 59 bp, Artificial
  Synthetic oligonucleotide
aagtacgggcaagcacttatggaagaagatgtgctagaggcccaagttgacatgttccc

SEQ ID NO: 304837 - DNA, 55 bp, Artificial
  Synthetic oligonucleotide
aagtacgtaacgagctcaacggatgcgaagttttatcgtaccgacacagacacgg

SEQ ID NO: 304838 - DNA, 52 bp, Artificial
  Synthetic oligonucleotide
aagtacgtcacggaacactcacgtaaaaactaggtctaagattggtttgtaa

SEQ ID NO: 304839 - DNA, 57 bp, Artificial
  Synthetic oligonucleotide
aagtacgtcactaaccacgtgactcccgcaggccaaccacagtctacgtcgtgcatt

SEQ ID NO: 304840 - DNA, 57 bp, Artificial
  Synthetic oligonucleotide
aagtacgtcactaaccacgtgactcctatcgaccaatcagggtctacgtcgtgcact

SEQ ID NO: 304841 - DNA, 60 bp, Artificial
  Synthetic oligonucleotide
aagtacgtcactaaccacgtgacttctttcagcgaaccaatgtgctatgtcgtgcacttc

SEQ ID NO: 304842 - DNA, 55 bp, Artificial
  Synthetic oligonucleotide
aagtacgtcgtttggtacgacgcctctcagttgacgatcgaccccgacaagagcg

SEQ ID NO: 304843 - DNA, 57 bp, Artificial
  Synthetic oligonucleotide
aagtacgtggccgctacccacaagcgttaaatggcggagtgtcagctccgcaagacc

SEQ ID NO: 304844 - DNA, 60 bp, Artificial
  Synthetic oligonucleotide
aagtactaacaggtaagagaacacattgctgtctgtcatggggaatgagtcagggaagga

SEQ ID NO: 304845 - DNA, 57 bp, Artificial
  Synthetic oligonucleotide
aagtactaacgtagtttcacactacagaacagaaggacatttctatgagttcacacg

SEQ ID NO: 304846 - DNA, 60 bp, Artificial
  Synthetic oligonucleotide
aagtactagcataagatctcgtgccgcctatttgaggcagaaactgatgcatgacattga

SEQ ID NO: 304847 - DNA, 53 bp, Artificial
  Synthetic oligonucleotide
aagtactagtgacaggcaatctcgatatctcaactgagcttgggaatgtcaac

SEQ ID NO: 304848 - DNA, 55 bp, Artificial
  Synthetic oligonucleotide
aagtactattcacgtgttagaagtgttagaggtagagctattatagtcagtgtcg

SEQ ID NO: 304849 - DNA, 53 bp, Artificial
  Synthetic oligonucleotide
aagtactcgcccatccgagttacaagggaggagtgtcctggcacgaaagtcac

SEQ ID NO: 304850 - DNA, 55 bp, Artificial
  Synthetic oligonucleotide
aagtactctgtgcatatcaataaacctcgcatgttaacctgacagtacgcgaagt

SEQ ID NO: 304851 - DNA, 55 bp, Artificial
  Synthetic oligonucleotide
aagtactgcaataactatttgggagtctataacgcaaactctaagcagcatatgg

SEQ ID NO: 304852 - DNA, 60 bp, Artificial
  Synthetic oligonucleotide
aagtactgctcatgctacagcaacgataccgctacaagcctcactccctttcggatggct

SEQ ID NO: 304853 - DNA, 57 bp, Artificial
  Synthetic oligonucleotide
aagtactgttgaggagcctccagataggcaatttttagatgtacaacgccttagtag

SEQ ID NO: 304854 - DNA, 60 bp, Artificial
  Synthetic oligonucleotide
aagtacttgaacagtcatgcatacattgaagtagcacgtggttcatcatacgataattgg

SEQ ID NO: 304855 - DNA, 56 bp, Artificial
  Synthetic oligonucleotide
aagtagaagcattcccaatcagaggtatcgccccgcctctcagtgttgtggaaaac

SEQ ID NO: 304856 - DNA, 55 bp, Artificial
  Synthetic oligonucleotide
aagtagacaaatcacctccagaggaccccttcagcgaacagagagccctgacgcg

SEQ ID NO: 304857 - DNA, 55 bp, Artificial
  Synthetic oligonucleotide
aagtagacaacttatttgggagagcctggttttatcaggaacacactttcaccaa

SEQ ID NO: 304858 - DNA, 60 bp, Artificial
  Synthetic oligonucleotide
aagtagagatgagaaatctgtcatatatccactcgctcaagctcgtatgtatgataactt

SEQ ID NO: 304859 - DNA, 60 bp, Artificial
  Synthetic oligonucleotide
aagtagagcaagattgaaagaagatcctatttgttctatgtccagatgagttatatcgtc

SEQ ID NO: 304860 - DNA, 54 bp, Artificial
  Synthetic oligonucleotide
aagtagagcagctatctcctgaagaggaagtgaaacggagaatccgaagagaac

SEQ ID NO: 304861 - DNA, 55 bp, Artificial
  Synthetic oligonucleotide
aagtagagcgaggatcaaaaccagactattcaccataagacaagagatggccagt

SEQ ID NO: 304862 - DNA, 55 bp, Artificial
  Synthetic oligonucleotide
aagtagaggaaagggcaaacagagacttcaataacttaactagagggctctgtac

SEQ ID NO: 304863 - DNA, 50 bp, Artificial
  Synthetic oligonucleotide
aagtagaggtaaacatagttactgactcacaatatgcattagggatcatt

SEQ ID NO: 304864 - DNA, 53 bp, Artificial
  Synthetic oligonucleotide
aagtagatggcccataacccaactgcatacagacaatggacccaattttacgt

SEQ ID NO: 304865 - DNA, 60 bp, Artificial
  Synthetic oligonucleotide
aagtagattatagagtaggagtaggagctctgataatagcactactcatagcaatagttg

SEQ ID NO: 304866 - DNA, 60 bp, Artificial
  Synthetic oligonucleotide
aagtagcactcagttattcaacaggtgcgcttgccagttgcatgggtctcatctacaata

SEQ ID NO: 304867 - DNA, 54 bp, Artificial
  Synthetic oligonucleotide
aagtagcccttatgattacaatattgatcgaaaaaaggaaattccttgtaccca

SEQ ID NO: 304868 - DNA, 52 bp, Artificial
  Synthetic oligonucleotide
aagtagctgtgattattggacgaccaccacggctaagactacaactcagact

SEQ ID NO: 304869 - DNA, 50 bp, Artificial
  Synthetic oligonucleotide
aagtagggtttctctctcctcaaaccccccggagaagacgaacggaggcc

SEQ ID NO: 304870 - DNA, 54 bp, Artificial
  Synthetic oligonucleotide
aagtagtacaagtgtctgtgttagatggatgccggagccaaacatatacgcttc

SEQ ID NO: 304871 - DNA, 59 bp, Artificial
  Synthetic oligonucleotide
aagtagtgccgtctaagtttcagtatggaggattgcttgattctcgaagttataacgca

SEQ ID NO: 304872 - DNA, 57 bp, Artificial
  Synthetic oligonucleotide
aagtagttgagtacaatattactggtgactcacacccaggttatccctggtgcaagt

SEQ ID NO: 304873 - DNA, 52 bp, Artificial
  Synthetic oligonucleotide
aagtagttgcgaaaacggtccccttattgcctgacaagctaagggccaccct

SEQ ID NO: 304874 - DNA, 56 bp, Artificial
  Synthetic oligonucleotide
aagtagttgtgtctgccgagactgcgggcccagctggtctttccggtacgagttgg

SEQ ID NO: 304875 - DNA, 52 bp, Artificial
  Synthetic oligonucleotide
aagtataataaccaatacaacgaatggaaggctacgtactactcgtggagtg

SEQ ID NO: 304876 - DNA, 55 bp, Artificial
  Synthetic oligonucleotide
aagtataatcttaagtgggaaggttcgagttgacgggatggcgtctcggataaga

SEQ ID NO: 304877 - DNA, 51 bp, Artificial
  Synthetic oligonucleotide
aagtataatcttttgttttcaaacacttcaggggaaccctaaatcatttcc

SEQ ID NO: 304878 - DNA, 57 bp, Artificial
  Synthetic oligonucleotide
aagtataattttcttggtcccagttagcaatactatgagagtattctagatttcttc

SEQ ID NO: 304879 - DNA, 55 bp, Artificial
  Synthetic oligonucleotide
aagtatacagctaggaccaggacgagcattttttacaacaggggatataataggg

SEQ ID NO: 304880 - DNA, 57 bp, Artificial
  Synthetic oligonucleotide
aagtataccaacagggggtcgcaagagcactcaacggtatcagcccaaagactccac

SEQ ID NO: 304881 - DNA, 57 bp, Artificial
  Synthetic oligonucleotide
aagtataccagcattaggaggaacaagtattggttataacattatgacgaaagacaa

SEQ ID NO: 304882 - DNA, 59 bp, Artificial
  Synthetic oligonucleotide
aagtatacgactgaatcgaacccacattacggtttgtcatgtccagagtgggtgatgac

SEQ ID NO: 304883 - DNA, 57 bp, Artificial
  Synthetic oligonucleotide
aagtatacgcattttcaacgcagcatgcccggaacataagatagcaattcccgtaat

SEQ ID NO: 304884 - DNA, 54 bp, Artificial
  Synthetic oligonucleotide
aagtatagatatttgtgcctaatgcagaaagctatgttcatacattctaagaga

SEQ ID NO: 304885 - DNA, 55 bp, Artificial
  Synthetic oligonucleotide
aagtatataaacaagtaccacaaccttttgacttcagagcgtcaatgcatatgtt

SEQ ID NO: 304886 - DNA, 60 bp, Artificial
  Synthetic oligonucleotide
aagtatataacagttcgtcgatcatttgggacgagactcgcacgattatttgatattcat

SEQ ID NO: 304887 - DNA, 53 bp, Artificial
  Synthetic oligonucleotide
aagtatcaaaagggcgcacgggacgcccaagcaaagaagagtgcatatgactg

SEQ ID NO: 304888 - DNA, 50 bp, Artificial
  Synthetic oligonucleotide
aagtatccaaacgagcatgggctgagacgattgacacgaaggatgtgtta

SEQ ID NO: 304889 - DNA, 50 bp, Artificial
  Synthetic oligonucleotide
aagtatccagaagggtttctgaacgatgagagataccttgaatacagacg

SEQ ID NO: 304890 - DNA, 55 bp, Artificial
  Synthetic oligonucleotide
aagtatcccgtatatccatcctgatttagcgcacacagaagaggggcaaggtaag

SEQ ID NO: 304891 - DNA, 58 bp, Artificial
  Synthetic oligonucleotide
aagtatccctcaaagcggcctccgtgaccttatgggcaatcatcagcatttggttcgg

SEQ ID NO: 304892 - DNA, 60 bp, Artificial
  Synthetic oligonucleotide
aagtatcctaacagtggaatagtttacaagcgcagactttgtcgcacgtatgctcaacga

SEQ ID NO: 304893 - DNA, 55 bp, Artificial
  Synthetic oligonucleotide
aagtatcgtgaagtatcgcttcctcaacgatggatctttagattggaggacttgg

SEQ ID NO: 304894 - DNA, 60 bp, Artificial
  Synthetic oligonucleotide
aagtatctctcgctcttcgagagtactatctcaaacgatttacgagatctacacttcaac

SEQ ID NO: 304895 - DNA, 58 bp, Artificial
  Synthetic oligonucleotide
aagtatcttagttttacacttgctgctaagaacaacagcatcgtctttagttggacac

SEQ ID NO: 304896 - DNA, 55 bp, Artificial
  Synthetic oligonucleotide
aagtatctttacggttggtgcccggaatgggatgtcgacggagtgctttgccgac

SEQ ID NO: 304897 - DNA, 56 bp, Artificial
  Synthetic oligonucleotide
aagtatgaacacccacaagggagatcaacacgtcgacgcctcgtccccttcttggc

SEQ ID NO: 304898 - DNA, 53 bp, Artificial
  Synthetic oligonucleotide
aagtatgacactattcagcattggggttctagttacccagggcatttattcac

SEQ ID NO: 304899 - DNA, 59 bp, Artificial
  Synthetic oligonucleotide
aagtatgaggaggaactattttacagcggaagtgtcccattgcagggctactgaataca

SEQ ID NO: 304900 - DNA, 55 bp, Artificial
  Synthetic oligonucleotide
aagtatgcccactcaatacacagacccttggaataggatgttcgactactgatcc

SEQ ID NO: 304901 - DNA, 60 bp, Artificial
  Synthetic oligonucleotide
aagtatgcctctgaaatggggaaagaagttactagcactctttgctgatgacagcttcac

SEQ ID NO: 304902 - DNA, 50 bp, Artificial
  Synthetic oligonucleotide
aagtatgctgccgtttcacatggtcagattcgctaggattaatcagatca

SEQ ID NO: 304903 - DNA, 57 bp, Artificial
  Synthetic oligonucleotide
aagtatggaactattgtcaggaggagggagaaaggaatcgcactcccatgctagaaa

SEQ ID NO: 304904 - DNA, 55 bp, Artificial
  Synthetic oligonucleotide
aagtatggtgggtactcaacctactcgtctaactctaacaccgatccttggatta

SEQ ID NO: 304905 - DNA, 60 bp, Artificial
  Synthetic oligonucleotide
aagtattaaagtggaagtttgacagcagcctagcacgcagacacatggcccgcgagctac

SEQ ID NO: 304906 - DNA, 55 bp, Artificial
  Synthetic oligonucleotide
aagtattacatttgacccaaggaacatgctgggaacaaatgtacaccccaggtgg

SEQ ID NO: 304907 - DNA, 58 bp, Artificial
  Synthetic oligonucleotide
aagtattaccagtaacacctttggatcctgctattgtgccattaacagatggattacc

SEQ ID NO: 304908 - DNA, 56 bp, Artificial
  Synthetic oligonucleotide
aagtattatatctaggaatagtcctcatgtcgtagtagctctctcaaggcacacag

SEQ ID NO: 304909 - DNA, 55 bp, Artificial
  Synthetic oligonucleotide
aagtattcttggacttcagacaggaatcaacacacgagtgtgacacaggggtgat

SEQ ID NO: 304910 - DNA, 60 bp, Artificial
  Synthetic oligonucleotide
aagtattgaaaaataacgcccagagaattgtatacgatgatgagctgcagatgcacatac

SEQ ID NO: 304911 - DNA, 58 bp, Artificial
  Synthetic oligonucleotide
aagtattgcaacggcgcgagcgatagaaggtgcctataaattgaaagcggtgataacc

SEQ ID NO: 304912 - DNA, 56 bp, Artificial
  Synthetic oligonucleotide
aagtattgcaactcctcacctagttctccgctataaatacggtaaaacatattagc

SEQ ID NO: 304913 - DNA, 51 bp, Artificial
  Synthetic oligonucleotide
aagtatttattccaccagccaaactagcgcttcggggccatctgtccgaga

SEQ ID NO: 304914 - DNA, 60 bp, Artificial
  Synthetic oligonucleotide
aagtatttgtgtgtctgtacataatactatatctatagtgtcctgtgtgagttgatacag

SEQ ID NO: 304915 - DNA, 54 bp, Artificial
  Synthetic oligonucleotide
aagtcaaaatacgtcgcagggttgatataaatcctggtcatgccgatctcagtt

SEQ ID NO: 304916 - DNA, 57 bp, Artificial
  Synthetic oligonucleotide
aagtcaaaggacatagcgtgcggcagtttgattggcgaacgtgacagagcttcgtgg

SEQ ID NO: 304917 - DNA, 60 bp, Artificial
  Synthetic oligonucleotide
aagtcaacagaaatggcttgattcaatgcagcttgaaagcgacgacggagaaacaacgct

SEQ ID NO: 304918 - DNA, 55 bp, Artificial
  Synthetic oligonucleotide
aagtcaaccacgccggtaaccgctcggtgccgcgactgcccgcgcacatggaacc

SEQ ID NO: 304919 - DNA, 51 bp, Artificial
  Synthetic oligonucleotide
aagtcaaccttccatgctgtccctgtccatatctgggaccgtcttatgttg

SEQ ID NO: 304920 - DNA, 55 bp, Artificial
  Synthetic oligonucleotide
aagtcaacttgagagacgatgtctatttggtaccactttacgcaatagttggcgg

SEQ ID NO: 304921 - DNA, 53 bp, Artificial
  Synthetic oligonucleotide
aagtcaagaacgctaacgggaacgatgttaaaggcgttttgagagtgttatac

SEQ ID NO: 304922 - DNA, 51 bp, Artificial
  Synthetic oligonucleotide
aagtcaagaagaaagtataaaggaatcggccttagaaccgaccccagcgat

SEQ ID NO: 304923 - DNA, 55 bp, Artificial
  Synthetic oligonucleotide
aagtcaagagctgcaagcagagccctggtgtcagtgatgacatcagacttcacag

SEQ ID NO: 304924 - DNA, 57 bp, Artificial
  Synthetic oligonucleotide
aagtcaagaggtggggaagcaccgtgactggctggttagtgaccatcgacggcttaa

SEQ ID NO: 304925 - DNA, 52 bp, Artificial
  Synthetic oligonucleotide
aagtcaagcagccgttttccgaggaaaatgctagcggcaacgatctcaatac

SEQ ID NO: 304926 - DNA, 50 bp, Artificial
  Synthetic oligonucleotide
aagtcaagggtggtagtaacactaaagggagaagccgtaaatcccggaac

SEQ ID NO: 304927 - DNA, 60 bp, Artificial
  Synthetic oligonucleotide
aagtcacacgtggacacatgggtggagctaacaccatgtacgcgatcgacgcaccccctg

SEQ ID NO: 304928 - DNA, 55 bp, Artificial
  Synthetic oligonucleotide
aagtcacagactcacacggctggcttagtgtacgctaaaggcatcgacgggtaca

SEQ ID NO: 304929 - DNA, 54 bp, Artificial
  Synthetic oligonucleotide
aagtcacagtctattaggtactccttttgtggtaatggacgacatgttctaacc

SEQ ID NO: 304930 - DNA, 55 bp, Artificial
  Synthetic oligonucleotide
aagtcacagttactcgagttcagaaacttaaacgctgaccactcgtttactacta

SEQ ID NO: 304931 - DNA, 56 bp, Artificial
  Synthetic oligonucleotide
aagtcacatggaaaccccatatgttcaatagtggcagtgattggaaccactacagt

SEQ ID NO: 304932 - DNA, 52 bp, Artificial
  Synthetic oligonucleotide
aagtcacccccgggcgttacgcggtaacacaatatggagggactaacacttc

SEQ ID NO: 304933 - DNA, 55 bp, Artificial
  Synthetic oligonucleotide
aagtcacccctgaagatttgatcgaaaccaggcatgttattaacaatagactaag

SEQ ID NO: 304934 - DNA, 55 bp, Artificial
  Synthetic oligonucleotide
aagtcacgtggggacggctgctgtaaacacggaagtagctgacccgcgtgacttg

SEQ ID NO: 304935 - DNA, 60 bp, Artificial
  Synthetic oligonucleotide
aagtcactagccaccatgattgtaggccggaaattagcagagtatgagggctcagatgtt

SEQ ID NO: 304936 - DNA, 57 bp, Artificial
  Synthetic oligonucleotide
aagtcactccacggtgaattcaaggtcgtgaactctgcatctattcgggtcttcccc

SEQ ID NO: 304937 - DNA, 55 bp, Artificial
  Synthetic oligonucleotide
aagtcactccatttcttgacgttgacaatcgaatggttcagtacagtaagggaag

SEQ ID NO: 304938 - DNA, 56 bp, Artificial
  Synthetic oligonucleotide
aagtcactcgaagtagcaggatcctttataaggtttattactgtattcaggatggg

SEQ ID NO: 304939 - DNA, 60 bp, Artificial
  Synthetic oligonucleotide
aagtcactcggcttaaatgccgtcgcattctacagaggtgtcgatgtgtccgtcatcccc

SEQ ID NO: 304940 - DNA, 57 bp, Artificial
  Synthetic oligonucleotide
aagtcactgttgtctcgaaattttcccggtagagacatacactttgcacaacgagac

SEQ ID NO: 304941 - DNA, 58 bp, Artificial
  Synthetic oligonucleotide
aagtcagaagtgtactttacatcgtcgttcaccaagaaccgcattcaaaccattatga

SEQ ID NO: 304942 - DNA, 60 bp, Artificial
  Synthetic oligonucleotide
aagtcagaccagggcgtatacttcattgggcgatgattaagagctcttgggatgtgaagg

SEQ ID NO: 304943 - DNA, 60 bp, Artificial
  Synthetic oligonucleotide
aagtcagatccatgaagaaagtagacagcccaagggccagtttgattcctgatgcttccc

SEQ ID NO: 304944 - DNA, 59 bp, Artificial
  Synthetic oligonucleotide
aagtcagatgtcaaaggaaagagattatttatactggatgaaatcagtttgctccctaa

SEQ ID NO: 304945 - DNA, 60 bp, Artificial
  Synthetic oligonucleotide
aagtcagcactcttaatgactctcattatagattgcctattcttgaggaaggataggcaa

SEQ ID NO: 304946 - DNA, 51 bp, Artificial
  Synthetic oligonucleotide
aagtcagcctatgcatctgaaaagtggactttggtggataccagcatagag

SEQ ID NO: 304947 - DNA, 60 bp, Artificial
  Synthetic oligonucleotide
aagtcagcgaactatgtcgcttgatttcgtgaccacaaactacatgtcattgatctcagg

SEQ ID NO: 304948 - DNA, 60 bp, Artificial
  Synthetic oligonucleotide
aagtcaggattctggcaggttctgccagatcaagaatcaagacctctaacggcattcaca

SEQ ID NO: 304949 - DNA, 51 bp, Artificial
  Synthetic oligonucleotide
aagtcagtggtactatctctttcgatggtgctggttactctaatggtgaac

SEQ ID NO: 304950 - DNA, 60 bp, Artificial
  Synthetic oligonucleotide
aagtcagttgctctgcatctcttatagtcaatcaaatcgcttcattacagttctcacaac

SEQ ID NO: 304951 - DNA, 56 bp, Artificial
  Synthetic oligonucleotide
aagtcatactacaagtacgccactgtagcacaaataggggccatgtcggggccaga

SEQ ID NO: 304952 - DNA, 55 bp, Artificial
  Synthetic oligonucleotide
aagtcatagagagatcacagaggtccatatccaggaatgggaagaatgtaggaag

SEQ ID NO: 304953 - DNA, 58 bp, Artificial
  Synthetic oligonucleotide
aagtcataggctatgactccgagtcacagattatactagtccaggtgtcatacccaag

SEQ ID NO: 304954 - DNA, 60 bp, Artificial
  Synthetic oligonucleotide
aagtcatagtcccagcgtccgtaccagccgatacgacgacagaatccgattggctgccac

SEQ ID NO: 304955 - DNA, 57 bp, Artificial
  Synthetic oligonucleotide
aagtcatcacatcaaaaaggggagtatactgccataggaaagttgattgtttattgt

SEQ ID NO: 304956 - DNA, 53 bp, Artificial
  Synthetic oligonucleotide
aagtcatccagctataaccacagttaggaacacaatcacccatcatttcgcgg

SEQ ID NO: 304957 - DNA, 59 bp, Artificial
  Synthetic oligonucleotide
aagtcatccgcggggcaatcccaatcgatcacaccgtcaacatcatcgcccgacctaac

SEQ ID NO: 304958 - DNA, 59 bp, Artificial
  Synthetic oligonucleotide
aagtcatgacattcagggttggagataagagtaacagcaaattgactctagaaaaatcc

SEQ ID NO: 304959 - DNA, 60 bp, Artificial
  Synthetic oligonucleotide
aagtcatggcatagctgatattcatctctgtgcgactctatatagttgaaggcacttgga

SEQ ID NO: 304960 - DNA, 60 bp, Artificial
  Synthetic oligonucleotide
aagtcattagtgacagaagttgtcggacgacaattgtcacgctactatggagctggacgg

SEQ ID NO: 304961 - DNA, 57 bp, Artificial
  Synthetic oligonucleotide
aagtcattattattgaatctcatcatgtccacccccccccagggcgttttgactgtg

SEQ ID NO: 304962 - DNA, 60 bp, Artificial
  Synthetic oligonucleotide
aagtcattcagactctacaagtaagggcatggctccatgttcgctacgtagagtaactgt

SEQ ID NO: 304963 - DNA, 59 bp, Artificial
  Synthetic oligonucleotide
aagtcattgctgctctcgaggggttacgaagatgtgcataccgttcatgaggtgcaagg

SEQ ID NO: 304964 - DNA, 55 bp, Artificial
  Synthetic oligonucleotide
aagtcattgggggcatatgaaccgaaacagggctgttacagaacattgtcccttt

SEQ ID NO: 304965 - DNA, 55 bp, Artificial
  Synthetic oligonucleotide
aagtcatttgtgtgtcggatgttactcgtggtaacgggttgactcatcgagtggg

SEQ ID NO: 304966 - DNA, 54 bp, Artificial
  Synthetic oligonucleotide
aagtcattttgacaatgagttagttagtattcattattaccctacttttttcta

SEQ ID NO: 304967 - DNA, 57 bp, Artificial
  Synthetic oligonucleotide
aagtccaaaacccgtatggcagttcacgtcaatgccactacgaagaccgaccacaca

SEQ ID NO: 304968 - DNA, 60 bp, Artificial
  Synthetic oligonucleotide
aagtccaaagttgggatcgagcaagcatacaaggtagtcaggtatgaggcgttgaggctg

SEQ ID NO: 304969 - DNA, 55 bp, Artificial
  Synthetic oligonucleotide
aagtccaacatgattactggacaactggtactcaacagtatcagtcctacggtct

SEQ ID NO: 304970 - DNA, 56 bp, Artificial
  Synthetic oligonucleotide
aagtccagatggggttctcacacttaaatgtatatccccacttaatactacaggcg

SEQ ID NO: 304971 - DNA, 60 bp, Artificial
  Synthetic oligonucleotide
aagtccagatgttccgaggggatgtgaaggcccatgcaaggtccagtcatttgagtccag

SEQ ID NO: 304972 - DNA, 55 bp, Artificial
  Synthetic oligonucleotide
aagtccagatgttcctagggggtgtgaagggccatgtaaggtccagtcttttgag

SEQ ID NO: 304973 - DNA, 57 bp, Artificial
  Synthetic oligonucleotide
aagtccaggtgaccacacaaataattgtgtggacctaacgacctagcccacatggtc

SEQ ID NO: 304974 - DNA, 55 bp, Artificial
  Synthetic oligonucleotide
aagtccaggtggtttctggaagcattgggtttcaactaaagatggagactgtggg

SEQ ID NO: 304975 - DNA, 60 bp, Artificial
  Synthetic oligonucleotide
aagtccaggtgtccactcagataattatgtgggcctaaggcacgagcccacatcgtcttg

SEQ ID NO: 304976 - DNA, 51 bp, Artificial
  Synthetic oligonucleotide
aagtccagtgtatcagaggtgtttccaagatggggctatagtgaagcaaaa

SEQ ID NO: 304977 - DNA, 60 bp, Artificial
  Synthetic oligonucleotide
aagtccatcaaagtgcaggatgggcaccagattggcatgtgtcagccgtataataccacc

SEQ ID NO: 304978 - DNA, 53 bp, Artificial
  Synthetic oligonucleotide
aagtccccaactctaggtgttcttccggttacgactacatattgacctactac

SEQ ID NO: 304979 - DNA, 55 bp, Artificial
  Synthetic oligonucleotide
aagtccccttttacatgtcggaagcaactcagaattcgctgactcgtttctaccc

SEQ ID NO: 304980 - DNA, 55 bp, Artificial
  Synthetic oligonucleotide
aagtcccgaagcagagcttggacactttcaaaacgtgggagaaaggccttgtcca

SEQ ID NO: 304981 - DNA, 60 bp, Artificial
  Synthetic oligonucleotide
aagtcccgatatgtacgacatttccagcaaagctctgttaaacagcgagatattgacaga

SEQ ID NO: 304982 - DNA, 55 bp, Artificial
  Synthetic oligonucleotide
aagtcccgcaatttgttgctgattggattgagcagagagatgcaaagggtgacga

SEQ ID NO: 304983 - DNA, 54 bp, Artificial
  Synthetic oligonucleotide
aagtcccgccagaactgcctcataggaccctcaactcgtgccgcttgaaccagg

SEQ ID NO: 304984 - DNA, 60 bp, Artificial
  Synthetic oligonucleotide
aagtccctcacgtcgctggtgctgatatcctcaacgacgatcattggtacaaggtcactt

SEQ ID NO: 304985 - DNA, 53 bp, Artificial
  Synthetic oligonucleotide
aagtccctttcgtacgttaatgagttgtccagtaggagttgccccctctccta

SEQ ID NO: 304986 - DNA, 57 bp, Artificial
  Synthetic oligonucleotide
aagtccgcatgaccctatgcgaatctgaagacgaagatgaagggatctcagcccttc

SEQ ID NO: 304987 - DNA, 57 bp, Artificial
  Synthetic oligonucleotide
aagtccgccgcttaattgaagcatttgtgaagaatgaaccgaccaataaatctggtc

SEQ ID NO: 304988 - DNA, 54 bp, Artificial
  Synthetic oligonucleotide
aagtccggcaggtccttagcgaaaaaacggggtgtgccagaaaactctatgctc

SEQ ID NO: 304989 - DNA, 54 bp, Artificial
  Synthetic oligonucleotide
aagtccggctcggacttagcgtcgtccgcggccgagagaggtgtggcttcgggg

SEQ ID NO: 304990 - DNA, 56 bp, Artificial
  Synthetic oligonucleotide
aagtccgtcactaaccacgtgacccgtctcgcccaaccagagtctatgtcgttcat

SEQ ID NO: 304991 - DNA, 59 bp, Artificial
  Synthetic oligonucleotide
aagtccgtcactaaccacgtgactcccgcaggccaatcagagtttatgtcgtgcacttc

SEQ ID NO: 304992 - DNA, 57 bp, Artificial
  Synthetic oligonucleotide
aagtccgtttacatattgggtaagatatggatggatgaaaacatcaagaccaagaac

SEQ ID NO: 304993 - DNA, 54 bp, Artificial
  Synthetic oligonucleotide
aagtcctagttgttttcatacatcaagtgggttgaaagccccgtgtacttggag

SEQ ID NO: 304994 - DNA, 55 bp, Artificial
  Synthetic oligonucleotide
aagtcctccaaattgacgttcgctcacgtcaatcgagcccttggaggccaaaaat

SEQ ID NO: 304995 - DNA, 60 bp, Artificial
  Synthetic oligonucleotide
aagtcctccttgagtcatccataggattgacactgagaccatccataggctatcgcgtgt

SEQ ID NO: 304996 - DNA, 58 bp, Artificial
  Synthetic oligonucleotide
aagtcctggtcttcctccaattatggagatgtggtgacagggctgaaaagggccgcac

SEQ ID NO: 304997 - DNA, 56 bp, Artificial
  Synthetic oligonucleotide
aagtccttaatggtcatgggggtcctattaagagtagggatggcagagagccccca

SEQ ID NO: 304998 - DNA, 57 bp, Artificial
  Synthetic oligonucleotide
aagtcgaaaaggattatattcgatgagtgtttcttacaacacgctggttgtgtctac

SEQ ID NO: 304999 - DNA, 54 bp, Artificial
  Synthetic oligonucleotide
aagtcgaagaaccgttggtttctacactggaactttccttcgaattgaagcaga

SEQ ID NO: 305000 - DNA, 56 bp, Artificial
  Synthetic oligonucleotide
aagtcgaagaacgacccaatggggttctcttatgatacccgctgctttgactccac

SEQ ID NO: 305001 - DNA, 55 bp, Artificial
  Synthetic oligonucleotide
aagtcgaaggagtattctctatggttgttgttgtggatcgtaaaccacaccttgg

SEQ ID NO: 305002 - DNA, 55 bp, Artificial
  Synthetic oligonucleotide
aagtcgacggtatgagaagtgcacaaatgcatcaacagccacgatgcgctccgac

SEQ ID NO: 305003 - DNA, 55 bp, Artificial
  Synthetic oligonucleotide
aagtcgactctaatgccacaatcaaactggacgatacagttggaattaattccgc

SEQ ID NO: 305004 - DNA, 58 bp, Artificial
  Synthetic oligonucleotide
aagtcgactgacgtactttcgcacacatgttcggcacttggatggttcaaaaccacgc

SEQ ID NO: 305005 - DNA, 60 bp, Artificial
  Synthetic oligonucleotide
aagtcgagattcagattttgatgagggctacacattggctaacatatcagctcgcactct

SEQ ID NO: 305006 - DNA, 53 bp, Artificial
  Synthetic oligonucleotide
aagtcgagcacgtaaggcctacgttcgatgacttcttcaccccggtttatagg

SEQ ID NO: 305007 - DNA, 60 bp, Artificial
  Synthetic oligonucleotide
aagtcgcaatgcaattgatagaagatttgtaatgtcaacctgaggacacactagggagct

SEQ ID NO: 305008 - DNA, 54 bp, Artificial
  Synthetic oligonucleotide
aagtcgcacaggtaggggccggtcgggccgatactactacgctggggtgggcaa

SEQ ID NO: 305009 - DNA, 57 bp, Artificial
  Synthetic oligonucleotide
aagtcgccagtgaacgtcactgtacgcgctgtaacccacttctcagccgcttttgct

SEQ ID NO: 305010 - DNA, 60 bp, Artificial
  Synthetic oligonucleotide
aagtcgcgagattcattgctaggcttgctaaagccatttggtatattagccgatgatgtc

SEQ ID NO: 305011 - DNA, 57 bp, Artificial
  Synthetic oligonucleotide
aagtcgcgctgcaattgagaaggcggacaagtggttgcacgctgtttatgtacgtga

SEQ ID NO: 305012 - DNA, 53 bp, Artificial
  Synthetic oligonucleotide
aagtcgctagggcgagtgtcgccgtaggagtgaaaaggccgaaaggtcttttc

SEQ ID NO: 305013 - DNA, 56 bp, Artificial
  Synthetic oligonucleotide
aagtcggagattatgggttcgctgagcccatatcgaaagggttccgctacaaggga

SEQ ID NO: 305014 - DNA, 50 bp, Artificial
  Synthetic oligonucleotide
aagtcggagggatagtactgtggcgcagtgggttgccaccactcctgtgc

SEQ ID NO: 305015 - DNA, 54 bp, Artificial
  Synthetic oligonucleotide
aagtcggagtcctcactgggcttagcgagggggggtcccaagctctacaaggcg

SEQ ID NO: 305016 - DNA, 59 bp, Artificial
  Synthetic oligonucleotide
aagtcggctctgcggaaatttgactgagattaggcttttgcgctgtttcgcgatgtacg

SEQ ID NO: 305017 - DNA, 55 bp, Artificial
  Synthetic oligonucleotide
aagtcgggcgccgcttccatgggtgtccgcttgtccgggcaggcctctaacagat

SEQ ID NO: 305018 - DNA, 56 bp, Artificial
  Synthetic oligonucleotide
aagtcggtgttgtcaagcccattgcgtaaacgagtttccgcgcgcccgtgcgatag

SEQ ID NO: 305019 - DNA, 58 bp, Artificial
  Synthetic oligonucleotide
aagtcgttaatattaaatctcagcatatccaccgcccaggagggcgttctgactgtgg

SEQ ID NO: 305020 - DNA, 56 bp, Artificial
  Synthetic oligonucleotide
aagtcgttcagacactaaatctatataaacaaacgcaaattaatttaatggactca

SEQ ID NO: 305021 - DNA, 52 bp, Artificial
  Synthetic oligonucleotide
aagtcgttgacccgaagcacgttaccccggaagtcacctggcactcgtggga

SEQ ID NO: 305022 - DNA, 55 bp, Artificial
  Synthetic oligonucleotide
aagtcgttgtttgttccttggattgagtctgcccctttgttagcgagtctaacac

SEQ ID NO: 305023 - DNA, 52 bp, Artificial
  Synthetic oligonucleotide
aagtctaagagggttagccacatccctcggtaacagatgtttaaccacccct

SEQ ID NO: 305024 - DNA, 60 bp, Artificial
  Synthetic oligonucleotide
aagtctaatgttatggcatatcgtttactagcgtattcacagggagacgacatcatagaa

SEQ ID NO: 305025 - DNA, 60 bp, Artificial
  Synthetic oligonucleotide
aagtctactatactctgattcttcgaagagtgagttactttcctgagcatatttcagtaa

SEQ ID NO: 305026 - DNA, 60 bp, Artificial
  Synthetic oligonucleotide
aagtctagatgcccacaaaggtaattatgtgggcccaatgatctggcccacattgtcttc

SEQ ID NO: 305027 - DNA, 54 bp, Artificial
  Synthetic oligonucleotide
aagtctagatgggattatcgttaagaggtagtaaatggaaatcatcaacacagc

SEQ ID NO: 305028 - DNA, 54 bp, Artificial
  Synthetic oligonucleotide
aagtctaggattcattgcctctacaggcgttaaatttagaaaacacgaagaggg

SEQ ID NO: 305029 - DNA, 57 bp, Artificial
  Synthetic oligonucleotide
aagtctaggtgcccacataaatagttatgtgggcctagagacctggcccacattgtt

SEQ ID NO: 305030 - DNA, 60 bp, Artificial
  Synthetic oligonucleotide
aagtctatgacaacaaattttctagctaggatgataacaaatgatagtgacatatactca

SEQ ID NO: 305031 - DNA, 58 bp, Artificial
  Synthetic oligonucleotide
aagtctcaatcaacttcaacttctaatcagacatgtcagtgcccgacgtccccgtggg

SEQ ID NO: 305032 - DNA, 58 bp, Artificial
  Synthetic oligonucleotide
aagtctcagaaccgtttctgatatagactagcaaccgaaatggggcgtcatagtttca

SEQ ID NO: 305033 - DNA, 60 bp, Artificial
  Synthetic oligonucleotide
aagtctccagttgacatcaaagacctgtggctccgtgcgcttagcttcccagattggacg

SEQ ID NO: 305034 - DNA, 55 bp, Artificial
  Synthetic oligonucleotide
aagtctccatgagaaggttagaaggatgctaaaagacaatgccaaagacgagggg

SEQ ID NO: 305035 - DNA, 55 bp, Artificial
  Synthetic oligonucleotide
aagtctcccgattatcatcagcctttgaaattattgattcagatcataccaaggc

SEQ ID NO: 305036 - DNA, 57 bp, Artificial
  Synthetic oligonucleotide
aagtctcgccgttaattgtgccgtcgtcgaagggaattgcataactatctcagttaa

SEQ ID NO: 305037 - DNA, 51 bp, Artificial
  Synthetic oligonucleotide
aagtctctcgagccgtgcacctgcggatctacagacttatacttggttacc

SEQ ID NO: 305038 - DNA, 55 bp, Artificial
  Synthetic oligonucleotide
aagtctctcgttgtcttatacaacgatggagtcagaatcggtatgggctctagag

SEQ ID NO: 305039 - DNA, 57 bp, Artificial
  Synthetic oligonucleotide
aagtctctcttaaggaggatatggcgtacgatcccgggaacccctgcgctaatcaga

SEQ ID NO: 305040 - DNA, 58 bp, Artificial
  Synthetic oligonucleotide
aagtctctgaccattcagagaaactacgtgtgccaaggtgacgacgggttaatgatta

SEQ ID NO: 305041 - DNA, 50 bp, Artificial
  Synthetic oligonucleotide
aagtctctgcgatgccctgaagggggttataccctcggtcaaagagactc

SEQ ID NO: 305042 - DNA, 55 bp, Artificial
  Synthetic oligonucleotide
aagtctctggtgccgtgcacctgcggggcctcggacttgttcttggtgaccagac

SEQ ID NO: 305043 - DNA, 60 bp, Artificial
  Synthetic oligonucleotide
aagtctgaatgacgttcgactgatattgagctcattaatatatgactggtttgatataag

SEQ ID NO: 305044 - DNA, 60 bp, Artificial
  Synthetic oligonucleotide
aagtctgacagcgacagataaggacaggagaatatgattggtggagcaagacttaacggt

SEQ ID NO: 305045 - DNA, 55 bp, Artificial
  Synthetic oligonucleotide
aagtctgaccgataccggttgcagcacccataattccgggaataatacctaatga

SEQ ID NO: 305046 - DNA, 57 bp, Artificial
  Synthetic oligonucleotide
aagtctgcgtaggaaatgcctactgaagctggctcaagtgcttggaacagaaacagg

SEQ ID NO: 305047 - DNA, 57 bp, Artificial
  Synthetic oligonucleotide
aagtctgcttaaagtgggagctaatggatgaggattatcggggaagactttgtaatc

SEQ ID NO: 305048 - DNA, 57 bp, Artificial
  Synthetic oligonucleotide
aagtctgtacacccacaatgtggacatcggataggtgttccatcagactcatagcag

SEQ ID NO: 305049 - DNA, 54 bp, Artificial
  Synthetic oligonucleotide
aagtctgtagcaatcgggggaacggggggcaatttatatgatgccccctaaatg

SEQ ID NO: 305050 - DNA, 55 bp, Artificial
  Synthetic oligonucleotide
aagtctgtgagcgcgactggtcagataagatgaagacactccactcactggttcg

SEQ ID NO: 305051 - DNA, 51 bp, Artificial
  Synthetic oligonucleotide
aagtctgtgcaacaaccaccttgttaacctggcaactatggcggcgatagg

SEQ ID NO: 305052 - DNA, 56 bp, Artificial
  Synthetic oligonucleotide
aagtcttatataaataggacaggaacatttgaatttacgagctttttctatcgcta

SEQ ID NO: 305053 - DNA, 53 bp, Artificial
  Synthetic oligonucleotide
aagtcttccctgttgatgtgtgattgaggtaccaatatttactgtaattgcag

SEQ ID NO: 305054 - DNA, 60 bp, Artificial
  Synthetic oligonucleotide
aagtcttcttatgagcttcctcatagtctttgtttcctgagggcacaatgcctcaatcaa

SEQ ID NO: 305055 - DNA, 60 bp, Artificial
  Synthetic oligonucleotide
aagtcttgaatatccagtccatgagagtgcttagagtcctgcttaaactgctttagatct

SEQ ID NO: 305056 - DNA, 56 bp, Artificial
  Synthetic oligonucleotide
aagtcttgccgttcacatgtttattcgacggtactaggcttcgtccctttgatgac

SEQ ID NO: 305057 - DNA, 56 bp, Artificial
  Synthetic oligonucleotide
aagtctttgaacatattccttaacccattcattatctcctcctcagagccgttaaa

SEQ ID NO: 305058 - DNA, 58 bp, Artificial
  Synthetic oligonucleotide
aagtgaaaaattagcaataaccgatgttgttgatggtgtgaaccataaacttgatgta

SEQ ID NO: 305059 - DNA, 52 bp, Artificial
  Synthetic oligonucleotide
aagtgaaaagtatcaacgtatagtgaacattggaccaagaaatgagtcaatg

SEQ ID NO: 305060 - DNA, 51 bp, Artificial
  Synthetic oligonucleotide
aagtgaaaccttcccagagctgctcgactacaattggccagccagaggatc

SEQ ID NO: 305061 - DNA, 55 bp, Artificial
  Synthetic oligonucleotide
aagtgaaatgctgcggttcccttgagtgccaacccgcttcgcatgccgactacaa

SEQ ID NO: 305062 - DNA, 60 bp, Artificial
  Synthetic oligonucleotide
aagtgaacaagcagtggaagccatggaggttgccagtcaggccaggcaaatggtgcaggc

SEQ ID NO: 305063 - DNA, 60 bp, Artificial
  Synthetic oligonucleotide
aagtgaacgcgaggttgcgctcagccacaaccccagtggtagctctggaagatggggctc

SEQ ID NO: 305064 - DNA, 53 bp, Artificial
  Synthetic oligonucleotide
aagtgaacgctggaacctctggaacttttagtgtgccgaggctcaaaaaccta

SEQ ID NO: 305065 - DNA, 55 bp, Artificial
  Synthetic oligonucleotide
aagtgaactggagtatggtaactgtaataccaaatgtcagaccccagtaggtgct

SEQ ID NO: 305066 - DNA, 57 bp, Artificial
  Synthetic oligonucleotide
aagtgaagggcgaatcttcacacttggtgaccgcttgttttattatcaacgcagtag

SEQ ID NO: 305067 - DNA, 51 bp, Artificial
  Synthetic oligonucleotide
aagtgaataacggtaattatgcaaggctctacatctggggagttcaccacc

SEQ ID NO: 305068 - DNA, 58 bp, Artificial
  Synthetic oligonucleotide
aagtgaatgtgtctggcaaggattacaagaaaggtgcctttgatcctgataaccgtaa

SEQ ID NO: 305069 - DNA, 60 bp, Artificial
  Synthetic oligonucleotide
aagtgacaaggcagtggacccggacttttggacctatccacttgagcgacgctctgatga

SEQ ID NO: 305070 - DNA, 57 bp, Artificial
  Synthetic oligonucleotide
aagtgacatagcaggaactactagtacccttcaggaacaaataaattggatgacaag

SEQ ID NO: 305071 - DNA, 55 bp, Artificial
  Synthetic oligonucleotide
aagtgacatcactccccatgaatctatagaaatgtctgttttaggggaaacctct

SEQ ID NO: 305072 - DNA, 50 bp, Artificial
  Synthetic oligonucleotide
aagtgaccgtaccagggcacgcgtccaggcaaccggggtccccctcgttg

SEQ ID NO: 305073 - DNA, 57 bp, Artificial
  Synthetic oligonucleotide
aagtgacctcccaacctcaaaagcctgggggtggagagacattgtgagaggcatccg

SEQ ID NO: 305074 - DNA, 60 bp, Artificial
  Synthetic oligonucleotide
aagtgacggaaacacaaagacatgcaattggtgcacaattcacaacacaccgataaacag

SEQ ID NO: 305075 - DNA, 56 bp, Artificial
  Synthetic oligonucleotide
aagtgacgggtaatactatcccgtcacttcgtcacgccgccaggggcgctgttatc

SEQ ID NO: 305076 - DNA, 60 bp, Artificial
  Synthetic oligonucleotide
aagtgactcagcaggcagaatcacttagtcttgagtctagtggaaagtttgagttttctc

SEQ ID NO: 305077 - DNA, 58 bp, Artificial
  Synthetic oligonucleotide
aagtgactccccaaataaggacatgcttccttgttacagtgtggccagaattccacta

SEQ ID NO: 305078 - DNA, 58 bp, Artificial
  Synthetic oligonucleotide
aagtgacttcaggacccaacaacgactacctcaagatccgtactggcagcgcctacaa

SEQ ID NO: 305079 - DNA, 53 bp, Artificial
  Synthetic oligonucleotide
aagtgagaaattacgaagatttggagggactcgtgtttttagtgtaccaccat

SEQ ID NO: 305080 - DNA, 59 bp, Artificial
  Synthetic oligonucleotide
aagtgagaacatttgatatcccgaattacaggcctcaacagttatgtcaacctgtacta

SEQ ID NO: 305081 - DNA, 55 bp, Artificial
  Synthetic oligonucleotide
aagtgagattgcgcgccgtgatcatttgaatgcaagcatgcggaaggtattgatt

SEQ ID NO: 305082 - DNA, 51 bp, Artificial
  Synthetic oligonucleotide
aagtgagcccatctctagatgttgacggtcgccgtataatgtatagtaagg

SEQ ID NO: 305083 - DNA, 55 bp, Artificial
  Synthetic oligonucleotide
aagtgagctatcgtgcagggaaggccagagctattggactggatcctttagtccc

SEQ ID NO: 305084 - DNA, 55 bp, Artificial
  Synthetic oligonucleotide
aagtgagggagggttaggcgcagacggtgaaatgcctctcgctacggtcttaccg

SEQ ID NO: 305085 - DNA, 55 bp, Artificial
  Synthetic oligonucleotide
aagtgagtcccagttatttaatcgaccgtattggttaaacagagctcagggtaca

SEQ ID NO: 305086 - DNA, 57 bp, Artificial
  Synthetic oligonucleotide
aagtgagtctttcgaacacaagagctttaaattcacaatttgcatcgtggtacgcgg

SEQ ID NO: 305087 - DNA, 53 bp, Artificial
  Synthetic oligonucleotide
aagtgagttgcgtaagaaaggtttacagggctttgtggttaaggtatcaggac

SEQ ID NO: 305088 - DNA, 58 bp, Artificial
  Synthetic oligonucleotide
aagtgataacccatgcaaggttgacctgcatacacaatcaattgacggggcctggggt

SEQ ID NO: 305089 - DNA, 60 bp, Artificial
  Synthetic oligonucleotide
aagtgatacacctgtagcaacactgccgatagactatttagtaccaattctcctgcgttc

SEQ ID NO: 305090 - DNA, 57 bp, Artificial
  Synthetic oligonucleotide
aagtgatatagtagattcaacggataatgtcgtaacagccacggcaacagccgctgc

SEQ ID NO: 305091 - DNA, 54 bp, Artificial
  Synthetic oligonucleotide
aagtgatcaaaaatggagttaagtttcctgacatagttagaaaatggttattgt

SEQ ID NO: 305092 - DNA, 51 bp, Artificial
  Synthetic oligonucleotide
aagtgatcctattaacaacaaggcgcacatgcaaaaatggtggcgaaacca

SEQ ID NO: 305093 - DNA, 54 bp, Artificial
  Synthetic oligonucleotide
aagtgatgaggataaaactcagggaaccttcaaaccacccattggggtgaagcc

SEQ ID NO: 305094 - DNA, 60 bp, Artificial
  Synthetic oligonucleotide
aagtgatggctgacaggtacgtggcatggatgcaccctgaagattggcggcgtaactttt

SEQ ID NO: 305095 - DNA, 53 bp, Artificial
  Synthetic oligonucleotide
aagtgattatgttgtggctatgcgacacatgtcattagcgggactcattgctg

SEQ ID NO: 305096 - DNA, 58 bp, Artificial
  Synthetic oligonucleotide
aagtgattttgttagtatagtacagatgttcgtggctcttgctaacatggttcgtcct

SEQ ID NO: 305097 - DNA, 54 bp, Artificial
  Synthetic oligonucleotide
aagtgcaaaacgcagtgtggaacgctgggatgggggtcggagtggggaacttaa

SEQ ID NO: 305098 - DNA, 54 bp, Artificial
  Synthetic oligonucleotide
aagtgcaaacttgggagctttgctcctagctgaagttcttgggggtaacttaac

SEQ ID NO: 305099 - DNA, 57 bp, Artificial
  Synthetic oligonucleotide
aagtgcaaggtgatattagtgaggatgccggggtacgttttcggaaatgatgaatta

SEQ ID NO: 305100 - DNA, 59 bp, Artificial
  Synthetic oligonucleotide
aagtgcacaataagtccggggtgtaccatgtcacgaacgactgttccaactctagcata

SEQ ID NO: 305101 - DNA, 50 bp, Artificial
  Synthetic oligonucleotide
aagtgcaccctctcagagtgatcaagagcaattgttctccaatgtacagt

SEQ ID NO: 305102 - DNA, 55 bp, Artificial
  Synthetic oligonucleotide
aagtgcacgagttgcccgcactttacgtacacgcgttcgtcggcccgcgactgcg

SEQ ID NO: 305103 - DNA, 58 bp, Artificial
  Synthetic oligonucleotide
aagtgcactcggcaagaggcgagagcggcgactggtgagtacgccgaaaaatttttga

SEQ ID NO: 305104 - DNA, 60 bp, Artificial
  Synthetic oligonucleotide
aagtgcactggggacgcagctttttgctctgcttatgagtgcactgctcaatacgccaat

SEQ ID NO: 305105 - DNA, 52 bp, Artificial
  Synthetic oligonucleotide
aagtgcagtgccagttaagccgatcttgaagcagatagagccgtgcttaggg

SEQ ID NO: 305106 - DNA, 60 bp, Artificial
  Synthetic oligonucleotide
aagtgcagtgtctgaaggaataattgcaaatgtcgcctctccaattgcttgcatagctgc

SEQ ID NO: 305107 - DNA, 51 bp, Artificial
  Synthetic oligonucleotide
aagtgcatcggagacatcgaaagggtagttcatcgtttcaactctgtgctc

SEQ ID NO: 305108 - DNA, 60 bp, Artificial
  Synthetic oligonucleotide
aagtgcatgactgggcagccagccagtggcagttaatagtgaaaccggaaagcagccaga

SEQ ID NO: 305109 - DNA, 53 bp, Artificial
  Synthetic oligonucleotide
aagtgcatggcgtcaattgagagtgacaagacactggattatcttcgagtata

SEQ ID NO: 305110 - DNA, 56 bp, Artificial
  Synthetic oligonucleotide
aagtgccaaagtcctttgggagcaataaatacaacgttgccctttcacaatatcca

SEQ ID NO: 305111 - DNA, 60 bp, Artificial
  Synthetic oligonucleotide
aagtgccagaccagaagatgtgtcattccaggggcggggagtcttcgagctctcggacga

SEQ ID NO: 305112 - DNA, 55 bp, Artificial
  Synthetic oligonucleotide
aagtgccagctgaatctgttattctcacgtcaactgcgatcgtgagaaagtctta

SEQ ID NO: 305113 - DNA, 57 bp, Artificial
  Synthetic oligonucleotide
aagtgccatgacgaaaggtaaattcctaatctcttacaccccgcctggagcaggaga

SEQ ID NO: 305114 - DNA, 55 bp, Artificial
  Synthetic oligonucleotide
aagtgccccatccctgatagcggcgtcagtcaaggcctttgcaggagaccccgtc

SEQ ID NO: 305115 - DNA, 57 bp, Artificial
  Synthetic oligonucleotide
aagtgccccgatgcgtatgcctgtgctgggtggtagggttcaagtaactacggcaac

SEQ ID NO: 305116 - DNA, 59 bp, Artificial
  Synthetic oligonucleotide
aagtgccgatttgtatcaccgggtagcgcctgagggcaataggcacgaggcgaagattc

SEQ ID NO: 305117 - DNA, 59 bp, Artificial
  Synthetic oligonucleotide
aagtgccgggttgatccggctggttcgtagtgttcctgtgcgctgtgctgtctcaaacc

SEQ ID NO: 305118 - DNA, 60 bp, Artificial
  Synthetic oligonucleotide
aagtgcctgccatgatggcaccagttggttgacaattggaatttctggcccagacaatgg

SEQ ID NO: 305119 - DNA, 58 bp, Artificial
  Synthetic oligonucleotide
aagtgcgaaataattctttaatggatacggaataccgaactgatgacgtggtacatga

SEQ ID NO: 305120 - DNA, 54 bp, Artificial
  Synthetic oligonucleotide
aagtgcgacgagctcgcaacaaaactggttgcgttgggcatcaacgccgtggct

SEQ ID NO: 305121 - DNA, 60 bp, Artificial
  Synthetic oligonucleotide
aagtgcgattcattcatggatccacagaactcctttcttctacagccgcgggtacccaca

SEQ ID NO: 305122 - DNA, 60 bp, Artificial
  Synthetic oligonucleotide
aagtgcgcaacgtgtccgggatataccatgtcacgaacgactgctccaactcaagcattg

SEQ ID NO: 305123 - DNA, 60 bp, Artificial
  Synthetic oligonucleotide
aagtgcgctgatatagtgcaggaagcacgtaattattcgtatgcagtgcttgttaatgcc

SEQ ID NO: 305124 - DNA, 51 bp, Artificial
  Synthetic oligonucleotide
aagtgcgctgttcttatcctcgtccaagtaatccttatagcttgaattggg

SEQ ID NO: 305125 - DNA, 51 bp, Artificial
  Synthetic oligonucleotide
aagtgcggtagttcccgacactgtagtaaagggttcccctaacttttatga

SEQ ID NO: 305126 - DNA, 60 bp, Artificial
  Synthetic oligonucleotide
aagtgcgtcactgtcagctactgtctcaaatctctgtaaggtgcttagagatgttcatgg

SEQ ID NO: 305127 - DNA, 55 bp, Artificial
  Synthetic oligonucleotide
aagtgcgtggccgaagaagaggaggactactacgacttcgaggaagtaccaatgg

SEQ ID NO: 305128 - DNA, 56 bp, Artificial
  Synthetic oligonucleotide
aagtgctaggtgtcggcacatttccaacgaagtctggcgtgggaggggactatgtt

SEQ ID NO: 305129 - DNA, 60 bp, Artificial
  Synthetic oligonucleotide
aagtgctcggattgttaggggcaaactgacggagttgaacatacaaagtgagctgacata

SEQ ID NO: 305130 - DNA, 60 bp, Artificial
  Synthetic oligonucleotide
aagtgctctgttactgcgacagtgacagtaaaagctggcatcattggagctgagacatgt

SEQ ID NO: 305131 - DNA, 55 bp, Artificial
  Synthetic oligonucleotide
aagtgctcttcgacccaaccaacgaaattagaattctcaaccacgaacaagccga

SEQ ID NO: 305132 - DNA, 57 bp, Artificial
  Synthetic oligonucleotide
aagtgctgcagtctattcgagaaattcttccccagtagttcatacaggaggccagtt

SEQ ID NO: 305133 - DNA, 60 bp, Artificial
  Synthetic oligonucleotide
aagtgctgcggcgtaagcgtcgttggctgattgctgaccccctcttgcagatcgtccgtc

SEQ ID NO: 305134 - DNA, 55 bp, Artificial
  Synthetic oligonucleotide
aagtgctgggcttctatgtatctggatctgttgtcctgaagcagccgcacatgcg

SEQ ID NO: 305135 - DNA, 58 bp, Artificial
  Synthetic oligonucleotide
aagtgctggtccacttttgtgaggggatgcgttcgcaattttccacaaatgcgaacta

SEQ ID NO: 305136 - DNA, 60 bp, Artificial
  Synthetic oligonucleotide
aagtgctgtttctagatggaatagagaaggctcaagacgagcatgaaaaatatcacagca

SEQ ID NO: 305137 - DNA, 60 bp, Artificial
  Synthetic oligonucleotide
aagtgcttctgcaaactgtgcgagctacacagaagactaggcggcttctaggtacgtggc

SEQ ID NO: 305138 - DNA, 59 bp, Artificial
  Synthetic oligonucleotide
aagtgcttgccatgatggcattagttggttgacaattggtatttccggcccagacaacg

SEQ ID NO: 305139 - DNA, 60 bp, Artificial
  Synthetic oligonucleotide
aagtgcttgtgcagattaaaagtgctattgttgcagtcggaattgcgaacgtgcaattct

SEQ ID NO: 305140 - DNA, 54 bp, Artificial
  Synthetic oligonucleotide
aagtggaaccagagcacatccgactccgaggtcttcagacccctaggaggaaat

SEQ ID NO: 305141 - DNA, 59 bp, Artificial
  Synthetic oligonucleotide
aagtggaaggtatcaccccatcaagagcacaattgatgcagaggtacacgcagtgatca

SEQ ID NO: 305142 - DNA, 60 bp, Artificial
  Synthetic oligonucleotide
aagtggaattgtgtccactggatgataatatgcctcccgaatctgtttatgaagagggag

SEQ ID NO: 305143 - DNA, 52 bp, Artificial
  Synthetic oligonucleotide
aagtggacaagcgtagcgatacgctttgcttctcggagattttgctaccccg

SEQ ID NO: 305144 - DNA, 56 bp, Artificial
  Synthetic oligonucleotide
aagtggaccgccactctcccaagtggacaccgcgccacgacattcattaacaccgt

SEQ ID NO: 305145 - DNA, 53 bp, Artificial
  Synthetic oligonucleotide
aagtggacggaaacattatcgcagttgtttttaacaaaaggatggccaacagg

SEQ ID NO: 305146 - DNA, 55 bp, Artificial
  Synthetic oligonucleotide
aagtggactccagaccctgactcctggcttttagatgaccaggctgccaccttac

SEQ ID NO: 305147 - DNA, 60 bp, Artificial
  Synthetic oligonucleotide
aagtggagaggggacaggagggtactcgtcatgtgcaaggatacgtggagatgaagagac

SEQ ID NO: 305148 - DNA, 58 bp, Artificial
  Synthetic oligonucleotide
aagtggaggaaggacataggtttccgtgtcaatgcaaacacggcagccttaagcaaca

SEQ ID NO: 305149 - DNA, 55 bp, Artificial
  Synthetic oligonucleotide
aagtggaggaatcacgtaagaggagtaaattgggattctcttttgatcatgacat

SEQ ID NO: 305150 - DNA, 57 bp, Artificial
  Synthetic oligonucleotide
aagtggaggagagggcgagtagagaattcaataacttgaccaaaggactctgtacta

SEQ ID NO: 305151 - DNA, 55 bp, Artificial
  Synthetic oligonucleotide
aagtggagtgagaatggccaaatgcaacacaaagtgtcaaacatcattaggtggg

SEQ ID NO: 305152 - DNA, 60 bp, Artificial
  Synthetic oligonucleotide
aagtggatgaagtgggcgatcgatgataggatggacattcagccactcaagatcactcta

SEQ ID NO: 305153 - DNA, 55 bp, Artificial
  Synthetic oligonucleotide
aagtggatgtcactatcgaagctcagattcgtcaagagtttctagacgctgaacg

SEQ ID NO: 305154 - DNA, 56 bp, Artificial
  Synthetic oligonucleotide
aagtggattaggagattacaacatttaatttggctcttgcgacacaaggaacccaa

SEQ ID NO: 305155 - DNA, 60 bp, Artificial
  Synthetic oligonucleotide
aagtggattgagcatcttaattgcagcatacctgctaacatcatgcatatatcattaatg

SEQ ID NO: 305156 - DNA, 60 bp, Artificial
  Synthetic oligonucleotide
aagtggcagaagacccaagcgcgtctttcgcatggcgtatctactctgcattcactgcag

SEQ ID NO: 305157 - DNA, 58 bp, Artificial
  Synthetic oligonucleotide
aagtggccccttgtcaggtggtctataacggggccacctataatgtcagctgtatcaa

SEQ ID NO: 305158 - DNA, 55 bp, Artificial
  Synthetic oligonucleotide
aagtggcccgttcctatattaggctcactagccaatttcggacacagtcggaccc

SEQ ID NO: 305159 - DNA, 59 bp, Artificial
  Synthetic oligonucleotide
aagtggctacaaatgagaaactagtaataactgatgtcgttgatggtgtgaaccataaa

SEQ ID NO: 305160 - DNA, 51 bp, Artificial
  Synthetic oligonucleotide
aagtggctacgctttgatggcaaaattctggcaactgacgtttgaattgat

SEQ ID NO: 305161 - DNA, 56 bp, Artificial
  Synthetic oligonucleotide
aagtggctgcaagggttcatggattggttggaaccacaggttgtggcccccccaca

SEQ ID NO: 305162 - DNA, 60 bp, Artificial
  Synthetic oligonucleotide
aagtgggacaccaacacacagagtgctcatgtacaacttccctactaaatcagggcagtg

SEQ ID NO: 305163 - DNA, 60 bp, Artificial
  Synthetic oligonucleotide
aagtgggagcccaaattgagcgggttctcaattggaggagggctctctgcgagcgcgatc

SEQ ID NO: 305164 - DNA, 59 bp, Artificial
  Synthetic oligonucleotide
aagtgggagcctaaattgagcggaatctcaattggaggaggactctccgcgagcgcgat

SEQ ID NO: 305165 - DNA, 59 bp, Artificial
  Synthetic oligonucleotide
aagtgggatgtcatccgctgtccagtcatatggaaccctgccggagtgggtgactcggc

SEQ ID NO: 305166 - DNA, 54 bp, Artificial
  Synthetic oligonucleotide
aagtgggcccccccactaaaatatgtcccccactcagaacgcgccctcagagcc

SEQ ID NO: 305167 - DNA, 55 bp, Artificial
  Synthetic oligonucleotide
aagtgggcggatcgaatttcactggacactagtacggccgggtgacaacataacc

SEQ ID NO: 305168 - DNA, 54 bp, Artificial
  Synthetic oligonucleotide
aagtggggtttggattgttgggggcaaactgacggaattgaacatacaaagtga

SEQ ID NO: 305169 - DNA, 50 bp, Artificial
  Synthetic oligonucleotide
aagtgggtacggttgtgctcaccgctacggacgtaggcgcgtcccctacg

SEQ ID NO: 305170 - DNA, 60 bp, Artificial
  Synthetic oligonucleotide
aagtgggtgctaaactcggatctcgttccgcatgatgacaggcttggtcaattatttcag

SEQ ID NO: 305171 - DNA, 55 bp, Artificial
  Synthetic oligonucleotide
aagtgggtgtcgagctacgcggacaagttcgcggagaatcacgacccgttggggc

SEQ ID NO: 305172 - DNA, 51 bp, Artificial
  Synthetic oligonucleotide
aagtgggtttgcgtttcattactatgtcaacaatccacaacagctatctga

SEQ ID NO: 305173 - DNA, 59 bp, Artificial
  Synthetic oligonucleotide
aagtggtacacccagcaggacctgtgcgacgttaacctgttgcaacttgtggtcactgc

SEQ ID NO: 305174 - DNA, 60 bp, Artificial
  Synthetic oligonucleotide
aagtggtacccagcgacactatgcagacgcgtcacgtatgcaactaccactcgagatctg

SEQ ID NO: 305175 - DNA, 60 bp, Artificial
  Synthetic oligonucleotide
aagtggtcaaacagcagactggtatacaattggagtgtacgtcataggcttcacacttcc

SEQ ID NO: 305176 - DNA, 52 bp, Artificial
  Synthetic oligonucleotide
aagtggtcatgtgcgtcatgtacaaccaactcagcgtttaaccacgtttata

SEQ ID NO: 305177 - DNA, 52 bp, Artificial
  Synthetic oligonucleotide
aagtggtcccccccactacctcgtgtcggccaataaaaacgctccctcagag

SEQ ID NO: 305178 - DNA, 59 bp, Artificial
  Synthetic oligonucleotide
aagtggtccccgcagtcacgtgtgtccaatctaggccgctcctcaaagcttaattatga

SEQ ID NO: 305179 - DNA, 60 bp, Artificial
  Synthetic oligonucleotide
aagtggtcgaccacgagtgactgatgaaaatggcgtagtagtgaatgggctggagaacca

SEQ ID NO: 305180 - DNA, 50 bp, Artificial
  Synthetic oligonucleotide
aagtggtcgccccggcaccgagtaagtcgagacccgaacccgtggtcgtt

SEQ ID NO: 305181 - DNA, 55 bp, Artificial
  Synthetic oligonucleotide
aagtggtcgttgagtctccatttgagatttacggcaaattccgggaggcaaactc

SEQ ID NO: 305182 - DNA, 55 bp, Artificial
  Synthetic oligonucleotide
aagtggtgcggtgacccgtctcgcgtggttaggtgactcaaaacatcgttctgac

SEQ ID NO: 305183 - DNA, 60 bp, Artificial
  Synthetic oligonucleotide
aagtggtgtgtgtatgcagagacaattggcatgcttcgaaccgaccatgggtctctttcg

SEQ ID NO: 305184 - DNA, 58 bp, Artificial
  Synthetic oligonucleotide
aagtggttatgcccaaacagattgtgtattagaagcaatggctttccttgaggaatcc

SEQ ID NO: 305185 - DNA, 60 bp, Artificial
  Synthetic oligonucleotide
aagtggttggagcatgaactcaaagatgcgaaagaagacatttcaagattaagactggat

SEQ ID NO: 305186 - DNA, 56 bp, Artificial
  Synthetic oligonucleotide
aagtggtttgcgcgttctgtgaccaggtgtttcagacgactccaacaccgtcgagt

SEQ ID NO: 305187 - DNA, 57 bp, Artificial
  Synthetic oligonucleotide
aagtggtttggaactcagaaaagtaagataggtaggactgcatttgagattgagtgg

SEQ ID NO: 305188 - DNA, 54 bp, Artificial
  Synthetic oligonucleotide
aagtggtttttccactagagttacctcccgcttagacgcaattgccgaagagcg

SEQ ID NO: 305189 - DNA, 58 bp, Artificial
  Synthetic oligonucleotide
aagtgtaaaggatggtgtctagattgctgtcagtatactgatttaacctattgtcggg

SEQ ID NO: 305190 - DNA, 57 bp, Artificial
  Synthetic oligonucleotide
aagtgtaacattaacaagaggccagaatacagtcaaagtgtcagggaagggaggcca

SEQ ID NO: 305191 - DNA, 60 bp, Artificial
  Synthetic oligonucleotide
aagtgtaataactgagcatgcaatttcccagtttgataagttgcaaatggcctgtgagtt

SEQ ID NO: 305192 - DNA, 60 bp, Artificial
  Synthetic oligonucleotide
aagtgtaatcatgcgaacatagagctaatgcggagcttaacgatggtggaattgtaccat

SEQ ID NO: 305193 - DNA, 59 bp, Artificial
  Synthetic oligonucleotide
aagtgtacactcgatattaacaggtgaatcatatggcgaatccgttaaacaggcagtct

SEQ ID NO: 305194 - DNA, 60 bp, Artificial
  Synthetic oligonucleotide
aagtgtactttctagtcgttcctactgctaatggtacgatagcttcgcttgatgctaaca

SEQ ID NO: 305195 - DNA, 56 bp, Artificial
  Synthetic oligonucleotide
aagtgtagaaatcgatagtacacagatacaaaagggttctagtggtctaattattc

SEQ ID NO: 305196 - DNA, 55 bp, Artificial
  Synthetic oligonucleotide
aagtgtaggtcacgtggtcattgggcttgtgcgtgggtgtataaaagggggcgtg

SEQ ID NO: 305197 - DNA, 55 bp, Artificial
  Synthetic oligonucleotide
aagtgtattactgctttagcttctgtctgtcagatgttctgcttttggaggggag

SEQ ID NO: 305198 - DNA, 59 bp, Artificial
  Synthetic oligonucleotide
aagtgtcaaatctccagtcaagccctccagctctggactcggccgcgccaaaacagaaa

SEQ ID NO: 305199 - DNA, 56 bp, Artificial
  Synthetic oligonucleotide
aagtgtcaatatgaaaaatgtccaacaccaactcttgcgattcctccggatttaaa

SEQ ID NO: 305200 - DNA, 60 bp, Artificial
  Synthetic oligonucleotide
aagtgtcagctatacatactctggtggccgatcatataaataagcatgtgaatttgtcta

SEQ ID NO: 305201 - DNA, 55 bp, Artificial
  Synthetic oligonucleotide
aagtgtcatcgtaatctaagccaatattcattcccctagctcctcatgttcgtga

SEQ ID NO: 305202 - DNA, 60 bp, Artificial
  Synthetic oligonucleotide
aagtgtccaaagcagtggtgttcagtaatgaaagtggttcgagatgcccatggctagata

SEQ ID NO: 305203 - DNA, 53 bp, Artificial
  Synthetic oligonucleotide
aagtgtccatggtgtgaagattggggacataacgatgcagctcgccttggcta

SEQ ID NO: 305204 - DNA, 60 bp, Artificial
  Synthetic oligonucleotide
aagtgtcccgaacgacggagatcttgttgagctggcgagagcctgcctcaacatggtagt

SEQ ID NO: 305205 - DNA, 57 bp, Artificial
  Synthetic oligonucleotide
aagtgtccttcgcggaaactcattgttccctacgtcaaggtggatatgaggattcgc

SEQ ID NO: 305206 - DNA, 60 bp, Artificial
  Synthetic oligonucleotide
aagtgtctcatacggctgaagcctacgctgcacgggccaacacccttgctgtataggcta

SEQ ID NO: 305207 - DNA, 60 bp, Artificial
  Synthetic oligonucleotide
aagtgtcttaaagtgatctctgctccctctcgcactttacggctcggtagactgtgctaa

SEQ ID NO: 305208 - DNA, 60 bp, Artificial
  Synthetic oligonucleotide
aagtgtgaccaagcttggactgcatcagtgcgagtgcttgttagatttatcatagcaacg

SEQ ID NO: 305209 - DNA, 60 bp, Artificial
  Synthetic oligonucleotide
aagtgtgccaatcggaagagctttattgctcccagagtactctacattgtaccgccgatg

SEQ ID NO: 305210 - DNA, 52 bp, Artificial
  Synthetic oligonucleotide
aagtgtgccagccctgacggcagctgagaccggacacacctcgcaggtgact

SEQ ID NO: 305211 - DNA, 59 bp, Artificial
  Synthetic oligonucleotide
aagtgtgctgtgttaaattgaccgccatggatctagagcttcccgtctccgcaaagtta

SEQ ID NO: 305212 - DNA, 60 bp, Artificial
  Synthetic oligonucleotide
aagtgtgcttttgcatctgcctaccacgagtttacacagtaccatcaggaaactgtggta

SEQ ID NO: 305213 - DNA, 54 bp, Artificial
  Synthetic oligonucleotide
aagtgtggaggtaacaagtatttactagttcttgtgtgtacctactctggtggg

SEQ ID NO: 305214 - DNA, 58 bp, Artificial
  Synthetic oligonucleotide
aagtgtgggatgaggtttaacacagagcaggttcaaggagtacgacatatggtattgt

SEQ ID NO: 305215 - DNA, 56 bp, Artificial
  Synthetic oligonucleotide
aagtgtggttcgtaacgtctgacgaagtgtggagactatcgagacctgctaaacgg

SEQ ID NO: 305216 - DNA, 57 bp, Artificial
  Synthetic oligonucleotide
aagtgtgtagacgccgccctcggccccagggacaccgaggactgccacgccgctcag

SEQ ID NO: 305217 - DNA, 56 bp, Artificial
  Synthetic oligonucleotide
aagtgtgtcgacttagtgggaaggctaagcgagagttccgtaagttaatcatggag

SEQ ID NO: 305218 - DNA, 59 bp, Artificial
  Synthetic oligonucleotide
aagtgtgtgaataattctgaaactgcaattagagatgagaatttttataatttggattc

SEQ ID NO: 305219 - DNA, 60 bp, Artificial
  Synthetic oligonucleotide
aagtgtgtgcgagttattggaccttgaccagtcaactgtcagcgtgtacggtgatgatat

SEQ ID NO: 305220 - DNA, 59 bp, Artificial
  Synthetic oligonucleotide
aagtgtgtgttcccatctctcctagtcgccgcctggtcattcggtgttcacctgagtaa

SEQ ID NO: 305221 - DNA, 58 bp, Artificial
  Synthetic oligonucleotide
aagtgtgttagactgctattagacatggtgcgaggtaacgacaattggaaaaggtcag

SEQ ID NO: 305222 - DNA, 57 bp, Artificial
  Synthetic oligonucleotide
aagtgttaaatctgataaggaacctcttgctgcaaatccagtcgctacgggttataa

SEQ ID NO: 305223 - DNA, 60 bp, Artificial
  Synthetic oligonucleotide
aagtgttagaacagactactaatcaacaagcagaattggaagcatttctcatggcattga

SEQ ID NO: 305224 - DNA, 57 bp, Artificial
  Synthetic oligonucleotide
aagtgttagcggatcaaactcaacagtttaagcgagataaacttgaagcgtgggcta

SEQ ID NO: 305225 - DNA, 59 bp, Artificial
  Synthetic oligonucleotide
aagtgttatgcgctgttactcgaacagtttctactgacgctgagggatctttgagaatt

SEQ ID NO: 305226 - DNA, 51 bp, Artificial
  Synthetic oligonucleotide
aagtgttgaggtgctaactactcctaacataagttataagactagtgatca

SEQ ID NO: 305227 - DNA, 53 bp, Artificial
  Synthetic oligonucleotide
aagtgttgggttgagcctgacttagaaaaaggcccgcatgagttttgttcaca

SEQ ID NO: 305228 - DNA, 56 bp, Artificial
  Synthetic oligonucleotide
aagtgtttccctcttatggagagtgcaatctgtttctggactgaaatatttggttt

SEQ ID NO: 305229 - DNA, 55 bp, Artificial
  Synthetic oligonucleotide
aagtgtttgacgcttgaattctcactgttcttccccatcacaggttccgccagga

SEQ ID NO: 305230 - DNA, 57 bp, Artificial
  Synthetic oligonucleotide
aagtgttttgactaggtccacagctgtcatttgggaccacacgtgctttgggaccac

SEQ ID NO: 305231 - DNA, 60 bp, Artificial
  Synthetic oligonucleotide
aagtgttttggagagctggctgagtaaacaagagagtgtcacaattgggcaactggctga

SEQ ID NO: 305232 - DNA, 58 bp, Artificial
  Synthetic oligonucleotide
aagttaaaatacgccgccgggttgacataaacccaggccatgcagatctcagtgctaa

SEQ ID NO: 305233 - DNA, 56 bp, Artificial
  Synthetic oligonucleotide
aagttaacattctctctcctcttttgatctccaatacaatttcccggtgatcggag

SEQ ID NO: 305234 - DNA, 54 bp, Artificial
  Synthetic oligonucleotide
aagttaacctattagaagcctaaccagtacgttcctggatgtcgaatggttcta

SEQ ID NO: 305235 - DNA, 54 bp, Artificial
  Synthetic oligonucleotide
aagttaacggaacgcaaattgaaaattctcacgtatttattcctcacgtgtgga

SEQ ID NO: 305236 - DNA, 53 bp, Artificial
  Synthetic oligonucleotide
aagttaactgaattgtgcggtttaggacacgtcttcgcttttaattcttatta

SEQ ID NO: 305237 - DNA, 56 bp, Artificial
  Synthetic oligonucleotide
aagttaagataagaaggagagtagacataaaccctggacatgcagaccttagcgcc

SEQ ID NO: 305238 - DNA, 50 bp, Artificial
  Synthetic oligonucleotide
aagttaagcctgaaatgtcacaatcaatagttatagacatgatgcaggga

SEQ ID NO: 305239 - DNA, 52 bp, Artificial
  Synthetic oligonucleotide
aagttaaggatggttattttaccattactgacgaccacgttcactaccgtgt

SEQ ID NO: 305240 - DNA, 56 bp, Artificial
  Synthetic oligonucleotide
aagttaagtaaagcgccaaaactagcattttatgctaatttctatctttcattgac

SEQ ID NO: 305241 - DNA, 55 bp, Artificial
  Synthetic oligonucleotide
aagttaagtaacagacttgtaaacccgatagattttatgtatgatcagctacctt

SEQ ID NO: 305242 - DNA, 52 bp, Artificial
  Synthetic oligonucleotide
aagttaataacaccatatatggtaatggagttccaaaattcgattacctttg

SEQ ID NO: 305243 - DNA, 52 bp, Artificial
  Synthetic oligonucleotide
aagttaatggtaaacgccttgtggacagcccgaactcccataaacccttatc

SEQ ID NO: 305244 - DNA, 52 bp, Artificial
  Synthetic oligonucleotide
aagttaatttgcgtagaaaaacttggcgtcgcgaccgtcatccttggtcgga

SEQ ID NO: 305245 - DNA, 54 bp, Artificial
  Synthetic oligonucleotide
aagttacactccaggtaggcaaatgacatcccgccctgtggacacatcctctct

SEQ ID NO: 305246 - DNA, 55 bp, Artificial
  Synthetic oligonucleotide
aagttaccattaagccccccactctactagtagataagtggtactttcagcacga

SEQ ID NO: 305247 - DNA, 54 bp, Artificial
  Synthetic oligonucleotide
aagttacccggtaagcgctatgggtctcacgctctggaggcgtggggttaccgc

SEQ ID NO: 305248 - DNA, 51 bp, Artificial
  Synthetic oligonucleotide
aagttacccttcccgggattgcctaaacacggcctggattattagtccacg

SEQ ID NO: 305249 - DNA, 52 bp, Artificial
  Synthetic oligonucleotide
aagttaccgatttaaacttatccgagaactgattaagaggtgtaggcctcgt

SEQ ID NO: 305250 - DNA, 50 bp, Artificial
  Synthetic oligonucleotide
aagttacgagttgatgttggaatctctagcaatgattcgcccataaactg

SEQ ID NO: 305251 - DNA, 58 bp, Artificial
  Synthetic oligonucleotide
aagttacgatctctctttcgaccgagagccagatacacatggtatgggtaaaatcagg

SEQ ID NO: 305252 - DNA, 58 bp, Artificial
  Synthetic oligonucleotide
aagttacgtgtctaacaaagctagtgagttgttgttagatgctcgtgtttttgacagc

SEQ ID NO: 305253 - DNA, 56 bp, Artificial
  Synthetic oligonucleotide
aagttacgttgaatgaagataaaccgatttcggatggacatgtgaaagaattagtc

SEQ ID NO: 305254 - DNA, 57 bp, Artificial
  Synthetic oligonucleotide
aagttactaggggctctcagatataatattacctgagagccccgcgaccggtgtatc

SEQ ID NO: 305255 - DNA, 58 bp, Artificial
  Synthetic oligonucleotide
aagttactcgcaaaaacggaatagcaacgtgactgttgctccatgtgaatacacatac

SEQ ID NO: 305256 - DNA, 56 bp, Artificial
  Synthetic oligonucleotide
aagttactcggtgggtcacgttatttctggcatgttttcctacgtttatgcatgct

SEQ ID NO: 305257 - DNA, 54 bp, Artificial
  Synthetic oligonucleotide
aagttagacttaagcattcaggacgaatatcctgcgttgcagacgatagtctat

SEQ ID NO: 305258 - DNA, 57 bp, Artificial
  Synthetic oligonucleotide
aagttagaggaatttaaccacaatctattcaatttcgcattgagtcccatcgcgaaa

SEQ ID NO: 305259 - DNA, 55 bp, Artificial
  Synthetic oligonucleotide
aagttagatgttacaacgacaacttgcaccatacgcaactgtaaaaaattaggac

SEQ ID NO: 305260 - DNA, 59 bp, Artificial
  Synthetic oligonucleotide
aagttagcacccccagagtcaactgccgaggttaagacaaacacactatacatgcgaga

SEQ ID NO: 305261 - DNA, 56 bp, Artificial
  Synthetic oligonucleotide
aagttagctaacgcaatcacgaaggaggatgactctgtgattgatgaatcttcacc

SEQ ID NO: 305262 - DNA, 55 bp, Artificial
  Synthetic oligonucleotide
aagttaggggcgcttactggcacctatctctataaccatcttacccctcttcgag

SEQ ID NO: 305263 - DNA, 52 bp, Artificial
  Synthetic oligonucleotide
aagttagtaagtagtggaatcaggaaggtgctatttctagatggaatagata

SEQ ID NO: 305264 - DNA, 55 bp, Artificial
  Synthetic oligonucleotide
aagttagtcgcaacgccaatttctcgccacgtggaggtatgggccctaaggccgc

SEQ ID NO: 305265 - DNA, 55 bp, Artificial
  Synthetic oligonucleotide
aagttagtttatgacacggatttacaaatgcactgtttacgtggaccactgaaaa

SEQ ID NO: 305266 - DNA, 58 bp, Artificial
  Synthetic oligonucleotide
aagttatacgtaaaatagctggaattcatgttgctggtgatgcccgcgggaaagctta

SEQ ID NO: 305267 - DNA, 58 bp, Artificial
  Synthetic oligonucleotide
aagttatcaaatacattcttagccaagatgcaagtttacatagagtaaaaggatgtca

SEQ ID NO: 305268 - DNA, 54 bp, Artificial
  Synthetic oligonucleotide
aagttatcacacccgtcaccaaatgggtaaaacagatcgttccggttggctgtg

SEQ ID NO: 305269 - DNA, 60 bp, Artificial
  Synthetic oligonucleotide
aagttatcctggtagcagtccatgtagccagtggctatatggaagcagaagttatcccag

SEQ ID NO: 305270 - DNA, 56 bp, Artificial
  Synthetic oligonucleotide
aagttatcgtctctctcttcagttccgataaaaacctaatttcacgatgatcggag

SEQ ID NO: 305271 - DNA, 55 bp, Artificial
  Synthetic oligonucleotide
aagttatctaaaagttatacgacacaagtacacgaggcacatcgctaagcggtgt

SEQ ID NO: 305272 - DNA, 60 bp, Artificial
  Synthetic oligonucleotide
aagttatgcatagattctatgctaaggtcactggtgggcaatatgcaagcaacgagcaag

SEQ ID NO: 305273 - DNA, 51 bp, Artificial
  Synthetic oligonucleotide
aagttatgcttcttgttgcggagggttatgtacctctcaaccattatgttt

SEQ ID NO: 305274 - DNA, 55 bp, Artificial
  Synthetic oligonucleotide
aagttatggagcgtatcacagtggggtgcacaacgaagtgcgcgggcctgagcgc

SEQ ID NO: 305275 - DNA, 60 bp, Artificial
  Synthetic oligonucleotide
aagttatgtccaagcgatcaagatcactagattcggctgctttctactatagaatttaga

SEQ ID NO: 305276 - DNA, 56 bp, Artificial
  Synthetic oligonucleotide
aagttatgtcgtcaaactctatcagattatagagcagatgtagcatataatatgtg

SEQ ID NO: 305277 - DNA, 57 bp, Artificial
  Synthetic oligonucleotide
aagttcaacaaggcctctgaatgggttaacaggcccatgtataggaagcccaggata

SEQ ID NO: 305278 - DNA, 55 bp, Artificial
  Synthetic oligonucleotide
aagttcaacccgtttagaggtgggctaaacaggatcgtggagtggataatggctc

SEQ ID NO: 305279 - DNA, 56 bp, Artificial
  Synthetic oligonucleotide
aagttcaacgaccaactccaaaaggcacggtaatggacatcatatctaggaaagac

SEQ ID NO: 305280 - DNA, 60 bp, Artificial
  Synthetic oligonucleotide
aagttcaactgtgagttgtatccgcttgagcatttgggaaggcgtagtcacactgatgag

SEQ ID NO: 305281 - DNA, 59 bp, Artificial
  Synthetic oligonucleotide
aagttcaagcaatcgagatgtctaacactgcaggagttcaaagctctcaaacctccggg

SEQ ID NO: 305282 - DNA, 55 bp, Artificial
  Synthetic oligonucleotide
aagttcaaggatattatatctgtattattggtggaaactccgcccctgtatatgc

SEQ ID NO: 305283 - DNA, 60 bp, Artificial
  Synthetic oligonucleotide
aagttcaatcatttgagcagaggcatgatattgcccacacaggcaaagtgatttgcatat

SEQ ID NO: 305284 - DNA, 58 bp, Artificial
  Synthetic oligonucleotide
aagttcaccagtcgcgcttaccagcgtgttacggccaggcataacgattccaagctcg

SEQ ID NO: 305285 - DNA, 60 bp, Artificial
  Synthetic oligonucleotide
aagttcagggactacctttcctgcatggaccggcatgacttgcactgggagctcaaactg

SEQ ID NO: 305286 - DNA, 57 bp, Artificial
  Synthetic oligonucleotide
aagttcagtgcttgagttacctgtaggtgacgagactcgttacttcaaaccactcaa

SEQ ID NO: 305287 - DNA, 59 bp, Artificial
  Synthetic oligonucleotide
aagttcatagtgaaaatcctggtgagaatactttgctacatggtactttattgccataa

SEQ ID NO: 305288 - DNA, 60 bp, Artificial
  Synthetic oligonucleotide
aagttcatatgcccacctttgctgctccgggtggatgcctcgtgcaaatgctatgaatgc

SEQ ID NO: 305289 - DNA, 60 bp, Artificial
  Synthetic oligonucleotide
aagttcatggcccaatcatgaaacgaacagaggtgtgacatcagcgtgtccttatgctgg

SEQ ID NO: 305290 - DNA, 59 bp, Artificial
  Synthetic oligonucleotide
aagttccaccagggagctctaggggtgtttgcagttccagagatgtgtttggctggtga

SEQ ID NO: 305291 - DNA, 58 bp, Artificial
  Synthetic oligonucleotide
aagttccactgacccagatggatgtgataggtactttagtatccggaggaccaacatc

SEQ ID NO: 305292 - DNA, 57 bp, Artificial
  Synthetic oligonucleotide
aagttccagctctcataatacgaggacccccaaacaatgtaaagtgttatagataca

SEQ ID NO: 305293 - DNA, 51 bp, Artificial
  Synthetic oligonucleotide
aagttccatccggcaacgtccctcccgccaaccctcctggtcgaacaaacg

SEQ ID NO: 305294 - DNA, 55 bp, Artificial
  Synthetic oligonucleotide
aagttcccgatacattcaagcaacacgtattctcatctccattatgggttaagaa

SEQ ID NO: 305295 - DNA, 60 bp, Artificial
  Synthetic oligonucleotide
aagttccctctccatacaactcaaggtttgagtcagttgcttggtcagcaagtgcttgtc

SEQ ID NO: 305296 - DNA, 60 bp, Artificial
  Synthetic oligonucleotide
aagttccctgccgtacaaggcgtgatagaggagttctcacgcgacagagtacagaatgta

SEQ ID NO: 305297 - DNA, 53 bp, Artificial
  Synthetic oligonucleotide
aagttccctttgaaagcggctggtacggctgttgttagccttaaaccagacca

SEQ ID NO: 305298 - DNA, 58 bp, Artificial
  Synthetic oligonucleotide
aagttccgcttcccttgacccagctgatggtctcataagactacctacccaagctgaa

SEQ ID NO: 305299 - DNA, 55 bp, Artificial
  Synthetic oligonucleotide
aagttccgcttctagctgctgaatcatgtaacagctgacgcttaggtcataaccg

SEQ ID NO: 305300 - DNA, 59 bp, Artificial
  Synthetic oligonucleotide
aagttccggctccggaattcttcactgaggtggatggcgtgcgactacatcgctacgct

SEQ ID NO: 305301 - DNA, 50 bp, Artificial
  Synthetic oligonucleotide
aagttcgaagagacaccgcgcgtcggtacaacgacccactgacgcactga

SEQ ID NO: 305302 - DNA, 55 bp, Artificial
  Synthetic oligonucleotide
aagttcgaccctgtacccctgtggctatccatcaactgccgagtttgtcaaactg

SEQ ID NO: 305303 - DNA, 51 bp, Artificial
  Synthetic oligonucleotide
aagttcgatgggaggtagctggccgcgtagtgattatgaatctgctcgtta

SEQ ID NO: 305304 - DNA, 55 bp, Artificial
  Synthetic oligonucleotide
aagttcggaagggatctcgatgaggtttataagtttgcgacccaggagcataagg

SEQ ID NO: 305305 - DNA, 60 bp, Artificial
  Synthetic oligonucleotide
aagttcgtctgggtcgttgcatacatttgatgaagtattcggtgcaagaatccatagcca

SEQ ID NO: 305306 - DNA, 60 bp, Artificial
  Synthetic oligonucleotide
aagttcgtggcccaatcatgaaacaaacagaggtgtgacggtagcatgcccttatgctgg

SEQ ID NO: 305307 - DNA, 52 bp, Artificial
  Synthetic oligonucleotide
aagttcgttcgggaaatcgtcatcctacttcggagtaggttcacgtcctacg

SEQ ID NO: 305308 - DNA, 57 bp, Artificial
  Synthetic oligonucleotide
aagttctaaaattgaataactccgagtatattccgacttgtttgtctatatcagaca

SEQ ID NO: 305309 - DNA, 59 bp, Artificial
  Synthetic oligonucleotide
aagttctacagagtcaataattatgtggtctacaatcaccaggaagccgcgaaatacga

SEQ ID NO: 305310 - DNA, 56 bp, Artificial
  Synthetic oligonucleotide
aagttctctcttccatttacaacggcttcctctctataacccacacttcctcaaca

SEQ ID NO: 305311 - DNA, 60 bp, Artificial
  Synthetic oligonucleotide
aagttcttcgacatatgtgcagcgtttagcagcaataggcgcattatatcccaatgaatt

SEQ ID NO: 305312 - DNA, 51 bp, Artificial
  Synthetic oligonucleotide
aagttcttctatcaggtatattagtaatagaatggaggatgtttcaagagc

SEQ ID NO: 305313 - DNA, 52 bp, Artificial
  Synthetic oligonucleotide
aagttcttgtaactttgacttgcatacaagcacagctgcacaacaggctttt

SEQ ID NO: 305314 - DNA, 60 bp, Artificial
  Synthetic oligonucleotide
aagttcttgtacgatgtatggcgtgatgcggcgagagatgtatgtaatcgtagtcagact

SEQ ID NO: 305315 - DNA, 56 bp, Artificial
  Synthetic oligonucleotide
aagttctttaaagacacagccttatttcatccctgagtataaagggattgacttga

SEQ ID NO: 305316 - DNA, 57 bp, Artificial
  Synthetic oligonucleotide
aagttgaaaaaccacacgaacagcgtcatgttctggttggtcagggataggagacca

SEQ ID NO: 305317 - DNA, 58 bp, Artificial
  Synthetic oligonucleotide
aagttgaagactttgtctcgtctgctgatagtacacttaaaagctgctctgttacgta

SEQ ID NO: 305318 - DNA, 60 bp, Artificial
  Synthetic oligonucleotide
aagttgacagcacaagtatccctggccctgacaacatacccacctgtgattgcactacag

SEQ ID NO: 305319 - DNA, 51 bp, Artificial
  Synthetic oligonucleotide
aagttgagccagacagaatgacattgttcaactttcaagtccccgaaaggc

SEQ ID NO: 305320 - DNA, 52 bp, Artificial
  Synthetic oligonucleotide
aagttgagggtggtgtgccatctgggtgttcaggcactagcatatttaattc

SEQ ID NO: 305321 - DNA, 58 bp, Artificial
  Synthetic oligonucleotide
aagttgagtgaacatttaaatgtcactcgtgattttatgccggctgacactttattgc

SEQ ID NO: 305322 - DNA, 58 bp, Artificial
  Synthetic oligonucleotide
aagttgatcctcagacacccaacattcaccgtgcatacactcggggtccctgacaagg

SEQ ID NO: 305323 - DNA, 55 bp, Artificial
  Synthetic oligonucleotide
aagttgatcgaaaatgagcttaagaagcaagagtatttccggaacatcacaagtg

SEQ ID NO: 305324 - DNA, 55 bp, Artificial
  Synthetic oligonucleotide
aagttgatctccgtggcaggactcgccgtccactctggacctgacgagtaccggc

SEQ ID NO: 305325 - DNA, 55 bp, Artificial
  Synthetic oligonucleotide
aagttgatctcgaaacttggtgctaaacacatcaaagattgggaacacttggagg

SEQ ID NO: 305326 - DNA, 54 bp, Artificial
  Synthetic oligonucleotide
aagttgatttcgggctttggtggtcctgtacctttagacaagttattgactgct

SEQ ID NO: 305327 - DNA, 55 bp, Artificial
  Synthetic oligonucleotide
aagttgcagaaaagctagcattggaagccgaagatgaaggagagagcattgacgt

SEQ ID NO: 305328 - DNA, 57 bp, Artificial
  Synthetic oligonucleotide
aagttgcagcaaatccataagctcatttctctcctccaaagacagagtttgatccat

SEQ ID NO: 305329 - DNA, 59 bp, Artificial
  Synthetic oligonucleotide
aagttgcatacactacgccgcttttgtttgaaatgtgttgcatggaatcaattttagaa

SEQ ID NO: 305330 - DNA, 52 bp, Artificial
  Synthetic oligonucleotide
aagttgcctgacccaaataggtttggcctacccgacaatacaatttacaacc

SEQ ID NO: 305331 - DNA, 51 bp, Artificial
  Synthetic oligonucleotide
aagttgcgtatgtgttgagcttgctaggtataattggtataacagcgtatg

SEQ ID NO: 305332 - DNA, 55 bp, Artificial
  Synthetic oligonucleotide
aagttgcgtgttcctggagagtgctttgctgagtttaccgagtcttgtggcaaat

SEQ ID NO: 305333 - DNA, 60 bp, Artificial
  Synthetic oligonucleotide
aagttgctagtcaggctaggcagatggtgcaggcaatgagaactattgggactcatccta

SEQ ID NO: 305334 - DNA, 60 bp, Artificial
  Synthetic oligonucleotide
aagttgctatgacgggaaagcatggttgcacgtctgtgttactggggatgatagaaatgc

SEQ ID NO: 305335 - DNA, 59 bp, Artificial
  Synthetic oligonucleotide
aagttgctcttttgtccacatgtttcgcataactacctcaattggctatcttttgagcc

SEQ ID NO: 305336 - DNA, 60 bp, Artificial
  Synthetic oligonucleotide
aagttgctgatgctctcataaccttatgtaacccaagagactagctcatgttgccaggca

SEQ ID NO: 305337 - DNA, 58 bp, Artificial
  Synthetic oligonucleotide
aagttggaagaagcgaatattaagaacacaagagtctgaatgtgtctgtatgaacggt

SEQ ID NO: 305338 - DNA, 58 bp, Artificial
  Synthetic oligonucleotide
aagttggaaggtgacgctcgtcagactcagttttccaggacctttgactcgagatcaa

SEQ ID NO: 305339 - DNA, 60 bp, Artificial
  Synthetic oligonucleotide
aagttggaatcaatgagggtctatcagattctggcgatctattcaaccgtcgccagttca

SEQ ID NO: 305340 - DNA, 60 bp, Artificial
  Synthetic oligonucleotide
aagttggacgcggcggcctacttgctgctgccagaccaggagaccgcacatgtgactgcg

SEQ ID NO: 305341 - DNA, 60 bp, Artificial
  Synthetic oligonucleotide
aagttggataaggctaggagcatgaagatgctccgaattttatgcaagccaagagggaat

SEQ ID NO: 305342 - DNA, 55 bp, Artificial
  Synthetic oligonucleotide
aagttggccaacctatgggagcatatagttcttgagctgcttttaccttaactca

SEQ ID NO: 305343 - DNA, 55 bp, Artificial
  Synthetic oligonucleotide
aagttggctgagtgaagacatcaaatcatcaagatgtagtgaatgccttgctaac

SEQ ID NO: 305344 - DNA, 54 bp, Artificial
  Synthetic oligonucleotide
aagttggctggtcccggagcattcgatgtaaacaccgggcccaactgggcaacg

SEQ ID NO: 305345 - DNA, 55 bp, Artificial
  Synthetic oligonucleotide
aagttgggataccgggtatcggctaaaaaggcccagctctgccagaaagaggtca

SEQ ID NO: 305346 - DNA, 55 bp, Artificial
  Synthetic oligonucleotide
aagttgggtcacatttataagaccatgggaccacgtgggccaactccaaacacga

SEQ ID NO: 305347 - DNA, 53 bp, Artificial
  Synthetic oligonucleotide
aagttggtctacagggaacggggaggtgtactctacaggaggttctgggaaca

SEQ ID NO: 305348 - DNA, 55 bp, Artificial
  Synthetic oligonucleotide
aagttggttgtccaaggacccacactcctgaggaactagccgcaacgtaccactc

SEQ ID NO: 305349 - DNA, 55 bp, Artificial
  Synthetic oligonucleotide
aagttgtaagtgcttaatgaaaggatgattgaagaaagactttccgggcttgtgc

SEQ ID NO: 305350 - DNA, 60 bp, Artificial
  Synthetic oligonucleotide
aagttgtacccagatatattgatgctggattgctgctcggttatcacacccagaactggg

SEQ ID NO: 305351 - DNA, 53 bp, Artificial
  Synthetic oligonucleotide
aagttgtacgctactcagtcatcatcaattcaagaagttgtgccgacgaagac

SEQ ID NO: 305352 - DNA, 52 bp, Artificial
  Synthetic oligonucleotide
aagttgtgacattctattggtcgacgaggttagtatgttgaccaattatgaa

SEQ ID NO: 305353 - DNA, 57 bp, Artificial
  Synthetic oligonucleotide
aagttgtggtcgataacttgaattggtcaggatacagtggctctttcacattaccgg

SEQ ID NO: 305354 - DNA, 59 bp, Artificial
  Synthetic oligonucleotide
aagttgtgttgtggttagattgccagcatagacacccggctgcccactcccttcagccc

SEQ ID NO: 305355 - DNA, 50 bp, Artificial
  Synthetic oligonucleotide
aagttgttacagacataacattgacgcgtgcccagagatcatacgctatt

SEQ ID NO: 305356 - DNA, 55 bp, Artificial
  Synthetic oligonucleotide
aagttgttactaagcgtccaaagccatacaggactagacgctggattacaaggtg

SEQ ID NO: 305357 - DNA, 55 bp, Artificial
  Synthetic oligonucleotide
aagttgttggaggactagataacggggtatcaccttacacagggaattctggaga

SEQ ID NO: 305358 - DNA, 53 bp, Artificial
  Synthetic oligonucleotide
aagtttaacaacgaaattttgtttgctcctgttaccagctccaccaactccga

SEQ ID NO: 305359 - DNA, 56 bp, Artificial
  Synthetic oligonucleotide
aagtttacaactttattcaacatggaagctaaggtgatggaacctgcagtacctta

SEQ ID NO: 305360 - DNA, 52 bp, Artificial
  Synthetic oligonucleotide
aagtttacagcattagccccgaccaaagcgcttttaggccgatggaaagcag

SEQ ID NO: 305361 - DNA, 58 bp, Artificial
  Synthetic oligonucleotide
aagtttacaggtttaggaatatacgataacctattagtcatccccacacatgctgatc

SEQ ID NO: 305362 - DNA, 57 bp, Artificial
  Synthetic oligonucleotide
aagtttactcaattggactccatcagggatatggtctttaattcacctgctaaagga

SEQ ID NO: 305363 - DNA, 59 bp, Artificial
  Synthetic oligonucleotide
aagtttagattacccatactaaaagagacatgggacacatggtggtcagaatattggca

SEQ ID NO: 305364 - DNA, 60 bp, Artificial
  Synthetic oligonucleotide
aagtttagtctagtcaggatagtgtctagatctgcattctgcgtgttggttggtaaagac

SEQ ID NO: 305365 - DNA, 55 bp, Artificial
  Synthetic oligonucleotide
aagtttagtgagcggattcttacctcttatctgggacgacctgaggagcctgtgc

SEQ ID NO: 305366 - DNA, 58 bp, Artificial
  Synthetic oligonucleotide
aagtttatcactcaatatggttgtctcacagttgagagaagaatccaataccagaaag

SEQ ID NO: 305367 - DNA, 51 bp, Artificial
  Synthetic oligonucleotide
aagtttatggtccaatcatgactcgaacaaaggtgtaacggcagcatgtcc

SEQ ID NO: 305368 - DNA, 55 bp, Artificial
  Synthetic oligonucleotide
aagtttatgtatgaccctagccctgtaccggagggggacttcgcaagacttgatc

SEQ ID NO: 305369 - DNA, 60 bp, Artificial
  Synthetic oligonucleotide
aagtttatgtgttgtcatgacacaaagtgctctagtacagggttagttgcagctgcacca

SEQ ID NO: 305370 - DNA, 60 bp, Artificial
  Synthetic oligonucleotide
aagtttattagaacggctgattccgctctcatgcacggacttccgtcatgtcagcggttg

SEQ ID NO: 305371 - DNA, 55 bp, Artificial
  Synthetic oligonucleotide
aagtttattatgttttgtgttgttgggccttagtgctattggacctattgggcca

SEQ ID NO: 305372 - DNA, 55 bp, Artificial
  Synthetic oligonucleotide
aagtttattgaacagctttgtatagtttttgactacccctgacaaatgattggac

SEQ ID NO: 305373 - DNA, 59 bp, Artificial
  Synthetic oligonucleotide
aagtttcaccttcgggccgagtctatcagactgtccggcattcaaggatggaatactca

SEQ ID NO: 305374 - DNA, 52 bp, Artificial
  Synthetic oligonucleotide
aagtttcagtatggaggattgctcgattctcggagttataacgcacttacga

SEQ ID NO: 305375 - DNA, 59 bp, Artificial
  Synthetic oligonucleotide
aagtttcatacagagactaggaccgtctggcaactctccgtagccggcgtgtcgtgcga

SEQ ID NO: 305376 - DNA, 59 bp, Artificial
  Synthetic oligonucleotide
aagtttctgcctcctcggacttatccgttgccgccatctctgctatgttcgcggacgga

SEQ ID NO: 305377 - DNA, 59 bp, Artificial
  Synthetic oligonucleotide
aagtttgacttcgcacaggatgcatacgtcgatgaggcagggttcctaaggttgcctcc

SEQ ID NO: 305378 - DNA, 60 bp, Artificial
  Synthetic oligonucleotide
aagtttgattgcaccgaacacatcacaaactggtgacgtagatggagaaagtatcttaga

SEQ ID NO: 305379 - DNA, 56 bp, Artificial
  Synthetic oligonucleotide
aagtttgcgagcactccggcccaaaggttgagagtacccagagggaggagatccac

SEQ ID NO: 305380 - DNA, 51 bp, Artificial
  Synthetic oligonucleotide
aagtttgcggaaacgagcgccgaccccttgacggagtttatcgaatggagg

SEQ ID NO: 305381 - DNA, 55 bp, Artificial
  Synthetic oligonucleotide
aagtttgctcctgaattccatggagaagatgcaaacaacagagctaccaaattcc

SEQ ID NO: 305382 - DNA, 50 bp, Artificial
  Synthetic oligonucleotide
aagtttggtattatgcaggtgacgagaaagggcggaagttagccgtggaa

SEQ ID NO: 305383 - DNA, 55 bp, Artificial
  Synthetic oligonucleotide
aagtttggtgagtcgatgcctcggtttacagatatgtctaccgtacagcgttcag

SEQ ID NO: 305384 - DNA, 54 bp, Artificial
  Synthetic oligonucleotide
aagtttggtgtgttagatatcaatctgtgtgttcacatcgctaggatggccaca

SEQ ID NO: 305385 - DNA, 55 bp, Artificial
  Synthetic oligonucleotide
aagtttgttacagcccccattggttttgtgtaccccacaggtgttagcactcaga

SEQ ID NO: 305386 - DNA, 60 bp, Artificial
  Synthetic oligonucleotide
aagtttgttctcacaccacatgtatcagagagagctcaggtcaggggggtcgtcaagcta

SEQ ID NO: 305387 - DNA, 48 bp, Artificial
  Synthetic oligonucleotide
aagttttaaaactgggggtaggtgaaggtcaataccccgggactaatc

SEQ ID NO: 305388 - DNA, 50 bp, Artificial
  Synthetic oligonucleotide
aagttttaccgtcatcccgacgttaaagggaaccaaccacaagcttggaa

SEQ ID NO: 305389 - DNA, 51 bp, Artificial
  Synthetic oligonucleotide
aagttttaccgtcgttcccgacgttaaagggagataaccacacgcttgaga

SEQ ID NO: 305390 - DNA, 51 bp, Artificial
  Synthetic oligonucleotide
aagttttaccgtctgtcccgacgttaaagggaggtaaccataagcatacta

SEQ ID NO: 305391 - DNA, 57 bp, Artificial
  Synthetic oligonucleotide
aagttttagttgtgtaatgcatggtaatgcgataaacttagatagtatttattttgc

SEQ ID NO: 305392 - DNA, 58 bp, Artificial
  Synthetic oligonucleotide
aagttttcaaaatcggactgcacactgagttccagactgtgtccttctcaatggtggg

SEQ ID NO: 305393 - DNA, 57 bp, Artificial
  Synthetic oligonucleotide
aagttttcattaataagagaatcgttgagcgcgtacgggttggacagattctggctg

SEQ ID NO: 305394 - DNA, 55 bp, Artificial
  Synthetic oligonucleotide
aagttttcttcgaagaataataattacaagccagccgccgcaggtaagactctag

SEQ ID NO: 305395 - DNA, 54 bp, Artificial
  Synthetic oligonucleotide
aagttttggtagctcctcaacttccggtgttacgagtggcaatacgactacacc

SEQ ID NO: 305396 - DNA, 53 bp, Artificial
  Synthetic oligonucleotide
aagttttggtatgtcaatcacaccttgacagggcagcacactttaccaagatg

SEQ ID NO: 305397 - DNA, 58 bp, Artificial
  Synthetic oligonucleotide
aagtttttaaacctggaactgacacattcctacagcaagtggtgacgaaatgatggca

SEQ ID NO: 305398 - DNA, 60 bp, Artificial
  Synthetic oligonucleotide
aagtttttagcctggaactgacacaatcctgcatgaacgagcgcaagagaatggcagacc

SEQ ID NO: 305399 - DNA, 58 bp, Artificial
  Synthetic oligonucleotide
aagttttttaaccctatatcacgatgactagcataagcctgaccattgctccagacct

SEQ ID NO: 305400 - DNA, 49 bp, Artificial
  Synthetic oligonucleotide
aagttttttaaccctcgacatttttgaaagacgacaaacacggtgaaaa

SEQ ID NO: 305401 - DNA, 55 bp, Artificial
  Synthetic oligonucleotide
aagttttttaagcctttgtctaccatgactaccggaacagatgtacggatatcat

SEQ ID NO: 305402 - DNA, 57 bp, Artificial
  Synthetic oligonucleotide
aagttttttgagtctgagatactgttacccattgcgaccctgagaacgagttcaaca

SEQ ID NO: 305403 - DNA, 56 bp, Artificial
  Synthetic oligonucleotide
aagtttttttcaccgacctgcatgaccctacatacacatggtggaacaaagtttca

SEQ ID NO: 305404 - DNA, 56 bp, Artificial
  Synthetic oligonucleotide
aagtttttttcaggatgttgaaagtaaatgtgcaggccctcatttatcctttcagc

SEQ ID NO: 305405 - DNA, 55 bp, Artificial
  Synthetic oligonucleotide
aagtttttttcgcactgtctaaagatgactggcacccatgacgaccggatttctt

SEQ ID NO: 305406 - DNA, 54 bp, Artificial
  Synthetic oligonucleotide
aataaaacaaccgtaaacccaggagtagtacgtgcaggttggagtggcatagtc

SEQ ID NO: 305407 - DNA, 52 bp, Artificial
  Synthetic oligonucleotide
aataaaacagacgttatgacaacgcccggtgataacctgagctctgaacagc

SEQ ID NO: 305408 - DNA, 51 bp, Artificial
  Synthetic oligonucleotide
aataaaacattcggaataaacaaaattgggagttacacaataccaccaaaa

SEQ ID NO: 305409 - DNA, 52 bp, Artificial
  Synthetic oligonucleotide
aataaaaccgggaatataaccgggaataagaccgagatcgaagtcttcagac

SEQ ID NO: 305410 - DNA, 60 bp, Artificial
  Synthetic oligonucleotide
aataaaacgtgtgcggacgggcatgatcgaagacgccatctctgccgtagaagctagaat

SEQ ID NO: 305411 - DNA, 51 bp, Artificial
  Synthetic oligonucleotide
aataaaagcgggctggccgaacccttgtttgacccgtttgcaaacgccgtc

SEQ ID NO: 305412 - DNA, 52 bp, Artificial
  Synthetic oligonucleotide
aataaaatacacccacgtcactaattaattagtaaacaccatcataaccggg

SEQ ID NO: 305413 - DNA, 59 bp, Artificial
  Synthetic oligonucleotide
aataaaatagattacatgcgcgtcatgcctttgtgggttacctattggcctctgacaaa

SEQ ID NO: 305414 - DNA, 57 bp, Artificial
  Synthetic oligonucleotide
aataaaattacgtcagagttgtttaagtcggctgaggaatatacggattcattgatg

SEQ ID NO: 305415 - DNA, 57 bp, Artificial
  Synthetic oligonucleotide
aataaacacttggtaccatgcccaaggttcttaaacgtcgcaagcgtgcttctgcca

SEQ ID NO: 305416 - DNA, 53 bp, Artificial
  Synthetic oligonucleotide
aataaaccaactttttgcggttggcacctgtgtcccgatggtatatataaaaa

SEQ ID NO: 305417 - DNA, 59 bp, Artificial
  Synthetic oligonucleotide
aataaaccactgatatcgtatcgacatatagtaatgcaatccagagataggtttttacg

SEQ ID NO: 305418 - DNA, 51 bp, Artificial
  Synthetic oligonucleotide
aataaacctgacgctaacgacgatgtagcgggctaaacccggtgctagcga

SEQ ID NO: 305419 - DNA, 59 bp, Artificial
  Synthetic oligonucleotide
aataaaccttcagaatatgagatatgctcaaaccagtctgcccaactttgtatcgggac

SEQ ID NO: 305420 - DNA, 54 bp, Artificial
  Synthetic oligonucleotide
aataaacggtggccgtgggagcttcacttgtcggtgtctacctcttaaggtcac

SEQ ID NO: 305421 - DNA, 58 bp, Artificial
  Synthetic oligonucleotide
aataaacgtaggaccgatatctccagattatacccaacatatggctacaattggtgta

SEQ ID NO: 305422 - DNA, 51 bp, Artificial
  Synthetic oligonucleotide
aataaactaaactttattcgcgtatttgtgcattcccgttgcccacccaca

SEQ ID NO: 305423 - DNA, 59 bp, Artificial
  Synthetic oligonucleotide
aataaactctacattcccccgacgcctgtcgccaggattctcagtacagatgactatat

SEQ ID NO: 305424 - DNA, 53 bp, Artificial
  Synthetic oligonucleotide
aataaacttgtcagttggccaacgtttacccgcggataatacaactcgcgacg

SEQ ID NO: 305425 - DNA, 52 bp, Artificial
  Synthetic oligonucleotide
aataaagatccctttgtagtcccgatcggaagtcggggtactcagcccgtac

SEQ ID NO: 305426 - DNA, 50 bp, Artificial
  Synthetic oligonucleotide
aataaagccatgcgtggtaatgtaccacaattaaaagatgtagtattgca

SEQ ID NO: 305427 - DNA, 58 bp, Artificial
  Synthetic oligonucleotide
aataaagcgccactggatctaatggactgcaccactgaaggttggatacttggaaacc

SEQ ID NO: 305428 - DNA, 59 bp, Artificial
  Synthetic oligonucleotide
aataaagctgccagttagaagcaagttaagtgtgtgttcccatctctcctagtcgccgc

SEQ ID NO: 305429 - DNA, 59 bp, Artificial
  Synthetic oligonucleotide
aataaagctgccatttagaagtaagccagtgtgtgttcccatctctcctagccgccgcc

SEQ ID NO: 305430 - DNA, 55 bp, Artificial
  Synthetic oligonucleotide
aataaagtacactcgagacctttacaacaaacacctaagcatgaacaacgaagac

SEQ ID NO: 305431 - DNA, 60 bp, Artificial
  Synthetic oligonucleotide
aataaagttgcctgcttaagagtctatctgagcaagtgcctcattgcgcgcccttcctca

SEQ ID NO: 305432 - DNA, 60 bp, Artificial
  Synthetic oligonucleotide
aataaatatattgacacaccagtgtaccatggcgctgcagagttgattgttttccaacga

SEQ ID NO: 305433 - DNA, 60 bp, Artificial
  Synthetic oligonucleotide
aataaatatcatatgaattgtagtggagttaagatgattgatagtgacaaaactatcaat

SEQ ID NO: 305434 - DNA, 59 bp, Artificial
  Synthetic oligonucleotide
aataaatggatttcaatgggatcgtcttgtactataaaagtatgtccactgaatacgca

SEQ ID NO: 305435 - DNA, 56 bp, Artificial
  Synthetic oligonucleotide
aataaattgcggcctatcgaaggcaattacgttgagtcgcgacagtcccgtaatta

SEQ ID NO: 305436 - DNA, 55 bp, Artificial
  Synthetic oligonucleotide
aataacaatcatgtcaggactgaatttccattcgcagcctctcaataccagaccc

SEQ ID NO: 305437 - DNA, 50 bp, Artificial
  Synthetic oligonucleotide
aataacaatcgcagggcgattcgtctaccgtgccagccgattcatggatc

SEQ ID NO: 305438 - DNA, 55 bp, Artificial
  Synthetic oligonucleotide
aataacaatcggggtagtgaacactactctatcaacaatagcccttctcattgga

SEQ ID NO: 305439 - DNA, 55 bp, Artificial
  Synthetic oligonucleotide
aataacaattggttccgtctctctaaccattgcaacagtacgtttccttatgcag

SEQ ID NO: 305440 - DNA, 58 bp, Artificial
  Synthetic oligonucleotide
aataacaccttataaaccagctactatactttcagaccagatagatagtcgcagagcc

SEQ ID NO: 305441 - DNA, 60 bp, Artificial
  Synthetic oligonucleotide
aataacacgaggcttttgtgataaatagttatagcctctgcgtcagtcacagtagttctc

SEQ ID NO: 305442 - DNA, 58 bp, Artificial
  Synthetic oligonucleotide
aataacagagattttctgggggacgagttgacttacttggatccgagcattgaagatc

SEQ ID NO: 305443 - DNA, 56 bp, Artificial
  Synthetic oligonucleotide
aataacaggttgatcttggacaatttaagtgccctggatctaggaccagttaactg

SEQ ID NO: 305444 - DNA, 55 bp, Artificial
  Synthetic oligonucleotide
aataacagttggctctgtctctctaaccattgcaatagtatgtttcctcatgcag

SEQ ID NO: 305445 - DNA, 57 bp, Artificial
  Synthetic oligonucleotide
aataacatgataaacaacgatcttggaccagcaacttcccaaatggctcttcaactg

SEQ ID NO: 305446 - DNA, 55 bp, Artificial
  Synthetic oligonucleotide
aataaccagaggcggtgagttcagaacgcatgaagacgagtgtgaactatcggat

SEQ ID NO: 305447 - DNA, 55 bp, Artificial
  Synthetic oligonucleotide
aataaccattggatacgtttgcatgacgcttggggcaatcagcttaacactgcaa

SEQ ID NO: 305448 - DNA, 58 bp, Artificial
  Synthetic oligonucleotide
aataaccgtcgtggacgtggcatgaatatggcggcgctttcccggcttagtcagcctg

SEQ ID NO: 305449 - DNA, 55 bp, Artificial
  Synthetic oligonucleotide
aataacctctcgctagcatctcagtatgactggcagactcagaacgccgtagata

SEQ ID NO: 305450 - DNA, 55 bp, Artificial
  Synthetic oligonucleotide
aataacgattactagaattaacagggatgctatcgtgttattggctggtgtatgc

SEQ ID NO: 305451 - DNA, 60 bp, Artificial
  Synthetic oligonucleotide
aataacggatcgcgctcacgcttacttgcaaagtgcgcggcaccactaacagccaggtcg

SEQ ID NO: 305452 - DNA, 54 bp, Artificial
  Synthetic oligonucleotide
aataacgggtggcccgttcctagtcatcgtcgaggggcaaataatcgctcccac

SEQ ID NO: 305453 - DNA, 59 bp, Artificial
  Synthetic oligonucleotide
aataacggtcacagtggccccaatgagcgccgaatattatggtctacgattggccagca

SEQ ID NO: 305454 - DNA, 54 bp, Artificial
  Synthetic oligonucleotide
aataacgtacaccatacgatgccataataacgtacaccatacgatgccataata

SEQ ID NO: 305455 - DNA, 58 bp, Artificial
  Synthetic oligonucleotide
aataactacggcgcagggggctcatgaaaacccgctgctaatcgttatcagtacgcag

SEQ ID NO: 305456 - DNA, 57 bp, Artificial
  Synthetic oligonucleotide
aataactacggtattcaataatctaacgaatactatgccttctataagagttaatca

SEQ ID NO: 305457 - DNA, 55 bp, Artificial
  Synthetic oligonucleotide
aataactcaaccgacacagttgacacagtactcgagaagaacgtaaccgtgacac

SEQ ID NO: 305458 - DNA, 56 bp, Artificial
  Synthetic oligonucleotide
aataactccgaatctgtcgaagtacccaagaacttgattgcgtaagaccctcaaga

SEQ ID NO: 305459 - DNA, 51 bp, Artificial
  Synthetic oligonucleotide
aataacttacacggttccggttctttcgtacgtggcaacatggcagcacat

SEQ ID NO: 305460 - DNA, 60 bp, Artificial
  Synthetic oligonucleotide
aataacttcagttataatggtggatcactaccaactgattttggtgtatcaagatatgaa

SEQ ID NO: 305461 - DNA, 55 bp, Artificial
  Synthetic oligonucleotide
aataactttcccaatcgggttgtgctcgtagatgatttgacttgtcaacgggccc

SEQ ID NO: 305462 - DNA, 60 bp, Artificial
  Synthetic oligonucleotide
aataagaaaagaagcaccggtgtcgccgtgtgacagccaatcacgcgctggttagagcca

SEQ ID NO: 305463 - DNA, 58 bp, Artificial
  Synthetic oligonucleotide
aataagaaacggacttcacgatacgccacaacaagcacgagctcttctagcgaaacca

SEQ ID NO: 305464 - DNA, 59 bp, Artificial
  Synthetic oligonucleotide
aataagaacgcgaacattttacgctcgatggaagtactgaaattcgacagtgtgaatga

SEQ ID NO: 305465 - DNA, 55 bp, Artificial
  Synthetic oligonucleotide
aataagaagataccctgttcttaggccaatgagagggactgctcccggcccaacc

SEQ ID NO: 305466 - DNA, 60 bp, Artificial
  Synthetic oligonucleotide
aataagaatacatattactctctttgtcttcgcatatgtcggtcaacacgactattattg

SEQ ID NO: 305467 - DNA, 57 bp, Artificial
  Synthetic oligonucleotide
aataagacaatagtctttaaaccacactcaggaggagacctagaactaacaatgcat

SEQ ID NO: 305468 - DNA, 55 bp, Artificial
  Synthetic oligonucleotide
aataagagaggctatctaataagagcactgacattgaatacgatgaccaaagatg

SEQ ID NO: 305469 - DNA, 55 bp, Artificial
  Synthetic oligonucleotide
aataagaggtcaatccctgaaatagcaacaaggccaacagtcaacggacaagggg

SEQ ID NO: 305470 - DNA, 60 bp, Artificial
  Synthetic oligonucleotide
aataagatcatgtgttacattacaagatgcaagaatagtgttagaggcaaatgttatgga

SEQ ID NO: 305471 - DNA, 55 bp, Artificial
  Synthetic oligonucleotide
aataagatgggtggcaagttgtcaaaacgtagtatgtttggctggtctagggtaa

SEQ ID NO: 305472 - DNA, 55 bp, Artificial
  Synthetic oligonucleotide
aataagcagacacgtaaaacgacgtggggtcgtgaatcacgacgtcatcgattca

SEQ ID NO: 305473 - DNA, 57 bp, Artificial
  Synthetic oligonucleotide
aataagcgcttcgtgaagtagttcaataattatgactagttattaagagagcttggg

SEQ ID NO: 305474 - DNA, 57 bp, Artificial
  Synthetic oligonucleotide
aataagctgcctacagagcctgtaatgaaagggaataatatggaaaacacccacaaa

SEQ ID NO: 305475 - DNA, 60 bp, Artificial
  Synthetic oligonucleotide
aataagctgtcgtcaagccgacgtacatccgagtcgctcgagagcaacctggtccaatca

SEQ ID NO: 305476 - DNA, 60 bp, Artificial
  Synthetic oligonucleotide
aataagctttcccatcacactctgcatattctctaggcattctggcactattatagtttg

SEQ ID NO: 305477 - DNA, 60 bp, Artificial
  Synthetic oligonucleotide
aataaggagaatcgtgcatgatattccaccatgctggaatgagacgcaaggagataaacg

SEQ ID NO: 305478 - DNA, 53 bp, Artificial
  Synthetic oligonucleotide
aataaggaggtgaacattccaccggatatttcctggttaagaccaatactacg

SEQ ID NO: 305479 - DNA, 55 bp, Artificial
  Synthetic oligonucleotide
aataaggatcctgcgatcctcatactccgacccgaataatcacgaggtatacata

SEQ ID NO: 305480 - DNA, 52 bp, Artificial
  Synthetic oligonucleotide
aataagggcccgacgtcaggctcgtcgttaaaccgagaccgacacccacctg

SEQ ID NO: 305481 - DNA, 52 bp, Artificial
  Synthetic oligonucleotide
aataagggttacgcgacggactggtaccttaagaatagcaagtctaagggaa

SEQ ID NO: 305482 - DNA, 58 bp, Artificial
  Synthetic oligonucleotide
aataaggtacatccgtatcgtctgtgttgtgagtatccgactttggttgaggatccca

SEQ ID NO: 305483 - DNA, 57 bp, Artificial
  Synthetic oligonucleotide
aataagtccaatgttaacaaaccatctagggttagatggattgctttcacagatttc

SEQ ID NO: 305484 - DNA, 59 bp, Artificial
  Synthetic oligonucleotide
aataagtcgcacggagtcctccgtggcatagcccactagagtgttgtcatccccaggca

SEQ ID NO: 305485 - DNA, 60 bp, Artificial
  Synthetic oligonucleotide
aataagtctgatgtgccccttgatatttgccagtctacgtgtaaatatcctgactactta

SEQ ID NO: 305486 - DNA, 54 bp, Artificial
  Synthetic oligonucleotide
aataagtttgcaaaaattatgaaccttagacaaagtgttgttggtgatcttaaa

SEQ ID NO: 305487 - DNA, 55 bp, Artificial
  Synthetic oligonucleotide
aataagtttgctagtacgcgccaaatagaaggaacaccagtcgagactaagattg

SEQ ID NO: 305488 - DNA, 60 bp, Artificial
  Synthetic oligonucleotide
aataataatagagaggaacataacagagatagtgtatttgaataacaccaccatagagaa

SEQ ID NO: 305489 - DNA, 60 bp, Artificial
  Synthetic oligonucleotide
aataatacggaacagaatagagcaattaatatcacagtgtagattgtgagagctctattg

SEQ ID NO: 305490 - DNA, 55 bp, Artificial
  Synthetic oligonucleotide
aataatagaggatagtggcccacctattgaggatgaggcgataccaggggcccca

SEQ ID NO: 305491 - DNA, 58 bp, Artificial
  Synthetic oligonucleotide
aataatatagtgtctagaggaatagctttgaccgagaaagcgaaattaaattcatatg

SEQ ID NO: 305492 - DNA, 57 bp, Artificial
  Synthetic oligonucleotide
aataatatctgggttcaagaataattgtgttgaagaacacaacaatgaaacgacttg

SEQ ID NO: 305493 - DNA, 60 bp, Artificial
  Synthetic oligonucleotide
aataatcaggctcctgtatcaaagcagtaagtagaagcttttactgtaaatgcatccaag

SEQ ID NO: 305494 - DNA, 59 bp, Artificial
  Synthetic oligonucleotide
aataatctgggggatccatcattccggatcaaccacagaacagaccaaattatatggga

SEQ ID NO: 305495 - DNA, 58 bp, Artificial
  Synthetic oligonucleotide
aataatgaaccgagcggatacgcacaaacggactgcgtgttggaagcaatggctttcc

SEQ ID NO: 305496 - DNA, 60 bp, Artificial
  Synthetic oligonucleotide
aataatgactggaccagtactctgtcttgcagatagacattgcttgcaagacttcgtacc

SEQ ID NO: 305497 - DNA, 60 bp, Artificial
  Synthetic oligonucleotide
aataatgagggaaagaacattatcttcatgtggggcatacatcacccacctactgacact

SEQ ID NO: 305498 - DNA, 55 bp, Artificial
  Synthetic oligonucleotide
aataatgaggttaacgaaatcgcggtagtggacgagcatgtaaatacaaatgaca

SEQ ID NO: 305499 - DNA, 60 bp, Artificial
  Synthetic oligonucleotide
aataatggatctagatgatacagctgtttatgcacagatggagagaggacgttggttata

SEQ ID NO: 305500 - DNA, 57 bp, Artificial
  Synthetic oligonucleotide
aataatgggaacaagtgcattaactcagccaattagtttgttgcttaagggaatgac

SEQ ID NO: 305501 - DNA, 51 bp, Artificial
  Synthetic oligonucleotide
aataatgggagccttacaatcgacccttcagacaggatcagaagaacttag

SEQ ID NO: 305502 - DNA, 55 bp, Artificial
  Synthetic oligonucleotide
aataatgtagtatgcagtggaggttcttatagttttgcgttacctgtaggcaatc

SEQ ID NO: 305503 - DNA, 60 bp, Artificial
  Synthetic oligonucleotide
aataatgtcgcatttctcagaagttgcagaagcctacattgaaaagaggaacgcaacaga

SEQ ID NO: 305504 - DNA, 60 bp, Artificial
  Synthetic oligonucleotide
aataatgttgcgtatggctcgcttgtctttggtggtgggtttgaatgctatgctcacaat

SEQ ID NO: 305505 - DNA, 60 bp, Artificial
  Synthetic oligonucleotide
aataattatctgtcagcatttaagatcaagcctggtgagataatcgaccgttctagagca

SEQ ID NO: 305506 - DNA, 51 bp, Artificial
  Synthetic oligonucleotide
aataattcatgtataaaactaagggtgtaaccgaaatcggttgaaccgaaa

SEQ ID NO: 305507 - DNA, 60 bp, Artificial
  Synthetic oligonucleotide
aataattgaaggaagagaccgagcaatggcctggacagtggtgaatagcatctgcaacac

SEQ ID NO: 305508 - DNA, 59 bp, Artificial
  Synthetic oligonucleotide
aataatttttccttgggcctagagtgtgctattatggaggagtgtgggatgccgcagtg

SEQ ID NO: 305509 - DNA, 60 bp, Artificial
  Synthetic oligonucleotide
aatacaaaatactagaaatgtagtaccagtgagcataacatcgagagaaataagacacac

SEQ ID NO: 305510 - DNA, 55 bp, Artificial
  Synthetic oligonucleotide
aatacaaacacaaccataatggtgcagaaaggcaactttaagggccctagaagga

SEQ ID NO: 305511 - DNA, 53 bp, Artificial
  Synthetic oligonucleotide
aatacaaacagcacgcaaaatagtacaaataatgacaccattataacacttcc

SEQ ID NO: 305512 - DNA, 60 bp, Artificial
  Synthetic oligonucleotide
aatacaacagccacagcatatgatgactctgtatcctatactaaaggatactttcaacca

SEQ ID NO: 305513 - DNA, 56 bp, Artificial
  Synthetic oligonucleotide
aatacaacgacttacttctctattaaagctacgtggcgacgtaagatatctctaaa

SEQ ID NO: 305514 - DNA, 60 bp, Artificial
  Synthetic oligonucleotide
aatacaacgagagcatgtgcccagaggtgatgatggtgttcctaagagaactaggaataa

SEQ ID NO: 305515 - DNA, 54 bp, Artificial
  Synthetic oligonucleotide
aatacaacgcacacccggcattcccccacgtattaggtccaccactattggtac

SEQ ID NO: 305516 - DNA, 51 bp, Artificial
  Synthetic oligonucleotide
aatacaacgtgatttaatgattgcaggaggtgtgttcatcggaggaatcct

SEQ ID NO: 305517 - DNA, 54 bp, Artificial
  Synthetic oligonucleotide
aatacaagacaaagtataaggtttggaccaggacaagtattctttggaacagac

SEQ ID NO: 305518 - DNA, 56 bp, Artificial
  Synthetic oligonucleotide
aatacaagacctaccattatggttaataacatggggatggatagaatggctaaaaa

SEQ ID NO: 305519 - DNA, 60 bp, Artificial
  Synthetic oligonucleotide
aatacaagacgaagtacacatataggaccagggcaagcattatatacaaatcacataata

SEQ ID NO: 305520 - DNA, 60 bp, Artificial
  Synthetic oligonucleotide
aatacaagcactatgcactttactgatgaaaggatagagtggaaagaccctgatggaatg

SEQ ID NO: 305521 - DNA, 60 bp, Artificial
  Synthetic oligonucleotide
aatacaaggcgaccagagctccactcacgtggccggttgacttgaagcagaggtgaggag

SEQ ID NO: 305522 - DNA, 55 bp, Artificial
  Synthetic oligonucleotide
aatacaagtctcgggaactgtttgattatgtgcggtatggtttacgacctcttgg

SEQ ID NO: 305523 - DNA, 60 bp, Artificial
  Synthetic oligonucleotide
aatacaatggatggacgtatcagaaggcaccgtgatgaacgaggctgtcaacgctgttgc

SEQ ID NO: 305524 - DNA, 60 bp, Artificial
  Synthetic oligonucleotide
aatacaatggcataataacagacactatcaagagttggaggaacagcatactgagaactc

SEQ ID NO: 305525 - DNA, 56 bp, Artificial
  Synthetic oligonucleotide
aatacacactaacggacaagacaaaggttggtcaaaggttgtcacgcaagacaatc

SEQ ID NO: 305526 - DNA, 58 bp, Artificial
  Synthetic oligonucleotide
aatacacatccgcgggctacattacttgctggtaccagactaacatagtggtcccgcc

SEQ ID NO: 305527 - DNA, 58 bp, Artificial
  Synthetic oligonucleotide
aatacacattggtggtgatggtactagaggatttgcagccctattgaagagagactac

SEQ ID NO: 305528 - DNA, 55 bp, Artificial
  Synthetic oligonucleotide
aatacaccacccttaaagatgcttacgattccactatctctagttgggaccttta

SEQ ID NO: 305529 - DNA, 54 bp, Artificial
  Synthetic oligonucleotide
aatacaccaggactccccgtctgtcaagaccacctggaattttgggagggcgta

SEQ ID NO: 305530 - DNA, 60 bp, Artificial
  Synthetic oligonucleotide
aatacaccgtctcggtgcagctgcgtctgctctgcgagagggtcagggctcatcaggacg

SEQ ID NO: 305531 - DNA, 55 bp, Artificial
  Synthetic oligonucleotide
aatacaccttgtgtcaagagtgtgagtagagtgtgagtagagcgcaagatccgtg

SEQ ID NO: 305532 - DNA, 60 bp, Artificial
  Synthetic oligonucleotide
aatacacctttgtgttgaagtccagatgtccactgagataattatgtgggcctaatgcac

SEQ ID NO: 305533 - DNA, 55 bp, Artificial
  Synthetic oligonucleotide
aatacacgacaggactgcattcagaggattaatatcaactcctttgggaagcccc

SEQ ID NO: 305534 - DNA, 55 bp, Artificial
  Synthetic oligonucleotide
aatacacgacaggactgctttcagagggctgatatcaactccattagggagcccc

SEQ ID NO: 305535 - DNA, 60 bp, Artificial
  Synthetic oligonucleotide
aatacacgagatacaacaggtagaggggcatgatacagttgaacaatgtagtatgggcag

SEQ ID NO: 305536 - DNA, 55 bp, Artificial
  Synthetic oligonucleotide
aatacactcaagcccctcataggtgggtttattgacggccttagactaatgaccg

SEQ ID NO: 305537 - DNA, 60 bp, Artificial
  Synthetic oligonucleotide
aatacactcatggaccgttgatcgtacaagatcatttaattgggccattgacattgttat

SEQ ID NO: 305538 - DNA, 55 bp, Artificial
  Synthetic oligonucleotide
aatacactgttactggttctgctgggcagtggagtatttctaaagaatatgagcc

SEQ ID NO: 305539 - DNA, 60 bp, Artificial
  Synthetic oligonucleotide
aatacactttttctgatggacagtatactgctgcaacaacttggagtggcacacaactct

SEQ ID NO: 305540 - DNA, 59 bp, Artificial
  Synthetic oligonucleotide
aatacagaatacaatgtctgcagatgtgcagacgacaacattaaactggttttgtgtgt

SEQ ID NO: 305541 - DNA, 56 bp, Artificial
  Synthetic oligonucleotide
aatacagacctgtctaatagtacaggaagtaatgaaaacatcacgcttccatgcag

SEQ ID NO: 305542 - DNA, 59 bp, Artificial
  Synthetic oligonucleotide
aatacagattgacccagtcaaactaagcagcggctacaaagatgtgatactttggttta

SEQ ID NO: 305543 - DNA, 54 bp, Artificial
  Synthetic oligonucleotide
aatacagccatgttttttcttgttagtgacaggaggccgtttggaactccccag

SEQ ID NO: 305544 - DNA, 57 bp, Artificial
  Synthetic oligonucleotide
aatacagtactgtcacccgacggtagtgtataactatttgagttccagagctccaaa

SEQ ID NO: 305545 - DNA, 57 bp, Artificial
  Synthetic oligonucleotide
aatacagtagcaaccctctattgcgtacaccaacaactaggtgtaagagacaccaag

SEQ ID NO: 305546 - DNA, 54 bp, Artificial
  Synthetic oligonucleotide
aatacagttatcccgtttaactcagttgctgttcgggctgtaaagacaggaccc

SEQ ID NO: 305547 - DNA, 53 bp, Artificial
  Synthetic oligonucleotide
aatacagttgaaacaggtaaagtttgtgtcttgtttataacgtcactttcaac

SEQ ID NO: 305548 - DNA, 60 bp, Artificial
  Synthetic oligonucleotide
aatacataaagtctggccaactcaagctagccactggactcagaaatgtgccagctatat

SEQ ID NO: 305549 - DNA, 53 bp, Artificial
  Synthetic oligonucleotide
aatacatcacaactgtttaatagtacctggaagattactgaagaggtaaataa

SEQ ID NO: 305550 - DNA, 51 bp, Artificial
  Synthetic oligonucleotide
aatacatcacaactgtttaatagtacttggtttcagaatggtaatagtact

SEQ ID NO: 305551 - DNA, 56 bp, Artificial
  Synthetic oligonucleotide
aatacatcacgactgtttaataatacttgcataggaaatgaaaccagggaagggtg

SEQ ID NO: 305552 - DNA, 60 bp, Artificial
  Synthetic oligonucleotide
aatacatcgttatcgcaatgactctttgttattcgatcagcgttagctgcagatgttaca

SEQ ID NO: 305553 - DNA, 58 bp, Artificial
  Synthetic oligonucleotide
aatacatcgtttctaatagaaactgtatcttacagtatctgtatcacgaaataatatt

SEQ ID NO: 305554 - DNA, 57 bp, Artificial
  Synthetic oligonucleotide
aatacatgaatacaccccaagttacaatctctttataaaaactgcctcatctggtat

SEQ ID NO: 305555 - DNA, 59 bp, Artificial
  Synthetic oligonucleotide
aatacatgaggacgatatgggcgggagacgagagtcgaggtttgtatattcccacgaga

SEQ ID NO: 305556 - DNA, 55 bp, Artificial
  Synthetic oligonucleotide
aatacatgcaagattaacggtgagttcgacgccgttagtttctgtggactaaaat

SEQ ID NO: 305557 - DNA, 60 bp, Artificial
  Synthetic oligonucleotide
aatacatgtattgcgaaagtttaatgccaccgaatctggtggccaatatgcttgtaagga

SEQ ID NO: 305558 - DNA, 60 bp, Artificial
  Synthetic oligonucleotide
aatacatgtgtcacccagacagtcgacttcagcttggaccctaccttcaccattgagacg

SEQ ID NO: 305559 - DNA, 56 bp, Artificial
  Synthetic oligonucleotide
aatacatgttaatatcttcgaccttgtacctacgggggtagtttgcactgttctgc

SEQ ID NO: 305560 - DNA, 53 bp, Artificial
  Synthetic oligonucleotide
aatacattaaaaggcttcagacgtaaggcccggctaaaatactctgagtatta

SEQ ID NO: 305561 - DNA, 60 bp, Artificial
  Synthetic oligonucleotide
aatacattatggttagagaggggcagaatggcatgtgacacatacgcaactggaaaaatt

SEQ ID NO: 305562 - DNA, 60 bp, Artificial
  Synthetic oligonucleotide
aatacattccgtacacgtattcatacacttgcactcgtatacacattgtacatttcgtct

SEQ ID NO: 305563 - DNA, 52 bp, Artificial
  Synthetic oligonucleotide
aatacattgatgcctcctttcttagagccacaaagcttggcttcagatagaa

SEQ ID NO: 305564 - DNA, 57 bp, Artificial
  Synthetic oligonucleotide
aatacattgcttcagtatactctagtgggcaaagttcccagatggccttggagaatc

SEQ ID NO: 305565 - DNA, 60 bp, Artificial
  Synthetic oligonucleotide
aataccaacctccaacaatccaataacagagacctgtgcacttgaccactatatagcact

SEQ ID NO: 305566 - DNA, 53 bp, Artificial
  Synthetic oligonucleotide
aataccaccagtaaacgttgacaaaccaataccattagggaggagagacgtac

SEQ ID NO: 305567 - DNA, 54 bp, Artificial
  Synthetic oligonucleotide
aataccaccagtaaatgttgacaaaccgataccattagggaggagagacgtacc

SEQ ID NO: 305568 - DNA, 55 bp, Artificial
  Synthetic oligonucleotide
aataccaccagtgaacgtcgacagaccaataccgttagggaggagagacgtgcca

SEQ ID NO: 305569 - DNA, 55 bp, Artificial
  Synthetic oligonucleotide
aataccagaggaacaaacttcacaatatcagtattaggtgaaaagcaggacagcg

SEQ ID NO: 305570 - DNA, 60 bp, Artificial
  Synthetic oligonucleotide
aataccagatggtaatgttattaagaagatacaatatggggctgtagcgtcaggagagaa

SEQ ID NO: 305571 - DNA, 60 bp, Artificial
  Synthetic oligonucleotide
aataccagcatcttggattaatagcacgcatagagaaattataatgtttgccgtagataa

SEQ ID NO: 305572 - DNA, 60 bp, Artificial
  Synthetic oligonucleotide
aataccagtgttattgagtatctagaaatgccagagagtgatcatttcatgaacaataca

SEQ ID NO: 305573 - DNA, 57 bp, Artificial
  Synthetic oligonucleotide
aataccatttcatacatatttatcgatacaaacacattttttcagatggttacaaaa

SEQ ID NO: 305574 - DNA, 56 bp, Artificial
  Synthetic oligonucleotide
aatacccaaacgctgggaataggatgtcagactacaaatactggaacgtttgaaga

SEQ ID NO: 305575 - DNA, 54 bp, Artificial
  Synthetic oligonucleotide
aatacccctacaaatctgtgggcataaagctaaaggtacagtactcgttggggc

SEQ ID NO: 305576 - DNA, 54 bp, Artificial
  Synthetic oligonucleotide
aatacccgaacttaattgtcagtggaggaagattaggagtgctttctccgaaac

SEQ ID NO: 305577 - DNA, 51 bp, Artificial
  Synthetic oligonucleotide
aataccctttcacaatcgtggggtaataccacagtcccattgtcaatccct

SEQ ID NO: 305578 - DNA, 55 bp, Artificial
  Synthetic oligonucleotide
aataccgatccggctctctactttaacattgagtttccgtcaagtcatcgtctct

SEQ ID NO: 305579 - DNA, 58 bp, Artificial
  Synthetic oligonucleotide
aataccgcaaaaaagatctatagtacaattggaaaagcggcggagcgattcgctgaga

SEQ ID NO: 305580 - DNA, 60 bp, Artificial
  Synthetic oligonucleotide
aataccgcaaaatgttgcaaatcgcttcggagtttatgacaagaactcgcatttgccata

SEQ ID NO: 305581 - DNA, 53 bp, Artificial
  Synthetic oligonucleotide
aataccgcatatgccctagagtcgattaaagctcttgttcgacaagctggtat

SEQ ID NO: 305582 - DNA, 58 bp, Artificial
  Synthetic oligonucleotide
aataccgctatatgatgcgatcaaatgtatgaagaccttcttcggttggaaggagccc

SEQ ID NO: 305583 - DNA, 56 bp, Artificial
  Synthetic oligonucleotide
aataccggagttatttgtagtgtgattacatcatggttaatagccgaggtacggta

SEQ ID NO: 305584 - DNA, 56 bp, Artificial
  Synthetic oligonucleotide
aataccgggtgcaggcgcattgctacggcaagggctacagaaacgagggtttcgac

SEQ ID NO: 305585 - DNA, 55 bp, Artificial
  Synthetic oligonucleotide
aataccggttggggactgcatgcgcccaccaagatgtacggaggcgcccgcaaac

SEQ ID NO: 305586 - DNA, 60 bp, Artificial
  Synthetic oligonucleotide
aataccgtacggttgccagatctttgccggttgcagtgatagcggcccaaaatgcatcaa

SEQ ID NO: 305587 - DNA, 59 bp, Artificial
  Synthetic oligonucleotide
aataccgtatacattcaggtgacagtagtacggtcagtgagaagcagtttgttaatctc

SEQ ID NO: 305588 - DNA, 55 bp, Artificial
  Synthetic oligonucleotide
aataccgtctcttgatcaaagatcccaccaaagtgtcttaaagtgatctctgctc

SEQ ID NO: 305589 - DNA, 60 bp, Artificial
  Synthetic oligonucleotide
aatacctaaactacagaacaggaatatacagtgccatattcctttcagcaggcagactgt

SEQ ID NO: 305590 - DNA, 60 bp, Artificial
  Synthetic oligonucleotide
aatacctaaaggatcaggcacagctaaattcatggggatgtgcatttaggcaagtctgcc

SEQ ID NO: 305591 - DNA, 53 bp, Artificial
  Synthetic oligonucleotide
aatacctacccatgctgatccaggtaaaagtgttaatatagatggggttgaag

SEQ ID NO: 305592 - DNA, 55 bp, Artificial
  Synthetic oligonucleotide
aatacctcaaccataacacaagcctgtccaaaggtcacgtttgacccaattccta

SEQ ID NO: 305593 - DNA, 59 bp, Artificial
  Synthetic oligonucleotide
aatacctcagaatcgaagagtttgtggtatattaaagacgagcgttacagcatgctaat

SEQ ID NO: 305594 - DNA, 54 bp, Artificial
  Synthetic oligonucleotide
aatacctggaagagcaccccagtgtcgggaaggaccccaagaagactggaggcc

SEQ ID NO: 305595 - DNA, 54 bp, Artificial
  Synthetic oligonucleotide
aatacctggaagagcatcccagtgcggggaaggacccgaagaaaactggaggtc

SEQ ID NO: 305596 - DNA, 55 bp, Artificial
  Synthetic oligonucleotide
aatacctgggttatgccattctagcctggaagtcactacatgaccccatgacagc

SEQ ID NO: 305597 - DNA, 50 bp, Artificial
  Synthetic oligonucleotide
aataccttctcaaattgatacaccttatagtagtgaccatccaactgatg

SEQ ID NO: 305598 - DNA, 55 bp, Artificial
  Synthetic oligonucleotide
aataccttgatggtagtcattgctatgtactattcttgttgtaagcaagggtggt

SEQ ID NO: 305599 - DNA, 60 bp, Artificial
  Synthetic oligonucleotide
aataccttggtcaacgatcttgcaaagcggcgtctatatgacacagcggtcgatgaattt

SEQ ID NO: 305600 - DNA, 55 bp, Artificial
  Synthetic oligonucleotide
aatacgacaacaccctctgagcccgcctcttctgacccgtccccagactccgacg

SEQ ID NO: 305601 - DNA, 55 bp, Artificial
  Synthetic oligonucleotide
aatacgagattggagctcgctacgaacgcgtaggggaggctttcgctcccgtccc

SEQ ID NO: 305602 - DNA, 57 bp, Artificial
  Synthetic oligonucleotide
aatacgatacacacctaacgcgacataattttcgaaccggtatgctccaaggaatca

SEQ ID NO: 305603 - DNA, 60 bp, Artificial
  Synthetic oligonucleotide
aatacgatcagtaggatcaacggcatcagcttgggctaacatttcagagcagacgcagga

SEQ ID NO: 305604 - DNA, 54 bp, Artificial
  Synthetic oligonucleotide
aatacgatggaactccggtccccggatttgggttccatcgatacgtcatatagg

SEQ ID NO: 305605 - DNA, 55 bp, Artificial
  Synthetic oligonucleotide
aatacgattaagagttgctaatcaggtgaggatccagctagctgataacgacatt

SEQ ID NO: 305606 - DNA, 59 bp, Artificial
  Synthetic oligonucleotide
aatacgattcaactctagaattagatatgtctgaattggcggacctcatattaaatgaa

SEQ ID NO: 305607 - DNA, 54 bp, Artificial
  Synthetic oligonucleotide
aatacgatttgcccaacattaaggattttgtagaacgcgctaaacaccgaagga

SEQ ID NO: 305608 - DNA, 59 bp, Artificial
  Synthetic oligonucleotide
aatacgcaactggaatatgagctccgtaccacacatcgagcaagtccacaaattctcga

SEQ ID NO: 305609 - DNA, 51 bp, Artificial
  Synthetic oligonucleotide
aatacgcaggcacccggtgccggtggaattgtcagctcgcttatttccagc

SEQ ID NO: 305610 - DNA, 55 bp, Artificial
  Synthetic oligonucleotide
aatacgccacaagggtactacccgatatgggacgggtatgagacaaataatctcg

SEQ ID NO: 305611 - DNA, 58 bp, Artificial
  Synthetic oligonucleotide
aatacgcggagcaagcgggcctaatagacctatcgagaatctagctattagacgggta

SEQ ID NO: 305612 - DNA, 57 bp, Artificial
  Synthetic oligonucleotide
aatacgctatccggccaatgcattcacggggttaacgtgggttatgagttttgatgc

SEQ ID NO: 305613 - DNA, 60 bp, Artificial
  Synthetic oligonucleotide
aatacgctgaagcatacaacgaaatgattgagaaacttacgaaagccttagagccgatga

SEQ ID NO: 305614 - DNA, 55 bp, Artificial
  Synthetic oligonucleotide
aatacgcttcactaatacatagcatgctcgcaaagcacgccgcgaggcacaatgg

SEQ ID NO: 305615 - DNA, 51 bp, Artificial
  Synthetic oligonucleotide
aatacggaaccacatcacgagcactctctccaatgggatcaaaattctgaa

SEQ ID NO: 305616 - DNA, 57 bp, Artificial
  Synthetic oligonucleotide
aatacggatacgattatcgcgagaacggctggtaagcgataattttatacagcgtaa

SEQ ID NO: 305617 - DNA, 55 bp, Artificial
  Synthetic oligonucleotide
aatacgggtctgaaccaattagttgctggcacgagtctagttggtttaaacactg

SEQ ID NO: 305618 - DNA, 58 bp, Artificial
  Synthetic oligonucleotide
aatacggtcactcacccaacgcctgtactgtggaggcccaatgtataacagcaagggc

SEQ ID NO: 305619 - DNA, 60 bp, Artificial
  Synthetic oligonucleotide
aatacggttggctgcgactgcttgaagacggttggctgcgactgcttgaagacggcaggg

SEQ ID NO: 305620 - DNA, 54 bp, Artificial
  Synthetic oligonucleotide
aatacgtaaccgtaccccacatcttcctcccagagaactataactgccgcaccc

SEQ ID NO: 305621 - DNA, 55 bp, Artificial
  Synthetic oligonucleotide
aatacgtgatttaatttctgtcgtcagggccaaaagctatgtcgaagcgaccagc

SEQ ID NO: 305622 - DNA, 55 bp, Artificial
  Synthetic oligonucleotide
aatacgttccccattatgcaagcaaaatggatgtcacttgtgtaagatccacgat

SEQ ID NO: 305623 - DNA, 56 bp, Artificial
  Synthetic oligonucleotide
aatacgttccggctggctttgaagttactcgtgtgcgtccttgtgtagcaccgaag

SEQ ID NO: 305624 - DNA, 56 bp, Artificial
  Synthetic oligonucleotide
aatactaacaccatataagctacgcgactcggagataatactaaataaagtcgcaa

SEQ ID NO: 305625 - DNA, 60 bp, Artificial
  Synthetic oligonucleotide
aatactacagcaatagtagtagcggggtggacagatagggttatagaggtagcacaagca

SEQ ID NO: 305626 - DNA, 60 bp, Artificial
  Synthetic oligonucleotide
aatactactgtcggtgtgccattggctctagacgcgagagctataactgtcgcgctactg

SEQ ID NO: 305627 - DNA, 60 bp, Artificial
  Synthetic oligonucleotide
aatactagggttgagtgcatagggtggtcaagcacatcatgccatgatggcatgtcaaga

SEQ ID NO: 305628 - DNA, 54 bp, Artificial
  Synthetic oligonucleotide
aatactagtaaagacactgagcggagggggacatctggaacgagagggaaaggg

SEQ ID NO: 305629 - DNA, 55 bp, Artificial
  Synthetic oligonucleotide
aatactatagggagttgggatccacaatgaaagtggaacccactgtctacgaact

SEQ ID NO: 305630 - DNA, 54 bp, Artificial
  Synthetic oligonucleotide
aatactattttccacgagctcgcttacgacggatcactgacggtgctcaaacga

SEQ ID NO: 305631 - DNA, 52 bp, Artificial
  Synthetic oligonucleotide
aatactcatacacaaaactaatggcgcccatatactattcagcagttagaaa

SEQ ID NO: 305632 - DNA, 53 bp, Artificial
  Synthetic oligonucleotide
aatactccaaacattcgccaaatcgcgtttggtaattgggagtagtggaaagg

SEQ ID NO: 305633 - DNA, 59 bp, Artificial
  Synthetic oligonucleotide
aatactccaatggtggaccatttctaactcctatagtaccaacagcagacacacaatat

SEQ ID NO: 305634 - DNA, 59 bp, Artificial
  Synthetic oligonucleotide
aatactccacgaagtcaaacctgttacatctgggtgctttcctataatgcacgacagaa

SEQ ID NO: 305635 - DNA, 56 bp, Artificial
  Synthetic oligonucleotide
aatactcccagtggctctcttgtgtcttctgaggcccagttgtttaataaacctta

SEQ ID NO: 305636 - DNA, 60 bp, Artificial
  Synthetic oligonucleotide
aatactcgacaacacaacaccatgcgtgacttaacttctgtctcaagtcttgtatctcgt

SEQ ID NO: 305637 - DNA, 55 bp, Artificial
  Synthetic oligonucleotide
aatactcttaagaaacgcaaggtctgaggacgtaaacgagtccagattcggcaaa

SEQ ID NO: 305638 - DNA, 57 bp, Artificial
  Synthetic oligonucleotide
aatactcttttcgttgcgtgctattcttagtaggtgtgactcaaccgtctggagtct

SEQ ID NO: 305639 - DNA, 59 bp, Artificial
  Synthetic oligonucleotide
aatactgactggagtcgcacaacaacattgccttatataggtccgacctcgaattacta

SEQ ID NO: 305640 - DNA, 58 bp, Artificial
  Synthetic oligonucleotide
aatactgcaatccccataggatcttgcgttagtaaatgtcacaccgacaggggttcaa

SEQ ID NO: 305641 - DNA, 60 bp, Artificial
  Synthetic oligonucleotide
aatactgcaggatggcgttgcgattagaaggattggtgacgcgatttcctttttcatgaa

SEQ ID NO: 305642 - DNA, 60 bp, Artificial
  Synthetic oligonucleotide
aatactgcggtccccataggatcctgcactagtaaatgccataccgacagaggttcaatc

SEQ ID NO: 305643 - DNA, 50 bp, Artificial
  Synthetic oligonucleotide
aatactgctgctaggcctgtaaattcgcaaccattctgctgtttatagtt

SEQ ID NO: 305644 - DNA, 59 bp, Artificial
  Synthetic oligonucleotide
aatactggatgtttgactttaagacattctcgtcggacaaggcgtatggagcaccagtg

SEQ ID NO: 305645 - DNA, 58 bp, Artificial
  Synthetic oligonucleotide
aatactgtgatgttcttcttagtccgtgacagaaggccttatggtactccacaagatt

SEQ ID NO: 305646 - DNA, 55 bp, Artificial
  Synthetic oligonucleotide
aatacttatacacttgatacctaaagactcttaaaaaatgaccagtcggagactg

SEQ ID NO: 305647 - DNA, 57 bp, Artificial
  Synthetic oligonucleotide
aatacttcactgttttaacacggcgagtatatctaccagagcgagtataacgacgag

SEQ ID NO: 305648 - DNA, 51 bp, Artificial
  Synthetic oligonucleotide
aatacttccctcgtaagttttgggttcaaatatgtgggaccctttagagaa

SEQ ID NO: 305649 - DNA, 55 bp, Artificial
  Synthetic oligonucleotide
aatacttgcataggaaatgaaaccatagaggggtgtaatggcactatcatacttc

SEQ ID NO: 305650 - DNA, 58 bp, Artificial
  Synthetic oligonucleotide
aatacttggcgggcctgtcaacgttgcctggcaaccccgcaattgcttcgttgatggc

SEQ ID NO: 305651 - DNA, 54 bp, Artificial
  Synthetic oligonucleotide
aatacttgggtcttaaataccctcaagaaacgccaggtctgaggctgtaaggtc

SEQ ID NO: 305652 - DNA, 52 bp, Artificial
  Synthetic oligonucleotide
aatactttccgagaacgcagaatttgaggatttaaaagacggcaagttttac

SEQ ID NO: 305653 - DNA, 52 bp, Artificial
  Synthetic oligonucleotide
aatagaaattacgtaagaattttttgcgcacatagggcgaacaaagcgatta

SEQ ID NO: 305654 - DNA, 55 bp, Artificial
  Synthetic oligonucleotide
aatagaacctttcagaatgtaagccccctgtggataggagagtgtcccgaatacg

SEQ ID NO: 305655 - DNA, 55 bp, Artificial
  Synthetic oligonucleotide
aatagaagatcctacagatgaaagaagaacagccctacaaaggttagccctaagg

SEQ ID NO: 305656 - DNA, 59 bp, Artificial
  Synthetic oligonucleotide
aatagaagatcctacagatgaaagaagaactgcattacaaaggttagcacaaagagaat

SEQ ID NO: 305657 - DNA, 50 bp, Artificial
  Synthetic oligonucleotide
aatagaagatggtagttatgtcacatatcacatagatcaggtatattcat

SEQ ID NO: 305658 - DNA, 60 bp, Artificial
  Synthetic oligonucleotide
aatagaataagggcagagtggataacagccacatacgatagaggcaggattagagcgcta

SEQ ID NO: 305659 - DNA, 59 bp, Artificial
  Synthetic oligonucleotide
aatagaatcgaaaacttaatatcgcagtgtaggttgtagctgtctattttaagatgtga

SEQ ID NO: 305660 - DNA, 57 bp, Artificial
  Synthetic oligonucleotide
aatagacacaagcgtggaatcatggtaggaataaacccgcactcacgtgagtggtcc

SEQ ID NO: 305661 - DNA, 53 bp, Artificial
  Synthetic oligonucleotide
aatagacagtagttattggaagtctatgtctaaggtgtttttagaacaaaaag

SEQ ID NO: 305662 - DNA, 53 bp, Artificial
  Synthetic oligonucleotide
aatagacatactcggccgtaaaaggttaccaatttgctaagaagctaggtaaa

SEQ ID NO: 305663 - DNA, 60 bp, Artificial
  Synthetic oligonucleotide
aatagacatgcagaggatagctctatattcccgcttagtctatctgggaaattaaatcct

SEQ ID NO: 305664 - DNA, 56 bp, Artificial
  Synthetic oligonucleotide
aatagacccacggaaacataggatcttattcgcaggggatgacatgtgctccctga

SEQ ID NO: 305665 - DNA, 60 bp, Artificial
  Synthetic oligonucleotide
aatagacgcgaccattgaagtccaggtgtccactgagatagttatgtgggcctaacgcac

SEQ ID NO: 305666 - DNA, 55 bp, Artificial
  Synthetic oligonucleotide
aatagactaaatggctgtgaagtactttcctaccgtaatcacaacggcctaccat

SEQ ID NO: 305667 - DNA, 54 bp, Artificial
  Synthetic oligonucleotide
aatagactacgagcaagcgttccagtacgtgtacggtaaacgagccgtacaccc

SEQ ID NO: 305668 - DNA, 60 bp, Artificial
  Synthetic oligonucleotide
aatagactcgagaattgaaatccaaatggcccatgagataattgtgtggacccagtgctc

SEQ ID NO: 305669 - DNA, 57 bp, Artificial
  Synthetic oligonucleotide
aatagactggagtctaccgatggaggagagagcagttgtagcggaacacaacccgac

SEQ ID NO: 305670 - DNA, 50 bp, Artificial
  Synthetic oligonucleotide
aatagacttcaaagtgtctgtagacgaccgatcttctagaatcacaaggg

SEQ ID NO: 305671 - DNA, 59 bp, Artificial
  Synthetic oligonucleotide
aatagactttgaacttacaacagaggacacgccagcaacaccgttcaagtctgcaacat

SEQ ID NO: 305672 - DNA, 59 bp, Artificial
  Synthetic oligonucleotide
aatagagaatgcgtgatatgtaatagcgagtccttatctgctgtcacacgttctctcca

SEQ ID NO: 305673 - DNA, 51 bp, Artificial
  Synthetic oligonucleotide
aatagagacgaaattgaatacactccagaacaagttagaggagagattgca

SEQ ID NO: 305674 - DNA, 60 bp, Artificial
  Synthetic oligonucleotide
aatagagagaatcagagaacaggcaaatacaatggagaccatagtcctaatggcagctca

SEQ ID NO: 305675 - DNA, 60 bp, Artificial
  Synthetic oligonucleotide
aatagagagagacaattccattgcctactgttacccgggagccactgtgagtgaagaagc

SEQ ID NO: 305676 - DNA, 58 bp, Artificial
  Synthetic oligonucleotide
aatagagagcttcgggtttggggaggagataacaccctctcagaaacaggagcagaca

SEQ ID NO: 305677 - DNA, 60 bp, Artificial
  Synthetic oligonucleotide
aatagagatcctggatcaggtatcataacatcggatgcaccaatccatgactgtaatgcg

SEQ ID NO: 305678 - DNA, 55 bp, Artificial
  Synthetic oligonucleotide
aatagagcagttaagagaccatctgttaaggtggggattcaccacaccagacaag

SEQ ID NO: 305679 - DNA, 60 bp, Artificial
  Synthetic oligonucleotide
aatagagcggttaacatcggctatgtgttgagattcacgaccagtaatgagacagctcct

SEQ ID NO: 305680 - DNA, 55 bp, Artificial
  Synthetic oligonucleotide
aatagagctcgtatctgaagacgtgaccttggaaaccgacctggttagggtacac

SEQ ID NO: 305681 - DNA, 51 bp, Artificial
  Synthetic oligonucleotide
aatagagctgacttggaaatgcaatccatactactgtcttcagtagaatgt

SEQ ID NO: 305682 - DNA, 52 bp, Artificial
  Synthetic oligonucleotide
aatagagctgtcaccgacggcggtaataccaaacccgtgggatatgaaacga

SEQ ID NO: 305683 - DNA, 54 bp, Artificial
  Synthetic oligonucleotide
aatagaggacccgattgaccgctcttgcaactctcccctgtatattgggtctca

SEQ ID NO: 305684 - DNA, 55 bp, Artificial
  Synthetic oligonucleotide
aatagaggagaggataaaccgattgtcgaaacatgtagatgattctgtggttgac

SEQ ID NO: 305685 - DNA, 55 bp, Artificial
  Synthetic oligonucleotide
aatagaggagttaagacaacatctattaaggtggggacttaccacaccagacaag

SEQ ID NO: 305686 - DNA, 55 bp, Artificial
  Synthetic oligonucleotide
aatagaggagttaagggaacatctattgagatggggattcaccacaccagacaag

SEQ ID NO: 305687 - DNA, 60 bp, Artificial
  Synthetic oligonucleotide
aatagaggcgtggaggaatcacgttgtgagtgaaaggctcaactctgactggtggataaa

SEQ ID NO: 305688 - DNA, 55 bp, Artificial
  Synthetic oligonucleotide
aatagagggggttaagctggaatctgagggagcttacaaaatcctcaccatttat

SEQ ID NO: 305689 - DNA, 55 bp, Artificial
  Synthetic oligonucleotide
aatagagtaaagtcatttaagctttgcgagaacagtgccacaggtaaatcctgtg

SEQ ID NO: 305690 - DNA, 52 bp, Artificial
  Synthetic oligonucleotide
aatagagtcacttcacccttgggctcagtcagaggctaatacatctattagt

SEQ ID NO: 305691 - DNA, 57 bp, Artificial
  Synthetic oligonucleotide
aatagagtggcccacacaatttgcaggttttcaaaagatctatatctgtcgtttaaa

SEQ ID NO: 305692 - DNA, 60 bp, Artificial
  Synthetic oligonucleotide
aatagataaactcacagggatcgatctctcccatttgaaagtagcagatattcatcctca

SEQ ID NO: 305693 - DNA, 60 bp, Artificial
  Synthetic oligonucleotide
aatagatcacgtattagaccatgtgcaaacaatggaggagataaacactctacaaaatca

SEQ ID NO: 305694 - DNA, 51 bp, Artificial
  Synthetic oligonucleotide
aatagatcaggtcgctgcacaagctctgaagaaacctcgcggcaagcgagg

SEQ ID NO: 305695 - DNA, 50 bp, Artificial
  Synthetic oligonucleotide
aatagatccaactattatttccaacactatgtcaacagtctcggagtcta

SEQ ID NO: 305696 - DNA, 60 bp, Artificial
  Synthetic oligonucleotide
aatagatcctttccgtctgctgcaaaacagccaggtcttcagcctaattagaccaaatga

SEQ ID NO: 305697 - DNA, 60 bp, Artificial
  Synthetic oligonucleotide
aatagatgctccagcctttactgcagctgagagactgaagttgtagccagaaatgttgat

SEQ ID NO: 305698 - DNA, 60 bp, Artificial
  Synthetic oligonucleotide
aatagatgctgaaatgcacgacctcaactgcagttacaatatatgtccttactgtgcatc

SEQ ID NO: 305699 - DNA, 53 bp, Artificial
  Synthetic oligonucleotide
aatagatgggatgaagtccgatattacgccagtttcttcggtccctcggccta

SEQ ID NO: 305700 - DNA, 60 bp, Artificial
  Synthetic oligonucleotide
aatagatggtacagcctcattgagtcccggaatgatgatgggaatgttcaacatgctaag

SEQ ID NO: 305701 - DNA, 55 bp, Artificial
  Synthetic oligonucleotide
aatagattcatggcaaagaagttggggataagcactatgaatgatttcacgggga

SEQ ID NO: 305702 - DNA, 55 bp, Artificial
  Synthetic oligonucleotide
aatagattgggtgtagatctagatgcggtaatcagggctaacaataatagactac

SEQ ID NO: 305703 - DNA, 60 bp, Artificial
  Synthetic oligonucleotide
aatagatttgccacattctttcgaggaaaggcatcttataaagagattgaatctcgtgct

SEQ ID NO: 305704 - DNA, 53 bp, Artificial
  Synthetic oligonucleotide
aatagcaaaggttagagaacgattgaacgacaacgaagtagggaattacggag

SEQ ID NO: 305705 - DNA, 60 bp, Artificial
  Synthetic oligonucleotide
aatagcaatggagttaatcagaatgatcaaacgtgggatcaatgaccgaaacttctggag

SEQ ID NO: 305706 - DNA, 58 bp, Artificial
  Synthetic oligonucleotide
aatagcacacctcgattacttatcttaccaggctcggatagggagtattgaacattac

SEQ ID NO: 305707 - DNA, 52 bp, Artificial
  Synthetic oligonucleotide
aatagcacggccttgaactgcaatgatagccttagcaccggctggatagcag

SEQ ID NO: 305708 - DNA, 56 bp, Artificial
  Synthetic oligonucleotide
aatagcactggcacatgaaacttatcgtgtaagtttccttcccttacaagttttga

SEQ ID NO: 305709 - DNA, 58 bp, Artificial
  Synthetic oligonucleotide
aatagcacttggaatgatactgaagggttaaatagcactaaaggagatataacactcc

SEQ ID NO: 305710 - DNA, 55 bp, Artificial
  Synthetic oligonucleotide
aatagcacttggctctgtttctctaactattgcgacaatgtgtttactcattcag

SEQ ID NO: 305711 - DNA, 60 bp, Artificial
  Synthetic oligonucleotide
aatagcagaaggccatgaaagctcagcattattatattgtctcatggtcatgtacctgaa

SEQ ID NO: 305712 - DNA, 57 bp, Artificial
  Synthetic oligonucleotide
aatagcagtaaggtcagccaaaattaccctatagtgcagaacctccaggggcaaatg

SEQ ID NO: 305713 - DNA, 56 bp, Artificial
  Synthetic oligonucleotide
aatagcagtcaaagcaccagcatttgccccataaaagaggcccccggtggtcttta

SEQ ID NO: 305714 - DNA, 57 bp, Artificial
  Synthetic oligonucleotide
aatagcatccaggtacattagggacgcaaatgaagtggttctaccaaagttggagta

SEQ ID NO: 305715 - DNA, 59 bp, Artificial
  Synthetic oligonucleotide
aatagcatcccggtgcagggtgaattgaattataagtcaggtcgaggtcagttcttgta

SEQ ID NO: 305716 - DNA, 56 bp, Artificial
  Synthetic oligonucleotide
aatagcatcttctgaaccaacgcaacaatttaggggtttgactaatcgttggatgc

SEQ ID NO: 305717 - DNA, 53 bp, Artificial
  Synthetic oligonucleotide
aatagcattaggcccctatagagttcaagttgtctatgagaggacatactgta

SEQ ID NO: 305718 - DNA, 54 bp, Artificial
  Synthetic oligonucleotide
aatagccaccagaccccaggtgaacggacagagaggagggatggaatttttttg

SEQ ID NO: 305719 - DNA, 57 bp, Artificial
  Synthetic oligonucleotide
aatagccagcactttgatacaagctggcgctgacgtcattatgtacatcccacatgc

SEQ ID NO: 305720 - DNA, 55 bp, Artificial
  Synthetic oligonucleotide
aatagcccaattaagtatctagccagtccgcccattcaaagaacgacaccgtttg

SEQ ID NO: 305721 - DNA, 60 bp, Artificial
  Synthetic oligonucleotide
aatagccgaagcaataatcgtggccatggtgttttcacaagaggattgcatgataaaagc

SEQ ID NO: 305722 - DNA, 54 bp, Artificial
  Synthetic oligonucleotide
aatagccgggatcccaggatataaataacacgtcaccgaggctggcatagtatt

SEQ ID NO: 305723 - DNA, 60 bp, Artificial
  Synthetic oligonucleotide
aatagcgacacatgtagattcagaagacaaaaccactaccttgattcagggcactggttc

SEQ ID NO: 305724 - DNA, 50 bp, Artificial
  Synthetic oligonucleotide
aatagcgactcaaactgagggattaaatttcgatgatatatctgcagcgg

SEQ ID NO: 305725 - DNA, 58 bp, Artificial
  Synthetic oligonucleotide
aatagcgagcccaagatgacagcccaacgtatacatgagaatcagtttgggcctgaat

SEQ ID NO: 305726 - DNA, 55 bp, Artificial
  Synthetic oligonucleotide
aatagcgatattggcaacaaccggaaaatcagacaagatctgcattgggtatcat

SEQ ID NO: 305727 - DNA, 55 bp, Artificial
  Synthetic oligonucleotide
aatagcgatgttccatatgttgccggggttctccgggctttgggagcctcaggct

SEQ ID NO: 305728 - DNA, 55 bp, Artificial
  Synthetic oligonucleotide
aatagcgattggatctgtgaatacagtgttatctaccatagcattgctagtgggg

SEQ ID NO: 305729 - DNA, 60 bp, Artificial
  Synthetic oligonucleotide
aatagcgcagagaattgaagatgtttttgcagggaaaaacaccgatcttgaggcactcat

SEQ ID NO: 305730 - DNA, 54 bp, Artificial
  Synthetic oligonucleotide
aatagcggcctcctgtgtccaatctatttttcttacaccccttcaaaatggcgg

SEQ ID NO: 305731 - DNA, 57 bp, Artificial
  Synthetic oligonucleotide
aatagcgtatgaaatgggcggggtgttttcatgcgcgttagttaagcatagaattcc

SEQ ID NO: 305732 - DNA, 60 bp, Artificial
  Synthetic oligonucleotide
aatagctctattggatgacgcgacagaggtatgctggcaatacattgatatgtttttacg

SEQ ID NO: 305733 - DNA, 59 bp, Artificial
  Synthetic oligonucleotide
aatagctgaaactctatgcttgccaggagtcattaaaaatacaaggcttccctcttgga

SEQ ID NO: 305734 - DNA, 54 bp, Artificial
  Synthetic oligonucleotide
aatagctgccctgttgtccgtccaagaggtctgcatctaggccagagcctgagc

SEQ ID NO: 305735 - DNA, 56 bp, Artificial
  Synthetic oligonucleotide
aatagctggtttcatagaaggtggatggccaggtttaatcaatggttggtatggtt

SEQ ID NO: 305736 - DNA, 55 bp, Artificial
  Synthetic oligonucleotide
aatagctgttcacgaaagttttattttcctgtcctgcggtatacccaggttgaca

SEQ ID NO: 305737 - DNA, 55 bp, Artificial
  Synthetic oligonucleotide
aatagcttatcaacatttaaagatgtctgcacaatgttgaagttctcaatgatca

SEQ ID NO: 305738 - DNA, 51 bp, Artificial
  Synthetic oligonucleotide
aatagctttgattgtaggtctagtcacaaggagcaccttaccacacgtggg

SEQ ID NO: 305739 - DNA, 57 bp, Artificial
  Synthetic oligonucleotide
aataggaacgttctaagatcaatggaagttgagcctatcacttcggtcgacacttat

SEQ ID NO: 305740 - DNA, 60 bp, Artificial
  Synthetic oligonucleotide
aataggaatcaacctgccgcaacagcacttgctaatacaattgaagtgttcagatcaaat

SEQ ID NO: 305741 - DNA, 60 bp, Artificial
  Synthetic oligonucleotide
aataggacaagggcaagcactcaatacaaacaagaggattatacgagacaatagacaagc

SEQ ID NO: 305742 - DNA, 56 bp, Artificial
  Synthetic oligonucleotide
aataggactgatagtggcgctaatcctagcaatagttgtgtggactatagtagctc

SEQ ID NO: 305743 - DNA, 60 bp, Artificial
  Synthetic oligonucleotide
aataggagagcttgtagaatctagtgaactagcagtccaacaactatattgtcaagatgc

SEQ ID NO: 305744 - DNA, 60 bp, Artificial
  Synthetic oligonucleotide
aataggagcacaagctgtctcacatctgagagcgcatattggtgacacaccaacgctcgc

SEQ ID NO: 305745 - DNA, 60 bp, Artificial
  Synthetic oligonucleotide
aataggagggaatttgaagatccttgggatacacacaagtggcaatggcactatgggagc

SEQ ID NO: 305746 - DNA, 55 bp, Artificial
  Synthetic oligonucleotide
aataggagtaggagctctgataatagcactaatcttagcaataattgtgtggacc

SEQ ID NO: 305747 - DNA, 60 bp, Artificial
  Synthetic oligonucleotide
aataggatcctggtgtcagatggtctcactaataggtgcagagctctcagcatcagttaa

SEQ ID NO: 305748 - DNA, 57 bp, Artificial
  Synthetic oligonucleotide
aataggcagggaaatggcatcgacaacagagcgggtgaaactattcttcgaatggtt

SEQ ID NO: 305749 - DNA, 57 bp, Artificial
  Synthetic oligonucleotide
aataggccctgggagcatgatggtacgtacgcaagaatgacccagactatactgtca

SEQ ID NO: 305750 - DNA, 55 bp, Artificial
  Synthetic oligonucleotide
aataggcgacacatgtcgctatgttggtgctcatgaccccaaccgaaaccacagc

SEQ ID NO: 305751 - DNA, 58 bp, Artificial
  Synthetic oligonucleotide
aataggcggtgatcatccaaatcacttacggacaagcacttctagtctccccggcaac

SEQ ID NO: 305752 - DNA, 55 bp, Artificial
  Synthetic oligonucleotide
aataggcgtttcaattgttggtctacgtttaaggatttggaccgtgattcatgta

SEQ ID NO: 305753 - DNA, 51 bp, Artificial
  Synthetic oligonucleotide
aataggctaaattggctggtaaagtcagatggaaatgcgtacccccttcag

SEQ ID NO: 305754 - DNA, 50 bp, Artificial
  Synthetic oligonucleotide
aataggctcatagagaagactaaccaacaatttgagttaatagacaatga

SEQ ID NO: 305755 - DNA, 55 bp, Artificial
  Synthetic oligonucleotide
aatagggacaaactgtgaaatagtggcgtgttgtcaaggatagttcgcagtcagc

SEQ ID NO: 305756 - DNA, 54 bp, Artificial
  Synthetic oligonucleotide
aatagggaggaacttcgctttgagggcggttgcgactccagaaccgaagggata

SEQ ID NO: 305757 - DNA, 60 bp, Artificial
  Synthetic oligonucleotide
aatagggcagtcacccaatgtatatcaggcaagatttgaagcagtagcatggtcagccac

SEQ ID NO: 305758 - DNA, 56 bp, Artificial
  Synthetic oligonucleotide
aatagggccatccccggataacaccatccgttgtaatctcgacctaggcataccaa

SEQ ID NO: 305759 - DNA, 55 bp, Artificial
  Synthetic oligonucleotide
aatagggcgatcccctacaatcattgcgttgatggccttagacaagtttcgtcta

SEQ ID NO: 305760 - DNA, 51 bp, Artificial
  Synthetic oligonucleotide
aatagggcggggcgaaaaccgattcgtgcctgccgttcccagacaggggat

SEQ ID NO: 305761 - DNA, 55 bp, Artificial
  Synthetic oligonucleotide
aataggggaaacacctgagtggattgttagacaaacaatgttacaacatagcctg

SEQ ID NO: 305762 - DNA, 60 bp, Artificial
  Synthetic oligonucleotide
aataggggaagatgttgctccaattgagcacattgcaagtatgagaaggaattatttcac

SEQ ID NO: 305763 - DNA, 55 bp, Artificial
  Synthetic oligonucleotide
aataggggactgccccaagtatgtgaatgttaaatccctaaagcttgctaccgga

SEQ ID NO: 305764 - DNA, 60 bp, Artificial
  Synthetic oligonucleotide
aataggggagcacttgcagacggcatgtgattttagagtttacaacatgtgcaaagcctt

SEQ ID NO: 305765 - DNA, 60 bp, Artificial
  Synthetic oligonucleotide
aataggggtgagcggattgttgatagcaaagagatcgtgtggtatgatttgtcgttgacc

SEQ ID NO: 305766 - DNA, 54 bp, Artificial
  Synthetic oligonucleotide
aatagggtattgacatataagggtggaccgatacttgcccctagtccgggggca

SEQ ID NO: 305767 - DNA, 60 bp, Artificial
  Synthetic oligonucleotide
aatagggtctgctcacgttgtgtagtgataggtatgcggaaacaagtacttgcctgcaca

SEQ ID NO: 305768 - DNA, 55 bp, Artificial
  Synthetic oligonucleotide
aatagggtttaatgggtattattatcagggttcattgattaataagctaatcagg

SEQ ID NO: 305769 - DNA, 53 bp, Artificial
  Synthetic oligonucleotide
aataggtaaatgggcacccaaagtccccaattgagtccccgatatatcgggga

SEQ ID NO: 305770 - DNA, 54 bp, Artificial
  Synthetic oligonucleotide
aataggtactaacgtagaaaattccgtttcaggacatgtctataatgccttaat

SEQ ID NO: 305771 - DNA, 60 bp, Artificial
  Synthetic oligonucleotide
aataggtgacgatgagagagaagtgctgatgtggaagtttgacagcgccctagcacgaag

SEQ ID NO: 305772 - DNA, 60 bp, Artificial
  Synthetic oligonucleotide
aataggtgacggacaaaggagttggatgaaactatattggcatctcatgcgcccaggcga

SEQ ID NO: 305773 - DNA, 53 bp, Artificial
  Synthetic oligonucleotide
aataggtgagggcttaggggctcctttggatgatttagacctcattagtgatg

SEQ ID NO: 305774 - DNA, 54 bp, Artificial
  Synthetic oligonucleotide
aataggtgattgtgttacgaacatttaaagacctggcgcattattccccgattt

SEQ ID NO: 305775 - DNA, 55 bp, Artificial
  Synthetic oligonucleotide
aataggttgttcttgtacttgtacaactactacgctcgttaacaacgatttgcag

SEQ ID NO: 305776 - DNA, 60 bp, Artificial
  Synthetic oligonucleotide
aatagtaaaatgtgttgtgagaataacgataatagattgatagattcggaaacacatcga

SEQ ID NO: 305777 - DNA, 52 bp, Artificial
  Synthetic oligonucleotide
aatagtaacagtgggaaaacgcagctgattgaggctctaacgggcctgataa

SEQ ID NO: 305778 - DNA, 60 bp, Artificial
  Synthetic oligonucleotide
aatagtaaggctttgcagagtcactttgactgccgagaatctagggtccatctataggat

SEQ ID NO: 305779 - DNA, 50 bp, Artificial
  Synthetic oligonucleotide
aatagtaataggaagcaggagaataatggcacttggaataataatgggag

SEQ ID NO: 305780 - DNA, 56 bp, Artificial
  Synthetic oligonucleotide
aatagtaatatcgtcatgacgattttactgcgcggtaataaaaaactactttcatc

SEQ ID NO: 305781 - DNA, 51 bp, Artificial
  Synthetic oligonucleotide
aatagtactactaacagtagtagtaatgggatgaagggagatatgaaaaac

SEQ ID NO: 305782 - DNA, 58 bp, Artificial
  Synthetic oligonucleotide
aatagtacttggtatagcaataggaatagtactggagggtcaactaacgagagcgaca

SEQ ID NO: 305783 - DNA, 53 bp, Artificial
  Synthetic oligonucleotide
aatagtagccaactctacaccgttaggtagggtaagtctgcctagtgtcccct

SEQ ID NO: 305784 - DNA, 54 bp, Artificial
  Synthetic oligonucleotide
aatagtagcctatcgctctgtcgccgggcatgtgcgccaattgatacgcgttgt

SEQ ID NO: 305785 - DNA, 59 bp, Artificial
  Synthetic oligonucleotide
aatagtatacaggcagacgcagaggcagcccgggcattgtttaatatacaggaagggga

SEQ ID NO: 305786 - DNA, 60 bp, Artificial
  Synthetic oligonucleotide
aatagtatatccagcgtttggaatgcaacgaatgcactatagaaatggggatccacagac

SEQ ID NO: 305787 - DNA, 50 bp, Artificial
  Synthetic oligonucleotide
aatagtatatgcaacaccacaggagtcgaaaagccgaaatttctcccagg

SEQ ID NO: 305788 - DNA, 60 bp, Artificial
  Synthetic oligonucleotide
aatagtatctgcaatacaacaggagtcgagaagcctaaatttctcccggatctgtatgat

SEQ ID NO: 305789 - DNA, 55 bp, Artificial
  Synthetic oligonucleotide
aatagtatggcaaaggaaagcagtttgtagtttatttgccaaattgtttgtaaga

SEQ ID NO: 305790 - DNA, 53 bp, Artificial
  Synthetic oligonucleotide
aatagtcaacagactagcgcgaggattcccgtaccggtacctgttataccggt

SEQ ID NO: 305791 - DNA, 60 bp, Artificial
  Synthetic oligonucleotide
aatagtcaagcacggtttgtaaaagaatgtgcaataatggtgagacattataagcgtgga

SEQ ID NO: 305792 - DNA, 58 bp, Artificial
  Synthetic oligonucleotide
aatagtcaagctaaatttgtaagagagtgtgcagcaatggtgcgcttttataaaaaag

SEQ ID NO: 305793 - DNA, 50 bp, Artificial
  Synthetic oligonucleotide
aatagtcgccgtgcaggattaatagcgcgcataaaacttatcgtccgtgg

SEQ ID NO: 305794 - DNA, 53 bp, Artificial
  Synthetic oligonucleotide
aatagtctaaacaagcaggaccttacccaggacccagaaaagttcacgcgacc

SEQ ID NO: 305795 - DNA, 60 bp, Artificial
  Synthetic oligonucleotide
aatagtcttctcagtagtgcaggcacctcgggtgctgcaaagctgtatggttgtggcaaa

SEQ ID NO: 305796 - DNA, 60 bp, Artificial
  Synthetic oligonucleotide
aatagtgaagacgatcacggatgaccaaattgaagtgactaatgccactgaactggtcca

SEQ ID NO: 305797 - DNA, 60 bp, Artificial
  Synthetic oligonucleotide
aatagtgacattagcttgtctgtgtcacgtgtatgacttgatggacccaaatgtgaaatt

SEQ ID NO: 305798 - DNA, 60 bp, Artificial
  Synthetic oligonucleotide
aatagtgagacagtggcagccagatgtaatgagaaactgttatattactggcttcctacc

SEQ ID NO: 305799 - DNA, 60 bp, Artificial
  Synthetic oligonucleotide
aatagtgctaactgtgaaggacagagtcggttcagtcgtatatgtgaccgtatttaatca

SEQ ID NO: 305800 - DNA, 58 bp, Artificial
  Synthetic oligonucleotide
aatagtggctgtacgaaactgttgctccacaacaaatacagacgccaacaaacgccag

SEQ ID NO: 305801 - DNA, 58 bp, Artificial
  Synthetic oligonucleotide
aatagtgggacaactacagccatcccttcagacagggtcagaagaacttaagtcatta

SEQ ID NO: 305802 - DNA, 55 bp, Artificial
  Synthetic oligonucleotide
aatagtgttcatgggttcttgaacagtcactacaggtttggtagtaacattcaag

SEQ ID NO: 305803 - DNA, 56 bp, Artificial
  Synthetic oligonucleotide
aatagtgttccgctgaaaatagtagtgtctatataaaatacggagtctactaaatc

SEQ ID NO: 305804 - DNA, 59 bp, Artificial
  Synthetic oligonucleotide
aatagttaatgaacctctcactaatcaaaccataaaaatcagaagcattgtgcaagatt

SEQ ID NO: 305805 - DNA, 53 bp, Artificial
  Synthetic oligonucleotide
aatagttacagtcccaccttcgtctccttgaataactacaacctgagtacgtt

SEQ ID NO: 305806 - DNA, 54 bp, Artificial
  Synthetic oligonucleotide
aatagttagagaggcttcaagaaatggaatgcaacctcagtctccaactcttat

SEQ ID NO: 305807 - DNA, 56 bp, Artificial
  Synthetic oligonucleotide
aatagttagtaataagtacgagcctcttatggccccattaattaattgtattcatg

SEQ ID NO: 305808 - DNA, 55 bp, Artificial
  Synthetic oligonucleotide
aatagttatgtgggcctaaggacctagcccacatagtcttacccgtacgactatc

SEQ ID NO: 305809 - DNA, 58 bp, Artificial
  Synthetic oligonucleotide
aatagttccagaatatagtaccatgctctacagatggctcaatctatttagatgaaca

SEQ ID NO: 305810 - DNA, 56 bp, Artificial
  Synthetic oligonucleotide
aatagttccaggaataagggatataccacgtggcatagtaccacctcagactccat

SEQ ID NO: 305811 - DNA, 55 bp, Artificial
  Synthetic oligonucleotide
aatagttctaatcaattgcagctcgacctttcggggcaatcaaaaggggtgggat

SEQ ID NO: 305812 - DNA, 55 bp, Artificial
  Synthetic oligonucleotide
aatagttctcctcgagcaggagttgggccccggtctaataaggcctctgactggg

SEQ ID NO: 305813 - DNA, 60 bp, Artificial
  Synthetic oligonucleotide
aatagttgaaacgtctgacattaatctggagatagacagagcatctatcgatatgtcagt

SEQ ID NO: 305814 - DNA, 54 bp, Artificial
  Synthetic oligonucleotide
aatagttggggtagtagttggagtaatagaactaatagacctctggaggacatt

SEQ ID NO: 305815 - DNA, 58 bp, Artificial
  Synthetic oligonucleotide
aatataaactaaaacatatagtatgggcaagcagggagctggaacgattcgcagttaa

SEQ ID NO: 305816 - DNA, 58 bp, Artificial
  Synthetic oligonucleotide
aatataaaggatggtgtctggactgttgccaacatactgacttaacttattgtcgagg

SEQ ID NO: 305817 - DNA, 53 bp, Artificial
  Synthetic oligonucleotide
aatataaagtcagccgcggacgtaaatttagcatctaagggtttagtacaact

SEQ ID NO: 305818 - DNA, 60 bp, Artificial
  Synthetic oligonucleotide
aatataagcaagaacgccatattagtttattattgttggatgtcggatgtcatgtccaag

SEQ ID NO: 305819 - DNA, 58 bp, Artificial
  Synthetic oligonucleotide
aatataagtaaaaacgccttgttagtatattattgttggatgtcggatgctatgtcta

SEQ ID NO: 305820 - DNA, 57 bp, Artificial
  Synthetic oligonucleotide
aatataagtacgccgatttcgaacgtgttgtccgatcgcacatcgcgtcagaagggg

SEQ ID NO: 305821 - DNA, 60 bp, Artificial
  Synthetic oligonucleotide
aatataagtatttgcactccagaacgatgtgctattgctttgcaaagccatgtttatatg

SEQ ID NO: 305822 - DNA, 56 bp, Artificial
  Synthetic oligonucleotide
aatataatcccagtactgtactttggggatcattaaagttgacacaggacacccca

SEQ ID NO: 305823 - DNA, 55 bp, Artificial
  Synthetic oligonucleotide
aatatacagagatccacagcacaaaacgttggagctctcccgatgccagtggtac

SEQ ID NO: 305824 - DNA, 59 bp, Artificial
  Synthetic oligonucleotide
aatatacagctcatggcccagttactgaattgattcaattggcaaggaaaccagaaact

SEQ ID NO: 305825 - DNA, 60 bp, Artificial
  Synthetic oligonucleotide
aatatacaggaattttatcgcacagttttgccagcttggatagtgaactgtatagtgaac

SEQ ID NO: 305826 - DNA, 58 bp, Artificial
  Synthetic oligonucleotide
aatatacccgaaatgagtggcaactaccatcaattagaaaagatacttagttctggca

SEQ ID NO: 305827 - DNA, 60 bp, Artificial
  Synthetic oligonucleotide
aatatactaaggactcaggaatcagaatgcgtatgccataatgggatatgccccgtagtg

SEQ ID NO: 305828 - DNA, 52 bp, Artificial
  Synthetic oligonucleotide
aatatacttcccggcctaaatgttaaactagtacacggcgatccttcgttag

SEQ ID NO: 305829 - DNA, 55 bp, Artificial
  Synthetic oligonucleotide
aatatagacgaattcgaatcagtttcagacctcattgagagttttggtactgcag

SEQ ID NO: 305830 - DNA, 60 bp, Artificial
  Synthetic oligonucleotide
aatatagcaacgtgcttacccacaggagaatacattgcgccaaaccccaggatttcatca

SEQ ID NO: 305831 - DNA, 60 bp, Artificial
  Synthetic oligonucleotide
aatatagcctgcaatgaggaattcatccatttgcactcgcagtttcacaatggctctttt

SEQ ID NO: 305832 - DNA, 60 bp, Artificial
  Synthetic oligonucleotide
aatatagcgcagattttaactatgactgaagagcaggaaaaggaagtgatagctaaaatg

SEQ ID NO: 305833 - DNA, 56 bp, Artificial
  Synthetic oligonucleotide
aatatagctactgatgtagacgacatcacactattggtcacagtcaagccaattat

SEQ ID NO: 305834 - DNA, 52 bp, Artificial
  Synthetic oligonucleotide
aatatagggggtaggacaccctatgagttgtatatatggcaagagagtgaat

SEQ ID NO: 305835 - DNA, 54 bp, Artificial
  Synthetic oligonucleotide
aatatagtggttctgccacctacccaaaaggtggaagtaagggtgccagtttgc

SEQ ID NO: 305836 - DNA, 60 bp, Artificial
  Synthetic oligonucleotide
aatatataatactcgcatgaccgcctctgagcttgacgcagccgttgagtttttagacgt

SEQ ID NO: 305837 - DNA, 60 bp, Artificial
  Synthetic oligonucleotide
aatatatcacgataacagctaacgtgaccgacgaatcatatttgtacaacgcggatttgc

SEQ ID NO: 305838 - DNA, 53 bp, Artificial
  Synthetic oligonucleotide
aatatatcggttatgcgtgggcgatggttgttgtcattgtcggcgcaactacc

SEQ ID NO: 305839 - DNA, 57 bp, Artificial
  Synthetic oligonucleotide
aatatatgggtgtatggtcgcgcaacggcttttaataagggggtgctatgaatacaa

SEQ ID NO: 305840 - DNA, 59 bp, Artificial
  Synthetic oligonucleotide
aatatatgttccgggctaataaggttcgagcgagaaaaccagcacatgcttggggatca

SEQ ID NO: 305841 - DNA, 55 bp, Artificial
  Synthetic oligonucleotide
aatatattacaaccactcgctacgctcactacccactgcttgttccaactcgtgc

SEQ ID NO: 305842 - DNA, 60 bp, Artificial
  Synthetic oligonucleotide
aatatattatggtccggaatcctgcagtcagcatgagtaaagatagtcactccatcacac

SEQ ID NO: 305843 - DNA, 54 bp, Artificial
  Synthetic oligonucleotide
aatatcaactcctttgggaagcccccctatagttagcaatagtgacttcctttg

SEQ ID NO: 305844 - DNA, 60 bp, Artificial
  Synthetic oligonucleotide
aatatcaatttccagcactcaaatgacattctcttattgaacttcacggacatcgcgtca

SEQ ID NO: 305845 - DNA, 55 bp, Artificial
  Synthetic oligonucleotide
aatatcaggatctccaggtaacagctctttaccctcataaactctaacctcctcc

SEQ ID NO: 305846 - DNA, 55 bp, Artificial
  Synthetic oligonucleotide
aatatcatggcttacacttcaacggaagaggatgttaagaagagcttcttgcact

SEQ ID NO: 305847 - DNA, 59 bp, Artificial
  Synthetic oligonucleotide
aatatcatggttgcttatgcggcgtattctatttctaactggggtttagatgggtcaga

SEQ ID NO: 305848 - DNA, 57 bp, Artificial
  Synthetic oligonucleotide
aatatcatgtgactccccaagcaatgtcaatggaggacccggagtgaaggggtttgg

SEQ ID NO: 305849 - DNA, 60 bp, Artificial
  Synthetic oligonucleotide
aatatcatttaggatatgtattatcccgagcgcctgagaacaggagttgtaatttcacag

SEQ ID NO: 305850 - DNA, 60 bp, Artificial
  Synthetic oligonucleotide
aatatccagacaatcagatgggttgttacaacatagacgaacatccattaccaggaggta

SEQ ID NO: 305851 - DNA, 60 bp, Artificial
  Synthetic oligonucleotide
aatatcccaactgcaatgagcacgatagcattgcatcttcactcaaggtccggttagagt

SEQ ID NO: 305852 - DNA, 56 bp, Artificial
  Synthetic oligonucleotide
aatatcccatatcaccggcgggagcgcagtgtttactttttcaaaggtcagggaca

SEQ ID NO: 305853 - DNA, 58 bp, Artificial
  Synthetic oligonucleotide
aatatccccaaatggatatatctggtgcctccaacgtttcggtgtctaagcgcatgtt

SEQ ID NO: 305854 - DNA, 54 bp, Artificial
  Synthetic oligonucleotide
aatatccttaatatggcatttaaaggtaacagtcggactttaactcaacagtcc

SEQ ID NO: 305855 - DNA, 57 bp, Artificial
  Synthetic oligonucleotide
aatatcggaaggtcaccttcagcaagggaataaatctctaaatgaggttagaatcca

SEQ ID NO: 305856 - DNA, 55 bp, Artificial
  Synthetic oligonucleotide
aatatcggaagtcctgcaatcatggaaactccatccaacaagaggtgacttcccc

SEQ ID NO: 305857 - DNA, 58 bp, Artificial
  Synthetic oligonucleotide
aatatcgttgaccaaacgtcagtctcgtttgtggcgtcaggcgacgctagctacctac

SEQ ID NO: 305858 - DNA, 55 bp, Artificial
  Synthetic oligonucleotide
aatatctaaaacgaaagtgtttcagtccgaaagctgttcaggagcttagtcctcg

SEQ ID NO: 305859 - DNA, 56 bp, Artificial
  Synthetic oligonucleotide
aatatctacctagctcctagacaagaagcgtgtagactcattaacgagtattacgg

SEQ ID NO: 305860 - DNA, 55 bp, Artificial
  Synthetic oligonucleotide
aatatctgagtttatcggaggcggagagaatacagggagattttaaaacgcctaa

SEQ ID NO: 305861 - DNA, 60 bp, Artificial
  Synthetic oligonucleotide
aatatctggcgggactgtcgacgttgcctggtaatcctgctattgcatcgttgatggctt

SEQ ID NO: 305862 - DNA, 58 bp, Artificial
  Synthetic oligonucleotide
aatatcttgaggataggtgtaaggaagccgccttcaccagaagcctaaagagtgtgtc

SEQ ID NO: 305863 - DNA, 55 bp, Artificial
  Synthetic oligonucleotide
aatatcttgcttagtgggaatcaaactgccagaatgcttaaatacaattacccaa

SEQ ID NO: 305864 - DNA, 50 bp, Artificial
  Synthetic oligonucleotide
aatatcttgttgagtggcaccaacacagcacgaatgattaaatatcacta

SEQ ID NO: 305865 - DNA, 58 bp, Artificial
  Synthetic oligonucleotide
aatatctttgggaataccaaaaatagatgctgatacgtatgttggctcaaagatttat

SEQ ID NO: 305866 - DNA, 59 bp, Artificial
  Synthetic oligonucleotide
aatatgaatttaaccctcatctcaccgtccgctttgtctacatgtttgtaattcgatca

SEQ ID NO: 305867 - DNA, 60 bp, Artificial
  Synthetic oligonucleotide
aatatgacgctgttgctaccacacactcctggatccctaagagaaaccgctccattctca

SEQ ID NO: 305868 - DNA, 55 bp, Artificial
  Synthetic oligonucleotide
aatatgactccaaaggatctctttgacctatcaaggtgggtgaagactgctgctg

SEQ ID NO: 305869 - DNA, 55 bp, Artificial
  Synthetic oligonucleotide
aatatgagacaagttggggttgtaacccttcagactgtcctggggtcggcacagg

SEQ ID NO: 305870 - DNA, 57 bp, Artificial
  Synthetic oligonucleotide
aatatgagagataatacccaaacattcactagacatatccatggcaacacacaggtc

SEQ ID NO: 305871 - DNA, 60 bp, Artificial
  Synthetic oligonucleotide
aatatgagcacccgcacgttagatcaactctccgtctccgaatgggcttcctcttggcta

SEQ ID NO: 305872 - DNA, 53 bp, Artificial
  Synthetic oligonucleotide
aatatgaggtggtgttttatacagatggttcttctataaaatcccctaaaaaa

SEQ ID NO: 305873 - DNA, 53 bp, Artificial
  Synthetic oligonucleotide
aatatgaggttgcagcggagccagaggcgctagaacattactttggaagcgca

SEQ ID NO: 305874 - DNA, 60 bp, Artificial
  Synthetic oligonucleotide
aatatgataaccatactgagaatgctttgttgttgtatatggcatgtactcatgcctcta

SEQ ID NO: 305875 - DNA, 57 bp, Artificial
  Synthetic oligonucleotide
aatatgatcgatgataagattgatgaccaaatacaagacatatgggcatataacgca

SEQ ID NO: 305876 - DNA, 59 bp, Artificial
  Synthetic oligonucleotide
aatatgcaaattctcgactcactgccccacatcgattttaccttctcctctgggtctaa

SEQ ID NO: 305877 - DNA, 55 bp, Artificial
  Synthetic oligonucleotide
aatatgcacactttgttgggtatgggtccaccgcagtaaagactaggtaaactgg

SEQ ID NO: 305878 - DNA, 56 bp, Artificial
  Synthetic oligonucleotide
aatatgcatcaattccattccctcaatgttgggggtcggggggacattgagggtgg

SEQ ID NO: 305879 - DNA, 55 bp, Artificial
  Synthetic oligonucleotide
aatatgccgatatatgcccaggatggagtggggtagtcataacagaggacgctgt

SEQ ID NO: 305880 - DNA, 55 bp, Artificial
  Synthetic oligonucleotide
aatatgcgacttttacttgtaccgtcgcgattgaatgggaacttgaacactttac

SEQ ID NO: 305881 - DNA, 60 bp, Artificial
  Synthetic oligonucleotide
aatatgcgtaggttatctgagcaccaattcatcagaaagggtcgacacgctccttgaaaa

SEQ ID NO: 305882 - DNA, 57 bp, Artificial
  Synthetic oligonucleotide
aatatgctgctggcattgtcaagtttgctttctgaacaagggcttaggcatctccta

SEQ ID NO: 305883 - DNA, 53 bp, Artificial
  Synthetic oligonucleotide
aatatgctttggatacactgactatgtagagactcaactaggacccaatgtgg

SEQ ID NO: 305884 - DNA, 58 bp, Artificial
  Synthetic oligonucleotide
aatatggaaagaataaaagagctaaggaatctgatgtctcaatcccgcactcgcgaga

SEQ ID NO: 305885 - DNA, 57 bp, Artificial
  Synthetic oligonucleotide
aatatggataggttgtagaaaaacgcgttgtcaatccacgcactttctatgctaaag

SEQ ID NO: 305886 - DNA, 56 bp, Artificial
  Synthetic oligonucleotide
aatatggcagtctgggagtttttttgggaggtttgggcattggaacagccagaggc

SEQ ID NO: 305887 - DNA, 60 bp, Artificial
  Synthetic oligonucleotide
aatatggcgacagcaatcggagaagatgactgagttagggtttcagccgttgagaggacg

SEQ ID NO: 305888 - DNA, 59 bp, Artificial
  Synthetic oligonucleotide
aatatgggctaaatggtacatactttggcgaacatgttgctatgctacgcgacttaaaa

SEQ ID NO: 305889 - DNA, 60 bp, Artificial
  Synthetic oligonucleotide
aatatggtaactgcaacaccaagtgccaaactccaatgggtgcgataaactctagcatgc

SEQ ID NO: 305890 - DNA, 60 bp, Artificial
  Synthetic oligonucleotide
aatatggtatatgtgaggtcgttagctgcaaatttgaatgatgtagtatgcagtggaggt

SEQ ID NO: 305891 - DNA, 60 bp, Artificial
  Synthetic oligonucleotide
aatatgtatttatacagatacatgagtatacacgtcatattcatctgatacattaatatt

SEQ ID NO: 305892 - DNA, 57 bp, Artificial
  Synthetic oligonucleotide
aatatgtcattcggtgatccacttttccatccgaaattaacacaattgggtcgtgaa

SEQ ID NO: 305893 - DNA, 58 bp, Artificial
  Synthetic oligonucleotide
aatatgtcgtgcgatggcacgaaaaacacacgctatcaatacaggggggaggtagccg

SEQ ID NO: 305894 - DNA, 55 bp, Artificial
  Synthetic oligonucleotide
aatatgtctgccaaacgtgccacactgtgaatcgagcacttgtcatagtcctggg

SEQ ID NO: 305895 - DNA, 57 bp, Artificial
  Synthetic oligonucleotide
aatatgtgatcagcgtgaatgggtgggactcccggttcatggtcaacgatgtgtctt

SEQ ID NO: 305896 - DNA, 55 bp, Artificial
  Synthetic oligonucleotide
aatatgtgatggtgcggaatccgctagttagcctatctaaagattcatactcagt

SEQ ID NO: 305897 - DNA, 54 bp, Artificial
  Synthetic oligonucleotide
aatatgttaagataggtttactaatagtaatagtgattatagtgttaaggattt

SEQ ID NO: 305898 - DNA, 59 bp, Artificial
  Synthetic oligonucleotide
aatatgttcgatcacgagccctttacagcctccgtggagaacatgcataagggtcggta

SEQ ID NO: 305899 - DNA, 56 bp, Artificial
  Synthetic oligonucleotide
aatatgtttgacaacgaacctagtacagcaactgtgaagaatagtcatagggaccg

SEQ ID NO: 305900 - DNA, 60 bp, Artificial
  Synthetic oligonucleotide
aatatgtttgataatgagcccagtactgcaactgtgaagaatgtttttcgtgatcgctac

SEQ ID NO: 305901 - DNA, 60 bp, Artificial
  Synthetic oligonucleotide
aatattaagactgcatttcattgttatggtgcatgccagaaatactcttatccatggcag

SEQ ID NO: 305902 - DNA, 53 bp, Artificial
  Synthetic oligonucleotide
aatattaagcgccctccctccattctgaacccgtcccactcgtccccgtggta

SEQ ID NO: 305903 - DNA, 55 bp, Artificial
  Synthetic oligonucleotide
aatattacacttcgatcgatttcgcaggcggagactacgtatttgtcgaaacgtt

SEQ ID NO: 305904 - DNA, 55 bp, Artificial
  Synthetic oligonucleotide
aatattatgggcctgccacatgggtacaagacggctcatggggataccaaacccc

SEQ ID NO: 305905 - DNA, 59 bp, Artificial
  Synthetic oligonucleotide
aatattcatttggttgcgaataactatttcgatacatatcaaataatcaaatacagtgt

SEQ ID NO: 305906 - DNA, 55 bp, Artificial
  Synthetic oligonucleotide
aatattcccacaaatactgacacagacatgcatcgtgaatacagtatcttgccat

SEQ ID NO: 305907 - DNA, 55 bp, Artificial
  Synthetic oligonucleotide
aatattccccaaggaaagctcatggcccaaccacacagtaaccaaaggagtgacg

SEQ ID NO: 305908 - DNA, 51 bp, Artificial
  Synthetic oligonucleotide
aatattccgcctgccagtgaaaactagttagttgaccaccccgatccgttt

SEQ ID NO: 305909 - DNA, 60 bp, Artificial
  Synthetic oligonucleotide
aatattcgcactataatgggctgaatcataggaccaataacgtcagctctgttggccaat

SEQ ID NO: 305910 - DNA, 60 bp, Artificial
  Synthetic oligonucleotide
aatattgaagcttacatgcctagaccccttgtttcttataaagctaatggtgatgccaga

SEQ ID NO: 305911 - DNA, 55 bp, Artificial
  Synthetic oligonucleotide
aatattgcaaacctcgaagtctatctacgcggtaacttgctgtattacggcgacg

SEQ ID NO: 305912 - DNA, 54 bp, Artificial
  Synthetic oligonucleotide
aatattgccttattcagaggggcttgtaatgcaaactcataacagaactgtctc

SEQ ID NO: 305913 - DNA, 60 bp, Artificial
  Synthetic oligonucleotide
aatattgctacagataatggctcacgcacaaatgcagataaactagtggctttagctttg

SEQ ID NO: 305914 - DNA, 55 bp, Artificial
  Synthetic oligonucleotide
aatattgcttacacggtcagtcatagacgtacgattaagacgcgaagaggacgta

SEQ ID NO: 305915 - DNA, 50 bp, Artificial
  Synthetic oligonucleotide
aatattgtaggtcaccatctagttctatatggcctagaaccggtagccca

SEQ ID NO: 305916 - DNA, 53 bp, Artificial
  Synthetic oligonucleotide
aatattgttgctggacagggtgtgacttcaataatattagctggcaattcctc

SEQ ID NO: 305917 - DNA, 60 bp, Artificial
  Synthetic oligonucleotide
aatatttgagcaagctctatgaagcaggaatcctttataagcgagtatctaaacatttgg

SEQ ID NO: 305918 - DNA, 60 bp, Artificial
  Synthetic oligonucleotide
aatattttacatcctccagcatcaagctggatccaaatgtgctagttaagacaaccatgc

SEQ ID NO: 305919 - DNA, 60 bp, Artificial
  Synthetic oligonucleotide
aatattttagggagagcctgcttgcctatccgagatatagtaacttcatctcgactgagt

SEQ ID NO: 305920 - DNA, 56 bp, Artificial
  Synthetic oligonucleotide
aatattttccgctttcactagacttgaaacgattttcaacagaacaggctcttatc

SEQ ID NO: 305921 - DNA, 53 bp, Artificial
  Synthetic oligonucleotide
aatattttgcacgagttggtggaaacacttcacccgagtataaaaaattgggc

SEQ ID NO: 305922 - DNA, 59 bp, Artificial
  Synthetic oligonucleotide
aatcaaaatcatttcggcactagtaatagtggttagaaaccacgatgatctggtgacga

SEQ ID NO: 305923 - DNA, 55 bp, Artificial
  Synthetic oligonucleotide
aatcaaaatgcgattcagaatctggtttagctaacagtggtttgccattcttgtc

SEQ ID NO: 305924 - DNA, 50 bp, Artificial
  Synthetic oligonucleotide
aatcaaaattagacgtatccaagagaaattgatgcaagctgtttgtttgt

SEQ ID NO: 305925 - DNA, 60 bp, Artificial
  Synthetic oligonucleotide
aatcaaacacctgagaccagacaatcaaagatcaggttggtttagaagatgagtgggcca

SEQ ID NO: 305926 - DNA, 59 bp, Artificial
  Synthetic oligonucleotide
aatcaaacatggcgaaattgcacaacgacggaatgatgacccaatggtgaaacgtacat

SEQ ID NO: 305927 - DNA, 55 bp, Artificial
  Synthetic oligonucleotide
aatcaaagagctgctcaatttggtaaagaaggagggcttcaagattgagtgttac

SEQ ID NO: 305928 - DNA, 59 bp, Artificial
  Synthetic oligonucleotide
aatcaaagatagggtcagttatttcgtccattgaatggtacttacgatccatggagcta

SEQ ID NO: 305929 - DNA, 55 bp, Artificial
  Synthetic oligonucleotide
aatcaaagctcaataggcggagcgcaaaccagcgctctcatgagcaagcactcct

SEQ ID NO: 305930 - DNA, 56 bp, Artificial
  Synthetic oligonucleotide
aatcaaaggaccaaatggagacgaacttaaacttggctgcagagtacaagccgact

SEQ ID NO: 305931 - DNA, 59 bp, Artificial
  Synthetic oligonucleotide
aatcaaatagattctgataaggtttatgatgacggtgcaccgccctgtacaattaaatg

SEQ ID NO: 305932 - DNA, 55 bp, Artificial
  Synthetic oligonucleotide
aatcaaatctatcattgcagccaagcggcacataattcctgccgcggtagtgata

SEQ ID NO: 305933 - DNA, 58 bp, Artificial
  Synthetic oligonucleotide
aatcaaatgatagtaaccatgaatgggaatgactttcaaactggaggaattggcaatt

SEQ ID NO: 305934 - DNA, 60 bp, Artificial
  Synthetic oligonucleotide
aatcaacaagaggccggcaagtatgagaatcatactgagaacgcattgatgttgtatatg

SEQ ID NO: 305935 - DNA, 60 bp, Artificial
  Synthetic oligonucleotide
aatcaacagctgtgatagactaaaagatttgtgcagaaacaaatcaaaatcagcagttga

SEQ ID NO: 305936 - DNA, 60 bp, Artificial
  Synthetic oligonucleotide
aatcaacaggagcctactatactagaagttggcgactgctgctcatatggaaacatatta

SEQ ID NO: 305937 - DNA, 51 bp, Artificial
  Synthetic oligonucleotide
aatcaacatgggagatatgtacgatgaatcatttgacaagtcgggcggtcc

SEQ ID NO: 305938 - DNA, 55 bp, Artificial
  Synthetic oligonucleotide
aatcaaccagcagacaactatcggcaatgcagcaacgcttggacccctggggccc

SEQ ID NO: 305939 - DNA, 60 bp, Artificial
  Synthetic oligonucleotide
aatcaaccatactatattcctgattatagaggaattatgctaattcatccaagcatcaat

SEQ ID NO: 305940 - DNA, 58 bp, Artificial
  Synthetic oligonucleotide
aatcaaccgagctccagagcgttgcgaagccgggcatcgttaggtaggagtagttcat

SEQ ID NO: 305941 - DNA, 60 bp, Artificial
  Synthetic oligonucleotide
aatcaacgcacgcttagaataatcattttcgcaagctgtatgcaatttccttgactgtct

SEQ ID NO: 305942 - DNA, 51 bp, Artificial
  Synthetic oligonucleotide
aatcaacgctgtcttggagatgagattaagattcatggaagattgggactt

SEQ ID NO: 305943 - DNA, 50 bp, Artificial
  Synthetic oligonucleotide
aatcaacgtgggtgtagtgtgccccctcactggcacaccggggcgctcca

SEQ ID NO: 305944 - DNA, 55 bp, Artificial
  Synthetic oligonucleotide
aatcaactaagacttggcatgagaatatcggcgctgcaatcgttaagcgatacgc

SEQ ID NO: 305945 - DNA, 60 bp, Artificial
  Synthetic oligonucleotide
aatcaactcgctaatatcagataacatcttaatgaagaacagagttagagagctgattga

SEQ ID NO: 305946 - DNA, 55 bp, Artificial
  Synthetic oligonucleotide
aatcaagatgtcttactctacttctggtttgcgttctttgcctgcatatactaag

SEQ ID NO: 305947 - DNA, 51 bp, Artificial
  Synthetic oligonucleotide
aatcaagcgatccaggttttacaaggtccctatatcacaaatacatatggc

SEQ ID NO: 305948 - DNA, 53 bp, Artificial
  Synthetic oligonucleotide
aatcaagcgtatgcgccacaggctaacgagttaaaggtatcacttatggactt

SEQ ID NO: 305949 - DNA, 59 bp, Artificial
  Synthetic oligonucleotide
aatcaaggaactactatcatttaggagcctggacgaatgtgtaaggagatcattggttc

SEQ ID NO: 305950 - DNA, 60 bp, Artificial
  Synthetic oligonucleotide
aatcaaggatcattctacaggagcatgagatggcttactttgaaatcagggcaattcccg

SEQ ID NO: 305951 - DNA, 60 bp, Artificial
  Synthetic oligonucleotide
aatcaaggtgcccactgatatagttatgacgccctagggcacgagcccacattgtcttgc

SEQ ID NO: 305952 - DNA, 55 bp, Artificial
  Synthetic oligonucleotide
aatcaagtcccaagaagaagcccaatccaacgacgctggaggaaatcattggaca

SEQ ID NO: 305953 - DNA, 53 bp, Artificial
  Synthetic oligonucleotide
aatcaagtgaattaaatgcacctaattaccactacgaggaatgttcttgttat

SEQ ID NO: 305954 - DNA, 59 bp, Artificial
  Synthetic oligonucleotide
aatcaagttaagataagacggagagtcgacataaaccctgggcacgcagacctcagtgc

SEQ ID NO: 305955 - DNA, 59 bp, Artificial
  Synthetic oligonucleotide
aatcaagttcacatatcgagggcgagcgacccaaagattgaagggtgtgtggagtacca

SEQ ID NO: 305956 - DNA, 56 bp, Artificial
  Synthetic oligonucleotide
aatcaagttggttatgcgtttcttaatttaggtagatatcttctttctgtcgcatc

SEQ ID NO: 305957 - DNA, 60 bp, Artificial
  Synthetic oligonucleotide
aatcaataattgtagagtctggcgatccgaatgcattactgaaacaccgatttgagataa

SEQ ID NO: 305958 - DNA, 57 bp, Artificial
  Synthetic oligonucleotide
aatcaatactctaggttgcacggccgcagggaacacccttggaattgctctaaccag

SEQ ID NO: 305959 - DNA, 60 bp, Artificial
  Synthetic oligonucleotide
aatcaatattatgggcagccagtgctgcagagatcccacttgtcccattatggacagata

SEQ ID NO: 305960 - DNA, 60 bp, Artificial
  Synthetic oligonucleotide
aatcaatcataacataacacttgtatactacatcaactggccgcagaatagtgtttggac

SEQ ID NO: 305961 - DNA, 58 bp, Artificial
  Synthetic oligonucleotide
aatcaatccatcattccgttcagccctcgctaagcaaaaagacttgcaaggaaatgca

SEQ ID NO: 305962 - DNA, 57 bp, Artificial
  Synthetic oligonucleotide
aatcaatcccaactgggacaggtttgaaccggccggatgttaaacactatgatgaca

SEQ ID NO: 305963 - DNA, 52 bp, Artificial
  Synthetic oligonucleotide
aatcaatccgctgagcaattcgctcctgcgacatcacaatctggtttactcc

SEQ ID NO: 305964 - DNA, 55 bp, Artificial
  Synthetic oligonucleotide
aatcaatcctcaggaggggacccagaaattgtaaggcaccagtttatttgtggag

SEQ ID NO: 305965 - DNA, 57 bp, Artificial
  Synthetic oligonucleotide
aatcaatcctcaggaggggacccagagattgtaatgcacagttttaattgtggaggg

SEQ ID NO: 305966 - DNA, 53 bp, Artificial
  Synthetic oligonucleotide
aatcaatgaacgttgtagaacaatggacgttgtactattgaattcgtccggcc

SEQ ID NO: 305967 - DNA, 53 bp, Artificial
  Synthetic oligonucleotide
aatcaatgatgattggactaggtgattacacaccgatttcacagcaattgtgc

SEQ ID NO: 305968 - DNA, 59 bp, Artificial
  Synthetic oligonucleotide
aatcaattaacacggcaggaattcatggaatatcgaaaggatggtattatagaggtcga

SEQ ID NO: 305969 - DNA, 60 bp, Artificial
  Synthetic oligonucleotide
aatcaattaggtggactaaagatccgcgcaacacacaggatcatgtccgatcattgtgct

SEQ ID NO: 305970 - DNA, 52 bp, Artificial
  Synthetic oligonucleotide
aatcaattccttacatctgatgacttccagtcgccctgtgccttacctaatt

SEQ ID NO: 305971 - DNA, 60 bp, Artificial
  Synthetic oligonucleotide
aatcaattgatctacgtcatattgaccattctcaccatcattggtctaatagcagccaac

SEQ ID NO: 305972 - DNA, 60 bp, Artificial
  Synthetic oligonucleotide
aatcaattgtctccaccatatcctcttgtcgaaactctcctatattagaatccttgtaca

SEQ ID NO: 305973 - DNA, 60 bp, Artificial
  Synthetic oligonucleotide
aatcacaaaggattatacctgggtggaactgtttcctgcgcttcctcagtgcctgcacac

SEQ ID NO: 305974 - DNA, 57 bp, Artificial
  Synthetic oligonucleotide
aatcacaaattagatgttacaacgacaacttgcaccatacgcaactgtaaaaaatta

SEQ ID NO: 305975 - DNA, 60 bp, Artificial
  Synthetic oligonucleotide
aatcacaattacgcattatgcagccttactaccacgcattgtactctttctatgaacata

SEQ ID NO: 305976 - DNA, 52 bp, Artificial
  Synthetic oligonucleotide
aatcacacctggacgaatccctaatttaccttaccacgcgtttacttagggc

SEQ ID NO: 305977 - DNA, 55 bp, Artificial
  Synthetic oligonucleotide
aatcacactctcgttacctgcgtgaacctaaaatccttcgggtgggctggaacac

SEQ ID NO: 305978 - DNA, 60 bp, Artificial
  Synthetic oligonucleotide
aatcacactgagaacgcattaatattgtatatggcatgtactcatgcctctaaccccgtg

SEQ ID NO: 305979 - DNA, 58 bp, Artificial
  Synthetic oligonucleotide
aatcacagaaatgggtaggcttccaacttttatgactcagaaagcaaggaacgcactg

SEQ ID NO: 305980 - DNA, 57 bp, Artificial
  Synthetic oligonucleotide
aatcacagaatttcccggaattatgcccgagccctctaagattagtagatggtcaaa

SEQ ID NO: 305981 - DNA, 60 bp, Artificial
  Synthetic oligonucleotide
aatcacatcacgtttggacaatcacgaatgtttatcccacacatcacacttagttttagc

SEQ ID NO: 305982 - DNA, 57 bp, Artificial
  Synthetic oligonucleotide
aatcacatttgagcttcaaagcttagttagtgcggaccgcactataaaacttgggga

SEQ ID NO: 305983 - DNA, 60 bp, Artificial
  Synthetic oligonucleotide
aatcaccagagacccatcaggcaattgccaattctgggggatggtactgcttgggcccca

SEQ ID NO: 305984 - DNA, 55 bp, Artificial
  Synthetic oligonucleotide
aatcacccaacatactccccagctttcactccactaaacagatccacatacctgg

SEQ ID NO: 305985 - DNA, 55 bp, Artificial
  Synthetic oligonucleotide
aatcaccgaaggagtggctaaattggatgatccacgattcaatggacgtgcaacc

SEQ ID NO: 305986 - DNA, 60 bp, Artificial
  Synthetic oligonucleotide
aatcaccgagaggtgacgacgacagaggcagtgaagtacttgagtattgacttcacgacc

SEQ ID NO: 305987 - DNA, 55 bp, Artificial
  Synthetic oligonucleotide
aatcaccgtatggcaaagagccatggacgctaacacaaactagtttggagactgt

SEQ ID NO: 305988 - DNA, 60 bp, Artificial
  Synthetic oligonucleotide
aatcacctaacggcatacagtcagtggcccaaaagcgtacaggccatagctctagagtac

SEQ ID NO: 305989 - DNA, 58 bp, Artificial
  Synthetic oligonucleotide
aatcacctccagaggaccccttcagcgaacagaagagcgcttcgtgcggtaggagtaa

SEQ ID NO: 305990 - DNA, 60 bp, Artificial
  Synthetic oligonucleotide
aatcacctccagaggaccccttcagcgaacagagagcaccgagacgcgataggagtaaga

SEQ ID NO: 305991 - DNA, 56 bp, Artificial
  Synthetic oligonucleotide
aatcaccttcaattatcaaagataatggtctatccggtaaaggatctgcccttaag

SEQ ID NO: 305992 - DNA, 52 bp, Artificial
  Synthetic oligonucleotide
aatcaccttgttccattgttagttccagtagttcggggaaatccccttcttg

SEQ ID NO: 305993 - DNA, 54 bp, Artificial
  Synthetic oligonucleotide
aatcacgacagatggcaaataacaacagtagattatttagtggctatatacact

SEQ ID NO: 305994 - DNA, 55 bp, Artificial
  Synthetic oligonucleotide
aatcacgattctgtttctgctcatagcagagggctcctctcagaattacacgggg

SEQ ID NO: 305995 - DNA, 58 bp, Artificial
  Synthetic oligonucleotide
aatcacgccgctcattgttcatcgaagaggcccccgggtactatgtccccacatccga

SEQ ID NO: 305996 - DNA, 58 bp, Artificial
  Synthetic oligonucleotide
aatcacgctgaccaggactttatagatagcctccaagacgaccagtcgttcggaggta

SEQ ID NO: 305997 - DNA, 51 bp, Artificial
  Synthetic oligonucleotide
aatcacgtaatgtttttcttggtacgtgatagaaggccttatggctccccc

SEQ ID NO: 305998 - DNA, 59 bp, Artificial
  Synthetic oligonucleotide
aatcacgtagcgtctgccgcgcctagatatttgtgacttggcgactaagtcgttgtggg

SEQ ID NO: 305999 - DNA, 53 bp, Artificial
  Synthetic oligonucleotide
aatcactacttccaaacccgacactatttacataccctatgggaggcgggcat

SEQ ID NO: 306000 - DNA, 59 bp, Artificial
  Synthetic oligonucleotide
aatcactagcctaatcacttcttcatcataacgtacagctacgaaaaaagtctctatag

SEQ ID NO: 306001 - DNA, 58 bp, Artificial
  Synthetic oligonucleotide
aatcactaggagtccagagtgatgttcccttagactctagttgtggaggggattgctt

SEQ ID NO: 306002 - DNA, 60 bp, Artificial
  Synthetic oligonucleotide
aatcactcacgttccgcgatgacagacggtatgtacgatgaggagtctgatagcaaagct

SEQ ID NO: 306003 - DNA, 59 bp, Artificial
  Synthetic oligonucleotide
aatcactcccaccacatttacagaaatcaaacgtactgtgtaatgggtgggatgccatc

SEQ ID NO: 306004 - DNA, 60 bp, Artificial
  Synthetic oligonucleotide
aatcactccccatgtcaatagagacttagcagttgtatttactggagcacatggtgcgga

SEQ ID NO: 306005 - DNA, 60 bp, Artificial
  Synthetic oligonucleotide
aatcactccttcgctgaaagatcgtttctatatacgccacgtgctgaaacgcgtagtgtc

SEQ ID NO: 306006 - DNA, 58 bp, Artificial
  Synthetic oligonucleotide
aatcactcgtcggaagagaaatggagttctgggaatcgtctgctatgcctgacgatgt

SEQ ID NO: 306007 - DNA, 59 bp, Artificial
  Synthetic oligonucleotide
aatcactcgtctgcgcgataaatgcattatgacgggttcattcgtctgcagcgggtaga

SEQ ID NO: 306008 - DNA, 50 bp, Artificial
  Synthetic oligonucleotide
aatcactctaacccttccgcggtttgagtcataaagccgtaaacaaggct

SEQ ID NO: 306009 - DNA, 60 bp, Artificial
  Synthetic oligonucleotide
aatcactctgaatacaaaagacgtcaaatatgagttgtttatcgctagagacatgagtgc

SEQ ID NO: 306010 - DNA, 60 bp, Artificial
  Synthetic oligonucleotide
aatcactgaaaccagtgctgaggacagcaatgcctgagaagcgacagggtagtttgattg

SEQ ID NO: 306011 - DNA, 57 bp, Artificial
  Synthetic oligonucleotide
aatcactgacacaaaaggcaagtgaaatccccagttcaaagtccataatcccacaaa

SEQ ID NO: 306012 - DNA, 60 bp, Artificial
  Synthetic oligonucleotide
aatcactgagacaaatgatggagtgttgatcgtgaacactagtaagtaccccaatatgta

SEQ ID NO: 306013 - DNA, 60 bp, Artificial
  Synthetic oligonucleotide
aatcacttactcaaaaaatgacacaggcatattcatgcatagtaaggtatttagacattg

SEQ ID NO: 306014 - DNA, 60 bp, Artificial
  Synthetic oligonucleotide
aatcagaaatggaacttatgaccatgatgtatacagagatgaagcattaaacaaccggtt

SEQ ID NO: 306015 - DNA, 57 bp, Artificial
  Synthetic oligonucleotide
aatcagaacaatcgtcgtgaaatcattgctaaaccagcctttttgacgctcctcttt

SEQ ID NO: 306016 - DNA, 60 bp, Artificial
  Synthetic oligonucleotide
aatcagaagaaagcgattgtagagttgcaagcactcctaccgaaagcacagtcggtcggc

SEQ ID NO: 306017 - DNA, 58 bp, Artificial
  Synthetic oligonucleotide
aatcagaagcaccaatagacaatgattgtgagtctaaatgtttttggagagggggttc

SEQ ID NO: 306018 - DNA, 52 bp, Artificial
  Synthetic oligonucleotide
aatcagaaggtatcagtgcaaacagagggcatatgcacgctacgactttgta

SEQ ID NO: 306019 - DNA, 60 bp, Artificial
  Synthetic oligonucleotide
aatcagaatccaagagtgtttctggcaatgatcacatacataacaagaaatcaaccagag

SEQ ID NO: 306020 - DNA, 53 bp, Artificial
  Synthetic oligonucleotide
aatcagagcaccgctaccacccaggaaggagataacagatgcgttctgagtgt

SEQ ID NO: 306021 - DNA, 55 bp, Artificial
  Synthetic oligonucleotide
aatcagagcgcgtgtgtttagttggagctacgttccaggaaaagtacatcgcccc

SEQ ID NO: 306022 - DNA, 50 bp, Artificial
  Synthetic oligonucleotide
aatcagataggttggtccttgcaactggactcagaaacgtccctcaaagg

SEQ ID NO: 306023 - DNA, 60 bp, Artificial
  Synthetic oligonucleotide
aatcagatgctaaatttcattttaagatagtcgataaccaccaactagtcaatcatctgt

SEQ ID NO: 306024 - DNA, 52 bp, Artificial
  Synthetic oligonucleotide
aatcagattaattactcccttgtttgttggatccactcccgaaacgttttac

SEQ ID NO: 306025 - DNA, 58 bp, Artificial
  Synthetic oligonucleotide
aatcagattataaaggagcgccaaggtttacctcaagcagcttggcagttacaacgtg

SEQ ID NO: 306026 - DNA, 60 bp, Artificial
  Synthetic oligonucleotide
aatcagcacacaatcgatctggccgactcagaaatgaacaaactatatgaacgagtgagg

SEQ ID NO: 306027 - DNA, 60 bp, Artificial
  Synthetic oligonucleotide
aatcagccagtagcattagtaggagcattgccatttattacggattcatcagttatatca

SEQ ID NO: 306028 - DNA, 59 bp, Artificial
  Synthetic oligonucleotide
aatcagcccgaatggttcagaaatgtgctaagtgttgccccaataatgttctcgaacaa

SEQ ID NO: 306029 - DNA, 55 bp, Artificial
  Synthetic oligonucleotide
aatcagccctttgtttgtagcaaatttttgtgtctagtcccgacgactgatggtg

SEQ ID NO: 306030 - DNA, 50 bp, Artificial
  Synthetic oligonucleotide
aatcagcctttactgtctcaggctgttgagctacttgcttctgaggatcg

SEQ ID NO: 306031 - DNA, 55 bp, Artificial
  Synthetic oligonucleotide
aatcagcgtacaacccacattctccgtacagagaaaccttcccttcgaaagggca

SEQ ID NO: 306032 - DNA, 55 bp, Artificial
  Synthetic oligonucleotide
aatcagcttatgggatgaaagcctaaaaccatgtgtacagttaacccctctctgt

SEQ ID NO: 306033 - DNA, 55 bp, Artificial
  Synthetic oligonucleotide
aatcagcttcagggtatccaccacggaggccaccttcccggaggagaacggcgca

SEQ ID NO: 306034 - DNA, 60 bp, Artificial
  Synthetic oligonucleotide
aatcagcttgcgtgctacaccattttagctgtattgggctatgacatcaaccaatgttat

SEQ ID NO: 306035 - DNA, 58 bp, Artificial
  Synthetic oligonucleotide
aatcaggcattcctctagcagctactgccatggtgaaggttgctgagctagatgggtc

SEQ ID NO: 306036 - DNA, 56 bp, Artificial
  Synthetic oligonucleotide
aatcagggagatataagagatacggaatggtctagatatgatcgtcggaagtggcc

SEQ ID NO: 306037 - DNA, 58 bp, Artificial
  Synthetic oligonucleotide
aatcagggcgagattgtgtacactacgacggatagggtaattggtgccagagtcttat

SEQ ID NO: 306038 - DNA, 50 bp, Artificial
  Synthetic oligonucleotide
aatcagggcgctgtcagtcaaaagttactcagacttatccgacaatcgcc

SEQ ID NO: 306039 - DNA, 55 bp, Artificial
  Synthetic oligonucleotide
aatcagggggattgggatataaatggtcagaagtgtcatttaaaccagcgtttta

SEQ ID NO: 306040 - DNA, 59 bp, Artificial
  Synthetic oligonucleotide
aatcagggtcagcaaacgtcgtatgtgaactttccatctctcggagttgatggtaatgg

SEQ ID NO: 306041 - DNA, 60 bp, Artificial
  Synthetic oligonucleotide
aatcaggtagactctggtctagataacattgatagttagtgcaaaggggactagatctgg

SEQ ID NO: 306042 - DNA, 55 bp, Artificial
  Synthetic oligonucleotide
aatcaggtaggagcgggagcattcgggccagggttcaccccaccacacggtggtc

SEQ ID NO: 306043 - DNA, 56 bp, Artificial
  Synthetic oligonucleotide
aatcaggtgtaaattatgtacagacaagtgtattatgggtccggcctttaacatta

SEQ ID NO: 306044 - DNA, 60 bp, Artificial
  Synthetic oligonucleotide
aatcagtaacagcccgagcacagcttgtggcggaccaacggaggttatgtgatgttgact

SEQ ID NO: 306045 - DNA, 57 bp, Artificial
  Synthetic oligonucleotide
aatcagtagataccatcaaagcaagaccccatgttgaagttcccatagggtcaaaaa

SEQ ID NO: 306046 - DNA, 55 bp, Artificial
  Synthetic oligonucleotide
aatcagtcgagttgaatgctcctaattatcattacgaggagtgttcctgttatcc

SEQ ID NO: 306047 - DNA, 58 bp, Artificial
  Synthetic oligonucleotide
aatcagtctgtgacaacaatgcactccctttaatctggaggggcctaattgacttaac

SEQ ID NO: 306048 - DNA, 60 bp, Artificial
  Synthetic oligonucleotide
aatcagtgaacagtgcagtagtaatgcctgcgcatggccctgccaaaagcatggagtatg

SEQ ID NO: 306049 - DNA, 60 bp, Artificial
  Synthetic oligonucleotide
aatcagtgcaagtccaatcatgtcaacacgttgcatttgatgatggctaatgctgggcat

SEQ ID NO: 306050 - DNA, 55 bp, Artificial
  Synthetic oligonucleotide
aatcagtgcttgcggatgcaaatgaaactttattggcgaatgttaccgcggtacg

SEQ ID NO: 306051 - DNA, 59 bp, Artificial
  Synthetic oligonucleotide
aatcagtggactgtaattgtgccaggacgaaaattagccaccaatacttatgaaatgta

SEQ ID NO: 306052 - DNA, 59 bp, Artificial
  Synthetic oligonucleotide
aatcagtgtgcaacccactttctctgtgcaaagaaacctcccctttgagagagcgacca

SEQ ID NO: 306053 - DNA, 56 bp, Artificial
  Synthetic oligonucleotide
aatcagtgtgcaacctgcattttctgtgcaaagaaaccttccatttgacaaaccaa

SEQ ID NO: 306054 - DNA, 56 bp, Artificial
  Synthetic oligonucleotide
aatcagtgttggtaaacacctaccagtggatcatcagaaactgggaaactgttaaa

SEQ ID NO: 306055 - DNA, 60 bp, Artificial
  Synthetic oligonucleotide
aatcagtttgaggaagagagagcggatgtgagacttaatccgtctacaagggctaaagca

SEQ ID NO: 306056 - DNA, 60 bp, Artificial
  Synthetic oligonucleotide
aatcataacctgtttcactatcacttgccagcctatgccaagaagaaattgtctgcaaga

SEQ ID NO: 306057 - DNA, 60 bp, Artificial
  Synthetic oligonucleotide
aatcataatgtctcgcaaggctccatgcaaatatgaagtgcggggcaaatgcaatagagg

SEQ ID NO: 306058 - DNA, 60 bp, Artificial
  Synthetic oligonucleotide
aatcataccaatctgcggggtggacatcaaagcaatcgcagcccatgaacaagggctgcc

SEQ ID NO: 306059 - DNA, 60 bp, Artificial
  Synthetic oligonucleotide
aatcatacggaaaacgctttattattgtacatggcatgtacacatgcctctaatccagtg

SEQ ID NO: 306060 - DNA, 60 bp, Artificial
  Synthetic oligonucleotide
aatcatactgagaatgctttgttgctgtatatggcatgtactcatgcctctaaccctgtg

SEQ ID NO: 306061 - DNA, 50 bp, Artificial
  Synthetic oligonucleotide
aatcatacttcgcatcactgccaagacgaccgataactacacgactgtgc

SEQ ID NO: 306062 - DNA, 60 bp, Artificial
  Synthetic oligonucleotide
aatcatagaacttgagcaccttagaccacagtcagatgccttcttgggttacaaagatcc

SEQ ID NO: 306063 - DNA, 54 bp, Artificial
  Synthetic oligonucleotide
aatcatagccgtggggtttggtttcgtggcatttggtttcttcttggcgattcg

SEQ ID NO: 306064 - DNA, 60 bp, Artificial
  Synthetic oligonucleotide
aatcatatacacgtgacgtatgctattgcaccagtctgtgacagttacgatctgcctggg

SEQ ID NO: 306065 - DNA, 60 bp, Artificial
  Synthetic oligonucleotide
aatcatatgggtatttctagaagatcacatcaaattagattttcagagtctgcaacgtca

SEQ ID NO: 306066 - DNA, 60 bp, Artificial
  Synthetic oligonucleotide
aatcatatgtgtgtgtagggataactggcatggctcaaatcgaccgtgggtatcgttcaa

SEQ ID NO: 306067 - DNA, 60 bp, Artificial
  Synthetic oligonucleotide
aatcatcaagaggctgctaagtatgacaatcatactgagaatgccttgttattgtatatg

SEQ ID NO: 306068 - DNA, 55 bp, Artificial
  Synthetic oligonucleotide
aatcatcaagtggaaggacccaggccttggcttctttctgttggataacccttac

SEQ ID NO: 306069 - DNA, 60 bp, Artificial
  Synthetic oligonucleotide
aatcatcaggaagctgggaagtacgagaatcacactgagaatgctttgttgttgtatatg

SEQ ID NO: 306070 - DNA, 60 bp, Artificial
  Synthetic oligonucleotide
aatcatcataaatttctgggtgatctcctcgaattatttccacttttgcatcagtagccc

SEQ ID NO: 306071 - DNA, 60 bp, Artificial
  Synthetic oligonucleotide
aatcatcatgtgacttacaatcatcaagagcaggctaaatatgagaaccatactgagaac

SEQ ID NO: 306072 - DNA, 52 bp, Artificial
  Synthetic oligonucleotide
aatcatccctggttttcttaaaaccaaagtcttcaaaagacaggaatcgaaa

SEQ ID NO: 306073 - DNA, 57 bp, Artificial
  Synthetic oligonucleotide
aatcatcgtggggggctgggacaccgagaaacaggtactcaacgtcatagaggcggc

SEQ ID NO: 306074 - DNA, 59 bp, Artificial
  Synthetic oligonucleotide
aatcatctagtgtcatatgctccgttcttcgtaccaaacgatactaagcctggaagccg

SEQ ID NO: 306075 - DNA, 58 bp, Artificial
  Synthetic oligonucleotide
aatcatctgacaggcgatttcaggattttctgggcactttggataggtaaggaacgtg

SEQ ID NO: 306076 - DNA, 60 bp, Artificial
  Synthetic oligonucleotide
aatcatctggagccaacaagctaggaagccgtctgagcaagatattcagatccttacaga

SEQ ID NO: 306077 - DNA, 60 bp, Artificial
  Synthetic oligonucleotide
aatcatctgtcaactcagagcatatcttctcagtagaccacaattgtgaaaccattgcta

SEQ ID NO: 306078 - DNA, 60 bp, Artificial
  Synthetic oligonucleotide
aatcatcttatttaaggagaagcacccagcctccaagcgaggtggtttatgtgataggca

SEQ ID NO: 306079 - DNA, 58 bp, Artificial
  Synthetic oligonucleotide
aatcatgaaagggacacgcctccacgtgtcgcccgcacacacggatgattacgaggag

SEQ ID NO: 306080 - DNA, 56 bp, Artificial
  Synthetic oligonucleotide
aatcatgactctagtctagcgcgatagacgatttctagtccagagtactagacata

SEQ ID NO: 306081 - DNA, 60 bp, Artificial
  Synthetic oligonucleotide
aatcatgagccagaattcctcaacaacacagagcctctctgtgatgtatcaggatttgct

SEQ ID NO: 306082 - DNA, 55 bp, Artificial
  Synthetic oligonucleotide
aatcatgatagcggcgtcggacacacagcagggaagagtgtggagaacgaacctt

SEQ ID NO: 306083 - DNA, 60 bp, Artificial
  Synthetic oligonucleotide
aatcatgcctgcctgcctgtgtgcatggacttgccgtagcaagtggatacgactttgaga

SEQ ID NO: 306084 - DNA, 57 bp, Artificial
  Synthetic oligonucleotide
aatcatgcgaataaattggaaaaagtggtggcaagtattttatacaatagttgatta

SEQ ID NO: 306085 - DNA, 54 bp, Artificial
  Synthetic oligonucleotide
aatcatggagaggtactcatgcttagaagtagcatgggaaataatgtctcgcat

SEQ ID NO: 306086 - DNA, 60 bp, Artificial
  Synthetic oligonucleotide
aatcatgggactagatatgctagctaacatgactaatgatgccaaagtcatacaaacgct

SEQ ID NO: 306087 - DNA, 56 bp, Artificial
  Synthetic oligonucleotide
aatcattaacgcaggggcgcctgaaattgtgccccctgcacacggtgggtttacaa

SEQ ID NO: 306088 - DNA, 59 bp, Artificial
  Synthetic oligonucleotide
aatcattattgtgtgacatgtgcggacaaaacgatatgttttgggtcgtatagagttag

SEQ ID NO: 306089 - DNA, 60 bp, Artificial
  Synthetic oligonucleotide
aatcattcaacagaggagagcaagaaatggagccggtagatcctaaactagagccctgga

SEQ ID NO: 306090 - DNA, 60 bp, Artificial
  Synthetic oligonucleotide
aatcattcaaggagcagccacgcagggaactccacccctatcttatcgctacgagaataa

SEQ ID NO: 306091 - DNA, 60 bp, Artificial
  Synthetic oligonucleotide
aatcattcaggccggatatacgcaatccgtattctggcgcagtcggccttattcagttct

SEQ ID NO: 306092 - DNA, 60 bp, Artificial
  Synthetic oligonucleotide
aatcattccattaaaattagttgtaggaccaaacggcggttgatgccatggtatcatgca

SEQ ID NO: 306093 - DNA, 58 bp, Artificial
  Synthetic oligonucleotide
aatcattccggtatagggctgttagggcaaagtatggatgtcatgtccagaggacttg

SEQ ID NO: 306094 - DNA, 55 bp, Artificial
  Synthetic oligonucleotide
aatcattctgcgcaggggtccccgtgtataaggcaattctgatctaatcggagta

SEQ ID NO: 306095 - DNA, 55 bp, Artificial
  Synthetic oligonucleotide
aatcattgaattctaggctctttcggacagagggtgctaagaacgtcttcacagc

SEQ ID NO: 306096 - DNA, 60 bp, Artificial
  Synthetic oligonucleotide
aatcattgagcacaaggtgagccggcatgaggttgcaagaccggaacaaccagtccttct

SEQ ID NO: 306097 - DNA, 58 bp, Artificial
  Synthetic oligonucleotide
aatcattgcacgccgttatccgtccgatttgcaacacgtgtatcccactaacagactt

SEQ ID NO: 306098 - DNA, 60 bp, Artificial
  Synthetic oligonucleotide
aatcattggagcagttccatatggcaacggcagagtcgttaattcgcaaacagatgagct

SEQ ID NO: 306099 - DNA, 55 bp, Artificial
  Synthetic oligonucleotide
aatcatttcagtgccaaccacgtaattctaatgcttaaccctgtcaacgtaatct

SEQ ID NO: 306100 - DNA, 55 bp, Artificial
  Synthetic oligonucleotide
aatcatttccacacccgcctccaaggttcgacggaggctgaacttcgacagcccg

SEQ ID NO: 306101 - DNA, 55 bp, Artificial
  Synthetic oligonucleotide
aatcatttccacgcccgtttcgaaggtacgccgtcgtctcagcttcgacagccca

SEQ ID NO: 306102 - DNA, 60 bp, Artificial
  Synthetic oligonucleotide
aatccaaagcccaaggcatagactcaattgctagatgtaactgccacactggagtgtact

SEQ ID NO: 306103 - DNA, 57 bp, Artificial
  Synthetic oligonucleotide
aatccaaagggtgcacctcgttgaggacaatcttgaacggctagttgtgagttgtag

SEQ ID NO: 306104 - DNA, 53 bp, Artificial
  Synthetic oligonucleotide
aatccaaatgttttgcatcggtgctttcttcgtccggttgggagggatgtaca

SEQ ID NO: 306105 - DNA, 55 bp, Artificial
  Synthetic oligonucleotide
aatccaacagacagcagaaatcctgctgattatcgctggacaagatggaaaggtc

SEQ ID NO: 306106 - DNA, 60 bp, Artificial
  Synthetic oligonucleotide
aatccaagcgaggccatctcatttctggaaggcagttctaaatgatagtccagaggcagt

SEQ ID NO: 306107 - DNA, 58 bp, Artificial
  Synthetic oligonucleotide
aatccaaggataagctcagaagtacacataccactaggggaagctaaattgataataa

SEQ ID NO: 306108 - DNA, 60 bp, Artificial
  Synthetic oligonucleotide
aatccaagtcccgatgaacgtgacacgcggtattagttttgacatgatctcgagatacca

SEQ ID NO: 306109 - DNA, 51 bp, Artificial
  Synthetic oligonucleotide
aatccaatgagtgaccactcaaatccccggttaacaaaggttctagatgag

SEQ ID NO: 306110 - DNA, 60 bp, Artificial
  Synthetic oligonucleotide
aatccaatgtgtgatgagttcctaaacgcaccggagtggtcatatattgtggagaagaac

SEQ ID NO: 306111 - DNA, 60 bp, Artificial
  Synthetic oligonucleotide
aatccaatgttcgtaacagatgaacaagtgtgccttgaggttgggcactgcaattatgag

SEQ ID NO: 306112 - DNA, 55 bp, Artificial
  Synthetic oligonucleotide
aatccaattgcctcaggcctgcgcgtcgtttgggacctgttccgcggctgtgcca

SEQ ID NO: 306113 - DNA, 50 bp, Artificial
  Synthetic oligonucleotide
aatccacaagaaaccctagctagctcccccttagacaaccatatacagat

SEQ ID NO: 306114 - DNA, 60 bp, Artificial
  Synthetic oligonucleotide
aatccacagacgctctaatacagacatggtgcgaagagtctattgagctagttagtaatc

SEQ ID NO: 306115 - DNA, 60 bp, Artificial
  Synthetic oligonucleotide
aatccacaggtacccattgaactcaatcatgaaaagcttgaccgaagcatgtggcaactg

SEQ ID NO: 306116 - DNA, 50 bp, Artificial
  Synthetic oligonucleotide
aatccacgcatgcccctacacaagcaggacgtgcaggtgccagttcaaga

SEQ ID NO: 306117 - DNA, 52 bp, Artificial
  Synthetic oligonucleotide
aatccacgtggtttctctgttccgggggttgggccgggctgaggagtaggga

SEQ ID NO: 306118 - DNA, 55 bp, Artificial
  Synthetic oligonucleotide
aatccactatgcctgcttttgctaactctagttttaaaacttgctgtgccgccac

SEQ ID NO: 306119 - DNA, 60 bp, Artificial
  Synthetic oligonucleotide
aatccactgtcctgtccgcccaggagattcaagctcctcggtatgagatcgtcaccgaat

SEQ ID NO: 306120 - DNA, 60 bp, Artificial
  Synthetic oligonucleotide
aatccacttatcctacatgtcatgatagcatcctgaacacaaagcaatctgttttctctc

SEQ ID NO: 306121 - DNA, 60 bp, Artificial
  Synthetic oligonucleotide
aatccagaacagcatgacaatagagagaatggttctctcagcatttgatgagaggagaaa

SEQ ID NO: 306122 - DNA, 55 bp, Artificial
  Synthetic oligonucleotide
aatccagaacccaagggttatgtcttgaatgtcccggggccaggcgcttatagaa

SEQ ID NO: 306123 - DNA, 60 bp, Artificial
  Synthetic oligonucleotide
aatccagaggatcacgtgaattcgaaggaacaattgctggcgatacgatggcacctataa

SEQ ID NO: 306124 - DNA, 58 bp, Artificial
  Synthetic oligonucleotide
aatccagattgggacttcaaccccaacaaggatcactggccagaggcaaatcaggtag

SEQ ID NO: 306125 - DNA, 55 bp, Artificial
  Synthetic oligonucleotide
aatccaggaagttccctcgagcgatgcccgtatgggcacgcccggactacaaccc

SEQ ID NO: 306126 - DNA, 50 bp, Artificial
  Synthetic oligonucleotide
aatccaggccatgcaagagtgcctgtgcatccttgatgacttgcacttta

SEQ ID NO: 306127 - DNA, 59 bp, Artificial
  Synthetic oligonucleotide
aatccaggcccatttgcacagactagatacgctccagttaattggggacacggagagat

SEQ ID NO: 306128 - DNA, 52 bp, Artificial
  Synthetic oligonucleotide
aatccagggacttgaacggtaagccaattcagtgcggccccattcaagattc

SEQ ID NO: 306129 - DNA, 55 bp, Artificial
  Synthetic oligonucleotide
aatccagggtgaggtctatgcacggcggctccgtgtggtcgcgtggaggagacac

SEQ ID NO: 306130 - DNA, 55 bp, Artificial
  Synthetic oligonucleotide
aatccagtatggcggcggcgctcagggtgcaaccgacttcccggaggtctggcac

SEQ ID NO: 306131 - DNA, 55 bp, Artificial
  Synthetic oligonucleotide
aatccagtcgtactacgaccaaacaatgtagaagtggaatttcttcttaatgggc

SEQ ID NO: 306132 - DNA, 59 bp, Artificial
  Synthetic oligonucleotide
aatccagttcactgatgcaatgagggtattggggctttttgaacgcgggaataatctga

SEQ ID NO: 306133 - DNA, 53 bp, Artificial
  Synthetic oligonucleotide
aatccagttgttcacgcgaagaacggtgttgcccgctttgctctgccctacac

SEQ ID NO: 306134 - DNA, 55 bp, Artificial
  Synthetic oligonucleotide
aatccagttttgctctcaagactggcctgcaaattactggcggcgttgtagaccc

SEQ ID NO: 306135 - DNA, 57 bp, Artificial
  Synthetic oligonucleotide
aatccataagttagacgaatggtaggtagcaggtatcaaatatgttgtaaagttgaa

SEQ ID NO: 306136 - DNA, 55 bp, Artificial
  Synthetic oligonucleotide
aatccatcctctgaaacaatgagcatcaccaactctgcaatctacacattcccag

SEQ ID NO: 306137 - DNA, 60 bp, Artificial
  Synthetic oligonucleotide
aatccatctacaccagaatgttgtggacgtgcagtacctctacggattgtccacggcagt

SEQ ID NO: 306138 - DNA, 58 bp, Artificial
  Synthetic oligonucleotide
aatccatctacatcgaatccagcggccttatcgaagtcctctacagaataacccccca

SEQ ID NO: 306139 - DNA, 60 bp, Artificial
  Synthetic oligonucleotide
aatccatggttgcagcagtttattgatagaaaataagaacacccgcattcaagatcgact

SEQ ID NO: 306140 - DNA, 50 bp, Artificial
  Synthetic oligonucleotide
aatccatggttgcgacagttgagcgacaagtagtacgagcacccgcaatt

SEQ ID NO: 306141 - DNA, 60 bp, Artificial
  Synthetic oligonucleotide
aatccatggtttgcgcaattaattgagacgaaataggaacagccacagcgtagatcaaca

SEQ ID NO: 306142 - DNA, 60 bp, Artificial
  Synthetic oligonucleotide
aatccattaatggcaatctgtctgaagaaagaatttcgggtgcgcagcagtcggaagctc

SEQ ID NO: 306143 - DNA, 51 bp, Artificial
  Synthetic oligonucleotide
aatccattagcgttactgtatgcgcaacatgcattacgttcaacgttgatt

SEQ ID NO: 306144 - DNA, 60 bp, Artificial
  Synthetic oligonucleotide
aatccattattggcgcagttgatgtgtatgaagactgaacacccgcactctaggtccacc

SEQ ID NO: 306145 - DNA, 60 bp, Artificial
  Synthetic oligonucleotide
aatccattcaaaggactgtcaactgatagaaagatggatgaagtctctcaaataggaatt

SEQ ID NO: 306146 - DNA, 60 bp, Artificial
  Synthetic oligonucleotide
aatccattgaggagcacgcacaggcgctctccgggctaccagagcgtacacctgactatg

SEQ ID NO: 306147 - DNA, 59 bp, Artificial
  Synthetic oligonucleotide
aatccattgtgattggcagcacattctgtgtactggtcctgataccactccaacgtagt

SEQ ID NO: 306148 - DNA, 60 bp, Artificial
  Synthetic oligonucleotide
aatcccaaaagtcctgacagtcaatcggcggaacgtatttctccatgatgagttgcatta

SEQ ID NO: 306149 - DNA, 51 bp, Artificial
  Synthetic oligonucleotide
aatcccaaatatcggatctagaccctggataagaggtctgtctagtagaat

SEQ ID NO: 306150 - DNA, 56 bp, Artificial
  Synthetic oligonucleotide
aatcccaaatatcgggtccagaccctgggtacggggtgtctccagcataataagca

SEQ ID NO: 306151 - DNA, 58 bp, Artificial
  Synthetic oligonucleotide
aatcccaaatattggatccagaccgtgggtaaggggtcaatctggcagaataagcatc

SEQ ID NO: 306152 - DNA, 58 bp, Artificial
  Synthetic oligonucleotide
aatcccaaccacggagcaggtagttgcaagccagcaatcgacctgtcgtaacgcgtaa

SEQ ID NO: 306153 - DNA, 59 bp, Artificial
  Synthetic oligonucleotide
aatcccaagaaccaccatcgattccagagttgggagtctacattggcatacataagaaa

SEQ ID NO: 306154 - DNA, 57 bp, Artificial
  Synthetic oligonucleotide
aatcccaagtgtcaaggaaggatcatcggtccttagcaggaggatgccttaaagtta

SEQ ID NO: 306155 - DNA, 56 bp, Artificial
  Synthetic oligonucleotide
aatcccaatcacagccgcggcctggtacttatgggagacaaaaaagcagagggccg

SEQ ID NO: 306156 - DNA, 55 bp, Artificial
  Synthetic oligonucleotide
aatcccaatgccgagtttgtaacattgatgagggatccacaggcgttagggtctg

SEQ ID NO: 306157 - DNA, 58 bp, Artificial
  Synthetic oligonucleotide
aatcccacccgatgttaatgttctgtgataatagagtcagaattgtcccagtcaaaac

SEQ ID NO: 306158 - DNA, 58 bp, Artificial
  Synthetic oligonucleotide
aatcccacctgatcctctgaggatttgtcgcaatgcctcttcattaacaaacttcccc

SEQ ID NO: 306159 - DNA, 60 bp, Artificial
  Synthetic oligonucleotide
aatcccagattgctacattggaacaaagtgctccatcacagagcgatcaagaacaacttt

SEQ ID NO: 306160 - DNA, 55 bp, Artificial
  Synthetic oligonucleotide
aatcccagcacggtaagttcgttgtcaagaacaccacaacgctccggattgctcc

SEQ ID NO: 306161 - DNA, 55 bp, Artificial
  Synthetic oligonucleotide
aatcccaggtagaagaggttagggtgtttgatggcacagaaagacttccagggga

SEQ ID NO: 306162 - DNA, 60 bp, Artificial
  Synthetic oligonucleotide
aatcccatacgtcatgcgccagggtgacagctggttgaagaagtttacggaagcatgcaa

SEQ ID NO: 306163 - DNA, 50 bp, Artificial
  Synthetic oligonucleotide
aatcccatgaatcagctattcttgtatatctagggctcattgtatgtaag

SEQ ID NO: 306164 - DNA, 56 bp, Artificial
  Synthetic oligonucleotide
aatcccattgagacaacgtttcctgctgcccaaacccaaccagatcaaactcaaaa

SEQ ID NO: 306165 - DNA, 55 bp, Artificial
  Synthetic oligonucleotide
aatccccaaggagaaaatagcgcattggactaatacacatagtcatcgcggtagg

SEQ ID NO: 306166 - DNA, 60 bp, Artificial
  Synthetic oligonucleotide
aatccccaatgccgtccgaatgttgtggttgaaccgtatctggagtgtgatgatgtcgtg

SEQ ID NO: 306167 - DNA, 58 bp, Artificial
  Synthetic oligonucleotide
aatccccagtgccttccttaagttgtggttgaatctgatctggacagtcaaaatgtcg

SEQ ID NO: 306168 - DNA, 58 bp, Artificial
  Synthetic oligonucleotide
aatccccgtgcgccctccccaactttgatgtgacgccaccaatacacataccaggaga

SEQ ID NO: 306169 - DNA, 52 bp, Artificial
  Synthetic oligonucleotide
aatccccgttttctattttggggttaccagagatcgtggtacgtagtggagc

SEQ ID NO: 306170 - DNA, 50 bp, Artificial
  Synthetic oligonucleotide
aatcccctatagggttacctttagggtgatcccccccgaggcttatggcc

SEQ ID NO: 306171 - DNA, 54 bp, Artificial
  Synthetic oligonucleotide
aatcccctggacaactcgacaggccgctaacactttccttggggctatccacct

SEQ ID NO: 306172 - DNA, 60 bp, Artificial
  Synthetic oligonucleotide
aatcccgaatatcggatctagacccagagtaaggaatatccccagcagaataagcatcta

SEQ ID NO: 306173 - DNA, 60 bp, Artificial
  Synthetic oligonucleotide
aatcccgaatatcggatctagacccagggtaagggatatctccagcagaataagcatcta

SEQ ID NO: 306174 - DNA, 55 bp, Artificial
  Synthetic oligonucleotide
aatcccgatagggaacgtttggtatggaaattcacaggaatggagataggtcgtg

SEQ ID NO: 306175 - DNA, 49 bp, Artificial
  Synthetic oligonucleotide
aatcccgcggacgacccgtctcggggccgtttgggactctaccgtcccc

SEQ ID NO: 306176 - DNA, 56 bp, Artificial
  Synthetic oligonucleotide
aatcccggatatcgggtatagaccatgggtaaggggtctgtccagtagaataagca

SEQ ID NO: 306177 - DNA, 56 bp, Artificial
  Synthetic oligonucleotide
aatcccggattcccaaaataccctgaaatatgtgtctggaaggcgcgtggtaatgc

SEQ ID NO: 306178 - DNA, 58 bp, Artificial
  Synthetic oligonucleotide
aatcccgtacttgttaaggatgctacagggagtactcaatttgggccagtgcaagcgc

SEQ ID NO: 306179 - DNA, 54 bp, Artificial
  Synthetic oligonucleotide
aatcccgtagcaccggcgttctccctgcgcagcggggggaacgttggtgagaag

SEQ ID NO: 306180 - DNA, 53 bp, Artificial
  Synthetic oligonucleotide
aatcccgtatttaagcgtttacacggaacgaaacgaagtgatatcaagcgtcg

SEQ ID NO: 306181 - DNA, 52 bp, Artificial
  Synthetic oligonucleotide
aatcccgtcaaatcttcggccgctctggccgcagtcgatgtgaaaggtaaca

SEQ ID NO: 306182 - DNA, 60 bp, Artificial
  Synthetic oligonucleotide
aatccctatggatacatttgttacctctactgacagcagcagtgtaacaagtagtacacc

SEQ ID NO: 306183 - DNA, 50 bp, Artificial
  Synthetic oligonucleotide
aatccctcaccgaacccttttaatgaacgaattgggtgttccgttccatt

SEQ ID NO: 306184 - DNA, 60 bp, Artificial
  Synthetic oligonucleotide
aatccctcatattatcaagatttgccatcccaacacctgaaggtaaatctgtgttaggca

SEQ ID NO: 306185 - DNA, 56 bp, Artificial
  Synthetic oligonucleotide
aatccctgaatgcctctcttccgaatgacgccgctagatgtatgattgacagagcc

SEQ ID NO: 306186 - DNA, 59 bp, Artificial
  Synthetic oligonucleotide
aatccctgctttagattgtacgggagctcaccactgctcgctgcgtcgagagtgttcga

SEQ ID NO: 306187 - DNA, 50 bp, Artificial
  Synthetic oligonucleotide
aatccctggcttccccttatgtccagtccctccccggtccgagtaaaggg

SEQ ID NO: 306188 - DNA, 52 bp, Artificial
  Synthetic oligonucleotide
aatccgaagaggatggtgcggcctctgaggctgattcctacagttccatgcc

SEQ ID NO: 306189 - DNA, 55 bp, Artificial
  Synthetic oligonucleotide
aatccgaattctacgatgttccgtacgaagccatttacgaatgcgcaatggggac

SEQ ID NO: 306190 - DNA, 60 bp, Artificial
  Synthetic oligonucleotide
aatccgacacaacagaatgcgatggtgcaaatacaggttgtgttctatatatctatggat

SEQ ID NO: 306191 - DNA, 55 bp, Artificial
  Synthetic oligonucleotide
aatccgacatctagcaaagttcagcataaggatcaaccaagaggaggagcgtcta

SEQ ID NO: 306192 - DNA, 60 bp, Artificial
  Synthetic oligonucleotide
aatccgatgtggcactgctgagatttgtgaatccagatacaggtagggttctgtttgagt

SEQ ID NO: 306193 - DNA, 54 bp, Artificial
  Synthetic oligonucleotide
aatccgcaaagggtgaaggttcgcagacccggaatgcgaaaagaggaacggcgc

SEQ ID NO: 306194 - DNA, 60 bp, Artificial
  Synthetic oligonucleotide
aatccgcaacaaattgacatctcaaacactcgtgccactcaatctcaatttgagaagtgg

SEQ ID NO: 306195 - DNA, 52 bp, Artificial
  Synthetic oligonucleotide
aatccgccaataggatactgggtattgtttgctccaaccgttcaaggggtag

SEQ ID NO: 306196 - DNA, 55 bp, Artificial
  Synthetic oligonucleotide
aatccgccgtgaattggttcggtccagggacgatcgagcgttgccagttctccgg

SEQ ID NO: 306197 - DNA, 56 bp, Artificial
  Synthetic oligonucleotide
aatccgccgtgcgctggaattgacctgaaccgctttacttcttcggattgacccac

SEQ ID NO: 306198 - DNA, 59 bp, Artificial
  Synthetic oligonucleotide
aatccgccttatgtctggacgtgtctacgccacggaattcgtccaacatatattgagaa

SEQ ID NO: 306199 - DNA, 58 bp, Artificial
  Synthetic oligonucleotide
aatccgctccgaggtgggacctcccagcggaactcgcgtcaaccatagttgagatcga

SEQ ID NO: 306200 - DNA, 52 bp, Artificial
  Synthetic oligonucleotide
aatccgctgacgccgtactagaaggagttcgcgccggggttaaagcctccgt

SEQ ID NO: 306201 - DNA, 60 bp, Artificial
  Synthetic oligonucleotide
aatccgctttctgtgctcctacaactgatgcagactctcctgtgtctaatattgttgttc

SEQ ID NO: 306202 - DNA, 56 bp, Artificial
  Synthetic oligonucleotide
aatccggaggaagattacttagtacgatacctgttcagaggaatagggaccgcatc

SEQ ID NO: 306203 - DNA, 59 bp, Artificial
  Synthetic oligonucleotide
aatccgtatgcgtaagggatttggtgacgcactgaggaattacgccttcaagatggcta

SEQ ID NO: 306204 - DNA, 53 bp, Artificial
  Synthetic oligonucleotide
aatccgtctttggctctactccaatcacagtcatgacaagtggatatgcatta

SEQ ID NO: 306205 - DNA, 53 bp, Artificial
  Synthetic oligonucleotide
aatccgtggaaggatttctctcattcaaaatcccacagacccctcccggtaaa

SEQ ID NO: 306206 - DNA, 53 bp, Artificial
  Synthetic oligonucleotide
aatccgtgggttcccctgatgtccagcccctccccagtcctggtgaaggggga

SEQ ID NO: 306207 - DNA, 60 bp, Artificial
  Synthetic oligonucleotide
aatccgtgttcaacagcctatacgcatccccgcaattagaagggttctcagctgaatcta

SEQ ID NO: 306208 - DNA, 50 bp, Artificial
  Synthetic oligonucleotide
aatccgttacatagcaatgccagccacatatgatagattgacggctaata

SEQ ID NO: 306209 - DNA, 56 bp, Artificial
  Synthetic oligonucleotide
aatccgttagcacagtttggtagtggtcaagcatcttcaccttcaggtggagtttc

SEQ ID NO: 306210 - DNA, 60 bp, Artificial
  Synthetic oligonucleotide
aatccgttagttccatcggacacggtacagaccagacacgtcatacaacacagatcgaga

SEQ ID NO: 306211 - DNA, 60 bp, Artificial
  Synthetic oligonucleotide
aatccgttcctgataaggcatcagagcacgacttgcagtgggtggtcgggctccccgctc

SEQ ID NO: 306212 - DNA, 53 bp, Artificial
  Synthetic oligonucleotide
aatccgttgccctgttgtgtgaaactgaaagacaagtgctctcttggatgagc

SEQ ID NO: 306213 - DNA, 57 bp, Artificial
  Synthetic oligonucleotide
aatccgttgcgtttcattaacagcggtatccttaatctgttgcgtttcagtaacagc

SEQ ID NO: 306214 - DNA, 55 bp, Artificial
  Synthetic oligonucleotide
aatccgttggggatcacgaaaagaatctctcctcgattcttatgaaaccttagaa

SEQ ID NO: 306215 - DNA, 60 bp, Artificial
  Synthetic oligonucleotide
aatccgttggtgccttcggacaccgtgcaaacgcgccatgtcatccagagacgaacgcga

SEQ ID NO: 306216 - DNA, 60 bp, Artificial
  Synthetic oligonucleotide
aatcctaactgcggagcacatgccttcaatccagagggtagtgtgtcgtaatgggcaact

SEQ ID NO: 306217 - DNA, 58 bp, Artificial
  Synthetic oligonucleotide
aatcctaatgacacagtcacctttagtttcaatggagcctttgtggctccagaccgtg

SEQ ID NO: 306218 - DNA, 53 bp, Artificial
  Synthetic oligonucleotide
aatcctagaccgagggccgtccttcaagccctactgcggcacggcttacaacc

SEQ ID NO: 306219 - DNA, 57 bp, Artificial
  Synthetic oligonucleotide
aatcctagcagcttgttttgctggcagccggtatggggggaaacttatcggaacaga

SEQ ID NO: 306220 - DNA, 57 bp, Artificial
  Synthetic oligonucleotide
aatcctaggatgtttctggcaatgataacgtacctcacaaggaaccaaccagaatgg

SEQ ID NO: 306221 - DNA, 49 bp, Artificial
  Synthetic oligonucleotide
aatcctagttataccaacggtttgaggtggttttctaaaccgtccgaat

SEQ ID NO: 306222 - DNA, 55 bp, Artificial
  Synthetic oligonucleotide
aatcctatcaaagtggtactatatgtcactcgttcggggtatcaagaagccgcaa

SEQ ID NO: 306223 - DNA, 55 bp, Artificial
  Synthetic oligonucleotide
aatcctatgaggaacgagcttgtttcagcactcacaatgatgctggcacgtagtg

SEQ ID NO: 306224 - DNA, 56 bp, Artificial
  Synthetic oligonucleotide
aatcctatttcgctaaaggcttcctttcaatagattcaggttacttctcagccaaa

SEQ ID NO: 306225 - DNA, 53 bp, Artificial
  Synthetic oligonucleotide
aatcctcccggcgggttgcggtacgcggaacgtcccacgctagggcgtatggc

SEQ ID NO: 306226 - DNA, 56 bp, Artificial
  Synthetic oligonucleotide
aatcctccctccggtcctgtggcgggagctgagttggtagtgttactataaactgc

SEQ ID NO: 306227 - DNA, 51 bp, Artificial
  Synthetic oligonucleotide
aatcctcccttggttgtttcgaaacggggccacccataagccgcatcgggg

SEQ ID NO: 306228 - DNA, 58 bp, Artificial
  Synthetic oligonucleotide
aatcctcgagtgtttctagcgatgataacatacattacaaggaaccaacctgaatggt

SEQ ID NO: 306229 - DNA, 60 bp, Artificial
  Synthetic oligonucleotide
aatcctcggatgggacaaggacctgatacagactattatggcttcagtgacaacataaca

SEQ ID NO: 306230 - DNA, 60 bp, Artificial
  Synthetic oligonucleotide
aatcctcggatgtttctggcaatgataacatatatcacaagaaaccagcctgaatggttc

SEQ ID NO: 306231 - DNA, 60 bp, Artificial
  Synthetic oligonucleotide
aatcctcgtatgtttttagctatgatcacatacatgaccagaaatcagcccgaatggttc

SEQ ID NO: 306232 - DNA, 58 bp, Artificial
  Synthetic oligonucleotide
aatcctctatttttggggggtgcaccatcctcctgacaccaatgagcagaacactttg

SEQ ID NO: 306233 - DNA, 60 bp, Artificial
  Synthetic oligonucleotide
aatcctctgatcaagagaggagattgggcttcttattgcgaaatctcattagtccaaagc

SEQ ID NO: 306234 - DNA, 55 bp, Artificial
  Synthetic oligonucleotide
aatcctgaaaaggaaagattagtgtgggcctgtagaggcctggagataggcaggg

SEQ ID NO: 306235 - DNA, 55 bp, Artificial
  Synthetic oligonucleotide
aatcctgaaagaaattactccacggcttacactttggattatcaaagttccataa

SEQ ID NO: 306236 - DNA, 60 bp, Artificial
  Synthetic oligonucleotide
aatcctgaatggcagactccttcttttccagacattcatttgcaggaggacattgttgat

SEQ ID NO: 306237 - DNA, 52 bp, Artificial
  Synthetic oligonucleotide
aatcctgacatcaaggacccagacgtcgagttctggttctcgggctactcgc

SEQ ID NO: 306238 - DNA, 55 bp, Artificial
  Synthetic oligonucleotide
aatcctgatactgctgtttcaaatgctgaagcacaaggtccatttagtagacgtg

SEQ ID NO: 306239 - DNA, 60 bp, Artificial
  Synthetic oligonucleotide
aatcctgatcaaaaatgtataacagccttggcctctatttgtcagatgttctgcttttgg

SEQ ID NO: 306240 - DNA, 51 bp, Artificial
  Synthetic oligonucleotide
aatcctgatgtgaagtatcactgcgaatcaatgattgaagctatgtatgtt

SEQ ID NO: 306241 - DNA, 54 bp, Artificial
  Synthetic oligonucleotide
aatcctgcgtcgctccaagaggttccccaaaccgctaccaatttgggcgcgccc

SEQ ID NO: 306242 - DNA, 57 bp, Artificial
  Synthetic oligonucleotide
aatcctgctaattaaaggtctagcaaactcccttaaatgttggagatatcgattgaa

SEQ ID NO: 306243 - DNA, 54 bp, Artificial
  Synthetic oligonucleotide
aatcctggagagcatgggagccgtgccgacactcctgagggacaagtgcgtcca

SEQ ID NO: 306244 - DNA, 58 bp, Artificial
  Synthetic oligonucleotide
aatcctgtaactgcggttaccgtctacccagtctctaacatctgtctcgcaattcaaa

SEQ ID NO: 306245 - DNA, 54 bp, Artificial
  Synthetic oligonucleotide
aatcctgtggttcaactctttccccaccaacaagccaaagatgaaactctttat

SEQ ID NO: 306246 - DNA, 55 bp, Artificial
  Synthetic oligonucleotide
aatccttatactgtattcagtcaacacagggctaatcattcaaatgctcctggct

SEQ ID NO: 306247 - DNA, 58 bp, Artificial
  Synthetic oligonucleotide
aatccttgctcactatacaaatggtattcgccgtgacgataatggtgacttctggatg

SEQ ID NO: 306248 - DNA, 51 bp, Artificial
  Synthetic oligonucleotide
aatcctttattacaatcccaatgttttagtctcagccaaaaatccatccta

SEQ ID NO: 306249 - DNA, 60 bp, Artificial
  Synthetic oligonucleotide
aatcctttatttctggggtgtgcaccatcctcctgacaccaatgagcaaaatactctgta

SEQ ID NO: 306250 - DNA, 55 bp, Artificial
  Synthetic oligonucleotide
aatcgaaacaacgtctggtggatcacttcgcgcgtgtgcggcgtaccgctgatac

SEQ ID NO: 306251 - DNA, 55 bp, Artificial
  Synthetic oligonucleotide
aatcgaaagttggttatcgtgtttacagcggatactctcagattgaagggtgtgc

SEQ ID NO: 306252 - DNA, 54 bp, Artificial
  Synthetic oligonucleotide
aatcgaacgtaatttaagttcgacagtgacccgaggaccggggcgcagaggata

SEQ ID NO: 306253 - DNA, 58 bp, Artificial
  Synthetic oligonucleotide
aatcgaactaacgtaatattcgagagatgtgcggtcatagaaagaagggtcaggagag

SEQ ID NO: 306254 - DNA, 60 bp, Artificial
  Synthetic oligonucleotide
aatcgaagcatttgaacatctgattcgagtaagtgcaaataaatttcagtatgcattcat

SEQ ID NO: 306255 - DNA, 54 bp, Artificial
  Synthetic oligonucleotide
aatcgaaggaatcgtaatccgcagacggttcccaactttaaccccattgtcgca

SEQ ID NO: 306256 - DNA, 57 bp, Artificial
  Synthetic oligonucleotide
aatcgaaggactggggttgagttctcagttcatcgcaaaaatccccgagcttgcaat

SEQ ID NO: 306257 - DNA, 58 bp, Artificial
  Synthetic oligonucleotide
aatcgaagtctgagtacttcgcgctgaatacccctccgatcttccaagataaagccac

SEQ ID NO: 306258 - DNA, 55 bp, Artificial
  Synthetic oligonucleotide
aatcgaagtggactgctggcgggaaatgagaaaattcgacctatccttgcgcagc

SEQ ID NO: 306259 - DNA, 57 bp, Artificial
  Synthetic oligonucleotide
aatcgaagtgtctcaacaggctatgcactgggtaggcgaccactttaacttccggtg

SEQ ID NO: 306260 - DNA, 60 bp, Artificial
  Synthetic oligonucleotide
aatcgaatggaaggagcagatggccgagcgtccatggcacgtgagaaatgatctaattgc

SEQ ID NO: 306261 - DNA, 60 bp, Artificial
  Synthetic oligonucleotide
aatcgaattcacactacattcaaacagtacggagctaagacagggcgtatgtcaagtgag

SEQ ID NO: 306262 - DNA, 55 bp, Artificial
  Synthetic oligonucleotide
aatcgaattgaagggttgttaacttcctaccgccatgtagaatcactcctctatc

SEQ ID NO: 306263 - DNA, 57 bp, Artificial
  Synthetic oligonucleotide
aatcgacacgacttttcatgtacggaaaggtaatgctattagacggacggcagctcc

SEQ ID NO: 306264 - DNA, 54 bp, Artificial
  Synthetic oligonucleotide
aatcgaccacgtcaccttttcgcgtcgactatgccgtcaacaccctttcggccc

SEQ ID NO: 306265 - DNA, 58 bp, Artificial
  Synthetic oligonucleotide
aatcgacgtagtccttgaacaagactagacatggcttaccagacttcttctattcgaa

SEQ ID NO: 306266 - DNA, 59 bp, Artificial
  Synthetic oligonucleotide
aatcgacgtttgcgcgcgatctcttcagaagtgggacctggttctacactcgtggagga

SEQ ID NO: 306267 - DNA, 60 bp, Artificial
  Synthetic oligonucleotide
aatcgactgagtgcctatagtgccttaaaggtggctgatagtcaatagcctttaatgcga

SEQ ID NO: 306268 - DNA, 56 bp, Artificial
  Synthetic oligonucleotide
aatcgacttatgtgcgcaacgtctcgataagtgcaaacaaggtcattgtctcaagc

SEQ ID NO: 306269 - DNA, 56 bp, Artificial
  Synthetic oligonucleotide
aatcgacttcggatatggcgaaggacgtgtctcgaaaaccctgatggaatggaaaa

SEQ ID NO: 306270 - DNA, 60 bp, Artificial
  Synthetic oligonucleotide
aatcgagactaaggggacagaagcacatccacacttcctagttgcaacaaacataatcga

SEQ ID NO: 306271 - DNA, 53 bp, Artificial
  Synthetic oligonucleotide
aatcgagaggcgggacggaaatgatgtttgttacccggggaaatttgtgaatg

SEQ ID NO: 306272 - DNA, 54 bp, Artificial
  Synthetic oligonucleotide
aatcgagagttgtgtgtcatcaccaatggctgactctatggacctttgaagacg

SEQ ID NO: 306273 - DNA, 52 bp, Artificial
  Synthetic oligonucleotide
aatcgagcgataatgtatcgaaaggttagcatatcgtacggtgaacgaatcc

SEQ ID NO: 306274 - DNA, 52 bp, Artificial
  Synthetic oligonucleotide
aatcgaggtatgttggataggttaatactaatatctggaggaaattatactt

SEQ ID NO: 306275 - DNA, 60 bp, Artificial
  Synthetic oligonucleotide
aatcgagtaagacactcgtagtcttgtggatctgactataaaagacacacagtcatacac

SEQ ID NO: 306276 - DNA, 55 bp, Artificial
  Synthetic oligonucleotide
aatcgagtttgatggagcgcaacattttagcaactcgagtaataactggggagct

SEQ ID NO: 306277 - DNA, 59 bp, Artificial
  Synthetic oligonucleotide
aatcgataattgtggaatctggtgatccaaatgcattattaaaacaccgatttgaaata

SEQ ID NO: 306278 - DNA, 59 bp, Artificial
  Synthetic oligonucleotide
aatcgatatgccgcgtaacgcgctgacttcgtttgctgtcaatccagtcgacggtggta

SEQ ID NO: 306279 - DNA, 55 bp, Artificial
  Synthetic oligonucleotide
aatcgatcaacgtgagaacgtgcgcatggtgcttggtttaatcaatggtgcactg

SEQ ID NO: 306280 - DNA, 60 bp, Artificial
  Synthetic oligonucleotide
aatcgatccatcttgaacacaagccagagaggaatacttgaagacgagcaaatgtaccaa

SEQ ID NO: 306281 - DNA, 55 bp, Artificial
  Synthetic oligonucleotide
aatcgatcttacgtgcaacgtcgcagatagcctaactggtaaagattcgggcgcg

SEQ ID NO: 306282 - DNA, 60 bp, Artificial
  Synthetic oligonucleotide
aatcgatgctgcagaacaaggaattagccagctggttactaggacggacgatctcactag

SEQ ID NO: 306283 - DNA, 57 bp, Artificial
  Synthetic oligonucleotide
aatcgatggatgttcgaacaactcaatgggaacctgaaagcgatagcacactgccct

SEQ ID NO: 306284 - DNA, 54 bp, Artificial
  Synthetic oligonucleotide
aatcgatgttttgggatagcaacccaacttagcggtgtggtagggacaacaggt

SEQ ID NO: 306285 - DNA, 54 bp, Artificial
  Synthetic oligonucleotide
aatcgattattactggtctgttttgaaaccgggggaaacattgaatgtggaatc

SEQ ID NO: 306286 - DNA, 55 bp, Artificial
  Synthetic oligonucleotide
aatcgattgatcctagcctcgtaggtcaagagggagtactcctgatgacggaccg

SEQ ID NO: 306287 - DNA, 54 bp, Artificial
  Synthetic oligonucleotide
aatcgattgtaacgagcgattatgcaactccgtgagatggttactcagaattgt

SEQ ID NO: 306288 - DNA, 60 bp, Artificial
  Synthetic oligonucleotide
aatcgattgtatcttgcagtcccacgcgcatgtgtcgcaaacatctgtggaaactccgtc

SEQ ID NO: 306289 - DNA, 55 bp, Artificial
  Synthetic oligonucleotide
aatcgattgtattttcgagaagcgtgtacaaatacgcggggttggagaggcaagg

SEQ ID NO: 306290 - DNA, 53 bp, Artificial
  Synthetic oligonucleotide
aatcgatttcagcgcctttgattcaaaggttccagcgtggttgatcagaacgg

SEQ ID NO: 306291 - DNA, 57 bp, Artificial
  Synthetic oligonucleotide
aatcgcaacccaggaacaaccggcatttgacaggacgatgccaggtagcgagggtgg

SEQ ID NO: 306292 - DNA, 60 bp, Artificial
  Synthetic oligonucleotide
aatcgcaatcgcgatgaggaagcattccattccgtgtgtctccctaagatattgggaggt

SEQ ID NO: 306293 - DNA, 60 bp, Artificial
  Synthetic oligonucleotide
aatcgcaccagcgtaacggtagaactccagtaccagatgattgactctcggcgcaaccca

SEQ ID NO: 306294 - DNA, 56 bp, Artificial
  Synthetic oligonucleotide
aatcgcacgtcgtaaaactgcgcgctcgaaagctcataaaagaaacaaccatggcc

SEQ ID NO: 306295 - DNA, 59 bp, Artificial
  Synthetic oligonucleotide
aatcgcactaagtctgtcggccaataatggagggaacacgtggagagtttgcatgtttg

SEQ ID NO: 306296 - DNA, 54 bp, Artificial
  Synthetic oligonucleotide
aatcgcagaaacttactgcattcacatgtccacaaggacactaccaatggagag

SEQ ID NO: 306297 - DNA, 54 bp, Artificial
  Synthetic oligonucleotide
aatcgcaggactaacaagaagggggtcaggcgcttagataggaaaaactccgaa

SEQ ID NO: 306298 - DNA, 53 bp, Artificial
  Synthetic oligonucleotide
aatcgccatcatccacgtagccatctcactgtattcaaactcaggagtagaac

SEQ ID NO: 306299 - DNA, 60 bp, Artificial
  Synthetic oligonucleotide
aatcgccggtaccaaacaacgagtcaaccacgcagagacgtgagcggtgcagaagtgatg

SEQ ID NO: 306300 - DNA, 60 bp, Artificial
  Synthetic oligonucleotide
aatcgcctgtgtctgtcggcgtctcctagcaacctgtatgaaagagccaatcacgagctg

SEQ ID NO: 306301 - DNA, 54 bp, Artificial
  Synthetic oligonucleotide
aatcgcctttatttactcgatcttcgtcgaaaattcgtttggaaatagtgctaa

SEQ ID NO: 306302 - DNA, 59 bp, Artificial
  Synthetic oligonucleotide
aatcgcctttgcatatgcatcgttggccgtctgctgtccaccacgagcagatcgtccat

SEQ ID NO: 306303 - DNA, 59 bp, Artificial
  Synthetic oligonucleotide
aatcgcgatgcgtagcttcgggcttttatcattgaagacgcccgccagtaacttgcggc

SEQ ID NO: 306304 - DNA, 60 bp, Artificial
  Synthetic oligonucleotide
aatcgcgcagagacttgaagatgtctttgctgggaaaaacacagatcttgaggctctcat

SEQ ID NO: 306305 - DNA, 54 bp, Artificial
  Synthetic oligonucleotide
aatcgcgcgtgtaacaggagaaacgtcaacgtggggaccggcgcgccaaccgta

SEQ ID NO: 306306 - DNA, 51 bp, Artificial
  Synthetic oligonucleotide
aatcgcgggcggacccgcggtaccgtcgctgacgggcgggggatacgcggg

SEQ ID NO: 306307 - DNA, 58 bp, Artificial
  Synthetic oligonucleotide
aatcgcgtattgcggtatcttattataacacagttaatagccaggcacgacaaataaa

SEQ ID NO: 306308 - DNA, 58 bp, Artificial
  Synthetic oligonucleotide
aatcgcgtgtgcaacggaaagataacgcgtcgtccgccgcaaagttaatcagcgagcg

SEQ ID NO: 306309 - DNA, 50 bp, Artificial
  Synthetic oligonucleotide
aatcgcgttagttttgtcgagccagttacgcatggaagtcagcgcaatgt

SEQ ID NO: 306310 - DNA, 55 bp, Artificial
  Synthetic oligonucleotide
aatcgcgtttagatcctggaacccgcataatcaattggttggtagtaagggagcc

SEQ ID NO: 306311 - DNA, 58 bp, Artificial
  Synthetic oligonucleotide
aatcgctctggaacacaatagcagtgctctggtgcgttcacaacagatacaaggttgg

SEQ ID NO: 306312 - DNA, 55 bp, Artificial
  Synthetic oligonucleotide
aatcggaaaaagctcgatagggagtaaaggattggatgtattaggaggagtaata

SEQ ID NO: 306313 - DNA, 55 bp, Artificial
  Synthetic oligonucleotide
aatcggaaaagatcaatctgagcgtatcacacggttgtatcgcgccctccaaacg

SEQ ID NO: 306314 - DNA, 60 bp, Artificial
  Synthetic oligonucleotide
aatcggaaaggtatgcagaaccttactagcaaaatctgtattcaacagtctatatgcatc

SEQ ID NO: 306315 - DNA, 51 bp, Artificial
  Synthetic oligonucleotide
aatcggaaatattttcgttaacccagtccgacataattaaagggacattat

SEQ ID NO: 306316 - DNA, 59 bp, Artificial
  Synthetic oligonucleotide
aatcggaactaatcactcatgctttcatggtattcagcttgagttcggggaaatttgta

SEQ ID NO: 306317 - DNA, 60 bp, Artificial
  Synthetic oligonucleotide
aatcggagcatcccgattgtgccaagatggattcatctaggacaatcgggttatacttcg

SEQ ID NO: 306318 - DNA, 58 bp, Artificial
  Synthetic oligonucleotide
aatcggagtgccctgattgtgccaagatggactcatctaggacaatcgggctgtactt

SEQ ID NO: 306319 - DNA, 58 bp, Artificial
  Synthetic oligonucleotide
aatcggatacctctcaacaagtggaataattcaccgcactcaacggtcgggtcatgag

SEQ ID NO: 306320 - DNA, 58 bp, Artificial
  Synthetic oligonucleotide
aatcggatgtgaacatggacgggtctatctcgaaagtggaaggagtgttctctcttat

SEQ ID NO: 306321 - DNA, 58 bp, Artificial
  Synthetic oligonucleotide
aatcggattgcacgcggtgagtttttgaccgaaagtgaagcatcgacaatcgacaacg

SEQ ID NO: 306322 - DNA, 58 bp, Artificial
  Synthetic oligonucleotide
aatcggcaggtaggaaggttgcctactcccatttctccacctctaagagacactcatc

SEQ ID NO: 306323 - DNA, 56 bp, Artificial
  Synthetic oligonucleotide
aatcggccacatttgttgtgacccaatctgttaatgcttccggtacattgttaaac

SEQ ID NO: 306324 - DNA, 53 bp, Artificial
  Synthetic oligonucleotide
aatcggcgcccgagagggagtagaaggtaaagagcattggaacgccgagggga

SEQ ID NO: 306325 - DNA, 51 bp, Artificial
  Synthetic oligonucleotide
aatcggcgctgataagcgcggggagttgggctacggcagatcaaatgcaca

SEQ ID NO: 306326 - DNA, 54 bp, Artificial
  Synthetic oligonucleotide
aatcggctcagcaactttcactattagtaagtcgcgaaatttggttgggggtaa

SEQ ID NO: 306327 - DNA, 57 bp, Artificial
  Synthetic oligonucleotide
aatcgggaatgaccttgctttccagagtgggaacagactgacagacgtttattggaa

SEQ ID NO: 306328 - DNA, 50 bp, Artificial
  Synthetic oligonucleotide
aatcgggatattttccggtgtatgtgggcagttggcatagtttctttgat

SEQ ID NO: 306329 - DNA, 60 bp, Artificial
  Synthetic oligonucleotide
aatcgggcaaacatttacaggctcgagaagattgcttgcagagggggggagcaatgactg

SEQ ID NO: 306330 - DNA, 57 bp, Artificial
  Synthetic oligonucleotide
aatcgggcggttcatgggtatataaagacgtcagcggaatctttagagtatgcgtta

SEQ ID NO: 306331 - DNA, 53 bp, Artificial
  Synthetic oligonucleotide
aatcgggcgttcgcgaccgatctaagcgcaaacggccgttccccggtcttgct

SEQ ID NO: 306332 - DNA, 57 bp, Artificial
  Synthetic oligonucleotide
aatcggggcccgtgtacatttctatcatgatattagccccattccgcccacggagtc

SEQ ID NO: 306333 - DNA, 57 bp, Artificial
  Synthetic oligonucleotide
aatcgggggagacggactgagcaaacgaaatgctaaatcctcttgtactcaattcta

SEQ ID NO: 306334 - DNA, 51 bp, Artificial
  Synthetic oligonucleotide
aatcgggtgctcaacaactaccccggacacttttgaaacagttgcgacagc

SEQ ID NO: 306335 - DNA, 55 bp, Artificial
  Synthetic oligonucleotide
aatcgggttactacaaacagccaccaagcaagcggaggttgttgctcccgtggtg

SEQ ID NO: 306336 - DNA, 55 bp, Artificial
  Synthetic oligonucleotide
aatcggtgctccaggctggcgtgcccgttctagcttccgctggtgtcatcgatgc

SEQ ID NO: 306337 - DNA, 57 bp, Artificial
  Synthetic oligonucleotide
aatcggtgtattggtagccaatatataggtgtaccccaaatggcataatggtaataa

SEQ ID NO: 306338 - DNA, 56 bp, Artificial
  Synthetic oligonucleotide
aatcgtaagacctctggtaaacagacggctaaatctcgtgtatcgcgaaagttggc

SEQ ID NO: 306339 - DNA, 58 bp, Artificial
  Synthetic oligonucleotide
aatcgtacaaaaacaccagaaatgagcctgctttaatagtatggggaatccatcatcc

SEQ ID NO: 306340 - DNA, 56 bp, Artificial
  Synthetic oligonucleotide
aatcgtacgctatgacaaacggggaccacaaagactcgggggttgatgtgacatcc

SEQ ID NO: 306341 - DNA, 50 bp, Artificial
  Synthetic oligonucleotide
aatcgtactcagcgttccgcgtagtgcttcgcacgtgagcgccgtgcaag

SEQ ID NO: 306342 - DNA, 60 bp, Artificial
  Synthetic oligonucleotide
aatcgtagaatctggcgatccaaatgcactcttgaagcacagatttgaaataatcgaagg

SEQ ID NO: 306343 - DNA, 59 bp, Artificial
  Synthetic oligonucleotide
aatcgtagagcccggtgattcaaatgcgctcttgaaacacagatttgaaataatcgaag

SEQ ID NO: 306344 - DNA, 60 bp, Artificial
  Synthetic oligonucleotide
aatcgtatcgttagtagatggcttgagaaaggcgagcctttaatggcgcatgacgtggta

SEQ ID NO: 306345 - DNA, 59 bp, Artificial
  Synthetic oligonucleotide
aatcgtatgaccccattacccccatccgatgctactaatcatttcattgttcaaatata

SEQ ID NO: 306346 - DNA, 53 bp, Artificial
  Synthetic oligonucleotide
aatcgtcacacccatcgttgacgcggccgtgttaagttgtcgacccaagctgc

SEQ ID NO: 306347 - DNA, 59 bp, Artificial
  Synthetic oligonucleotide
aatcgtccaatccgctcaggtttttgtatggtctgctaatgacggacgaatgtccgatc

SEQ ID NO: 306348 - DNA, 57 bp, Artificial
  Synthetic oligonucleotide
aatcgtccagtccgcttaagttcttgtaaggtctgctggtggcggacgaatgtccga

SEQ ID NO: 306349 - DNA, 54 bp, Artificial
  Synthetic oligonucleotide
aatcgtctgttaccctcgtaataccatggatcagcaacactcattatagagcac

SEQ ID NO: 306350 - DNA, 56 bp, Artificial
  Synthetic oligonucleotide
aatcgtcttctacaacgtcaactctttctggaaaatctattggtaggagtgaacag

SEQ ID NO: 306351 - DNA, 54 bp, Artificial
  Synthetic oligonucleotide
aatcgtcttttaaggtaagacgggtggagattacgcaaggtaagagaccagatc

SEQ ID NO: 306352 - DNA, 60 bp, Artificial
  Synthetic oligonucleotide
aatcgtgatttgcttaagaagacgaagatgccagtaaatactgaagcgaacagacaagag

SEQ ID NO: 306353 - DNA, 60 bp, Artificial
  Synthetic oligonucleotide
aatcgtgcacaataaaagtgtgtccattgaatacccaaacgctaggaataggatgtcaga

SEQ ID NO: 306354 - DNA, 55 bp, Artificial
  Synthetic oligonucleotide
aatcgtgctttggagtatgcttttcagttaaaggacaaccaggtgacggcggaag

SEQ ID NO: 306355 - DNA, 50 bp, Artificial
  Synthetic oligonucleotide
aatcgtggacacacgcctctattgtatacccgttgatgctcttcaacgaa

SEQ ID NO: 306356 - DNA, 54 bp, Artificial
  Synthetic oligonucleotide
aatcgtggcgaactattcaatagactatccaaggcgcagaggtctacgttatgc

SEQ ID NO: 306357 - DNA, 55 bp, Artificial
  Synthetic oligonucleotide
aatcgtgggtcgccacgtacgaggacacgaacgggcagtcgccgggcgtcatcct

SEQ ID NO: 306358 - DNA, 54 bp, Artificial
  Synthetic oligonucleotide
aatcgtgtaaatatcttgatttaaggaatgatttgctaatgcaggcaacaacga

SEQ ID NO: 306359 - DNA, 59 bp, Artificial
  Synthetic oligonucleotide
aatcgtgttcaaattacgcagaggcatttcgcttacgtgtgtgctcggtctcccgactg

SEQ ID NO: 306360 - DNA, 60 bp, Artificial
  Synthetic oligonucleotide
aatcgttagctgactgctgacctcccctcgcagatctgccgtcgatctggaattgtcccc

SEQ ID NO: 306361 - DNA, 50 bp, Artificial
  Synthetic oligonucleotide
aatcgttccgcacgacggccctcctggttccacgcaacagtctcccaaaa

SEQ ID NO: 306362 - DNA, 55 bp, Artificial
  Synthetic oligonucleotide
aatcgttctgggtaattctggtgatcctaagtacgttgacctgccgactcttgag

SEQ ID NO: 306363 - DNA, 55 bp, Artificial
  Synthetic oligonucleotide
aatcgttgaggcagctgtccttcttgcggagctctttggcatcctatggaacccc

SEQ ID NO: 306364 - DNA, 55 bp, Artificial
  Synthetic oligonucleotide
aatcgtttccatgtcatgtctatttcatcgtaaataccctcaaacgaacggaaca

SEQ ID NO: 306365 - DNA, 52 bp, Artificial
  Synthetic oligonucleotide
aatcgtttgttactcgccaattagttgctaagttgaacgcatcgtcgttatc

SEQ ID NO: 306366 - DNA, 59 bp, Artificial
  Synthetic oligonucleotide
aatcgttttggaggcaaatgtgatggaaatattgggcattgcaattaacaggtataatg

SEQ ID NO: 306367 - DNA, 58 bp, Artificial
  Synthetic oligonucleotide
aatcgtttttcaaaacgcagcgtttacaatgtggagattgacatatttggagcataaa

SEQ ID NO: 306368 - DNA, 58 bp, Artificial
  Synthetic oligonucleotide
aatctaaaaagacatatcatgaacaattaactttagaatttgcaatgctaacaaggta

SEQ ID NO: 306369 - DNA, 58 bp, Artificial
  Synthetic oligonucleotide
aatctaaaagtgaagccagtctgggttgacctgctagtatggaaatataagtatattg

SEQ ID NO: 306370 - DNA, 57 bp, Artificial
  Synthetic oligonucleotide
aatctaaaccaagttgaaccaatcagcaatactaattttcttactgagaaagctgtg

SEQ ID NO: 306371 - DNA, 56 bp, Artificial
  Synthetic oligonucleotide
aatctaaccatagtgtatgtgataaaaagactctccctctcacatggacaggttat

SEQ ID NO: 306372 - DNA, 58 bp, Artificial
  Synthetic oligonucleotide
aatctaatgtcgtgcgtggaagcacatccgtgcgcgtttaacggcgacggacacacgt

SEQ ID NO: 306373 - DNA, 57 bp, Artificial
  Synthetic oligonucleotide
aatctacaaagattggcagaaatccttcgggatgaggtaaaatctcacaccctcaac

SEQ ID NO: 306374 - DNA, 58 bp, Artificial
  Synthetic oligonucleotide
aatctacagacctcaaaattgatgctatctcgtcctcagagctttacaaggatgcaac

SEQ ID NO: 306375 - DNA, 54 bp, Artificial
  Synthetic oligonucleotide
aatctaccatcaacagcaagatatattagaccaaatttactgcaagataggcta

SEQ ID NO: 306376 - DNA, 58 bp, Artificial
  Synthetic oligonucleotide
aatctacgacagatgggcggtgttgccccgacatgccaaacctggacctaccatctta

SEQ ID NO: 306377 - DNA, 53 bp, Artificial
  Synthetic oligonucleotide
aatctacggttggatgtggacgtcggtgggaaaatgtataaagttagaaccac

SEQ ID NO: 306378 - DNA, 55 bp, Artificial
  Synthetic oligonucleotide
aatctagaagattttacgagattaacagattatggggaggaacaaaatatttgtc

SEQ ID NO: 306379 - DNA, 60 bp, Artificial
  Synthetic oligonucleotide
aatctagagcaaacgggcagcatgatgtttgatgtaaacatagcaggtaaagattacaag

SEQ ID NO: 306380 - DNA, 60 bp, Artificial
  Synthetic oligonucleotide
aatctagatgtccactcagataattatgtgggcctaatgcacgagcccacatcgtctttc

SEQ ID NO: 306381 - DNA, 60 bp, Artificial
  Synthetic oligonucleotide
aatctagccttgctctggccttacattgctgttagagtaatccttgaacggattgtgaac

SEQ ID NO: 306382 - DNA, 58 bp, Artificial
  Synthetic oligonucleotide
aatctagctaagagcatcgtacaggcctgcaagctatacggctgtgtgaatcatcaga

SEQ ID NO: 306383 - DNA, 58 bp, Artificial
  Synthetic oligonucleotide
aatctagctccagtttcgattgctgttaatatgaagtagggggctactctagtggtgt

SEQ ID NO: 306384 - DNA, 56 bp, Artificial
  Synthetic oligonucleotide
aatctagcttttgttccaccacctcctcagggtatcgaagatgcctatcgttattt

SEQ ID NO: 306385 - DNA, 56 bp, Artificial
  Synthetic oligonucleotide
aatctaggataggcttgtggcgaccaaagctgccacattcaactttccgacacttc

SEQ ID NO: 306386 - DNA, 55 bp, Artificial
  Synthetic oligonucleotide
aatctaggctaattgaggcatccagtttgaatgactccgtggcaatgagacaaac

SEQ ID NO: 306387 - DNA, 58 bp, Artificial
  Synthetic oligonucleotide
aatctagtggtgattgttccaatccaataactgggagtcctggcgctccgggagtgaa

SEQ ID NO: 306388 - DNA, 54 bp, Artificial
  Synthetic oligonucleotide
aatctataagtcaaataatagaggagaagtttggtgttcagatgatgtccactg

SEQ ID NO: 306389 - DNA, 56 bp, Artificial
  Synthetic oligonucleotide
aatctatagtgtctaaaaattccacggaagaatcttatattatcgaagacaaggaa

SEQ ID NO: 306390 - DNA, 54 bp, Artificial
  Synthetic oligonucleotide
aatctatatcttgtgattctatgatacctcctttgtttagagacaatggcctat

SEQ ID NO: 306391 - DNA, 53 bp, Artificial
  Synthetic oligonucleotide
aatctatgaatagtttagttggtaccgaatctcccaaatccaaagttttggag

SEQ ID NO: 306392 - DNA, 60 bp, Artificial
  Synthetic oligonucleotide
aatctatgacgctgtaaccttgatgcctagctacaagtcttgccaccggatgctgctgct

SEQ ID NO: 306393 - DNA, 60 bp, Artificial
  Synthetic oligonucleotide
aatctatgagaaagccatttctgatatcatttccaccagtgtctccactgatggtaagtg

SEQ ID NO: 306394 - DNA, 55 bp, Artificial
  Synthetic oligonucleotide
aatctatgatacttagggataccgaaatcgcttacctcacaatgatcactcccgg

SEQ ID NO: 306395 - DNA, 54 bp, Artificial
  Synthetic oligonucleotide
aatctatgcccctgaaagcccacgcatggctctacaccttgaatatacggccgg

SEQ ID NO: 306396 - DNA, 59 bp, Artificial
  Synthetic oligonucleotide
aatctatggatttaccagacagcccgaaggtgtcaagggaatgtatagctcactgttaa

SEQ ID NO: 306397 - DNA, 60 bp, Artificial
  Synthetic oligonucleotide
aatctatgggaaccccaagtgtgacatccatctgaaggatcaaggttggtcatacatagt

SEQ ID NO: 306398 - DNA, 53 bp, Artificial
  Synthetic oligonucleotide
aatctatttgtaaatatccagactatttgcaaatgtctgcagatgcatatggg

SEQ ID NO: 306399 - DNA, 57 bp, Artificial
  Synthetic oligonucleotide
aatctcaaaccaggaacctatgaaattataagtacatagttatgtaatcaatactaa

SEQ ID NO: 306400 - DNA, 60 bp, Artificial
  Synthetic oligonucleotide
aatctcaactcgccaccatgcaacgagagtacgatcagaccacccgagctctgctccaag

SEQ ID NO: 306401 - DNA, 54 bp, Artificial
  Synthetic oligonucleotide
aatctcaactctaaaaccaaattccatcccagtgttttcttcgacgtcttccca

SEQ ID NO: 306402 - DNA, 57 bp, Artificial
  Synthetic oligonucleotide
aatctcacccagtgttggttgcaggtccaggtgacccgtcaccctacgtgacgcaag

SEQ ID NO: 306403 - DNA, 54 bp, Artificial
  Synthetic oligonucleotide
aatctcagtttacaaggaccctttgaagccttttatgtttatcaagttgtcgga

SEQ ID NO: 306404 - DNA, 55 bp, Artificial
  Synthetic oligonucleotide
aatctcatccaaagtgcgagtctacatgaaacccaagcatgtgcgcgtctggtgc

SEQ ID NO: 306405 - DNA, 60 bp, Artificial
  Synthetic oligonucleotide
aatctcatggcctctctgaagttgatacataagagtaacgctctacaggagagacttcgc

SEQ ID NO: 306406 - DNA, 54 bp, Artificial
  Synthetic oligonucleotide
aatctccaagggtcacgtttacctggcacacggctacaacgtattgtatgcact

SEQ ID NO: 306407 - DNA, 53 bp, Artificial
  Synthetic oligonucleotide
aatctccacgtaaaccccctgttatctttcccgcaatgaataaggtctttctg

SEQ ID NO: 306408 - DNA, 55 bp, Artificial
  Synthetic oligonucleotide
aatctcctatccacattcgaattattattagttcaaatagggcgtaacaaggaat

SEQ ID NO: 306409 - DNA, 56 bp, Artificial
  Synthetic oligonucleotide
aatctcctctaccaccgcaaagttctatcactttatcttcctctctaatgaagttg

SEQ ID NO: 306410 - DNA, 55 bp, Artificial
  Synthetic oligonucleotide
aatctccttgtgccctacctgaatttgatgtcacccagcccatattcattccagg

SEQ ID NO: 306411 - DNA, 55 bp, Artificial
  Synthetic oligonucleotide
aatctcgaaagctagatccctcaccaggattacaaagtataatggtggggacccc

SEQ ID NO: 306412 - DNA, 60 bp, Artificial
  Synthetic oligonucleotide
aatctcgacatgatattgctcacaccggtaaggttatgtgtgtgacggatgttactcgtg

SEQ ID NO: 306413 - DNA, 59 bp, Artificial
  Synthetic oligonucleotide
aatctcgagttcagtgaaatggacaatcgggactccaatggagagcctgcctaccaact

SEQ ID NO: 306414 - DNA, 59 bp, Artificial
  Synthetic oligonucleotide
aatctcgccgtactcgtgtcagcgcttgtggtcacattgcttgtccttcaggtggtgca

SEQ ID NO: 306415 - DNA, 60 bp, Artificial
  Synthetic oligonucleotide
aatctcgcgagaactgcagacggcgctcccgtgatcgcgacccgcgtcagcaaacgctac

SEQ ID NO: 306416 - DNA, 53 bp, Artificial
  Synthetic oligonucleotide
aatctcgggaatcccaatgttagtatcccttggacgcataaggtgggaaactt

SEQ ID NO: 306417 - DNA, 55 bp, Artificial
  Synthetic oligonucleotide
aatctcgggactttacaggcattcccgccgtcttgccagattagtgcctaccacc

SEQ ID NO: 306418 - DNA, 55 bp, Artificial
  Synthetic oligonucleotide
aatctctacgaccactctctcatgagcattatctctacctttcatctgtccatcc

SEQ ID NO: 306419 - DNA, 60 bp, Artificial
  Synthetic oligonucleotide
aatctctagcatggtggaggccatggtgtctagggcccggattgatgccaggattgactt

SEQ ID NO: 306420 - DNA, 59 bp, Artificial
  Synthetic oligonucleotide
aatctctctcttaaaacgatgtgcaacgaaatctctcatttcgtctacatccattggac

SEQ ID NO: 306421 - DNA, 51 bp, Artificial
  Synthetic oligonucleotide
aatctctgaagttcctacctaaggagtgtgatattattttctgagtgtatt

SEQ ID NO: 306422 - DNA, 60 bp, Artificial
  Synthetic oligonucleotide
aatctctgttaggtcatgagataactggtattcatctctatgagactctatgtaattaaa

SEQ ID NO: 306423 - DNA, 55 bp, Artificial
  Synthetic oligonucleotide
aatctctgttcatacaccagagcgtccccgagattatcacacaccctcccgacct

SEQ ID NO: 306424 - DNA, 56 bp, Artificial
  Synthetic oligonucleotide
aatctgaaggagtgatgcatcctacccctataaaaaaggtcttaagagtaggacca

SEQ ID NO: 306425 - DNA, 54 bp, Artificial
  Synthetic oligonucleotide
aatctgaatgtgataagtctttgctttgtccaacgcagaatgctggagctgatt

SEQ ID NO: 306426 - DNA, 60 bp, Artificial
  Synthetic oligonucleotide
aatctgagtacttcagactctgtgagtctcttaaaaccactgttgataagcgttctggta

SEQ ID NO: 306427 - DNA, 60 bp, Artificial
  Synthetic oligonucleotide
aatctgatttgatgactgaagtggtgcaaactaatggactatatggagtgatgtctgtag

SEQ ID NO: 306428 - DNA, 55 bp, Artificial
  Synthetic oligonucleotide
aatctgcacaatgtgggaccctttggtaaacgagttccctgattcagttcacggt

SEQ ID NO: 306429 - DNA, 60 bp, Artificial
  Synthetic oligonucleotide
aatctgcagttcaaattccaatctattattcttccaatagtgaactggaaagtagatgtg

SEQ ID NO: 306430 - DNA, 56 bp, Artificial
  Synthetic oligonucleotide
aatctgccatggacccctactaggggtgttactcctgccgttccacgcaccaatta

SEQ ID NO: 306431 - DNA, 55 bp, Artificial
  Synthetic oligonucleotide
aatctgcgatatgtactcccttccacgcccgcggggttcaccaacgtgcttagca

SEQ ID NO: 306432 - DNA, 56 bp, Artificial
  Synthetic oligonucleotide
aatctgcggttcaaattccgatttactattcttccaacaatgaactagaaagtaga

SEQ ID NO: 306433 - DNA, 60 bp, Artificial
  Synthetic oligonucleotide
aatctggaggacaaaatgtctatgctaattcatggaatggtcgaacttatggaaagaagc

SEQ ID NO: 306434 - DNA, 55 bp, Artificial
  Synthetic oligonucleotide
aatctggaggggcctaattgatttaactggatactatgaggcagtccacccttgt

SEQ ID NO: 306435 - DNA, 55 bp, Artificial
  Synthetic oligonucleotide
aatctggcgagaaaacaacgcatttggatgctgtcagtactgtgcaagagtctgc

SEQ ID NO: 306436 - DNA, 55 bp, Artificial
  Synthetic oligonucleotide
aatctggtatctttgaagggtgttgtgggccaagtcgatcgcactctacaacgca

SEQ ID NO: 306437 - DNA, 56 bp, Artificial
  Synthetic oligonucleotide
aatctgtaatgggacggtagtgagggaatataacgagacagttaggatcgagaggg

SEQ ID NO: 306438 - DNA, 53 bp, Artificial
  Synthetic oligonucleotide
aatctgtaggggttaaaacggtaataacgcacgctaaaggcgacttcattgaa

SEQ ID NO: 306439 - DNA, 56 bp, Artificial
  Synthetic oligonucleotide
aatctgtatccagttaacgaccactaccggtctcagcgaatccatctcaacgtcgg

SEQ ID NO: 306440 - DNA, 59 bp, Artificial
  Synthetic oligonucleotide
aatctgtcgaaatataggtggttaactcatagatatagaggtgtaggggtcagtagaca

SEQ ID NO: 306441 - DNA, 60 bp, Artificial
  Synthetic oligonucleotide
aatctgtcgagttgaatgctcctgattaccactatgaggagtgttcctgttaccctgatg

SEQ ID NO: 306442 - DNA, 54 bp, Artificial
  Synthetic oligonucleotide
aatctgtcggaggcagtcgggttatctgcgtcccgttcttagaaccggtacgga

SEQ ID NO: 306443 - DNA, 55 bp, Artificial
  Synthetic oligonucleotide
aatctgtctaataagggtgatgtgcctgcgtggcctgtgattcgtgttgaggggc

SEQ ID NO: 306444 - DNA, 55 bp, Artificial
  Synthetic oligonucleotide
aatctgtgcgtaatatagtgatgtcgacggtaggtgattggccgacatatccgag

SEQ ID NO: 306445 - DNA, 60 bp, Artificial
  Synthetic oligonucleotide
aatctgttacagtcctagatgtaggagatgcttatttctcatgtcctttagacccagatt

SEQ ID NO: 306446 - DNA, 60 bp, Artificial
  Synthetic oligonucleotide
aatctgttatgatctttcatgcaatagtacattctgtaagcctaccctttatctaattgt

SEQ ID NO: 306447 - DNA, 52 bp, Artificial
  Synthetic oligonucleotide
aatctgttcaatgtcgcccgaggcaacttatacctcgttcaaactgccacca

SEQ ID NO: 306448 - DNA, 50 bp, Artificial
  Synthetic oligonucleotide
aatctgttcccgtggaacagttgtaggggaataaggcatcggtactactg

SEQ ID NO: 306449 - DNA, 60 bp, Artificial
  Synthetic oligonucleotide
aatctgtttaggttcttatatggatatggatcgttgcctcgttctgtgtccacacatgaa

SEQ ID NO: 306450 - DNA, 60 bp, Artificial
  Synthetic oligonucleotide
aatctgtttatgacagcttcttctactacaaaatcgttgttacatgatgtcatcgctgac

SEQ ID NO: 306451 - DNA, 58 bp, Artificial
  Synthetic oligonucleotide
aatctgtttgtcgatagaactagcttttcctgtctaaacctattttcacagctgtaca

SEQ ID NO: 306452 - DNA, 56 bp, Artificial
  Synthetic oligonucleotide
aatcttacaaagactttaaggtacttgatgctttggataaggcgttagtagacaga

SEQ ID NO: 306453 - DNA, 60 bp, Artificial
  Synthetic oligonucleotide
aatcttacataccaaacctcattggtattgttacatcgcttacgagataggcacgatgga

SEQ ID NO: 306454 - DNA, 55 bp, Artificial
  Synthetic oligonucleotide
aatcttaccccatgcggagtgggacacagtgccagacttgaacctcagagtggca

SEQ ID NO: 306455 - DNA, 57 bp, Artificial
  Synthetic oligonucleotide
aatcttaccttagacgaactcagtcaatgggaattcaactggttcaaaagataatca

SEQ ID NO: 306456 - DNA, 55 bp, Artificial
  Synthetic oligonucleotide
aatcttactgatttggtagctacccacggctcatcaggactcgtagcgtcagccc

SEQ ID NO: 306457 - DNA, 55 bp, Artificial
  Synthetic oligonucleotide
aatcttagggttgtatcaaagaaggttaacgcacacaacacagggctccgggcca

SEQ ID NO: 306458 - DNA, 58 bp, Artificial
  Synthetic oligonucleotide
aatcttagtagtaatctggtaatcgctgttcggcaggcggaggctttgtttagagagc

SEQ ID NO: 306459 - DNA, 56 bp, Artificial
  Synthetic oligonucleotide
aatcttatggggagtcagttaaacaggcagttctcctcaacgtgttaggtacaggc

SEQ ID NO: 306460 - DNA, 53 bp, Artificial
  Synthetic oligonucleotide
aatcttattggaaccgacaactccgttgtcctctctcggaaatacacctcctt

SEQ ID NO: 306461 - DNA, 60 bp, Artificial
  Synthetic oligonucleotide
aatcttcaagggcccatgcgattgtggctttgactcgccacacagagaagtgtgtggtgg

SEQ ID NO: 306462 - DNA, 50 bp, Artificial
  Synthetic oligonucleotide
aatcttcagcccgctatcgcaccattcaccaatgcgcttctgaaaatctc

SEQ ID NO: 306463 - DNA, 50 bp, Artificial
  Synthetic oligonucleotide
aatcttcaggtattgaacctcacggtaattgaactctataattatattga

SEQ ID NO: 306464 - DNA, 56 bp, Artificial
  Synthetic oligonucleotide
aatcttcccaccaaacgatcgagatagcatcttaaccttacttctactgtctactt

SEQ ID NO: 306465 - DNA, 59 bp, Artificial
  Synthetic oligonucleotide
aatcttccgagtggaaccctggctatagcatgcctacactttacaaaatacagcgtatg

SEQ ID NO: 306466 - DNA, 55 bp, Artificial
  Synthetic oligonucleotide
aatcttcgaatcacttgacgtgggagtatgactgcatgacgcgcaaggcacgtaa

SEQ ID NO: 306467 - DNA, 60 bp, Artificial
  Synthetic oligonucleotide
aatcttcgagagaaggcaagaagcaattgtgagctaacgaagggtggatatactgatgca

SEQ ID NO: 306468 - DNA, 60 bp, Artificial
  Synthetic oligonucleotide
aatcttcgcaatacgttttaacgaatgcgaagatcaatcagaatgcgcgcagtgagtccg

SEQ ID NO: 306469 - DNA, 59 bp, Artificial
  Synthetic oligonucleotide
aatcttcgcgttagtaattgaaccatcctgaatcaccgcgctctgaatgaacacctggt

SEQ ID NO: 306470 - DNA, 52 bp, Artificial
  Synthetic oligonucleotide
aatcttcttaggggaatatagagggacggactttcgtttacccgagatctta

SEQ ID NO: 306471 - DNA, 55 bp, Artificial
  Synthetic oligonucleotide
aatcttgactatcagggaggatggacaatttgttaaggggcttaagagggagcgg

SEQ ID NO: 306472 - DNA, 58 bp, Artificial
  Synthetic oligonucleotide
aatcttgagagagagctgccggcgattatatttaggtgaccttggagtgtggaacgtt

SEQ ID NO: 306473 - DNA, 58 bp, Artificial
  Synthetic oligonucleotide
aatcttgagctaaataacaagtcgtgttcactatctgggtctggtctacacgtttcca

SEQ ID NO: 306474 - DNA, 55 bp, Artificial
  Synthetic oligonucleotide
aatcttgcaaagagctttgttcactcactaccgacatggttgtgcccacagcagg

SEQ ID NO: 306475 - DNA, 60 bp, Artificial
  Synthetic oligonucleotide
aatcttgcattacttattgcgtaacttgccaagggcaacgacttagcaatgcatggtttc

SEQ ID NO: 306476 - DNA, 54 bp, Artificial
  Synthetic oligonucleotide
aatcttgctcaacctgcgttaaatatgtctatgacgtaccagcgcacaggagtt

SEQ ID NO: 306477 - DNA, 59 bp, Artificial
  Synthetic oligonucleotide
aatcttgctgatacacttctcggcgggttgccgacagaattgatttcgtcggctggagg

SEQ ID NO: 306478 - DNA, 60 bp, Artificial
  Synthetic oligonucleotide
aatcttggtgtcgttcgaaagaatcacactaagagcgcgatgaggagatacttgcgtgat

SEQ ID NO: 306479 - DNA, 56 bp, Artificial
  Synthetic oligonucleotide
aatcttggttcgctagtagcattaaacgcttttttgagtactcagccggctaatgt

SEQ ID NO: 306480 - DNA, 60 bp, Artificial
  Synthetic oligonucleotide
aatctttaaactgaccaactgtctttgcgtatggtgacgtgatgacgcgcgctacgcgcg

SEQ ID NO: 306481 - DNA, 55 bp, Artificial
  Synthetic oligonucleotide
aatctttaagtatagccaatgctaatccagattgtaagagagcaatgagtcatct

SEQ ID NO: 306482 - DNA, 60 bp, Artificial
  Synthetic oligonucleotide
aatctttacaaccacgggtgattgatacgattaaagctcatgggcataatcttggactga

SEQ ID NO: 306483 - DNA, 51 bp, Artificial
  Synthetic oligonucleotide
aatctttacgaaatgttaagtgccagaaatgggtcggggggtacgtatttc

SEQ ID NO: 306484 - DNA, 56 bp, Artificial
  Synthetic oligonucleotide
aatctttaggggctagttccctaagtactctaagagcctctggcttactgcctgtg

SEQ ID NO: 306485 - DNA, 56 bp, Artificial
  Synthetic oligonucleotide
aatctttagttatatggggagagttgccagtccttgaactcccaatagagagggaa

SEQ ID NO: 306486 - DNA, 60 bp, Artificial
  Synthetic oligonucleotide
aatctttagttgcatgtcaattagcaatagtgaacacaataatatatccagcattcggga

SEQ ID NO: 306487 - DNA, 56 bp, Artificial
  Synthetic oligonucleotide
aatctttatgtcaaggaataaaggcaacacgaaaaattccatttgttgtgtatgct

SEQ ID NO: 306488 - DNA, 55 bp, Artificial
  Synthetic oligonucleotide
aatctttcgtgctgtttgctgtggatattttgagctgtttatctgacttgtatac

SEQ ID NO: 306489 - DNA, 57 bp, Artificial
  Synthetic oligonucleotide
aatctttgacataagagtgggtaattattgaaaccacgactacctgccacaataata

SEQ ID NO: 306490 - DNA, 60 bp, Artificial
  Synthetic oligonucleotide
aatctttgactagaatgatggactttataatctatagattccttttcatcatagtcatct

SEQ ID NO: 306491 - DNA, 52 bp, Artificial
  Synthetic oligonucleotide
aatctttgggcggaaggggaccaagcatcggcacgcccgtataggtactggt

SEQ ID NO: 306492 - DNA, 59 bp, Artificial
  Synthetic oligonucleotide
aatctttgtaatccttcaccctctgggattgatgtcttgtgtgggaaccatgtgaaaga

SEQ ID NO: 306493 - DNA, 55 bp, Artificial
  Synthetic oligonucleotide
aatcttttccatcgagttggcgttcgaattaccgcaaacgcagccggtatgcgta

SEQ ID NO: 306494 - DNA, 53 bp, Artificial
  Synthetic oligonucleotide
aatgaaaaacgaagattaaacttagtcatgcctgctaggttttttcccctctc

SEQ ID NO: 306495 - DNA, 56 bp, Artificial
  Synthetic oligonucleotide
aatgaaacaaggtccaaaagaggactatgcaagctttatagatagattatatgctc

SEQ ID NO: 306496 - DNA, 55 bp, Artificial
  Synthetic oligonucleotide
aatgaaacacctcatcaaggtagagacttgggccttgagaaatccgggctttgcc

SEQ ID NO: 306497 - DNA, 55 bp, Artificial
  Synthetic oligonucleotide
aatgaaaccagtgagatgggttaggaaaggcaaataaactaaattggcctctgcc

SEQ ID NO: 306498 - DNA, 60 bp, Artificial
  Synthetic oligonucleotide
aatgaaacctgcttgacacaccccatcacaaaatacctcatggcatgcatgtcagccgat

SEQ ID NO: 306499 - DNA, 55 bp, Artificial
  Synthetic oligonucleotide
aatgaaagaaatccacgagtccatacggtggaccaaggacgcgcgaaatacccaa

SEQ ID NO: 306500 - DNA, 57 bp, Artificial
  Synthetic oligonucleotide
aatgaaagcagcggcgcgtttaggtctactaccggggcaggagcgacacggtgacgc

SEQ ID NO: 306501 - DNA, 54 bp, Artificial
  Synthetic oligonucleotide
aatgaaagcgtaggttttacgacaccccctgtcaaggacagtcaaccttgcgaa

SEQ ID NO: 306502 - DNA, 60 bp, Artificial
  Synthetic oligonucleotide
aatgaaaggactctggatttccatgactcaaatgtaaagaacctgtatgagaaagcaaga

SEQ ID NO: 306503 - DNA, 55 bp, Artificial
  Synthetic oligonucleotide
aatgaaataaccccggtatgtgtagttaatgttgcagaggtggatggggatcaac

SEQ ID NO: 306504 - DNA, 50 bp, Artificial
  Synthetic oligonucleotide
aatgaaatacttttggatatatgacacaggagtaggcaatgcagtatatg

SEQ ID NO: 306505 - DNA, 55 bp, Artificial
  Synthetic oligonucleotide
aatgaaatccgaactgaccagcattgggtaacgaagacagatatagaagattacc

SEQ ID NO: 306506 - DNA, 57 bp, Artificial
  Synthetic oligonucleotide
aatgaaattgaagagagaaggtatggtggaccataatcctcttgttacattttactc

SEQ ID NO: 306507 - DNA, 60 bp, Artificial
  Synthetic oligonucleotide
aatgaacaacatactccacagagcgtctgagagattgaacattgaggccacaaaatctaa

SEQ ID NO: 306508 - DNA, 60 bp, Artificial
  Synthetic oligonucleotide
aatgaacaaggacaaacgctctggagcaagacaaaggatgctggatcggacagagtaatg

SEQ ID NO: 306509 - DNA, 51 bp, Artificial
  Synthetic oligonucleotide
aatgaacacatgagagtagccatagcacattactcagctcaattaatgact

SEQ ID NO: 306510 - DNA, 50 bp, Artificial
  Synthetic oligonucleotide
aatgaacagatatgcttatacgtgctcggtgagagtatgaccagtatccg

SEQ ID NO: 306511 - DNA, 59 bp, Artificial
  Synthetic oligonucleotide
aatgaacagtaatcatctggtatcctacgctccatttttcgtgccaaatgacactaaac

SEQ ID NO: 306512 - DNA, 59 bp, Artificial
  Synthetic oligonucleotide
aatgaaccaacctagtcttggtcgtggtgccactccagcaacattgggccgatccatcc

SEQ ID NO: 306513 - DNA, 56 bp, Artificial
  Synthetic oligonucleotide
aatgaaccgcatgaaccaaacgactgtcctaaacattcctgtggcaaccacccgta

SEQ ID NO: 306514 - DNA, 55 bp, Artificial
  Synthetic oligonucleotide
aatgaacgaggctttctggtgacgaaggttgatggtaggacaatgaagttagggg

SEQ ID NO: 306515 - DNA, 60 bp, Artificial
  Synthetic oligonucleotide
aatgaacgcgcactatcagtcggtcaggacgcttatcacatgcgcccacaccaaagtcct

SEQ ID NO: 306516 - DNA, 55 bp, Artificial
  Synthetic oligonucleotide
aatgaacgcgcttctatatcgtgtgaaaatagcttgaaagcctcacggcgcggag

SEQ ID NO: 306517 - DNA, 58 bp, Artificial
  Synthetic oligonucleotide
aatgaacgcggtttaggtccgaagtctgatggagagttgtacattgtcaatagtgaat

SEQ ID NO: 306518 - DNA, 55 bp, Artificial
  Synthetic oligonucleotide
aatgaacggggtgagtgatttcttgtcaacttgtgtcacagtggacagcatacca

SEQ ID NO: 306519 - DNA, 55 bp, Artificial
  Synthetic oligonucleotide
aatgaactacgtatggcttcttggcccttcgtcgaacgtaacacacctgttcaat

SEQ ID NO: 306520 - DNA, 60 bp, Artificial
  Synthetic oligonucleotide
aatgaactccgagccgaatggaaaagagatttagatctccctgatcacgagtcttggcga

SEQ ID NO: 306521 - DNA, 57 bp, Artificial
  Synthetic oligonucleotide
aatgaactgcataaggccttgtttctgggtagagttaatcagagggcaacccaagga

SEQ ID NO: 306522 - DNA, 58 bp, Artificial
  Synthetic oligonucleotide
aatgaactgcgaatggccgcttggcctttcgttgaacgtaacaccccagtgcaattca

SEQ ID NO: 306523 - DNA, 57 bp, Artificial
  Synthetic oligonucleotide
aatgaacttctgagcttcatacagtcgtgttataaaagtaatgttaacgtaggacat

SEQ ID NO: 306524 - DNA, 53 bp, Artificial
  Synthetic oligonucleotide
aatgaacttttaagcttcatccaagcttgttataaaagtaatgttaatgtggg

SEQ ID NO: 306525 - DNA, 56 bp, Artificial
  Synthetic oligonucleotide
aatgaacttttataactgcgttttactgtattctgattagagttaaaagcgtcagc

SEQ ID NO: 306526 - DNA, 59 bp, Artificial
  Synthetic oligonucleotide
aatgaagaaacgccagtggtaacagaggttcaagctactaatgctgtagccaccactcc

SEQ ID NO: 306527 - DNA, 56 bp, Artificial
  Synthetic oligonucleotide
aatgaagcatacattgcctccttagatgaagccgttgcttactatgccaactactg

SEQ ID NO: 306528 - DNA, 60 bp, Artificial
  Synthetic oligonucleotide
aatgaagcatctaatatgggcaagcagggagctagaacgatttgcaattgatcctggcct

SEQ ID NO: 306529 - DNA, 59 bp, Artificial
  Synthetic oligonucleotide
aatgaagcccgtgtttgatggtgaagagtgggtgtgtgtgcgtaatgttcacgtgtcgg

SEQ ID NO: 306530 - DNA, 60 bp, Artificial
  Synthetic oligonucleotide
aatgaagcgagtaatgtggaccatggcgcaggagattttagcgcctagtcatttatgtcg

SEQ ID NO: 306531 - DNA, 53 bp, Artificial
  Synthetic oligonucleotide
aatgaagcgggacttctatttgcagggcctaagcgcctttaccgaaagaaccg

SEQ ID NO: 306532 - DNA, 52 bp, Artificial
  Synthetic oligonucleotide
aatgaaggagacatacaacgaggcagtgactaaagccctgcaagcgtgtcag

SEQ ID NO: 306533 - DNA, 60 bp, Artificial
  Synthetic oligonucleotide
aatgaaggagagaacaatagcttgctacaccctatgagcctgcatgggatggaggacccg

SEQ ID NO: 306534 - DNA, 60 bp, Artificial
  Synthetic oligonucleotide
aatgaaggatcaagagtgtgtctgagcatcactagtaagctcaatggatcattttacgca

SEQ ID NO: 306535 - DNA, 59 bp, Artificial
  Synthetic oligonucleotide
aatgaaggcacaacccaccagttggcctctccaatgcccacttgaccatgttaacacat

SEQ ID NO: 306536 - DNA, 52 bp, Artificial
  Synthetic oligonucleotide
aatgaaggctctcctagagagaagccacagtccctactacatgctgaaccgg

SEQ ID NO: 306537 - DNA, 55 bp, Artificial
  Synthetic oligonucleotide
aatgaaggtaggggggcagctaagggaagctctgttagatacaggagcagatgat

SEQ ID NO: 306538 - DNA, 55 bp, Artificial
  Synthetic oligonucleotide
aatgaagtgagaccctaacccttccaggaactggcagttatgggagaacttcaaa

SEQ ID NO: 306539 - DNA, 53 bp, Artificial
  Synthetic oligonucleotide
aatgaataacactccagaaaactgctgccaactccacttgatgtgcagccaag

SEQ ID NO: 306540 - DNA, 56 bp, Artificial
  Synthetic oligonucleotide
aatgaatactacatgagcaacaccgagccactgtgtgaagcccagggctttgcacc

SEQ ID NO: 306541 - DNA, 60 bp, Artificial
  Synthetic oligonucleotide
aatgaatattacaatcgcatacattattgcactgacaagtgcagtgcttgcaatgccacc

SEQ ID NO: 306542 - DNA, 54 bp, Artificial
  Synthetic oligonucleotide
aatgaatcacggaaaccgagaaattttttactcttgcagcttacggtgcaaggg

SEQ ID NO: 306543 - DNA, 60 bp, Artificial
  Synthetic oligonucleotide
aatgaatccatgtttacattcttaaatctcccaaccatcaagcaattttcgaatggtgca

SEQ ID NO: 306544 - DNA, 60 bp, Artificial
  Synthetic oligonucleotide
aatgaatcgctctcaggttgaatatcaatctgaaatcgtgccagacccacttgaacaaca

SEQ ID NO: 306545 - DNA, 57 bp, Artificial
  Synthetic oligonucleotide
aatgaatgctcaagtggaggaggttagagtttatgatggtactgaggaactacccgg

SEQ ID NO: 306546 - DNA, 55 bp, Artificial
  Synthetic oligonucleotide
aatgaatggggcattatagatgattggcaagcatattcccctgggccaggcacca

SEQ ID NO: 306547 - DNA, 59 bp, Artificial
  Synthetic oligonucleotide
aatgaattattattggacattgttagatcaaggagacaccataacgtttgaagccactg

SEQ ID NO: 306548 - DNA, 56 bp, Artificial
  Synthetic oligonucleotide
aatgaattgagcaaccttgcgaaaggggaaaaagctaatgtgctaattgggcaagg

SEQ ID NO: 306549 - DNA, 59 bp, Artificial
  Synthetic oligonucleotide
aatgaattgagcaatcttgcgaagggggagaaagctaacgtgttgatagggcaaggaga

SEQ ID NO: 306550 - DNA, 55 bp, Artificial
  Synthetic oligonucleotide
aatgaattggtcacctacaacagccctagtggtatcgcagctactccggatccca

SEQ ID NO: 306551 - DNA, 55 bp, Artificial
  Synthetic oligonucleotide
aatgaattttgacggtacacttgggaacctgatgagtgatttcccttggacgaga

SEQ ID NO: 306552 - DNA, 56 bp, Artificial
  Synthetic oligonucleotide
aatgacaaaccctttcaaaacgtaaacaagattacatatggagcatgccccaagta

SEQ ID NO: 306553 - DNA, 60 bp, Artificial
  Synthetic oligonucleotide
aatgacaaagctttactaagtgcttctgaattactctctctctcactaatcctgacatca

SEQ ID NO: 306554 - DNA, 58 bp, Artificial
  Synthetic oligonucleotide
aatgacacaccctcagttatgtttgccacttatgaccctctcacgtcaggcacggggg

SEQ ID NO: 306555 - DNA, 55 bp, Artificial
  Synthetic oligonucleotide
aatgacacacccttaaatgtattgttggacacaggagcagacacgtcagtactaa

SEQ ID NO: 306556 - DNA, 56 bp, Artificial
  Synthetic oligonucleotide
aatgacacctgttgcgtaccccccagcgcagaatatagctagcccaagctacaacc

SEQ ID NO: 306557 - DNA, 55 bp, Artificial
  Synthetic oligonucleotide
aatgacacggacgttttcgtcctcaacaacactaggccaccgctgggcaattggt

SEQ ID NO: 306558 - DNA, 58 bp, Artificial
  Synthetic oligonucleotide
aatgacacgttcacatacgctggatgccaggggctaactaagccgaaggtacaaatag

SEQ ID NO: 306559 - DNA, 60 bp, Artificial
  Synthetic oligonucleotide
aatgacactgatgttgtgaactttgtgagtatggagttctctcttactgacccgagactg

SEQ ID NO: 306560 - DNA, 58 bp, Artificial
  Synthetic oligonucleotide
aatgacagctacatttctgagctgaccacagatggtgatgttatcccaggtgagtttc

SEQ ID NO: 306561 - DNA, 55 bp, Artificial
  Synthetic oligonucleotide
aatgacaggacctccactaggagatcctctaactggacagaccgtattccaatta

SEQ ID NO: 306562 - DNA, 60 bp, Artificial
  Synthetic oligonucleotide
aatgacaggtccacatatatcctcaaactacacactatatccaaacatcatgaacatcta

SEQ ID NO: 306563 - DNA, 60 bp, Artificial
  Synthetic oligonucleotide
aatgacagtggatcgcgcaaccatgatcacaagtcgcgctttccccacgccaaatcacaa

SEQ ID NO: 306564 - DNA, 60 bp, Artificial
  Synthetic oligonucleotide
aatgacatactcgccgaggatgaaagaacgtgaagatgacaagtacatatatggacgcgt

SEQ ID NO: 306565 - DNA, 58 bp, Artificial
  Synthetic oligonucleotide
aatgacatatggaccaatcagaatcgttcctcataacctaattgtttgcgtggtcccc

SEQ ID NO: 306566 - DNA, 60 bp, Artificial
  Synthetic oligonucleotide
aatgacatctgtagccattactggatcactaaggctatttccgtcagaacgagtgttaac

SEQ ID NO: 306567 - DNA, 60 bp, Artificial
  Synthetic oligonucleotide
aatgacattgttatattggattctgctctctgggcccccactaccgaagcagactctcct

SEQ ID NO: 306568 - DNA, 60 bp, Artificial
  Synthetic oligonucleotide
aatgaccagtcgaatgaggccagtcgtcattatgatgtgtggcccccctgggattgggaa

SEQ ID NO: 306569 - DNA, 57 bp, Artificial
  Synthetic oligonucleotide
aatgaccgaaacttctggaggggtgaaaatgggcgaaggacaaggattgcatatgaa

SEQ ID NO: 306570 - DNA, 56 bp, Artificial
  Synthetic oligonucleotide
aatgaccgaggggggtggctaggaacgcgggggaccagtggagccatgggatgctc

SEQ ID NO: 306571 - DNA, 56 bp, Artificial
  Synthetic oligonucleotide
aatgacctaaccaaatttagaaacaagatctcttcaaagacacacattaacttgga

SEQ ID NO: 306572 - DNA, 55 bp, Artificial
  Synthetic oligonucleotide
aatgacctccaaggggtggagattgctggcgcccatcacggcgtatgcccagcag

SEQ ID NO: 306573 - DNA, 58 bp, Artificial
  Synthetic oligonucleotide
aatgacctggcgtggctccacatctatagtagcacagcacacgcacaccctcatgtaa

SEQ ID NO: 306574 - DNA, 57 bp, Artificial
  Synthetic oligonucleotide
aatgacggaacaggcagttgtggtccagtgtcttctaatggggcatatggagtaaag

SEQ ID NO: 306575 - DNA, 59 bp, Artificial
  Synthetic oligonucleotide
aatgacggaggcccaggttgcgaagagtttgtcaagtctttggtacatgtctgcggaca

SEQ ID NO: 306576 - DNA, 55 bp, Artificial
  Synthetic oligonucleotide
aatgacgggaactgccattaaaagatatatggcggattactggactctggcggct

SEQ ID NO: 306577 - DNA, 55 bp, Artificial
  Synthetic oligonucleotide
aatgacgggaccgttaaggccacttgcgtggcaggttcctttaaaatcacagcac

SEQ ID NO: 306578 - DNA, 59 bp, Artificial
  Synthetic oligonucleotide
aatgacgttatactccacatcattcgagaagaccttggaattgaagtcgaggtgaccac

SEQ ID NO: 306579 - DNA, 59 bp, Artificial
  Synthetic oligonucleotide
aatgactaaattctatggaggatgggataaactgatgagaagtctaccggaaggatgga

SEQ ID NO: 306580 - DNA, 57 bp, Artificial
  Synthetic oligonucleotide
aatgactacgcagcgttctggaaatgtatcgccagttgggcgtacaatggtctcgtt

SEQ ID NO: 306581 - DNA, 60 bp, Artificial
  Synthetic oligonucleotide
aatgactgatggaagcgcatcagggaaagccgacactagaataatattcattgaagaggg

SEQ ID NO: 306582 - DNA, 60 bp, Artificial
  Synthetic oligonucleotide
aatgactgatggaagtgcatcagggaaggctgacactagaatactattcgtcaaagaggg

SEQ ID NO: 306583 - DNA, 51 bp, Artificial
  Synthetic oligonucleotide
aatgactgcctattagtagcattggctgacggcctgctaaccaagcgtatc

SEQ ID NO: 306584 - DNA, 60 bp, Artificial
  Synthetic oligonucleotide
aatgactgcttgctccaagcaatctctccttctttgtcagtcagtccatccagactttgg

SEQ ID NO: 306585 - DNA, 60 bp, Artificial
  Synthetic oligonucleotide
aatgactttacagcgcacgctccgacaaaagcatactatgacaaaagtacgggtatctga

SEQ ID NO: 306586 - DNA, 58 bp, Artificial
  Synthetic oligonucleotide
aatgagaaatgtttgttatactccccgttccacaacattcgctcgtgaccggagatca

SEQ ID NO: 306587 - DNA, 57 bp, Artificial
  Synthetic oligonucleotide
aatgagaagagtgttgtggtgaatgttaacgggcccacgtatggtgatcctaacgag

SEQ ID NO: 306588 - DNA, 59 bp, Artificial
  Synthetic oligonucleotide
aatgagaatacttgtgagaggcaactcccctgtgttcaactataacaaggcaaccaaga

SEQ ID NO: 306589 - DNA, 60 bp, Artificial
  Synthetic oligonucleotide
aatgagaattttggcagatacatgccatatgttttccagcagcgaagtgaggtgattaaa

SEQ ID NO: 306590 - DNA, 60 bp, Artificial
  Synthetic oligonucleotide
aatgagacacttgtttatggtactctcaagcagtgtctcgaggtcctttctggatactga

SEQ ID NO: 306591 - DNA, 55 bp, Artificial
  Synthetic oligonucleotide
aatgagaccccaggagtaagataccagtacaacgtcctcccgcaaggatggaaag

SEQ ID NO: 306592 - DNA, 57 bp, Artificial
  Synthetic oligonucleotide
aatgagacctggccggacgcatactggaaaataccaggcgagaaatggtgggacggc

SEQ ID NO: 306593 - DNA, 54 bp, Artificial
  Synthetic oligonucleotide
aatgagagaactttaaactttcatgaatcaaaagtcaagaacctttacgaacag

SEQ ID NO: 306594 - DNA, 59 bp, Artificial
  Synthetic oligonucleotide
aatgagagcgcaaatctgggctcaagtttgggacggttgttaggcattcaacactataa

SEQ ID NO: 306595 - DNA, 60 bp, Artificial
  Synthetic oligonucleotide
aatgagaggaataagagtcagcaaaatgggagtggatgaatactccagcacagagagggt

SEQ ID NO: 306596 - DNA, 60 bp, Artificial
  Synthetic oligonucleotide
aatgagagtgatggggacattgaggacttgtcaacaatggtggatatggggaatcttagg

SEQ ID NO: 306597 - DNA, 60 bp, Artificial
  Synthetic oligonucleotide
aatgagatcattattgagaagtcgtgcctcaattgatattgctgcgaaattacctgaaaa

SEQ ID NO: 306598 - DNA, 55 bp, Artificial
  Synthetic oligonucleotide
aatgagatcgcacgtgtaacaggagagacgtcaacgtggggaccggcgcgccaac

SEQ ID NO: 306599 - DNA, 57 bp, Artificial
  Synthetic oligonucleotide
aatgagattgcgcgtgtaactggagagacctcaacttggggaccggcccgtcagccg

SEQ ID NO: 306600 - DNA, 60 bp, Artificial
  Synthetic oligonucleotide
aatgagcagcctgggactaaatattataaaatgcgcggtgaatggtgggatggatatgac

SEQ ID NO: 306601 - DNA, 60 bp, Artificial
  Synthetic oligonucleotide
aatgagccaagcgggtatgcacaaacagattgtgtcttggaagctatggctttccttgaa

SEQ ID NO: 306602 - DNA, 60 bp, Artificial
  Synthetic oligonucleotide
aatgagcccagcactgccacggtcaagaccgatctacgcgatcgttaccaggtcatgcac

SEQ ID NO: 306603 - DNA, 60 bp, Artificial
  Synthetic oligonucleotide
aatgagcccagtacagctactgtgaagaacgatcttcgtgatcgtttccgagtgatacac

SEQ ID NO: 306604 - DNA, 60 bp, Artificial
  Synthetic oligonucleotide
aatgagcccagtactgctacagttaagcaggattatcgagaccgttttcaggtcatgaga

SEQ ID NO: 306605 - DNA, 60 bp, Artificial
  Synthetic oligonucleotide
aatgagcgaagcacggtggggctcggagattccaaacgcctgagtccttgagactcaaca

SEQ ID NO: 306606 - DNA, 60 bp, Artificial
  Synthetic oligonucleotide
aatgagcgtcgacagaatgacgtatagcggagataaagtgatacttcctgtttacgacga

SEQ ID NO: 306607 - DNA, 55 bp, Artificial
  Synthetic oligonucleotide
aatgagctggactatggttccgacaacctaccactaggcatgactttcaccgcac

SEQ ID NO: 306608 - DNA, 53 bp, Artificial
  Synthetic oligonucleotide
aatgagcttcaacctattggcactattgatgtagagcaccatgttggcttcag

SEQ ID NO: 306609 - DNA, 60 bp, Artificial
  Synthetic oligonucleotide
aatgagctttgcatcattgaggacacttgatttggttggttctgtgaacacccctagttc

SEQ ID NO: 306610 - DNA, 60 bp, Artificial
  Synthetic oligonucleotide
aatgaggaatctgctctcccagagtctatcagtaaggaagttcatggttgagatcctcat

SEQ ID NO: 306611 - DNA, 60 bp, Artificial
  Synthetic oligonucleotide
aatgaggacataacctgtgacacaattctcatgtgggaagcaattagtgtaaagactgag

SEQ ID NO: 306612 - DNA, 55 bp, Artificial
  Synthetic oligonucleotide
aatgaggagtcattccgtcgaggtttgatcgattactacactgggttagggttta

SEQ ID NO: 306613 - DNA, 57 bp, Artificial
  Synthetic oligonucleotide
aatgaggatgttattttcatgaagacaatgaggcaatatttccctggttttgaaaaa

SEQ ID NO: 306614 - DNA, 59 bp, Artificial
  Synthetic oligonucleotide
aatgaggattgctcggaagaaccaaaaggatgcaaagttacggagaatctatagcaata

SEQ ID NO: 306615 - DNA, 54 bp, Artificial
  Synthetic oligonucleotide
aatgaggattggggatgttatatagcctctgggtcctctgggggggggggagcg

SEQ ID NO: 306616 - DNA, 60 bp, Artificial
  Synthetic oligonucleotide
aatgaggcatatcgcgaattcttaaatttagcgatcagtagcacctatacttctccaatg

SEQ ID NO: 306617 - DNA, 60 bp, Artificial
  Synthetic oligonucleotide
aatgaggctcaatcgtcgacaacattcgatgttcattttgatgattggtggaatcggcgg

SEQ ID NO: 306618 - DNA, 58 bp, Artificial
  Synthetic oligonucleotide
aatgagggatcttatttcttcggagacaatgcagaggagtatgataattaaggaaaaa

SEQ ID NO: 306619 - DNA, 60 bp, Artificial
  Synthetic oligonucleotide
aatgaggggtggaatgcttctgaggatgccctcaccgcagtaattactgcggcctatttg

SEQ ID NO: 306620 - DNA, 54 bp, Artificial
  Synthetic oligonucleotide
aatgaggtcccagggatttatcccgtaaatagtggatccaggttaatccctgag

SEQ ID NO: 306621 - DNA, 55 bp, Artificial
  Synthetic oligonucleotide
aatgaggttatggcacttgaaccggtggtaggagcctcaatcgcagctcctgttg

SEQ ID NO: 306622 - DNA, 58 bp, Artificial
  Synthetic oligonucleotide
aatgaggtttcctaaagctataagacctgatgtctcaggcatgatccttgaagaggga

SEQ ID NO: 306623 - DNA, 54 bp, Artificial
  Synthetic oligonucleotide
aatgagtaaggttgaggacacgatccgacgtgctgctagagcaggaaacgacac

SEQ ID NO: 306624 - DNA, 60 bp, Artificial
  Synthetic oligonucleotide
aatgagtactacccagaaagataccaatcacatgtgatctcatcagccggcatcgcctta

SEQ ID NO: 306625 - DNA, 60 bp, Artificial
  Synthetic oligonucleotide
aatgagtcaccgggaggccatcattctagggttgagacacaagaagctctataatcaagc

SEQ ID NO: 306626 - DNA, 55 bp, Artificial
  Synthetic oligonucleotide
aatgagtcggggacaggaagagtctttgactccacctcaaagagtctccgcgacg

SEQ ID NO: 306627 - DNA, 60 bp, Artificial
  Synthetic oligonucleotide
aatgagtctcgatgtcgcgagaccgagtgttgttaggcctccccctgttgatccacaggc

SEQ ID NO: 306628 - DNA, 54 bp, Artificial
  Synthetic oligonucleotide
aatgagtctggacgtgccctacgaacgcctgggccccgccactaaagtagacta

SEQ ID NO: 306629 - DNA, 55 bp, Artificial
  Synthetic oligonucleotide
aatgagtggactcacagtagtcaagagcagacgaaacaaatcaaaggctccgatc

SEQ ID NO: 306630 - DNA, 55 bp, Artificial
  Synthetic oligonucleotide
aatgagtggggcatagtagatggatggcagaattatacagatgggccaggtacca

SEQ ID NO: 306631 - DNA, 58 bp, Artificial
  Synthetic oligonucleotide
aatgagtgtaggaccttcaggggaagagttctagacatgttcagaacagcttttggcg

SEQ ID NO: 306632 - DNA, 60 bp, Artificial
  Synthetic oligonucleotide
aatgagtgttgatttacaactgactcgccatgaattggagaggtgtaggccaaccatcat

SEQ ID NO: 306633 - DNA, 60 bp, Artificial
  Synthetic oligonucleotide
aatgagttaggcttgtggggaaagtatgtcctgattgcattaactataattatcagtatc

SEQ ID NO: 306634 - DNA, 59 bp, Artificial
  Synthetic oligonucleotide
aatgagttgagaaaaatcagagcaggagctcctagggcagttacagttaagcaaggccc

SEQ ID NO: 306635 - DNA, 55 bp, Artificial
  Synthetic oligonucleotide
aatgataacccatactactcacgtgaaaaaggcactactactaaaactagaggaa

SEQ ID NO: 306636 - DNA, 58 bp, Artificial
  Synthetic oligonucleotide
aatgataaccttgtactgccttaacaccaaattttatcaagatacagaatggggtgca

SEQ ID NO: 306637 - DNA, 55 bp, Artificial
  Synthetic oligonucleotide
aatgataatcctagagcattgttaacattgttaacgtatactcgtcgtatagttc

SEQ ID NO: 306638 - DNA, 59 bp, Artificial
  Synthetic oligonucleotide
aatgatacatggagaccgtcacctccaactaaatataaaggatggtgtctggattgctg

SEQ ID NO: 306639 - DNA, 60 bp, Artificial
  Synthetic oligonucleotide
aatgataccgatgtggtaaactttgtgagcatggaattttctctcactgacccgaggcta

SEQ ID NO: 306640 - DNA, 55 bp, Artificial
  Synthetic oligonucleotide
aatgatactaacaccaataatagtagtgctactaaccccactagtagtagcgggg

SEQ ID NO: 306641 - DNA, 60 bp, Artificial
  Synthetic oligonucleotide
aatgatactacacaagcaatgagagacaggcaacggagtggtgtagtacaactgtttttg

SEQ ID NO: 306642 - DNA, 52 bp, Artificial
  Synthetic oligonucleotide
aatgatagaaacaagcagtcatctgggtctgttgttgtgaacccacgtgagg

SEQ ID NO: 306643 - DNA, 58 bp, Artificial
  Synthetic oligonucleotide
aatgataggaacttttttggtgatggtgaagggccaataaggacatggagtgtgttga

SEQ ID NO: 306644 - DNA, 59 bp, Artificial
  Synthetic oligonucleotide
aatgataggtgggggtgagaagcgtgatgaaacaatacgcgcaagggaaacatcaataa

SEQ ID NO: 306645 - DNA, 56 bp, Artificial
  Synthetic oligonucleotide
aatgatatttcaacacaaacgtctacaatcagtaggaatcttagatcgaacgaaat

SEQ ID NO: 306646 - DNA, 54 bp, Artificial
  Synthetic oligonucleotide
aatgatcaccgatatggttttgtgtgtcaacaggacgaggttgagactgttcgc

SEQ ID NO: 306647 - DNA, 60 bp, Artificial
  Synthetic oligonucleotide
aatgatccagatgtgaaatacaatttgatgatgggcttgtacgcacgtgcagaacgcgat

SEQ ID NO: 306648 - DNA, 54 bp, Artificial
  Synthetic oligonucleotide
aatgatccagtgggcatatgataatggttatgacacagaaagcaggatagcata

SEQ ID NO: 306649 - DNA, 60 bp, Artificial
  Synthetic oligonucleotide
aatgatcccatgatgatatatctagtttggagaaggattgagaactttgctatgccccaa

SEQ ID NO: 306650 - DNA, 60 bp, Artificial
  Synthetic oligonucleotide
aatgatcgaagcaatgtgcgttaacatagagctaataattctgacattatatatctttgc

SEQ ID NO: 306651 - DNA, 55 bp, Artificial
  Synthetic oligonucleotide
aatgatcgagtcaattttctgtcatcgaacggtgtaataactgtaccagccggag

SEQ ID NO: 306652 - DNA, 60 bp, Artificial
  Synthetic oligonucleotide
aatgatcggctcgtacgcagtgctttcaccacaagcggtccttaacagcgagaagctcgc

SEQ ID NO: 306653 - DNA, 60 bp, Artificial
  Synthetic oligonucleotide
aatgatctgggatcccgactcgcaagactcggccccacaatccagacaggagatatcagc

SEQ ID NO: 306654 - DNA, 55 bp, Artificial
  Synthetic oligonucleotide
aatgatcttcgacttattaaaattgcctcccgaattcgtggagatgtggtttact

SEQ ID NO: 306655 - DNA, 60 bp, Artificial
  Synthetic oligonucleotide
aatgatgaagttacgccccttgacatcgtaacgcgcaccgagtctatcagaagtgacaag

SEQ ID NO: 306656 - DNA, 57 bp, Artificial
  Synthetic oligonucleotide
aatgatgaattaatgacgaagctattaaatgtttaggtcccttgacacggaccgatg

SEQ ID NO: 306657 - DNA, 59 bp, Artificial
  Synthetic oligonucleotide
aatgatgacatattattgtcggtaagcacttaccaatgactaataatctgttctccgta

SEQ ID NO: 306658 - DNA, 60 bp, Artificial
  Synthetic oligonucleotide
aatgatgatagtaaaatggcaaaccagcgtatacatgagaaccagtttggtccagaattc

SEQ ID NO: 306659 - DNA, 60 bp, Artificial
  Synthetic oligonucleotide
aatgatgatgggcatgtttaacatgctgagtacagtcctaggagtctcgatcttgaatct

SEQ ID NO: 306660 - DNA, 57 bp, Artificial
  Synthetic oligonucleotide
aatgatgctttctttgagtggtccggcctccagccttcgtttatcgacaaggaggga

SEQ ID NO: 306661 - DNA, 56 bp, Artificial
  Synthetic oligonucleotide
aatgatggatctatcgttttcgaattgtacaacgaagtagttattacctgtaggtc

SEQ ID NO: 306662 - DNA, 60 bp, Artificial
  Synthetic oligonucleotide
aatgatggtaccgtctatagtgtagatattgtatgctttaagtttgcacaccaccttata

SEQ ID NO: 306663 - DNA, 60 bp, Artificial
  Synthetic oligonucleotide
aatgatggtgttgttcaatacatgaggcttgtacaagctgaaattagttatgttcgagag

SEQ ID NO: 306664 - DNA, 59 bp, Artificial
  Synthetic oligonucleotide
aatgatgtactttggctttcacttacggccgctgagtatgaccagactacctacggctc

SEQ ID NO: 306665 - DNA, 60 bp, Artificial
  Synthetic oligonucleotide
aatgatgtcatactcacgggctgcatagtctacgtcccaattttcttggggcgagatttg

SEQ ID NO: 306666 - DNA, 55 bp, Artificial
  Synthetic oligonucleotide
aatgatgtcgtctttatcaacttggctcttctcttatttgggtcgaattgatgcc

SEQ ID NO: 306667 - DNA, 60 bp, Artificial
  Synthetic oligonucleotide
aatgatgtctctaggatcagcaacgagctttcgactcaacgcggactcattgatggcgtc

SEQ ID NO: 306668 - DNA, 60 bp, Artificial
  Synthetic oligonucleotide
aatgatgtgttcctcgcacattgatcgtatatttgagggtggtaggtaaaatagtgtgtg

SEQ ID NO: 306669 - DNA, 51 bp, Artificial
  Synthetic oligonucleotide
aatgatgttgtgaatagggagcacgaatgtatgagcagacgatgaataagt

SEQ ID NO: 306670 - DNA, 57 bp, Artificial
  Synthetic oligonucleotide
aatgattaaataaaacactaacgcagtttttgccatcacaagaccttctggactaga

SEQ ID NO: 306671 - DNA, 55 bp, Artificial
  Synthetic oligonucleotide
aatgattaataaacagggtatcatttccgctcgcgccctataattgtcgcccgtg

SEQ ID NO: 306672 - DNA, 59 bp, Artificial
  Synthetic oligonucleotide
aatgattcaacgacagtagaaccagtgttggatggaccatatcaacctacgactttcaa

SEQ ID NO: 306673 - DNA, 54 bp, Artificial
  Synthetic oligonucleotide
aatgattcaattgatcgttaaacaatagctaagttattaccgtctcacaaacag

SEQ ID NO: 306674 - DNA, 59 bp, Artificial
  Synthetic oligonucleotide
aatgattcctccgacctttgatgtcgttaatctcaccaattttgctgcctaagtgcagt

SEQ ID NO: 306675 - DNA, 57 bp, Artificial
  Synthetic oligonucleotide
aatgattcgtaattctgcgccttacgggacgcctctatctcttaaggtccttcatgg

SEQ ID NO: 306676 - DNA, 58 bp, Artificial
  Synthetic oligonucleotide
aatgattgagtcccccgtgtccgtacgagctaatgaagccggcatcgtaggacaatac

SEQ ID NO: 306677 - DNA, 60 bp, Artificial
  Synthetic oligonucleotide
aatgattgccccaattcgagcattgtgtacgagacgggcgataccatcttgcactctccg

SEQ ID NO: 306678 - DNA, 50 bp, Artificial
  Synthetic oligonucleotide
aatgatttcactgttcggttgcttagagacaccacacacatttcacaaac

SEQ ID NO: 306679 - DNA, 53 bp, Artificial
  Synthetic oligonucleotide
aatgatttcttcaacaggctgaattggctggtaaaatcagacggagatgcgta

SEQ ID NO: 306680 - DNA, 57 bp, Artificial
  Synthetic oligonucleotide
aatgcaaacccgcgattgcacaaagtttatgggttaccgaagcagccgccattatat

SEQ ID NO: 306681 - DNA, 58 bp, Artificial
  Synthetic oligonucleotide
aatgcaaactctagggtgctacggtctggtgacaccatgacaggtaatttaacagcgc

SEQ ID NO: 306682 - DNA, 60 bp, Artificial
  Synthetic oligonucleotide
aatgcaaataggccgaggtcagcctctgggaattagcagcacaggtcacccatttttcaa

SEQ ID NO: 306683 - DNA, 60 bp, Artificial
  Synthetic oligonucleotide
aatgcaacaacaatagtctttaatcaatcctcaggaggagatccagaaattgtaatgcac

SEQ ID NO: 306684 - DNA, 51 bp, Artificial
  Synthetic oligonucleotide
aatgcaactacaaagctcattgggaaagttgttccaatgtcactcgaagtt

SEQ ID NO: 306685 - DNA, 58 bp, Artificial
  Synthetic oligonucleotide
aatgcaacttgcacgcccactacaatacccttgctcgaacacttatggtctaaccgcg

SEQ ID NO: 306686 - DNA, 50 bp, Artificial
  Synthetic oligonucleotide
aatgcaaggccatagaagttaaccttctgtggtgcccattggccggtagc

SEQ ID NO: 306687 - DNA, 55 bp, Artificial
  Synthetic oligonucleotide
aatgcaagtatagcgtcagatgatggggggagacacctaaacgcattgttggcag

SEQ ID NO: 306688 - DNA, 60 bp, Artificial
  Synthetic oligonucleotide
aatgcaagtgttccattgtgcctaatatagcaaacagtcgaccgctctgagcaatgggta

SEQ ID NO: 306689 - DNA, 60 bp, Artificial
  Synthetic oligonucleotide
aatgcaatacatgtatgttccaccaggtgcaccggtgcccaatagtagggacgattatgc

SEQ ID NO: 306690 - DNA, 59 bp, Artificial
  Synthetic oligonucleotide
aatgcaatgaaatttcgttcagagtagtgccgttccattctgtaccagacaggctaggg

SEQ ID NO: 306691 - DNA, 59 bp, Artificial
  Synthetic oligonucleotide
aatgcacagttcatcacgcctaccaactcggcgtcaggctttgtcagggcccagtttga

SEQ ID NO: 306692 - DNA, 53 bp, Artificial
  Synthetic oligonucleotide
aatgcacataggctcccacctatgtgacggttagcgggactcacctattcatc

SEQ ID NO: 306693 - DNA, 58 bp, Artificial
  Synthetic oligonucleotide
aatgcaccaattgagtcatgaccaagtacttctgttaccccggacttagtatcaataa

SEQ ID NO: 306694 - DNA, 60 bp, Artificial
  Synthetic oligonucleotide
aatgcaccatgggtctttgcctgtgcaccagatcggtgtccaccaacatgtatctatgtt

SEQ ID NO: 306695 - DNA, 60 bp, Artificial
  Synthetic oligonucleotide
aatgcaccgaaccatgaggggatacaggcaggagtggataggttctataggacctgcaaa

SEQ ID NO: 306696 - DNA, 60 bp, Artificial
  Synthetic oligonucleotide
aatgcaccgcagcagccgcattcatattcgttgatgaatcgaccgttttctgtccagtcg

SEQ ID NO: 306697 - DNA, 50 bp, Artificial
  Synthetic oligonucleotide
aatgcacctcgacaaaaacgagaatgcgatcgtttaaagtagacgaatac

SEQ ID NO: 306698 - DNA, 55 bp, Artificial
  Synthetic oligonucleotide
aatgcacgcgtctcaaccgcttctcgcaccagttccgtcgaactccgcactcccg

SEQ ID NO: 306699 - DNA, 60 bp, Artificial
  Synthetic oligonucleotide
aatgcacttttgacaccactcccaagcaaccgtctcgatgactcaacgtatggtcttgcg

SEQ ID NO: 306700 - DNA, 55 bp, Artificial
  Synthetic oligonucleotide
aatgcagaaagtgagacaagtgcaagctgattatatgaccgcaacgcgagaggtt

SEQ ID NO: 306701 - DNA, 54 bp, Artificial
  Synthetic oligonucleotide
aatgcagaacgaaagaaggtagacggaaaacgaacctgtatgggttcattataa

SEQ ID NO: 306702 - DNA, 53 bp, Artificial
  Synthetic oligonucleotide
aatgcagaagcctttctccgtagcaatgcacaagcaaaacatgtaaaggactg

SEQ ID NO: 306703 - DNA, 60 bp, Artificial
  Synthetic oligonucleotide
aatgcagatcttgcacgcctgtcgtacaagaaatccagtaagtacgatctggaatgtgca

SEQ ID NO: 306704 - DNA, 58 bp, Artificial
  Synthetic oligonucleotide
aatgcagcggccttaattgcgggctgtgggctcaaattgaaggttgattaccgcccca

SEQ ID NO: 306705 - DNA, 60 bp, Artificial
  Synthetic oligonucleotide
aatgcagctgaatgacatgggataccgctcgtaatggttatcggtctcctgaagtatctc

SEQ ID NO: 306706 - DNA, 54 bp, Artificial
  Synthetic oligonucleotide
aatgcaggaccaaggaaggaaggcggaaaacaaacctatatgggttcattataa

SEQ ID NO: 306707 - DNA, 55 bp, Artificial
  Synthetic oligonucleotide
aatgcaggactttttttctaacccaaggagccttgttgaatgacaaacattccaa

SEQ ID NO: 306708 - DNA, 56 bp, Artificial
  Synthetic oligonucleotide
aatgcaggagagttttctctccccacttttgattcattgaacattactgctgcatc

SEQ ID NO: 306709 - DNA, 60 bp, Artificial
  Synthetic oligonucleotide
aatgcaggatccatcaacgccccaacagtgtcagatagcagggccctagcacgaagattt

SEQ ID NO: 306710 - DNA, 55 bp, Artificial
  Synthetic oligonucleotide
aatgcaggatgtgagttctttaatcaacattctaaagggtgcagagtggatctat

SEQ ID NO: 306711 - DNA, 60 bp, Artificial
  Synthetic oligonucleotide
aatgcaggcctcgatccaactccaaaagaagatcaacaacatagcacagagtgctaggtc

SEQ ID NO: 306712 - DNA, 60 bp, Artificial
  Synthetic oligonucleotide
aatgcaggcgcatcgggctacacagtactactattactaagattcatagcccataaaaat

SEQ ID NO: 306713 - DNA, 59 bp, Artificial
  Synthetic oligonucleotide
aatgcaggggccgcagtctgacaacaacaccgcaacaagtttcaggctcaccccagggc

SEQ ID NO: 306714 - DNA, 53 bp, Artificial
  Synthetic oligonucleotide
aatgcagtagacacttgctatccatttgatgtgccagagtaccagagtctgag

SEQ ID NO: 306715 - DNA, 55 bp, Artificial
  Synthetic oligonucleotide
aatgcagtccgcggcagtcagtaatttcaggacgtataatttcaagacaggtatt

SEQ ID NO: 306716 - DNA, 60 bp, Artificial
  Synthetic oligonucleotide
aatgcagtttttacagaaatttgctatggctgacggagaaggatggctcatacccgaatc

SEQ ID NO: 306717 - DNA, 55 bp, Artificial
  Synthetic oligonucleotide
aatgcatacccaacaataaaggagagttacaataataccaaccaggaagatcttt

SEQ ID NO: 306718 - DNA, 56 bp, Artificial
  Synthetic oligonucleotide
aatgcatacccactccaaaacctgacaaaggtcaacaacggggactatgcaagact

SEQ ID NO: 306719 - DNA, 60 bp, Artificial
  Synthetic oligonucleotide
aatgcatatctccatctttgtgtgcctctcgggcacaaatgatgtacttaggagtccaac

SEQ ID NO: 306720 - DNA, 60 bp, Artificial
  Synthetic oligonucleotide
aatgcatatttccatcacgatgtgcctctcgggcacataggatgtacagaggattccaat

SEQ ID NO: 306721 - DNA, 58 bp, Artificial
  Synthetic oligonucleotide
aatgcatcaactcttgagacacttccaaaaggatgcaaaagtgcttttccaaaactgg

SEQ ID NO: 306722 - DNA, 58 bp, Artificial
  Synthetic oligonucleotide
aatgcatcactccaaatggaagcattcccaatgacaaaccctttcaaaatgtaaacag

SEQ ID NO: 306723 - DNA, 60 bp, Artificial
  Synthetic oligonucleotide
aatgcatcagcagtaatctggtataatagaaggcctgttacagagatcaatacatgggcc

SEQ ID NO: 306724 - DNA, 58 bp, Artificial
  Synthetic oligonucleotide
aatgcatgaggatataatcagtttatgggatgaaagcctaaagccatgtgtaaagttg

SEQ ID NO: 306725 - DNA, 54 bp, Artificial
  Synthetic oligonucleotide
aatgcatgtagggcgcatacacttctgagtaccatgtgggggctcgttgataat

SEQ ID NO: 306726 - DNA, 50 bp, Artificial
  Synthetic oligonucleotide
aatgcatgtcgtataccccgacaggcagttttaacatactgaaacgcctc

SEQ ID NO: 306727 - DNA, 60 bp, Artificial
  Synthetic oligonucleotide
aatgcatgtctaagacagcatcttcgcataactctcttagcgcacaattgcgccgagctg

SEQ ID NO: 306728 - DNA, 60 bp, Artificial
  Synthetic oligonucleotide
aatgcattacgatataacctatgaagctctgaagaacaacgcgcagcggatagtttacga

SEQ ID NO: 306729 - DNA, 55 bp, Artificial
  Synthetic oligonucleotide
aatgcattataacgtacgccgatgactcttgtgcggggtatgtgcacaagcgcga

SEQ ID NO: 306730 - DNA, 57 bp, Artificial
  Synthetic oligonucleotide
aatgcattattgaaacaccgatttgaaataattgaaggaagagaccgaacgattgcc

SEQ ID NO: 306731 - DNA, 60 bp, Artificial
  Synthetic oligonucleotide
aatgcattgaaattagtaaatgataccgaattgcagatacatgtgttgcgagggccgaag

SEQ ID NO: 306732 - DNA, 52 bp, Artificial
  Synthetic oligonucleotide
aatgcattgagtctgtcgcagcccacaagacccgcacttccaccagcagaac

SEQ ID NO: 306733 - DNA, 60 bp, Artificial
  Synthetic oligonucleotide
aatgcattgcttttatttaccatatactaaggatggaattgtacctgtcacaggattcac

SEQ ID NO: 306734 - DNA, 57 bp, Artificial
  Synthetic oligonucleotide
aatgcattgtaagaggccaggaaataagacagttgtaccaataacacttaggtcagg

SEQ ID NO: 306735 - DNA, 60 bp, Artificial
  Synthetic oligonucleotide
aatgcattgtcacaacaaatcgcaatgtcacaattgatagatctggcattattaccactt

SEQ ID NO: 306736 - DNA, 56 bp, Artificial
  Synthetic oligonucleotide
aatgccaaagttgcaatacaaatgggcatcgttttaaaatcccttgcgaaatctaa

SEQ ID NO: 306737 - DNA, 60 bp, Artificial
  Synthetic oligonucleotide
aatgccaaattacaagaaaccgatgaatatcaatgtccgcaatctgaacatgaggactat

SEQ ID NO: 306738 - DNA, 54 bp, Artificial
  Synthetic oligonucleotide
aatgccaacccagactgtaagttagtactaaaagggctgggaatgaatcccacc

SEQ ID NO: 306739 - DNA, 55 bp, Artificial
  Synthetic oligonucleotide
aatgccaacctccactgggtgggttaaggttgaggtatagaatcctattcgctcc

SEQ ID NO: 306740 - DNA, 60 bp, Artificial
  Synthetic oligonucleotide
aatgccaataagtggttctggcatcagttaacagccacagattcagacacactaggccaa

SEQ ID NO: 306741 - DNA, 60 bp, Artificial
  Synthetic oligonucleotide
aatgccaatagatcatgataatacaagctatacgttgataaattgtaaatcctcaaccat

SEQ ID NO: 306742 - DNA, 53 bp, Artificial
  Synthetic oligonucleotide
aatgccaatatcgttccgggaaaccacctggagttgttccaaacgcaggaaaa

SEQ ID NO: 306743 - DNA, 59 bp, Artificial
  Synthetic oligonucleotide
aatgccacatatacgagcaaggtagaattctttaaccatgacttcacacttttcctgga

SEQ ID NO: 306744 - DNA, 54 bp, Artificial
  Synthetic oligonucleotide
aatgccacccctggcacgtcagtaactgctatcgaaccagcggtggtattggac

SEQ ID NO: 306745 - DNA, 55 bp, Artificial
  Synthetic oligonucleotide
aatgccaccgttactggtggccaatatgcttgtaaggaacaagccatggtgaatc

SEQ ID NO: 306746 - DNA, 54 bp, Artificial
  Synthetic oligonucleotide
aatgccacctttaatttgaatgggtttcccgtatttacagttggtctgccagtc

SEQ ID NO: 306747 - DNA, 55 bp, Artificial
  Synthetic oligonucleotide
aatgccagagccgagtttctctactatcaactgtgtagcgtgatttgcgaaaggg

SEQ ID NO: 306748 - DNA, 60 bp, Artificial
  Synthetic oligonucleotide
aatgccagagtactaataagatgcccatacactgaacccatgctaatagaccactcagac

SEQ ID NO: 306749 - DNA, 52 bp, Artificial
  Synthetic oligonucleotide
aatgccaggcgtggactacaagccgaatcctggcactcccatcggcaatcgc

SEQ ID NO: 306750 - DNA, 51 bp, Artificial
  Synthetic oligonucleotide
aatgccagttaccgtagcgagcgctgcgcagaggagagggagggttggcag

SEQ ID NO: 306751 - DNA, 57 bp, Artificial
  Synthetic oligonucleotide
aatgccatcctaaagcggattggcgtccatgggttggccaaaatcccgtgcaacttc

SEQ ID NO: 306752 - DNA, 55 bp, Artificial
  Synthetic oligonucleotide
aatgccatggaggcactaatggtcacaactgtagacaaattaacccaggggagac

SEQ ID NO: 306753 - DNA, 58 bp, Artificial
  Synthetic oligonucleotide
aatgccatggttggctacgagaatctgcctatggacgatcctaatttcactcagcaga

SEQ ID NO: 306754 - DNA, 57 bp, Artificial
  Synthetic oligonucleotide
aatgcccaaacgttaggaataggatgtcagactacggatactggaacatttgaagaa

SEQ ID NO: 306755 - DNA, 55 bp, Artificial
  Synthetic oligonucleotide
aatgcccaactatgctctgcacccatccatcattcccactccgggttaccgaggc

SEQ ID NO: 306756 - DNA, 56 bp, Artificial
  Synthetic oligonucleotide
aatgcccaagaacaactgccttctcaccgcagtcgccccttccctccatataaacc

SEQ ID NO: 306757 - DNA, 59 bp, Artificial
  Synthetic oligonucleotide
aatgccccgatgaccaaagagcatggaacatttgggaagtcgaggactatggatttgga

SEQ ID NO: 306758 - DNA, 59 bp, Artificial
  Synthetic oligonucleotide
aatgcccctgggcctgctcccttggaccacatgaatctggggccagtgtgccggcgagt

SEQ ID NO: 306759 - DNA, 57 bp, Artificial
  Synthetic oligonucleotide
aatgcccggaacgtgcaggctttcaaatcccaaatgttgcagttccaattggtagta

SEQ ID NO: 306760 - DNA, 54 bp, Artificial
  Synthetic oligonucleotide
aatgccctactgagacgtaccgttgaccccgccctgaaaccggaatggtctgcc

SEQ ID NO: 306761 - DNA, 60 bp, Artificial
  Synthetic oligonucleotide
aatgccctatgcctattgtactccttgaagcccatgactcaccaggcctgatctcaattg

SEQ ID NO: 306762 - DNA, 55 bp, Artificial
  Synthetic oligonucleotide
aatgccctgaatgactacaattatgaaatggattactctcagtatgatggttccc

SEQ ID NO: 306763 - DNA, 60 bp, Artificial
  Synthetic oligonucleotide
aatgccgaacttctggttctcatggaaaatgagagaactctagactttcatgactcaaat

SEQ ID NO: 306764 - DNA, 58 bp, Artificial
  Synthetic oligonucleotide
aatgccgccttcattaggatatcggatgcgccgctagtttcgacggttaaatgtgagg

SEQ ID NO: 306765 - DNA, 53 bp, Artificial
  Synthetic oligonucleotide
aatgccgtagtcgcctcgatggattgctctcgagtcggctggagacgcgtaac

SEQ ID NO: 306766 - DNA, 58 bp, Artificial
  Synthetic oligonucleotide
aatgcctaagcgcgatgccccatggccccacagggcaccttcgacgaagattagccgt

SEQ ID NO: 306767 - DNA, 59 bp, Artificial
  Synthetic oligonucleotide
aatgcctacaactgcccgctgccatagttcggaatcgtgcctgccccaacgccaaatac

SEQ ID NO: 306768 - DNA, 54 bp, Artificial
  Synthetic oligonucleotide
aatgcctacaccacggggccctgtactcccctccctgcgccggactataagttc

SEQ ID NO: 306769 - DNA, 60 bp, Artificial
  Synthetic oligonucleotide
aatgcctaccgagagcacacactgaggaagcatccgaatggcacgcgagagctcgcaatt

SEQ ID NO: 306770 - DNA, 53 bp, Artificial
  Synthetic oligonucleotide
aatgcctcatggcctttcagtctgctctcgaagctctcaactcaactactcac

SEQ ID NO: 306771 - DNA, 60 bp, Artificial
  Synthetic oligonucleotide
aatgcctcttacctcacttacattatgtaaagtcagactattacactcaggccataaaga

SEQ ID NO: 306772 - DNA, 50 bp, Artificial
  Synthetic oligonucleotide
aatgcctgggtgaaagtagtagaggaaaagggttttaacccagaggtgat

SEQ ID NO: 306773 - DNA, 56 bp, Artificial
  Synthetic oligonucleotide
aatgccttacatttatgtgccaatcaaggatggtcaaattgtgaacccaacattta

SEQ ID NO: 306774 - DNA, 56 bp, Artificial
  Synthetic oligonucleotide
aatgccttatagaaaagctacccctatgggcagcagtatacgggtacccagaatac

SEQ ID NO: 306775 - DNA, 60 bp, Artificial
  Synthetic oligonucleotide
aatgccttgtggagacccaatgctctcctgaggttgtggttgaaccgtatctggatgtgg

SEQ ID NO: 306776 - DNA, 60 bp, Artificial
  Synthetic oligonucleotide
aatgcgaaaatgagtaatactataacgtatgcgacagagagtagcggcgatatccaatca

SEQ ID NO: 306777 - DNA, 55 bp, Artificial
  Synthetic oligonucleotide
aatgcgagcaggtaccgccgagccttcgggttgagtcgtcgagtgcccatgtcag

SEQ ID NO: 306778 - DNA, 60 bp, Artificial
  Synthetic oligonucleotide
aatgcgatggtgcaaatacaggttgtgttctatatatctatggataaaactttaaatcag

SEQ ID NO: 306779 - DNA, 60 bp, Artificial
  Synthetic oligonucleotide
aatgcgatgtctgaggttgtaaggctgtgaatatcctcaagttgagataacatttgtgaa

SEQ ID NO: 306780 - DNA, 60 bp, Artificial
  Synthetic oligonucleotide
aatgcgatttgctgctcacagtgagctcatggtcctatattgtggaaacatcaaactccg

SEQ ID NO: 306781 - DNA, 58 bp, Artificial
  Synthetic oligonucleotide
aatgcgcaatggggacgaggtaatacgggggcgactagtgccgcgattgcagccctta

SEQ ID NO: 306782 - DNA, 60 bp, Artificial
  Synthetic oligonucleotide
aatgcgcactggcaaaatactctgaacagcattgtgggtctaggcgtgcaaagtgtaaaa

SEQ ID NO: 306783 - DNA, 60 bp, Artificial
  Synthetic oligonucleotide
aatgcgcagtcacaacaactggagcctggtgataatcccaatatgtcctcttgaaacatc

SEQ ID NO: 306784 - DNA, 60 bp, Artificial
  Synthetic oligonucleotide
aatgcgccgaatcatgagggaatacaagcaggagtagataggttctttagaacttgcaaa

SEQ ID NO: 306785 - DNA, 56 bp, Artificial
  Synthetic oligonucleotide
aatgcgctatgagagagagacatacgttgtggagcaaagattcacttcttatgcgg

SEQ ID NO: 306786 - DNA, 60 bp, Artificial
  Synthetic oligonucleotide
aatgcgctctgagtcgagtcatcatgacgttgtaccaggcgtcgttactgtatactttgg

SEQ ID NO: 306787 - DNA, 59 bp, Artificial
  Synthetic oligonucleotide
aatgcggaacgtgcatcaacgagtgattcctttaatggaactatgatcgaattaggtcg

SEQ ID NO: 306788 - DNA, 55 bp, Artificial
  Synthetic oligonucleotide
aatgcggaattcttttcttcgtccagaaattccgtatatgaagacgttggacctg

SEQ ID NO: 306789 - DNA, 55 bp, Artificial
  Synthetic oligonucleotide
aatgcggagctaagacaatcggaagtctctaaaattccagagctagaaggtgacg

SEQ ID NO: 306790 - DNA, 55 bp, Artificial
  Synthetic oligonucleotide
aatgcggatcctccttctctcttttactcgacgcacccggttatgaccccgtatg

SEQ ID NO: 306791 - DNA, 60 bp, Artificial
  Synthetic oligonucleotide
aatgcggatcgacgtcatcaatgacgttataccatgcgtcatttgagtaaaccctaggat

SEQ ID NO: 306792 - DNA, 60 bp, Artificial
  Synthetic oligonucleotide
aatgcggatctacgtcatcaatgacgttataccaagcgtcattagaatatacctttggac

SEQ ID NO: 306793 - DNA, 60 bp, Artificial
  Synthetic oligonucleotide
aatgcggctaacatcatagtcggttatggtgagtggccttcctactgctcggattctgac

SEQ ID NO: 306794 - DNA, 56 bp, Artificial
  Synthetic oligonucleotide
aatgcgggagttggaactactggagcgaatggaggaggatgggtagttctaacgga

SEQ ID NO: 306795 - DNA, 60 bp, Artificial
  Synthetic oligonucleotide
aatgcgggtcgacatcatcaatgacgttgtaccacgcatcattgctgtacactttagggc

SEQ ID NO: 306796 - DNA, 60 bp, Artificial
  Synthetic oligonucleotide
aatgcgggtctacgtcatcaatgacgttgtaccacgcatcattactgtacacctttggac

SEQ ID NO: 306797 - DNA, 60 bp, Artificial
  Synthetic oligonucleotide
aatgcggtgtgcgacgcgtggaatcgcggccacaatcggtacagtcggccgatgcgaacg

SEQ ID NO: 306798 - DNA, 56 bp, Artificial
  Synthetic oligonucleotide
aatgcggttatctgttcatgtatagcgatccgcgtcggtacgttccggcgtaacgg

SEQ ID NO: 306799 - DNA, 60 bp, Artificial
  Synthetic oligonucleotide
aatgcgtatagctgctacactccacccttcgatgagtgatagaacagcggagctattaag

SEQ ID NO: 306800 - DNA, 55 bp, Artificial
  Synthetic oligonucleotide
aatgcgtatgcgtgaagaagatatctcggcgctggaattcggtgatatgaaagtt

SEQ ID NO: 306801 - DNA, 57 bp, Artificial
  Synthetic oligonucleotide
aatgcgtcaagtggttgacaagtatcttgtacaggataggagcagtggagaactata

SEQ ID NO: 306802 - DNA, 60 bp, Artificial
  Synthetic oligonucleotide
aatgcgtcagcagtagtctggtacaacagaagacctgttacagaaatcaatacgtgggcc

SEQ ID NO: 306803 - DNA, 60 bp, Artificial
  Synthetic oligonucleotide
aatgcgtctgtggggagtgtcctcaagtctgcgaggagtgcaaagacgatccaggagtcg

SEQ ID NO: 306804 - DNA, 60 bp, Artificial
  Synthetic oligonucleotide
aatgcgtgtgagttctggcggatcattgtagaatagcagtccacgtattactaattggta

SEQ ID NO: 306805 - DNA, 54 bp, Artificial
  Synthetic oligonucleotide
aatgcgttggggcgtgtgaacgcgtcgcctttgtttccaaggacttaagcctac

SEQ ID NO: 306806 - DNA, 60 bp, Artificial
  Synthetic oligonucleotide
aatgctaaaatcataatagtacagcttaatgagtctgtaccaattaattgcataaggccc

SEQ ID NO: 306807 - DNA, 58 bp, Artificial
  Synthetic oligonucleotide
aatgctaacagtacttggaatgctactgaagggtcacttaacactacagaaaatgacc

SEQ ID NO: 306808 - DNA, 55 bp, Artificial
  Synthetic oligonucleotide
aatgctaactccccataccggtactgggttggctattacagctaagcctgatgcc

SEQ ID NO: 306809 - DNA, 54 bp, Artificial
  Synthetic oligonucleotide
aatgctaagactgtaagttctaatcctagtatttcagttcggggatgttggcgc

SEQ ID NO: 306810 - DNA, 59 bp, Artificial
  Synthetic oligonucleotide
aatgctaagtccaccactgagattagtgttaaactgcctgacgacttgtcttctgaaaa

SEQ ID NO: 306811 - DNA, 59 bp, Artificial
  Synthetic oligonucleotide
aatgctaattagatttaagtgtggcaaaagtagggacacagtggcgcattgtattggaa

SEQ ID NO: 306812 - DNA, 59 bp, Artificial
  Synthetic oligonucleotide
aatgctacagatagtgttggtggggccatatgtgtttttgtgttgggagcttttacaca

SEQ ID NO: 306813 - DNA, 53 bp, Artificial
  Synthetic oligonucleotide
aatgctaccacaaattataactgaagcgtcggagaaatttataccgaaccgtg

SEQ ID NO: 306814 - DNA, 57 bp, Artificial
  Synthetic oligonucleotide
aatgctaccgactcggaaatcttcggctatcaagaaagatacggtgaataccgcttc

SEQ ID NO: 306815 - DNA, 55 bp, Artificial
  Synthetic oligonucleotide
aatgctactgaaacacgcgaaatcaacaacggacaacttcccaggagcaggcagt

SEQ ID NO: 306816 - DNA, 60 bp, Artificial
  Synthetic oligonucleotide
aatgctagctaaggagtaccagacacctgaactcaggaatatgtaccactggtacgttga

SEQ ID NO: 306817 - DNA, 60 bp, Artificial
  Synthetic oligonucleotide
aatgctaggagacccccactgtgatgtctttcagtatgagaattgggacctcttcataga

SEQ ID NO: 306818 - DNA, 59 bp, Artificial
  Synthetic oligonucleotide
aatgctagtaaattccaccaaggagcactcctagttgctgtcctaccagagtacgtcat

SEQ ID NO: 306819 - DNA, 50 bp, Artificial
  Synthetic oligonucleotide
aatgctagtatatagctgggaatatagtgctataagtatagcctgtaaat

SEQ ID NO: 306820 - DNA, 60 bp, Artificial
  Synthetic oligonucleotide
aatgctagtgaggtggatggtgagcctaaatacttgccatacccagatccttcacgcatt

SEQ ID NO: 306821 - DNA, 60 bp, Artificial
  Synthetic oligonucleotide
aatgctatcgggaacatcggctacgatacagaattttataactgacgctcagcttattac

SEQ ID NO: 306822 - DNA, 60 bp, Artificial
  Synthetic oligonucleotide
aatgctatgaaaaccactactatgcatgcagtaccctaacaaggcgaactgatttgaggt

SEQ ID NO: 306823 - DNA, 57 bp, Artificial
  Synthetic oligonucleotide
aatgctattacaactgtctcggaaggttttaatactatggcctcggcattgactaag

SEQ ID NO: 306824 - DNA, 60 bp, Artificial
  Synthetic oligonucleotide
aatgctattgcatgtcatgtctatgtcataccaattaccctaaaatgaacggcacatatt

SEQ ID NO: 306825 - DNA, 60 bp, Artificial
  Synthetic oligonucleotide
aatgctccagctaatactcaacaatttgagcacatagttcaattgcgccgagtactgaca

SEQ ID NO: 306826 - DNA, 60 bp, Artificial
  Synthetic oligonucleotide
aatgctccccctctgacgggataaaagagaatgtcacagcctgcaaacaagctatagtac

SEQ ID NO: 306827 - DNA, 58 bp, Artificial
  Synthetic oligonucleotide
aatgctcgccagtcctccaagtggcagcgttcgagcaagagccgccgtgctgcgaaca

SEQ ID NO: 306828 - DNA, 58 bp, Artificial
  Synthetic oligonucleotide
aatgctctggtctttactagtccagggcagttagctaattcgttagtgaattacagga

SEQ ID NO: 306829 - DNA, 60 bp, Artificial
  Synthetic oligonucleotide
aatgctctgttttgtatcagggtgtaaggatttctgcctacgcatggctagagacactaa

SEQ ID NO: 306830 - DNA, 55 bp, Artificial
  Synthetic oligonucleotide
aatgctcttactcccactggttcacccgttgtcaggcaaatagaagcgttactac

SEQ ID NO: 306831 - DNA, 60 bp, Artificial
  Synthetic oligonucleotide
aatgctgaaatcgaagatctcatcttcttggcacgatctgctctcattctcaggggatca

SEQ ID NO: 306832 - DNA, 60 bp, Artificial
  Synthetic oligonucleotide
aatgctgatgaacacatactcgaagacagacactttatcaaaaccagaccccttatcagc

SEQ ID NO: 306833 - DNA, 58 bp, Artificial
  Synthetic oligonucleotide
aatgctgatgagcacccattgagcgacgcggaaagcgatggagaaaccgaggcattaa

SEQ ID NO: 306834 - DNA, 60 bp, Artificial
  Synthetic oligonucleotide
aatgctgcagcaatagcagtaggggggtggacagatagggtcatcgaagtagcacaaaga

SEQ ID NO: 306835 - DNA, 60 bp, Artificial
  Synthetic oligonucleotide
aatgctggaactatatggacatttatatgcgcaatgcattagatggcaatcctatgtgct

SEQ ID NO: 306836 - DNA, 60 bp, Artificial
  Synthetic oligonucleotide
aatgctggccattgttcctcgtcctccatgtgaccattcacgttttctagatgtatttgc

SEQ ID NO: 306837 - DNA, 58 bp, Artificial
  Synthetic oligonucleotide
aatgctgggattctatataagagggaaactacacgtagcgcctcattttgcgggtcac

SEQ ID NO: 306838 - DNA, 55 bp, Artificial
  Synthetic oligonucleotide
aatgctggtactagtactactatccgtaactgttacgtagagaaatcgaaagttg

SEQ ID NO: 306839 - DNA, 56 bp, Artificial
  Synthetic oligonucleotide
aatgctggtgactttgttgatgttagttcaatctgaacaaggaatgaagtgtcgtc

SEQ ID NO: 306840 - DNA, 58 bp, Artificial
  Synthetic oligonucleotide
aatgctgtagcatactaccggggtcttgacgtgtccgtcataccggctagcggagacg

SEQ ID NO: 306841 - DNA, 60 bp, Artificial
  Synthetic oligonucleotide
aatgctgtcatggagaagagtgttcacaaattggactccatgctgcagcaccccatcttg

SEQ ID NO: 306842 - DNA, 55 bp, Artificial
  Synthetic oligonucleotide
aatgctgtcgcgcaagacgggttggcacttaccgaactagcgaaaaactagtttg

SEQ ID NO: 306843 - DNA, 60 bp, Artificial
  Synthetic oligonucleotide
aatgctgtcgcgtttgataacatgcgcatcatgaacgaactgtaaacgtcaaccccactg

SEQ ID NO: 306844 - DNA, 58 bp, Artificial
  Synthetic oligonucleotide
aatgctgttgcgcacccagagttagtcattgggtccacactattaagcctcttttccc

SEQ ID NO: 306845 - DNA, 59 bp, Artificial
  Synthetic oligonucleotide
aatgcttactatcggtgtggctgggagttcttactagaagttaatggcactgtcttcca

SEQ ID NO: 306846 - DNA, 56 bp, Artificial
  Synthetic oligonucleotide
aatgcttagccgccgggagggccaactcactgaaagttgacggtcagtgcgttact

SEQ ID NO: 306847 - DNA, 60 bp, Artificial
  Synthetic oligonucleotide
aatgcttatacgtttgtatgttattcaatcatgctgatgcagtaactaggacaccacgta

SEQ ID NO: 306848 - DNA, 59 bp, Artificial
  Synthetic oligonucleotide
aatgcttatactacttgcgcggcgctatagcgccgcgctagtgggtccccgcgcgaaac

SEQ ID NO: 306849 - DNA, 60 bp, Artificial
  Synthetic oligonucleotide
aatgcttcggatgccgcatcattagctgtctgttgacctcctctagcagatcttccgtcg

SEQ ID NO: 306850 - DNA, 60 bp, Artificial
  Synthetic oligonucleotide
aatgcttcgtactaataatgtattatattcaatgttgcatagtttggagaatagaataat

SEQ ID NO: 306851 - DNA, 60 bp, Artificial
  Synthetic oligonucleotide
aatgcttgatacattttcacggcatacgtcaatgtaacggtctgagcattcaatataacg

SEQ ID NO: 306852 - DNA, 60 bp, Artificial
  Synthetic oligonucleotide
aatgcttgatgaaggctggtctgcagatgaaattagggatgtggtgaataacctcagaga

SEQ ID NO: 306853 - DNA, 55 bp, Artificial
  Synthetic oligonucleotide
aatgcttggacaccttagagaccatcctcaccactaagtctataagctttaggcg

SEQ ID NO: 306854 - DNA, 57 bp, Artificial
  Synthetic oligonucleotide
aatgctttaagtggaattgatttaacgcacctacgtacaccaaggattgagccaagc

SEQ ID NO: 306855 - DNA, 54 bp, Artificial
  Synthetic oligonucleotide
aatgctttcaaccctccttggggagagattaacaaggcaggtaaatctgggtac

SEQ ID NO: 306856 - DNA, 57 bp, Artificial
  Synthetic oligonucleotide
aatggaaaaagatgcaatgagccatgcgtaatattgactgacaatcgtggaggaaaa

SEQ ID NO: 306857 - DNA, 55 bp, Artificial
  Synthetic oligonucleotide
aatggaaacatccggtgccagatttgcatttagagaaaaaacacccttgtttcta

SEQ ID NO: 306858 - DNA, 55 bp, Artificial
  Synthetic oligonucleotide
aatggaaagactcattatcacaaatgtttctcacaaaaggttggccaacaggatc

SEQ ID NO: 306859 - DNA, 54 bp, Artificial
  Synthetic oligonucleotide
aatggaaagagagtcaggttccattctccggcagttggagatcagcaggtggga

SEQ ID NO: 306860 - DNA, 55 bp, Artificial
  Synthetic oligonucleotide
aatggaaatgacttgtggatgggaagaacaatcagcaaagaatcacgctcaggtt

SEQ ID NO: 306861 - DNA, 59 bp, Artificial
  Synthetic oligonucleotide
aatggaaattctttcctcaccattgagaggtactcttgcttagaagtggatgactctat

SEQ ID NO: 306862 - DNA, 50 bp, Artificial
  Synthetic oligonucleotide
aatggaacaaatttcaccagtgcagcagtaaaagcagcctgttggtgggc

SEQ ID NO: 306863 - DNA, 55 bp, Artificial
  Synthetic oligonucleotide
aatggaacacccaacctggaaggcattgatatgaaccaggctgctggttacccat

SEQ ID NO: 306864 - DNA, 50 bp, Artificial
  Synthetic oligonucleotide
aatggaacagaactttagaacaagtaagggaaagattaagagaacacttc

SEQ ID NO: 306865 - DNA, 55 bp, Artificial
  Synthetic oligonucleotide
aatggaacagatcgttatgagtcacatcgaacacgcttcttgcctcctcaatcgc

SEQ ID NO: 306866 - DNA, 56 bp, Artificial
  Synthetic oligonucleotide
aatggaaccgtcaaggacagaagcccttatagaaccttaatgagctgccctattgg

SEQ ID NO: 306867 - DNA, 55 bp, Artificial
  Synthetic oligonucleotide
aatggaaccgtcaaggacaggagtccttatagaaccttaatgagttgccccatcg

SEQ ID NO: 306868 - DNA, 60 bp, Artificial
  Synthetic oligonucleotide
aatggaacgagaatcagaatcctcggatgtttctagcaatgataacatacatcacaagaa

SEQ ID NO: 306869 - DNA, 58 bp, Artificial
  Synthetic oligonucleotide
aatggaagggaatcctcttattaagagaggtgattggtcttcatattgtgaagtctcc

SEQ ID NO: 306870 - DNA, 60 bp, Artificial
  Synthetic oligonucleotide
aatggaagtcatccatcaaattgacattatgctgtaccactaacatttggtgcacacgtc

SEQ ID NO: 306871 - DNA, 60 bp, Artificial
  Synthetic oligonucleotide
aatggaagtctgattcatagtaatcataaggtaatgcagttagcattctaaggatctgta

SEQ ID NO: 306872 - DNA, 60 bp, Artificial
  Synthetic oligonucleotide
aatggaagtgctaaagcagagctctatgggaaattcagctcttgtgaagaaatacctata

SEQ ID NO: 306873 - DNA, 51 bp, Artificial
  Synthetic oligonucleotide
aatggaagttaatgccgacgaggtattagagactacctatgacctagccag

SEQ ID NO: 306874 - DNA, 57 bp, Artificial
  Synthetic oligonucleotide
aatggaataagaattgggtcaaggggacatgtgtttgtcataagagaaccatttgtg

SEQ ID NO: 306875 - DNA, 58 bp, Artificial
  Synthetic oligonucleotide
aatggaatatcccccttacaattggggaattgcaacgtagcaggatggatccttggca

SEQ ID NO: 306876 - DNA, 57 bp, Artificial
  Synthetic oligonucleotide
aatggaatgaggctgttagagcgttgtttagatatttagaaccagtggatataaacg

SEQ ID NO: 306877 - DNA, 58 bp, Artificial
  Synthetic oligonucleotide
aatggaatgtccacatactattgggttgggtcaaggccttgttgtaggatcagtggaa

SEQ ID NO: 306878 - DNA, 55 bp, Artificial
  Synthetic oligonucleotide
aatggacactgaatctagcaatggcactgtatctgacatactctatcctgagtgt

SEQ ID NO: 306879 - DNA, 54 bp, Artificial
  Synthetic oligonucleotide
aatggacagatgactgggcagtatgtgcagtagacataccagacgcagcatgtc

SEQ ID NO: 306880 - DNA, 55 bp, Artificial
  Synthetic oligonucleotide
aatggacccgatcagcgcgtatgcgcagcggttctccggcggcaagtacgaatgg

SEQ ID NO: 306881 - DNA, 58 bp, Artificial
  Synthetic oligonucleotide
aatggacgaattcagacagcaaagttaaagtgagggcacaggcgccttttgttagctc

SEQ ID NO: 306882 - DNA, 54 bp, Artificial
  Synthetic oligonucleotide
aatggacgaccctgagagagaagtgttacagtggaagtttgacagccgtctagc

SEQ ID NO: 306883 - DNA, 50 bp, Artificial
  Synthetic oligonucleotide
aatggacgctagaactgttggaagcgcttaaacaagaagctgttagacac

SEQ ID NO: 306884 - DNA, 60 bp, Artificial
  Synthetic oligonucleotide
aatggactgaggaagcagaaattgcatttcactatgcattattagcagacgaagatagta

SEQ ID NO: 306885 - DNA, 59 bp, Artificial
  Synthetic oligonucleotide
aatggacttgcagtcatctaaaaaggaattgtttattcaatgggatgtgtgtcaaacaa

SEQ ID NO: 306886 - DNA, 60 bp, Artificial
  Synthetic oligonucleotide
aatggagaagacgcaactgctggtctcactcatttgatgatctggcattccaacctgaat

SEQ ID NO: 306887 - DNA, 56 bp, Artificial
  Synthetic oligonucleotide
aatggagaccgttaacacaatatttggtcagtaccggatcgtgccaatattactta

SEQ ID NO: 306888 - DNA, 60 bp, Artificial
  Synthetic oligonucleotide
aatggagagattacattggtgagtcaaatcaatgaattgccatcgcgcgtatcaacactg

SEQ ID NO: 306889 - DNA, 55 bp, Artificial
  Synthetic oligonucleotide
aatggagaggccgacccatggcaacttcccacggtggatgacgtcggcgacaacg

SEQ ID NO: 306890 - DNA, 55 bp, Artificial
  Synthetic oligonucleotide
aatggagatgacgtgtggatgggaagaacgatcagcaaggatttacgctcaggtt

SEQ ID NO: 306891 - DNA, 57 bp, Artificial
  Synthetic oligonucleotide
aatggagccgctatacaaccagttgaggggttaattcgtggcccgactccagcagag

SEQ ID NO: 306892 - DNA, 60 bp, Artificial
  Synthetic oligonucleotide
aatggaggagccatcattcccagtcaaatgactaattgtaaccgacatgctgttaatttc

SEQ ID NO: 306893 - DNA, 58 bp, Artificial
  Synthetic oligonucleotide
aatggaggatattaggacgctatggaaagtaacatttgacctgttatatgataacaac

SEQ ID NO: 306894 - DNA, 58 bp, Artificial
  Synthetic oligonucleotide
aatggagtacaaaattattttactcctccagctaaagggaatgctatgactgttgaca

SEQ ID NO: 306895 - DNA, 55 bp, Artificial
  Synthetic oligonucleotide
aatggagtcagagacgttgactatatggacagaattccccttgcaacgtcagaag

SEQ ID NO: 306896 - DNA, 56 bp, Artificial
  Synthetic oligonucleotide
aatggagtcttggcccaaggaaagaaaatgattaggccgcaacccatggaacacaa

SEQ ID NO: 306897 - DNA, 59 bp, Artificial
  Synthetic oligonucleotide
aatggagttcttctggacaattttaaaaccaaatgatgcaatcaacttcgagagcaatg

SEQ ID NO: 306898 - DNA, 60 bp, Artificial
  Synthetic oligonucleotide
aatggatagccagcgcggtattgcgtctgattggcgactttacgcactccgtaaatctgc

SEQ ID NO: 306899 - DNA, 60 bp, Artificial
  Synthetic oligonucleotide
aatggatataaccacgagttatacatatatgttatcagacgaaatctatgtagcgaacgt

SEQ ID NO: 306900 - DNA, 60 bp, Artificial
  Synthetic oligonucleotide
aatggatatagctgaagagcataccataaataagttcgagtaactgcagtcacgaccgtg

SEQ ID NO: 306901 - DNA, 60 bp, Artificial
  Synthetic oligonucleotide
aatggatgaacacgggtgatggcaagattggtgacattaagaagggagcgctgtatctag

SEQ ID NO: 306902 - DNA, 55 bp, Artificial
  Synthetic oligonucleotide
aatggatgcgttcttatgatcctgccactgaaggctacactgctgggtgcgcgcc

SEQ ID NO: 306903 - DNA, 60 bp, Artificial
  Synthetic oligonucleotide
aatggatggaagcgaatgattattacccggccagataccaatctcacatgacaatgggtc

SEQ ID NO: 306904 - DNA, 55 bp, Artificial
  Synthetic oligonucleotide
aatggatgtatctgtcacaatgtaactcactgtcaaatttgtcacgggattcccc

SEQ ID NO: 306905 - DNA, 59 bp, Artificial
  Synthetic oligonucleotide
aatggatgtcaatccgaccttacttttcttaaaagtgccagcacaaaatgctataagca

SEQ ID NO: 306906 - DNA, 60 bp, Artificial
  Synthetic oligonucleotide
aatggatgtcaatccgactctacttttcttgaaagtgccagcgcaaaatgccataagtac

SEQ ID NO: 306907 - DNA, 59 bp, Artificial
  Synthetic oligonucleotide
aatggattgatggtttggtgtattgagaatgggacttcaccaaacattaatggctactg

SEQ ID NO: 306908 - DNA, 56 bp, Artificial
  Synthetic oligonucleotide
aatggcaaaaacctcacaaatgccataaatactgcactcactctgcaggaaatggg

SEQ ID NO: 306909 - DNA, 50 bp, Artificial
  Synthetic oligonucleotide
aatggcaaaggtgcaaaagttaacacaaggacagtggagttaccaaatag

SEQ ID NO: 306910 - DNA, 55 bp, Artificial
  Synthetic oligonucleotide
aatggcaaattcactggattgggaatctatgacaaacttatggtattacccacac

SEQ ID NO: 306911 - DNA, 60 bp, Artificial
  Synthetic oligonucleotide
aatggcaacgctgttctcggtgtgatgactagtattgaaggagctttacagcctaacgag

SEQ ID NO: 306912 - DNA, 52 bp, Artificial
  Synthetic oligonucleotide
aatggcaagaccttttggatctgctacatatcgtattcaaaaatatcctgga

SEQ ID NO: 306913 - DNA, 55 bp, Artificial
  Synthetic oligonucleotide
aatggcaagactagggaaaggatacatgttcgaaagcaagagtatgaagcttcgt

SEQ ID NO: 306914 - DNA, 55 bp, Artificial
  Synthetic oligonucleotide
aatggcaagactagggaaggggtacatgttcgaaagtaagagcatgaagcttaga

SEQ ID NO: 306915 - DNA, 51 bp, Artificial
  Synthetic oligonucleotide
aatggcaatacacattgccttaccttgttaacacaatacacttcggcctgt

SEQ ID NO: 306916 - DNA, 59 bp, Artificial
  Synthetic oligonucleotide
aatggcaatggtccgcgtagacgacgagtctctcggaggcgggttgttgcaagaacgca

SEQ ID NO: 306917 - DNA, 60 bp, Artificial
  Synthetic oligonucleotide
aatggcacacagcctggtcctacatcagatacaatcccctcacagacaaaggcataggaa

SEQ ID NO: 306918 - DNA, 60 bp, Artificial
  Synthetic oligonucleotide
aatggcacagtgaaggaccgaagtccctatagaactctgatgagtgtagaaatagggcag

SEQ ID NO: 306919 - DNA, 55 bp, Artificial
  Synthetic oligonucleotide
aatggcactaggattgcagccccgaattcatcagcaacaaccttaagatcagggg

SEQ ID NO: 306920 - DNA, 55 bp, Artificial
  Synthetic oligonucleotide
aatggcactgtatctgacatactctatcctgagtgtcaccttaactctcctatcg

SEQ ID NO: 306921 - DNA, 50 bp, Artificial
  Synthetic oligonucleotide
aatggcagacagagggctattgagagacatcagagccaagacggcctatg

SEQ ID NO: 306922 - DNA, 55 bp, Artificial
  Synthetic oligonucleotide
aatggcagcggcccgacatttgcaatggcgtcaagatggccttatcaccgctgcc

SEQ ID NO: 306923 - DNA, 51 bp, Artificial
  Synthetic oligonucleotide
aatggcaggtcctcccctgctcattcacaacgctgcccgccctgtcaactg

SEQ ID NO: 306924 - DNA, 55 bp, Artificial
  Synthetic oligonucleotide
aatggcagtctggcaaattgttcggacattcttatgaaagtaccactttgcaagg

SEQ ID NO: 306925 - DNA, 56 bp, Artificial
  Synthetic oligonucleotide
aatggcagtgattttcttacaactgtcaaagtccgaggttctaataacttaattga

SEQ ID NO: 306926 - DNA, 60 bp, Artificial
  Synthetic oligonucleotide
aatggcataataatagacactgtcaaaagctggagaaacaatatattgaggacacaggaa

SEQ ID NO: 306927 - DNA, 59 bp, Artificial
  Synthetic oligonucleotide
aatggcatattatggaataaccaaatttttgtaactgtagcagataatacacgcaatac

SEQ ID NO: 306928 - DNA, 60 bp, Artificial
  Synthetic oligonucleotide
aatggcatctcgcctgcgtgggagacgggagccccctgtggccgactccactacctcgca

SEQ ID NO: 306929 - DNA, 60 bp, Artificial
  Synthetic oligonucleotide
aatggcatgcatcacaatgaacatgcaacacgctcaaaccctaacaacggaaaaattaca

SEQ ID NO: 306930 - DNA, 60 bp, Artificial
  Synthetic oligonucleotide
aatggcatgcatgattaatcacacagattttctgctgaggggtccatttgaggcgagatg

SEQ ID NO: 306931 - DNA, 60 bp, Artificial
  Synthetic oligonucleotide
aatggcatgccttgagaagtaggttgagcaagaatgcgcccaattacgttgtaccctcag

SEQ ID NO: 306932 - DNA, 60 bp, Artificial
  Synthetic oligonucleotide
aatggcatgtgctggggcaatcgggtcttcctgacagtggtggacaccacgcgcagcaca

SEQ ID NO: 306933 - DNA, 59 bp, Artificial
  Synthetic oligonucleotide
aatggcattagacgcccgaaacatctgtatgtgtctatgccaacagcccagtctactat

SEQ ID NO: 306934 - DNA, 56 bp, Artificial
  Synthetic oligonucleotide
aatggccaaaactttgccaaaggattttaaggtggcagtgcaaaagcatgttgaaa

SEQ ID NO: 306935 - DNA, 51 bp, Artificial
  Synthetic oligonucleotide
aatggccacacagtctcggggcggatattcgcaagcgacctgccgggaacg

SEQ ID NO: 306936 - DNA, 60 bp, Artificial
  Synthetic oligonucleotide
aatggccagaaagttttatgataattcaatgagtgagggtagattgctgacattcgctca

SEQ ID NO: 306937 - DNA, 50 bp, Artificial
  Synthetic oligonucleotide
aatggccattaactaaaacatcttatcacttcccccaagctattggagtg

SEQ ID NO: 306938 - DNA, 58 bp, Artificial
  Synthetic oligonucleotide
aatggcccaacgtacatctgaatgtgcgtctaatttatgggtagttccagcttttaga

SEQ ID NO: 306939 - DNA, 60 bp, Artificial
  Synthetic oligonucleotide
aatggcccatgagataattgtgtggacccagtgctcgtgcccacatcgtcttgcccgtcc

SEQ ID NO: 306940 - DNA, 60 bp, Artificial
  Synthetic oligonucleotide
aatggcccttcacactattactcctgctgagagtgttcttgcccaattttcttcagaaga

SEQ ID NO: 306941 - DNA, 58 bp, Artificial
  Synthetic oligonucleotide
aatggccgcgcagcggcactcaccacgttctcggaagcccattcctcaagttctccgg

SEQ ID NO: 306942 - DNA, 58 bp, Artificial
  Synthetic oligonucleotide
aatggccggttgtggtgctctaatatcttgaaatagaggggattttgaatctcccaga

SEQ ID NO: 306943 - DNA, 57 bp, Artificial
  Synthetic oligonucleotide
aatggcctaataccttcgatcgaagtaaggatacattatacagagtacaagcggaaa

SEQ ID NO: 306944 - DNA, 55 bp, Artificial
  Synthetic oligonucleotide
aatggccttgccttttattgcgttccagattctccaaccagggtttctagttgta

SEQ ID NO: 306945 - DNA, 55 bp, Artificial
  Synthetic oligonucleotide
aatggccttggtatgtgtggctacttattggactagtagtaatattctgcatacc

SEQ ID NO: 306946 - DNA, 59 bp, Artificial
  Synthetic oligonucleotide
aatggcgaaaagtagtagaagagcaaactattaacaatttgcatatcgcatacaaatat

SEQ ID NO: 306947 - DNA, 51 bp, Artificial
  Synthetic oligonucleotide
aatggcgacgcaatcggctatgatacactggttattaatggtatatatagc

SEQ ID NO: 306948 - DNA, 57 bp, Artificial
  Synthetic oligonucleotide
aatggcgccacatggcaggtacgtcaaaaattagccgttcggctaatttctctcctc

SEQ ID NO: 306949 - DNA, 55 bp, Artificial
  Synthetic oligonucleotide
aatggcgccgttatacggcgccgtaatctccggaggatcacactcgcccgggaac

SEQ ID NO: 306950 - DNA, 56 bp, Artificial
  Synthetic oligonucleotide
aatggcgggcccccgaagatctgtcgctactccacggggtgggtcgaggatcacaa

SEQ ID NO: 306951 - DNA, 60 bp, Artificial
  Synthetic oligonucleotide
aatggcgtggatacgcggtctgatcagatcgacgcgagtgtcatgaccgatctccactgt

SEQ ID NO: 306952 - DNA, 60 bp, Artificial
  Synthetic oligonucleotide
aatggcgtggttatccagcgcagcccaggctcagcatgtcaagcattgtgctcaaatggt

SEQ ID NO: 306953 - DNA, 59 bp, Artificial
  Synthetic oligonucleotide
aatggctaccgtacgcattccaaaggtccgatagtggttcattgcaacagtgggctcga

SEQ ID NO: 306954 - DNA, 55 bp, Artificial
  Synthetic oligonucleotide
aatggctacgcagaagtaaacgcggtgacccaattgctgtcaccttatacccgcc

SEQ ID NO: 306955 - DNA, 60 bp, Artificial
  Synthetic oligonucleotide
aatggctcacattgcaaccctcactgctgcgctattcgggtgtgatgcgtgctaacgcct

SEQ ID NO: 306956 - DNA, 58 bp, Artificial
  Synthetic oligonucleotide
aatggctcaccttggtgagattgggtacatgtaagctccggaaatgtctatggggtta

SEQ ID NO: 306957 - DNA, 56 bp, Artificial
  Synthetic oligonucleotide
aatggctcataagcatgaaagcggtgagaattacgacacggcaacggcggaaaacg

SEQ ID NO: 306958 - DNA, 52 bp, Artificial
  Synthetic oligonucleotide
aatggctcatgctggtatggtttacttttgcgctcaaattgctagagcaaag

SEQ ID NO: 306959 - DNA, 51 bp, Artificial
  Synthetic oligonucleotide
aatggctgaccactgcacttgggcgacacgacacgcctagcgataaggaag

SEQ ID NO: 306960 - DNA, 60 bp, Artificial
  Synthetic oligonucleotide
aatggctgagtttatgccgccagacggagactggagcagttcactgattacaggctgacc

SEQ ID NO: 306961 - DNA, 60 bp, Artificial
  Synthetic oligonucleotide
aatggctgagtttatgccgccagcggtagacagaactgtctagcgactgggctggtgccg

SEQ ID NO: 306962 - DNA, 58 bp, Artificial
  Synthetic oligonucleotide
aatggctgagttttccacgcccgtccgcagcgagggagcgacggaggagctcccgagc

SEQ ID NO: 306963 - DNA, 56 bp, Artificial
  Synthetic oligonucleotide
aatggctgagttttccacgcccgtccgcggagagggagccacggaggtgatcccga

SEQ ID NO: 306964 - DNA, 55 bp, Artificial
  Synthetic oligonucleotide
aatggctggcagattttcacttatatcactagttccgtcgaatgatgactatcag

SEQ ID NO: 306965 - DNA, 53 bp, Artificial
  Synthetic oligonucleotide
aatggcttccgtgcctctcactatctagatgatgagggtaaacttagagggct

SEQ ID NO: 306966 - DNA, 60 bp, Artificial
  Synthetic oligonucleotide
aatggcttgtttgactatgaatatgcaaaacgtgcagactttaactacagaggaattaca

SEQ ID NO: 306967 - DNA, 58 bp, Artificial
  Synthetic oligonucleotide
aatggctttacccatgactactgatcctaatggacccgttaaagcattcatggtgttg

SEQ ID NO: 306968 - DNA, 60 bp, Artificial
  Synthetic oligonucleotide
aatggctttgatggaaccccagtatgtttagatagcaagcataaaaatccaatgcaaata

SEQ ID NO: 306969 - DNA, 60 bp, Artificial
  Synthetic oligonucleotide
aatgggaaaagtactgtgttctcgaaataggagatatgcttctgaggactgcaataggcc

SEQ ID NO: 306970 - DNA, 52 bp, Artificial
  Synthetic oligonucleotide
aatgggaaaattcctagtggattgggcgatattaaggattttcttcccgtta

SEQ ID NO: 306971 - DNA, 57 bp, Artificial
  Synthetic oligonucleotide
aatgggaaagaatattacgaaatggctggcagattttcacttatatcactagttccg

SEQ ID NO: 306972 - DNA, 56 bp, Artificial
  Synthetic oligonucleotide
aatgggaaattaggcctgggcacagatcttacccatggtctgaaggagggtattct

SEQ ID NO: 306973 - DNA, 57 bp, Artificial
  Synthetic oligonucleotide
aatgggacacttcctcttgaacccagaagggagattggacatcgcagaataaagcgt

SEQ ID NO: 306974 - DNA, 60 bp, Artificial
  Synthetic oligonucleotide
aatgggacaggaccatgccataatgttagcacagtacaatgtacacatgggattaagcca

SEQ ID NO: 306975 - DNA, 58 bp, Artificial
  Synthetic oligonucleotide
aatgggacccaagacctccaagattcccagagagaatctggaggtgactgggcactcc

SEQ ID NO: 306976 - DNA, 56 bp, Artificial
  Synthetic oligonucleotide
aatgggacccagaaatctccttagcttccaaaagagaagcaggagaaaactggctc

SEQ ID NO: 306977 - DNA, 55 bp, Artificial
  Synthetic oligonucleotide
aatgggaccgacaatccctaattatgtttatcactgcattcttgaatattgccct

SEQ ID NO: 306978 - DNA, 56 bp, Artificial
  Synthetic oligonucleotide
aatgggactatacatgacagaagcccgtttagggcgttgataagctgggaaatggg

SEQ ID NO: 306979 - DNA, 60 bp, Artificial
  Synthetic oligonucleotide
aatgggagatgattctgttgagggatgggttaatgatgcccctaggaaatattcagcgct

SEQ ID NO: 306980 - DNA, 60 bp, Artificial
  Synthetic oligonucleotide
aatgggaggtacatgatggcaatcaggtgattgtttctcctgcacccatatctagcacca

SEQ ID NO: 306981 - DNA, 60 bp, Artificial
  Synthetic oligonucleotide
aatgggaggtgcactatagatggcctcttgcagggcaccacacaactcgtgtcctgtaat

SEQ ID NO: 306982 - DNA, 60 bp, Artificial
  Synthetic oligonucleotide
aatgggatatcttcatagaacgacccactgctgtggacacttgctacccatttgatgtgc

SEQ ID NO: 306983 - DNA, 59 bp, Artificial
  Synthetic oligonucleotide
aatgggatatgaaggacgtgaaatatcaagagcacatgcttcacaatatctcaattatt

SEQ ID NO: 306984 - DNA, 57 bp, Artificial
  Synthetic oligonucleotide
aatgggatgtggacaaatctttgttacaatccttgtccatgacgtttttcctacata

SEQ ID NO: 306985 - DNA, 60 bp, Artificial
  Synthetic oligonucleotide
aatgggattcggaaaccaaagcatctttacatctctatgccaactgcacaatccacgatg

SEQ ID NO: 306986 - DNA, 59 bp, Artificial
  Synthetic oligonucleotide
aatgggcaaacctctagagcagcctgacgctacgccggagtgcgacgagcgatgtataa

SEQ ID NO: 306987 - DNA, 51 bp, Artificial
  Synthetic oligonucleotide
aatgggcagggattaatgagaattgctggacccattacagccaaagttccg

SEQ ID NO: 306988 - DNA, 59 bp, Artificial
  Synthetic oligonucleotide
aatgggcatctggtttctacatcaactcatttggagtataaacaataaactcacctgga

SEQ ID NO: 306989 - DNA, 60 bp, Artificial
  Synthetic oligonucleotide
aatgggccagatctgttacgcatactatactgatactacgatttcacagggcaaagtaga

SEQ ID NO: 306990 - DNA, 56 bp, Artificial
  Synthetic oligonucleotide
aatgggcccactattataaagggatacactgtcgaacagattggtaagatagcccg

SEQ ID NO: 306991 - DNA, 52 bp, Artificial
  Synthetic oligonucleotide
aatgggcctaagccacataggaatgcaagtagtgccaccattaaaggtgtcc

SEQ ID NO: 306992 - DNA, 56 bp, Artificial
  Synthetic oligonucleotide
aatgggcctcggaataatgagacgcccctacacctggacctcaaggctctccgtcg

SEQ ID NO: 306993 - DNA, 57 bp, Artificial
  Synthetic oligonucleotide
aatgggcctgttggatgtcggcctcgaccaatggaaaccctccctcatcgcttaaca

SEQ ID NO: 306994 - DNA, 60 bp, Artificial
  Synthetic oligonucleotide
aatgggcgattgtcctactctaaaagagtatgatgattcggccttcttcaacatattgga

SEQ ID NO: 306995 - DNA, 55 bp, Artificial
  Synthetic oligonucleotide
aatgggcgcaacctaaaatttcttgggatgtgactgcggctgacttattgaaatt

SEQ ID NO: 306996 - DNA, 60 bp, Artificial
  Synthetic oligonucleotide
aatgggcgccgagtggagagtgcgtaattgtataaacgttgccaatggcataatctgtcg

SEQ ID NO: 306997 - DNA, 58 bp, Artificial
  Synthetic oligonucleotide
aatgggcgtagatgaatactccagcgcggagagggtagtggtgagcattgaccgtttt

SEQ ID NO: 306998 - DNA, 55 bp, Artificial
  Synthetic oligonucleotide
aatgggctcctaggcaggttttcagctctatgatgtaacacatgcgctgttcccc

SEQ ID NO: 306999 - DNA, 54 bp, Artificial
  Synthetic oligonucleotide
aatgggctcttcccgactatgctggccagttcacccacaacatgaacttagccc

SEQ ID NO: 307000 - DNA, 55 bp, Artificial
  Synthetic oligonucleotide
aatgggctgactacgtgggcaccgccgcacccatccagcttcaggtggccgagta

SEQ ID NO: 307001 - DNA, 59 bp, Artificial
  Synthetic oligonucleotide
aatgggctgccatttcgactagacggggagcacctttgtcgatattagctaggcgagaa

SEQ ID NO: 307002 - DNA, 60 bp, Artificial
  Synthetic oligonucleotide
aatgggctgtccaacgaatgaatgctatactccaaggcataactgaaatgccggatggag

SEQ ID NO: 307003 - DNA, 53 bp, Artificial
  Synthetic oligonucleotide
aatggggaaacggcaggtggtcctttgaatacggaccagaatggcgtagactg

SEQ ID NO: 307004 - DNA, 60 bp, Artificial
  Synthetic oligonucleotide
aatggggaagtacaatctaatcttgtcagaatatctctcattcatttacaactcacaatc

SEQ ID NO: 307005 - DNA, 60 bp, Artificial
  Synthetic oligonucleotide
aatggggaatggagatgagacgttgcctcctacagtcgctacagcagatcgagagcatga

SEQ ID NO: 307006 - DNA, 55 bp, Artificial
  Synthetic oligonucleotide
aatggggacaacacatggctagggaggactatcagtcccagatctaggagtgggt

SEQ ID NO: 307007 - DNA, 59 bp, Artificial
  Synthetic oligonucleotide
aatggggactatgcaagactttacatatggggagtccaccatccttcaaccgacacaga

SEQ ID NO: 307008 - DNA, 55 bp, Artificial
  Synthetic oligonucleotide
aatggggatcgacgtcatctatgacgttataccacgcgtcgtttgaaaagacttt

SEQ ID NO: 307009 - DNA, 52 bp, Artificial
  Synthetic oligonucleotide
aatggggcaacaccagtccgggcaagagaagcgcatgcacaaatgaaggcgg

SEQ ID NO: 307010 - DNA, 55 bp, Artificial
  Synthetic oligonucleotide
aatggggcaagcaccgagtccatacaatatcagagtagaatgtgttggatggtcc

SEQ ID NO: 307011 - DNA, 60 bp, Artificial
  Synthetic oligonucleotide
aatggggcaagcgaaacacgctgtggctgttcggacatgcgaccaccggcaagaccaaca

SEQ ID NO: 307012 - DNA, 53 bp, Artificial
  Synthetic oligonucleotide
aatggggcggtactactctgcgttcccaggtcattcgaaacccctgttcgggc

SEQ ID NO: 307013 - DNA, 60 bp, Artificial
  Synthetic oligonucleotide
aatgggggagggacgcttggctactgaccgagtgcagctacgagacatatagtgccccgc

SEQ ID NO: 307014 - DNA, 52 bp, Artificial
  Synthetic oligonucleotide
aatggggggatattctagagggaacaactgcatcatgtcagaacagaggagc

SEQ ID NO: 307015 - DNA, 60 bp, Artificial
  Synthetic oligonucleotide
aatgggggtacatcagccttacatgatggaagacgacacaatcataacaaacactcgtaa

SEQ ID NO: 307016 - DNA, 56 bp, Artificial
  Synthetic oligonucleotide
aatggggtaaagaaatggtagaccatttccacctaggagatgatatggacccagaa

SEQ ID NO: 307017 - DNA, 58 bp, Artificial
  Synthetic oligonucleotide
aatggggtaaagaaatggttgaccactttcacttgggtgatgatatggatcctgagct

SEQ ID NO: 307018 - DNA, 60 bp, Artificial
  Synthetic oligonucleotide
aatggggtcatcttgcacagttggcgacccaggaatggcacgctctgaggcttgtggtta

SEQ ID NO: 307019 - DNA, 57 bp, Artificial
  Synthetic oligonucleotide
aatggggtggacttgccctgttcaggggtgtatgtattcccgctccacttggagcaa

SEQ ID NO: 307020 - DNA, 53 bp, Artificial
  Synthetic oligonucleotide
aatggggttgcgttaggaacgtttaagtaataatgaacattggtcactcgacg

SEQ ID NO: 307021 - DNA, 58 bp, Artificial
  Synthetic oligonucleotide
aatgggtaacagtatattatggcacacctaaatggcacccagcaagaacgcatctttt

SEQ ID NO: 307022 - DNA, 52 bp, Artificial
  Synthetic oligonucleotide
aatgggtccacgcatactgttcctccgaacaccagcacagatagcaaaatag

SEQ ID NO: 307023 - DNA, 60 bp, Artificial
  Synthetic oligonucleotide
aatgggtccatgaagattatcggtcctaggacctgcagcaacgtctggcatggcaggttt

SEQ ID NO: 307024 - DNA, 58 bp, Artificial
  Synthetic oligonucleotide
aatgggtctgaggatcagttcatcctttagctttggaggcttcaccttcaaaagaaca

SEQ ID NO: 307025 - DNA, 53 bp, Artificial
  Synthetic oligonucleotide
aatgggtctgctctgctcagcaggttgcagtctccacctcggctaatccggcc

SEQ ID NO: 307026 - DNA, 57 bp, Artificial
  Synthetic oligonucleotide
aatgggtgcacaagtgtcttcccagaaggttggagcccacgaaaacaccaatgtagc

SEQ ID NO: 307027 - DNA, 53 bp, Artificial
  Synthetic oligonucleotide
aatgggtggcaagtgggcaaaaggtagtgtacttagatggcaggctgtaaggg

SEQ ID NO: 307028 - DNA, 55 bp, Artificial
  Synthetic oligonucleotide
aatgggtggcccaggcgaagcgtagcatgtacacccaactacccgaccgtgaggg

SEQ ID NO: 307029 - DNA, 50 bp, Artificial
  Synthetic oligonucleotide
aatgggtggtttcccctccgccccgccaaggtccaaatcccctatcccgc

SEQ ID NO: 307030 - DNA, 60 bp, Artificial
  Synthetic oligonucleotide
aatgggttaagtgagtcattgtgatattacctaaaacgcatatagctatctttgtgtatg

SEQ ID NO: 307031 - DNA, 53 bp, Artificial
  Synthetic oligonucleotide
aatgggtttcaagagagtccccctggggtactctctttgcgcctatccgaacc

SEQ ID NO: 307032 - DNA, 60 bp, Artificial
  Synthetic oligonucleotide
aatggtaagaaggcccgatagcataggcaaagacagcacaacactactgagcatgctcaa

SEQ ID NO: 307033 - DNA, 50 bp, Artificial
  Synthetic oligonucleotide
aatggtaagatcctattggtcctccataaagcgggcaccgtattaatatt

SEQ ID NO: 307034 - DNA, 54 bp, Artificial
  Synthetic oligonucleotide
aatggtacacagctggtaaacccccaaaggagatagccatccgagtaagggaac

SEQ ID NO: 307035 - DNA, 55 bp, Artificial
  Synthetic oligonucleotide
aatggtacgaatatacctggagcgcaatctcctcatccatgtgagatggacacgg

SEQ ID NO: 307036 - DNA, 60 bp, Artificial
  Synthetic oligonucleotide
aatggtagaaatgaccattgagcagatggtctcatatgctggaggtgattataatggagt

SEQ ID NO: 307037 - DNA, 59 bp, Artificial
  Synthetic oligonucleotide
aatggtagagcagtattaaatgagatcactagaacatttaattgtccagtcgaacgtta

SEQ ID NO: 307038 - DNA, 58 bp, Artificial
  Synthetic oligonucleotide
aatggtaggaacaatagtaatgatagggacaatagtgagtatagattaataaattgta

SEQ ID NO: 307039 - DNA, 59 bp, Artificial
  Synthetic oligonucleotide
aatggtagggtgggtttgcatcttcctcgtggtccttactactgcaactgctggattga

SEQ ID NO: 307040 - DNA, 56 bp, Artificial
  Synthetic oligonucleotide
aatggtatccacagtcgattttatacccccaatggcttcactggaagagaaaggcg

SEQ ID NO: 307041 - DNA, 52 bp, Artificial
  Synthetic oligonucleotide
aatggtcaatgttcccgaaggaacaaccgcgttctacccaaaatactaccca

SEQ ID NO: 307042 - DNA, 55 bp, Artificial
  Synthetic oligonucleotide
aatggtcagtcgtgtctttcacacgccgatgtcttacaagatgtcgaggtaccct

SEQ ID NO: 307043 - DNA, 55 bp, Artificial
  Synthetic oligonucleotide
aatggtccccatgggagcccttcagcctggtcttccctctcctgtagccatcccc

SEQ ID NO: 307044 - DNA, 50 bp, Artificial
  Synthetic oligonucleotide
aatggtccgttaaagccttaaagtacgaaccaggcaaattgcgttccatc

SEQ ID NO: 307045 - DNA, 55 bp, Artificial
  Synthetic oligonucleotide
aatggtcctacatcgtcgaaagaccatcggctgttaatggattgtgttaccccgg

SEQ ID NO: 307046 - DNA, 60 bp, Artificial
  Synthetic oligonucleotide
aatggtcctcagatgctactcatgccttttggatttcagaggggtcacaggcatggaatt

SEQ ID NO: 307047 - DNA, 53 bp, Artificial
  Synthetic oligonucleotide
aatggtcgcctacgggttgtccgtctccgacatggtggcggccacgggtaagg

SEQ ID NO: 307048 - DNA, 55 bp, Artificial
  Synthetic oligonucleotide
aatggtcgtatttaatcgaagatcctaatgcccctcacaaactctgctacccggg

SEQ ID NO: 307049 - DNA, 59 bp, Artificial
  Synthetic oligonucleotide
aatggtctaggatgcccagctccgataaccaagtggtggtgtgatttccaccgattctc

SEQ ID NO: 307050 - DNA, 51 bp, Artificial
  Synthetic oligonucleotide
aatggtctatatggaataaacccagctgacactattggcaacttgtgtgtc

SEQ ID NO: 307051 - DNA, 52 bp, Artificial
  Synthetic oligonucleotide
aatggtcttacaagccgtcctctcgtattccggccccaagctcgtccacttc

SEQ ID NO: 307052 - DNA, 59 bp, Artificial
  Synthetic oligonucleotide
aatggtgaaaaatgcgaataagggaattgcggttgattattcaacgcgatccggcatgc

SEQ ID NO: 307053 - DNA, 52 bp, Artificial
  Synthetic oligonucleotide
aatggtgagccaccggaacctaacgccaaagtaattttggtcgacggtgttc

SEQ ID NO: 307054 - DNA, 60 bp, Artificial
  Synthetic oligonucleotide
aatggtgataagcaccacatctggatgtggtgcgtagcaccattttcataacattagttt

SEQ ID NO: 307055 - DNA, 60 bp, Artificial
  Synthetic oligonucleotide
aatggtgatagacgagaatatacaaaaactggattgttatagcctagctgcaacagacca

SEQ ID NO: 307056 - DNA, 60 bp, Artificial
  Synthetic oligonucleotide
aatggtgcagtctgacccgcagacatggggttggtgtcgaattctagtgctctcatagtc

SEQ ID NO: 307057 - DNA, 60 bp, Artificial
  Synthetic oligonucleotide
aatggtgcattcatagccccagatagagccacctttctccgctctaatgccccatcggga

SEQ ID NO: 307058 - DNA, 60 bp, Artificial
  Synthetic oligonucleotide
aatggtgccatcaaagctctggtgacaattaatatggaagatcatgaaatagaatttttg

SEQ ID NO: 307059 - DNA, 60 bp, Artificial
  Synthetic oligonucleotide
aatggtgcggagtgggatgtcttcatagagcgacccaccgctgtggacacttgttaccca

SEQ ID NO: 307060 - DNA, 58 bp, Artificial
  Synthetic oligonucleotide
aatggtgggtagctccgcgtggcgaggcgaagtcctcactgctgaccaaggtcgggcc

SEQ ID NO: 307061 - DNA, 55 bp, Artificial
  Synthetic oligonucleotide
aatggtgtcacattagatgttgattgtgtgattgattttgggctgaaagtagtcg

SEQ ID NO: 307062 - DNA, 55 bp, Artificial
  Synthetic oligonucleotide
aatggtgtctggttcttggtacaagatctcaggattgttagcgaaggggctatgc

SEQ ID NO: 307063 - DNA, 56 bp, Artificial
  Synthetic oligonucleotide
aatggtgtgctactcgccaaatcagggctggacattatccaaggatggaagggtca

SEQ ID NO: 307064 - DNA, 56 bp, Artificial
  Synthetic oligonucleotide
aatggtgttaagttggagggtgacgccagacagacccatttctcgcggactttcga

SEQ ID NO: 307065 - DNA, 55 bp, Artificial
  Synthetic oligonucleotide
aatggtgttacatttagagtctttaaaggactcaccttatggcacagaggattgg

SEQ ID NO: 307066 - DNA, 60 bp, Artificial
  Synthetic oligonucleotide
aatggtgttccaggccagcataaccagagtgccgtacttcgtacgcgctcaagggctcat

SEQ ID NO: 307067 - DNA, 57 bp, Artificial
  Synthetic oligonucleotide
aatggtgtttacaccaacccaactgcaagtgaatttatggatggttatgataaccag

SEQ ID NO: 307068 - DNA, 59 bp, Artificial
  Synthetic oligonucleotide
aatggttaatcaggctgtatcatttggtccggtctgcctggattttgcaggcaccaaag

SEQ ID NO: 307069 - DNA, 54 bp, Artificial
  Synthetic oligonucleotide
aatggttagagaagcatcaagaaatggaatgcaacctcaatcaccaacgttaat

SEQ ID NO: 307070 - DNA, 60 bp, Artificial
  Synthetic oligonucleotide
aatggttagttaggactgtgcaacatgcttcaaccgtgcaagagttggatctccaagttc

SEQ ID NO: 307071 - DNA, 53 bp, Artificial
  Synthetic oligonucleotide
aatggttcaataaggttacgttagccatgaccgttgtggggacgtataagagg

SEQ ID NO: 307072 - DNA, 53 bp, Artificial
  Synthetic oligonucleotide
aatggttccatcctgagcgataccaacccgcttaacccaaggactcaacgtga

SEQ ID NO: 307073 - DNA, 55 bp, Artificial
  Synthetic oligonucleotide
aatggttccgatcgggaatcactcgatcttggacggttacctggtactcaagatt

SEQ ID NO: 307074 - DNA, 51 bp, Artificial
  Synthetic oligonucleotide
aatggttccttgaaagcggagttaaggccaattgaaaaagtgcaggcaaac

SEQ ID NO: 307075 - DNA, 54 bp, Artificial
  Synthetic oligonucleotide
aatggttcttggtatggtaatagagggtcagaaaatgacacaattatactccca

SEQ ID NO: 307076 - DNA, 55 bp, Artificial
  Synthetic oligonucleotide
aatggttcttgttatgtttgcggtcgctagtttcctcgtattgcccgataagcgc

SEQ ID NO: 307077 - DNA, 60 bp, Artificial
  Synthetic oligonucleotide
aatggttgatggccatcacaactcataacaggctcccgtcacttcagcgtcacacggaat

SEQ ID NO: 307078 - DNA, 52 bp, Artificial
  Synthetic oligonucleotide
aatggttggagctacaaatatttctatccgcctttcctttcggacattgaac

SEQ ID NO: 307079 - DNA, 60 bp, Artificial
  Synthetic oligonucleotide
aatggttggaggaatcggaagattctacatacagatgtgcactgagctcaagctcagtga

SEQ ID NO: 307080 - DNA, 51 bp, Artificial
  Synthetic oligonucleotide
aatggttggagttggtcgataagacagtgggggttaaaggcctaaaagaag

SEQ ID NO: 307081 - DNA, 58 bp, Artificial
  Synthetic oligonucleotide
aatggttgggacctccttgttcaggatgaacccacaactcgagcattatgaccaggtc

SEQ ID NO: 307082 - DNA, 54 bp, Artificial
  Synthetic oligonucleotide
aatggttgggttacaatcaatgcagccggggcgacctcgctaatcaacatcgtt

SEQ ID NO: 307083 - DNA, 54 bp, Artificial
  Synthetic oligonucleotide
aatggttggtatgggtaccaccatagcaatgaccaggggaatggatatgctgca

SEQ ID NO: 307084 - DNA, 59 bp, Artificial
  Synthetic oligonucleotide
aatgtaaacgcgttctcattgatgaagcaggtttaatgcactacggtcaattattggcc

SEQ ID NO: 307085 - DNA, 60 bp, Artificial
  Synthetic oligonucleotide
aatgtaaagccagtatgagaatgggaaacactgatgctcaaattttgatggttccagggc

SEQ ID NO: 307086 - DNA, 51 bp, Artificial
  Synthetic oligonucleotide
aatgtaacattgccggatggatcttgggaaatccagaatgcgaatcactgc

SEQ ID NO: 307087 - DNA, 55 bp, Artificial
  Synthetic oligonucleotide
aatgtaacgtagcgtcacatatgtcgtcatgtcgtcgcagggagcctgatgtcca

SEQ ID NO: 307088 - DNA, 53 bp, Artificial
  Synthetic oligonucleotide
aatgtaaggacgtggtcctaaagtatcagccaggtgactgtataacccttctg

SEQ ID NO: 307089 - DNA, 60 bp, Artificial
  Synthetic oligonucleotide
aatgtaagttgaagctccatgatgaatcctgaagcttacgtgtacttatctgcagcatga

SEQ ID NO: 307090 - DNA, 57 bp, Artificial
  Synthetic oligonucleotide
aatgtaataacaaatatacccctaggacaatgcatattattaggaacagtaacagac

SEQ ID NO: 307091 - DNA, 54 bp, Artificial
  Synthetic oligonucleotide
aatgtaatcatacgaacctggatttactacgaagtttaacaacgacggagatgt

SEQ ID NO: 307092 - DNA, 51 bp, Artificial
  Synthetic oligonucleotide
aatgtaatcctgtctcctgaagaggttagcgaaacgcagggaacagagaag

SEQ ID NO: 307093 - DNA, 58 bp, Artificial
  Synthetic oligonucleotide
aatgtaattgtactagtaggaatgaatcggaaaagatgaaatgtcctgcaaaagatgg

SEQ ID NO: 307094 - DNA, 54 bp, Artificial
  Synthetic oligonucleotide
aatgtacacctagcccctgccgtagcccccacttttccgggtgagcaacttctc

SEQ ID NO: 307095 - DNA, 57 bp, Artificial
  Synthetic oligonucleotide
aatgtacagaagccctgatgtcccaaagggttgtgaaggcccatgtaaggtccagtc

SEQ ID NO: 307096 - DNA, 55 bp, Artificial
  Synthetic oligonucleotide
aatgtacagaagtcctgatgtgccttatggctgtgagggtccgtgtaaggttcag

SEQ ID NO: 307097 - DNA, 60 bp, Artificial
  Synthetic oligonucleotide
aatgtacaggtggaagttatgactttagtatacctgtaggtgcatggccagtcatgaatg

SEQ ID NO: 307098 - DNA, 60 bp, Artificial
  Synthetic oligonucleotide
aatgtaccaacaagattcttcaggatggaagatgttcaaagagacttgagtgaaatggtg

SEQ ID NO: 307099 - DNA, 56 bp, Artificial
  Synthetic oligonucleotide
aatgtaccaagaacgcagtggtcacgattcgatgtgttaagtcgaaagaatccggt

SEQ ID NO: 307100 - DNA, 60 bp, Artificial
  Synthetic oligonucleotide
aatgtaccagctaaatcaagtagaggactatttggtgccatagctggattcatcgaggga

SEQ ID NO: 307101 - DNA, 55 bp, Artificial
  Synthetic oligonucleotide
aatgtacccgctttctgcattgtaaccagtcgctctgcggagaggctggcagatc

SEQ ID NO: 307102 - DNA, 50 bp, Artificial
  Synthetic oligonucleotide
aatgtacgcagatgacactgctggttgggacacaaggatcacatctgagg

SEQ ID NO: 307103 - DNA, 60 bp, Artificial
  Synthetic oligonucleotide
aatgtacttaactcgtcctgtcatccctactatagcgacacttatgtcttacgtgcgcaa

SEQ ID NO: 307104 - DNA, 51 bp, Artificial
  Synthetic oligonucleotide
aatgtagaaggatgctggaaaatcatcctccagctacaaccttcagtagac

SEQ ID NO: 307105 - DNA, 51 bp, Artificial
  Synthetic oligonucleotide
aatgtagacgctgccctgtgggtagtcgcgctccacgctcttagcgccacg

SEQ ID NO: 307106 - DNA, 55 bp, Artificial
  Synthetic oligonucleotide
aatgtagcacacgctatccgctatgtctatttagtcctcaaagatcagaccatcc

SEQ ID NO: 307107 - DNA, 60 bp, Artificial
  Synthetic oligonucleotide
aatgtaggaagtctttatgtgtgatattatttagattgtaagcgtgagataggatgagac

SEQ ID NO: 307108 - DNA, 51 bp, Artificial
  Synthetic oligonucleotide
aatgtaggagttatttctacgataatgtaacgaattaggattaataaagat

SEQ ID NO: 307109 - DNA, 55 bp, Artificial
  Synthetic oligonucleotide
aatgtaggggataaattacataaagggcagttgatgggtagaactggtaacagtg

SEQ ID NO: 307110 - DNA, 55 bp, Artificial
  Synthetic oligonucleotide
aatgtaggtgtaccttacagtttggaagatgcgcgtaaagaacttgataaaccca

SEQ ID NO: 307111 - DNA, 60 bp, Artificial
  Synthetic oligonucleotide
aatgtagtatcagacgtgtaagttatattgcaatctatacctacagcacactgcgaacaa

SEQ ID NO: 307112 - DNA, 59 bp, Artificial
  Synthetic oligonucleotide
aatgtagtgaaccgtgatcaaaatgacaaacaacctagtgatgataattggctcaactt

SEQ ID NO: 307113 - DNA, 56 bp, Artificial
  Synthetic oligonucleotide
aatgtataaaagactccccagagtttgattggattcttggatggacaattaaagga

SEQ ID NO: 307114 - DNA, 56 bp, Artificial
  Synthetic oligonucleotide
aatgtatacatgggattaagccagtagtgtcaactcaactgttattgaatggcagt

SEQ ID NO: 307115 - DNA, 55 bp, Artificial
  Synthetic oligonucleotide
aatgtataccaatgttgacaaagatcttgtgggttggcccgctcctcaaggcacc

SEQ ID NO: 307116 - DNA, 55 bp, Artificial
  Synthetic oligonucleotide
aatgtatagaagccgtgatgttcctcgtgggtgtgaaggcccatgtaaggttcag

SEQ ID NO: 307117 - DNA, 57 bp, Artificial
  Synthetic oligonucleotide
aatgtatagaagtcccgacgtgccaaggggctgtgaaggcccttgtaaggtgcagtc

SEQ ID NO: 307118 - DNA, 60 bp, Artificial
  Synthetic oligonucleotide
aatgtataggatcacggacatatcaaatagaagatagcggatcaaagtcatctatctcaa

SEQ ID NO: 307119 - DNA, 57 bp, Artificial
  Synthetic oligonucleotide
aatgtataggccctttacagcaagtggatacatgcgatgataaatcaagcaggtctt

SEQ ID NO: 307120 - DNA, 55 bp, Artificial
  Synthetic oligonucleotide
aatgtataggttgagagacagacttagattattgccagttgaaagacgaagactt

SEQ ID NO: 307121 - DNA, 56 bp, Artificial
  Synthetic oligonucleotide
aatgtatagtttactagaaaaagtagattataggttaggagtaggagctctgataa

SEQ ID NO: 307122 - DNA, 60 bp, Artificial
  Synthetic oligonucleotide
aatgtatatatagaggatgcaatcacgcaagcattattcggtatcagtgcgcaaaatgtg

SEQ ID NO: 307123 - DNA, 57 bp, Artificial
  Synthetic oligonucleotide
aatgtatatgacatgaagattgaatgcccccatacagtcaattttggggaaaacagt

SEQ ID NO: 307124 - DNA, 52 bp, Artificial
  Synthetic oligonucleotide
aatgtatcctcagcttagtagccggggtgttccttatacgaagtcttaaaca

SEQ ID NO: 307125 - DNA, 58 bp, Artificial
  Synthetic oligonucleotide
aatgtatcgcagcccagatgtcccaaagggatgtgaaggtccttgtaaggttcaatct

SEQ ID NO: 307126 - DNA, 60 bp, Artificial
  Synthetic oligonucleotide
aatgtatctaactctacatttttccatcccgcagagtcacgttgatataacggactgcga

SEQ ID NO: 307127 - DNA, 58 bp, Artificial
  Synthetic oligonucleotide
aatgtatctagtggtgttgaatttataagaagaaagttcttagcaggagaaatcgcat

SEQ ID NO: 307128 - DNA, 60 bp, Artificial
  Synthetic oligonucleotide
aatgtatctatcgatggtgacttaagtactcgtcgttctccggatgatgtgttaactgat

SEQ ID NO: 307129 - DNA, 60 bp, Artificial
  Synthetic oligonucleotide
aatgtatctgaagttcatgtcacatctagccaacttgaatggattgatccagatagtgca

SEQ ID NO: 307130 - DNA, 60 bp, Artificial
  Synthetic oligonucleotide
aatgtatgggcatgggaaccaacagtatcagatgctagagaatatggaatattttaccat

SEQ ID NO: 307131 - DNA, 60 bp, Artificial
  Synthetic oligonucleotide
aatgtatgtatggacgaaatagctagagagtcgcaacgaaatgggatagctccacaatct

SEQ ID NO: 307132 - DNA, 60 bp, Artificial
  Synthetic oligonucleotide
aatgtatgttagtgctgatgcaacaaaatggtcaccaggagacaactctgccaaatttag

SEQ ID NO: 307133 - DNA, 60 bp, Artificial
  Synthetic oligonucleotide
aatgtattactatctcctgaggaggtcagtgaaacacatgggacagagagactgacaata

SEQ ID NO: 307134 - DNA, 60 bp, Artificial
  Synthetic oligonucleotide
aatgtattcactaggcctagcatggatgctttaatagcattggacttcaaagctgaatcc

SEQ ID NO: 307135 - DNA, 60 bp, Artificial
  Synthetic oligonucleotide
aatgtattggacttgaaccatctggatattgatgagcctactgggcagactgcagactgg

SEQ ID NO: 307136 - DNA, 57 bp, Artificial
  Synthetic oligonucleotide
aatgtattgggcaatgactggaccatagttttatgtgaaaatgggaattactattat

SEQ ID NO: 307137 - DNA, 55 bp, Artificial
  Synthetic oligonucleotide
aatgtattggtaaggtaatgtgtatttcggatgttacgcgtggagtcggtttgac

SEQ ID NO: 307138 - DNA, 58 bp, Artificial
  Synthetic oligonucleotide
aatgtatttagacaagaccctatggatgaaactcaacgtctagatggctctttaatgg

SEQ ID NO: 307139 - DNA, 59 bp, Artificial
  Synthetic oligonucleotide
aatgtcaaatatacattgttatggatccgacccatccgaaggacacttttgtatctata

SEQ ID NO: 307140 - DNA, 55 bp, Artificial
  Synthetic oligonucleotide
aatgtcaaggagtcgcaagcaaaggagttcacgaaagttgttagggacaagctag

SEQ ID NO: 307141 - DNA, 60 bp, Artificial
  Synthetic oligonucleotide
aatgtcagaccgttattgatgacttgactcagatgaatggaaaacaagcacgagagataa

SEQ ID NO: 307142 - DNA, 55 bp, Artificial
  Synthetic oligonucleotide
aatgtcagataaaaggggaaccagtccatgggcaagtagatgcctcgccaggggt

SEQ ID NO: 307143 - DNA, 56 bp, Artificial
  Synthetic oligonucleotide
aatgtcaggaacctttacgacaaggtccgactacagcttagggataatgcaaagga

SEQ ID NO: 307144 - DNA, 59 bp, Artificial
  Synthetic oligonucleotide
aatgtcaggtatatggcgatgtagcgttaaagcactgggtggcacttttaatagaactc

SEQ ID NO: 307145 - DNA, 54 bp, Artificial
  Synthetic oligonucleotide
aatgtcagtagagaaaaatggaatagcactttacaaaaggtggttacaaaatta

SEQ ID NO: 307146 - DNA, 60 bp, Artificial
  Synthetic oligonucleotide
aatgtcatgatttacttggttattatgagtccgagccagacttagagattgcggccgcat

SEQ ID NO: 307147 - DNA, 60 bp, Artificial
  Synthetic oligonucleotide
aatgtcatgggaatgataggaatattacctgacatgactccgagcacagagatgtcacta

SEQ ID NO: 307148 - DNA, 50 bp, Artificial
  Synthetic oligonucleotide
aatgtccaattttcaggagtgaacagcttggatacctccaggcaaaggct

SEQ ID NO: 307149 - DNA, 50 bp, Artificial
  Synthetic oligonucleotide
aatgtcccacattcagacgggtggctaacatttgctagagaaagaactag

SEQ ID NO: 307150 - DNA, 60 bp, Artificial
  Synthetic oligonucleotide
aatgtcccagaaccaggttgtctaaaaatcaatatgagttcattggatgaagcatcaaaa

SEQ ID NO: 307151 - DNA, 59 bp, Artificial
  Synthetic oligonucleotide
aatgtccctacagtactagggactagtcacaacctcattacagcaggctgtcccaatgg

SEQ ID NO: 307152 - DNA, 60 bp, Artificial
  Synthetic oligonucleotide
aatgtccgcttgggctccatgagaatcacagggcctaaaacctgcatgaacacttggcag

SEQ ID NO: 307153 - DNA, 55 bp, Artificial
  Synthetic oligonucleotide
aatgtccgtcttaacaccaatagctagaatgattagaccaaatgctcagcgagcc

SEQ ID NO: 307154 - DNA, 59 bp, Artificial
  Synthetic oligonucleotide
aatgtcctacgaaaggatacacaaatatgatccgttcgtgtatatcgatcacggtggtg

SEQ ID NO: 307155 - DNA, 60 bp, Artificial
  Synthetic oligonucleotide
aatgtccttgatgtgaatgccattgatatagaagagccaagtggccaaacagccgactgg

SEQ ID NO: 307156 - DNA, 55 bp, Artificial
  Synthetic oligonucleotide
aatgtcgaacccggactattgcatacctaatttctctcaaacggtgaatgagaga

SEQ ID NO: 307157 - DNA, 56 bp, Artificial
  Synthetic oligonucleotide
aatgtcgaaccgacgacatcggtacttgcggatttaggttccatacttgttgaagc

SEQ ID NO: 307158 - DNA, 51 bp, Artificial
  Synthetic oligonucleotide
aatgtcgaattgtatgaaggcagactcaaagtgacgaggattggagataat

SEQ ID NO: 307159 - DNA, 55 bp, Artificial
  Synthetic oligonucleotide
aatgtcgctcgaaacgaaagttaattatctcttatctctggtgaatcgcctcaat

SEQ ID NO: 307160 - DNA, 55 bp, Artificial
  Synthetic oligonucleotide
aatgtcggctcttgttactggatttgtttgtgcttgtgagactgagtctcccggg

SEQ ID NO: 307161 - DNA, 56 bp, Artificial
  Synthetic oligonucleotide
aatgtcgtattccacgcggggaaccagtacggactaggagctactcaaacgcaagc

SEQ ID NO: 307162 - DNA, 52 bp, Artificial
  Synthetic oligonucleotide
aatgtctatacttgacgtgcatgagttgcagttaatatcagagcctccacga

SEQ ID NO: 307163 - DNA, 58 bp, Artificial
  Synthetic oligonucleotide
aatgtctcactcaaggtgggagggggactcactgtagaacaacagtctggaaaactga

SEQ ID NO: 307164 - DNA, 55 bp, Artificial
  Synthetic oligonucleotide
aatgtctcgaatactagactcgtctttacacaaggagaggagtaaaatcccttag

SEQ ID NO: 307165 - DNA, 51 bp, Artificial
  Synthetic oligonucleotide
aatgtctgccacgctttcactttagaggcgataattgacatatctgcgtat

SEQ ID NO: 307166 - DNA, 60 bp, Artificial
  Synthetic oligonucleotide
aatgtctgtctgtcagctgcttgtgtaaatgagctttccccaggatagctctcctgggca

SEQ ID NO: 307167 - DNA, 60 bp, Artificial
  Synthetic oligonucleotide
aatgtctgtttctggagtccgctcttctgagcttgcctagtttagtggcgaacaggatga

SEQ ID NO: 307168 - DNA, 51 bp, Artificial
  Synthetic oligonucleotide
aatgtgaaaccgcctactggtttagtggaagagtgtcggaccgtgctccca

SEQ ID NO: 307169 - DNA, 55 bp, Artificial
  Synthetic oligonucleotide
aatgtgaaagcaggccctattggctctgaaacttgtgtcaccttgaaaggacctg

SEQ ID NO: 307170 - DNA, 51 bp, Artificial
  Synthetic oligonucleotide
aatgtgaaggaccgggactcactagttcgaatcaagaaacgtattatgaat

SEQ ID NO: 307171 - DNA, 60 bp, Artificial
  Synthetic oligonucleotide
aatgtgaattactattcacagtaagctcatggtcttacattgtggaaacatcgaactcag

SEQ ID NO: 307172 - DNA, 60 bp, Artificial
  Synthetic oligonucleotide
aatgtgaattttctacgcaacatccagtagatttacaagtatgtgagcatttaacacaaa

SEQ ID NO: 307173 - DNA, 51 bp, Artificial
  Synthetic oligonucleotide
aatgtgacatgatccagttaaagcctggaagatattcagtaagaagctctc

SEQ ID NO: 307174 - DNA, 52 bp, Artificial
  Synthetic oligonucleotide
aatgtgacccacgagggcggtaataattggcgcctgggttacgagtggtcta

SEQ ID NO: 307175 - DNA, 54 bp, Artificial
  Synthetic oligonucleotide
aatgtgacgcctttctgtttctgatattttccgttataaggcttttctaccggc

SEQ ID NO: 307176 - DNA, 60 bp, Artificial
  Synthetic oligonucleotide
aatgtgagaggatcaggaatgaggatactggtaagaggcaattctccagtgttcaactac

SEQ ID NO: 307177 - DNA, 60 bp, Artificial
  Synthetic oligonucleotide
aatgtgatgggtgcggcaaacgcgccgccggatccaattagcccaggagagcacgcgata

SEQ ID NO: 307178 - DNA, 58 bp, Artificial
  Synthetic oligonucleotide
aatgtgcaatattcgcacactttttgttggaaatttgtgctagaatgtagttaagaaa

SEQ ID NO: 307179 - DNA, 55 bp, Artificial
  Synthetic oligonucleotide
aatgtgcacagctgttgcccacttttggacgatcgcgatggtgccagatttaccg

SEQ ID NO: 307180 - DNA, 55 bp, Artificial
  Synthetic oligonucleotide
aatgtgcagagacctccttggatatttattgtatccatctccccactagagagtt

SEQ ID NO: 307181 - DNA, 60 bp, Artificial
  Synthetic oligonucleotide
aatgtgccactctgcggagagtgcagtctgcgatagtgccccaggtggactgggttaaca

SEQ ID NO: 307182 - DNA, 55 bp, Artificial
  Synthetic oligonucleotide
aatgtgcctaacccagttcgccatactatagatgtcttcttgcatgatcacggtt

SEQ ID NO: 307183 - DNA, 60 bp, Artificial
  Synthetic oligonucleotide
aatgtgcgaggcccgtgagccgtcggtcgatttaagactaccattgtgtgcaggtattga

SEQ ID NO: 307184 - DNA, 57 bp, Artificial
  Synthetic oligonucleotide
aatgtgcgcaactgtgcacaattattgcagccggttgggtgttaagaggttcaggct

SEQ ID NO: 307185 - DNA, 56 bp, Artificial
  Synthetic oligonucleotide
aatgtgctaggcagtggtgaagaattacctgaccccctaagtccaggagaacgcgg

SEQ ID NO: 307186 - DNA, 58 bp, Artificial
  Synthetic oligonucleotide
aatgtgctagtgactatatcgaggagaaggttatgagtgttaaaagaaactacgataa

SEQ ID NO: 307187 - DNA, 55 bp, Artificial
  Synthetic oligonucleotide
aatgtgctcggcgcaggagatgagatcccggacccacttagtcctggagagcgtg

SEQ ID NO: 307188 - DNA, 59 bp, Artificial
  Synthetic oligonucleotide
aatgtgctgacccgacttggggaaaccaagtcgaagaatctgatattcttgcactggaa

SEQ ID NO: 307189 - DNA, 56 bp, Artificial
  Synthetic oligonucleotide
aatgtgctgaccgggttggggaaataaggtcgaagaatctgttgtttgtgcattgg

SEQ ID NO: 307190 - DNA, 60 bp, Artificial
  Synthetic oligonucleotide
aatgtgctgacctagatggggatacgagatcgaagaatcgttgatttgtgcattggtatt

SEQ ID NO: 307191 - DNA, 59 bp, Artificial
  Synthetic oligonucleotide
aatgtgctgacctgtttggggatacgaggtcgaagaatcgttgatttgtgcagttgtat

SEQ ID NO: 307192 - DNA, 57 bp, Artificial
  Synthetic oligonucleotide
aatgtggacttccgcgtttctgcaaaaatttgagccggctgattaccacgcccacac

SEQ ID NO: 307193 - DNA, 60 bp, Artificial
  Synthetic oligonucleotide
aatgtggagaattcagtttcaggacatgtctataatgcgttgatttactacagatataat

SEQ ID NO: 307194 - DNA, 57 bp, Artificial
  Synthetic oligonucleotide
aatgtggatacctaagaaaattggcgccctaactgtgtggacagtagagagtattat

SEQ ID NO: 307195 - DNA, 60 bp, Artificial
  Synthetic oligonucleotide
aatgtggatgaaaaatttcagcacattcaagcagcaactccagtcctacttaatggagtt

SEQ ID NO: 307196 - DNA, 52 bp, Artificial
  Synthetic oligonucleotide
aatgtggcaaaccaagaacctggattagcccaaaaatgagcaaaaaagtgtg

SEQ ID NO: 307197 - DNA, 55 bp, Artificial
  Synthetic oligonucleotide
aatgtggcggctgctcaagtggattggccgcgacgtgccccgctcgacgttttac

SEQ ID NO: 307198 - DNA, 55 bp, Artificial
  Synthetic oligonucleotide
aatgtggctccggatccagctcactacacggctgtcctgtccaacccgggcctcg

SEQ ID NO: 307199 - DNA, 60 bp, Artificial
  Synthetic oligonucleotide
aatgtggctgctgaccgttataccaaatgacatgtttataagagagtcactagttgcatg

SEQ ID NO: 307200 - DNA, 57 bp, Artificial
  Synthetic oligonucleotide
aatgtggcttctcatgttagagttaatgtttatctctcagctattaatctagaatgt

SEQ ID NO: 307201 - DNA, 55 bp, Artificial
  Synthetic oligonucleotide
aatgtgggattactttacacttgtgttgactaatgcatgtgaactgggagagtgg

SEQ ID NO: 307202 - DNA, 59 bp, Artificial
  Synthetic oligonucleotide
aatgtgggtaaagccagagaaagttaaggtctcagacactctcattggtctatcattct

SEQ ID NO: 307203 - DNA, 56 bp, Artificial
  Synthetic oligonucleotide
aatgtggtgtatggccggcggtgataagaaaaataatcgacttgaaagtaatgtaa

SEQ ID NO: 307204 - DNA, 58 bp, Artificial
  Synthetic oligonucleotide
aatgtggttcggggccgtggttgacacctaggtgcatggttgactatccatacaggct

SEQ ID NO: 307205 - DNA, 54 bp, Artificial
  Synthetic oligonucleotide
aatgtgtacgggaggtgattacagctttgcattaccagttggtcaatggccagt

SEQ ID NO: 307206 - DNA, 60 bp, Artificial
  Synthetic oligonucleotide
aatgtgtataaaatactgtcaatttacagctgcattgcaagcagtctcgtattggcagca

SEQ ID NO: 307207 - DNA, 59 bp, Artificial
  Synthetic oligonucleotide
aatgtgtcaagtggatactctaataccaataaacaacaccatgccaaatctacgaaaca

SEQ ID NO: 307208 - DNA, 55 bp, Artificial
  Synthetic oligonucleotide
aatgtgtcgctgtaccgtaaatcgttccgcacgacggccctcctggttccacgca

SEQ ID NO: 307209 - DNA, 57 bp, Artificial
  Synthetic oligonucleotide
aatgtgtcttagaaactcacctccaaagactttacaaagactcgctatgttggcgtg

SEQ ID NO: 307210 - DNA, 50 bp, Artificial
  Synthetic oligonucleotide
aatgtgtgcttttgaggtaaacttggcttcgcagaacaatagatctttaa

SEQ ID NO: 307211 - DNA, 60 bp, Artificial
  Synthetic oligonucleotide
aatgtgtggatatcattttaaatgatatatatggttcttgtttgttggtacataatatct

SEQ ID NO: 307212 - DNA, 55 bp, Artificial
  Synthetic oligonucleotide
aatgtgtgtaaacagcttcgtggagatccttttcacctaaatgcaacactccgca

SEQ ID NO: 307213 - DNA, 54 bp, Artificial
  Synthetic oligonucleotide
aatgtgttagtgtctcgggaccttgtatgtatcattgacctcaccagtcacaat

SEQ ID NO: 307214 - DNA, 60 bp, Artificial
  Synthetic oligonucleotide
aatgtgttccctggttgacattagtgtctgacaccctgtagtacagcttccatggaatag

SEQ ID NO: 307215 - DNA, 58 bp, Artificial
  Synthetic oligonucleotide
aatgtgtttggtttattcaacatgaatggggaaaagatcaagggtggcattgtcatgt

SEQ ID NO: 307216 - DNA, 56 bp, Artificial
  Synthetic oligonucleotide
aatgtgtttgtagggacaactggactggaactaacaggccagtattggtgatttct

SEQ ID NO: 307217 - DNA, 52 bp, Artificial
  Synthetic oligonucleotide
aatgtgttttatcatgcaagcagtgatcgcttgttaatagtgggacaccctt

SEQ ID NO: 307218 - DNA, 51 bp, Artificial
  Synthetic oligonucleotide
aatgttacacacatttacgatacaggtagggttttcgttcctgctccattc

SEQ ID NO: 307219 - DNA, 60 bp, Artificial
  Synthetic oligonucleotide
aatgttaccggatatgatcttacttctcgtgtgatgtttgagcgaattgatattggcccc

SEQ ID NO: 307220 - DNA, 53 bp, Artificial
  Synthetic oligonucleotide
aatgttacgatgtttgttactcttatccgttaacaatcaaggttacaccaaaa

SEQ ID NO: 307221 - DNA, 60 bp, Artificial
  Synthetic oligonucleotide
aatgttacttttattacgtcatttattccagctgatctggatctagagcagactattcaa

SEQ ID NO: 307222 - DNA, 60 bp, Artificial
  Synthetic oligonucleotide
aatgttagccgcactaatgtgcataggttcgtggtgaagcgcaagtggcatgtggattac

SEQ ID NO: 307223 - DNA, 50 bp, Artificial
  Synthetic oligonucleotide
aatgttatctctgctgacaacagttgtaggcttcaaagctgcactcatgg

SEQ ID NO: 307224 - DNA, 60 bp, Artificial
  Synthetic oligonucleotide
aatgttcacaaacaagtatatgatgatgaacatgagatatattagcatattaagtaggca

SEQ ID NO: 307225 - DNA, 57 bp, Artificial
  Synthetic oligonucleotide
aatgttcacgtgtcggtagcgaaggatacctactctatcaacccttggaataatgag

SEQ ID NO: 307226 - DNA, 58 bp, Artificial
  Synthetic oligonucleotide
aatgttcaggaattctccatttcgagaatccttaacatcactaatgggacctccacta

SEQ ID NO: 307227 - DNA, 58 bp, Artificial
  Synthetic oligonucleotide
aatgttcaggtgggccggtgctaaactaggttgagcgcagcttatataccgagacgcc

SEQ ID NO: 307228 - DNA, 60 bp, Artificial
  Synthetic oligonucleotide
aatgttcatcgtgataggtatcaagttctgcgcaaatggtatgcaactgtcaccggtgga

SEQ ID NO: 307229 - DNA, 60 bp, Artificial
  Synthetic oligonucleotide
aatgttccaggacctggtgcatacagaattcaggatgggcaagatatcattagcttgatg

SEQ ID NO: 307230 - DNA, 60 bp, Artificial
  Synthetic oligonucleotide
aatgttccatctgccagtagaaagagaggtctgggaacaatggtggactgactattggca

SEQ ID NO: 307231 - DNA, 55 bp, Artificial
  Synthetic oligonucleotide
aatgttccctgcatatatatgactatcaggtccatgagctattagttcacctaca

SEQ ID NO: 307232 - DNA, 59 bp, Artificial
  Synthetic oligonucleotide
aatgttcgacttgtacctcaagttgcatgacgaagcacgagaatacttccaaccgatgc

SEQ ID NO: 307233 - DNA, 60 bp, Artificial
  Synthetic oligonucleotide
aatgttcgatctaatgcaaggccagaattagatgatcacgcgtgttcggcactgttaaat

SEQ ID NO: 307234 - DNA, 59 bp, Artificial
  Synthetic oligonucleotide
aatgttcgtcccagtgggtgatgttgtacaatatggatttctgaacctcagcggtaagc

SEQ ID NO: 307235 - DNA, 60 bp, Artificial
  Synthetic oligonucleotide
aatgttcgtgctctcatctcgcaacagtgagtttgagtgggaaataagtactaatattct

SEQ ID NO: 307236 - DNA, 60 bp, Artificial
  Synthetic oligonucleotide
aatgttcttgacttaaaccacctggatattgatgagccgacaggacagacagcagactgg

SEQ ID NO: 307237 - DNA, 58 bp, Artificial
  Synthetic oligonucleotide
aatgttgaaccactcatcgtttgaatacactttagggcttatacctatgtgacctctc

SEQ ID NO: 307238 - DNA, 53 bp, Artificial
  Synthetic oligonucleotide
aatgttgaggcatgtggatacagtgacagggtacaacaaattacacttggcaa

SEQ ID NO: 307239 - DNA, 60 bp, Artificial
  Synthetic oligonucleotide
aatgttgcagaacagcgaattggccagttggatacagtcacggataatctccttgagcga

SEQ ID NO: 307240 - DNA, 60 bp, Artificial
  Synthetic oligonucleotide
aatgttgccacatagtcatcgttgcataagtattgccacatagtcatcgttacataaggg

SEQ ID NO: 307241 - DNA, 57 bp, Artificial
  Synthetic oligonucleotide
aatgttgcctcttatgggggtccaccgccaccagggttgagacagacgagaaggtga

SEQ ID NO: 307242 - DNA, 55 bp, Artificial
  Synthetic oligonucleotide
aatgttgcgatacactaaggaagggtgcggaatgagcggtgacatgaacactgcc

SEQ ID NO: 307243 - DNA, 57 bp, Artificial
  Synthetic oligonucleotide
aatgttggaccaatatcgccagattatacccagcatatggctaccatcggtgttcta

SEQ ID NO: 307244 - DNA, 60 bp, Artificial
  Synthetic oligonucleotide
aatgttggactcagccctatgtgcccctactattgatgccgagtcacctggatccagtac

SEQ ID NO: 307245 - DNA, 60 bp, Artificial
  Synthetic oligonucleotide
aatgttggatgatgccacaggcacatgctggtcatatttcgatacgtatatgagaaatgc

SEQ ID NO: 307246 - DNA, 60 bp, Artificial
  Synthetic oligonucleotide
aatgttggattgcactccgaccccgagagtgtgcgattcgcgattctctacacagaacca

SEQ ID NO: 307247 - DNA, 58 bp, Artificial
  Synthetic oligonucleotide
aatgttgggtgtctatgacaggtgggctgtcttaccacgccacgccaaacctgggcca

SEQ ID NO: 307248 - DNA, 57 bp, Artificial
  Synthetic oligonucleotide
aatgttggtctacgaggcatattgactatctcgtattgggggctcaagtaaacttat

SEQ ID NO: 307249 - DNA, 59 bp, Artificial
  Synthetic oligonucleotide
aatgttggttcaaacggtgatggtgagcactacccaaattggaactctgggcataatca

SEQ ID NO: 307250 - DNA, 59 bp, Artificial
  Synthetic oligonucleotide
aatgttgtcttagaatccccggcattaaatcactatactatacatgggacaactatcaa

SEQ ID NO: 307251 - DNA, 60 bp, Artificial
  Synthetic oligonucleotide
aatgttgttcatagcgcgccgtctgggtgatttgattgaaagataacgatgtcattgcac

SEQ ID NO: 307252 - DNA, 55 bp, Artificial
  Synthetic oligonucleotide
aatgttgtttctcttgtagcgccaacgttgtgtccacagcaaaccttttctaggt

SEQ ID NO: 307253 - DNA, 57 bp, Artificial
  Synthetic oligonucleotide
aatgtttattccacacataacactaagtttcagtaacaagaaaacagtgagaataga

SEQ ID NO: 307254 - DNA, 60 bp, Artificial
  Synthetic oligonucleotide
aatgtttcccgctcttaggcttacgtggctttcccagttctgcagttgagcatgcgccca

SEQ ID NO: 307255 - DNA, 52 bp, Artificial
  Synthetic oligonucleotide
aatgtttcgccgtcgacagtttcagtttccctttgaatttcgcgaagtgggt

SEQ ID NO: 307256 - DNA, 51 bp, Artificial
  Synthetic oligonucleotide
aatgtttcttaacccacgctggatgtgtttatgctgccgcgaccttagctc

SEQ ID NO: 307257 - DNA, 54 bp, Artificial
  Synthetic oligonucleotide
aatgtttgcgggagcaacccgggatgtttccttcaatcctatccccggacttga

SEQ ID NO: 307258 - DNA, 50 bp, Artificial
  Synthetic oligonucleotide
aatgtttggagggactaaagactctgtgttcctcgtgacagacacctccg

SEQ ID NO: 307259 - DNA, 59 bp, Artificial
  Synthetic oligonucleotide
aatgtttggatggaaatgtgctgacctgcttgggggagtgaggtcgaagaatctattgt

SEQ ID NO: 307260 - DNA, 55 bp, Artificial
  Synthetic oligonucleotide
aatgtttggcgtaatacattgtttacagaaatcggggtcacgccggtcaacgtga

SEQ ID NO: 307261 - DNA, 50 bp, Artificial
  Synthetic oligonucleotide
aatgtttggtagtgggggcaatttccgaggtttattctcttactgggact

SEQ ID NO: 307262 - DNA, 57 bp, Artificial
  Synthetic oligonucleotide
aatgttttaggggagtgttttcatgcgtccgatgcgattgttatggtgcaagtttac

SEQ ID NO: 307263 - DNA, 55 bp, Artificial
  Synthetic oligonucleotide
aatgttttcaggaattaagagtacaattgacgcagcgaagtctatggcgacgaac

SEQ ID NO: 307264 - DNA, 60 bp, Artificial
  Synthetic oligonucleotide
aatgttttctacatcagcatatttgatcagcatcttcttacatcttataaagataccaac

SEQ ID NO: 307265 - DNA, 57 bp, Artificial
  Synthetic oligonucleotide
aatgtttttgggtaatgacggatggaccagcgaacagacaagcgcagtacagggcgt

SEQ ID NO: 307266 - DNA, 52 bp, Artificial
  Synthetic oligonucleotide
aattaaaaacctacactatattcggtcaacaagttaacctagtgattgaaaa

SEQ ID NO: 307267 - DNA, 57 bp, Artificial
  Synthetic oligonucleotide
aattaaaacaactcaaaaagacatatacaaacacaacgcaatcaaaattctctcagc

SEQ ID NO: 307268 - DNA, 55 bp, Artificial
  Synthetic oligonucleotide
aattaaacaaacgtgctcgttgtatcttaatcgttaaaaatagaatgagtcattg

SEQ ID NO: 307269 - DNA, 60 bp, Artificial
  Synthetic oligonucleotide
aattaaacatggtgctcagccatctgttgcttgggtggcaatcgcccttactcagtggat

SEQ ID NO: 307270 - DNA, 60 bp, Artificial
  Synthetic oligonucleotide
aattaaacgcatttggaggatttgctaactgagattccatatatgaataattggccgcgc

SEQ ID NO: 307271 - DNA, 55 bp, Artificial
  Synthetic oligonucleotide
aattaaactaagtttgccaattttcaaactggtgatactaacatattggcaatta

SEQ ID NO: 307272 - DNA, 55 bp, Artificial
  Synthetic oligonucleotide
aattaaactccccttagacctaggaatcactcaagaaggagagtcatgggcaaca

SEQ ID NO: 307273 - DNA, 52 bp, Artificial
  Synthetic oligonucleotide
aattaaacttcctccgtaggaggaagcacagggggagaataccatttctccc

SEQ ID NO: 307274 - DNA, 52 bp, Artificial
  Synthetic oligonucleotide
aattaaagcctgtgggaacgaccggtccggtccgtaggctaggcattcggag

SEQ ID NO: 307275 - DNA, 55 bp, Artificial
  Synthetic oligonucleotide
aattaaagggtggtgtattgaatgttgtcaacttactgaattgaccttttgtcac

SEQ ID NO: 307276 - DNA, 57 bp, Artificial
  Synthetic oligonucleotide
aattaaagtccaagtgaccgctcaaataattatgtggtcctaaagcacgagcccaca

SEQ ID NO: 307277 - DNA, 59 bp, Artificial
  Synthetic oligonucleotide
aattaaatattactggatatatgacaccggagtaggaaatgcagtatatgttgtaatgt

SEQ ID NO: 307278 - DNA, 56 bp, Artificial
  Synthetic oligonucleotide
aattaaatgggaaaggctgttagactcagttcgagatgtagccgaaagtcgactta

SEQ ID NO: 307279 - DNA, 57 bp, Artificial
  Synthetic oligonucleotide
aattaaatgttggttcacaaggtcaggtgagtggttgctaggaattcttaatggcaa

SEQ ID NO: 307280 - DNA, 55 bp, Artificial
  Synthetic oligonucleotide
aattaacacaggtaaacttagaattgacggtggttatgattacaattgtccttca

SEQ ID NO: 307281 - DNA, 60 bp, Artificial
  Synthetic oligonucleotide
aattaaccactttacgctctcagtttgctttagcagatgagtgtaatagtgcagatagat

SEQ ID NO: 307282 - DNA, 58 bp, Artificial
  Synthetic oligonucleotide
aattaacgacgaatcacaaagttgacatagaaacacttcctctcttgagcccgaagca

SEQ ID NO: 307283 - DNA, 55 bp, Artificial
  Synthetic oligonucleotide
aattaactcaattgtcaaacactgatgacttagcgacgttgacgtctctcctagg

SEQ ID NO: 307284 - DNA, 55 bp, Artificial
  Synthetic oligonucleotide
aattaactctcggatgccgtctcggatcactagcaataatgaggttcacaggaga

SEQ ID NO: 307285 - DNA, 55 bp, Artificial
  Synthetic oligonucleotide
aattaagacattgaccacgctcatcagaaggctcgccaaaataaacgttgcaaaa

SEQ ID NO: 307286 - DNA, 55 bp, Artificial
  Synthetic oligonucleotide
aattaagagccaggttgcctagacctgatactagacatcttagagttctatacag

SEQ ID NO: 307287 - DNA, 57 bp, Artificial
  Synthetic oligonucleotide
aattaagcttaaacagtggaatcccgcagtaactaaattctgcagaattattggata

SEQ ID NO: 307288 - DNA, 56 bp, Artificial
  Synthetic oligonucleotide
aattaaggctcgaaagagacttagagcaagatagaaggagtctggaacctacgttg

SEQ ID NO: 307289 - DNA, 60 bp, Artificial
  Synthetic oligonucleotide
aattaagttgtaatcatgggtgcacaggtgtctacacaaaagagtggttcacatgagaat

SEQ ID NO: 307290 - DNA, 60 bp, Artificial
  Synthetic oligonucleotide
aattaataccagttgactcaatagcaccaattgaccccgaagcaccatcaatagtctcat

SEQ ID NO: 307291 - DNA, 50 bp, Artificial
  Synthetic oligonucleotide
aattaatagagggttttcagagtcaggttggggctgatgaaggtgtccga

SEQ ID NO: 307292 - DNA, 59 bp, Artificial
  Synthetic oligonucleotide
aattaatagctatggacatagtcatgaaggtattgtagtataaatataagctaaggtgg

SEQ ID NO: 307293 - DNA, 50 bp, Artificial
  Synthetic oligonucleotide
aattaatattactgctaacgggggacgcctccgaaaaaaggtcaatcccg

SEQ ID NO: 307294 - DNA, 53 bp, Artificial
  Synthetic oligonucleotide
aattaattaggggagccaaacccctagatgaagaagtagaatggactagggaa

SEQ ID NO: 307295 - DNA, 56 bp, Artificial
  Synthetic oligonucleotide
aattaattctcaagcatttgttcctagggcgggaaatagcagtataaaagccactc

SEQ ID NO: 307296 - DNA, 50 bp, Artificial
  Synthetic oligonucleotide
aattacacatatatatagacctctagtttagattagaaatagaagttttg

SEQ ID NO: 307297 - DNA, 53 bp, Artificial
  Synthetic oligonucleotide
aattacacattctagggttatttgagtcagatctgaggggcactgttataact

SEQ ID NO: 307298 - DNA, 59 bp, Artificial
  Synthetic oligonucleotide
aattacagagctaccaaatatgtcactaaagacaattacttaacaaaggctagcattgc

SEQ ID NO: 307299 - DNA, 51 bp, Artificial
  Synthetic oligonucleotide
aattacagcaacgcgcgattgaaagctgccgatgcgttcgaataaccaata

SEQ ID NO: 307300 - DNA, 53 bp, Artificial
  Synthetic oligonucleotide
aattacaggcccgtggtgcctttgtagtggtctaccctcaccgtaccattacc

SEQ ID NO: 307301 - DNA, 52 bp, Artificial
  Synthetic oligonucleotide
aattacagtacacacgaagacaacatggggactatgggtcgtttggtgacta

SEQ ID NO: 307302 - DNA, 55 bp, Artificial
  Synthetic oligonucleotide
aattacatactagagctcctgtataagttccgtgacagtatcaagtctagcgtga

SEQ ID NO: 307303 - DNA, 60 bp, Artificial
  Synthetic oligonucleotide
aattacatctagcattaatgctggtacagattctaggtggccttatttacataatagatt

SEQ ID NO: 307304 - DNA, 59 bp, Artificial
  Synthetic oligonucleotide
aattacatgtctagaggatacctagatctatattacaataatcttacttacatgtttta

SEQ ID NO: 307305 - DNA, 60 bp, Artificial
  Synthetic oligonucleotide
aattacattcaattaatctaggctctattagccaatattcgtgccataccaatattcgca

SEQ ID NO: 307306 - DNA, 60 bp, Artificial
  Synthetic oligonucleotide
aattaccaagctagatacggtacattggctgcgcgcaatttcgattcaatacgcatttcg

SEQ ID NO: 307307 - DNA, 58 bp, Artificial
  Synthetic oligonucleotide
aattaccatacccattatcaaaaacgattaatgatgaatttcagaatcaaaagaatgc

SEQ ID NO: 307308 - DNA, 59 bp, Artificial
  Synthetic oligonucleotide
aattacccaatatcagaattgttcatacaactacagcgtaaattgagctcaattaaagc

SEQ ID NO: 307309 - DNA, 60 bp, Artificial
  Synthetic oligonucleotide
aattaccccatagtgcaaaatgcacaagggcaaatgacacaccagtccatatcacctagg

SEQ ID NO: 307310 - DNA, 60 bp, Artificial
  Synthetic oligonucleotide
aattaccctatagtgcaaaatgcacaagggcaaatggtacatcaggccatgtcacctaga

SEQ ID NO: 307311 - DNA, 60 bp, Artificial
  Synthetic oligonucleotide
aattaccggatggtatactagaacgatgcagcaggccccaattgtattgacgccggcaga

SEQ ID NO: 307312 - DNA, 57 bp, Artificial
  Synthetic oligonucleotide
aattacctacagggacaagttccgaacattcgtaatcaaggaataacagcatacata

SEQ ID NO: 307313 - DNA, 55 bp, Artificial
  Synthetic oligonucleotide
aattacgaaattcacgtaatgacttcgccggaagacgaagtttattgcgtgataa

SEQ ID NO: 307314 - DNA, 55 bp, Artificial
  Synthetic oligonucleotide
aattacgaccaatctagttaatcctgcacctctcgattatgtgaacttcgaggcg

SEQ ID NO: 307315 - DNA, 55 bp, Artificial
  Synthetic oligonucleotide
aattacgacgaatattgtcagacaatcaaccacacctagaatagaggcgatatcc

SEQ ID NO: 307316 - DNA, 58 bp, Artificial
  Synthetic oligonucleotide
aattacgagagtacccttgctagagctaggagactcgcagatagtttgtgttccggaa

SEQ ID NO: 307317 - DNA, 60 bp, Artificial
  Synthetic oligonucleotide
aattacgagattggatacagtcacgagtgatctctctggcagaacatccatactggagac

SEQ ID NO: 307318 - DNA, 51 bp, Artificial
  Synthetic oligonucleotide
aattacgcaagcacctcttacaggtgctgtgcaaaagttgttgaggagccc

SEQ ID NO: 307319 - DNA, 56 bp, Artificial
  Synthetic oligonucleotide
aattacgcactcaaacagcaagtggcctgccatgaccgtttcgtacccacgtagtt

SEQ ID NO: 307320 - DNA, 51 bp, Artificial
  Synthetic oligonucleotide
aattactataaggactccgccagctcaggactcgcaaagcaagatttctca

SEQ ID NO: 307321 - DNA, 60 bp, Artificial
  Synthetic oligonucleotide
aattactcaatggtataataccagtgcaattaagtacatagagagacctccaaatgaata

SEQ ID NO: 307322 - DNA, 54 bp, Artificial
  Synthetic oligonucleotide
aattactcggttgaaatcctcccgaataccaatgccctgattgtgtccggtacg

SEQ ID NO: 307323 - DNA, 60 bp, Artificial
  Synthetic oligonucleotide
aattactctattaccagacgccgagagattcagtttcccgagagtcattaattcagctga

SEQ ID NO: 307324 - DNA, 60 bp, Artificial
  Synthetic oligonucleotide
aattagaaaacagaatatgactgaattcatggagttgtggtctcaagggatctcagatga

SEQ ID NO: 307325 - DNA, 52 bp, Artificial
  Synthetic oligonucleotide
aattagaacacctttaattcaaattccgacaaatctgggtccacctaaaggc

SEQ ID NO: 307326 - DNA, 60 bp, Artificial
  Synthetic oligonucleotide
aattagaaccttgcaggacatactgacggaggagctgcagctgttgtgcccggagtgtcg

SEQ ID NO: 307327 - DNA, 50 bp, Artificial
  Synthetic oligonucleotide
aattagacatttaacaacttccggacgcacatatgctctcgtgtccgact

SEQ ID NO: 307328 - DNA, 56 bp, Artificial
  Synthetic oligonucleotide
aattagagggtgttcgaacgagatgggtgcacaagatcttgaataaggaatttagg

SEQ ID NO: 307329 - DNA, 60 bp, Artificial
  Synthetic oligonucleotide
aattagaggtgttgagttgaaatcaggctacaaagattggatactgtggatttcattcgc

SEQ ID NO: 307330 - DNA, 58 bp, Artificial
  Synthetic oligonucleotide
aattagatgtttatcaaatattacagggctgttattaacaagagatggtggaacgaga

SEQ ID NO: 307331 - DNA, 53 bp, Artificial
  Synthetic oligonucleotide
aattagattttcagagtccgcgacatcatattcagggtatatttttagagatc

SEQ ID NO: 307332 - DNA, 60 bp, Artificial
  Synthetic oligonucleotide
aattagattttcgcgcgactcggatccattgactcaaactcaatttgcttctcatacggc

SEQ ID NO: 307333 - DNA, 51 bp, Artificial
  Synthetic oligonucleotide
aattagcaaaccaagccccgaagtgggttgttcttccgactcgggtggtct

SEQ ID NO: 307334 - DNA, 60 bp, Artificial
  Synthetic oligonucleotide
aattagcaaatgtcgtaagaaagatgatgactaactcacaagacacagagctttccttta

SEQ ID NO: 307335 - DNA, 55 bp, Artificial
  Synthetic oligonucleotide
aattagcagataaacttacactcttccatgtgttcgcctcgttttgccacaacgc

SEQ ID NO: 307336 - DNA, 56 bp, Artificial
  Synthetic oligonucleotide
aattagcatttcatcccgaagtgggtttgaaatcttattgatagaagacggttgga

SEQ ID NO: 307337 - DNA, 57 bp, Artificial
  Synthetic oligonucleotide
aattagccaacgcaattactaatttctggtatgcgtcctcagtatcggggtctagga

SEQ ID NO: 307338 - DNA, 55 bp, Artificial
  Synthetic oligonucleotide
aattagccaccccaccggtgatacgctgccgctaagcggcgaagtacgtcctccc

SEQ ID NO: 307339 - DNA, 60 bp, Artificial
  Synthetic oligonucleotide
aattagcccaataattgtctgtaaccagaagaatgtactgtatatatactcgtatatgta

SEQ ID NO: 307340 - DNA, 60 bp, Artificial
  Synthetic oligonucleotide
aattagccctttctatatattgggtccgactgatatattatattcgttgtgactcagcag

SEQ ID NO: 307341 - DNA, 60 bp, Artificial
  Synthetic oligonucleotide
aattagctgagagatctagtacagggcaaggaggaatatccccaggagctcctcgttctc

SEQ ID NO: 307342 - DNA, 58 bp, Artificial
  Synthetic oligonucleotide
aattaggaacgggacttatgaccatgacatatacagggatgaggcattgaacaaccgg

SEQ ID NO: 307343 - DNA, 55 bp, Artificial
  Synthetic oligonucleotide
aattaggaccaagggaaaacgtagcagttatacaggttggtggctcagatatact

SEQ ID NO: 307344 - DNA, 52 bp, Artificial
  Synthetic oligonucleotide
aattagtcaaacgtgttgatcaaattgttacccgttcacctttaaacattac

SEQ ID NO: 307345 - DNA, 59 bp, Artificial
  Synthetic oligonucleotide
aattagtgacactgagtggaaagatacactatctcagctgtttttaaccaagggatgcc

SEQ ID NO: 307346 - DNA, 54 bp, Artificial
  Synthetic oligonucleotide
aattagtggaacttacaataacactgggaacaagccaatcctctatttctgggg

SEQ ID NO: 307347 - DNA, 55 bp, Artificial
  Synthetic oligonucleotide
aattagttcaccataccaattgtcacaaagttgtcgtacatttagggccttacaa

SEQ ID NO: 307348 - DNA, 55 bp, Artificial
  Synthetic oligonucleotide
aattagttttgtaccaggtgtatttatgttggcaagaagcgttgatgaaatgagc

SEQ ID NO: 307349 - DNA, 57 bp, Artificial
  Synthetic oligonucleotide
aattataaggaatagaattgaacagttaattctacaatgtaagttgtgagaacgcta

SEQ ID NO: 307350 - DNA, 55 bp, Artificial
  Synthetic oligonucleotide
aattataaggtaaatgtcactactactacatgcaccattagaaactgtaaaaaac

SEQ ID NO: 307351 - DNA, 60 bp, Artificial
  Synthetic oligonucleotide
aattataatgtgatcgattttcatacatcgacctttgagtcgcatggtagcctgctcgaa

SEQ ID NO: 307352 - DNA, 55 bp, Artificial
  Synthetic oligonucleotide
aattatagaggatagttcggttcaagaattatcttcacgatggctggcgtgagga

SEQ ID NO: 307353 - DNA, 55 bp, Artificial
  Synthetic oligonucleotide
aattataggagcgccagctattattctcgtctactgtccggggttgcaattttgc

SEQ ID NO: 307354 - DNA, 56 bp, Artificial
  Synthetic oligonucleotide
aattataggcgtaagacatctgataccagggtatggtacagagtgtacttagacat

SEQ ID NO: 307355 - DNA, 50 bp, Artificial
  Synthetic oligonucleotide
aattatagtatacaagaatacttggaggaccgccaacgatatgaggaaga

SEQ ID NO: 307356 - DNA, 55 bp, Artificial
  Synthetic oligonucleotide
aattatagtgtcacaacatccatcaacgacggaaccggtcgagttaccgctgcga

SEQ ID NO: 307357 - DNA, 60 bp, Artificial
  Synthetic oligonucleotide
aattatataccagctacagacgatattcctagtatattaattgatggattcagctctgat

SEQ ID NO: 307358 - DNA, 49 bp, Artificial
  Synthetic oligonucleotide
aattatatgttactaaaagggtgtaaccgaaaacggttgcaaccgaaac

SEQ ID NO: 307359 - DNA, 49 bp, Artificial
  Synthetic oligonucleotide
aattatcaacacggaaaaccgctcaaccacaagggtttgaaacggtttt

SEQ ID NO: 307360 - DNA, 58 bp, Artificial
  Synthetic oligonucleotide
aattatcaatcttcggacatatgtaagcgtgggacacgtcaaaacagtgataacctgg

SEQ ID NO: 307361 - DNA, 57 bp, Artificial
  Synthetic oligonucleotide
aattatcaatgaaccgggagctggtcagagtacacgtcactttacactaccgtggcc

SEQ ID NO: 307362 - DNA, 60 bp, Artificial
  Synthetic oligonucleotide
aattatcacatgtttgcagtaggaggtgaacctctagatttacaaggcatagagagtaat

SEQ ID NO: 307363 - DNA, 60 bp, Artificial
  Synthetic oligonucleotide
aattatcacgccaatcacatgccttgcaaaagttcgattcagtattttataagagacgcg

SEQ ID NO: 307364 - DNA, 60 bp, Artificial
  Synthetic oligonucleotide
aattatccatcaatattgcatccaatagattatgctttcaatgaatacttcctacaacac

SEQ ID NO: 307365 - DNA, 52 bp, Artificial
  Synthetic oligonucleotide
aattatccattactatttgcctcctggaagatttgcgatgcgacacaagaaa

SEQ ID NO: 307366 - DNA, 54 bp, Artificial
  Synthetic oligonucleotide
aattatcctgccttgctagccgtttcgacgagttgtttcttaaggtacaacagg

SEQ ID NO: 307367 - DNA, 60 bp, Artificial
  Synthetic oligonucleotide
aattatcgctagcagcaatttcttagcagccaatcctgaatctggagtgcatgattcgga

SEQ ID NO: 307368 - DNA, 60 bp, Artificial
  Synthetic oligonucleotide
aattatctgatcagttgctagtatcaaaaaacgcaattgtatctaaaggtatagcagtaa

SEQ ID NO: 307369 - DNA, 55 bp, Artificial
  Synthetic oligonucleotide
aattatctgtcgctcggtgaaagacatacggaaaatacggtctgaagccatgacg

SEQ ID NO: 307370 - DNA, 60 bp, Artificial
  Synthetic oligonucleotide
aattatgaagctagaagagagaacaggaatcagttgggatcttggcgtagaagatgcctc

SEQ ID NO: 307371 - DNA, 60 bp, Artificial
  Synthetic oligonucleotide
aattatgactggaagggcagtctgagcatgaagctcaagaatcatcacgggctcggtcag

SEQ ID NO: 307372 - DNA, 60 bp, Artificial
  Synthetic oligonucleotide
aattatgacttcatgtttcaagcaaacataatattcactcaaactctcgtgacattcaaa

SEQ ID NO: 307373 - DNA, 60 bp, Artificial
  Synthetic oligonucleotide
aattatgatggcacaacatccttcagattcacaaattatgaaggtgccagttcttcaaag

SEQ ID NO: 307374 - DNA, 60 bp, Artificial
  Synthetic oligonucleotide
aattatgcattataacacttaatccagaggtaatgacatacatccacactatggatgcat

SEQ ID NO: 307375 - DNA, 55 bp, Artificial
  Synthetic oligonucleotide
aattatgcctgctaggttttaccctaacagcacaaaatatttgcctctagacaaa

SEQ ID NO: 307376 - DNA, 57 bp, Artificial
  Synthetic oligonucleotide
aattatgcctttaagatggctatcgaatttcatgggtcggaagcggagacgttgaac

SEQ ID NO: 307377 - DNA, 50 bp, Artificial
  Synthetic oligonucleotide
aattatgcgattgaggtctcttacgcatacagattgggagagagggctct

SEQ ID NO: 307378 - DNA, 56 bp, Artificial
  Synthetic oligonucleotide
aattatgctgtaagctggggtcttgttatcattgggttgttgaccggactgctttt

SEQ ID NO: 307379 - DNA, 60 bp, Artificial
  Synthetic oligonucleotide
aattatggaaagatcaatgttgttatcatgtgatactactctgcaattgttatcagactt

SEQ ID NO: 307380 - DNA, 60 bp, Artificial
  Synthetic oligonucleotide
aattatggaggcccaatgatctagcccacattgttttgcctgtacgactctcaccttcta

SEQ ID NO: 307381 - DNA, 60 bp, Artificial
  Synthetic oligonucleotide
aattatgggagtgtaccacagacaccgtgtgatacatgtccccacaatgcctgagagcga

SEQ ID NO: 307382 - DNA, 54 bp, Artificial
  Synthetic oligonucleotide
aattatggtaccaactggagaaagaacccatagtgggggcagaaactttctatg

SEQ ID NO: 307383 - DNA, 58 bp, Artificial
  Synthetic oligonucleotide
aattatgtatcgcactttaaacgaggtcggtttaacgtgcattcctgctgcccattgc

SEQ ID NO: 307384 - DNA, 55 bp, Artificial
  Synthetic oligonucleotide
aattatgtggccctaatgacctagcccaaacagttttgccggtacgactgtcgcc

SEQ ID NO: 307385 - DNA, 56 bp, Artificial
  Synthetic oligonucleotide
aattatgtgggcctaacgcacgagcccacattgtcttccccgtccgactatcgccc

SEQ ID NO: 307386 - DNA, 60 bp, Artificial
  Synthetic oligonucleotide
aattatgttaaccgtatagtcttgtcattgattgtagttatgtcaatgattatgtaatag

SEQ ID NO: 307387 - DNA, 59 bp, Artificial
  Synthetic oligonucleotide
aattatgttgtaccaaccagttgcagccgaaaatataactcaatggaacctgagtgaca

SEQ ID NO: 307388 - DNA, 60 bp, Artificial
  Synthetic oligonucleotide
aattatgtttcgatcggaagaaaccatcgattgatattaggagatgagccatataggaaa

SEQ ID NO: 307389 - DNA, 56 bp, Artificial
  Synthetic oligonucleotide
aattattaatcatcaaacttattatacacaaaccagtttctcttccgctcaagtcg

SEQ ID NO: 307390 - DNA, 55 bp, Artificial
  Synthetic oligonucleotide
aattattccacattgtaattgcacttcaggtgtttactactcccagtactacagg

SEQ ID NO: 307391 - DNA, 57 bp, Artificial
  Synthetic oligonucleotide
aattattctcatctccctaaccttgaacgtgactttaacgttgcatctatttatgtc

SEQ ID NO: 307392 - DNA, 55 bp, Artificial
  Synthetic oligonucleotide
aattattctcctcgtgcaggtattaggccaagaattaacaaggccgctgaatggg

SEQ ID NO: 307393 - DNA, 50 bp, Artificial
  Synthetic oligonucleotide
aattattgacgatgtcgggacacgattttactggacgtacacccccagta

SEQ ID NO: 307394 - DNA, 55 bp, Artificial
  Synthetic oligonucleotide
aattattgctgccaggaacatagtaaggagagcaacggtgtcagcagacccgcta

SEQ ID NO: 307395 - DNA, 56 bp, Artificial
  Synthetic oligonucleotide
aattattgtcatatggagacgttactcgttttttgtcaaataacgctatggtattg

SEQ ID NO: 307396 - DNA, 60 bp, Artificial
  Synthetic oligonucleotide
aattattgtcgcgcgatgactgactatggcccattgtactatgtgaaggacgtggctata

SEQ ID NO: 307397 - DNA, 54 bp, Artificial
  Synthetic oligonucleotide
aattatttccactaaccatgacatctactctgtagttggtggcaatactgtttc

SEQ ID NO: 307398 - DNA, 56 bp, Artificial
  Synthetic oligonucleotide
aattatttccatctattgtgaacatccataaaagagtagtaaacgttggaccgaga

SEQ ID NO: 307399 - DNA, 52 bp, Artificial
  Synthetic oligonucleotide
aattatttcctttattagtcaaaaaacataaacgcgtgataaatgttggacc

SEQ ID NO: 307400 - DNA, 58 bp, Artificial
  Synthetic oligonucleotide
aattatttcgaaatgcccaagcgggatccctcatggcgccagatggcgggaacctcaa

SEQ ID NO: 307401 - DNA, 55 bp, Artificial
  Synthetic oligonucleotide
aattattttatgcgaatacaggttgccttccgtgaagtccacttggtatgacacc

SEQ ID NO: 307402 - DNA, 58 bp, Artificial
  Synthetic oligonucleotide
aattcaaaaaacagcatacagctcagtttccaggaaactcttgggattcttcacatgg

SEQ ID NO: 307403 - DNA, 55 bp, Artificial
  Synthetic oligonucleotide
aattcaaaatttgcagtactattaatttgtttcgcgtaaggttgaggatatacta

SEQ ID NO: 307404 - DNA, 57 bp, Artificial
  Synthetic oligonucleotide
aattcaaacgaggaggtcattcgagctaaagaagctgtgggagcaaacccgctcaaa

SEQ ID NO: 307405 - DNA, 59 bp, Artificial
  Synthetic oligonucleotide
aattcaaaggttggtgtctagattgttgccaatatacaaatctaacatactgtagagga

SEQ ID NO: 307406 - DNA, 55 bp, Artificial
  Synthetic oligonucleotide
aattcaacaaagcggtaaggggctattcataaattacgtaagcataatttggagc

SEQ ID NO: 307407 - DNA, 59 bp, Artificial
  Synthetic oligonucleotide
aattcaacaacacttactaaaggaggtgacaatgccactcagagtagagacacttggta

SEQ ID NO: 307408 - DNA, 60 bp, Artificial
  Synthetic oligonucleotide
aattcaacatcaccaatgagtgaaatctgtgtcagagatgatatatccctagttaagtct

SEQ ID NO: 307409 - DNA, 50 bp, Artificial
  Synthetic oligonucleotide
aattcaacatttgtgattgacggacccgaaaccaaagagtgtccagacga

SEQ ID NO: 307410 - DNA, 58 bp, Artificial
  Synthetic oligonucleotide
aattcaacttctgttcacacttgatcaggaggggtcatgctgagctaacttcatggcc

SEQ ID NO: 307411 - DNA, 58 bp, Artificial
  Synthetic oligonucleotide
aattcaagaagacggactaagattagcagtatttagacttagtacagctcatcgtaaa

SEQ ID NO: 307412 - DNA, 58 bp, Artificial
  Synthetic oligonucleotide
aattcaagcaagaccgtctcatttctggaaggcggtactaaatgatagccccgaagca

SEQ ID NO: 307413 - DNA, 58 bp, Artificial
  Synthetic oligonucleotide
aattcaagcctaggtcagcattaaaatgcaagggtttccatgttccagcaaaggaaca

SEQ ID NO: 307414 - DNA, 59 bp, Artificial
  Synthetic oligonucleotide
aattcaagcttagtaggcgttgacgttgcaaggaagcaaataggagtgctttgcaaaga

SEQ ID NO: 307415 - DNA, 58 bp, Artificial
  Synthetic oligonucleotide
aattcaatccggacaagaattgaattgtcgtcgttgatcttcacgtcgatggtaaata

SEQ ID NO: 307416 - DNA, 60 bp, Artificial
  Synthetic oligonucleotide
aattcaatgaaggcccatgacgagcccaagatgacagcccagcggatacatgagaaccag

SEQ ID NO: 307417 - DNA, 60 bp, Artificial
  Synthetic oligonucleotide
aattcaatgttcgatattaaggatgaacatatacgtgatgcgattatatacaaaccagtc

SEQ ID NO: 307418 - DNA, 60 bp, Artificial
  Synthetic oligonucleotide
aattcaattaaagtcacgcagtctgatgttgcgagtgtactttcaagagtagtttctgta

SEQ ID NO: 307419 - DNA, 60 bp, Artificial
  Synthetic oligonucleotide
aattcaattgatgcagacctgggagacaatgtaattagccctgaaggccagggcagcaac

SEQ ID NO: 307420 - DNA, 58 bp, Artificial
  Synthetic oligonucleotide
aattcacaaaaatgaggccacatttatcgctcacgcttacaaattatttggtagtgaa

SEQ ID NO: 307421 - DNA, 59 bp, Artificial
  Synthetic oligonucleotide
aattcacaaatgagttagttgcagcacattactatcctacttatttttatgaacactat

SEQ ID NO: 307422 - DNA, 58 bp, Artificial
  Synthetic oligonucleotide
aattcacaaccctactcagcagaatgcgatggtgcagatacaagtggtcttctacatc

SEQ ID NO: 307423 - DNA, 58 bp, Artificial
  Synthetic oligonucleotide
aattcacacgcagcaggacccggtttgatcactcggaactacagttctttcacagtta

SEQ ID NO: 307424 - DNA, 60 bp, Artificial
  Synthetic oligonucleotide
aattcaccagcacccgcatatggattaccagcgaaaaggatacatgcgacttatacaaat

SEQ ID NO: 307425 - DNA, 60 bp, Artificial
  Synthetic oligonucleotide
aattcacccagaaactctcacaggatcaggcaatgcatctaaagggtgggaatactcata

SEQ ID NO: 307426 - DNA, 56 bp, Artificial
  Synthetic oligonucleotide
aattcacgcgatcagtttgtgtccttgatttaggagaaaagacttattgcggtaaa

SEQ ID NO: 307427 - DNA, 58 bp, Artificial
  Synthetic oligonucleotide
aattcacgggaactgaagtttggtaatacgttgcttcacattgctgcaggtactgaaa

SEQ ID NO: 307428 - DNA, 59 bp, Artificial
  Synthetic oligonucleotide
aattcacgtcctggcttaatcaacgcctcatgaagcatcgaacttcaggagaggttacg

SEQ ID NO: 307429 - DNA, 55 bp, Artificial
  Synthetic oligonucleotide
aattcagaaatgcttgaactgctcatatcatcagaaagagctgaaaagttccgtg

SEQ ID NO: 307430 - DNA, 60 bp, Artificial
  Synthetic oligonucleotide
aattcagatagatggttagctaccatactaattgaaccaaacgtcacatcacaaagtaga

SEQ ID NO: 307431 - DNA, 60 bp, Artificial
  Synthetic oligonucleotide
aattcagatcgtgcacatcaagtgactgatattttgaagaaattgggcttgaacgtatcg

SEQ ID NO: 307432 - DNA, 52 bp, Artificial
  Synthetic oligonucleotide
aattcagcacacaattcccagtggagcttagggttgaagaatccctttcatt

SEQ ID NO: 307433 - DNA, 51 bp, Artificial
  Synthetic oligonucleotide
aattcagcacctttatatctacacacaggggtcccccagtagccattataa

SEQ ID NO: 307434 - DNA, 60 bp, Artificial
  Synthetic oligonucleotide
aattcagcctcagaggtatactgcttggaggatgagtcgtcgatgtcaattgggtttggt

SEQ ID NO: 307435 - DNA, 59 bp, Artificial
  Synthetic oligonucleotide
aattcagctgacggagcgactacatggtacttcaacccagtgattcttagaccaaataa

SEQ ID NO: 307436 - DNA, 60 bp, Artificial
  Synthetic oligonucleotide
aattcaggcacaacagagcctgttgcaactcacagtctggggcgtcaagcagctccaggc

SEQ ID NO: 307437 - DNA, 56 bp, Artificial
  Synthetic oligonucleotide
aattcagtaacagtaagacaagatttagaacgtcaactaactgatttacgagagga

SEQ ID NO: 307438 - DNA, 56 bp, Artificial
  Synthetic oligonucleotide
aattcagtaaggcctatatatttgtctaacagttctttccaatacacaactttagc

SEQ ID NO: 307439 - DNA, 56 bp, Artificial
  Synthetic oligonucleotide
aattcagtaaggcctattaagcattgtgtttttcaagtatgttgcatccatttgtt

SEQ ID NO: 307440 - DNA, 60 bp, Artificial
  Synthetic oligonucleotide
aattcagtagatagggtagtgtacagcattatatatccggtagaagtagaagctggctat

SEQ ID NO: 307441 - DNA, 60 bp, Artificial
  Synthetic oligonucleotide
aattcagtgaaaagactttcagattctcacaagttgttgacaagtgtctcaattgatgca

SEQ ID NO: 307442 - DNA, 60 bp, Artificial
  Synthetic oligonucleotide
aattcagtggagtcttggaattcaataaattcgaggcattcacatcaaatggatggggtg

SEQ ID NO: 307443 - DNA, 59 bp, Artificial
  Synthetic oligonucleotide
aattcagttagtgtccagaacatctgccaacccaggaaggaaattcttcaagtgcgcaa

SEQ ID NO: 307444 - DNA, 56 bp, Artificial
  Synthetic oligonucleotide
aattcagttgtgatgtctgggtctaacaccactagaaaagctccttttatggtctt

SEQ ID NO: 307445 - DNA, 58 bp, Artificial
  Synthetic oligonucleotide
aattcataagacgtaagaccgataaacgctgccagttccacgaaataaatatctcatc

SEQ ID NO: 307446 - DNA, 55 bp, Artificial
  Synthetic oligonucleotide
aattcatagatactgcttatacggtcagtcatagacgtacgattaagacgcgagg

SEQ ID NO: 307447 - DNA, 57 bp, Artificial
  Synthetic oligonucleotide
aattcatatacgtggtacaataattatcataggaagtggagttaatttagatatggt

SEQ ID NO: 307448 - DNA, 60 bp, Artificial
  Synthetic oligonucleotide
aattcatatgcaccaatatcacttgaaaagagacgtgcacagatatcagcactactaaca

SEQ ID NO: 307449 - DNA, 57 bp, Artificial
  Synthetic oligonucleotide
aattcatcaattcactgtttgagcccaaagacattgcaaggtaccccgaggagaccg

SEQ ID NO: 307450 - DNA, 55 bp, Artificial
  Synthetic oligonucleotide
aattcatccgcaggaggggacctagaagttacatcacatacctttaattgtggag

SEQ ID NO: 307451 - DNA, 59 bp, Artificial
  Synthetic oligonucleotide
aattcatccttccttcgaaacacttcaagagtccaagtcaaatgagactcaagaagcgc

SEQ ID NO: 307452 - DNA, 53 bp, Artificial
  Synthetic oligonucleotide
aattcatctcgaagtcttgttctattcaaaacggaatctggctttgaatgggg

SEQ ID NO: 307453 - DNA, 55 bp, Artificial
  Synthetic oligonucleotide
aattcatctcggagccatgctccgataacaggatgtgtatcctgcgatggcatcc

SEQ ID NO: 307454 - DNA, 60 bp, Artificial
  Synthetic oligonucleotide
aattcatcttccggtgatggctgcaggtaactgaaggcaagtccgtaatggttgatcttc

SEQ ID NO: 307455 - DNA, 55 bp, Artificial
  Synthetic oligonucleotide
aattcatgcatctctcaagacttatcgtctgggttgttccaactatacctaatcc

SEQ ID NO: 307456 - DNA, 60 bp, Artificial
  Synthetic oligonucleotide
aattcatggaggccatagttgagagcggaccgcttgcttacaagggcgacataaaatcag

SEQ ID NO: 307457 - DNA, 59 bp, Artificial
  Synthetic oligonucleotide
aattcatgtctgcaatgactactctgcgtttgaccaatctcagcatggtgaggccgttg

SEQ ID NO: 307458 - DNA, 58 bp, Artificial
  Synthetic oligonucleotide
aattcatttggcgcgtcatgaccaacccagtggacgcctatggaaccctggtcaggac

SEQ ID NO: 307459 - DNA, 58 bp, Artificial
  Synthetic oligonucleotide
aattccaaccgccagttggtggcgttgcatgccggcacggacacacaaggtgaaacaa

SEQ ID NO: 307460 - DNA, 59 bp, Artificial
  Synthetic oligonucleotide
aattccaagtcacagactaatagacaagtcatagttgacaataacaactggtctggtta

SEQ ID NO: 307461 - DNA, 60 bp, Artificial
  Synthetic oligonucleotide
aattccacgcacgagatgtactgggtaagtcgagcttcaggcaatgtggtacattcagtg

SEQ ID NO: 307462 - DNA, 56 bp, Artificial
  Synthetic oligonucleotide
aattccagacccaaccgggtctggaattgggctctgcaattgggtgtgacccagac

SEQ ID NO: 307463 - DNA, 58 bp, Artificial
  Synthetic oligonucleotide
aattccagcattgccgtgtacgacaatcgggcccatacgtgacgatgtgaagaaacgt

SEQ ID NO: 307464 - DNA, 55 bp, Artificial
  Synthetic oligonucleotide
aattccaggatccacaaccaccagtacgggaccatgcagaacctgcacgactcct

SEQ ID NO: 307465 - DNA, 58 bp, Artificial
  Synthetic oligonucleotide
aattccagtctccatctgggaccgagtccgactttcggcccataccgccgctcacaga

SEQ ID NO: 307466 - DNA, 56 bp, Artificial
  Synthetic oligonucleotide
aattccagttgggctttccagactacatggtatttggaaattgccatagacaaccc

SEQ ID NO: 307467 - DNA, 60 bp, Artificial
  Synthetic oligonucleotide
aattccatcacaaacatgcatcgcgagaagacacctgggaccaggcccaacacaacatac

SEQ ID NO: 307468 - DNA, 57 bp, Artificial
  Synthetic oligonucleotide
aattcccacctttaatcatgactggctttccgtacttcgtgttgctttgccagtctc

SEQ ID NO: 307469 - DNA, 59 bp, Artificial
  Synthetic oligonucleotide
aattcccaggagctcttggtccaatcatgatgcctcatcgggagtgagttcggcatgcc

SEQ ID NO: 307470 - DNA, 53 bp, Artificial
  Synthetic oligonucleotide
aattcccatattaacagtcgtttattaattacgctaaattcaaatcccaacat

SEQ ID NO: 307471 - DNA, 54 bp, Artificial
  Synthetic oligonucleotide
aattcccatctttcgcggggtgataagaggactcgaaactaaaagatggtcgcg

SEQ ID NO: 307472 - DNA, 54 bp, Artificial
  Synthetic oligonucleotide
aattcccattagaacttccatgggttcaaacagagaccggagaggtggttctgg

SEQ ID NO: 307473 - DNA, 55 bp, Artificial
  Synthetic oligonucleotide
aattccccacctcactcgggagagtgccagtgtacgaaccaccgcccggctacga

SEQ ID NO: 307474 - DNA, 54 bp, Artificial
  Synthetic oligonucleotide
aattcccctccccaatttaaatgaggacctaacctgtggaaatctactgatgtg

SEQ ID NO: 307475 - DNA, 59 bp, Artificial
  Synthetic oligonucleotide
aattcccgacctatcgggacattcaagttgcgaaggcatgagtcatcgttgaaaatatc

SEQ ID NO: 307476 - DNA, 53 bp, Artificial
  Synthetic oligonucleotide
aattcccggacgataagaaaacagtttaggaagagtctctcgaggaccctaga

SEQ ID NO: 307477 - DNA, 56 bp, Artificial
  Synthetic oligonucleotide
aattccctactaccaagaaaagacggaagaaatgcagagttgtctcctctcactct

SEQ ID NO: 307478 - DNA, 58 bp, Artificial
  Synthetic oligonucleotide
aattccctcctgggcttgggccctctgtgctaccggcgttgccataccaatcatcgcc

SEQ ID NO: 307479 - DNA, 55 bp, Artificial
  Synthetic oligonucleotide
aattccctcctgtagtaactatcggttttgtcagattcacgctctttacgtagac

SEQ ID NO: 307480 - DNA, 58 bp, Artificial
  Synthetic oligonucleotide
aattccctgacctgaaggcaaatctctggactcccctccagtgccctttacatcctca

SEQ ID NO: 307481 - DNA, 55 bp, Artificial
  Synthetic oligonucleotide
aattcccttacgccatgaagtgattcctgcacttagtaccgtaatgtcgcgcatg

SEQ ID NO: 307482 - DNA, 54 bp, Artificial
  Synthetic oligonucleotide
aattccgagcaactccatggtagactccgtcccccttctccacactccttcccc

SEQ ID NO: 307483 - DNA, 55 bp, Artificial
  Synthetic oligonucleotide
aattccgatacacgatctattaccacatatgcttcaggagcttggattcaaattg

SEQ ID NO: 307484 - DNA, 55 bp, Artificial
  Synthetic oligonucleotide
aattccgcagcaaaccgcccaaccacactttttggactgatgaacttgtttaaca

SEQ ID NO: 307485 - DNA, 57 bp, Artificial
  Synthetic oligonucleotide
aattccgcctgggagctcccaccgctggtatatgtcgatggctccccgctaaccgta

SEQ ID NO: 307486 - DNA, 60 bp, Artificial
  Synthetic oligonucleotide
aattccgctgcattttactacagagtatagatatagcttagattagaattgtatgatgtg

SEQ ID NO: 307487 - DNA, 55 bp, Artificial
  Synthetic oligonucleotide
aattccggctaattatcgattgaaggagtattctggtcttgaacttcaccgtggg

SEQ ID NO: 307488 - DNA, 54 bp, Artificial
  Synthetic oligonucleotide
aattccggtctttaagcatcagggtagaccgatgaggaataaagaaccctataa

SEQ ID NO: 307489 - DNA, 55 bp, Artificial
  Synthetic oligonucleotide
aattccggttggtatccaagcttgaactattgtgtttgtaaccagaggtattcac

SEQ ID NO: 307490 - DNA, 50 bp, Artificial
  Synthetic oligonucleotide
aattccgtaggtaaacgaacagatactatagctgtactagggaataagta

SEQ ID NO: 307491 - DNA, 60 bp, Artificial
  Synthetic oligonucleotide
aattcctaacatcatacaggaagcaatcaacattgctctaatagctgtcagcctcattgc

SEQ ID NO: 307492 - DNA, 58 bp, Artificial
  Synthetic oligonucleotide
aattcctaacatcggatccaggccttgggtcagaggccaatctaggagaataagtatc

SEQ ID NO: 307493 - DNA, 55 bp, Artificial
  Synthetic oligonucleotide
aattcctaatctcttacaccccgcctggagcaggagaacccaaaacactggacca

SEQ ID NO: 307494 - DNA, 58 bp, Artificial
  Synthetic oligonucleotide
aattcctatggatacatttattgttagcacaaaccctaacacagtaactagtagcaca

SEQ ID NO: 307495 - DNA, 58 bp, Artificial
  Synthetic oligonucleotide
aattcctatggctgtgtcctcgtccaatcttaatgaattggtagcctcccacggctct

SEQ ID NO: 307496 - DNA, 60 bp, Artificial
  Synthetic oligonucleotide
aattcctatgttcatggcattatcagaagggtctatcccttatgatattaatactatgct

SEQ ID NO: 307497 - DNA, 55 bp, Artificial
  Synthetic oligonucleotide
aattcctcaatccggatagggagtacgacttcagagatctcacttggtgtatcaa

SEQ ID NO: 307498 - DNA, 58 bp, Artificial
  Synthetic oligonucleotide
aattcctcttactccctgttgagccccttactttctcatggatgcttctccgcgagat

SEQ ID NO: 307499 - DNA, 55 bp, Artificial
  Synthetic oligonucleotide
aattcctgagctcccctgacgtccaggccgtcccctctccgagtgaagggagact

SEQ ID NO: 307500 - DNA, 59 bp, Artificial
  Synthetic oligonucleotide
aattcctgggtaggagacatattgagaacccaagaatcatcttgtacttgcatccaagg

SEQ ID NO: 307501 - DNA, 57 bp, Artificial
  Synthetic oligonucleotide
aattcctggttgggaaggaccataagcaaagattcaagatcagggtatgaggtacta

SEQ ID NO: 307502 - DNA, 60 bp, Artificial
  Synthetic oligonucleotide
aattccttgaagtgctttaaataatgcggatctacgtcatcaatgacgttgtaccacgca

SEQ ID NO: 307503 - DNA, 56 bp, Artificial
  Synthetic oligonucleotide
aattccttgctttgtatctcaatttttggtggtcggaattcgacgtcagtcgaatg

SEQ ID NO: 307504 - DNA, 51 bp, Artificial
  Synthetic oligonucleotide
aattcgaacatcgttagggaaaacggctttagccaattatcttaaatccct

SEQ ID NO: 307505 - DNA, 55 bp, Artificial
  Synthetic oligonucleotide
aattcgaagtccggtgagaatggcggaggagaatccctcactgtttcgccgtgtg

SEQ ID NO: 307506 - DNA, 59 bp, Artificial
  Synthetic oligonucleotide
aattcgagccatttcagtctttggtccctaaagcagctagaggtcaatacagcggattc

SEQ ID NO: 307507 - DNA, 53 bp, Artificial
  Synthetic oligonucleotide
aattcgaggttccaaccaaatactagacaaaatcgcttccgactacaaatcgt

SEQ ID NO: 307508 - DNA, 55 bp, Artificial
  Synthetic oligonucleotide
aattcgcatcaggagaagtgttcaatttgacgatccagagtggacttctgtcgtg

SEQ ID NO: 307509 - DNA, 50 bp, Artificial
  Synthetic oligonucleotide
aattcgccaggtaatactagctggcgaacgttccccagccagttgagtga

SEQ ID NO: 307510 - DNA, 51 bp, Artificial
  Synthetic oligonucleotide
aattcgctaacgccgcgctatatgaatcttttatcagaacggcaattaagc

SEQ ID NO: 307511 - DNA, 60 bp, Artificial
  Synthetic oligonucleotide
aattcgctcaattagatatgcttcactattacatagtatgctcgcgaagcatgctgccag

SEQ ID NO: 307512 - DNA, 52 bp, Artificial
  Synthetic oligonucleotide
aattcgcttacatgttcggtatcacaggcaacggtatcgaaagaatggaagg

SEQ ID NO: 307513 - DNA, 54 bp, Artificial
  Synthetic oligonucleotide
aattcggagattctttggaaaggaactacaatggtttgcccaggttgaatggtg

SEQ ID NO: 307514 - DNA, 60 bp, Artificial
  Synthetic oligonucleotide
aattcggatctcgtcagtgcgcgcgtcacgcgcatacaccaggccgtgtgtttctgcttc

SEQ ID NO: 307515 - DNA, 54 bp, Artificial
  Synthetic oligonucleotide
aattcgggacataccacgtggtttagttccgcctcaaactccaacaaatcgaga

SEQ ID NO: 307516 - DNA, 56 bp, Artificial
  Synthetic oligonucleotide
aattcgggtgaagaaacaataagtgtagattgcgtggtagatataaatagaataag

SEQ ID NO: 307517 - DNA, 57 bp, Artificial
  Synthetic oligonucleotide
aattcggtgaaatcaccattgtccacaccccaacctcccgccagtacaaggacatgc

SEQ ID NO: 307518 - DNA, 55 bp, Artificial
  Synthetic oligonucleotide
aattcgtaccgaaccatctcacactcactgcgtcagttagtcccagcatacacta

SEQ ID NO: 307519 - DNA, 60 bp, Artificial
  Synthetic oligonucleotide
aattcgtcgtcgacgtatggctctcttcttggcaatcctgtgctgtggcttgatagaggg

SEQ ID NO: 307520 - DNA, 50 bp, Artificial
  Synthetic oligonucleotide
aattcgttacgtttggaaaatttccgtgggtggagtaccacgcgaaatgt

SEQ ID NO: 307521 - DNA, 57 bp, Artificial
  Synthetic oligonucleotide
aattctaaagtgtaacgagacaaagttcaatggatcaggaccatgtaaaaatgtcac

SEQ ID NO: 307522 - DNA, 54 bp, Artificial
  Synthetic oligonucleotide
aattctaacttccttgtcatcaaatttaaacgcagtcatgttttggttggaaaa

SEQ ID NO: 307523 - DNA, 56 bp, Artificial
  Synthetic oligonucleotide
aattctaagtttcgttgaagcatcacttctatgatgaaattacggacgagccacgt

SEQ ID NO: 307524 - DNA, 58 bp, Artificial
  Synthetic oligonucleotide
aattctaccagacaccacctatcttggccccctaaactgcaaatcatgttggcaaaga

SEQ ID NO: 307525 - DNA, 57 bp, Artificial
  Synthetic oligonucleotide
aattctacccggtggtggttgataacgatactgttggcgttctagatcagtgttgga

SEQ ID NO: 307526 - DNA, 50 bp, Artificial
  Synthetic oligonucleotide
aattctatactgattttctatagccgccacatcgtcttgattaaaaccaa

SEQ ID NO: 307527 - DNA, 51 bp, Artificial
  Synthetic oligonucleotide
aattctatgcactcacccccatgggaactggacaggggcgtaggagagtcc

SEQ ID NO: 307528 - DNA, 55 bp, Artificial
  Synthetic oligonucleotide
aattctatgcgactgttgttggtggaccctccgggatgaaggaacaagctctggt

SEQ ID NO: 307529 - DNA, 60 bp, Artificial
  Synthetic oligonucleotide
aattctatggagttatcattagattaccatcggatattgatcaagatgtccccggtctgt

SEQ ID NO: 307530 - DNA, 58 bp, Artificial
  Synthetic oligonucleotide
aattctattctcaggaagccgtagctaagtttgctagtgtatacgcaaagctaggtaa

SEQ ID NO: 307531 - DNA, 55 bp, Artificial
  Synthetic oligonucleotide
aattctcaacgcaattcccaataagaattgtcaccgagcaatccataagctttaa

SEQ ID NO: 307532 - DNA, 60 bp, Artificial
  Synthetic oligonucleotide
aattctcaatgtcattggatgtttgcacacaaacgatggtagatagatatatacgtgcgc

SEQ ID NO: 307533 - DNA, 58 bp, Artificial
  Synthetic oligonucleotide
aattctccccagtcaactgtatctccgtccttctcgatgtaggacttgacgtcggagc

SEQ ID NO: 307534 - DNA, 59 bp, Artificial
  Synthetic oligonucleotide
aattctccccgatccctctctgacgaggcacttatagcacttgacaaagtagaaacagc

SEQ ID NO: 307535 - DNA, 53 bp, Artificial
  Synthetic oligonucleotide
aattctcgggaactatttcatcaacaagagagtaaggaaagcgaggagcactt

SEQ ID NO: 307536 - DNA, 59 bp, Artificial
  Synthetic oligonucleotide
aattctctacacctagaacggccgatgccagcaaccataacataccacgataaagatat

SEQ ID NO: 307537 - DNA, 54 bp, Artificial
  Synthetic oligonucleotide
aattctctcagacctacccacacctaaagcttacaccttaggcaaaccagaccc

SEQ ID NO: 307538 - DNA, 60 bp, Artificial
  Synthetic oligonucleotide
aattctgaacaacatctacgtgctctacgccctgcgtagacactatgagggagttgagct

SEQ ID NO: 307539 - DNA, 59 bp, Artificial
  Synthetic oligonucleotide
aattctgaacaccccagtcccaatcggctcatgtgtgagtaaatgtcacacagaaaaag

SEQ ID NO: 307540 - DNA, 60 bp, Artificial
  Synthetic oligonucleotide
aattctgagtatatgacggaggagctctgagttaagacagagtacaagtaatagtttctc

SEQ ID NO: 307541 - DNA, 55 bp, Artificial
  Synthetic oligonucleotide
aattctgctttcgcagcctgccgaggctgcaagacctaccccatcgaggaggtag

SEQ ID NO: 307542 - DNA, 54 bp, Artificial
  Synthetic oligonucleotide
aattctggcccaagagcatttcctactttccagtacatacaggggttaaaccaa

SEQ ID NO: 307543 - DNA, 55 bp, Artificial
  Synthetic oligonucleotide
aattctggtaatatcttctgatctatcgtacacagtcggatatttgtgtgctggc

SEQ ID NO: 307544 - DNA, 55 bp, Artificial
  Synthetic oligonucleotide
aattctggtcgtgtatttcctttcgatggtactattccaacaatcggtgattggt

SEQ ID NO: 307545 - DNA, 58 bp, Artificial
  Synthetic oligonucleotide
aattctgtaaatggacccaattaaattatatacataaggagtctgactcatggcttaa

SEQ ID NO: 307546 - DNA, 58 bp, Artificial
  Synthetic oligonucleotide
aattctgtatctagcccttacaatgataagaaattcatcgaatggtattctaagacgt

SEQ ID NO: 307547 - DNA, 55 bp, Artificial
  Synthetic oligonucleotide
aattctgttgaattacgttcagctgatatacaaagtgctgtagcctgggtaacgc

SEQ ID NO: 307548 - DNA, 59 bp, Artificial
  Synthetic oligonucleotide
aattcttacattagtgatcttgcatcttctatcggacgtagaagaagttattctagtta

SEQ ID NO: 307549 - DNA, 51 bp, Artificial
  Synthetic oligonucleotide
aattcttaggcaaaggctacatgacattggccatcacctcaaggcaaatga

SEQ ID NO: 307550 - DNA, 55 bp, Artificial
  Synthetic oligonucleotide
aattcttatactaatacaccctatactggtgcccttggtttgctcgattttgcac

SEQ ID NO: 307551 - DNA, 60 bp, Artificial
  Synthetic oligonucleotide
aattcttcttccactctcagcacgtccgtccgacagttagatggatagctgcatgctgta

SEQ ID NO: 307552 - DNA, 60 bp, Artificial
  Synthetic oligonucleotide
aattcttgggccggagacattttaagaactcaggaatcatcatgcacttgcattcaaggt

SEQ ID NO: 307553 - DNA, 60 bp, Artificial
  Synthetic oligonucleotide
aattcttgtaaggtaacaccatggcttgtgctttccacatatcagcttcaggagattcta

SEQ ID NO: 307554 - DNA, 54 bp, Artificial
  Synthetic oligonucleotide
aattcttgtggtttaacggcacgacgtggcttgacgaggcgaccggggatgacc

SEQ ID NO: 307555 - DNA, 59 bp, Artificial
  Synthetic oligonucleotide
aattctttataactgctgttaggtcctggattgcagagaaagatagtgggaatgcctcc

SEQ ID NO: 307556 - DNA, 59 bp, Artificial
  Synthetic oligonucleotide
aattctttcaacggttaaggaattgcatagtgcagtgctcctatggatccgtcgtaaga

SEQ ID NO: 307557 - DNA, 58 bp, Artificial
  Synthetic oligonucleotide
aattctttggtccttccatactcgagaatggtattctgatatggtaagagaattagta

SEQ ID NO: 307558 - DNA, 60 bp, Artificial
  Synthetic oligonucleotide
aattgaacagcaagcagctaacgaagaagcgatacaagagatgcttgatataagtgcgga

SEQ ID NO: 307559 - DNA, 56 bp, Artificial
  Synthetic oligonucleotide
aattgaaccattaggagtagcacccaccaaggcaaagagaagagtggtgcagaggg

SEQ ID NO: 307560 - DNA, 60 bp, Artificial
  Synthetic oligonucleotide
aattgaacccattgataatgtcatgggaatgatcggaatattacctgacatgactccgag

SEQ ID NO: 307561 - DNA, 54 bp, Artificial
  Synthetic oligonucleotide
aattgaacccgcccaattggcccgctgtccaggtgtatcaggaaaaccccgctc

SEQ ID NO: 307562 - DNA, 57 bp, Artificial
  Synthetic oligonucleotide
aattgaaccggacttggatgtggtatatcctgactgacgtgtaaattgggtcctcga

SEQ ID NO: 307563 - DNA, 58 bp, Artificial
  Synthetic oligonucleotide
aattgaaccggatctggatgtggtatatccggagcgacgtgtatatcgggtcctcgac

SEQ ID NO: 307564 - DNA, 60 bp, Artificial
  Synthetic oligonucleotide
aattgaacctattgacaatgtcatggggatgatcggagtattacctgacatgaccccaag

SEQ ID NO: 307565 - DNA, 60 bp, Artificial
  Synthetic oligonucleotide
aattgaacgtgcctcagataaaattgctcaaggtgtaattattgcctatcgtgatatgca

SEQ ID NO: 307566 - DNA, 56 bp, Artificial
  Synthetic oligonucleotide
aattgaagcctccagcctcaatgattctgtggcaatgagaatggccttcgggaact

SEQ ID NO: 307567 - DNA, 54 bp, Artificial
  Synthetic oligonucleotide
aattgaataagggcatgcagatgtggttccccattgtcatgtaattctctgcag

SEQ ID NO: 307568 - DNA, 60 bp, Artificial
  Synthetic oligonucleotide
aattgaatacattgcaagcatgaggaggaattacttcacagcagaggtgtcccattgcag

SEQ ID NO: 307569 - DNA, 54 bp, Artificial
  Synthetic oligonucleotide
aattgaatccggaggaagaattcctgcgaaattataaggtgcaaggcgaacatg

SEQ ID NO: 307570 - DNA, 50 bp, Artificial
  Synthetic oligonucleotide
aattgaatttaactaagcttcataccctcattacatcgaactcaacgttt

SEQ ID NO: 307571 - DNA, 60 bp, Artificial
  Synthetic oligonucleotide
aattgacacttagcgtgtccgtggctcgtaacctcatcagcactgcttctaggtatcccc

SEQ ID NO: 307572 - DNA, 57 bp, Artificial
  Synthetic oligonucleotide
aattgacagactcgagttggattgaacttgacgaaataggggaagacgtagctccaa

SEQ ID NO: 307573 - DNA, 60 bp, Artificial
  Synthetic oligonucleotide
aattgacagattcaagttggattgaacttgatgaaataggggaagacattgctccaatcg

SEQ ID NO: 307574 - DNA, 55 bp, Artificial
  Synthetic oligonucleotide
aattgacagctataacgaaccacaaagcacatacatgtttgcgcacgaattcagc

SEQ ID NO: 307575 - DNA, 53 bp, Artificial
  Synthetic oligonucleotide
aattgacccaaggccgtcaaacctatgactggacattaaacagaaaccaaccg

SEQ ID NO: 307576 - DNA, 55 bp, Artificial
  Synthetic oligonucleotide
aattgacccttgggtacaggcttgggtccttagccataatgagatttacagggga

SEQ ID NO: 307577 - DNA, 55 bp, Artificial
  Synthetic oligonucleotide
aattgaccgccatggatctagagcttcccgtctccgcaaagttactacaccatcc

SEQ ID NO: 307578 - DNA, 55 bp, Artificial
  Synthetic oligonucleotide
aattgacgactatgaatatggagtaattggcggcaaccaaacgattgacagcctc

SEQ ID NO: 307579 - DNA, 60 bp, Artificial
  Synthetic oligonucleotide
aattgacggttggtatgggttcagacaccaaaatgcagagggaacagggacagctgcaga

SEQ ID NO: 307580 - DNA, 55 bp, Artificial
  Synthetic oligonucleotide
aattgacgtctgaccgcgaattacttggttgacgtgaatagggttgtttgtacaa

SEQ ID NO: 307581 - DNA, 56 bp, Artificial
  Synthetic oligonucleotide
aattgacttgccgtaagtctatcggcacgaaccagagcccgttggactggccccgc

SEQ ID NO: 307582 - DNA, 60 bp, Artificial
  Synthetic oligonucleotide
aattgagactggccacaggattgaggaatatcccgtctattcaatctagaggcctatttg

SEQ ID NO: 307583 - DNA, 57 bp, Artificial
  Synthetic oligonucleotide
aattgagatgtttaaggatagattagttgttagtaacaagtatgagcctttaatggc

SEQ ID NO: 307584 - DNA, 52 bp, Artificial
  Synthetic oligonucleotide
aattgagcaggggtgcaacggatcctgcgacccgttgtaccccctcccgatt

SEQ ID NO: 307585 - DNA, 60 bp, Artificial
  Synthetic oligonucleotide
aattgagcatattgcaagcatgaggagaaattatttcacagcagaagtgtctcattgtag

SEQ ID NO: 307586 - DNA, 59 bp, Artificial
  Synthetic oligonucleotide
aattgagctctaaaggatatatgagcgttcctcaagtgttgtgtgctgttactcgaaca

SEQ ID NO: 307587 - DNA, 53 bp, Artificial
  Synthetic oligonucleotide
aattgaggatggctacaggactaagaaacattccatctattcaatccaggggt

SEQ ID NO: 307588 - DNA, 55 bp, Artificial
  Synthetic oligonucleotide
aattgaggatggttacaggactaagaaacaacccatccattcaattcagaggtct

SEQ ID NO: 307589 - DNA, 51 bp, Artificial
  Synthetic oligonucleotide
aattgaggcaactaaccaacggtgaggaaagcaccgctgaagcattattcg

SEQ ID NO: 307590 - DNA, 55 bp, Artificial
  Synthetic oligonucleotide
aattgaggcccctcacgtctgggcggacggagtattctctggactgaagggggga

SEQ ID NO: 307591 - DNA, 60 bp, Artificial
  Synthetic oligonucleotide
aattgaggttgaatcagagagtatgcaagaagaggctatacaggaaatcgcaagcatgag

SEQ ID NO: 307592 - DNA, 55 bp, Artificial
  Synthetic oligonucleotide
aattgagtagcgtatctagaggagctctagacgtgctgcgagattgcatgtataa

SEQ ID NO: 307593 - DNA, 60 bp, Artificial
  Synthetic oligonucleotide
aattgagtgggcgttaaccgagtgtgctcaaggatatgtaactgtcacaagtccctatgc

SEQ ID NO: 307594 - DNA, 55 bp, Artificial
  Synthetic oligonucleotide
aattgatacacatgaaactcgttgatcggactagccaaccgcgatacgttttaca

SEQ ID NO: 307595 - DNA, 60 bp, Artificial
  Synthetic oligonucleotide
aattgatatgacgccatccgctggctcattttggccgactactcaagtcataactgagga

SEQ ID NO: 307596 - DNA, 56 bp, Artificial
  Synthetic oligonucleotide
aattgatccgaagtggaatcttgacccgtcaactcctgacggtttaaagctggcga

SEQ ID NO: 307597 - DNA, 60 bp, Artificial
  Synthetic oligonucleotide
aattgatccggtgtctctcaactctctctatgtaattggtgtctggagtcccatatatag

SEQ ID NO: 307598 - DNA, 58 bp, Artificial
  Synthetic oligonucleotide
aattgatcctgactcagattccccctatagactccagggcctctggcttcggtcctgg

SEQ ID NO: 307599 - DNA, 55 bp, Artificial
  Synthetic oligonucleotide
aattgatctcggtgggacactcacttctttcgaagggccatcttatctgatgcct

SEQ ID NO: 307600 - DNA, 56 bp, Artificial
  Synthetic oligonucleotide
aattgatctttccaatagaggtatgtggtcctaataatggttttgaaatgtggagt

SEQ ID NO: 307601 - DNA, 58 bp, Artificial
  Synthetic oligonucleotide
aattgatgagtcatcccgtgcatttgcctatggtcgtgagtctaaatacaagccagca

SEQ ID NO: 307602 - DNA, 58 bp, Artificial
  Synthetic oligonucleotide
aattgatggatgaagactaccagggcagactgtgtaatcctctgaacccgtttgttag

SEQ ID NO: 307603 - DNA, 50 bp, Artificial
  Synthetic oligonucleotide
aattgatgtcaaccacccggtaatccctgttggtttaggggtcccgggtc

SEQ ID NO: 307604 - DNA, 52 bp, Artificial
  Synthetic oligonucleotide
aattgattattaccagtgttttgccaaacatcattcaagcggtgtataaaac

SEQ ID NO: 307605 - DNA, 57 bp, Artificial
  Synthetic oligonucleotide
aattgattgagggttttcagagtcaggttggggcggatgagggtgttcgtgaagcaa

SEQ ID NO: 307606 - DNA, 59 bp, Artificial
  Synthetic oligonucleotide
aattgattggaaatctagatatgaacaattggaaaagcgatttgaatcactgaaacaaa

SEQ ID NO: 307607 - DNA, 50 bp, Artificial
  Synthetic oligonucleotide
aattgattggcgcatcaggaaagaaactctcgtattctgaaagacatgcc

SEQ ID NO: 307608 - DNA, 55 bp, Artificial
  Synthetic oligonucleotide
aattgatttcgtcggctggaggtcaactgttttactcccgcccggttgtctcagc

SEQ ID NO: 307609 - DNA, 60 bp, Artificial
  Synthetic oligonucleotide
aattgatttggaagaaccgagtggacagactgctgattggaaggctataggagcatacat

SEQ ID NO: 307610 - DNA, 60 bp, Artificial
  Synthetic oligonucleotide
aattgcaaccctaatccttgcacatgtcgacagcaataatggtgatagtaagggttgtct

SEQ ID NO: 307611 - DNA, 60 bp, Artificial
  Synthetic oligonucleotide
aattgcaagttgcgtcactttggcagggtgtcaactcagcagcgggcaactgtacgcggc

SEQ ID NO: 307612 - DNA, 57 bp, Artificial
  Synthetic oligonucleotide
aattgcagaagcacatggagatgaggttgcccatcttcgtgtagttccctgcagttg

SEQ ID NO: 307613 - DNA, 60 bp, Artificial
  Synthetic oligonucleotide
aattgcagcttaaggctccgagcgacgtgtcagagtgtacagagcctacggagatcgtgc

SEQ ID NO: 307614 - DNA, 59 bp, Artificial
  Synthetic oligonucleotide
aattgcaggctgcgggctcaagttaaaggttgattaccgccctatcgggctgtatgctg

SEQ ID NO: 307615 - DNA, 58 bp, Artificial
  Synthetic oligonucleotide
aattgcaggcttgcaatgcgtccatcgaccaggagacacgtcgaatttccgggtaaac

SEQ ID NO: 307616 - DNA, 60 bp, Artificial
  Synthetic oligonucleotide
aattgcagtattatctcagttaggtcatgggaaagctgatactcatcccgctgagactct

SEQ ID NO: 307617 - DNA, 54 bp, Artificial
  Synthetic oligonucleotide
aattgcatctgcggccctctcacccattgcaaatgccctaaaaactgttacaaa

SEQ ID NO: 307618 - DNA, 60 bp, Artificial
  Synthetic oligonucleotide
aattgcatggctacccttgttgttatgaaggatagggtgcaagtctgtatggcaccagga

SEQ ID NO: 307619 - DNA, 53 bp, Artificial
  Synthetic oligonucleotide
aattgccaaacaggggtgtactattgtaactcaaggagaaaacactacccagt

SEQ ID NO: 307620 - DNA, 57 bp, Artificial
  Synthetic oligonucleotide
aattgcccccctaatggtagcatacatgttggagagagagttggtccgcaaaacaag

SEQ ID NO: 307621 - DNA, 59 bp, Artificial
  Synthetic oligonucleotide
aattgccccgtaggtactccgcgcaaggacctgattgtctcaagatccacgggatctga

SEQ ID NO: 307622 - DNA, 60 bp, Artificial
  Synthetic oligonucleotide
aattgccctcctgagctctatgagcgcagggggttggaggcacaaagctgtgatctacag

SEQ ID NO: 307623 - DNA, 55 bp, Artificial
  Synthetic oligonucleotide
aattgccgccgttctgcactacgtggtctttcccctgtcgaccgtacctactgct

SEQ ID NO: 307624 - DNA, 57 bp, Artificial
  Synthetic oligonucleotide
aattgccgccgttctgcgctacgcggcttgcctccagtcgatcgcacgtactgcttc

SEQ ID NO: 307625 - DNA, 55 bp, Artificial
  Synthetic oligonucleotide
aattgccgctaattgtaatcttgtaatgcgaggttgtcgtacaaagccactttct

SEQ ID NO: 307626 - DNA, 59 bp, Artificial
  Synthetic oligonucleotide
aattgccgctatgcttagtcaacgtactatgtctttagatttcgtcactacaaactaca

SEQ ID NO: 307627 - DNA, 60 bp, Artificial
  Synthetic oligonucleotide
aattgcctacatgaaccaagcctcaagtctgcagaaccaagtggagattggactgatagg

SEQ ID NO: 307628 - DNA, 55 bp, Artificial
  Synthetic oligonucleotide
aattgcctcctcgacggaataacaggtaggttgaagaagcatgtaagcttcggga

SEQ ID NO: 307629 - DNA, 59 bp, Artificial
  Synthetic oligonucleotide
aattgcctgagcatatgcatcgtttgccgtctgttgacctccacgagcagatcgtccat

SEQ ID NO: 307630 - DNA, 50 bp, Artificial
  Synthetic oligonucleotide
aattgcctgtaacagtcaactggagtaagattataatagagtggagcaag

SEQ ID NO: 307631 - DNA, 60 bp, Artificial
  Synthetic oligonucleotide
aattgcgcagtagcactgcatgtagatggacaactaactagagcaagtcgggtaccatac

SEQ ID NO: 307632 - DNA, 58 bp, Artificial
  Synthetic oligonucleotide
aattgcgcctactcaaataggtagagtagcggagggtacaaacacaactgatagatgg

SEQ ID NO: 307633 - DNA, 60 bp, Artificial
  Synthetic oligonucleotide
aattgcgctacagcaatgaactagttcagtacaactccctcccacatgagggcctggaag

SEQ ID NO: 307634 - DNA, 53 bp, Artificial
  Synthetic oligonucleotide
aattgcgtatttccggttccgggacacgtcgcttaaatgcggaagtgacgcct

SEQ ID NO: 307635 - DNA, 55 bp, Artificial
  Synthetic oligonucleotide
aattgcgtccatataatagaggtctaaatacgtatcgtaaattgcgtgttgctcg

SEQ ID NO: 307636 - DNA, 60 bp, Artificial
  Synthetic oligonucleotide
aattgcgtgataaggttccagtgatgagaaaatatcatgcaccagttattggtggggccc

SEQ ID NO: 307637 - DNA, 59 bp, Artificial
  Synthetic oligonucleotide
aattgctaccccaaaatgttccgtcatgagtggtgttgacattgagtccatcccaaatg

SEQ ID NO: 307638 - DNA, 60 bp, Artificial
  Synthetic oligonucleotide
aattgctatcaatccttttggaatgccaggcaatccgactgatcttactgttgtagcaac

SEQ ID NO: 307639 - DNA, 60 bp, Artificial
  Synthetic oligonucleotide
aattgctatgcatccaggggtgatgtatgtgaacaccactctatcgtacaacagaacttt

SEQ ID NO: 307640 - DNA, 57 bp, Artificial
  Synthetic oligonucleotide
aattgctattaccctgcacaaggtagcgaggttcatcaccgtgagaggttaaattcc

SEQ ID NO: 307641 - DNA, 58 bp, Artificial
  Synthetic oligonucleotide
aattgctcacagacaggttctaggtaccgctgtggacgcgtgcctgtcgggggcctcc

SEQ ID NO: 307642 - DNA, 60 bp, Artificial
  Synthetic oligonucleotide
aattgctcccatttgccgctgcacctccggaacaaagcagaatgcaattctcctctttaa

SEQ ID NO: 307643 - DNA, 60 bp, Artificial
  Synthetic oligonucleotide
aattgctcctcgaggttacttcaaagtacagactgggaaaagctcagtaatgagatcaga

SEQ ID NO: 307644 - DNA, 57 bp, Artificial
  Synthetic oligonucleotide
aattgctccttccttggctcccatgttcttagcttattctacgggggcaatagctta

SEQ ID NO: 307645 - DNA, 55 bp, Artificial
  Synthetic oligonucleotide
aattgctcttggcaaatatatctatactagacatggagacacccttgaaggcgcc

SEQ ID NO: 307646 - DNA, 50 bp, Artificial
  Synthetic oligonucleotide
aattgctgaacatgcttctctagtaggacttttgctgtgtctatatcgtc

SEQ ID NO: 307647 - DNA, 52 bp, Artificial
  Synthetic oligonucleotide
aattgctgacagggactttccgctggggactttccggggaggcgtaacctgg

SEQ ID NO: 307648 - DNA, 55 bp, Artificial
  Synthetic oligonucleotide
aattgctggacatcagaaactatcgtgcttacggtcacaaccccggttttgaggg

SEQ ID NO: 307649 - DNA, 60 bp, Artificial
  Synthetic oligonucleotide
aattgctggtcctttgctctcgctcaaggggcattactgggaactaagcatagcaatgga

SEQ ID NO: 307650 - DNA, 60 bp, Artificial
  Synthetic oligonucleotide
aattgctggttatacggtatacgagtacatgattggaccttgggcgcattatggtgatat

SEQ ID NO: 307651 - DNA, 58 bp, Artificial
  Synthetic oligonucleotide
aattgcttgaggcgtgtaagtgcgggagccccgtcggaatgttcctctctggcgactc

SEQ ID NO: 307652 - DNA, 60 bp, Artificial
  Synthetic oligonucleotide
aattgcttgttttgacatatcatgtaatcaaacagtatgtcaacctactgtctatttagt

SEQ ID NO: 307653 - DNA, 54 bp, Artificial
  Synthetic oligonucleotide
aattgctttagagggacagaggattttattgcggtatacattgatgacatacta

SEQ ID NO: 307654 - DNA, 55 bp, Artificial
  Synthetic oligonucleotide
aattggaaccaatggggatgtatcagattctggcgatctactcaactgtcgccag

SEQ ID NO: 307655 - DNA, 56 bp, Artificial
  Synthetic oligonucleotide
aattggaagagaacagggagattctaaaggaccctgtacatggggtatactatgac

SEQ ID NO: 307656 - DNA, 60 bp, Artificial
  Synthetic oligonucleotide
aattggaaggaatggaccaattggttcactcattccgtatgtgagacagaattgcgtgag

SEQ ID NO: 307657 - DNA, 59 bp, Artificial
  Synthetic oligonucleotide
aattggaatggagtatcttcacctaagtggctttgtgtgcgcaagcctcctagtatacc

SEQ ID NO: 307658 - DNA, 54 bp, Artificial
  Synthetic oligonucleotide
aattggacaagaacggaaatttcatctggggagaaagagggtaccattccaagc

SEQ ID NO: 307659 - DNA, 60 bp, Artificial
  Synthetic oligonucleotide
aattggacagggaccaacagacctgtgctggttatctctcctgatctctcttacagagtt

SEQ ID NO: 307660 - DNA, 56 bp, Artificial
  Synthetic oligonucleotide
aattggaccaagcaaagagtattaaagtactccgtgttttgtgcaagcctcgtcca

SEQ ID NO: 307661 - DNA, 57 bp, Artificial
  Synthetic oligonucleotide
aattggacctctctagaaattgggccttactgattcgtacatggatagttagttggc

SEQ ID NO: 307662 - DNA, 57 bp, Artificial
  Synthetic oligonucleotide
aattggactcgaggggagcgttgtgacttggaggacagggataggtcagaacttagc

SEQ ID NO: 307663 - DNA, 58 bp, Artificial
  Synthetic oligonucleotide
aattggactggggtcactcagaatgggggaagctatgcttgcaaaaggggacctgata

SEQ ID NO: 307664 - DNA, 56 bp, Artificial
  Synthetic oligonucleotide
aattggacttgtactgtgatgatgtcgtggttcctcagaaatggactctcgtggtg

SEQ ID NO: 307665 - DNA, 60 bp, Artificial
  Synthetic oligonucleotide
aattggagaagacaacaagttgacatatgcagagctatgtctgaccaggaaaactcctga

SEQ ID NO: 307666 - DNA, 56 bp, Artificial
  Synthetic oligonucleotide
aattggagaatcacccaaaggggtggaggaaggctccattgggaaggtgtgcagaa

SEQ ID NO: 307667 - DNA, 55 bp, Artificial
  Synthetic oligonucleotide
aattggagactgccccaaatacgttaaacagggctctctgaagcttgcaacaggg

SEQ ID NO: 307668 - DNA, 60 bp, Artificial
  Synthetic oligonucleotide
aattggagagggattatgggatggataacagagcaaggagtgcattcaagaacttctcaa

SEQ ID NO: 307669 - DNA, 60 bp, Artificial
  Synthetic oligonucleotide
aattggagcgctcaatcaagacgtgaaactccagtttatgaatatagaaatcctatggtg

SEQ ID NO: 307670 - DNA, 60 bp, Artificial
  Synthetic oligonucleotide
aattggaggactttgccagacgattttcaaatggatcaatgtgcgttgaatcggattaca

SEQ ID NO: 307671 - DNA, 60 bp, Artificial
  Synthetic oligonucleotide
aattggaggagggctctcagcgagcgtaatcgaagcagaggaagttcgcacaaagtggcc

SEQ ID NO: 307672 - DNA, 59 bp, Artificial
  Synthetic oligonucleotide
aattggagtaacggggcctgattccagagcagtagcagtggtgcattatgggggaattc

SEQ ID NO: 307673 - DNA, 60 bp, Artificial
  Synthetic oligonucleotide
aattggatcagcggcaatcgatgggttagttcaaggtagcgtacattcaattatgacagg

SEQ ID NO: 307674 - DNA, 60 bp, Artificial
  Synthetic oligonucleotide
aattggcatgactgagaaaggcttggtgaagccacctagtgtggttacaactgaagctgc

SEQ ID NO: 307675 - DNA, 60 bp, Artificial
  Synthetic oligonucleotide
aattggccagacaaggggaggaaatcctctctcagctataccgacccctagaggcatgca

SEQ ID NO: 307676 - DNA, 57 bp, Artificial
  Synthetic oligonucleotide
aattggcccaagcaatacagggaagtcaatgttttgtcactctttgatatccttcct

SEQ ID NO: 307677 - DNA, 55 bp, Artificial
  Synthetic oligonucleotide
aattggccgcaatgcctaaggcggtcgggaatagtaggacacctagtagcgggaa

SEQ ID NO: 307678 - DNA, 57 bp, Artificial
  Synthetic oligonucleotide
aattggccgcagcacggcgtacccttggatattttcgattttctctcgttcttgatg

SEQ ID NO: 307679 - DNA, 60 bp, Artificial
  Synthetic oligonucleotide
aattggcctcagtggtagcgcaagacctgcttgcaccctcagaaatggacgttggtgact

SEQ ID NO: 307680 - DNA, 60 bp, Artificial
  Synthetic oligonucleotide
aattggcctggtgctcagaggtatgatttctctagaggacctaatcccactgagaacgta

SEQ ID NO: 307681 - DNA, 60 bp, Artificial
  Synthetic oligonucleotide
aattggctacactacatggctagttgtacagcttattggcgagggacattgacgtatgag

SEQ ID NO: 307682 - DNA, 60 bp, Artificial
  Synthetic oligonucleotide
aattggctgactaaatctggtagtgcttatccattgctgaacgtgactatgccgaataat

SEQ ID NO: 307683 - DNA, 59 bp, Artificial
  Synthetic oligonucleotide
aattggctgggtcacgtgaagtgcgctatcttggtgggcagcaaacacctttggtccac

SEQ ID NO: 307684 - DNA, 55 bp, Artificial
  Synthetic oligonucleotide
aattggcttgggactgatcatgcttttgcatttaaagaagtgactgggcaacgtg

SEQ ID NO: 307685 - DNA, 53 bp, Artificial
  Synthetic oligonucleotide
aattgggaaagggcttcctctttagagagagaacaattgggatatgttaggaa

SEQ ID NO: 307686 - DNA, 59 bp, Artificial
  Synthetic oligonucleotide
aattgggaaagtgcttcttctttgctaagcgagcagtgtgggtatgtgaggaaatagct

SEQ ID NO: 307687 - DNA, 57 bp, Artificial
  Synthetic oligonucleotide
aattgggaatagcaccaatcagacgcgttgttatgatccggaattggaggaatagtt

SEQ ID NO: 307688 - DNA, 60 bp, Artificial
  Synthetic oligonucleotide
aattgggaatcagaatcagcctgaaatatgcaatcaaagcgtcattacgtacgaaaacaa

SEQ ID NO: 307689 - DNA, 51 bp, Artificial
  Synthetic oligonucleotide
aattgggagttattctttgagttagttcacactactgtgttggctaatgtt

SEQ ID NO: 307690 - DNA, 55 bp, Artificial
  Synthetic oligonucleotide
aattgggcacaaatgagatacccctcagatcatacatgtacagctggtttgccgg

SEQ ID NO: 307691 - DNA, 56 bp, Artificial
  Synthetic oligonucleotide
aattgggccgacgaaaccgtgttaacggctcgtaacataggcctgtgcagctccga

SEQ ID NO: 307692 - DNA, 60 bp, Artificial
  Synthetic oligonucleotide
aattgggctagcgtgaaaaaagatctgatttcatacggaggaggatggagattgagcgca

SEQ ID NO: 307693 - DNA, 59 bp, Artificial
  Synthetic oligonucleotide
aattgggctctaaaggctatatgagcgttcctcaagtgctgtgtgccgttaccaggagg

SEQ ID NO: 307694 - DNA, 54 bp, Artificial
  Synthetic oligonucleotide
aattgggcttgtctacctgtataggactcaaaacgaaatcctggttaagacgac

SEQ ID NO: 307695 - DNA, 53 bp, Artificial
  Synthetic oligonucleotide
aattggggagtcacctaaaggggtggaggaaggctccattgggaaagtgtgcc

SEQ ID NO: 307696 - DNA, 60 bp, Artificial
  Synthetic oligonucleotide
aattgggggattgaacccatcgacaatgtgatgggaatgattggaatattgcccgacatg

SEQ ID NO: 307697 - DNA, 53 bp, Artificial
  Synthetic oligonucleotide
aattggggttaagtttgacacacggaactttaggctgggctacgaccctgtga

SEQ ID NO: 307698 - DNA, 54 bp, Artificial
  Synthetic oligonucleotide
aattgggtcctctacattgattatcgtgaaataaaggggatttggtacctccca

SEQ ID NO: 307699 - DNA, 57 bp, Artificial
  Synthetic oligonucleotide
aattgggtccttcaacgagaagaacgaagcggaaaagtagtggagatctatgttgca

SEQ ID NO: 307700 - DNA, 60 bp, Artificial
  Synthetic oligonucleotide
aattgggtgattatggtgaggtcacggttgactgtgagccacggtcaggaatagacacta

SEQ ID NO: 307701 - DNA, 51 bp, Artificial
  Synthetic oligonucleotide
aattggtaaagataaggcgtcagagattatgaatgtcccaatttcagttag

SEQ ID NO: 307702 - DNA, 54 bp, Artificial
  Synthetic oligonucleotide
aattggtaaagctgcggggaaagcttatcgtgacggtgtagagggaaggttgta

SEQ ID NO: 307703 - DNA, 51 bp, Artificial
  Synthetic oligonucleotide
aattggtatatggggtaaatatgtgctaatcatatctggaagtcttattat

SEQ ID NO: 307704 - DNA, 60 bp, Artificial
  Synthetic oligonucleotide
aattggtcaggatactcaggggcattcatagactactgggcaaacaaagagtgcttcaat

SEQ ID NO: 307705 - DNA, 54 bp, Artificial
  Synthetic oligonucleotide
aattggtcatgaagtggttcttccctaagaaggaagaggctaacgagttagcct

SEQ ID NO: 307706 - DNA, 55 bp, Artificial
  Synthetic oligonucleotide
aattggtccgtaaaaccagattcctgcccgtagctggcggtacaagtagtgtgta

SEQ ID NO: 307707 - DNA, 55 bp, Artificial
  Synthetic oligonucleotide
aattggtgcctcataattggtgttgcctaaaatacccccgcttttgtgtctggaa

SEQ ID NO: 307708 - DNA, 55 bp, Artificial
  Synthetic oligonucleotide
aattggtgcgatcaggcccagtaaaagtcgacacagaacaacagccatcatagtc

SEQ ID NO: 307709 - DNA, 57 bp, Artificial
  Synthetic oligonucleotide
aattggtgggctgatttccatcgtgagtcctatcttaacgatccgaatgctaaagtt

SEQ ID NO: 307710 - DNA, 55 bp, Artificial
  Synthetic oligonucleotide
aattgtaacaatacgatattgaggtgctgggtatccaccattgctatcacttgca

SEQ ID NO: 307711 - DNA, 59 bp, Artificial
  Synthetic oligonucleotide
aattgtaacataattagaagcatgacatacagtccaataggaggcggttaatccataac

SEQ ID NO: 307712 - DNA, 58 bp, Artificial
  Synthetic oligonucleotide
aattgtacattgctttttgaacaaagaaggcgaatgtagtatacgtcctgattcaata

SEQ ID NO: 307713 - DNA, 54 bp, Artificial
  Synthetic oligonucleotide
aattgtaccaacgtgttcttgaaccaaagttgattgttacaagcttgtaatttg

SEQ ID NO: 307714 - DNA, 54 bp, Artificial
  Synthetic oligonucleotide
aattgtaccgacgaaaccgaaggcacaaagagtcctaagactacagagagccct

SEQ ID NO: 307715 - DNA, 57 bp, Artificial
  Synthetic oligonucleotide
aattgtacctcaaccaaatgctccgatcacaatgtttgaacttaggtcaatagtaag

SEQ ID NO: 307716 - DNA, 55 bp, Artificial
  Synthetic oligonucleotide
aattgtactaccttaaattgtactacctgcaatactaccatgggcaatattacca

SEQ ID NO: 307717 - DNA, 59 bp, Artificial
  Synthetic oligonucleotide
aattgtatcggatggtcacagggacagttatttaccgatgacatgcattataacggaaa

SEQ ID NO: 307718 - DNA, 59 bp, Artificial
  Synthetic oligonucleotide
aattgtattcatgtagttgttatgtctaattttctcccagatttcgagaagattagtca

SEQ ID NO: 307719 - DNA, 54 bp, Artificial
  Synthetic oligonucleotide
aattgtcaaattgtgttgaacgctttgttcaaccatgatgcgaccaagaaagag

SEQ ID NO: 307720 - DNA, 58 bp, Artificial
  Synthetic oligonucleotide
aattgtcaccgggtattgcaccaatggtggcgacagggtacagaagagcaagtactcc

SEQ ID NO: 307721 - DNA, 58 bp, Artificial
  Synthetic oligonucleotide
aattgtcccaaatatgttggagtgaagagtctcaaactggcagtgggcctaaggaatg

SEQ ID NO: 307722 - DNA, 57 bp, Artificial
  Synthetic oligonucleotide
aattgtccgaccactggagaagcacacaacacaaagcgggccgaccctaaatacatc

SEQ ID NO: 307723 - DNA, 59 bp, Artificial
  Synthetic oligonucleotide
aattgtcctgcaagcactacagatgttacacactatggtggttatgaccaattttcgcg

SEQ ID NO: 307724 - DNA, 55 bp, Artificial
  Synthetic oligonucleotide
aattgtcgcggatgaagtaaaggccggggtaagtatcacctcgccggtgattcgc

SEQ ID NO: 307725 - DNA, 57 bp, Artificial
  Synthetic oligonucleotide
aattgtcggaggtacagcgctgctaggcggtatttcggttgctacttacgcttacac

SEQ ID NO: 307726 - DNA, 60 bp, Artificial
  Synthetic oligonucleotide
aattgtctccaccatatcctcttgtcgaaactctcctataacagaatccttgtacatgat

SEQ ID NO: 307727 - DNA, 55 bp, Artificial
  Synthetic oligonucleotide
aattgtgaccgcctggccccaccaaccatagcggagcctaaagccctagatagga

SEQ ID NO: 307728 - DNA, 60 bp, Artificial
  Synthetic oligonucleotide
aattgtgatgtagattgctacccttattattcaggcaacctagctgactgctcttggagt

SEQ ID NO: 307729 - DNA, 60 bp, Artificial
  Synthetic oligonucleotide
aattgtgcaacgagagcttgggaagctgcgttctcagtgggcttctagtataagaatgcg

SEQ ID NO: 307730 - DNA, 57 bp, Artificial
  Synthetic oligonucleotide
aattgtgcaatacttttaacgtcagcaatccctcacttatcgatgttcttttgggct

SEQ ID NO: 307731 - DNA, 60 bp, Artificial
  Synthetic oligonucleotide
aattgtgcagccgcactctaaatcaacgcgacgtcgtctgattgctcgtttcttcgcagc

SEQ ID NO: 307732 - DNA, 55 bp, Artificial
  Synthetic oligonucleotide
aattgtgccgtcaagtacatcgtacaatacatatctaatggctctaacaacattg

SEQ ID NO: 307733 - DNA, 58 bp, Artificial
  Synthetic oligonucleotide
aattgtgctgaccgtgatgaacctaccgggtaaaacatcacaagcgtatgtagttgga

SEQ ID NO: 307734 - DNA, 57 bp, Artificial
  Synthetic oligonucleotide
aattgtgggctgataccagttcgaactcaattgcgctggttaacagaaacacaaccg

SEQ ID NO: 307735 - DNA, 50 bp, Artificial
  Synthetic oligonucleotide
aattgtggggtcctaagcaacgagcccacattgttttccctgttctacta

SEQ ID NO: 307736 - DNA, 56 bp, Artificial
  Synthetic oligonucleotide
aattgtggtggttgatcctgttcgaccgtccgtccgtcggaatgtcaagttgataa

SEQ ID NO: 307737 - DNA, 54 bp, Artificial
  Synthetic oligonucleotide
aattgtgtccgagccccctgagactagttgacggtcagacttgcgatatcatca

SEQ ID NO: 307738 - DNA, 55 bp, Artificial
  Synthetic oligonucleotide
aattgtgtgggcctagagacctggcccaaagagttttccctgtacgactctcacc

SEQ ID NO: 307739 - DNA, 57 bp, Artificial
  Synthetic oligonucleotide
aattgtgtgtatcattggactcttatcgtacaccccacctgaaagacttaaccactc

SEQ ID NO: 307740 - DNA, 53 bp, Artificial
  Synthetic oligonucleotide
aattgtgtttaattggttgcaaaccacctataggggaacactggggcaaagga

SEQ ID NO: 307741 - DNA, 51 bp, Artificial
  Synthetic oligonucleotide
aattgtgtttgggtacagccagaagtaaaaatccctctataccccttaacc

SEQ ID NO: 307742 - DNA, 57 bp, Artificial
  Synthetic oligonucleotide
aattgttacatggtttggtttgcgctaatcgactcgtcgttcgtcggatctatgtac

SEQ ID NO: 307743 - DNA, 53 bp, Artificial
  Synthetic oligonucleotide
aattgttaggaaataccaaaggactgaagctgatagaggtttttttataacta

SEQ ID NO: 307744 - DNA, 51 bp, Artificial
  Synthetic oligonucleotide
aattgttagggatgtcttggatagacacagctttttctgagctagattcaa

SEQ ID NO: 307745 - DNA, 59 bp, Artificial
  Synthetic oligonucleotide
aattgttagtaacaagtatgagcctctgatggccccacttgttaattgtattcatgttg

SEQ ID NO: 307746 - DNA, 60 bp, Artificial
  Synthetic oligonucleotide
aattgttcaggagtgacttgaacattgaatcttgctcaactaaatgccagtccgaaattg

SEQ ID NO: 307747 - DNA, 51 bp, Artificial
  Synthetic oligonucleotide
aattgttcgagtaaaaaggggcactgtttttcgccagcgacctaaaggtta

SEQ ID NO: 307748 - DNA, 60 bp, Artificial
  Synthetic oligonucleotide
aattgttgcatatggtgaatggcctagttacttgtcagacatagacgcaacttcagttga

SEQ ID NO: 307749 - DNA, 60 bp, Artificial
  Synthetic oligonucleotide
aattgttgcatctgtctgcatcaggcgttgttaatgtcaaagtggcgtctgctgatcaag

SEQ ID NO: 307750 - DNA, 55 bp, Artificial
  Synthetic oligonucleotide
aattgtttacatgtgggaagtgcaacctccctagccgatagcccttgaccgggtg

SEQ ID NO: 307751 - DNA, 60 bp, Artificial
  Synthetic oligonucleotide
aattgtttcagtcagccgaagaatatactgattcattaatggatcctgctatattaactt

SEQ ID NO: 307752 - DNA, 59 bp, Artificial
  Synthetic oligonucleotide
aattgtttgggaggagccattgacttggtcaatcggtacccagatctaatcctatgtca

SEQ ID NO: 307753 - DNA, 56 bp, Artificial
  Synthetic oligonucleotide
aattgtttggtaccaatccctaagcactacgaatctatcataataagtagggttca

SEQ ID NO: 307754 - DNA, 54 bp, Artificial
  Synthetic oligonucleotide
aatttaaaaaacgttataatactagtgataattcaagaggtatgaattatgaaa

SEQ ID NO: 307755 - DNA, 56 bp, Artificial
  Synthetic oligonucleotide
aatttaaaccataaactgatcgtaaaaagcgtaagagccaaagagcattatcactc

SEQ ID NO: 307756 - DNA, 57 bp, Artificial
  Synthetic oligonucleotide
aatttaacccaggtaagatactgtcttccatatgcaacttgggtgtggactgttgga

SEQ ID NO: 307757 - DNA, 55 bp, Artificial
  Synthetic oligonucleotide
aatttaacgacgggctggcgtaggtttgggttcaagtgcattgcagaggagccag

SEQ ID NO: 307758 - DNA, 53 bp, Artificial
  Synthetic oligonucleotide
aatttaacttgtcaatagagcaacctagtttgtgattactcatcttccgtagt

SEQ ID NO: 307759 - DNA, 52 bp, Artificial
  Synthetic oligonucleotide
aatttaagcgtaaattacgcccatacaatgggggtcttaacacgtatcgtaa

SEQ ID NO: 307760 - DNA, 57 bp, Artificial
  Synthetic oligonucleotide
aatttaagctttgccttaatctgggcaaatgtagttccgtcgatcacattggagtcc

SEQ ID NO: 307761 - DNA, 60 bp, Artificial
  Synthetic oligonucleotide
aatttaataggtatgtacgcttttgaacgcgcgcaccaaagtcactctcatgatctcacg

SEQ ID NO: 307762 - DNA, 56 bp, Artificial
  Synthetic oligonucleotide
aatttaattcggcctctgtgttgagccccttgttgaagtgtttccctccatcgcga

SEQ ID NO: 307763 - DNA, 58 bp, Artificial
  Synthetic oligonucleotide
aatttaatttactgcactccaaatctggtctccttattcctacctgttctcagccaga

SEQ ID NO: 307764 - DNA, 58 bp, Artificial
  Synthetic oligonucleotide
aatttacaactcgaggtggtaaatttgctggatggaaccctacattcatgatagtaca

SEQ ID NO: 307765 - DNA, 58 bp, Artificial
  Synthetic oligonucleotide
aatttacaagagatggcccagattaggcgaaaatttgaaatgttcacatatgtaagat

SEQ ID NO: 307766 - DNA, 54 bp, Artificial
  Synthetic oligonucleotide
aatttacactccaatctcgaccccagatggtacaattgtgaagaaatatcgagg

SEQ ID NO: 307767 - DNA, 60 bp, Artificial
  Synthetic oligonucleotide
aatttacacttgttcaactcagaaatgcatgattcagtgttagtatcatattcctcagac

SEQ ID NO: 307768 - DNA, 60 bp, Artificial
  Synthetic oligonucleotide
aatttacatggtgcagctgccaatctttggcgttatagacacgccttgctggatagtaaa

SEQ ID NO: 307769 - DNA, 60 bp, Artificial
  Synthetic oligonucleotide
aatttaccaatgttgtgacttggcccctgaagccagacaggccataaggtcgctcacaga

SEQ ID NO: 307770 - DNA, 55 bp, Artificial
  Synthetic oligonucleotide
aatttaccggtcttggtgtttacgacaccgtacttgtacttcccagacatgctca

SEQ ID NO: 307771 - DNA, 55 bp, Artificial
  Synthetic oligonucleotide
aatttaccttcagcttccacgggtgtggtcttatacctatcctgtggttagcgaa

SEQ ID NO: 307772 - DNA, 60 bp, Artificial
  Synthetic oligonucleotide
aatttacgacggaggtgattacctcttgactgcgcatcatgtgtggtcccaagcacctaa

SEQ ID NO: 307773 - DNA, 54 bp, Artificial
  Synthetic oligonucleotide
aatttacgagacatgggtctggctcgatacgcatttgacttctatgaagtcaca

SEQ ID NO: 307774 - DNA, 53 bp, Artificial
  Synthetic oligonucleotide
aatttacgtggagatagatatgattgatagttttgtcactatcaatcatgtgt

SEQ ID NO: 307775 - DNA, 55 bp, Artificial
  Synthetic oligonucleotide
aatttactcggttaccgcgaggaatgcaggaaattccaagaggccaataggcagc

SEQ ID NO: 307776 - DNA, 52 bp, Artificial
  Synthetic oligonucleotide
aatttacttaagtatgtgtgcaagacgtatttccctgcgtctaatagatttg

SEQ ID NO: 307777 - DNA, 59 bp, Artificial
  Synthetic oligonucleotide
aatttagaccgataaggattagcctagaggagaagcccgcacctgatgctattagtgac

SEQ ID NO: 307778 - DNA, 58 bp, Artificial
  Synthetic oligonucleotide
aatttagatcattaacacacgaggaccacgcaattcagccacaaaactttatgcctgg

SEQ ID NO: 307779 - DNA, 60 bp, Artificial
  Synthetic oligonucleotide
aatttagcaaacgaggcattatggaaagtgcaaatgcctccacgtctgcaacgaccatag

SEQ ID NO: 307780 - DNA, 55 bp, Artificial
  Synthetic oligonucleotide
aatttagttcttcataatgtctgatcaagtagtgccggacgtacctacgtttacc

SEQ ID NO: 307781 - DNA, 50 bp, Artificial
  Synthetic oligonucleotide
aatttagtttagcgcttttttcacgtccgcgaaatgggttaaccgcattt

SEQ ID NO: 307782 - DNA, 58 bp, Artificial
  Synthetic oligonucleotide
aatttataaatcgtaagctacaccacatagcgctatacgggccagccttgaataccga

SEQ ID NO: 307783 - DNA, 57 bp, Artificial
  Synthetic oligonucleotide
aatttatacaatatccggaatctccacattccggaagtctgcctaaagtgggagcta

SEQ ID NO: 307784 - DNA, 60 bp, Artificial
  Synthetic oligonucleotide
aatttatactgcctcccactacattggatgaacttatatctctatggtctaaagagcagc

SEQ ID NO: 307785 - DNA, 60 bp, Artificial
  Synthetic oligonucleotide
aatttatatgatgccccctaaatggcatttatgtaatatcctcaatgaatttgaatttca

SEQ ID NO: 307786 - DNA, 51 bp, Artificial
  Synthetic oligonucleotide
aatttatcctggtgggcggaaatcaaaaccttacgtcgtagttggtactac

SEQ ID NO: 307787 - DNA, 54 bp, Artificial
  Synthetic oligonucleotide
aatttatctacttatagttggttagttataatgttagaaatcccttacagtgta

SEQ ID NO: 307788 - DNA, 55 bp, Artificial
  Synthetic oligonucleotide
aatttatggtccaggccactaaccgaagatgcagatgaggccactatgaaagagg

SEQ ID NO: 307789 - DNA, 52 bp, Artificial
  Synthetic oligonucleotide
aatttattaacaagtgtaactttcatgttacctagtgaagggtcctccggga

SEQ ID NO: 307790 - DNA, 50 bp, Artificial
  Synthetic oligonucleotide
aatttattatactcacgagaggcccggcccctgactcacaacgcgctctt

SEQ ID NO: 307791 - DNA, 59 bp, Artificial
  Synthetic oligonucleotide
aatttcaacagctgtcccgcataatatatgtactgacgacgtgggtaattctcgaccaa

SEQ ID NO: 307792 - DNA, 54 bp, Artificial
  Synthetic oligonucleotide
aatttcaacgcccgtctcgaaggttcgtcgaagactgaacttcgacagcccgta

SEQ ID NO: 307793 - DNA, 56 bp, Artificial
  Synthetic oligonucleotide
aatttcaactgtccaacattgtggattgggtcactacaacccaaaatgtagcttaa

SEQ ID NO: 307794 - DNA, 53 bp, Artificial
  Synthetic oligonucleotide
aatttcaaggactaccagtgttgaacacccctggtagtaaccagtacctgacg

SEQ ID NO: 307795 - DNA, 55 bp, Artificial
  Synthetic oligonucleotide
aatttcagactacatctcgaatttaggaaaagcctttgggactggattcactgaa

SEQ ID NO: 307796 - DNA, 60 bp, Artificial
  Synthetic oligonucleotide
aatttcaggtaccatatggatgcagattacaccagatgggattccacccaacagagagcc

SEQ ID NO: 307797 - DNA, 55 bp, Artificial
  Synthetic oligonucleotide
aatttcagtaataaggagagttaggcagggttactcaccactgtcattacagacc

SEQ ID NO: 307798 - DNA, 55 bp, Artificial
  Synthetic oligonucleotide
aatttcatgctatacgtcttttggtgaaaggcgtgtacaagcctttagttatgag

SEQ ID NO: 307799 - DNA, 52 bp, Artificial
  Synthetic oligonucleotide
aatttcatgggctatgtcattggaagttggggatcattgccacaagatcaca

SEQ ID NO: 307800 - DNA, 50 bp, Artificial
  Synthetic oligonucleotide
aatttccaacaaactgcccgagtggaaaagaaacgttgaaaacggacacg

SEQ ID NO: 307801 - DNA, 59 bp, Artificial
  Synthetic oligonucleotide
aatttccagtatggtggaggccatggtgtctagggcccgaatcgatgcacgaattgact

SEQ ID NO: 307802 - DNA, 58 bp, Artificial
  Synthetic oligonucleotide
aatttccccttcatttatcggttcccttttccgtgagcagctcatctcagagtctgat

SEQ ID NO: 307803 - DNA, 54 bp, Artificial
  Synthetic oligonucleotide
aatttccctttgaggagtttcctaggaatgatttcttcctaggaatgaatgtac

SEQ ID NO: 307804 - DNA, 52 bp, Artificial
  Synthetic oligonucleotide
aatttccttccctcaacctccacacctgacctacctccaccccgaacctcac

SEQ ID NO: 307805 - DNA, 54 bp, Artificial
  Synthetic oligonucleotide
aatttcgaatcgttgtgggataccataacaacatcaaattatatattagctaga

SEQ ID NO: 307806 - DNA, 60 bp, Artificial
  Synthetic oligonucleotide
aatttcgcctggagagattgtgtgagcccaacgcttgtgaagacagacgtcagtcttggc

SEQ ID NO: 307807 - DNA, 55 bp, Artificial
  Synthetic oligonucleotide
aatttcggtcagactggagactcagagtcagtcccagaccctcaacctctcggag

SEQ ID NO: 307808 - DNA, 53 bp, Artificial
  Synthetic oligonucleotide
aatttcggtcgttgtggtcatttcgtacctttcgttggtggatgtcaagtact

SEQ ID NO: 307809 - DNA, 55 bp, Artificial
  Synthetic oligonucleotide
aatttcgtaaacagagcgaaccagcggctgaatcccatgcaccaactcctgagac

SEQ ID NO: 307810 - DNA, 55 bp, Artificial
  Synthetic oligonucleotide
aatttcgtactccccacctggggcttctgtccccacgtcgcgtaaggatgcaatg

SEQ ID NO: 307811 - DNA, 50 bp, Artificial
  Synthetic oligonucleotide
aatttcgtatagacataattggactagaggacaaattcgtagcggagtcc

SEQ ID NO: 307812 - DNA, 54 bp, Artificial
  Synthetic oligonucleotide
aatttctataacacccggttcaccgttctatgcactcgagacgtctcaataagt

SEQ ID NO: 307813 - DNA, 60 bp, Artificial
  Synthetic oligonucleotide
aatttctatgcgggcacgagtcaggcgtccagctgcgttgatggctatgtcgtgagtggc

SEQ ID NO: 307814 - DNA, 51 bp, Artificial
  Synthetic oligonucleotide
aatttctcaaattcacccgtaccctccggaaaatacgtccggacgctgcgg

SEQ ID NO: 307815 - DNA, 55 bp, Artificial
  Synthetic oligonucleotide
aatttctcgccacgtggaggtatgggccctaaggccgctgcttgggttaacaggc

SEQ ID NO: 307816 - DNA, 57 bp, Artificial
  Synthetic oligonucleotide
aatttctgaaatgctaagcaaagagtattcggacagacagggtaaaactcctctgac

SEQ ID NO: 307817 - DNA, 54 bp, Artificial
  Synthetic oligonucleotide
aatttctggcgtaaccggaggatgcgtaggctttagaccaggagggatcccctg

SEQ ID NO: 307818 - DNA, 58 bp, Artificial
  Synthetic oligonucleotide
aatttcttagagccgtctcctgaagctaaaattagagatgatatggcttttagaaatc

SEQ ID NO: 307819 - DNA, 55 bp, Artificial
  Synthetic oligonucleotide
aatttcttaggcggtggcatttttgtaataagaggggtgtacaccgattgagctc

SEQ ID NO: 307820 - DNA, 55 bp, Artificial
  Synthetic oligonucleotide
aatttcttcgcgacgaaggccaacaacgccatggtgtcgtcgctgatccacgggc

SEQ ID NO: 307821 - DNA, 55 bp, Artificial
  Synthetic oligonucleotide
aatttctttacgaaacaagatgtagtggcagtaaccgattggtcagggtacagcg

SEQ ID NO: 307822 - DNA, 52 bp, Artificial
  Synthetic oligonucleotide
aatttgaaaaataagtcttccgtcataaccggaaacttcgagtcctctggac

SEQ ID NO: 307823 - DNA, 57 bp, Artificial
  Synthetic oligonucleotide
aatttgaactacgtcagaccggcccagcgcgcgtgataccatctaaagacgtcccta

SEQ ID NO: 307824 - DNA, 60 bp, Artificial
  Synthetic oligonucleotide
aatttgaagggtatatcatctatgatgttgtagactgcttcctcatcataggaagaccag

SEQ ID NO: 307825 - DNA, 56 bp, Artificial
  Synthetic oligonucleotide
aatttgaagtggatgctgccaggtttggcaaaactggacgttgggaagtgcatgtt

SEQ ID NO: 307826 - DNA, 53 bp, Artificial
  Synthetic oligonucleotide
aatttgaattggcttcccgtactttgtattgctttgccagtccttttgggccc

SEQ ID NO: 307827 - DNA, 60 bp, Artificial
  Synthetic oligonucleotide
aatttgacttgtctcgtatgattcaatgggcctatgataatgatcatgttgatgaatgta

SEQ ID NO: 307828 - DNA, 57 bp, Artificial
  Synthetic oligonucleotide
aatttgagaggaaccttgcgtgatggtacccctcctgagcctcaatgcttcactact

SEQ ID NO: 307829 - DNA, 52 bp, Artificial
  Synthetic oligonucleotide
aatttgagtttcgttgttggtaagccggtattcgcatcgcttggattgaata

SEQ ID NO: 307830 - DNA, 60 bp, Artificial
  Synthetic oligonucleotide
aatttgatgtcaggcatgaataagcttgtaggtgcgttgaggtgttacgcatattgccta

SEQ ID NO: 307831 - DNA, 60 bp, Artificial
  Synthetic oligonucleotide
aatttgattggcataactgtgtgtgggaggattacaacagagatcttctagtcagcacaa

SEQ ID NO: 307832 - DNA, 59 bp, Artificial
  Synthetic oligonucleotide
aatttgatttctgttagccatgttgttgcgaatgtgttcaatggtagaactttgaaggc

SEQ ID NO: 307833 - DNA, 60 bp, Artificial
  Synthetic oligonucleotide
aatttgcacttacacggtaggagtactgtcttcgacttcttgatcactcgtgatattgaa

SEQ ID NO: 307834 - DNA, 55 bp, Artificial
  Synthetic oligonucleotide
aatttgcagagcttttcgccacgtacctagaagaataagacagggcttggaaagg

SEQ ID NO: 307835 - DNA, 58 bp, Artificial
  Synthetic oligonucleotide
aatttgccaataacagggtcaatggatactacatatgcaaattcaacgcagagcgagt

SEQ ID NO: 307836 - DNA, 58 bp, Artificial
  Synthetic oligonucleotide
aatttgccatcaacggctagatatataagacctaatctactacaagacagactaaatt

SEQ ID NO: 307837 - DNA, 60 bp, Artificial
  Synthetic oligonucleotide
aatttgccatccattactgattgatacatgatgcaatccaatagagcacaatgaggttca

SEQ ID NO: 307838 - DNA, 55 bp, Artificial
  Synthetic oligonucleotide
aatttgcccctgaaacagtggcgctcttctcggcactagcggaagggtgcatccc

SEQ ID NO: 307839 - DNA, 56 bp, Artificial
  Synthetic oligonucleotide
aatttgcgcaccaacaacagtgccaccatagtgatgccatatattaatagtgtgcc

SEQ ID NO: 307840 - DNA, 55 bp, Artificial
  Synthetic oligonucleotide
aatttgcggcacgcgagtaatgtacccggacgtcgtgatggacagtgatgacgtg

SEQ ID NO: 307841 - DNA, 55 bp, Artificial
  Synthetic oligonucleotide
aatttgcgtgacgcatcacgcctcagaagctgggtgggtacggcttcgattccgg

SEQ ID NO: 307842 - DNA, 55 bp, Artificial
  Synthetic oligonucleotide
aatttgctcgaccagagaataatctggcaaaattggtacgcattcacgtcatcaa

SEQ ID NO: 307843 - DNA, 55 bp, Artificial
  Synthetic oligonucleotide
aatttgctgcctcgcaacacctcccacccggcacagaacgccgacatggtgggag

SEQ ID NO: 307844 - DNA, 57 bp, Artificial
  Synthetic oligonucleotide
aatttggaagatccaacatccagggacctagtagtcggttatgtcaacactactgtg

SEQ ID NO: 307845 - DNA, 57 bp, Artificial
  Synthetic oligonucleotide
aatttggaagatccaacgtccagggacctagtagtcagttatgttaactctcatatg

SEQ ID NO: 307846 - DNA, 60 bp, Artificial
  Synthetic oligonucleotide
aatttggaatggactcgtagttattggcgaggatattgctaacgcattcaaggcatttgc

SEQ ID NO: 307847 - DNA, 60 bp, Artificial
  Synthetic oligonucleotide
aatttggacactaacaccatttgcgacacactggtcacagattgtgtctattgtttctga

SEQ ID NO: 307848 - DNA, 55 bp, Artificial
  Synthetic oligonucleotide
aatttggaccaggattgcataggaagattgttggtatcccgcctttaatttgaac

SEQ ID NO: 307849 - DNA, 58 bp, Artificial
  Synthetic oligonucleotide
aatttggacgacccaacatctagggacctagtagtcagctatgtcaacactaatatgg

SEQ ID NO: 307850 - DNA, 55 bp, Artificial
  Synthetic oligonucleotide
aatttggagactccaataggtaaatgcgtgccccgattcccaatcgagaccccaa

SEQ ID NO: 307851 - DNA, 60 bp, Artificial
  Synthetic oligonucleotide
aatttggatccccagccaatgtatgaggccgggaactgggctggagatgtagcattcatt

SEQ ID NO: 307852 - DNA, 51 bp, Artificial
  Synthetic oligonucleotide
aatttggcaaaatgtgtgcgctgatgaacatttgtatctgacactctgtag

SEQ ID NO: 307853 - DNA, 57 bp, Artificial
  Synthetic oligonucleotide
aatttggcgttgcttgtatttatttgagcggaactttcaatgttttcgagcattcca

SEQ ID NO: 307854 - DNA, 55 bp, Artificial
  Synthetic oligonucleotide
aatttggctaccagactaagcatggtgtctctggcaagtacctacagcggaggct

SEQ ID NO: 307855 - DNA, 60 bp, Artificial
  Synthetic oligonucleotide
aatttggctatctgctcaaaggtgaaagctacggcagaataattcaaaatgaggatatac

SEQ ID NO: 307856 - DNA, 55 bp, Artificial
  Synthetic oligonucleotide
aatttggctcagtcgaatctcctaggaaggaggtcttcctaggtatgaacgtacc

SEQ ID NO: 307857 - DNA, 59 bp, Artificial
  Synthetic oligonucleotide
aatttggctcctcactaagaatactttgcctattgtgggagatcgggagcatgcgttac

SEQ ID NO: 307858 - DNA, 60 bp, Artificial
  Synthetic oligonucleotide
aatttggctcgcttcgctcgcaccacgtttgctgccaggcggacctgattgaagactgaa

SEQ ID NO: 307859 - DNA, 55 bp, Artificial
  Synthetic oligonucleotide
aatttggctgatcgattttacgaaaacacgcgcgttcggaatcgtaactcgaaca

SEQ ID NO: 307860 - DNA, 52 bp, Artificial
  Synthetic oligonucleotide
aatttggctttgagagaacagttgaacctctaagtgaccccatcgttgtgca

SEQ ID NO: 307861 - DNA, 55 bp, Artificial
  Synthetic oligonucleotide
aatttgggactgttcctccggttgggcggatgaattaagattgacatcatgggga

SEQ ID NO: 307862 - DNA, 59 bp, Artificial
  Synthetic oligonucleotide
aatttggggagttcatcactctgaatcggttagcgagcagaccaaactctatggaagcg

SEQ ID NO: 307863 - DNA, 60 bp, Artificial
  Synthetic oligonucleotide
aatttggtagcaacatcaagccacacagaatttttgattagaggtgcagttggctcaggg

SEQ ID NO: 307864 - DNA, 58 bp, Artificial
  Synthetic oligonucleotide
aatttggtctagtgtcaaagtttcaactctcgtgcttaccgctcttggtatgtacgca

SEQ ID NO: 307865 - DNA, 55 bp, Artificial
  Synthetic oligonucleotide
aatttggtgcagaagtggtgccaggatttcaggcactatcagaaggctgtacccc

SEQ ID NO: 307866 - DNA, 60 bp, Artificial
  Synthetic oligonucleotide
aatttgtactagatgttacgtgtattgtgtagatactttatgttgtgtgtagtatcctca

SEQ ID NO: 307867 - DNA, 60 bp, Artificial
  Synthetic oligonucleotide
aatttgtactctgactctatcaagtcactgactcttgaagatgttgacaagacccagttg

SEQ ID NO: 307868 - DNA, 60 bp, Artificial
  Synthetic oligonucleotide
aatttgtagtgaaggtgtcatcaattctgcggaggatgtcactgtcaaggtgggttatga

SEQ ID NO: 307869 - DNA, 55 bp, Artificial
  Synthetic oligonucleotide
aatttgtcacctgcacaattgaccatgtgcccgcatgtagtggtggatgtgaggc

SEQ ID NO: 307870 - DNA, 53 bp, Artificial
  Synthetic oligonucleotide
aatttgtcctacttcgactgctgaagtaccagatacagctccaacttttacca

SEQ ID NO: 307871 - DNA, 55 bp, Artificial
  Synthetic oligonucleotide
aatttgtgccttctgatacttccaccatttatgtcttagacgattgggtttctag

SEQ ID NO: 307872 - DNA, 57 bp, Artificial
  Synthetic oligonucleotide
aatttgtgggttacagtctactatggggtacctgtatggaaagatgcgaagaccatc

SEQ ID NO: 307873 - DNA, 60 bp, Artificial
  Synthetic oligonucleotide
aatttgtggtgtcacgattatggtgatgttatacattgtacgctggcgcggtatatgttg

SEQ ID NO: 307874 - DNA, 52 bp, Artificial
  Synthetic oligonucleotide
aatttgttcgagtcaatccgttaagagcggaacaaaagtcaaaccgtttaga

SEQ ID NO: 307875 - DNA, 53 bp, Artificial
  Synthetic oligonucleotide
aatttgttgggaggctatgttcctattttgcagaaccctacccagggccggaa

SEQ ID NO: 307876 - DNA, 53 bp, Artificial
  Synthetic oligonucleotide
aatttgtttaatagcacttgggaaaagaaaaagggcacttggaatgataccac

SEQ ID NO: 307877 - DNA, 51 bp, Artificial
  Synthetic oligonucleotide
aattttaacctacaatgcccctggaccgttggtatgacaaagttttatggg

SEQ ID NO: 307878 - DNA, 54 bp, Artificial
  Synthetic oligonucleotide
aattttaatcagttacagcccgcctggtgctaaacctcccacaaccaggaagga

SEQ ID NO: 307879 - DNA, 55 bp, Artificial
  Synthetic oligonucleotide
aattttacatgacacactccaaatacggaatccctcaaagtttggaacaagcggc

SEQ ID NO: 307880 - DNA, 58 bp, Artificial
  Synthetic oligonucleotide
aattttaccacaaatgcgataacacgtgcatggaaagtgtcaaaaatgggacttatga

SEQ ID NO: 307881 - DNA, 56 bp, Artificial
  Synthetic oligonucleotide
aattttactgggctttattcctctactgtgcctagctttaatcctgaatggcagac

SEQ ID NO: 307882 - DNA, 60 bp, Artificial
  Synthetic oligonucleotide
aattttcagaatagtgagcatgttctgtactcacttgacactacttgcactcctgaacat

SEQ ID NO: 307883 - DNA, 57 bp, Artificial
  Synthetic oligonucleotide
aattttcatcagatttggcttacataaaagggaggaagtgccaagcctcaagaggcc

SEQ ID NO: 307884 - DNA, 57 bp, Artificial
  Synthetic oligonucleotide
aattttcgacaacgttgatccagctttatttggtcaagtcacacgccctcaagttca

SEQ ID NO: 307885 - DNA, 60 bp, Artificial
  Synthetic oligonucleotide
aattttctggctgctaaccccgagtcaggagtccacgattcagaagcatatgaacggcga

SEQ ID NO: 307886 - DNA, 58 bp, Artificial
  Synthetic oligonucleotide
aattttctttccagacatccactatgtttgtcagagaaaaccttgtatggaagataca

SEQ ID NO: 307887 - DNA, 57 bp, Artificial
  Synthetic oligonucleotide
aattttgaacatcgaccaattaaataagctctatattgttaagataagtaatacatc

SEQ ID NO: 307888 - DNA, 58 bp, Artificial
  Synthetic oligonucleotide
aattttgacatcgagctgtttcgcgctaacgtggtgtctttggagagaattttcgcga

SEQ ID NO: 307889 - DNA, 59 bp, Artificial
  Synthetic oligonucleotide
aattttgcattgtggagtgtccaggctttgagtgatgcgttttcctctttctcgaggaa

SEQ ID NO: 307890 - DNA, 60 bp, Artificial
  Synthetic oligonucleotide
aattttgcttgtgtctatggagttgactaggggcgacatgaaagtctgcagatatcgttg

SEQ ID NO: 307891 - DNA, 58 bp, Artificial
  Synthetic oligonucleotide
aattttggacagtcgtaccggagcacattacggagataattctttcatcgacattgta

SEQ ID NO: 307892 - DNA, 56 bp, Artificial
  Synthetic oligonucleotide
aattttggagacaccaataggtaaatgcgtccccaattgaggcaccgatatatcgg

SEQ ID NO: 307893 - DNA, 57 bp, Artificial
  Synthetic oligonucleotide
aattttggctccaaacgcacatataatagcggagccaaagagttttactcgcttcca

SEQ ID NO: 307894 - DNA, 53 bp, Artificial
  Synthetic oligonucleotide
aattttggtttgtgctacaattttgacttcattagggaaaaagaacagcggga

SEQ ID NO: 307895 - DNA, 57 bp, Artificial
  Synthetic oligonucleotide
aattttgttcgcaacacaccctacagattgtaggaccagatggtgattattacctac

SEQ ID NO: 307896 - DNA, 52 bp, Artificial
  Synthetic oligonucleotide
aatttttaccttggccgcgccttctctttttatgtggtctccacgagggttc

SEQ ID NO: 307897 - DNA, 53 bp, Artificial
  Synthetic oligonucleotide
aatttttccgcgttatataattgatacgttaaaatacgagaaatttattgata

SEQ ID NO: 307898 - DNA, 60 bp, Artificial
  Synthetic oligonucleotide
aatttttctattgtgatacatcagctctgttcaatagcacttggaatgccactgagtcaa

SEQ ID NO: 307899 - DNA, 60 bp, Artificial
  Synthetic oligonucleotide
aatttttgcgctactcactgtactcgccacaaaggtgtcagtcgctcgcacactcacaga

SEQ ID NO: 307900 - DNA, 50 bp, Artificial
  Synthetic oligonucleotide
aatttttttattccacgtctttctacaaggtaatgtacgaaatacctaag

SEQ ID NO: 307901 - DNA, 57 bp, Artificial
  Synthetic oligonucleotide
aatttttttattgcaatacaacacatctgtttaatggtaatggtacagaaagtgata

SEQ ID NO: 307902 - DNA, 54 bp, Artificial
  Synthetic oligonucleotide
acaaaaactgggatttagacaacccgagaagggtgagaggatctgtatggtagg

SEQ ID NO: 307903 - DNA, 53 bp, Artificial
  Synthetic oligonucleotide
acaaaaagatggggctactcccttaacttcatggggtatacaattggaggttg

SEQ ID NO: 307904 - DNA, 51 bp, Artificial
  Synthetic oligonucleotide
acaaaaaggaagctctggagggtttagtgggtcttacggttatagccactt

SEQ ID NO: 307905 - DNA, 55 bp, Artificial
  Synthetic oligonucleotide
acaaaaatcctcaggggaccacatctggactaccaaggtatgttgcccgtttgtc

SEQ ID NO: 307906 - DNA, 59 bp, Artificial
  Synthetic oligonucleotide
acaaaaattgccgtattccaagacacacatgcgaataagcatgtccagacctcggacga

SEQ ID NO: 307907 - DNA, 57 bp, Artificial
  Synthetic oligonucleotide
acaaaacaacctctagtggctacccgcaccacgtgcggaagaatgaacattggaatg

SEQ ID NO: 307908 - DNA, 57 bp, Artificial
  Synthetic oligonucleotide
acaaaacaatgtgctaagtttaccactaggtgacagtctcgaagtagttgatgggaa

SEQ ID NO: 307909 - DNA, 60 bp, Artificial
  Synthetic oligonucleotide
acaaaacaccagaaacgttgtaccagtgtcaatcagttcgaggagcatagtgcacactag

SEQ ID NO: 307910 - DNA, 51 bp, Artificial
  Synthetic oligonucleotide
acaaaacacggacccgactttaaccggttggtgtccgcatttgaggaactg

SEQ ID NO: 307911 - DNA, 58 bp, Artificial
  Synthetic oligonucleotide
acaaaacagtcagaagtgaccctgatagtccctcccatgttctctacagttaacactg

SEQ ID NO: 307912 - DNA, 60 bp, Artificial
  Synthetic oligonucleotide
acaaaacatagttcattgcatatcatgtagtctcacctaagagagattacaatctagaag

SEQ ID NO: 307913 - DNA, 50 bp, Artificial
  Synthetic oligonucleotide
acaaaacatagttcattgtgtatcatgtagtctcacctatgagtgcttgc

SEQ ID NO: 307914 - DNA, 60 bp, Artificial
  Synthetic oligonucleotide
acaaaaccagcaaagcctaataggcaatctctgttgaaattagtagagatgcaagggcca

SEQ ID NO: 307915 - DNA, 50 bp, Artificial
  Synthetic oligonucleotide
acaaaacgacaaaacccgggagggcatttatgtcctttggcgaaaaagga

SEQ ID NO: 307916 - DNA, 59 bp, Artificial
  Synthetic oligonucleotide
acaaaacgaccctataatgtgcctaacccagttcgccatactatagatgtcttcttgca

SEQ ID NO: 307917 - DNA, 56 bp, Artificial
  Synthetic oligonucleotide
acaaaacgcatctgcagtccaaaattcgtgcccttcaaataacatacccccttctc

SEQ ID NO: 307918 - DNA, 50 bp, Artificial
  Synthetic oligonucleotide
acaaaacggaaaacccgtcaaacccatcactactaacgaaaattgacgac

SEQ ID NO: 307919 - DNA, 54 bp, Artificial
  Synthetic oligonucleotide
acaaaacggaaacaacccgaactggaagcctagagacgcaccagcaatataccc

SEQ ID NO: 307920 - DNA, 57 bp, Artificial
  Synthetic oligonucleotide
acaaaacggagccgctgcagctttttgggcttatattcccgacccgcctatgattca

SEQ ID NO: 307921 - DNA, 50 bp, Artificial
  Synthetic oligonucleotide
acaaaacgtgttaaacgtgcatctgcaacacaactatatcgtacttgcaa

SEQ ID NO: 307922 - DNA, 55 bp, Artificial
  Synthetic oligonucleotide
acaaaacgtttgcatcgctggtgttgacagcttgagtagcgtccagtgacgtcag

SEQ ID NO: 307923 - DNA, 51 bp, Artificial
  Synthetic oligonucleotide
acaaaactcaaactcgcagagttagagcaacaatgcccctctacagcagta

SEQ ID NO: 307924 - DNA, 60 bp, Artificial
  Synthetic oligonucleotide
acaaaactgctgtgcaaatgaaagctccaccccttttagtgactagtaacatcgatgtgc

SEQ ID NO: 307925 - DNA, 55 bp, Artificial
  Synthetic oligonucleotide
acaaaactgtctagcgactgggcgggtgccggaggatccctggtccggagtcaag

SEQ ID NO: 307926 - DNA, 59 bp, Artificial
  Synthetic oligonucleotide
acaaaagaatatagcgagaaaccagcgaatgctctttgaaactaacaagcacattctag

SEQ ID NO: 307927 - DNA, 56 bp, Artificial
  Synthetic oligonucleotide
acaaaagaattaagggagtataaagaacactagccgagcatacgtaagttgcaagc

SEQ ID NO: 307928 - DNA, 55 bp, Artificial
  Synthetic oligonucleotide
acaaaagaggcgtgcggtttgtttgcaaccgcacgaagaatgtttacaatcttca

SEQ ID NO: 307929 - DNA, 53 bp, Artificial
  Synthetic oligonucleotide
acaaaagatacgagcgggtgatgcaaattgagtctgtccagcaacaactaata

SEQ ID NO: 307930 - DNA, 57 bp, Artificial
  Synthetic oligonucleotide
acaaaaggagcgattagtaccagaagcggtaccataataggtcctcgtgtgcactac

SEQ ID NO: 307931 - DNA, 56 bp, Artificial
  Synthetic oligonucleotide
acaaaaggatcggcttggtgcctaggaatggcgttgaccactgggacgcctacaag

SEQ ID NO: 307932 - DNA, 60 bp, Artificial
  Synthetic oligonucleotide
acaaaaggccatccaaaatcagcccaaagacacagggaacagagcagacatcattccaga

SEQ ID NO: 307933 - DNA, 59 bp, Artificial
  Synthetic oligonucleotide
acaaaaggcttaggcatttcctatggcaggaagaagcggagacagcgacgaagcactcc

SEQ ID NO: 307934 - DNA, 56 bp, Artificial
  Synthetic oligonucleotide
acaaaaggcttcgacccgatcggtatctatggaatttatgacaaaatgtcagggaa

SEQ ID NO: 307935 - DNA, 53 bp, Artificial
  Synthetic oligonucleotide
acaaaaggggaccacaaagactcgggggttgattgcgacatcggaacgaataa

SEQ ID NO: 307936 - DNA, 58 bp, Artificial
  Synthetic oligonucleotide
acaaaaggtcacgtgccgtcatcccccgtggcactagtgattggagcatgcccgaacc

SEQ ID NO: 307937 - DNA, 55 bp, Artificial
  Synthetic oligonucleotide
acaaaaggttgactgatgagagggaggctactattctgactgctaacgctaatcc

SEQ ID NO: 307938 - DNA, 59 bp, Artificial
  Synthetic oligonucleotide
acaaaaggtttgctatgtgccccattttaaggtcggatgggcatggtggacctgcagca

SEQ ID NO: 307939 - DNA, 55 bp, Artificial
  Synthetic oligonucleotide
acaaaagtaacattgtggcctgcctacaacactgcggggggaatatctcattcgc

SEQ ID NO: 307940 - DNA, 52 bp, Artificial
  Synthetic oligonucleotide
acaaaagtaccggccacacgtttatcttatctctagggccgtaaaagttcac

SEQ ID NO: 307941 - DNA, 56 bp, Artificial
  Synthetic oligonucleotide
acaaaagtctagaacccccaccttaggtttttgctttatgcagtcattgcaagcac

SEQ ID NO: 307942 - DNA, 52 bp, Artificial
  Synthetic oligonucleotide
acaaaagttatggcggggggaaagattttgtacacagcgcgtttaagcgacg

SEQ ID NO: 307943 - DNA, 58 bp, Artificial
  Synthetic oligonucleotide
acaaaagttccgacggaatgtatctgctcctggcagataacgaatggttcccagcgga

SEQ ID NO: 307944 - DNA, 57 bp, Artificial
  Synthetic oligonucleotide
acaaaagttggggtcgcatgatcgaggattaccaatctttgagaggatgttaaagac

SEQ ID NO: 307945 - DNA, 60 bp, Artificial
  Synthetic oligonucleotide
acaaaagtttaagagcagaacagacagatgcagcagtaaagaattggatgactcaaacac

SEQ ID NO: 307946 - DNA, 60 bp, Artificial
  Synthetic oligonucleotide
acaaaatagtgagttgagagctaggatagccactaataaagagataatagagggactgag

SEQ ID NO: 307947 - DNA, 50 bp, Artificial
  Synthetic oligonucleotide
acaaaatatgtaccatctgttcctcaattggaactaagagtccctcggct

SEQ ID NO: 307948 - DNA, 50 bp, Artificial
  Synthetic oligonucleotide
acaaaatattgcagtatgggagtatgggtgtttatttgggtgggttggga

SEQ ID NO: 307949 - DNA, 58 bp, Artificial
  Synthetic oligonucleotide
acaaaatcatattcggtgaggcctgtaacattctcacttagtttaacattgagcctaa

SEQ ID NO: 307950 - DNA, 55 bp, Artificial
  Synthetic oligonucleotide
acaaaatcctaaacagagacggcagtgaagacgttccaaagaggggacctgtcag

SEQ ID NO: 307951 - DNA, 56 bp, Artificial
  Synthetic oligonucleotide
acaaaatcgctcgaaaaagaaagcttgaatccgtttcgctttattcaattgataga

SEQ ID NO: 307952 - DNA, 56 bp, Artificial
  Synthetic oligonucleotide
acaaaatcggtcacggcccagaagtatgacccaacaaagcctgacattagttacaa

SEQ ID NO: 307953 - DNA, 59 bp, Artificial
  Synthetic oligonucleotide
acaaaatctttaggagctaactccttaatgactctaagagcctctgacttactgcctgc

SEQ ID NO: 307954 - DNA, 51 bp, Artificial
  Synthetic oligonucleotide
acaaaatctttaggggccttttcccttagtatattgagggccgaagctttg

SEQ ID NO: 307955 - DNA, 53 bp, Artificial
  Synthetic oligonucleotide
acaaaatgaacactcgaattctaatactcacccttacggcagtcatccacaca

SEQ ID NO: 307956 - DNA, 55 bp, Artificial
  Synthetic oligonucleotide
acaaaatgcgtcaagaatctagagtttagcgttcgtatcggagacatgtgcaagg

SEQ ID NO: 307957 - DNA, 51 bp, Artificial
  Synthetic oligonucleotide
acaaaatgcgttgaaggtaggaagtacattagaggccattgccctaatggg

SEQ ID NO: 307958 - DNA, 51 bp, Artificial
  Synthetic oligonucleotide
acaaaatggagaacaaaatcgaggtgaataacaaagatgagatgaataagt

SEQ ID NO: 307959 - DNA, 60 bp, Artificial
  Synthetic oligonucleotide
acaaaatggcaagattaggaaaaggatacatgttcgaaagtaagagcatgaagctgcgga

SEQ ID NO: 307960 - DNA, 60 bp, Artificial
  Synthetic oligonucleotide
acaaaattgtgaatagattcttcgaaactgtggttgatatcaatttattgaccacattgc

SEQ ID NO: 307961 - DNA, 60 bp, Artificial
  Synthetic oligonucleotide
acaaaatttcatctatggagaccaggaaattgctagacagatagaagatgcgggcgccgg

SEQ ID NO: 307962 - DNA, 54 bp, Artificial
  Synthetic oligonucleotide
acaaaatttgataagcagtagcaatgaaaataattaattggcgtgcagctaagc

SEQ ID NO: 307963 - DNA, 52 bp, Artificial
  Synthetic oligonucleotide
acaaacaaaccttataactgggaaaactacggcacaccagcggactatggca

SEQ ID NO: 307964 - DNA, 55 bp, Artificial
  Synthetic oligonucleotide
acaaacaaaggccacgggactagcggctgtgagggcttattgttaccaggcaaag

SEQ ID NO: 307965 - DNA, 60 bp, Artificial
  Synthetic oligonucleotide
acaaacaaattgcatatcatcattagtgagacaggatggatcaaagtcctctactagatg

SEQ ID NO: 307966 - DNA, 55 bp, Artificial
  Synthetic oligonucleotide
acaaacaactcgactgagacagtaaacacactaattgagcaaaacattccggtga

SEQ ID NO: 307967 - DNA, 56 bp, Artificial
  Synthetic oligonucleotide
acaaacaagggtggataaactaactcaaggtcgccagacttatgattggacattaa

SEQ ID NO: 307968 - DNA, 53 bp, Artificial
  Synthetic oligonucleotide
acaaacaatcatagccacattaacactaattggatgctcaggttccccctggc

SEQ ID NO: 307969 - DNA, 58 bp, Artificial
  Synthetic oligonucleotide
acaaacaattacgagccttattaacattaagtgcagttcttgtcagaaagcactccaa

SEQ ID NO: 307970 - DNA, 59 bp, Artificial
  Synthetic oligonucleotide
acaaacacccaaggtgatgactatattcccacctgtgactgtactcaagctacctacta

SEQ ID NO: 307971 - DNA, 60 bp, Artificial
  Synthetic oligonucleotide
acaaacacgtacaggaatacagattcagtagaacatcttataatctggggaattcatcac

SEQ ID NO: 307972 - DNA, 55 bp, Artificial
  Synthetic oligonucleotide
acaaacactacaagcattaatatgtacacagtgcagttacagagacaggctgagc

SEQ ID NO: 307973 - DNA, 60 bp, Artificial
  Synthetic oligonucleotide
acaaacactggctcttgcaacactccaatgtaagtggggtagcacctgcctcctctgatg

SEQ ID NO: 307974 - DNA, 60 bp, Artificial
  Synthetic oligonucleotide
acaaacagccaatggcatctaccagtaacttgccaaaagctctttgtgcaccaatagatg

SEQ ID NO: 307975 - DNA, 60 bp, Artificial
  Synthetic oligonucleotide
acaaacaggcttgtcagcacgcttaagtaaaaacctcaagcagctgagacagcggctata

SEQ ID NO: 307976 - DNA, 55 bp, Artificial
  Synthetic oligonucleotide
acaaacagttcgtgaaaccgcggtaatgagatttctgtaacgagcaaaagacgaa

SEQ ID NO: 307977 - DNA, 59 bp, Artificial
  Synthetic oligonucleotide
acaaacatactaagctctggaacttacaatacattgaacgagagttgacaaatatcgaa

SEQ ID NO: 307978 - DNA, 57 bp, Artificial
  Synthetic oligonucleotide
acaaacatgttcaacttcttctttgcactaagaacagcttttaagagatcttcagta

SEQ ID NO: 307979 - DNA, 59 bp, Artificial
  Synthetic oligonucleotide
acaaacatttatgagaatggcttggggagggagttatattgctcttgattctggacgcg

SEQ ID NO: 307980 - DNA, 56 bp, Artificial
  Synthetic oligonucleotide
acaaaccaaatatatgggatacttacagaatcacagaaccagcaggacaagaatga

SEQ ID NO: 307981 - DNA, 56 bp, Artificial
  Synthetic oligonucleotide
acaaaccaacagctactttaatgtagtgtgcatttcaggttggacaacaactcctt

SEQ ID NO: 307982 - DNA, 59 bp, Artificial
  Synthetic oligonucleotide
acaaaccaacattggacgtccgcatgattaacatcgaagctagccaacttgctgaggtt

SEQ ID NO: 307983 - DNA, 50 bp, Artificial
  Synthetic oligonucleotide
acaaaccaactcaaccagacacatcatcaaatagattttacaccttggac

SEQ ID NO: 307984 - DNA, 53 bp, Artificial
  Synthetic oligonucleotide
acaaaccaattcacgccccctactcaggaatggcattggtacctatccctgaa

SEQ ID NO: 307985 - DNA, 60 bp, Artificial
  Synthetic oligonucleotide
acaaacccactaacattgaacatcacttgaacagggcagtcttggtagtgcagtccattg

SEQ ID NO: 307986 - DNA, 55 bp, Artificial
  Synthetic oligonucleotide
acaaacccactatggctggactctgtcatacaatacctacctgaagatagtgaca

SEQ ID NO: 307987 - DNA, 60 bp, Artificial
  Synthetic oligonucleotide
acaaacccagcagaatcgatggatgttcgagcagctcaatgggaacctgaaagcaatagc

SEQ ID NO: 307988 - DNA, 51 bp, Artificial
  Synthetic oligonucleotide
acaaaccgccacccttctgtaacagtacagattgggagccactagaggccg

SEQ ID NO: 307989 - DNA, 56 bp, Artificial
  Synthetic oligonucleotide
acaaacctcaggactttggtgaggtatttaatatgtttgacattgaacccagtaca

SEQ ID NO: 307990 - DNA, 57 bp, Artificial
  Synthetic oligonucleotide
acaaacctcgatcaggacccgaaacaacgtactggcccagcggacacatacagacaa

SEQ ID NO: 307991 - DNA, 55 bp, Artificial
  Synthetic oligonucleotide
acaaaccttgccagcaaatccgcctcctgctgctaccaatcgccagtcagccgcc

SEQ ID NO: 307992 - DNA, 59 bp, Artificial
  Synthetic oligonucleotide
acaaacgaatgtctccagtgtattatcacgagtggtatctataagacacttggagaatt

SEQ ID NO: 307993 - DNA, 56 bp, Artificial
  Synthetic oligonucleotide
acaaacgatgaggccttgtgttaagctctcccccatatgtattaaaatgtcctgtg

SEQ ID NO: 307994 - DNA, 50 bp, Artificial
  Synthetic oligonucleotide
acaaacgccgtggctgagtgaagaccccgagggagcagtggacagggggt

SEQ ID NO: 307995 - DNA, 51 bp, Artificial
  Synthetic oligonucleotide
acaaacggtctctaaatcgcctggtcgcttggatgaggaagaatataacgt

SEQ ID NO: 307996 - DNA, 56 bp, Artificial
  Synthetic oligonucleotide
acaaacgtggtttctacagtctcttcaacgcgattttgatcgttgcggagttcaat

SEQ ID NO: 307997 - DNA, 55 bp, Artificial
  Synthetic oligonucleotide
acaaactacaaaccgccgaggatccgtacattcccgacatcaagctaccaattcg

SEQ ID NO: 307998 - DNA, 60 bp, Artificial
  Synthetic oligonucleotide
acaaactactacacttggatgagcacaaagaacttgaagcgtgggtggacacattgccag

SEQ ID NO: 307999 - DNA, 57 bp, Artificial
  Synthetic oligonucleotide
acaaactatcccctaggggccgcaagctgttgtacgtcattgctgagtaccgttgtg

SEQ ID NO: 308000 - DNA, 60 bp, Artificial
  Synthetic oligonucleotide
acaaactcataagaccagtagcacggctatagaagtgcatatgataccaagctctcggta

SEQ ID NO: 308001 - DNA, 60 bp, Artificial
  Synthetic oligonucleotide
acaaactctacactcattgcaaacgttatagcatatgattgtattgacccagtctggaat

SEQ ID NO: 308002 - DNA, 60 bp, Artificial
  Synthetic oligonucleotide
acaaactgacaagtccggagtggttgcatgtgcctattgtcttttcaagcgattcgagtc

SEQ ID NO: 308003 - DNA, 51 bp, Artificial
  Synthetic oligonucleotide
acaaactgacttcaagaactcctgtgcgtgctagagaagcacacatgcaaa

SEQ ID NO: 308004 - DNA, 55 bp, Artificial
  Synthetic oligonucleotide
acaaactgatgtgtatagcacaaggtccttataccggcttaccacaacccaaacc

SEQ ID NO: 308005 - DNA, 58 bp, Artificial
  Synthetic oligonucleotide
acaaactggactggtagcctacgtttcagtcttatgttttgtggctctgcaggaacaa

SEQ ID NO: 308006 - DNA, 56 bp, Artificial
  Synthetic oligonucleotide
acaaactggtggttgccacagtggagacgaactccgaaggcagccgaccaccttgt

SEQ ID NO: 308007 - DNA, 57 bp, Artificial
  Synthetic oligonucleotide
acaaacttctcggcgaatgttactgctccaatcgcgaagtccaatgctagggttagg

SEQ ID NO: 308008 - DNA, 52 bp, Artificial
  Synthetic oligonucleotide
acaaactttagtaatcctttacggaaaattactaagcaactgaaatgtcttg

SEQ ID NO: 308009 - DNA, 58 bp, Artificial
  Synthetic oligonucleotide
acaaagaaaaaaccacctcctgatatgaactactggaggccgcctgtgcacaatgtcc

SEQ ID NO: 308010 - DNA, 55 bp, Artificial
  Synthetic oligonucleotide
acaaagaaggcgaatgtagtatacgtcctgattcaatagaagatccagaagcaca

SEQ ID NO: 308011 - DNA, 60 bp, Artificial
  Synthetic oligonucleotide
acaaagaagtgctgcagtggcagtttgacagctccctggcaagaagacacatagcaagag

SEQ ID NO: 308012 - DNA, 59 bp, Artificial
  Synthetic oligonucleotide
acaaagaatgaagttccggagctggtcgtgattgaatgtacgaaggatgagttgctacc

SEQ ID NO: 308013 - DNA, 55 bp, Artificial
  Synthetic oligonucleotide
acaaagaccattattgcacttgcgttggatacacagcagttaagttatactaaac

SEQ ID NO: 308014 - DNA, 52 bp, Artificial
  Synthetic oligonucleotide
acaaagacgatatgtcatctttgcaccgattagtcgacatatttactccgtt

SEQ ID NO: 308015 - DNA, 54 bp, Artificial
  Synthetic oligonucleotide
acaaagacgatggttcaatcagtttcggactgaggaaaaccaaaaacacctatg

SEQ ID NO: 308016 - DNA, 55 bp, Artificial
  Synthetic oligonucleotide
acaaagacggtcgatgtgaatttggtaacgttgcacgtaaggatcttacaaagta

SEQ ID NO: 308017 - DNA, 60 bp, Artificial
  Synthetic oligonucleotide
acaaagacgtcatagtcacaagagagccttatgttagttgcgacaataataattgctggt

SEQ ID NO: 308018 - DNA, 54 bp, Artificial
  Synthetic oligonucleotide
acaaagacgtgctcgagtcctgggcaagcggagggcccgacggaaagttctccc

SEQ ID NO: 308019 - DNA, 54 bp, Artificial
  Synthetic oligonucleotide
acaaagactgctgacaacgggactttccgctggggactttccaggggaggtgtg

SEQ ID NO: 308020 - DNA, 55 bp, Artificial
  Synthetic oligonucleotide
acaaagagcgtgctactcaggagcgctcggaattatggcccgctactatcgacat

SEQ ID NO: 308021 - DNA, 60 bp, Artificial
  Synthetic oligonucleotide
acaaagaggagatcagaagaatctggcgtcaagcaaacaatggggaggacgcaactgctg

SEQ ID NO: 308022 - DNA, 60 bp, Artificial
  Synthetic oligonucleotide
acaaagaggagatcaggagaatttggcgtcaagcgaacaatggagaagatgcaactgctg

SEQ ID NO: 308023 - DNA, 59 bp, Artificial
  Synthetic oligonucleotide
acaaagaggctcacaatcctcggaaaagatgcgggtgcattaaccgaagacccagatga

SEQ ID NO: 308024 - DNA, 58 bp, Artificial
  Synthetic oligonucleotide
acaaagagtcaatgggctttagatattcaggaataagaacagacggggcaaccagtgc

SEQ ID NO: 308025 - DNA, 54 bp, Artificial
  Synthetic oligonucleotide
acaaagattaccgaggggtgtcttcaacagttcagacgctcaggcctttaacgc

SEQ ID NO: 308026 - DNA, 58 bp, Artificial
  Synthetic oligonucleotide
acaaagatttcttagtgaggagaggtgctcactagacaaatagtttgttgtgaactct

SEQ ID NO: 308027 - DNA, 60 bp, Artificial
  Synthetic oligonucleotide
acaaagccacttttggttgcagccattagacaatgctaaacttgggttgttggatgatgc

SEQ ID NO: 308028 - DNA, 54 bp, Artificial
  Synthetic oligonucleotide
acaaagcccttggaacccctcctatacaagcagctgggtaagctttaccagttc

SEQ ID NO: 308029 - DNA, 58 bp, Artificial
  Synthetic oligonucleotide
acaaagccgtatttacctgctggtgttcaagctcttcctacatttgaagagctgttcg

SEQ ID NO: 308030 - DNA, 57 bp, Artificial
  Synthetic oligonucleotide
acaaagcggctacgtggctcgcagagcgagtgcttgggaaggtgcccgatgtcgttt

SEQ ID NO: 308031 - DNA, 60 bp, Artificial
  Synthetic oligonucleotide
acaaagctgtgacagcccatggttactgtggctctgtgatggttgcagatgctggagttt

SEQ ID NO: 308032 - DNA, 53 bp, Artificial
  Synthetic oligonucleotide
acaaaggaaatttcaatccccggccaggttagaaacctaatagaattatgtca

SEQ ID NO: 308033 - DNA, 59 bp, Artificial
  Synthetic oligonucleotide
acaaaggactgataataaaagaggaggccctcaaaggatcagccaggcacatagaggaa

SEQ ID NO: 308034 - DNA, 54 bp, Artificial
  Synthetic oligonucleotide
acaaaggagggagttgtcaaaattcttagtgtactccttcctctagttcctaca

SEQ ID NO: 308035 - DNA, 57 bp, Artificial
  Synthetic oligonucleotide
acaaaggagtctcctacggaataggagtaagaccatagcgatagggggagatgctag

SEQ ID NO: 308036 - DNA, 51 bp, Artificial
  Synthetic oligonucleotide
acaaaggatgcaactgaagtctttgggtaatattgatgtccacatcgagat

SEQ ID NO: 308037 - DNA, 55 bp, Artificial
  Synthetic oligonucleotide
acaaaggcggcacaagtatcggatcatggcatataagaaaacgtactgaaggtga

SEQ ID NO: 308038 - DNA, 57 bp, Artificial
  Synthetic oligonucleotide
acaaaggctttggactggagcgggacaaggtactgggctcccgatgctaggactaca

SEQ ID NO: 308039 - DNA, 50 bp, Artificial
  Synthetic oligonucleotide
acaaagggaccggggataaggtatccgaagactttcgggttcttgttcaa

SEQ ID NO: 308040 - DNA, 57 bp, Artificial
  Synthetic oligonucleotide
acaaagggactaggatcaggtttaaagatgactcatccttcgaagaggtcaatggaa

SEQ ID NO: 308041 - DNA, 57 bp, Artificial
  Synthetic oligonucleotide
acaaagggatcaagccttattatcctgattatgtagttaatcattacttccagaccc

SEQ ID NO: 308042 - DNA, 54 bp, Artificial
  Synthetic oligonucleotide
acaaagggcacagctgtcagttgtgcaaatccgagtcatctggaccacaaacat

SEQ ID NO: 308043 - DNA, 58 bp, Artificial
  Synthetic oligonucleotide
acaaagggccccagaagaccaaggggcccaaaactatcactcattagatgcatggcaa

SEQ ID NO: 308044 - DNA, 55 bp, Artificial
  Synthetic oligonucleotide
acaaagggcgacgttggtccgcgaggatcaaagggtgacatgggagacacgggcc

SEQ ID NO: 308045 - DNA, 60 bp, Artificial
  Synthetic oligonucleotide
acaaaggggtctggcggggagacggcatcatgcagactacctgcccgtgtggagcacaaa

SEQ ID NO: 308046 - DNA, 55 bp, Artificial
  Synthetic oligonucleotide
acaaaggtatatgtgatttgttaattaggtgtataacgtgtcaaagaccgttgtg

SEQ ID NO: 308047 - DNA, 54 bp, Artificial
  Synthetic oligonucleotide
acaaaggtggatatcgaccgatactgaccgaagagtatcgcaaagacactctgc

SEQ ID NO: 308048 - DNA, 55 bp, Artificial
  Synthetic oligonucleotide
acaaagtaaactttagcttctcttctgcttataggactttgctgtataaattaac

SEQ ID NO: 308049 - DNA, 58 bp, Artificial
  Synthetic oligonucleotide
acaaagtagactcgaaatatcacgcccccgccctgattgtcagtaccggtgctgtgtg

SEQ ID NO: 308050 - DNA, 58 bp, Artificial
  Synthetic oligonucleotide
acaaagtaggtgtgttaaagtactagaccttggtgcctctccgcagatagctcagttg

SEQ ID NO: 308051 - DNA, 55 bp, Artificial
  Synthetic oligonucleotide
acaaagtatagcttaatcatctgatgatgtcacgagaagaggacctagaagagaa

SEQ ID NO: 308052 - DNA, 56 bp, Artificial
  Synthetic oligonucleotide
acaaagtcctttgggactaattcccgaatgacattaagagcttctgacttactgcc

SEQ ID NO: 308053 - DNA, 55 bp, Artificial
  Synthetic oligonucleotide
acaaagtcttgtggatcgatgaagggttaatgctgcacactggtgcaatcagttt

SEQ ID NO: 308054 - DNA, 55 bp, Artificial
  Synthetic oligonucleotide
acaaagtgcccggacacctcccgagctattaccatagccttggatactaacgaag

SEQ ID NO: 308055 - DNA, 51 bp, Artificial
  Synthetic oligonucleotide
acaaagtgtaattaaattgttaggactatctgaaccaccttcacttctata

SEQ ID NO: 308056 - DNA, 59 bp, Artificial
  Synthetic oligonucleotide
acaaagttaagacagcaaatgggaaacaatatgtttctggcatagattctagtatcttg

SEQ ID NO: 308057 - DNA, 59 bp, Artificial
  Synthetic oligonucleotide
acaaagttaagtcatcacgagagggattgccagatttcagtttgtaccgagttatgaga

SEQ ID NO: 308058 - DNA, 56 bp, Artificial
  Synthetic oligonucleotide
acaaagttcggtcacacacgccttggacaaatgtctggtctttgtaaacatggtac

SEQ ID NO: 308059 - DNA, 50 bp, Artificial
  Synthetic oligonucleotide
acaaagttctgctaacctcgcagcagaaggctcaggaccatcgcacagag

SEQ ID NO: 308060 - DNA, 58 bp, Artificial
  Synthetic oligonucleotide
acaaagttcttgatgggagggactgcacactaatagatgccctactaggggacccgca

SEQ ID NO: 308061 - DNA, 57 bp, Artificial
  Synthetic oligonucleotide
acaaagtttctcccttgggggacaatttctttgagcctagatgctgaatcagtagcc

SEQ ID NO: 308062 - DNA, 59 bp, Artificial
  Synthetic oligonucleotide
acaaataaaagaatgctctttcaatatcaccgcaagcattaaagataaggtgcagagag

SEQ ID NO: 308063 - DNA, 55 bp, Artificial
  Synthetic oligonucleotide
acaaataatgctgatcagactgagatagatgacctgttcagcgcattcggaagta

SEQ ID NO: 308064 - DNA, 53 bp, Artificial
  Synthetic oligonucleotide
acaaatacaaggtagtaaaaattgaacccctaggattagcaccaaccaaggca

SEQ ID NO: 308065 - DNA, 55 bp, Artificial
  Synthetic oligonucleotide
acaaatacctggaagagcaccccagcgctgggaaggatcctaagaaaactggagg

SEQ ID NO: 308066 - DNA, 51 bp, Artificial
  Synthetic oligonucleotide
acaaatagacagtacagcctataaagctgccagaaaaagatagctagactg

SEQ ID NO: 308067 - DNA, 54 bp, Artificial
  Synthetic oligonucleotide
acaaatagagttattaaattaactctattgaacccgttatccggtgatatagga

SEQ ID NO: 308068 - DNA, 54 bp, Artificial
  Synthetic oligonucleotide
acaaatagatagcgaaagtaatagtaccaaatataggttaataagttgtaacac

SEQ ID NO: 308069 - DNA, 60 bp, Artificial
  Synthetic oligonucleotide
acaaatagatcgcgcaattgggcgcaaggtcagcgaagtcaacctcagcgtatggtcgtg

SEQ ID NO: 308070 - DNA, 55 bp, Artificial
  Synthetic oligonucleotide
acaaatagcaaatcatctatccgttatggtttggatgctattcgtgccatgtcag

SEQ ID NO: 308071 - DNA, 56 bp, Artificial
  Synthetic oligonucleotide
acaaatagtaagttagatcaactcgtcacctcactggagcgactaaccgtggggtc

SEQ ID NO: 308072 - DNA, 60 bp, Artificial
  Synthetic oligonucleotide
acaaatagtgcctacccaagagctggatttgtatgatcctgatgaactaactcacattgc

SEQ ID NO: 308073 - DNA, 60 bp, Artificial
  Synthetic oligonucleotide
acaaatagtgttggaccacaacacccaagtgtgtagcgcgaatgtgatgtacacggcact

SEQ ID NO: 308074 - DNA, 55 bp, Artificial
  Synthetic oligonucleotide
acaaatataaagtagtacaacttgaaccactaggattagcacccaccgaggcaaa

SEQ ID NO: 308075 - DNA, 60 bp, Artificial
  Synthetic oligonucleotide
acaaatatgacttccgaaccaactcgatgcggttggatcaccgcgtgatgaatgttgtgc

SEQ ID NO: 308076 - DNA, 60 bp, Artificial
  Synthetic oligonucleotide
acaaatatggcatagatttaccacttgttacatacattaaagatgagcttagaggcaaag

SEQ ID NO: 308077 - DNA, 51 bp, Artificial
  Synthetic oligonucleotide
acaaatcaaaagactgaattgcacgcaattcagctagctttgcaggactca

SEQ ID NO: 308078 - DNA, 60 bp, Artificial
  Synthetic oligonucleotide
acaaatcacagtttattacacccaccaactataacatgcacaccagctatgaataggaga

SEQ ID NO: 308079 - DNA, 55 bp, Artificial
  Synthetic oligonucleotide
acaaatcacttgtaccagaccctccaacaatacaagagaaagtgtgcgtatagga

SEQ ID NO: 308080 - DNA, 60 bp, Artificial
  Synthetic oligonucleotide
acaaatcatattgagagagttcagatatttcctaggagctcttggcccaaccataatgcc

SEQ ID NO: 308081 - DNA, 60 bp, Artificial
  Synthetic oligonucleotide
acaaatccaggatgatatgtctatacgcaaaaactgttgtggataacagtaatgaaagga

SEQ ID NO: 308082 - DNA, 59 bp, Artificial
  Synthetic oligonucleotide
acaaatccggctgagaaatgcgacgtacaagcccactacgccatttctatacatggagg

SEQ ID NO: 308083 - DNA, 55 bp, Artificial
  Synthetic oligonucleotide
acaaatcggaaacatggccaattggagagtcccccaaaggagtggaagaaggctc

SEQ ID NO: 308084 - DNA, 54 bp, Artificial
  Synthetic oligonucleotide
acaaatcggtccgaacttggaatgagatcatcccctcaaaagggtgtttaagag

SEQ ID NO: 308085 - DNA, 53 bp, Artificial
  Synthetic oligonucleotide
acaaatctacgaagacatctggggtaaaacccgtcgtccagaaggaacaccag

SEQ ID NO: 308086 - DNA, 58 bp, Artificial
  Synthetic oligonucleotide
acaaatctagcttgcagggttttagggacaggatactcattcattgtaaccaagcctg

SEQ ID NO: 308087 - DNA, 60 bp, Artificial
  Synthetic oligonucleotide
acaaatctctatacacacaactcatgatatgtcggacatcttcaactcaccacagaacaa

SEQ ID NO: 308088 - DNA, 59 bp, Artificial
  Synthetic oligonucleotide
acaaatctgcaggtcaaaatgcccttcgtcgcttaactgcaacattagacgacacccaa

SEQ ID NO: 308089 - DNA, 55 bp, Artificial
  Synthetic oligonucleotide
acaaatctggcgactgtgataatacgtcattcgacggataaggtggactataagc

SEQ ID NO: 308090 - DNA, 58 bp, Artificial
  Synthetic oligonucleotide
acaaatgattcaaccacagtagaaccaattttagatggtccttatcagcctactacat

SEQ ID NO: 308091 - DNA, 59 bp, Artificial
  Synthetic oligonucleotide
acaaatgcagacaagatctgccttgggcaccatgccgtgtcaaacgggactaaagtaaa

SEQ ID NO: 308092 - DNA, 60 bp, Artificial
  Synthetic oligonucleotide
acaaatgcagactcgtacttaaacatttactgcacagggcaagttagctgcgaaattgta

SEQ ID NO: 308093 - DNA, 54 bp, Artificial
  Synthetic oligonucleotide
acaaatgcggcaaatggcttaacggatttggttatttcggactagaggaccttg

SEQ ID NO: 308094 - DNA, 60 bp, Artificial
  Synthetic oligonucleotide
acaaatgcgtcgacttgcgattgctctacagaaagagattggtgagaggacacatgtaga

SEQ ID NO: 308095 - DNA, 59 bp, Artificial
  Synthetic oligonucleotide
acaaatgctagatagagacaggagcgaaggatattttactggtcaccgtggtgaaagtg

SEQ ID NO: 308096 - DNA, 57 bp, Artificial
  Synthetic oligonucleotide
acaaatgctattgtaaagggtgttgcttacattgccaagtttgtttcatgacaaaag

SEQ ID NO: 308097 - DNA, 55 bp, Artificial
  Synthetic oligonucleotide
acaaatgctgccgaaaggtatgaagctatttatcccaggcataaaggcaccgaca

SEQ ID NO: 308098 - DNA, 55 bp, Artificial
  Synthetic oligonucleotide
acaaatggagccgtcgtaggcactccagtttgtgtcaatggcctcatgctcttgg

SEQ ID NO: 308099 - DNA, 60 bp, Artificial
  Synthetic oligonucleotide
acaaatggagtacatccaatgacatcctagacctggccagatacctgggctgcgactttt

SEQ ID NO: 308100 - DNA, 58 bp, Artificial
  Synthetic oligonucleotide
acaaatggcaatgacagacacaaccccctttggacagcagcgcgtgttcaaagaaaaa

SEQ ID NO: 308101 - DNA, 59 bp, Artificial
  Synthetic oligonucleotide
acaaatgggagaagtactgtgttcttgaaataggggacatgcttctaaggactgcaata

SEQ ID NO: 308102 - DNA, 55 bp, Artificial
  Synthetic oligonucleotide
acaaatgggcgtgaccaaaccatgcgggtgcccaaggtgtctgcaaatcagttcc

SEQ ID NO: 308103 - DNA, 59 bp, Artificial
  Synthetic oligonucleotide
acaaatggggtgcaaatttcaacagtgctctaattcaggtctataatgacgggtgcagg

SEQ ID NO: 308104 - DNA, 54 bp, Artificial
  Synthetic oligonucleotide
acaaatgggtcttgtgaggtattaggcgatgtcgagttggtagggttcatggtc

SEQ ID NO: 308105 - DNA, 53 bp, Artificial
  Synthetic oligonucleotide
acaaatgggttacaagcaaccacaaactttggctacggtttgtcagttctaca

SEQ ID NO: 308106 - DNA, 58 bp, Artificial
  Synthetic oligonucleotide
acaaatgtaatgcataggttccgcaggtcctggctcgatggccccgctcggttgtggg

SEQ ID NO: 308107 - DNA, 57 bp, Artificial
  Synthetic oligonucleotide
acaaatgtaccgatggttgtgaacttgctctggtctacgtatcagggttttgttcag

SEQ ID NO: 308108 - DNA, 60 bp, Artificial
  Synthetic oligonucleotide
acaaatgtgcttggaggacgccatgtacggtaccgatggcctagaagcacttgatttgtc

SEQ ID NO: 308109 - DNA, 60 bp, Artificial
  Synthetic oligonucleotide
acaaatgtgtcagcagccacctctgagaagcgctggttgacagccctgagtcggtttagt

SEQ ID NO: 308110 - DNA, 58 bp, Artificial
  Synthetic oligonucleotide
acaaattaattgcacaagacccaacaacaatacaagaagacgcataactatgggacca

SEQ ID NO: 308111 - DNA, 50 bp, Artificial
  Synthetic oligonucleotide
acaaattaccataagttcgatttcaagcgttctaaacgactgataaatgg

SEQ ID NO: 308112 - DNA, 57 bp, Artificial
  Synthetic oligonucleotide
acaaattagcgaacctcaacctggtcgtaaagaagtactgtgaaagtgagatgagta

SEQ ID NO: 308113 - DNA, 56 bp, Artificial
  Synthetic oligonucleotide
acaaattcacaatccaacccagcaaaacgctatggtacaaattcaggtagtattct

SEQ ID NO: 308114 - DNA, 53 bp, Artificial
  Synthetic oligonucleotide
acaaattcgtcttttcctcaaaaagaccgtttatgccattcggtgtacacaaa

SEQ ID NO: 308115 - DNA, 55 bp, Artificial
  Synthetic oligonucleotide
acaaattgacgctgacttacaacaacctgatcgagtcagacgtcacgctgatccg

SEQ ID NO: 308116 - DNA, 60 bp, Artificial
  Synthetic oligonucleotide
acaaattggaaatgtcatcaattggacacgagactcaatgactgaggtatggtcgtataa

SEQ ID NO: 308117 - DNA, 60 bp, Artificial
  Synthetic oligonucleotide
acaaattgtatggctctggtgatcgatatgtcaggatgggaaccgaaagcatgaattttg

SEQ ID NO: 308118 - DNA, 57 bp, Artificial
  Synthetic oligonucleotide
acaaattgttgacccacactccatgggcccgcaattctcgttccacaactgggacta

SEQ ID NO: 308119 - DNA, 53 bp, Artificial
  Synthetic oligonucleotide
acaaatttaaggccggaaagcaatatggcgaaattactccattgtcgaggtac

SEQ ID NO: 308120 - DNA, 53 bp, Artificial
  Synthetic oligonucleotide
acaaatttcaaggttacggggtatccctgcgtggtgactcgtgtatatatttt

SEQ ID NO: 308121 - DNA, 55 bp, Artificial
  Synthetic oligonucleotide
acaaatttccccgaaagcccgctccctcatcctctggacagaacgcggcgcagcc

SEQ ID NO: 308122 - DNA, 53 bp, Artificial
  Synthetic oligonucleotide
acaaatttgtgagtcctaaaacagttgtggggacctttgcaagtgaatttaaa

SEQ ID NO: 308123 - DNA, 56 bp, Artificial
  Synthetic oligonucleotide
acaaattttccaaatatcacattccgtgtgaaaacagagctgtagggtgcctggtt

SEQ ID NO: 308124 - DNA, 54 bp, Artificial
  Synthetic oligonucleotide
acaaattttgtacatgccctcaccgtaaggtgaggatgcccctttaagggatgc

SEQ ID NO: 308125 - DNA, 55 bp, Artificial
  Synthetic oligonucleotide
acaacaaaaacacacgttgcgggaacgctctattggcaaaacacagggtggctcg

SEQ ID NO: 308126 - DNA, 54 bp, Artificial
  Synthetic oligonucleotide
acaacaaaacttaggaaggccaatcggacaatcaatgctaagttatctcagagc

SEQ ID NO: 308127 - DNA, 55 bp, Artificial
  Synthetic oligonucleotide
acaacaaaaggagccgctttgatgagcggagagggccgtctggacccatactggg

SEQ ID NO: 308128 - DNA, 57 bp, Artificial
  Synthetic oligonucleotide
acaacaaacattcaaatggcacaatacacgatagaacccctcatcgaacccttttga

SEQ ID NO: 308129 - DNA, 58 bp, Artificial
  Synthetic oligonucleotide
acaacaaatcactttgaaattgcaggaactacagtcaaatcagggtggtttaagagca

SEQ ID NO: 308130 - DNA, 54 bp, Artificial
  Synthetic oligonucleotide
acaacaaatccccgaggggataggattgtttagaccagatataaaacaatacga

SEQ ID NO: 308131 - DNA, 51 bp, Artificial
  Synthetic oligonucleotide
acaacaaattatgtaggcacaccaagtggctctatggtttcatctgatgtc

SEQ ID NO: 308132 - DNA, 55 bp, Artificial
  Synthetic oligonucleotide
acaacaacagcagatgcccaacttgtttcgacgagttggatgcagtagcgagggg

SEQ ID NO: 308133 - DNA, 55 bp, Artificial
  Synthetic oligonucleotide
acaacaaccagtccaaggtgaccgccggcactcgcgcggccatcaacaaccaagg

SEQ ID NO: 308134 - DNA, 58 bp, Artificial
  Synthetic oligonucleotide
acaacaaccgctgaggctgttgtcactctcccaccaccataactacgtctacataacc

SEQ ID NO: 308135 - DNA, 54 bp, Artificial
  Synthetic oligonucleotide
acaacaactaaattccattgacgtaatcaatccgattaatgctatagatgattt

SEQ ID NO: 308136 - DNA, 55 bp, Artificial
  Synthetic oligonucleotide
acaacaactagaggtttggctgggagggggtctgtccaggtcccaaaagattgca

SEQ ID NO: 308137 - DNA, 53 bp, Artificial
  Synthetic oligonucleotide
acaacaagaaatattttacttcgacttgaaaaaagtgtgttatgttacataaa

SEQ ID NO: 308138 - DNA, 53 bp, Artificial
  Synthetic oligonucleotide
acaacaagaatgttagcccagtaagaagttttgcgtttaacaagactgtactc

SEQ ID NO: 308139 - DNA, 60 bp, Artificial
  Synthetic oligonucleotide
acaacaagcactaaatcttctaagatctgacccgcgagtattgcgtgaatttattaatca

SEQ ID NO: 308140 - DNA, 51 bp, Artificial
  Synthetic oligonucleotide
acaacaagcgcccgaatagtaatgttcccgcttcggggtcctataaaaatg

SEQ ID NO: 308141 - DNA, 53 bp, Artificial
  Synthetic oligonucleotide
acaacaagctcaatagaacccctggttaaagaagcctcagagctttgcaggta

SEQ ID NO: 308142 - DNA, 55 bp, Artificial
  Synthetic oligonucleotide
acaacaaggagtatcattattaagagatcatgttgtcactttgatggaagctgcc

SEQ ID NO: 308143 - DNA, 54 bp, Artificial
  Synthetic oligonucleotide
acaacaaggagtgaggaacctccagaaaagctattcccagaaggtaagaaagga

SEQ ID NO: 308144 - DNA, 55 bp, Artificial
  Synthetic oligonucleotide
acaacaaggcaccgttcacgagactcgctctcccgtacaccgcgccacaccgtgt

SEQ ID NO: 308145 - DNA, 60 bp, Artificial
  Synthetic oligonucleotide
acaacaaggcgctgaatgaccgcttctatccggatacggacgctccatatgtgcacttcc

SEQ ID NO: 308146 - DNA, 60 bp, Artificial
  Synthetic oligonucleotide
acaacaatcattgttccagtggaaccatcagcaccactgcccggacaataaggcatcctc

SEQ ID NO: 308147 - DNA, 60 bp, Artificial
  Synthetic oligonucleotide
acaacaattactgtttatccattataggattggctgccagcatagcagaatagggattac

SEQ ID NO: 308148 - DNA, 60 bp, Artificial
  Synthetic oligonucleotide
acaacacaaaatatcctcacggaaattgcttgtctacttcgatggtccacaacatgatga

SEQ ID NO: 308149 - DNA, 60 bp, Artificial
  Synthetic oligonucleotide
acaacacaagcggggagcaaatgctggtaatttggggaatacatcatcccaatgatgata

SEQ ID NO: 308150 - DNA, 60 bp, Artificial
  Synthetic oligonucleotide
acaacacaatcattgcctgtagacccttgatacttagccatttgcaatatagaaggtaca

SEQ ID NO: 308151 - DNA, 57 bp, Artificial
  Synthetic oligonucleotide
acaacacaatcctctctgaccaaatcagagactacaacagaagacaaagagccaagc

SEQ ID NO: 308152 - DNA, 58 bp, Artificial
  Synthetic oligonucleotide
acaacacagttcgtgaaacaataggagcttcgacctcaagggatgctcttccgaacac

SEQ ID NO: 308153 - DNA, 58 bp, Artificial
  Synthetic oligonucleotide
acaacacatagttttaattgtggaggagaatttttctattgcaatacatcagaactgt

SEQ ID NO: 308154 - DNA, 60 bp, Artificial
  Synthetic oligonucleotide
acaacacatctataacacatatggagacacctgggagggggtagaggcaattatcaggat

SEQ ID NO: 308155 - DNA, 59 bp, Artificial
  Synthetic oligonucleotide
acaacaccaacagccccaaaagcaagcacagcacccaagaacagacaggcaacaaccaa

SEQ ID NO: 308156 - DNA, 56 bp, Artificial
  Synthetic oligonucleotide
acaacaccaagaccaatcaaacttccgaatggacctccttgttatcagcggtccaa

SEQ ID NO: 308157 - DNA, 59 bp, Artificial
  Synthetic oligonucleotide
acaacacctggtatgactactggaccaagtgcgcaggaccacaaaacataccctggtca

SEQ ID NO: 308158 - DNA, 59 bp, Artificial
  Synthetic oligonucleotide
acaacacgcgtccgccacaaggcaactggttcggctgtacatggatgaatagtactggg

SEQ ID NO: 308159 - DNA, 55 bp, Artificial
  Synthetic oligonucleotide
acaacacggacgtttcagattacgggcgggtcagaatattacggcagcgtacgtg

SEQ ID NO: 308160 - DNA, 60 bp, Artificial
  Synthetic oligonucleotide
acaacacggtgctccagtgctacaacataacttggataaacaatttgctcacaagaatcg

SEQ ID NO: 308161 - DNA, 54 bp, Artificial
  Synthetic oligonucleotide
acaacacgtacgtgtgttacctttggttcagtgtgctataaagagaacaatcgc

SEQ ID NO: 308162 - DNA, 55 bp, Artificial
  Synthetic oligonucleotide
acaacactagagagtatgcgacataacggaggacaacacgagtatgctaccgacc

SEQ ID NO: 308163 - DNA, 53 bp, Artificial
  Synthetic oligonucleotide
acaacactcgcgtaggtggtaacttagggttaggtggtgcttcttccacgaag

SEQ ID NO: 308164 - DNA, 54 bp, Artificial
  Synthetic oligonucleotide
acaacacttaagttgcttattgcttacactccccctggaatcgagaaaccaaca

SEQ ID NO: 308165 - DNA, 53 bp, Artificial
  Synthetic oligonucleotide
acaacagaggaccacgttgctggacccaacacatcaggtttggagacacgagt

SEQ ID NO: 308166 - DNA, 55 bp, Artificial
  Synthetic oligonucleotide
acaacagagggaaggtcctctctacgaggatcagatcagagattacagacgcgga

SEQ ID NO: 308167 - DNA, 52 bp, Artificial
  Synthetic oligonucleotide
acaacagagttcctctagtcgatgtcacctttaactgatgcaaacacgtagg

SEQ ID NO: 308168 - DNA, 58 bp, Artificial
  Synthetic oligonucleotide
acaacagattcaactctacaggctgtcccgagaggttagccagctgccgaccccttac

SEQ ID NO: 308169 - DNA, 60 bp, Artificial
  Synthetic oligonucleotide
acaacagcgttagagtacatgtaatccgactgttcgggagtcatatccttgagccaatct

SEQ ID NO: 308170 - DNA, 54 bp, Artificial
  Synthetic oligonucleotide
acaacagcttgtttacccaggtgagtacgtactgcgtccgtggaaagctccaat

SEQ ID NO: 308171 - DNA, 51 bp, Artificial
  Synthetic oligonucleotide
acaacaggaccactaagagactcacagttctcgggaaggatgctggcactt

SEQ ID NO: 308172 - DNA, 55 bp, Artificial
  Synthetic oligonucleotide
acaacaggctatagaccccttggagaagggcctggagtccgagtaggtaatacac

SEQ ID NO: 308173 - DNA, 59 bp, Artificial
  Synthetic oligonucleotide
acaacagtagtcacacttggtcagataacaggcaataaagataacaccttagagcggaa

SEQ ID NO: 308174 - DNA, 60 bp, Artificial
  Synthetic oligonucleotide
acaacagtggcgatggtctttgaggcaagcgaacaccatagataacccatggaagtgtct

SEQ ID NO: 308175 - DNA, 52 bp, Artificial
  Synthetic oligonucleotide
acaacagtttctccatcaccagcttctgcaacggtgaaaaacatatggttgg

SEQ ID NO: 308176 - DNA, 60 bp, Artificial
  Synthetic oligonucleotide
acaacataatagtcaggcaagattggtaaaggactgtgcaattatggttagacattatag

SEQ ID NO: 308177 - DNA, 60 bp, Artificial
  Synthetic oligonucleotide
acaacatacttggctcataagttgaggccaatgttagcagatgcctgggaggactgcgaa

SEQ ID NO: 308178 - DNA, 60 bp, Artificial
  Synthetic oligonucleotide
acaacatatgcccatactgcgcgtccagactaacttcagatggactagtcagacatgtga

SEQ ID NO: 308179 - DNA, 60 bp, Artificial
  Synthetic oligonucleotide
acaacatatggcattgggatgacttatcattgttacaatgagatgttacgaatgttagtt

SEQ ID NO: 308180 - DNA, 60 bp, Artificial
  Synthetic oligonucleotide
acaacatcagctttatgagcagtcaggtaattcaacgcatcttttgagatgtcattaatt

SEQ ID NO: 308181 - DNA, 60 bp, Artificial
  Synthetic oligonucleotide
acaacatcatgtgcatttggggaccccggtgatatcatgtctactcctagtggtatgagg

SEQ ID NO: 308182 - DNA, 50 bp, Artificial
  Synthetic oligonucleotide
acaacatccatttaaactaaggaaaatgaaaaacgagtatatcgttgcac

SEQ ID NO: 308183 - DNA, 53 bp, Artificial
  Synthetic oligonucleotide
acaacatccgcagatactttagcacactagactttcgcctgcaagtgaattct

SEQ ID NO: 308184 - DNA, 51 bp, Artificial
  Synthetic oligonucleotide
acaacatccgccgttgcattcttgcagggcgccctgctactgatctttcct

SEQ ID NO: 308185 - DNA, 60 bp, Artificial
  Synthetic oligonucleotide
acaacatctacgtgctctacgccttgcgtagacactatgagggagttgagctggacactt

SEQ ID NO: 308186 - DNA, 51 bp, Artificial
  Synthetic oligonucleotide
acaacatctatcgtagtagaggtaggaaacttaggtggtacatctacgttt

SEQ ID NO: 308187 - DNA, 54 bp, Artificial
  Synthetic oligonucleotide
acaacatcttccggaggttgctttctccgtgaaggtaccgaagttaaatattga

SEQ ID NO: 308188 - DNA, 50 bp, Artificial
  Synthetic oligonucleotide
acaacatggatgcatcccttctagatgactggggttttggggccacgcca

SEQ ID NO: 308189 - DNA, 60 bp, Artificial
  Synthetic oligonucleotide
acaacatgtatgagatgggtaaatccatgcggcctgtctacacagccgctctcaaggatg

SEQ ID NO: 308190 - DNA, 58 bp, Artificial
  Synthetic oligonucleotide
acaacattacaaacccgaatcagtaccagtatttcgcagcggtgtgggcagagcccat

SEQ ID NO: 308191 - DNA, 50 bp, Artificial
  Synthetic oligonucleotide
acaacattagagatagtgcgcacatttgcttcgcgggagatgatatgtgt

SEQ ID NO: 308192 - DNA, 57 bp, Artificial
  Synthetic oligonucleotide
acaacattagtcgtgaaattactgaagctggataaatggtttattgccttatcttct

SEQ ID NO: 308193 - DNA, 53 bp, Artificial
  Synthetic oligonucleotide
acaacattgaatcttcgcaatatttgttaacgaacgcgaagattaatcagaat

SEQ ID NO: 308194 - DNA, 54 bp, Artificial
  Synthetic oligonucleotide
acaacattgacgccactcacttctggtaccgtaactattaaggggacttcggtg

SEQ ID NO: 308195 - DNA, 50 bp, Artificial
  Synthetic oligonucleotide
acaacattgctaggctatacttacaaacaactgtctactgttcggttagg

SEQ ID NO: 308196 - DNA, 60 bp, Artificial
  Synthetic oligonucleotide
acaacatttgttcaatggtgggacaatcaacttcagaatgggaatgtcatcacacactac

SEQ ID NO: 308197 - DNA, 59 bp, Artificial
  Synthetic oligonucleotide
acaaccaaaactggtcagggtattcaggagcgttcatcgattattgggctgatagagag

SEQ ID NO: 308198 - DNA, 54 bp, Artificial
  Synthetic oligonucleotide
acaaccaaaagcaagaccccaccctcctccacgcttccctcgccaagcgtctcc

SEQ ID NO: 308199 - DNA, 54 bp, Artificial
  Synthetic oligonucleotide
acaaccaaagtttcgcaccaattacccgattttgccgttggtcagacgatcgga

SEQ ID NO: 308200 - DNA, 53 bp, Artificial
  Synthetic oligonucleotide
acaaccaaccaagtccttctggaactacccgtgggaccaggtctaaacatgta

SEQ ID NO: 308201 - DNA, 58 bp, Artificial
  Synthetic oligonucleotide
acaaccaagtacaatgggattctgaagatgattggtttccaccacccactcagaagaa

SEQ ID NO: 308202 - DNA, 53 bp, Artificial
  Synthetic oligonucleotide
acaaccaataactctagcaaaataggaaatatcacagatgaagtaaacatagg

SEQ ID NO: 308203 - DNA, 59 bp, Artificial
  Synthetic oligonucleotide
acaaccaatactccagtcttgagcagctcgaaaaggcatgcggaaaccccacaagtgaa

SEQ ID NO: 308204 - DNA, 56 bp, Artificial
  Synthetic oligonucleotide
acaaccaatcatcctaaagtgggagcccaaattgggcgagttctcaattggaggag

SEQ ID NO: 308205 - DNA, 54 bp, Artificial
  Synthetic oligonucleotide
acaaccacagagtcgagtattttaccccgtgtcaagcgctaggcttaactttcc

SEQ ID NO: 308206 - DNA, 60 bp, Artificial
  Synthetic oligonucleotide
acaaccaccaagaggcagcgaagtatgagaaccatactgagaacgtattattgttgtata

SEQ ID NO: 308207 - DNA, 58 bp, Artificial
  Synthetic oligonucleotide
acaaccacccttatcacaaacttcaatagtatcatcataagttggcagtttgaccgat

SEQ ID NO: 308208 - DNA, 55 bp, Artificial
  Synthetic oligonucleotide
acaaccacctgaaatgacaattggcgataaggatcgcaatagtcgttagtgtccg

SEQ ID NO: 308209 - DNA, 56 bp, Artificial
  Synthetic oligonucleotide
acaaccacgacaactgttggttgaacgccatccttcagttgttcaggtacgtcgac

SEQ ID NO: 308210 - DNA, 58 bp, Artificial
  Synthetic oligonucleotide
acaaccacggatgattcacctaggtggttgacgcgcgaaggtccacagttaactcgca

SEQ ID NO: 308211 - DNA, 56 bp, Artificial
  Synthetic oligonucleotide
acaaccacggtgcctgtggcgttaaatggaacttggttcctatactcgatcacaac

SEQ ID NO: 308212 - DNA, 58 bp, Artificial
  Synthetic oligonucleotide
acaaccacggttgtttcgtcaactttggcgcaggtttcaatgaatgcaggagcgcgtg

SEQ ID NO: 308213 - DNA, 60 bp, Artificial
  Synthetic oligonucleotide
acaaccagcaatgctattcaacatctgcgtccatctagaggtttgctatgtaataagtga

SEQ ID NO: 308214 - DNA, 51 bp, Artificial
  Synthetic oligonucleotide
acaaccagcagtcttgagtgataatgatcccagacttgaggttaaattgac

SEQ ID NO: 308215 - DNA, 59 bp, Artificial
  Synthetic oligonucleotide
acaaccagcgtgggaacatgcagaacctgcacgatttctgctccaggaacctctttgtt

SEQ ID NO: 308216 - DNA, 53 bp, Artificial
  Synthetic oligonucleotide
acaaccaggttggccagtaccagttctgttccatcgaaccacaagagcagttt

SEQ ID NO: 308217 - DNA, 56 bp, Artificial
  Synthetic oligonucleotide
acaaccaggtttgcggaggatagattgggtgaggaaatagcttatgaaatgggtgg

SEQ ID NO: 308218 - DNA, 51 bp, Artificial
  Synthetic oligonucleotide
acaaccatacacagctgcccctgtctatggtaaaattcctgcaggcaaccc

SEQ ID NO: 308219 - DNA, 60 bp, Artificial
  Synthetic oligonucleotide
acaaccatacagcatgcggaggctaagcagaatattgtgacggcagcaatccgttttttt

SEQ ID NO: 308220 - DNA, 55 bp, Artificial
  Synthetic oligonucleotide
acaaccatcctctcacggaagtgtttgtcggtcttatcgaatttaggtatattgt

SEQ ID NO: 308221 - DNA, 55 bp, Artificial
  Synthetic oligonucleotide
acaaccatcttaggcatcggcactgtcctagaccaagcagagactgcgggggcga

SEQ ID NO: 308222 - DNA, 58 bp, Artificial
  Synthetic oligonucleotide
acaaccatgatcttcctgctttagtgtctttccaacctacgtacgactgtcctatgga

SEQ ID NO: 308223 - DNA, 59 bp, Artificial
  Synthetic oligonucleotide
acaaccatgtggtatacaaccatcaagaagctgggaagtacgagaatcatacggagaac

SEQ ID NO: 308224 - DNA, 60 bp, Artificial
  Synthetic oligonucleotide
acaaccattattagctctggaactggccccactgtagaaattggggatctagatgtcaca

SEQ ID NO: 308225 - DNA, 53 bp, Artificial
  Synthetic oligonucleotide
acaacccacctaatcgagaaaatactactcaaaataacactcgaagacccgga

SEQ ID NO: 308226 - DNA, 60 bp, Artificial
  Synthetic oligonucleotide
acaacccacctcaagtgtgacctcatcatttcaggacacaatggcaacacaaaatgccga

SEQ ID NO: 308227 - DNA, 50 bp, Artificial
  Synthetic oligonucleotide
acaacccactactaggacaaggagaaggtaacatgatatggctagagtgg

SEQ ID NO: 308228 - DNA, 60 bp, Artificial
  Synthetic oligonucleotide
acaacccagtgatgatgcatggcttaattttgatggtacactattaggtaatataactat

SEQ ID NO: 308229 - DNA, 57 bp, Artificial
  Synthetic oligonucleotide
acaaccccagagctccataaacgtaagctacaaaggagtatgggaactcatccgatc

SEQ ID NO: 308230 - DNA, 60 bp, Artificial
  Synthetic oligonucleotide
acaacccctttattgtcgatagtgactcagtcgtctcactgtcgctatcgggtggagcca

SEQ ID NO: 308231 - DNA, 59 bp, Artificial
  Synthetic oligonucleotide
acaaccctcacagaatccttgatggaagggactgtacgctgatagatgccctactgggg

SEQ ID NO: 308232 - DNA, 52 bp, Artificial
  Synthetic oligonucleotide
acaaccctgatcaacaagacagatccgacaaacaaccgtccacacctgagca

SEQ ID NO: 308233 - DNA, 50 bp, Artificial
  Synthetic oligonucleotide
acaaccctggaagctgttatgggtcgtagctatgcagtgaatacctcaaa

SEQ ID NO: 308234 - DNA, 60 bp, Artificial
  Synthetic oligonucleotide
acaacccttcagcaatatgtaatctaacaatgattacaagtttcatgtatttgagttcgc

SEQ ID NO: 308235 - DNA, 60 bp, Artificial
  Synthetic oligonucleotide
acaaccgagatgatctcgaaatagaggggattttctatctcccagatatacacgccactc

SEQ ID NO: 308236 - DNA, 53 bp, Artificial
  Synthetic oligonucleotide
acaaccgaggaatgtacgttataatgttgaagttggtcggtatctacgtaggt

SEQ ID NO: 308237 - DNA, 54 bp, Artificial
  Synthetic oligonucleotide
acaaccgatcgtttcggcgtccctacgtatagctggggggcgaacgagactgac

SEQ ID NO: 308238 - DNA, 58 bp, Artificial
  Synthetic oligonucleotide
acaaccgcagtctaggtcagcccgacgacgcctggtccccctcttggccagcctgtgc

SEQ ID NO: 308239 - DNA, 59 bp, Artificial
  Synthetic oligonucleotide
acaaccgcgtgcaaatggctacgggtatctagtcggacgtgttggcaatgaagcatggg

SEQ ID NO: 308240 - DNA, 56 bp, Artificial
  Synthetic oligonucleotide
acaaccgcgttttggacatggggagcacttactttgacattcggggcacgctggac

SEQ ID NO: 308241 - DNA, 57 bp, Artificial
  Synthetic oligonucleotide
acaaccgggttgttacactcaggtaaaggacctgatataggctcatgccataatttg

SEQ ID NO: 308242 - DNA, 59 bp, Artificial
  Synthetic oligonucleotide
acaaccggttccagatcaaaggtgttcagctgaagtcaggatacaaagattggatccta

SEQ ID NO: 308243 - DNA, 52 bp, Artificial
  Synthetic oligonucleotide
acaaccgtaacatacgaaccccagtgaaattacgtagaggtaatttcggata

SEQ ID NO: 308244 - DNA, 55 bp, Artificial
  Synthetic oligonucleotide
acaaccgtcctatacttgtcatgcgctctaatctctgggcatctggctatgatgt

SEQ ID NO: 308245 - DNA, 55 bp, Artificial
  Synthetic oligonucleotide
acaaccgtggcaaaagccctagagtctggtctatctcaattccgggtatcggacc

SEQ ID NO: 308246 - DNA, 54 bp, Artificial
  Synthetic oligonucleotide
acaacctaatacctccactaaaaatgaaccagttcacaagtcccaacacgcacc

SEQ ID NO: 308247 - DNA, 59 bp, Artificial
  Synthetic oligonucleotide
acaacctaggacagctgtatgtgaggcatgtgaacgctaaggcacagaacgtcacaagc

SEQ ID NO: 308248 - DNA, 54 bp, Artificial
  Synthetic oligonucleotide
acaacctattgttcataatcccagtgaatattttcttagtgttgtacgttttag

SEQ ID NO: 308249 - DNA, 59 bp, Artificial
  Synthetic oligonucleotide
acaacctggtgagacacatgccccagcaccttttggtgcaggggacaagaggtacacat

SEQ ID NO: 308250 - DNA, 53 bp, Artificial
  Synthetic oligonucleotide
acaaccttaaatgcccgtgccaggtcccatcgcccgagttttttacagagttg

SEQ ID NO: 308251 - DNA, 58 bp, Artificial
  Synthetic oligonucleotide
acaaccttcatcaacacagtcctaaattggtgctacacacagatggtaggtcttaagt

SEQ ID NO: 308252 - DNA, 57 bp, Artificial
  Synthetic oligonucleotide
acaaccttcctatacttggcacaggtatttgtaattacgaggtccatgcgttccgca

SEQ ID NO: 308253 - DNA, 56 bp, Artificial
  Synthetic oligonucleotide
acaaccttggttaatatatactgctcttagaacgaaggcatggtttgtgagaaact

SEQ ID NO: 308254 - DNA, 55 bp, Artificial
  Synthetic oligonucleotide
acaacctttaccactagcactcctgcagctgaaattggtaggcctaaaagggtct

SEQ ID NO: 308255 - DNA, 54 bp, Artificial
  Synthetic oligonucleotide
acaacgaaagggagttcgtaaataggaaattacaccatatcgcgttgcacggac

SEQ ID NO: 308256 - DNA, 55 bp, Artificial
  Synthetic oligonucleotide
acaacgaacaggaccttttgaagttgacagagactcatacctaaacacacaacca

SEQ ID NO: 308257 - DNA, 59 bp, Artificial
  Synthetic oligonucleotide
acaacgaatacaccattcgctcaattacaatcaatggtaccaacggaggctgttatggc

SEQ ID NO: 308258 - DNA, 59 bp, Artificial
  Synthetic oligonucleotide
acaacgaatcatttcgagattgcaggaaccacagttaaatctggctggttcaaaagcac

SEQ ID NO: 308259 - DNA, 58 bp, Artificial
  Synthetic oligonucleotide
acaacgaatgtcacagttaatccaggtccgtttgcacagactggatatgctccagtta

SEQ ID NO: 308260 - DNA, 57 bp, Artificial
  Synthetic oligonucleotide
acaacgacatgacgtaaggcagacacgtgaccaggccggtacaccgaaatagacacg

SEQ ID NO: 308261 - DNA, 60 bp, Artificial
  Synthetic oligonucleotide
acaacgaccatcgactattggaactagtgtgatgcctgcaatggcgaggtcctccttgat

SEQ ID NO: 308262 - DNA, 55 bp, Artificial
  Synthetic oligonucleotide
acaacgacttggatcagccgacccagtcgggcgagtcagccgagcctcctcacca

SEQ ID NO: 308263 - DNA, 58 bp, Artificial
  Synthetic oligonucleotide
acaacgagacggttggcattccattctacgatcctgtcgcggtagcaaagttcgcaac

SEQ ID NO: 308264 - DNA, 55 bp, Artificial
  Synthetic oligonucleotide
acaacgagccagctcattccgttaatggtgtccataaaaggaaaggctcggtaaa

SEQ ID NO: 308265 - DNA, 57 bp, Artificial
  Synthetic oligonucleotide
acaacgagggggatttttgtgctgaggcgtgtggtcgggagcgctgcgtaacgcgta

SEQ ID NO: 308266 - DNA, 58 bp, Artificial
  Synthetic oligonucleotide
acaacgaggtcgtcgtactaacagcgtcacacgtggttggtcgcgccaacatggccac

SEQ ID NO: 308267 - DNA, 60 bp, Artificial
  Synthetic oligonucleotide
acaacgagttatacgtatatgttatctgatgaggtgtatgtagcgaatgtaagcggtgtg

SEQ ID NO: 308268 - DNA, 55 bp, Artificial
  Synthetic oligonucleotide
acaacgataaaatgacaccttctgtcgaaatgtgtttcacgcacactctgtggat

SEQ ID NO: 308269 - DNA, 56 bp, Artificial
  Synthetic oligonucleotide
acaacgataaggggaaagcactcaaatggaacaatacacgatagatcccaataccg

SEQ ID NO: 308270 - DNA, 58 bp, Artificial
  Synthetic oligonucleotide
acaacgatgtataaggaagcgcgtgttactgatagaagagcgaaacttgtttcttcat

SEQ ID NO: 308271 - DNA, 54 bp, Artificial
  Synthetic oligonucleotide
acaacgcaacagctttttaagtcatgtaaaaattcccagtagtgtacaggttag

SEQ ID NO: 308272 - DNA, 55 bp, Artificial
  Synthetic oligonucleotide
acaacgcacggaaaacgcgttttagcgagttctggatagttttccgaatccatca

SEQ ID NO: 308273 - DNA, 54 bp, Artificial
  Synthetic oligonucleotide
acaacgcattggccctagccttatactgcctcaattttaaacaaaggggtagac

SEQ ID NO: 308274 - DNA, 50 bp, Artificial
  Synthetic oligonucleotide
acaacgccatgtgtaccaacaaggcccaggactgcaatcacaactcaaaa

SEQ ID NO: 308275 - DNA, 60 bp, Artificial
  Synthetic oligonucleotide
acaacgccgagttgctcgttctactcgagaatgagaggaccctagattttcatgactcta

SEQ ID NO: 308276 - DNA, 57 bp, Artificial
  Synthetic oligonucleotide
acaacgcgcaaatccacaatttggaagcgtcatgggtttacgatattatacaacaag

SEQ ID NO: 308277 - DNA, 55 bp, Artificial
  Synthetic oligonucleotide
acaacgcgttacaactaacgattaacggtggtacacttaacatagcgaattcatc

SEQ ID NO: 308278 - DNA, 54 bp, Artificial
  Synthetic oligonucleotide
acaacgctctatcttcgggtattcctgtcacaaaagatatggggtcagcaatgg

SEQ ID NO: 308279 - DNA, 60 bp, Artificial
  Synthetic oligonucleotide
acaacgcttattctgcgtctggagggtcgatggagagttctccatcacagacattgatgt

SEQ ID NO: 308280 - DNA, 50 bp, Artificial
  Synthetic oligonucleotide
acaacggaaacaagagtttccgcttgtggaagacccggaagtcccaaaac

SEQ ID NO: 308281 - DNA, 55 bp, Artificial
  Synthetic oligonucleotide
acaacggaacgacgggataggagcccgaaatgagcacggacgtaatgacagtgcg

SEQ ID NO: 308282 - DNA, 56 bp, Artificial
  Synthetic oligonucleotide
acaacggacccattatctacaacttttgccgcggtgcaattcatcaacgggagtac

SEQ ID NO: 308283 - DNA, 60 bp, Artificial
  Synthetic oligonucleotide
acaacggattgagaacatctcgtttcgtagagaagggcgcaagctatatgtcgagttgac

SEQ ID NO: 308284 - DNA, 57 bp, Artificial
  Synthetic oligonucleotide
acaacggctggatggtgcacggtgatccgggtttgtgggcagtctaccgggtcattc

SEQ ID NO: 308285 - DNA, 53 bp, Artificial
  Synthetic oligonucleotide
acaacgggaaatactctgcgatgttaccaacacatatgtccggtcgtactgca

SEQ ID NO: 308286 - DNA, 56 bp, Artificial
  Synthetic oligonucleotide
acaacgggggtctatgtacacacgtagtggtaaacatattggtggcaggatacatt

SEQ ID NO: 308287 - DNA, 55 bp, Artificial
  Synthetic oligonucleotide
acaacgggtacatattactgcaagagcaaagaccgctattatcccatagaagtgg

SEQ ID NO: 308288 - DNA, 57 bp, Artificial
  Synthetic oligonucleotide
acaacgggtacttcaatggtactgagggccaaccaagccagatcgctttcgtgagtg

SEQ ID NO: 308289 - DNA, 55 bp, Artificial
  Synthetic oligonucleotide
acaacgggtcttctatttggtacatcgtgaaatagaggggattttctatctccca

SEQ ID NO: 308290 - DNA, 54 bp, Artificial
  Synthetic oligonucleotide
acaacggtatgacgcgtgggacgcaatatagctacatgatatattctaacggtg

SEQ ID NO: 308291 - DNA, 60 bp, Artificial
  Synthetic oligonucleotide
acaacggtgtctgcccagtagtgttcacagatgggtccgccactgggcctgcagaaacaa

SEQ ID NO: 308292 - DNA, 60 bp, Artificial
  Synthetic oligonucleotide
acaacgtaacttgactgatatgagtcttgcgcgatatgcatttgatttctatgagctgca

SEQ ID NO: 308293 - DNA, 60 bp, Artificial
  Synthetic oligonucleotide
acaacgtacctagctttgatggccactttcagaatgagaccaatgttcgctgttgggcta

SEQ ID NO: 308294 - DNA, 57 bp, Artificial
  Synthetic oligonucleotide
acaacgtactgcgagagcacggtagatggcctcttcagaaccttcacggagtttacc

SEQ ID NO: 308295 - DNA, 53 bp, Artificial
  Synthetic oligonucleotide
acaacgtatgggcgggaaaattatcgttggagatttggaggctactggatcac

SEQ ID NO: 308296 - DNA, 60 bp, Artificial
  Synthetic oligonucleotide
acaacgtattggtgggacggactccaatcctctgatgactttgctctcatagtgaatgca

SEQ ID NO: 308297 - DNA, 56 bp, Artificial
  Synthetic oligonucleotide
acaacgtccaaacttaggtacaactgcattagatcctttatttggatggttcagat

SEQ ID NO: 308298 - DNA, 55 bp, Artificial
  Synthetic oligonucleotide
acaacgtcggtcagacctcccacgaagaacttgaccgcccgatacggcacgctcg

SEQ ID NO: 308299 - DNA, 55 bp, Artificial
  Synthetic oligonucleotide
acaacgtcttccttttagcaggatctgctgatactgacgatctggttgccttctc

SEQ ID NO: 308300 - DNA, 54 bp, Artificial
  Synthetic oligonucleotide
acaacgtgctagtttagggtgcgggtgtcccccgctctgcggggctctccaaaa

SEQ ID NO: 308301 - DNA, 60 bp, Artificial
  Synthetic oligonucleotide
acaacgtgtatagcttcagagaccccacatggcatgccttgcgtacggcgattttgaatc

SEQ ID NO: 308302 - DNA, 59 bp, Artificial
  Synthetic oligonucleotide
acaacgttatatttgattgggccctatgggctgcgacaacagatgctgaatcacccggg

SEQ ID NO: 308303 - DNA, 57 bp, Artificial
  Synthetic oligonucleotide
acaacgttgactattcaaatacacctgattcgttaatttcgattaatccagtataca

SEQ ID NO: 308304 - DNA, 55 bp, Artificial
  Synthetic oligonucleotide
acaacgttgcgtcgggagaagtagtcgaaatcagttcctatccgtggcaaaggcg

SEQ ID NO: 308305 - DNA, 54 bp, Artificial
  Synthetic oligonucleotide
acaacgttgtgcactgtttgcgtaattcttagtatcctattggtgtacattcta

SEQ ID NO: 308306 - DNA, 56 bp, Artificial
  Synthetic oligonucleotide
acaactaaaccctttcagaacatctcgagaatatcaatcggggactgtcccaagta

SEQ ID NO: 308307 - DNA, 56 bp, Artificial
  Synthetic oligonucleotide
acaactaacgttactgttaatccagggccattcgcacaaacgggatatgcgcctgt

SEQ ID NO: 308308 - DNA, 57 bp, Artificial
  Synthetic oligonucleotide
acaactaaggataataaggggacaaggatccgattcaaagatgacagctcttttgag

SEQ ID NO: 308309 - DNA, 58 bp, Artificial
  Synthetic oligonucleotide
acaactaatgtacaagtgatgaaggaccctttatatatgtatttgcacagtaggttaa

SEQ ID NO: 308310 - DNA, 60 bp, Artificial
  Synthetic oligonucleotide
acaactacaatggcatacacacagacagctaccacatctgctttgctcgacactgtccga

SEQ ID NO: 308311 - DNA, 58 bp, Artificial
  Synthetic oligonucleotide
acaactacctaaagcctgagttttacaacattcgaggcgggaatcagcagattcattg

SEQ ID NO: 308312 - DNA, 60 bp, Artificial
  Synthetic oligonucleotide
acaactacgaaacactaatggcatgcgttacgatgaatatgcaacatgttcagactctga

SEQ ID NO: 308313 - DNA, 51 bp, Artificial
  Synthetic oligonucleotide
acaactactgtcttgtttgtttgtgagcggatcttcctgattaacacccat

SEQ ID NO: 308314 - DNA, 58 bp, Artificial
  Synthetic oligonucleotide
acaactacttacgtcaattgaactattacatagagatggctaacgctttggcgggcta

SEQ ID NO: 308315 - DNA, 55 bp, Artificial
  Synthetic oligonucleotide
acaactagagtgtaccataaagcaaagcatgtgaaggcatggtgtcctagacccc

SEQ ID NO: 308316 - DNA, 60 bp, Artificial
  Synthetic oligonucleotide
acaactaggcctcaactttagtgagaaggatgaagaagctagcggagcatttagatgcat

SEQ ID NO: 308317 - DNA, 55 bp, Artificial
  Synthetic oligonucleotide
acaactatcgtatgcgcaacttagatcaaagcgaagaacgattgacgtgcataac

SEQ ID NO: 308318 - DNA, 58 bp, Artificial
  Synthetic oligonucleotide
acaactatgcaaaggctaagggtattaaggatgaatgctcgaaaatccttgaggaatc

SEQ ID NO: 308319 - DNA, 54 bp, Artificial
  Synthetic oligonucleotide
acaactatgcctcccttctactaccgaagacgctggtacccaaaccggtggaga

SEQ ID NO: 308320 - DNA, 52 bp, Artificial
  Synthetic oligonucleotide
acaactcaggtgatgacgtgtgcacggagtcttgccgcgttttaacacgtcc

SEQ ID NO: 308321 - DNA, 56 bp, Artificial
  Synthetic oligonucleotide
acaactcataacaggctcttgtcgcttcagcgttacacgggatcccttgggggccc

SEQ ID NO: 308322 - DNA, 55 bp, Artificial
  Synthetic oligonucleotide
acaactcataataggctcccgtcactttagcgacacacggaatccctcgggggcc

SEQ ID NO: 308323 - DNA, 56 bp, Artificial
  Synthetic oligonucleotide
acaactccaaagatccaacctaaaacgttagaagccatattggatgcgccaggagg

SEQ ID NO: 308324 - DNA, 54 bp, Artificial
  Synthetic oligonucleotide
acaactccctctcaaaagcaggagccggtagacaaggaactgtatcccttagcc

SEQ ID NO: 308325 - DNA, 60 bp, Artificial
  Synthetic oligonucleotide
acaactcgcgccctggcagtgcatctacagtagtggtcaatgttcaggcattctgtcggc

SEQ ID NO: 308326 - DNA, 60 bp, Artificial
  Synthetic oligonucleotide
acaactctcattagctctggccggtgagataccattgacagatcacattttcgaacaagc

SEQ ID NO: 308327 - DNA, 58 bp, Artificial
  Synthetic oligonucleotide
acaactctgttgtcctttctcggaaatacacctcctttccatggctgctagggtgtgc

SEQ ID NO: 308328 - DNA, 54 bp, Artificial
  Synthetic oligonucleotide
acaactgaaccacataatgcggatggcgctgtgaaggatggaaggattgcacca

SEQ ID NO: 308329 - DNA, 54 bp, Artificial
  Synthetic oligonucleotide
acaactgagatagggtttggtaatacccctctcagaagacctggtgaaggaaac

SEQ ID NO: 308330 - DNA, 60 bp, Artificial
  Synthetic oligonucleotide
acaactgatgtctttagtttaagtgagattgcgcgccgtgatcatttgaatgcaagcatg

SEQ ID NO: 308331 - DNA, 59 bp, Artificial
  Synthetic oligonucleotide
acaactgcgactgggtttgtgtcctggcccctagtggggaaggagcatttgtgacatca

SEQ ID NO: 308332 - DNA, 60 bp, Artificial
  Synthetic oligonucleotide
acaactgcgccacaaacagagagaatgatgcgagtaaattggaaaaaatggtggcaggtg

SEQ ID NO: 308333 - DNA, 59 bp, Artificial
  Synthetic oligonucleotide
acaactgctgcacaagacgagtatcaatggaaacccgtcggtaataatccacaatacag

SEQ ID NO: 308334 - DNA, 55 bp, Artificial
  Synthetic oligonucleotide
acaactgctgtatttagtctaggtggagatttcttaggtggcctaggtgttctac

SEQ ID NO: 308335 - DNA, 60 bp, Artificial
  Synthetic oligonucleotide
acaactgcttgttacaccctgcaagcctgcatggaatggaggacccagagaaagaagtgt

SEQ ID NO: 308336 - DNA, 53 bp, Artificial
  Synthetic oligonucleotide
acaactggagcatagttattatcccagtttgttcattacaaagtgaggcaggt

SEQ ID NO: 308337 - DNA, 55 bp, Artificial
  Synthetic oligonucleotide
acaactggagtctagtaattatacctgtgtcacccctggcttctgaatctacgga

SEQ ID NO: 308338 - DNA, 60 bp, Artificial
  Synthetic oligonucleotide
acaactggatgctaggtgtgtacgcacgctcgactaactacactacaccagtcggacagt

SEQ ID NO: 308339 - DNA, 55 bp, Artificial
  Synthetic oligonucleotide
acaactggtcctacgagtgattatggtggatatttagaagtaggtacccgtttca

SEQ ID NO: 308340 - DNA, 60 bp, Artificial
  Synthetic oligonucleotide
acaactgtattgtcccatgctctgcctttaatctgtgaccgtgaagcaatgtaaggccat

SEQ ID NO: 308341 - DNA, 60 bp, Artificial
  Synthetic oligonucleotide
acaactgttgctcaaccaatatcggaataggatattgcactgccgtgaacctgagatagc

SEQ ID NO: 308342 - DNA, 57 bp, Artificial
  Synthetic oligonucleotide
acaacttaatggagatcgctgaggtggactcggtcgttcccgtcaataacacctcta

SEQ ID NO: 308343 - DNA, 55 bp, Artificial
  Synthetic oligonucleotide
acaacttaccccaccacaactacaagcgctcaacacgcttcaaaaggctctgacc

SEQ ID NO: 308344 - DNA, 60 bp, Artificial
  Synthetic oligonucleotide
acaacttcaaggaaatcttaaagctgtggcaaagagtgagagccaacttgtgacaaagca

SEQ ID NO: 308345 - DNA, 60 bp, Artificial
  Synthetic oligonucleotide
acaacttcatgtgagacatttgggaatagctgagccagccttccaagtgtgatagcattg

SEQ ID NO: 308346 - DNA, 54 bp, Artificial
  Synthetic oligonucleotide
acaacttcgacgttgttaatcaggtgcagagttgcgtcgctgtgagggtccaca

SEQ ID NO: 308347 - DNA, 58 bp, Artificial
  Synthetic oligonucleotide
acaacttcgtgacgcagagtctgagttggcggaagccaaacaaagactccttcgcgaa

SEQ ID NO: 308348 - DNA, 53 bp, Artificial
  Synthetic oligonucleotide
acaacttgccggtacttggaatcttgaatgtaaagtgttcgactttaagtacc

SEQ ID NO: 308349 - DNA, 57 bp, Artificial
  Synthetic oligonucleotide
acaacttgtcggtagtaagcctaagtttactggcaggacgtctggctctgtcacagt

SEQ ID NO: 308350 - DNA, 55 bp, Artificial
  Synthetic oligonucleotide
acaactttgacgcagtgcgcagggtgctcgtggaatgcgcgcgtggcgacgacta

SEQ ID NO: 308351 - DNA, 60 bp, Artificial
  Synthetic oligonucleotide
acaacttttctacgtatacataatgtaagcacaacgccaaactgcagtgcagtacaagta

SEQ ID NO: 308352 - DNA, 57 bp, Artificial
  Synthetic oligonucleotide
acaagaaaacagctgtagcgaccacacaaaggcagcggaacccctctcctggtaaca

SEQ ID NO: 308353 - DNA, 55 bp, Artificial
  Synthetic oligonucleotide
acaagaaacattatttgccacctcagtcggcagcattggttcatacgctgtcgca

SEQ ID NO: 308354 - DNA, 55 bp, Artificial
  Synthetic oligonucleotide
acaagaaatggcaagcagaggcctttgggattcctttcgtcagtccgagagaggc

SEQ ID NO: 308355 - DNA, 56 bp, Artificial
  Synthetic oligonucleotide
acaagaacgattaaagactcgtgccgtaaacactctttggcaggcgcgttcgaatg

SEQ ID NO: 308356 - DNA, 60 bp, Artificial
  Synthetic oligonucleotide
acaagaagacagtggtggctcatatttgaccttaacataggccacctcccctgtgagcta

SEQ ID NO: 308357 - DNA, 60 bp, Artificial
  Synthetic oligonucleotide
acaagaagcagcaaacatcatagttggctatggtgagtggccctcctactgctcggattc

SEQ ID NO: 308358 - DNA, 60 bp, Artificial
  Synthetic oligonucleotide
acaagaagcccaggatatacaaggtgctcaggacacccgatgtgccgtatggttgtgaag

SEQ ID NO: 308359 - DNA, 60 bp, Artificial
  Synthetic oligonucleotide
acaagaaggagagcactaggatcaaggaggaggcaaagactccaaagcctcaaatagtca

SEQ ID NO: 308360 - DNA, 54 bp, Artificial
  Synthetic oligonucleotide
acaagaaggatgttactaccaagagggaaaaccaatagaggcaacagtaataaa

SEQ ID NO: 308361 - DNA, 55 bp, Artificial
  Synthetic oligonucleotide
acaagaagtctggggaagaggctgccttaatgttaggcgcctttaagaagtatac

SEQ ID NO: 308362 - DNA, 55 bp, Artificial
  Synthetic oligonucleotide
acaagaagtctgtttgttctaggcgttctaagtgtcgttccgtgaaaacgtgagc

SEQ ID NO: 308363 - DNA, 55 bp, Artificial
  Synthetic oligonucleotide
acaagaagtgccacactccgggatactgacgtgtcggggcccgtaaatccaaaca

SEQ ID NO: 308364 - DNA, 60 bp, Artificial
  Synthetic oligonucleotide
acaagaatggtgtgcaatctagacatagtgactcctatcagaagattgctaacgaccctg

SEQ ID NO: 308365 - DNA, 54 bp, Artificial
  Synthetic oligonucleotide
acaagaatgtggacaagcctaagggaaagcgtggaggagggaagggagccactc

SEQ ID NO: 308366 - DNA, 60 bp, Artificial
  Synthetic oligonucleotide
acaagacacagagctctctttcacaatcactggagacaacaccaagtggaatgagaatca

SEQ ID NO: 308367 - DNA, 60 bp, Artificial
  Synthetic oligonucleotide
acaagacacgcactttcacagcagcgccattagaaactctacttggtgggaaagtatgtg

SEQ ID NO: 308368 - DNA, 58 bp, Artificial
  Synthetic oligonucleotide
acaagacagaatgtgaaatgctaagcttaaaaaagaacagtggaccttataatgttgc

SEQ ID NO: 308369 - DNA, 55 bp, Artificial
  Synthetic oligonucleotide
acaagacagcaaaagatttgctgacgatgtacatagaaagaaaagcatccaacaa

SEQ ID NO: 308370 - DNA, 50 bp, Artificial
  Synthetic oligonucleotide
acaagaccaattctctcgagggcaatttacatcttgtcttcgacacttac

SEQ ID NO: 308371 - DNA, 50 bp, Artificial
  Synthetic oligonucleotide
acaagacccattgctaaaatactaataactttgcttttacaatgttagaa

SEQ ID NO: 308372 - DNA, 53 bp, Artificial
  Synthetic oligonucleotide
acaagacccttgcccggaaacccggggccgagattgcatatcaaatagtaagg

SEQ ID NO: 308373 - DNA, 51 bp, Artificial
  Synthetic oligonucleotide
acaagaccgatcttgtcacctctgactaaaggaattttagggtttgtgttt

SEQ ID NO: 308374 - DNA, 60 bp, Artificial
  Synthetic oligonucleotide
acaagaccgtgctttctcgtggatacatcgataatgcacagttcaaccccctggccctgc

SEQ ID NO: 308375 - DNA, 58 bp, Artificial
  Synthetic oligonucleotide
acaagaccttgacttgccccacagattgcttccgcaaacatccggaagccacgtactc

SEQ ID NO: 308376 - DNA, 56 bp, Artificial
  Synthetic oligonucleotide
acaagacgctagctcgctatgcattcgatttctatgaggtcacttcacgaacaact

SEQ ID NO: 308377 - DNA, 55 bp, Artificial
  Synthetic oligonucleotide
acaagacggaattgcttaaagttgcgcaaagttcgaaatccaccgtgaggttaga

SEQ ID NO: 308378 - DNA, 56 bp, Artificial
  Synthetic oligonucleotide
acaagacggcaaaggatcttttggctatatatatagaaaggagggcgtccaacaac

SEQ ID NO: 308379 - DNA, 55 bp, Artificial
  Synthetic oligonucleotide
acaagacgtgttagaatttggagcaattgctaatagatgagcatttcgcacacca

SEQ ID NO: 308380 - DNA, 55 bp, Artificial
  Synthetic oligonucleotide
acaagactcgcgccgatcaagttctcaaaagattgccgacctctggggccatgga

SEQ ID NO: 308381 - DNA, 58 bp, Artificial
  Synthetic oligonucleotide
acaagactctagccggcttacggggtccggtcacgcagatgtactcgagtgctgaggg

SEQ ID NO: 308382 - DNA, 60 bp, Artificial
  Synthetic oligonucleotide
acaagactctgaattagctggtttactatcaatgtcgtcagcatcaaatggtgaatccag

SEQ ID NO: 308383 - DNA, 51 bp, Artificial
  Synthetic oligonucleotide
acaagacttggatctggatttcgtaaaactttggtggttggaaacgatcac

SEQ ID NO: 308384 - DNA, 54 bp, Artificial
  Synthetic oligonucleotide
acaagagaaaaatccatttaaaggattgtcaactgatagaaaaatggatgaagt

SEQ ID NO: 308385 - DNA, 58 bp, Artificial
  Synthetic oligonucleotide
acaagagaagtttaaggactacctttcctgcatggaccggcatgacttgcactgggag

SEQ ID NO: 308386 - DNA, 55 bp, Artificial
  Synthetic oligonucleotide
acaagagatggtggtcataacaatgacacgcaccagatgacagagaccttcagac

SEQ ID NO: 308387 - DNA, 60 bp, Artificial
  Synthetic oligonucleotide
acaagagccaatgttcagatggatgagattctcagatctgagcacgtgggagggcgatcg

SEQ ID NO: 308388 - DNA, 60 bp, Artificial
  Synthetic oligonucleotide
acaagagcgctccagcctggtgagcttgaagaccgaaaggagttggtcagacgtactctc

SEQ ID NO: 308389 - DNA, 60 bp, Artificial
  Synthetic oligonucleotide
acaagagctacatcatgaggctttcttagacggtccctctcgaatagaagaagaatcatt

SEQ ID NO: 308390 - DNA, 55 bp, Artificial
  Synthetic oligonucleotide
acaagaggaaatccacgaaaagcgcgaaaggggttgaatttacaacagatgctaa

SEQ ID NO: 308391 - DNA, 55 bp, Artificial
  Synthetic oligonucleotide
acaagaggactcttggactttcagtactgtcaacatccggaattgagacatactt

SEQ ID NO: 308392 - DNA, 60 bp, Artificial
  Synthetic oligonucleotide
acaagaggactgcatgatcaaggcagtacggggtgatctgaactttgtaaatagggcaaa

SEQ ID NO: 308393 - DNA, 57 bp, Artificial
  Synthetic oligonucleotide
acaagaggccgtccgaattctcatctagcgatcccattgtcccttacggagagttat

SEQ ID NO: 308394 - DNA, 51 bp, Artificial
  Synthetic oligonucleotide
acaagagggattgctaccttcacgcacagtagggttgagtctgatgcacca

SEQ ID NO: 308395 - DNA, 60 bp, Artificial
  Synthetic oligonucleotide
acaagaggtatgtcgtcgttggtggcatgccctcaggctgttcaggcaccagcatcttca

SEQ ID NO: 308396 - DNA, 57 bp, Artificial
  Synthetic oligonucleotide
acaagagtcaactatgactcctccagaagcatccgctttggagactatgaggcaagc

SEQ ID NO: 308397 - DNA, 60 bp, Artificial
  Synthetic oligonucleotide
acaagagtgatatacagatgataagtaattcaagttcccttgaagccaattcattgacac

SEQ ID NO: 308398 - DNA, 57 bp, Artificial
  Synthetic oligonucleotide
acaagagttgtacaagtacaaagtagttagcatagaacccataggagtagcaccagg

SEQ ID NO: 308399 - DNA, 55 bp, Artificial
  Synthetic oligonucleotide
acaagataaacagattcgccgacatgacaaagaacgaagttgtcaatcgccacac

SEQ ID NO: 308400 - DNA, 52 bp, Artificial
  Synthetic oligonucleotide
acaagatacgaattaggcttaccttagttaggcaagcctagttcgagccaaa

SEQ ID NO: 308401 - DNA, 59 bp, Artificial
  Synthetic oligonucleotide
acaagatcaggaaattatttgtataatagcactacaggaggacttctagtaataatatg

SEQ ID NO: 308402 - DNA, 59 bp, Artificial
  Synthetic oligonucleotide
acaagatccacacacctttgaaaatcacgagaactcctccccagcaactgtgggttgca

SEQ ID NO: 308403 - DNA, 60 bp, Artificial
  Synthetic oligonucleotide
acaagatccagcatccagagacctagtagtcaattatgttaacactaacatgggactaaa

SEQ ID NO: 308404 - DNA, 60 bp, Artificial
  Synthetic oligonucleotide
acaagatctgcattgggtatcacgccaacaattcaacaacacaagtggatacgatacttg

SEQ ID NO: 308405 - DNA, 54 bp, Artificial
  Synthetic oligonucleotide
acaagatgcaagaaggggacaagaccctctctccgtacatgatcatctcgtacg

SEQ ID NO: 308406 - DNA, 55 bp, Artificial
  Synthetic oligonucleotide
acaagattagtgtcagctatggcgaaagaattcagagattgggccgtgtcggacg

SEQ ID NO: 308407 - DNA, 60 bp, Artificial
  Synthetic oligonucleotide
acaagattctcatgtgcagcatggtgcacgcattcctgaaggagacgggtgtgcgggctt

SEQ ID NO: 308408 - DNA, 53 bp, Artificial
  Synthetic oligonucleotide
acaagattgaggacaatcatcatcttaacatcctttttccagtcccttccttt

SEQ ID NO: 308409 - DNA, 59 bp, Artificial
  Synthetic oligonucleotide
acaagattggatatctaaaaaccaagccgcctataatgatataaaatctcgaggagata

SEQ ID NO: 308410 - DNA, 57 bp, Artificial
  Synthetic oligonucleotide
acaagcaaaaccggacacatccaattacaatatcgttaccttttgttgtcagtgtga

SEQ ID NO: 308411 - DNA, 60 bp, Artificial
  Synthetic oligonucleotide
acaagcaagacaggacgaccatatctttctctaaggatgaatttttgatggcatggtcca

SEQ ID NO: 308412 - DNA, 60 bp, Artificial
  Synthetic oligonucleotide
acaagcaagatccctcaagctctgaagccgagggctctgaggatgacactgactccgtcg

SEQ ID NO: 308413 - DNA, 55 bp, Artificial
  Synthetic oligonucleotide
acaagcaatcatgtacaacccaggagtacaggcatatttcttaggaaggggtacc

SEQ ID NO: 308414 - DNA, 56 bp, Artificial
  Synthetic oligonucleotide
acaagcacgtgtaatgctgaactttgaattgtcgcccttctacatggtgaatttgg

SEQ ID NO: 308415 - DNA, 53 bp, Artificial
  Synthetic oligonucleotide
acaagcactatggcattatagtaggagagaatgtatatcaattggattcggat

SEQ ID NO: 308416 - DNA, 60 bp, Artificial
  Synthetic oligonucleotide
acaagcactattgggatgctataaggtttagatactgtgcaccaccgggctttgctatgc

SEQ ID NO: 308417 - DNA, 57 bp, Artificial
  Synthetic oligonucleotide
acaagcacttttttataagcttgatatagtgccaatcaataagaatgagagtgacgg

SEQ ID NO: 308418 - DNA, 60 bp, Artificial
  Synthetic oligonucleotide
acaagcagcgtgtatatagaagtattacatttgactcaaggaacctgctgggagcagatg

SEQ ID NO: 308419 - DNA, 60 bp, Artificial
  Synthetic oligonucleotide
acaagcagctcatcaaacaatcaagcgattgtacctagcaaggggatcaacgcaataaga

SEQ ID NO: 308420 - DNA, 55 bp, Artificial
  Synthetic oligonucleotide
acaagcaggcagaatgaattattattggacactgttagatcagggagacaccata

SEQ ID NO: 308421 - DNA, 60 bp, Artificial
  Synthetic oligonucleotide
acaagcagtagaggatgtctggaacctatttgagacatcaataaaaccatgtgtcaaact

SEQ ID NO: 308422 - DNA, 60 bp, Artificial
  Synthetic oligonucleotide
acaagcagtgtgtacattgaagttctgcatttaacacaggggacatgctgggagcagatg

SEQ ID NO: 308423 - DNA, 57 bp, Artificial
  Synthetic oligonucleotide
acaagcatcaagccctgtgtcccttcagacactgcacgacgcttaccacagtcatct

SEQ ID NO: 308424 - DNA, 60 bp, Artificial
  Synthetic oligonucleotide
acaagcatcgccggatccaaaattgatagttagacagtcggctgtgatgcgtggctctga

SEQ ID NO: 308425 - DNA, 60 bp, Artificial
  Synthetic oligonucleotide
acaagcatgtgtggcaatggtataagtttgaagggttcgaccctgctgccgtcatgagac

SEQ ID NO: 308426 - DNA, 57 bp, Artificial
  Synthetic oligonucleotide
acaagcattcaaacgtcaacggagagcgtattttccggctctctacgtgatagtatt

SEQ ID NO: 308427 - DNA, 60 bp, Artificial
  Synthetic oligonucleotide
acaagccaaaaacattactcggcaatgcacctattagagacaatgttcttgatgaagcat

SEQ ID NO: 308428 - DNA, 60 bp, Artificial
  Synthetic oligonucleotide
acaagccagacaattattgtctggtatagtgcaacagcaaaacaatttgctgagggctat

SEQ ID NO: 308429 - DNA, 51 bp, Artificial
  Synthetic oligonucleotide
acaagccgaatcctggcactcccatcggcaatcgcaaaacacgcggtgtcg

SEQ ID NO: 308430 - DNA, 54 bp, Artificial
  Synthetic oligonucleotide
acaagccgagggaggaccggccgcttgggtcaagccgcatcacccggccggtta

SEQ ID NO: 308431 - DNA, 52 bp, Artificial
  Synthetic oligonucleotide
acaagcctcattgcgatgaaatactatgtggatgatttcaacaaacagttct

SEQ ID NO: 308432 - DNA, 56 bp, Artificial
  Synthetic oligonucleotide
acaagcctcgaagcgtagcttcaaagagggggcgattgaaacgtacgaagggctgc

SEQ ID NO: 308433 - DNA, 54 bp, Artificial
  Synthetic oligonucleotide
acaagcgaagagttcgctaaccaggttgggggctttgcttctatatttgtaagg

SEQ ID NO: 308434 - DNA, 54 bp, Artificial
  Synthetic oligonucleotide
acaagcgacaagaactcaactatgagagcatacagaaggatctaacgctcttgt

SEQ ID NO: 308435 - DNA, 54 bp, Artificial
  Synthetic oligonucleotide
acaagcgagggtttggcagccccgtcatttctaagaccccgccagccgacttct

SEQ ID NO: 308436 - DNA, 52 bp, Artificial
  Synthetic oligonucleotide
acaagcgggaacttcttcccagggggaccaaatttgagggtgtggggagcca

SEQ ID NO: 308437 - DNA, 60 bp, Artificial
  Synthetic oligonucleotide
acaagcggggagcaaatgctgataatttggggaatacaccatcccaataatgatgaggag

SEQ ID NO: 308438 - DNA, 52 bp, Artificial
  Synthetic oligonucleotide
acaagcggtacttcaccccaagtaaccggtactaacgccacactcctgaact

SEQ ID NO: 308439 - DNA, 60 bp, Artificial
  Synthetic oligonucleotide
acaagcgtagtgtcctcgacgattgccatcctcgtgtgaattccgggctcggcttgcact

SEQ ID NO: 308440 - DNA, 56 bp, Artificial
  Synthetic oligonucleotide
acaagctaaatttccacctccgatgatccgaaatcccctgttaatgtccacctcaa

SEQ ID NO: 308441 - DNA, 60 bp, Artificial
  Synthetic oligonucleotide
acaagctagagagaaactagatttctgcagaagattgaagcagttagatatcctagaaag

SEQ ID NO: 308442 - DNA, 60 bp, Artificial
  Synthetic oligonucleotide
acaagctaggacaacagtccaacagcaatttgcggatgcctggaaacctgtgcctagtat

SEQ ID NO: 308443 - DNA, 52 bp, Artificial
  Synthetic oligonucleotide
acaagctagtaccagttgagccagatgaagtagagaaggctactgaaggaga

SEQ ID NO: 308444 - DNA, 57 bp, Artificial
  Synthetic oligonucleotide
acaagctatacatctgggggattcatcacccgagctcaaatcaagagcagacaaaat

SEQ ID NO: 308445 - DNA, 60 bp, Artificial
  Synthetic oligonucleotide
acaagctcaagaaagtaataaacgcgttgagcgggattgatctatcgcacttgcgcacgc

SEQ ID NO: 308446 - DNA, 55 bp, Artificial
  Synthetic oligonucleotide
acaagctcgcagttgagcgcgtcgtcacgcaaggtcgacaccgctcgcacgtctg

SEQ ID NO: 308447 - DNA, 57 bp, Artificial
  Synthetic oligonucleotide
acaagctcgtttaattgtgccaaggacatagttatatttgactgggttcgtgttaga

SEQ ID NO: 308448 - DNA, 60 bp, Artificial
  Synthetic oligonucleotide
acaagctgcagacctaaaaagcactcaggcagccattgaccagatcaatgggaagttaaa

SEQ ID NO: 308449 - DNA, 60 bp, Artificial
  Synthetic oligonucleotide
acaagctggttcgctgcgcatagccccaattgggcgccgttcttgcgctaccgtgtcaaa

SEQ ID NO: 308450 - DNA, 60 bp, Artificial
  Synthetic oligonucleotide
acaagctgtactgcgagtgtggcgccgtcatgacttcgaagcgcggggaagaatcgatca

SEQ ID NO: 308451 - DNA, 55 bp, Artificial
  Synthetic oligonucleotide
acaagcttcgcgccttattagtcgtcattccacgcatactccgctcccctcctcc

SEQ ID NO: 308452 - DNA, 60 bp, Artificial
  Synthetic oligonucleotide
acaagcttgcattaacataggtaacagatacgtggacgtgcctatacgcccagtgtctgt

SEQ ID NO: 308453 - DNA, 60 bp, Artificial
  Synthetic oligonucleotide
acaagctttatattggacattccaggagatggaaaatatagatactgcagagactcgaca

SEQ ID NO: 308454 - DNA, 54 bp, Artificial
  Synthetic oligonucleotide
acaaggaaaaacaattaatagagaccgtcaagataaaggtttcggatcatccga

SEQ ID NO: 308455 - DNA, 54 bp, Artificial
  Synthetic oligonucleotide
acaaggaaacggcacaaatcagactccaaactgatactacaaatcactttgaag

SEQ ID NO: 308456 - DNA, 60 bp, Artificial
  Synthetic oligonucleotide
acaaggaagagatcagaagaaattggcgccaggcgaacaatggggaggatgcaactgcag

SEQ ID NO: 308457 - DNA, 60 bp, Artificial
  Synthetic oligonucleotide
acaaggaaggagtgtgcggagtcagatctgtcactagactggagcaccagatgtgggaag

SEQ ID NO: 308458 - DNA, 58 bp, Artificial
  Synthetic oligonucleotide
acaaggacaaacgctttggagtaagacaagtgatgctgggtcggacagagtaatggtg

SEQ ID NO: 308459 - DNA, 58 bp, Artificial
  Synthetic oligonucleotide
acaaggacaatgcaatacgattgggcgaaaacaaggacgtcatagtcacaagagaacc

SEQ ID NO: 308460 - DNA, 57 bp, Artificial
  Synthetic oligonucleotide
acaaggaccccaaaagcgctgtgtggcgactgctagaccagaggaccaaactccgag

SEQ ID NO: 308461 - DNA, 58 bp, Artificial
  Synthetic oligonucleotide
acaaggactcctatgctgctacggcaggcaaacagagtctcaaacaagatccggataa

SEQ ID NO: 308462 - DNA, 58 bp, Artificial
  Synthetic oligonucleotide
acaaggagaaccgtttcattgaaattggagtgacacggagagaggtccatatatacta

SEQ ID NO: 308463 - DNA, 59 bp, Artificial
  Synthetic oligonucleotide
acaaggagctacaactgctatacaaggaggatacttagcctggacaggaggaggcggaa

SEQ ID NO: 308464 - DNA, 58 bp, Artificial
  Synthetic oligonucleotide
acaaggaggcgtacctactccggttacttggtctggatgtgtacctggcatgatctgg

SEQ ID NO: 308465 - DNA, 60 bp, Artificial
  Synthetic oligonucleotide
acaaggaggtgcataatgtctgggctacgcatgcctgcgtacccacagaccccaacccac

SEQ ID NO: 308466 - DNA, 52 bp, Artificial
  Synthetic oligonucleotide
acaaggagtcacggactaccttacaagccatggagtctcttgcattccggga

SEQ ID NO: 308467 - DNA, 55 bp, Artificial
  Synthetic oligonucleotide
acaaggatcaatggccagcggcacaccaggtaggagtgggatccttcgggccagg

SEQ ID NO: 308468 - DNA, 55 bp, Artificial
  Synthetic oligonucleotide
acaaggatcgctggccagaggcaaatcaggtaggagcgggagcattcgggccagg

SEQ ID NO: 308469 - DNA, 59 bp, Artificial
  Synthetic oligonucleotide
acaaggcaactggttcggctgtacatggatgaatagtactgggttcactaagacgtgcg

SEQ ID NO: 308470 - DNA, 55 bp, Artificial
  Synthetic oligonucleotide
acaaggcacagtgcgccgatataggtggctggtggggaactagaccacaggatct

SEQ ID NO: 308471 - DNA, 55 bp, Artificial
  Synthetic oligonucleotide
acaaggcactcgaaatgtgcattgatcaagtcactatcgctggcgcaaagttgcg

SEQ ID NO: 308472 - DNA, 55 bp, Artificial
  Synthetic oligonucleotide
acaaggcagcaccggagcctctgaaccaattgatttcgcatttccaactgttggc

SEQ ID NO: 308473 - DNA, 54 bp, Artificial
  Synthetic oligonucleotide
acaaggcatgcaaaagtttgtataattggtactgtatcaaaattttcccagggg

SEQ ID NO: 308474 - DNA, 55 bp, Artificial
  Synthetic oligonucleotide
acaaggccaccaaaaggcttactgttctcggaaaagatgcaggtgcattgattga

SEQ ID NO: 308475 - DNA, 58 bp, Artificial
  Synthetic oligonucleotide
acaaggccaccaagaggctcacggtcctcggaaaggatgcaggtgcgttgatcgaaga

SEQ ID NO: 308476 - DNA, 54 bp, Artificial
  Synthetic oligonucleotide
acaaggccactaagagactcacagttctcggaaaggatgctggcaccttaactg

SEQ ID NO: 308477 - DNA, 55 bp, Artificial
  Synthetic oligonucleotide
acaaggccattataagcccccaaactcccatgatagaggcgtagacgtttaatac

SEQ ID NO: 308478 - DNA, 52 bp, Artificial
  Synthetic oligonucleotide
acaaggcgatcaaggtccacctcccgggggaaacaagcaacctccaggggag

SEQ ID NO: 308479 - DNA, 55 bp, Artificial
  Synthetic oligonucleotide
acaaggctcatccggttccgcaaggacagaaagaccaaagagagttgggcactcc

SEQ ID NO: 308480 - DNA, 55 bp, Artificial
  Synthetic oligonucleotide
acaaggcttgtatacttattctaatttagtggagttacaaaactatgactgccct

SEQ ID NO: 308481 - DNA, 60 bp, Artificial
  Synthetic oligonucleotide
acaaggctttgggagcacaggtgtgtttgctttacagtcatggatggataatattgaaaa

SEQ ID NO: 308482 - DNA, 54 bp, Artificial
  Synthetic oligonucleotide
acaagggaacctaatagccaactgtgcatcaatcctctgcaagtgttacacaac

SEQ ID NO: 308483 - DNA, 55 bp, Artificial
  Synthetic oligonucleotide
acaagggacattgactttgacaacctggctgagaatccatgtaaaattggcctcc

SEQ ID NO: 308484 - DNA, 59 bp, Artificial
  Synthetic oligonucleotide
acaagggaccgtagcgctgggttatctatatgatgccctggatgccgttcctgccgcgt

SEQ ID NO: 308485 - DNA, 54 bp, Artificial
  Synthetic oligonucleotide
acaagggacgttaaccgtagctgtcaagcacatagagatgttgactactcttgt

SEQ ID NO: 308486 - DNA, 56 bp, Artificial
  Synthetic oligonucleotide
acaagggactgggtggtaatcaggaagtagaccacctagtgagccaaggaattaga

SEQ ID NO: 308487 - DNA, 55 bp, Artificial
  Synthetic oligonucleotide
acaagggactttccagaactgctgacaagggactttccagggaggagtggcctgg

SEQ ID NO: 308488 - DNA, 55 bp, Artificial
  Synthetic oligonucleotide
acaagggagaatggattactactgggctgttcttaaacctggacaaacagtcaaa

SEQ ID NO: 308489 - DNA, 60 bp, Artificial
  Synthetic oligonucleotide
acaagggaggagaagttggaagacacttgattgcatctcttgctcagattatcgggaaca

SEQ ID NO: 308490 - DNA, 57 bp, Artificial
  Synthetic oligonucleotide
acaaggggcggcggtcctcagtactctcaatctttttcgataaagaggagactgctg

SEQ ID NO: 308491 - DNA, 55 bp, Artificial
  Synthetic oligonucleotide
acaagggtgatgctggattcagtaaactgaatgtagtcaatgcatgcaagatagc

SEQ ID NO: 308492 - DNA, 60 bp, Artificial
  Synthetic oligonucleotide
acaagggttcgatctacatgacactggacgttcacgaagagacacatcccaaatctggta

SEQ ID NO: 308493 - DNA, 60 bp, Artificial
  Synthetic oligonucleotide
acaaggtaagaagtctatgacgtacaggacgagaacatgagcctcgtagtaaatatgctc

SEQ ID NO: 308494 - DNA, 52 bp, Artificial
  Synthetic oligonucleotide
acaaggtaagacgcaccctggtgtttcaatgggcagagtcccgtggtcccct

SEQ ID NO: 308495 - DNA, 56 bp, Artificial
  Synthetic oligonucleotide
acaaggtagaatgggagaagatgccaaatttttctgccctactggctccctagtta

SEQ ID NO: 308496 - DNA, 58 bp, Artificial
  Synthetic oligonucleotide
acaaggtaggagagattctacagcaacatggggaatggacaggggcgagattggaaaa

SEQ ID NO: 308497 - DNA, 60 bp, Artificial
  Synthetic oligonucleotide
acaaggtattgtgatttctataagcaatatgctgacaattcaggctacagtcagacaaca

SEQ ID NO: 308498 - DNA, 55 bp, Artificial
  Synthetic oligonucleotide
acaaggtccacggcaggacggtttgccagtatgaaattccaggttttggtctatc

SEQ ID NO: 308499 - DNA, 58 bp, Artificial
  Synthetic oligonucleotide
acaaggtccgcagccaacaaattggtgacgctgactcataaggtaggccaagtctttg

SEQ ID NO: 308500 - DNA, 51 bp, Artificial
  Synthetic oligonucleotide
acaaggtgaaaacatcggcggttgctgttgtcgaactgagtaagactaaac

SEQ ID NO: 308501 - DNA, 58 bp, Artificial
  Synthetic oligonucleotide
acaaggtggaagaggccactggaggagagaacaacagcttgctacaccccataaacca

SEQ ID NO: 308502 - DNA, 55 bp, Artificial
  Synthetic oligonucleotide
acaaggtggagtcgggaacccaatagcaattacagatcgacacagtgttcaaagg

SEQ ID NO: 308503 - DNA, 60 bp, Artificial
  Synthetic oligonucleotide
acaaggtggctatcaaccttggtgttgctattagtggcactatgcaacaatactgtgtgt

SEQ ID NO: 308504 - DNA, 53 bp, Artificial
  Synthetic oligonucleotide
acaaggtgggagcgggagcattcgggccagggttcacccctccccatggggga

SEQ ID NO: 308505 - DNA, 60 bp, Artificial
  Synthetic oligonucleotide
acaaggtgtctcgctatcttgagtatgaagctcctactatccctgaggattgtggatctc

SEQ ID NO: 308506 - DNA, 54 bp, Artificial
  Synthetic oligonucleotide
acaaggttgaaagtcttcaacaaagtagtatcttcccctgtgaaaatgggcttc

SEQ ID NO: 308507 - DNA, 58 bp, Artificial
  Synthetic oligonucleotide
acaaggttgtgggaacatacagaaaaccaattcatccattataggaacaggtactgca

SEQ ID NO: 308508 - DNA, 54 bp, Artificial
  Synthetic oligonucleotide
acaagtaaggcgaatagaaagacttcaggacagaattagaagtagagcagagga

SEQ ID NO: 308509 - DNA, 50 bp, Artificial
  Synthetic oligonucleotide
acaagtaatccatgcagaaatacaatcgctaggacattggatggatgcca

SEQ ID NO: 308510 - DNA, 59 bp, Artificial
  Synthetic oligonucleotide
acaagtaattatgcctaccaagagatcttgcccacatggttttaccagttctagaagca

SEQ ID NO: 308511 - DNA, 60 bp, Artificial
  Synthetic oligonucleotide
acaagtacaagatggagctagccagcacggacaatgagagggacgccatctacagctcag

SEQ ID NO: 308512 - DNA, 57 bp, Artificial
  Synthetic oligonucleotide
acaagtaccaattggcatgtaatcgagaagcaataccaaaaacgtgcattaggccgg

SEQ ID NO: 308513 - DNA, 60 bp, Artificial
  Synthetic oligonucleotide
acaagtaccagattgacagacctgggtagtggagaattgggtatcaggattcaaggcagc

SEQ ID NO: 308514 - DNA, 55 bp, Artificial
  Synthetic oligonucleotide
acaagtacccctagtgatttcagcagagttagacctatttaccctagaaacactc

SEQ ID NO: 308515 - DNA, 58 bp, Artificial
  Synthetic oligonucleotide
acaagtagcaagtgcctcatagaaaacttacccctgtgggcctcagtatacggataca

SEQ ID NO: 308516 - DNA, 55 bp, Artificial
  Synthetic oligonucleotide
acaagtaggaatttaattcgttatcggtttgagaatgggtgtagtgaagcaagaa

SEQ ID NO: 308517 - DNA, 54 bp, Artificial
  Synthetic oligonucleotide
acaagtagggggacaattaaagattcggcctggaatatggcaaatggattgcac

SEQ ID NO: 308518 - DNA, 57 bp, Artificial
  Synthetic oligonucleotide
acaagtatccttccccgtgtatcgtatagagaggcgagaagccgccgacttcactcc

SEQ ID NO: 308519 - DNA, 55 bp, Artificial
  Synthetic oligonucleotide
acaagtatggtttgaaccttccaatggtgacttacgtgaaggatgagctcagatc

SEQ ID NO: 308520 - DNA, 54 bp, Artificial
  Synthetic oligonucleotide
acaagtatgtagctacgttaagctgtttgaactctacaagtaagggtacgttta

SEQ ID NO: 308521 - DNA, 60 bp, Artificial
  Synthetic oligonucleotide
acaagtattgtgaccatcctgtatcagttcacaattgcatggagatcccggttaagaact

SEQ ID NO: 308522 - DNA, 53 bp, Artificial
  Synthetic oligonucleotide
acaagtcaagacttgttggttagagcctgaggatgattgggaggtagccatca

SEQ ID NO: 308523 - DNA, 51 bp, Artificial
  Synthetic oligonucleotide
acaagtcacgtggggagggttggcgtttaacccggaagccaatcctcttac

SEQ ID NO: 308524 - DNA, 55 bp, Artificial
  Synthetic oligonucleotide
acaagtcagaaatcttgttgaattgtgtcaagtggacacactcattccaattgac

SEQ ID NO: 308525 - DNA, 55 bp, Artificial
  Synthetic oligonucleotide
acaagtcccaacgtcaatcaaattgcgcgtaccggcagttaatcacagggaagtc

SEQ ID NO: 308526 - DNA, 58 bp, Artificial
  Synthetic oligonucleotide
acaagtccggcctgatttcctcgctcatcccatcaatttttgacagtcccggtgatgt

SEQ ID NO: 308527 - DNA, 52 bp, Artificial
  Synthetic oligonucleotide
acaagtccggcctgatttccttgcccaccccatcaatttttgataccccccg

SEQ ID NO: 308528 - DNA, 60 bp, Artificial
  Synthetic oligonucleotide
acaagtcgtgtacattaatatcaaccactggggcttcgtgcatcatcaggatatcaatag

SEQ ID NO: 308529 - DNA, 54 bp, Artificial
  Synthetic oligonucleotide
acaagtcgttgaccgggctatgggcaaggctcttgtgggacgctcttaatatgc

SEQ ID NO: 308530 - DNA, 55 bp, Artificial
  Synthetic oligonucleotide
acaagtctattctcactgctacctggggtagcacactctattgctgttgagttgt

SEQ ID NO: 308531 - DNA, 56 bp, Artificial
  Synthetic oligonucleotide
acaagtctcaaatgactcaagtactctttggaaattcatactattcattaaactag

SEQ ID NO: 308532 - DNA, 60 bp, Artificial
  Synthetic oligonucleotide
acaagtctggttacaaacccatccatcagtggatgtgctaatatcgtcagactctgaagt

SEQ ID NO: 308533 - DNA, 59 bp, Artificial
  Synthetic oligonucleotide
acaagtgaggtataccaatgctttaggtcaggtagtcgagccacaagagggagatccta

SEQ ID NO: 308534 - DNA, 52 bp, Artificial
  Synthetic oligonucleotide
acaagtgcaacgattatcttcggggctacggaattcgtgagattcttggtga

SEQ ID NO: 308535 - DNA, 60 bp, Artificial
  Synthetic oligonucleotide
acaagtgcacccaaagcacatgaagagaagaaactttcagctcagcgtattcatgagaat

SEQ ID NO: 308536 - DNA, 60 bp, Artificial
  Synthetic oligonucleotide
acaagtgcatggggctgtgaagagtggggttgcatagcaataggcactggctgtgtatat

SEQ ID NO: 308537 - DNA, 60 bp, Artificial
  Synthetic oligonucleotide
acaagtgccgataaagtgagatatggctcagatttcgtggtgcggccaacggaaaagata

SEQ ID NO: 308538 - DNA, 59 bp, Artificial
  Synthetic oligonucleotide
acaagtgcgagatgttctgatggagaaacttggaaagtggccaacaatgtttgatgtag

SEQ ID NO: 308539 - DNA, 55 bp, Artificial
  Synthetic oligonucleotide
acaagtgctcggaccttgggaacgtgacgttcgtgaactactcactattcttccc

SEQ ID NO: 308540 - DNA, 58 bp, Artificial
  Synthetic oligonucleotide
acaagtgctgcgcagccaaaaggtaggtgacttggacgggtctgggaagggtggcaga

SEQ ID NO: 308541 - DNA, 57 bp, Artificial
  Synthetic oligonucleotide
acaagtggaaattgatcgtttagcttcaaaggctacggtttcaggtgacatgtataa

SEQ ID NO: 308542 - DNA, 58 bp, Artificial
  Synthetic oligonucleotide
acaagtggaagaactcgtgcatggcggaattgacccgatcctatgtggaacggaatta

SEQ ID NO: 308543 - DNA, 51 bp, Artificial
  Synthetic oligonucleotide
acaagtggatgagacctcttgtaacagagacggtgtggctatagtgctaca

SEQ ID NO: 308544 - DNA, 53 bp, Artificial
  Synthetic oligonucleotide
acaagtggctacgcgtaaatcgttgtcagcttcggtcgcagggaacagtgcgc

SEQ ID NO: 308545 - DNA, 60 bp, Artificial
  Synthetic oligonucleotide
acaagtggggaacaaatgctgatcatttggggggtgcatcaccccaatgatgaagctgaa

SEQ ID NO: 308546 - DNA, 56 bp, Artificial
  Synthetic oligonucleotide
acaagtgtatccaatcctatccgctcctcaaagcttaattattaaatggtccccta

SEQ ID NO: 308547 - DNA, 58 bp, Artificial
  Synthetic oligonucleotide
acaagtgtgagagtgtctggaacaaaaagcccatgggtcatctgccagagtttaaaac

SEQ ID NO: 308548 - DNA, 55 bp, Artificial
  Synthetic oligonucleotide
acaagtgtgatgcaggattcggtcgtctgacaagtgtgaacgcaacaaaggtcag

SEQ ID NO: 308549 - DNA, 53 bp, Artificial
  Synthetic oligonucleotide
acaagttaagatgggggagaacgttttcgaaaatcacgaaatggtgacaaagc

SEQ ID NO: 308550 - DNA, 59 bp, Artificial
  Synthetic oligonucleotide
acaagttatcaccgttaggtcaccatgcagaggcggagacttcacccttggactgaata

SEQ ID NO: 308551 - DNA, 54 bp, Artificial
  Synthetic oligonucleotide
acaagttcaaaacttcgaaaagaacactaatagtacgatgtctacagtagggaa

SEQ ID NO: 308552 - DNA, 51 bp, Artificial
  Synthetic oligonucleotide
acaagttcaaggtacctaagaaggtttggcaggcgctttccgtcactatcg

SEQ ID NO: 308553 - DNA, 51 bp, Artificial
  Synthetic oligonucleotide
acaagttcacctctgccagaagtgtgtttttgccaagacatttgccaagta

SEQ ID NO: 308554 - DNA, 58 bp, Artificial
  Synthetic oligonucleotide
acaagttcagaggctctactgacccaacaagctgctcccaaccgtccaaactacatag

SEQ ID NO: 308555 - DNA, 54 bp, Artificial
  Synthetic oligonucleotide
acaagttcatctcccgacgttgcacacagccagtcacggcaattgtatcgacac

SEQ ID NO: 308556 - DNA, 60 bp, Artificial
  Synthetic oligonucleotide
acaagttccacaacaatttgattttagagcttcaatgcatatgctaacatccaacctaac

SEQ ID NO: 308557 - DNA, 58 bp, Artificial
  Synthetic oligonucleotide
acaagttgacccaaggccgtcagacctatgattggacattaaacaggaatcagccggc

SEQ ID NO: 308558 - DNA, 55 bp, Artificial
  Synthetic oligonucleotide
acaagttgaggcgacaaagaagcttcaggctgacatgattggcatcaagcagggg

SEQ ID NO: 308559 - DNA, 54 bp, Artificial
  Synthetic oligonucleotide
acaagttgaggtctttggaccggttgtttaggtttgtcaattagataccactga

SEQ ID NO: 308560 - DNA, 60 bp, Artificial
  Synthetic oligonucleotide
acaagttgatcagctagcaaaacaacttgggaaacaacctcagcaaggctcatcaacaac

SEQ ID NO: 308561 - DNA, 57 bp, Artificial
  Synthetic oligonucleotide
acaagttggtggctctaatgtgttagacataacagcagatccaacaactaatccaca

SEQ ID NO: 308562 - DNA, 60 bp, Artificial
  Synthetic oligonucleotide
acaagttgttacagtcatggatgatttgtgccaaaatcctgatggaaaggatatttcact

SEQ ID NO: 308563 - DNA, 60 bp, Artificial
  Synthetic oligonucleotide
acaagttgtttagtgccatctcacagagtaggtctcaactgcctctccatgttctaaatg

SEQ ID NO: 308564 - DNA, 58 bp, Artificial
  Synthetic oligonucleotide
acaagtttaaatgcactaaatacatttagaacagaaggatgcataagtcacccacaac

SEQ ID NO: 308565 - DNA, 59 bp, Artificial
  Synthetic oligonucleotide
acaagtttactccaaatggcaatccatcagatctggaactccagtccttgacctgtccg

SEQ ID NO: 308566 - DNA, 58 bp, Artificial
  Synthetic oligonucleotide
acaagttttctaagtatcacatcccttgtgagaatagagcagtgggtggcagagtgtc

SEQ ID NO: 308567 - DNA, 53 bp, Artificial
  Synthetic oligonucleotide
acaataacaccaatgtagaagaccttctgatattgtggggaatccatcatcct

SEQ ID NO: 308568 - DNA, 58 bp, Artificial
  Synthetic oligonucleotide
acaataacagtgttggttctccctggaattggaaataatgagagttgcaatgaaacag

SEQ ID NO: 308569 - DNA, 59 bp, Artificial
  Synthetic oligonucleotide
acaataacatccccgggagcaccaaactgcagtgacactataattacatacaacaacac

SEQ ID NO: 308570 - DNA, 59 bp, Artificial
  Synthetic oligonucleotide
acaataacatgggtggcaagtggtcaaaacgtagcacagtgggatggccagctgtaagg

SEQ ID NO: 308571 - DNA, 56 bp, Artificial
  Synthetic oligonucleotide
acaataaggatggggtaaagctagagatcacagttcttaaacttaagagaaatgag

SEQ ID NO: 308572 - DNA, 59 bp, Artificial
  Synthetic oligonucleotide
acaataaggccaccaagaggcttacagtcctcggaaaagatgcaggtgcattaactggc

SEQ ID NO: 308573 - DNA, 58 bp, Artificial
  Synthetic oligonucleotide
acaataaggtcccatctcactcgagttgagggctgggtgtggaagaacaaactattca

SEQ ID NO: 308574 - DNA, 55 bp, Artificial
  Synthetic oligonucleotide
acaataagtaggtttaggcagggctatcgacctgtcttttcacaggactgccagc

SEQ ID NO: 308575 - DNA, 60 bp, Artificial
  Synthetic oligonucleotide
acaataatcgtgcaggagcgggctatgagcctcactgaaaaagtagcggccattaactac

SEQ ID NO: 308576 - DNA, 60 bp, Artificial
  Synthetic oligonucleotide
acaataatgtacttccggacataataccgtccgtgtcagcagtatgtgaccatccgatcc

SEQ ID NO: 308577 - DNA, 60 bp, Artificial
  Synthetic oligonucleotide
acaataattaacattgatgtagatgattattacaatctagaggtattattcgtaagtgat

SEQ ID NO: 308578 - DNA, 55 bp, Artificial
  Synthetic oligonucleotide
acaatacaatcagagacgcagtttttgacaggtataaactcacaagcagctaatg

SEQ ID NO: 308579 - DNA, 60 bp, Artificial
  Synthetic oligonucleotide
acaatacacattctgcagccaacacaacaccaccattgtcaggtcatcattgacggagct

SEQ ID NO: 308580 - DNA, 60 bp, Artificial
  Synthetic oligonucleotide
acaatacagttccgacatcatctaagcatgaacgtgttcacatcgtctgtgggttctgtg

SEQ ID NO: 308581 - DNA, 59 bp, Artificial
  Synthetic oligonucleotide
acaatacatgatagaatccctcatcggacccttttgatgaatgagctgggtgttccgtt

SEQ ID NO: 308582 - DNA, 60 bp, Artificial
  Synthetic oligonucleotide
acaataccctcattctcatgctggttgttgagtactgcaaatcttggcactttaagcaga

SEQ ID NO: 308583 - DNA, 58 bp, Artificial
  Synthetic oligonucleotide
acaataccgcagagtctagactcgtggtggacttctctcagttttctagggggatcac

SEQ ID NO: 308584 - DNA, 56 bp, Artificial
  Synthetic oligonucleotide
acaatacctcatcaccagagccgaggcacttttgcaagtgtgggtcccccctctca

SEQ ID NO: 308585 - DNA, 58 bp, Artificial
  Synthetic oligonucleotide
acaatacctgtacggcatagggtcagcggtcgtctcccttgcgatcaaatgggagtac

SEQ ID NO: 308586 - DNA, 57 bp, Artificial
  Synthetic oligonucleotide
acaatacctgtacggtatagggtcagcggttgtctccttcgcaatcaagtgggagta

SEQ ID NO: 308587 - DNA, 60 bp, Artificial
  Synthetic oligonucleotide
acaatacgactacatcctctgagcccgcctcttctggctgccccccagactccgacgatg

SEQ ID NO: 308588 - DNA, 60 bp, Artificial
  Synthetic oligonucleotide
acaatactacagaggccatacaatttatagagactgaagccgaatgcgatgagtgtctag

SEQ ID NO: 308589 - DNA, 59 bp, Artificial
  Synthetic oligonucleotide
acaatactatggacaggtaatggttatcaaaccgtacccagtatgtgtggcgctcaaga

SEQ ID NO: 308590 - DNA, 60 bp, Artificial
  Synthetic oligonucleotide
acaatactcatgggtctcaatggccgcgcagcggtactgacaacattcgccgccgcccac

SEQ ID NO: 308591 - DNA, 53 bp, Artificial
  Synthetic oligonucleotide
acaatactccgaagtgataagttattaagtttcgtgggatggatacccttatt

SEQ ID NO: 308592 - DNA, 60 bp, Artificial
  Synthetic oligonucleotide
acaatagaaggatgccaaatgctcttcactatcacctcctccaacagtcttgaatatgga

SEQ ID NO: 308593 - DNA, 60 bp, Artificial
  Synthetic oligonucleotide
acaatagaagtgttcagatcaaatgatctcacggccaatgaatctggaaggctaatagac

SEQ ID NO: 308594 - DNA, 60 bp, Artificial
  Synthetic oligonucleotide
acaatagaagtgttcagattaaacggcctcacgaccagtgaatctggaagactcatagac

SEQ ID NO: 308595 - DNA, 60 bp, Artificial
  Synthetic oligonucleotide
acaatagaggaaggaagaacattaagagttctgaagatggtggagccatggctctcttcg

SEQ ID NO: 308596 - DNA, 51 bp, Artificial
  Synthetic oligonucleotide
acaatagatctactgtattatatgggtggtgtggcctggtactgctgctta

SEQ ID NO: 308597 - DNA, 56 bp, Artificial
  Synthetic oligonucleotide
acaatagattcggctaggtgacctgccttaacatatgcagttgcagtcaatttagg

SEQ ID NO: 308598 - DNA, 59 bp, Artificial
  Synthetic oligonucleotide
acaatagcagacttagggattgaggttggagatggctatatgtgggactcaagatataa

SEQ ID NO: 308599 - DNA, 60 bp, Artificial
  Synthetic oligonucleotide
acaatagcggacaaccgtcaacagtcgtggacaacacgctcatggtcatattagcagtca

SEQ ID NO: 308600 - DNA, 60 bp, Artificial
  Synthetic oligonucleotide
acaatagctgtagagggaagaagctatctgattctaaaatagcggaagctgcagaacgta

SEQ ID NO: 308601 - DNA, 50 bp, Artificial
  Synthetic oligonucleotide
acaataggatccgtaacaacacgtgtgtcgtagcgtatacataatgccgt

SEQ ID NO: 308602 - DNA, 60 bp, Artificial
  Synthetic oligonucleotide
acaatagggcgaggcatgtatattatgccctcaaacgctggctctgggaactccagggtg

SEQ ID NO: 308603 - DNA, 58 bp, Artificial
  Synthetic oligonucleotide
acaataggtgaatgtcccaaatatgtaaagtcagatagattggttttggcaacagggc

SEQ ID NO: 308604 - DNA, 60 bp, Artificial
  Synthetic oligonucleotide
acaatagtgctaccattgtaatgccttacatcaacagcgttcccatggacaacatgtata

SEQ ID NO: 308605 - DNA, 60 bp, Artificial
  Synthetic oligonucleotide
acaatagttgactacgtggaatcaaattgtgcaagcatgtccaaaagatcgagatcatta

SEQ ID NO: 308606 - DNA, 55 bp, Artificial
  Synthetic oligonucleotide
acaatatagagaagaggcactcctgaatagactcagcatcaatccggtgaagctc

SEQ ID NO: 308607 - DNA, 59 bp, Artificial
  Synthetic oligonucleotide
acaatatatgatcctactaaagagaagctagtatggggccttatagggttgcaggtatc

SEQ ID NO: 308608 - DNA, 60 bp, Artificial
  Synthetic oligonucleotide
acaatatcgctaatcacagccaatttaagaggcgatgtgagaaatacgattgttgcgcca

SEQ ID NO: 308609 - DNA, 51 bp, Artificial
  Synthetic oligonucleotide
acaatatcgttcagttgtgccagtgacaacgttatgttcgactgtgtcctc

SEQ ID NO: 308610 - DNA, 54 bp, Artificial
  Synthetic oligonucleotide
acaatatcttatctatatgtataaattggtacgaaccggggaatatgaaacatt

SEQ ID NO: 308611 - DNA, 59 bp, Artificial
  Synthetic oligonucleotide
acaatatgagaaaagctgggttaactgacatacctaagatgatacaggactggttggtc

SEQ ID NO: 308612 - DNA, 60 bp, Artificial
  Synthetic oligonucleotide
acaatatgccatcgcagactacttacagtccggacccaagagactccagattcaagcctt

SEQ ID NO: 308613 - DNA, 50 bp, Artificial
  Synthetic oligonucleotide
acaatatgcgtgccacctacctggaaactttatctgtaagcacaaccaaa

SEQ ID NO: 308614 - DNA, 57 bp, Artificial
  Synthetic oligonucleotide
acaatatgcttttacctgctttttgttgggaccaatgtaactgcctatttggtcaga

SEQ ID NO: 308615 - DNA, 56 bp, Artificial
  Synthetic oligonucleotide
acaatatttcatcactagggctgaagcgcacttgctagtgtgggtcccccccctca

SEQ ID NO: 308616 - DNA, 55 bp, Artificial
  Synthetic oligonucleotide
acaatcaacaggaagcagggaactacgagaatcatacggaaaatgcgttaatgct

SEQ ID NO: 308617 - DNA, 60 bp, Artificial
  Synthetic oligonucleotide
acaatcaagtccagtacagtcgagtagctgcgagacgtagatggtccaaggtctctgttc

SEQ ID NO: 308618 - DNA, 54 bp, Artificial
  Synthetic oligonucleotide
acaatcaagtcctcaattatcatatgaggctcttcgtaaagaggaaaaaccacc

SEQ ID NO: 308619 - DNA, 60 bp, Artificial
  Synthetic oligonucleotide
acaatcaatcgctgaggcaatcattgtagcaatggtgttctcacaggaggattgcatgat

SEQ ID NO: 308620 - DNA, 60 bp, Artificial
  Synthetic oligonucleotide
acaatcaatctatgacatcgcgcatatcaaagttgtctaattaacgcccacgtccatcaa

SEQ ID NO: 308621 - DNA, 55 bp, Artificial
  Synthetic oligonucleotide
acaatcacactgttctcagcaaatatcgatgccattacaagcctcagcatcgggg

SEQ ID NO: 308622 - DNA, 60 bp, Artificial
  Synthetic oligonucleotide
acaatcacagtaccaaggcttgaaaagatctcagcaaagattaggatgccaaaacacaaa

SEQ ID NO: 308623 - DNA, 56 bp, Artificial
  Synthetic oligonucleotide
acaatcaccaggaccccaaatggtatcaggggtttattggatcgcagttcaataat

SEQ ID NO: 308624 - DNA, 52 bp, Artificial
  Synthetic oligonucleotide
acaatcaccccgttaaaggtctttactgggtcaccaaaatgggtaattatca

SEQ ID NO: 308625 - DNA, 60 bp, Artificial
  Synthetic oligonucleotide
acaatcagaagtcacatcacaacatattctggggaatgctaaatgggctcctattactat

SEQ ID NO: 308626 - DNA, 55 bp, Artificial
  Synthetic oligonucleotide
acaatcagattatcgtttcagttgatgagaccaccaaatatgacaccagcggtag

SEQ ID NO: 308627 - DNA, 60 bp, Artificial
  Synthetic oligonucleotide
acaatcaggggctgtgtatgttggcaattatagggtggtcaatagacacctggctacaca

SEQ ID NO: 308628 - DNA, 51 bp, Artificial
  Synthetic oligonucleotide
acaatcaggtgaacgaacccaggatgcggttagtggccatgctctacacac

SEQ ID NO: 308629 - DNA, 54 bp, Artificial
  Synthetic oligonucleotide
acaatcagtacataggctttaaaaaggtctttactattgggcttacttatgatc

SEQ ID NO: 308630 - DNA, 60 bp, Artificial
  Synthetic oligonucleotide
acaatcagttaggtctgtgtcactagcaaaagaagctacttgattccaatcacattcctc

SEQ ID NO: 308631 - DNA, 60 bp, Artificial
  Synthetic oligonucleotide
acaatcatactacctatgttttcactgcgatgcaattgaaccaaagccaggactacacca

SEQ ID NO: 308632 - DNA, 60 bp, Artificial
  Synthetic oligonucleotide
acaatcatagaggcaatacgttatctctcatcttcacagaacaatccaagtgttctacaa

SEQ ID NO: 308633 - DNA, 55 bp, Artificial
  Synthetic oligonucleotide
acaatcataggtggtggctggatgatgtgggactattttagcaggtgcactcaag

SEQ ID NO: 308634 - DNA, 60 bp, Artificial
  Synthetic oligonucleotide
acaatcatatatatgacacaggccccactataggaatcaatgtaatgcatgatgaacatt

SEQ ID NO: 308635 - DNA, 57 bp, Artificial
  Synthetic oligonucleotide
acaatcatcccctgatcatgcggagccccaacaccccactgttaccccgcaacgaag

SEQ ID NO: 308636 - DNA, 60 bp, Artificial
  Synthetic oligonucleotide
acaatcattatctatatcagttgggagttccacatatcagaacaattttgttccagttgt

SEQ ID NO: 308637 - DNA, 58 bp, Artificial
  Synthetic oligonucleotide
acaatccacctgtactcgagacttggaaatcgccgacctatgaaccaccagtggttca

SEQ ID NO: 308638 - DNA, 53 bp, Artificial
  Synthetic oligonucleotide
acaatccagaaacaaattgtctggatgtggaacatgggtttgtgttctcacag

SEQ ID NO: 308639 - DNA, 60 bp, Artificial
  Synthetic oligonucleotide
acaatccagtcaatggcctctgctacccaggagatttcaacgactatgaagaactgaaac

SEQ ID NO: 308640 - DNA, 52 bp, Artificial
  Synthetic oligonucleotide
acaatccccattagccttcggccgaccatcctctgcccctggtttgcttcat

SEQ ID NO: 308641 - DNA, 59 bp, Artificial
  Synthetic oligonucleotide
acaatccccttatgcttgttgcacagaatgccaaacttgtcccagactttgtcctcgaa

SEQ ID NO: 308642 - DNA, 52 bp, Artificial
  Synthetic oligonucleotide
acaatccgaatgatggagcattcaagagaacggggtagatctcgcaacatac

SEQ ID NO: 308643 - DNA, 59 bp, Artificial
  Synthetic oligonucleotide
acaatccgctactagagaccgcggccaaacacatgtccctcgacaagaggaagagactg

SEQ ID NO: 308644 - DNA, 60 bp, Artificial
  Synthetic oligonucleotide
acaatccgctgcctcacaagaggaccttgaagcaatgttcgggaatgtgtcatacctcgc

SEQ ID NO: 308645 - DNA, 55 bp, Artificial
  Synthetic oligonucleotide
acaatccggatagtgtttgtccagggtgttaatatctcgttgcacccaaaccgga

SEQ ID NO: 308646 - DNA, 54 bp, Artificial
  Synthetic oligonucleotide
acaatcctccactgttagagtcttggaaagacccggactacgtccctccagtgg

SEQ ID NO: 308647 - DNA, 60 bp, Artificial
  Synthetic oligonucleotide
acaatcctgctaactggacactctgcgaccatcagtggagattgtggacccgtcgcacca

SEQ ID NO: 308648 - DNA, 52 bp, Artificial
  Synthetic oligonucleotide
acaatccttccgtaaagggaagagaggatcttttacgttcaaattggaaatc

SEQ ID NO: 308649 - DNA, 55 bp, Artificial
  Synthetic oligonucleotide
acaatccttggtcttaggaataacgataaacctggcaagttaactcacattgagg

SEQ ID NO: 308650 - DNA, 50 bp, Artificial
  Synthetic oligonucleotide
acaatcgaaccccgagcgcgcaaccccgctcgccagaaacgactgtggac

SEQ ID NO: 308651 - DNA, 60 bp, Artificial
  Synthetic oligonucleotide
acaatcgaatcgatgctcacatttcctgctcacgtcattgctagaaaacccgaatgctgt

SEQ ID NO: 308652 - DNA, 60 bp, Artificial
  Synthetic oligonucleotide
acaatcgagaccaccacagtcccacaggatgctgtggcaaggagtcagaggcgaggccgt

SEQ ID NO: 308653 - DNA, 58 bp, Artificial
  Synthetic oligonucleotide
acaatcgatatttggtcgatcgtaacccactttcagacaaccgtcatatcgatcgacc

SEQ ID NO: 308654 - DNA, 60 bp, Artificial
  Synthetic oligonucleotide
acaatcgatgtcctacaagctatatatggccacccttcacctgagagacagactttgtag

SEQ ID NO: 308655 - DNA, 54 bp, Artificial
  Synthetic oligonucleotide
acaatcgattggaagtctagatatgagcaattggaaaaacgctttgaatcactg

SEQ ID NO: 308656 - DNA, 58 bp, Artificial
  Synthetic oligonucleotide
acaatcgtacttcccctcaatactaataacaggtcttgaaaaatgcagaatggtgcag

SEQ ID NO: 308657 - DNA, 60 bp, Artificial
  Synthetic oligonucleotide
acaatcgtatgaacagaggcacgacatatcccatgttggtaaggtattatgtgttagtga

SEQ ID NO: 308658 - DNA, 60 bp, Artificial
  Synthetic oligonucleotide
acaatcgttacatgacatcatatgtctcttatcctgcgaagaccagaactggaacgaata

SEQ ID NO: 308659 - DNA, 60 bp, Artificial
  Synthetic oligonucleotide
acaatctaccagtcgaatacagaaagaagtcactattgtattgctgattcacattgtcta

SEQ ID NO: 308660 - DNA, 55 bp, Artificial
  Synthetic oligonucleotide
acaatctatacaacaaagtgaagaggacactgggttccaatgccatggaagatgg

SEQ ID NO: 308661 - DNA, 55 bp, Artificial
  Synthetic oligonucleotide
acaatctcactaacttagtattgagtgtgcaaaagcttcctgatgatgcctggcg

SEQ ID NO: 308662 - DNA, 54 bp, Artificial
  Synthetic oligonucleotide
acaatctccctgacagccgggaagacttggccggtggaagttcgagtgagcctg

SEQ ID NO: 308663 - DNA, 59 bp, Artificial
  Synthetic oligonucleotide
acaatctcgttcttttcctggatcatacatcccttacggatctagaatttcacaatcaa

SEQ ID NO: 308664 - DNA, 60 bp, Artificial
  Synthetic oligonucleotide
acaatctctatgtggactacacaccatgtagcatgattcacgaatgggtttagtctacgc

SEQ ID NO: 308665 - DNA, 60 bp, Artificial
  Synthetic oligonucleotide
acaatctctattttcctggttacatttaactattcctcatgtcacaataatatgcacata

SEQ ID NO: 308666 - DNA, 54 bp, Artificial
  Synthetic oligonucleotide
acaatctgagatctcgacccaatgtaaggccaaccctctccactcagacaaagt

SEQ ID NO: 308667 - DNA, 58 bp, Artificial
  Synthetic oligonucleotide
acaatctgcagtacaaattccaatttactattcttccaatagtgaattagaaagtaga

SEQ ID NO: 308668 - DNA, 59 bp, Artificial
  Synthetic oligonucleotide
acaatctggactcccagttggaggcaatgaaaagaaggccaaattggcaaatgttgtga

SEQ ID NO: 308669 - DNA, 57 bp, Artificial
  Synthetic oligonucleotide
acaatcttgctgacataaatcgtaatacgttcccagcactagcggggtcggttagga

SEQ ID NO: 308670 - DNA, 59 bp, Artificial
  Synthetic oligonucleotide
acaatgaaataagaacggatcaacattggataactaaaactgatataattgactatata

SEQ ID NO: 308671 - DNA, 60 bp, Artificial
  Synthetic oligonucleotide
acaatgaagaatattgcgccaaagagtcgacataccttcgagttggtgaaccagtctcca

SEQ ID NO: 308672 - DNA, 59 bp, Artificial
  Synthetic oligonucleotide
acaatgacaaatctgtccatggagtgcttaatccaacttaccaagctgggttacgacgc

SEQ ID NO: 308673 - DNA, 56 bp, Artificial
  Synthetic oligonucleotide
acaatgacaatttcgataaactatacatctgggggatccatcacccgagtacaaat

SEQ ID NO: 308674 - DNA, 58 bp, Artificial
  Synthetic oligonucleotide
acaatgaccaataggtggtggccatccaggttactgacggtcgagcacttctgtttcc

SEQ ID NO: 308675 - DNA, 51 bp, Artificial
  Synthetic oligonucleotide
acaatgacgacccggcgaacggtggtttggcgatctttcggatggacactg

SEQ ID NO: 308676 - DNA, 57 bp, Artificial
  Synthetic oligonucleotide
acaatgagaccaccactttagtggtgggccatatgtcccgagttagtgcgccacgta

SEQ ID NO: 308677 - DNA, 60 bp, Artificial
  Synthetic oligonucleotide
acaatgagagctggaattctaaggtgagaggtacacttgagatgttagactactcgaggc

SEQ ID NO: 308678 - DNA, 57 bp, Artificial
  Synthetic oligonucleotide
acaatgagagttgtgatgccccaatagtgggaagaacgttcgggtggctacttaagc

SEQ ID NO: 308679 - DNA, 60 bp, Artificial
  Synthetic oligonucleotide
acaatgagcctagtacggcaactgtcaagaatgtgcatcgtgacaggtaccaggtgctga

SEQ ID NO: 308680 - DNA, 55 bp, Artificial
  Synthetic oligonucleotide
acaatgatcccacactctcagaggcccatacaactgatgtctctactaggggagg

SEQ ID NO: 308681 - DNA, 51 bp, Artificial
  Synthetic oligonucleotide
acaatgatgagccgctggtggtagtaacagagcatgctattaccaacttca

SEQ ID NO: 308682 - DNA, 60 bp, Artificial
  Synthetic oligonucleotide
acaatgatgcaagtgcccaaataatatatgcagggaaaatgacagactccatcaaatcat

SEQ ID NO: 308683 - DNA, 58 bp, Artificial
  Synthetic oligonucleotide
acaatgcaatacgactgggtgagaacaaagacgtcatagtcacaagggaaccttatgt

SEQ ID NO: 308684 - DNA, 60 bp, Artificial
  Synthetic oligonucleotide
acaatgcacacagcagatgatataagtttcgacttacgaccgcacttgccttctgacgcc

SEQ ID NO: 308685 - DNA, 60 bp, Artificial
  Synthetic oligonucleotide
acaatgcacctaagcatcagcaagccaggaaaacacatcgcacctgtcatgtgtgagaga

SEQ ID NO: 308686 - DNA, 60 bp, Artificial
  Synthetic oligonucleotide
acaatgcagtagtgatgccggcacatggtccggccaaaaacatggagtatgatgctgttg

SEQ ID NO: 308687 - DNA, 60 bp, Artificial
  Synthetic oligonucleotide
acaatgcatttagtcatgttgttaattgcatagagttggatgttagtggtccttacgaga

SEQ ID NO: 308688 - DNA, 60 bp, Artificial
  Synthetic oligonucleotide
acaatgccaagacgctggattcctagttccgcggccgctcgacgcactccgccaatttga

SEQ ID NO: 308689 - DNA, 60 bp, Artificial
  Synthetic oligonucleotide
acaatgccctgagactagctgagaacaaagacgttctagtgactagagaaccctatatca

SEQ ID NO: 308690 - DNA, 56 bp, Artificial
  Synthetic oligonucleotide
acaatgcgaaaacgaataccagctatagagatgagggagaacggggtggaggggga

SEQ ID NO: 308691 - DNA, 58 bp, Artificial
  Synthetic oligonucleotide
acaatgcgataaagcgctccttctacttgacaaaatcgttctcgaattcttcaataac

SEQ ID NO: 308692 - DNA, 58 bp, Artificial
  Synthetic oligonucleotide
acaatgcggttggtagctatgttgtacactcccctccgcactggtggtggctccggag

SEQ ID NO: 308693 - DNA, 60 bp, Artificial
  Synthetic oligonucleotide
acaatgctagctaatgtaacgtctgttagacaggaatacgcaataccagttggaccagta

SEQ ID NO: 308694 - DNA, 60 bp, Artificial
  Synthetic oligonucleotide
acaatgctgcagactggttcgctgtgctcaggtcgtctattgttatttgtggtttcggtc

SEQ ID NO: 308695 - DNA, 60 bp, Artificial
  Synthetic oligonucleotide
acaatgcttcggcagtggtctggtacaatggaagaccagtcactgaaattgcttcgtggg

SEQ ID NO: 308696 - DNA, 60 bp, Artificial
  Synthetic oligonucleotide
acaatggaacatgtgtagtgataatgaccgatggatcagcaagcagccaagcatatacaa

SEQ ID NO: 308697 - DNA, 59 bp, Artificial
  Synthetic oligonucleotide
acaatggaaggccagtcaccgaaattgcttcatgggcaggaaatatattaagaactcag

SEQ ID NO: 308698 - DNA, 60 bp, Artificial
  Synthetic oligonucleotide
acaatggactccagcactcttgaactgaggagcagatactgggccataaggaccaggagc

SEQ ID NO: 308699 - DNA, 60 bp, Artificial
  Synthetic oligonucleotide
acaatggactccagtactcctgaattgaggagcagatactgggctataagaacaagaagc

SEQ ID NO: 308700 - DNA, 58 bp, Artificial
  Synthetic oligonucleotide
acaatggagactaagtagagaactctctaaaatacctctgattagactaggaataagc

SEQ ID NO: 308701 - DNA, 59 bp, Artificial
  Synthetic oligonucleotide
acaatggagactgacggtcggataggctcggatacaccaccgagcaaccagagttggcc

SEQ ID NO: 308702 - DNA, 55 bp, Artificial
  Synthetic oligonucleotide
acaatggaggcgaatgggtgtatggaaaaccatccagagttggtcattgttacgg

SEQ ID NO: 308703 - DNA, 60 bp, Artificial
  Synthetic oligonucleotide
acaatggatacacctatggcatagaacgatgtgtaatatacgctggtattatgacctaca

SEQ ID NO: 308704 - DNA, 55 bp, Artificial
  Synthetic oligonucleotide
acaatggatcctcttaatgaatccactgttaatgtctatctccctgattcgtacc

SEQ ID NO: 308705 - DNA, 60 bp, Artificial
  Synthetic oligonucleotide
acaatggatgggttggtaatatgaaagttagggtgctgctcgctggtaatgccttcacag

SEQ ID NO: 308706 - DNA, 55 bp, Artificial
  Synthetic oligonucleotide
acaatggattaggcattggttcagccgttggttgcaacccagatgttgatttcac

SEQ ID NO: 308707 - DNA, 56 bp, Artificial
  Synthetic oligonucleotide
acaatggcaaccagacagaataagaaaatgtactataaaaggcagaggaactttag

SEQ ID NO: 308708 - DNA, 51 bp, Artificial
  Synthetic oligonucleotide
acaatggcatattacgaaccagacttatttgcacttaaagttggtctaatg

SEQ ID NO: 308709 - DNA, 60 bp, Artificial
  Synthetic oligonucleotide
acaatggcccataattctgccattccaacctatatctcatatcctaatctgggtaagacg

SEQ ID NO: 308710 - DNA, 59 bp, Artificial
  Synthetic oligonucleotide
acaatggccttagtaaccctatttgcgaatcaatttgttgatcaatcgggtgacgctga

SEQ ID NO: 308711 - DNA, 60 bp, Artificial
  Synthetic oligonucleotide
acaatggctacgcttgcaccacgatctcgcagacctattcgaaccgacggattaaccata

SEQ ID NO: 308712 - DNA, 60 bp, Artificial
  Synthetic oligonucleotide
acaatggctaggatacttacctgtaggtgtagccagatacaatcctaatgaagacacagg

SEQ ID NO: 308713 - DNA, 56 bp, Artificial
  Synthetic oligonucleotide
acaatggctcaaagtgggaaagatcaagtggagggaccccaaagatagctttctcg

SEQ ID NO: 308714 - DNA, 58 bp, Artificial
  Synthetic oligonucleotide
acaatggctttgagacatttgagcgttgtgtaactaaacacctattaatcgttgtctc

SEQ ID NO: 308715 - DNA, 58 bp, Artificial
  Synthetic oligonucleotide
acaatgggaaattcgaattcattgccgaagaatttcaatggactacagtgaagcaaaa

SEQ ID NO: 308716 - DNA, 54 bp, Artificial
  Synthetic oligonucleotide
acaatgggacctgtgtagtagtaatgaccgatggatcagcaagtagccaggcat

SEQ ID NO: 308717 - DNA, 50 bp, Artificial
  Synthetic oligonucleotide
acaatgggatcaagcggcagttttatattcgaattatattgttaatagac

SEQ ID NO: 308718 - DNA, 55 bp, Artificial
  Synthetic oligonucleotide
acaatgggattcagaagatgattggtttccaccacccactcagaagaaaaggcgg

SEQ ID NO: 308719 - DNA, 51 bp, Artificial
  Synthetic oligonucleotide
acaatgggcgttttagattttgacgcgtacaccatctttcctttgagacgg

SEQ ID NO: 308720 - DNA, 60 bp, Artificial
  Synthetic oligonucleotide
acaatggggatgactgcgtgcttatttgcgaaagaacagacaccgactacgtcgtgagta

SEQ ID NO: 308721 - DNA, 60 bp, Artificial
  Synthetic oligonucleotide
acaatggggcagttcattagcttcatgcaagaaataccaacctttttgcaagaagctctg

SEQ ID NO: 308722 - DNA, 55 bp, Artificial
  Synthetic oligonucleotide
acaatggggtattcccacaaatgacaaaatcctacaagaacactaagagggagcc

SEQ ID NO: 308723 - DNA, 60 bp, Artificial
  Synthetic oligonucleotide
acaatgggtccacaagatactggctaaggagtacagagaggtgcgcatgggagatatggt

SEQ ID NO: 308724 - DNA, 52 bp, Artificial
  Synthetic oligonucleotide
acaatgggtccggctgaaccgtactttaaggctcgaaggatacaaggggtac

SEQ ID NO: 308725 - DNA, 55 bp, Artificial
  Synthetic oligonucleotide
acaatgggtctcacacaaccagctagccggaatgcaacttgcacgcccactacaa

SEQ ID NO: 308726 - DNA, 55 bp, Artificial
  Synthetic oligonucleotide
acaatgggttaacacttagatcagtcacaatgcggccaacttcgcaagaacagcg

SEQ ID NO: 308727 - DNA, 60 bp, Artificial
  Synthetic oligonucleotide
acaatggtgttatcacagacacactaaagagctggaaaggcaacattatgcgaacacaag

SEQ ID NO: 308728 - DNA, 53 bp, Artificial
  Synthetic oligonucleotide
acaatgtaatccttcgtccctacttattaactcgtttgaaaatgtaagacctg

SEQ ID NO: 308729 - DNA, 60 bp, Artificial
  Synthetic oligonucleotide
acaatgtacacatgggattaggccagtagtatctactcacctgttgttaaatggcagcct

SEQ ID NO: 308730 - DNA, 55 bp, Artificial
  Synthetic oligonucleotide
acaatgtacgctggttggcaattcagtcccggcgcttcgcaccactatacgctgt

SEQ ID NO: 308731 - DNA, 59 bp, Artificial
  Synthetic oligonucleotide
acaatgtagattgtatagaacgtaaatattatgatcctgttttaacacgatatgaggcc

SEQ ID NO: 308732 - DNA, 53 bp, Artificial
  Synthetic oligonucleotide
acaatgtatcattgcaatgagtctcaatgactagatcacaatgggacattgtc

SEQ ID NO: 308733 - DNA, 60 bp, Artificial
  Synthetic oligonucleotide
acaatgtatgcatggatgaaatagctagagaatcacaacgaaatggaatagcaccacaat

SEQ ID NO: 308734 - DNA, 55 bp, Artificial
  Synthetic oligonucleotide
acaatgtatgtagttgcccgtgtcaggctggtagatggccatttccaccggatca

SEQ ID NO: 308735 - DNA, 59 bp, Artificial
  Synthetic oligonucleotide
acaatgtgagggctttaaggcagtgaaagccaaaggaggcacgaatgacggcaaaatga

SEQ ID NO: 308736 - DNA, 60 bp, Artificial
  Synthetic oligonucleotide
acaatgtgatgggaatgatcgggatattgcccgacatgactccaagcaccgagatgtcaa

SEQ ID NO: 308737 - DNA, 56 bp, Artificial
  Synthetic oligonucleotide
acaatgtgcaagttcgcggtcgggctaggagtagtgagggtaagaaacacaatggt

SEQ ID NO: 308738 - DNA, 57 bp, Artificial
  Synthetic oligonucleotide
acaatgtgcacatcaggctcgggtaccccctcttcggagggtttccataggagacca

SEQ ID NO: 308739 - DNA, 60 bp, Artificial
  Synthetic oligonucleotide
acaatgtggatcctcttactagtctttgaatctatcttgtgggctgcaagtgcttctgat

SEQ ID NO: 308740 - DNA, 55 bp, Artificial
  Synthetic oligonucleotide
acaatgtggctttacgaaaatggctcgtgtcggattggcatgactgcaaaccaaa

SEQ ID NO: 308741 - DNA, 58 bp, Artificial
  Synthetic oligonucleotide
acaatgttgaaaggtcccttgacacaaagctcgtggctggtgccgctcgctttgaacc

SEQ ID NO: 308742 - DNA, 50 bp, Artificial
  Synthetic oligonucleotide
acaatgttgtgggaacagtaaatgctgtcagtcgtaagcttctacagcga

SEQ ID NO: 308743 - DNA, 57 bp, Artificial
  Synthetic oligonucleotide
acaatgttgtttctcttgtagcgccaacattgtgctcgcaacaaaccttttctaggt

SEQ ID NO: 308744 - DNA, 55 bp, Artificial
  Synthetic oligonucleotide
acaatgtttgaagtatacacaccgtgccctcagtgatgttagcttaccaaggcgc

SEQ ID NO: 308745 - DNA, 58 bp, Artificial
  Synthetic oligonucleotide
acaatgttttcgaaaaggacatattgcagaagtttctacatattgttggcaagaaaca

SEQ ID NO: 308746 - DNA, 57 bp, Artificial
  Synthetic oligonucleotide
acaattaaagtgtgtcctttaaatactcagactcttgggataggatgcttaactaca

SEQ ID NO: 308747 - DNA, 56 bp, Artificial
  Synthetic oligonucleotide
acaattaagccccagagtttctcccgagactaacttcataagatcagttgaagttg

SEQ ID NO: 308748 - DNA, 57 bp, Artificial
  Synthetic oligonucleotide
acaattaccccacatacgtcctcaatctttcgagtatgtggcccataaaccaggatg

SEQ ID NO: 308749 - DNA, 60 bp, Artificial
  Synthetic oligonucleotide
acaattaccggatatggcagagcgtgggtgaagaatgtgagcacagagttcgataaacag

SEQ ID NO: 308750 - DNA, 55 bp, Artificial
  Synthetic oligonucleotide
acaattacgaacaatcaaggaacgaagatttatattgcaccgagacagtacctcc

SEQ ID NO: 308751 - DNA, 59 bp, Artificial
  Synthetic oligonucleotide
acaattagatccggacacaccagtctatcattaaccgaacgcagacatccaccaacaag

SEQ ID NO: 308752 - DNA, 54 bp, Artificial
  Synthetic oligonucleotide
acaattagccggtcttgctggagatcgtccggagtcgtcctattctaggaacga

SEQ ID NO: 308753 - DNA, 59 bp, Artificial
  Synthetic oligonucleotide
acaattataaagtgcgcaacgtcgaatctgcaggggatacttggtcctatagcgatcgt

SEQ ID NO: 308754 - DNA, 59 bp, Artificial
  Synthetic oligonucleotide
acaattataagctcaattagtattggaggtggtttacaaccatcagcgatgccggtgga

SEQ ID NO: 308755 - DNA, 52 bp, Artificial
  Synthetic oligonucleotide
acaattatgcaattgaggtatcctatgcctacaagctcggggagaggattaa

SEQ ID NO: 308756 - DNA, 57 bp, Artificial
  Synthetic oligonucleotide
acaattattggagatacatctttgataaaaaacgtttcttatgtaggcgttcacagc

SEQ ID NO: 308757 - DNA, 57 bp, Artificial
  Synthetic oligonucleotide
acaattcaaatcagttatggtgatgctgaagttaaccaaatcgttcgaattgactct

SEQ ID NO: 308758 - DNA, 60 bp, Artificial
  Synthetic oligonucleotide
acaattcaacaacacaaatagacacgatacttgagaagaatgtaactgtcacgcactcag

SEQ ID NO: 308759 - DNA, 52 bp, Artificial
  Synthetic oligonucleotide
acaattcaataattctcatatagtagtgacaagtaccacagaagaaggggaa

SEQ ID NO: 308760 - DNA, 60 bp, Artificial
  Synthetic oligonucleotide
acaattcaatactgaagtgactaagcagatggtgcaagatgtatcaaatgatgttaggga

SEQ ID NO: 308761 - DNA, 54 bp, Artificial
  Synthetic oligonucleotide
acaattcagtgaggtgtggaaaccttcaccacaagtaactgttaggttccccga

SEQ ID NO: 308762 - DNA, 59 bp, Artificial
  Synthetic oligonucleotide
acaattcccttgtgtttatcacagaggtgctcaaatcttttccacacaagctcctcgaa

SEQ ID NO: 308763 - DNA, 56 bp, Artificial
  Synthetic oligonucleotide
acaattcctaataacggtaacaagtcacattgcatacaggctttgaacttgtccgg

SEQ ID NO: 308764 - DNA, 60 bp, Artificial
  Synthetic oligonucleotide
acaattcgaagctgtagatcatgaattttccaatctggaaaggagaattgacaatctaaa

SEQ ID NO: 308765 - DNA, 60 bp, Artificial
  Synthetic oligonucleotide
acaattcgattgatttgggatatcatgattgggagcagtatcacggtaatggtaattgga

SEQ ID NO: 308766 - DNA, 50 bp, Artificial
  Synthetic oligonucleotide
acaattcggaacgggacctacaacaggaggaagtataaagaggaatcaag

SEQ ID NO: 308767 - DNA, 60 bp, Artificial
  Synthetic oligonucleotide
acaattcggcgagcatagtgttccagctattggaacgagattcctgttcaaggattatcg

SEQ ID NO: 308768 - DNA, 60 bp, Artificial
  Synthetic oligonucleotide
acaattcggtccatcagctatgctggagagccttgccacgcttgtcagttcgtggtcaag

SEQ ID NO: 308769 - DNA, 55 bp, Artificial
  Synthetic oligonucleotide
acaattcgttaaccagtggacgacggactgcccacgtgctaattagatattaccc

SEQ ID NO: 308770 - DNA, 60 bp, Artificial
  Synthetic oligonucleotide
acaattcttcctctcctaatgcctacactgatcttgccaactgctttacagttgacgccc

SEQ ID NO: 308771 - DNA, 59 bp, Artificial
  Synthetic oligonucleotide
acaattcttgatttagcaggatttcatcaaaagcaattgtccgttgtttggaggaatga

SEQ ID NO: 308772 - DNA, 55 bp, Artificial
  Synthetic oligonucleotide
acaattcttggctaggatcaatactgcaagggacgcatgtgtagccaaggatatc

SEQ ID NO: 308773 - DNA, 56 bp, Artificial
  Synthetic oligonucleotide
acaattctttcttctctagaggatccctcagggggtatctagggtcttctacatcc

SEQ ID NO: 308774 - DNA, 55 bp, Artificial
  Synthetic oligonucleotide
acaattctttgaggcctatactcaccgaatcccgaaagactgtaaatactattta

SEQ ID NO: 308775 - DNA, 54 bp, Artificial
  Synthetic oligonucleotide
acaattgaagctaggaaaggagcatattgcgtaagcgatccctccttccgccga

SEQ ID NO: 308776 - DNA, 58 bp, Artificial
  Synthetic oligonucleotide
acaattgaagttcaacgtgaggtgaaacaatcataggaaaagtgaatatgtgggaata

SEQ ID NO: 308777 - DNA, 59 bp, Artificial
  Synthetic oligonucleotide
acaattgacccacctgagaagtggtcgttcgcacaagcttgcgcgtcccttgacaagac

SEQ ID NO: 308778 - DNA, 60 bp, Artificial
  Synthetic oligonucleotide
acaattgccaaggaatcccaagaaatctggacgagcggcacctcgtgaggtgagagagca

SEQ ID NO: 308779 - DNA, 60 bp, Artificial
  Synthetic oligonucleotide
acaattgccagtgaaatgcttgagagccgttttagatcatcttcagtctccagtgctggg

SEQ ID NO: 308780 - DNA, 58 bp, Artificial
  Synthetic oligonucleotide
acaattgctaaaacgaaagtatttgagttcacaagaggttttgcagctcagtccgcgc

SEQ ID NO: 308781 - DNA, 59 bp, Artificial
  Synthetic oligonucleotide
acaattggaaaggttccaacaggccttggatgaggatcaacaatgagaccatactagaa

SEQ ID NO: 308782 - DNA, 53 bp, Artificial
  Synthetic oligonucleotide
acaattggcaaaagaactaaccgtaggaggagtgtgttgcacaactctactat

SEQ ID NO: 308783 - DNA, 55 bp, Artificial
  Synthetic oligonucleotide
acaattggcaggtcaccagtaacgaactagttacacccttggaaggttaccagca

SEQ ID NO: 308784 - DNA, 58 bp, Artificial
  Synthetic oligonucleotide
acaattggcttattccaagttgaagttctaaataggctgacctacaacagctctagtc

SEQ ID NO: 308785 - DNA, 58 bp, Artificial
  Synthetic oligonucleotide
acaattgggacacatcctagctccagtgccggtctgaaagatgaccttcttgaaaatt

SEQ ID NO: 308786 - DNA, 51 bp, Artificial
  Synthetic oligonucleotide
acaattgggtggtttacacactgttataggtatgtatagactattgcgtga

SEQ ID NO: 308787 - DNA, 60 bp, Artificial
  Synthetic oligonucleotide
acaattgtactcctgagaatcttcgtttgcttcttgagactgttcgagcgagattgatac

SEQ ID NO: 308788 - DNA, 60 bp, Artificial
  Synthetic oligonucleotide
acaattgtctgtggacttttcccggctcaaattatgcacaggaatatcataagtccagtc

SEQ ID NO: 308789 - DNA, 55 bp, Artificial
  Synthetic oligonucleotide
acaattgtgaacatggtgttactggcttacgtcaagaattttgacccgaatacct

SEQ ID NO: 308790 - DNA, 60 bp, Artificial
  Synthetic oligonucleotide
acaattgtgagaccatagcgaaggacatatttggttcacattcattaagtcagcaccaac

SEQ ID NO: 308791 - DNA, 55 bp, Artificial
  Synthetic oligonucleotide
acaattgtgccaccatagttatcccctatgctaacaccgtgccctttgactcggc

SEQ ID NO: 308792 - DNA, 60 bp, Artificial
  Synthetic oligonucleotide
acaattgttatctcctatgcaattgtactttgttccgagcaaatataatcctgctgacgg

SEQ ID NO: 308793 - DNA, 56 bp, Artificial
  Synthetic oligonucleotide
acaatttaaattggtcaggatacagtggttccttcacattacctgtggagttaaca

SEQ ID NO: 308794 - DNA, 59 bp, Artificial
  Synthetic oligonucleotide
acaatttaatcaaatgatagtgactatgaatggaaatgactttcaaactggaggaattg

SEQ ID NO: 308795 - DNA, 52 bp, Artificial
  Synthetic oligonucleotide
acaatttacgaaacagtcgaaacccgtccaacaacctcgaattgtggcggcc

SEQ ID NO: 308796 - DNA, 60 bp, Artificial
  Synthetic oligonucleotide
acaatttagggcctgcgcataaacatcgtttactgcctgctgaccacctcgtgcagatct

SEQ ID NO: 308797 - DNA, 55 bp, Artificial
  Synthetic oligonucleotide
acaatttctgtgaatgttcagatcctgagatcgtaaaagatgcctatctttgtgg

SEQ ID NO: 308798 - DNA, 60 bp, Artificial
  Synthetic oligonucleotide
acaatttgcaacgcgtatttacagtggcttccattagaagcatgctcattaaatgaggac

SEQ ID NO: 308799 - DNA, 56 bp, Artificial
  Synthetic oligonucleotide
acaatttggaagctaaactgccaggatcttcggacattctcgttccccttggacac

SEQ ID NO: 308800 - DNA, 60 bp, Artificial
  Synthetic oligonucleotide
acaatttggctctgatgtcgaatttgctggccaacagaaaggaggacattacttactgga

SEQ ID NO: 308801 - DNA, 58 bp, Artificial
  Synthetic oligonucleotide
acaatttggttgccatatctagacatcggaaatcatttaggtactttacagttgcgcc

SEQ ID NO: 308802 - DNA, 53 bp, Artificial
  Synthetic oligonucleotide
acaatttgtggatcccctcacaggagcacagttagaggaatctgtgtatgccg

SEQ ID NO: 308803 - DNA, 59 bp, Artificial
  Synthetic oligonucleotide
acaattttaaatactgcagttcctataggatcttgcgttagtaaatgtcacactgacag

SEQ ID NO: 308804 - DNA, 59 bp, Artificial
  Synthetic oligonucleotide
acaattttaagcgaacgtgcccctgcggtgtatccctcaccaagcctctctgtgtatca

SEQ ID NO: 308805 - DNA, 58 bp, Artificial
  Synthetic oligonucleotide
acaattttcatggtcgcacactcgccattaaggattgcaacaccacgtcggtggtgtt

SEQ ID NO: 308806 - DNA, 54 bp, Artificial
  Synthetic oligonucleotide
acaattttcctgggaatggagtcagcctccccctggatgggtcgcatgcgtccg

SEQ ID NO: 308807 - DNA, 58 bp, Artificial
  Synthetic oligonucleotide
acaattttccttaagcacagggaaactcttacaacagctggacccagtgacatgtatg

SEQ ID NO: 308808 - DNA, 60 bp, Artificial
  Synthetic oligonucleotide
acaattttgctatagaatcagccacggagaccatgcgcttgttatttagtgggtacgcaa

SEQ ID NO: 308809 - DNA, 56 bp, Artificial
  Synthetic oligonucleotide
acaattttgtgtagaatgtactggggtccagccattagttatttccatctaaatcc

SEQ ID NO: 308810 - DNA, 54 bp, Artificial
  Synthetic oligonucleotide
acaatttttgcaacctaacccctgctttcaacaagaagaccttcgaccacacac

SEQ ID NO: 308811 - DNA, 55 bp, Artificial
  Synthetic oligonucleotide
acacaaaacacaatgacactcagtacaaaggaaacacctacgtcgacgaaattaa

SEQ ID NO: 308812 - DNA, 59 bp, Artificial
  Synthetic oligonucleotide
acacaaaaggactcccgtattgcgaaatatctactactcatcaaactagcaatgctttc

SEQ ID NO: 308813 - DNA, 60 bp, Artificial
  Synthetic oligonucleotide
acacaaaagtagatctctggtcttataatgcggaactccttgttgccctggagaatcagc

SEQ ID NO: 308814 - DNA, 59 bp, Artificial
  Synthetic oligonucleotide
acacaaaatgtagttagagataccattagatcaggaaggttagatataagaaacgcatg

SEQ ID NO: 308815 - DNA, 56 bp, Artificial
  Synthetic oligonucleotide
acacaaacagatatcaaataggttcaacatggtcgggaaatttcccaccagattta

SEQ ID NO: 308816 - DNA, 55 bp, Artificial
  Synthetic oligonucleotide
acacaaacccggatttgctctaaggataggacacacggagaaaggtgttgaggaa

SEQ ID NO: 308817 - DNA, 60 bp, Artificial
  Synthetic oligonucleotide
acacaaacgattgatagactatcatccaactcttacacatacgattacgatgctaccctt

SEQ ID NO: 308818 - DNA, 60 bp, Artificial
  Synthetic oligonucleotide
acacaaacttctgcagtgacatggctttcaacaacttgatagatattaaccaaacttgat

SEQ ID NO: 308819 - DNA, 51 bp, Artificial
  Synthetic oligonucleotide
acacaaagaattcgtgatcatagaatgaccgctaatcattataagactttg

SEQ ID NO: 308820 - DNA, 57 bp, Artificial
  Synthetic oligonucleotide
acacaaagaccccccgtgatttctcaaacaacaagatgactagctacctattcgaca

SEQ ID NO: 308821 - DNA, 56 bp, Artificial
  Synthetic oligonucleotide
acacaaagaccccccgtgatttctcaaacatcaaacatgactagctaccttttcga

SEQ ID NO: 308822 - DNA, 60 bp, Artificial
  Synthetic oligonucleotide
acacaaagaccccctagtgcttatcaagtatatcatggattactttcctgtgatatctgt

SEQ ID NO: 308823 - DNA, 60 bp, Artificial
  Synthetic oligonucleotide
acacaaagacctcccgtattgctaaaccagagctaataatagacttctagacagccatgc

SEQ ID NO: 308824 - DNA, 59 bp, Artificial
  Synthetic oligonucleotide
acacaaagacggcgcatattttgatgaagaacttacagataatctatcttatagggttg

SEQ ID NO: 308825 - DNA, 56 bp, Artificial
  Synthetic oligonucleotide
acacaaagacggtgcattaaatgtatgttttactaacaattctaatctcggttctg

SEQ ID NO: 308826 - DNA, 60 bp, Artificial
  Synthetic oligonucleotide
acacaaagatagatctctggtcttacaatgcggagcttcttgttgccctagagaatcagc

SEQ ID NO: 308827 - DNA, 59 bp, Artificial
  Synthetic oligonucleotide
acacaaagctcctcaaggattgttaactagtgaattactacaccaagatgtcttatgaa

SEQ ID NO: 308828 - DNA, 54 bp, Artificial
  Synthetic oligonucleotide
acacaaagggttcaatcttgttgttagaaccgactagaccattggccgaaaatg

SEQ ID NO: 308829 - DNA, 57 bp, Artificial
  Synthetic oligonucleotide
acacaaaggtccctagttaatctgagtgagctaagtttgaaatggacgagtaccaga

SEQ ID NO: 308830 - DNA, 59 bp, Artificial
  Synthetic oligonucleotide
acacaaagtctagtctcgtcaatgcgcggaacgctagacaaattgaagttgattaaatc

SEQ ID NO: 308831 - DNA, 60 bp, Artificial
  Synthetic oligonucleotide
acacaaagtgcaggtcaacacccgacgatagatgaattcagaacatacatcgctgacaaa

SEQ ID NO: 308832 - DNA, 55 bp, Artificial
  Synthetic oligonucleotide
acacaaagtgttttggagacataatcctcttgcaaccgatagcggttggatttgg

SEQ ID NO: 308833 - DNA, 50 bp, Artificial
  Synthetic oligonucleotide
acacaaataaataacttatatgccgtaggatggcctaactcacaaaacta

SEQ ID NO: 308834 - DNA, 56 bp, Artificial
  Synthetic oligonucleotide
acacaaataattatgtggtcccaatgacctagcccacattgtcttacccgtacgac

SEQ ID NO: 308835 - DNA, 58 bp, Artificial
  Synthetic oligonucleotide
acacaaataattgtgtggacccagagacctggcccacatagtcttcccagtacgacta

SEQ ID NO: 308836 - DNA, 56 bp, Artificial
  Synthetic oligonucleotide
acacaaataccgtgatgttcttcttagtccgtgacagaaggccttttggtactcca

SEQ ID NO: 308837 - DNA, 54 bp, Artificial
  Synthetic oligonucleotide
acacaaataggtacactctttcctccagtttgaaaacaaacagtacgataacga

SEQ ID NO: 308838 - DNA, 60 bp, Artificial
  Synthetic oligonucleotide
acacaaatccagacaaggagatcattcgagctgaagaaattatgggaacaaacccgatca

SEQ ID NO: 308839 - DNA, 59 bp, Artificial
  Synthetic oligonucleotide
acacaaatgaaggtgattacgacacaataggtgttggatttgtaacatggaagattagc

SEQ ID NO: 308840 - DNA, 52 bp, Artificial
  Synthetic oligonucleotide
acacaacaaggacgttaaccttaaattcgcctcacgtaatctcagtgacggc

SEQ ID NO: 308841 - DNA, 59 bp, Artificial
  Synthetic oligonucleotide
acacaacaatttgaacacgttgtacagctccgtagagtgttgactacagctacgataac

SEQ ID NO: 308842 - DNA, 55 bp, Artificial
  Synthetic oligonucleotide
acacaacaggggaagcatatgctccttcgccgtaccgcacaggtagtggtgcccc

SEQ ID NO: 308843 - DNA, 55 bp, Artificial
  Synthetic oligonucleotide
acacaacatacggacgacctcgtacgcccacctaatctctagggtagtgagggag

SEQ ID NO: 308844 - DNA, 60 bp, Artificial
  Synthetic oligonucleotide
acacaacccctccactgtcacatccacaacaccaaccagcggatctgaaggctcagggga

SEQ ID NO: 308845 - DNA, 58 bp, Artificial
  Synthetic oligonucleotide
acacaacctaccacttcaactatatctagtgtatcctctcgttatagtaatactacta

SEQ ID NO: 308846 - DNA, 51 bp, Artificial
  Synthetic oligonucleotide
acacaacctactgaagccgcacgactgggctgaggggcttacgccttacga

SEQ ID NO: 308847 - DNA, 60 bp, Artificial
  Synthetic oligonucleotide
acacaacctggaatgtgacttacactggaacaagcagagcatgttcaggttcattctaca

SEQ ID NO: 308848 - DNA, 59 bp, Artificial
  Synthetic oligonucleotide
acacaacctttgatggagccagtcactggcacggtgtcatctttgccacagcaactatc

SEQ ID NO: 308849 - DNA, 59 bp, Artificial
  Synthetic oligonucleotide
acacaacgacataaaactcgaaaatgtcttatatttcgaagcacttgatcgtgtgtatg

SEQ ID NO: 308850 - DNA, 58 bp, Artificial
  Synthetic oligonucleotide
acacaacgcacatttcgcagacggccatgccacaaggggtggatgatctgataaccga

SEQ ID NO: 308851 - DNA, 56 bp, Artificial
  Synthetic oligonucleotide
acacaacgggcattggggtgcaactcccccgtccatcctggacgtcaccaggacca

SEQ ID NO: 308852 - DNA, 54 bp, Artificial
  Synthetic oligonucleotide
acacaacgttggggttactcccttaacttcatgggatatgtaattggcagttgg

SEQ ID NO: 308853 - DNA, 58 bp, Artificial
  Synthetic oligonucleotide
acacaactacgctgctcctccctccaccaaggtggaatacccagccgccaagaggcta

SEQ ID NO: 308854 - DNA, 56 bp, Artificial
  Synthetic oligonucleotide
acacaactcagatgacccagatcatagctagccacattgacacagtcatccgatct

SEQ ID NO: 308855 - DNA, 60 bp, Artificial
  Synthetic oligonucleotide
acacaactgaacgataccgataaagtcgctaggtcatacgcactcgatgctaaatatgct

SEQ ID NO: 308856 - DNA, 60 bp, Artificial
  Synthetic oligonucleotide
acacaactgtcagagaccatagacacaatttgtgatcaatgtattgctaatggggttagc

SEQ ID NO: 308857 - DNA, 60 bp, Artificial
  Synthetic oligonucleotide
acacaactgttgcaatcgccattcttgaaattgctgtttcaattcttaccatttatagta

SEQ ID NO: 308858 - DNA, 51 bp, Artificial
  Synthetic oligonucleotide
acacaactgtttaacagtacttggcatggtaatggtacttggaatggtact

SEQ ID NO: 308859 - DNA, 58 bp, Artificial
  Synthetic oligonucleotide
acacaacttggcgacaacgccattagcggtggttccaacgagggctccactgacacta

SEQ ID NO: 308860 - DNA, 54 bp, Artificial
  Synthetic oligonucleotide
acacaacttggtgacaacgccatcagtggaggctctaacgagggttccacggac

SEQ ID NO: 308861 - DNA, 57 bp, Artificial
  Synthetic oligonucleotide
acacaacttggtgacaacgctataagcggaggctccaacgaagggtccacggataca

SEQ ID NO: 308862 - DNA, 56 bp, Artificial
  Synthetic oligonucleotide
acacaagaaaagaatgatctgtatgggacccagtcactttctatttcggtagggag

SEQ ID NO: 308863 - DNA, 53 bp, Artificial
  Synthetic oligonucleotide
acacaagacttaaaaggttattatgtatcatatccagaatctagagatgattt

SEQ ID NO: 308864 - DNA, 60 bp, Artificial
  Synthetic oligonucleotide
acacaagagagctccccagagcagaaggccacgcccattggcagggcccagacatggaac

SEQ ID NO: 308865 - DNA, 60 bp, Artificial
  Synthetic oligonucleotide
acacaagagccagctagtgtggatggcatgtcattccgcagcatttgaagatctgagagt

SEQ ID NO: 308866 - DNA, 57 bp, Artificial
  Synthetic oligonucleotide
acacaagagggctttgcccacctcagtaacatttgaactcctatttgatgggaccag

SEQ ID NO: 308867 - DNA, 58 bp, Artificial
  Synthetic oligonucleotide
acacaagagtcagaatgtgtttgtataaacggttcctgttttactataatgactgatg

SEQ ID NO: 308868 - DNA, 60 bp, Artificial
  Synthetic oligonucleotide
acacaagatctaagcgacacgcgctccatagacaatctatgcggagaacttgtgaagaga

SEQ ID NO: 308869 - DNA, 57 bp, Artificial
  Synthetic oligonucleotide
acacaagcccagtgtgactccgcccgcgccttctggaacccagcttttgctaatggg

SEQ ID NO: 308870 - DNA, 60 bp, Artificial
  Synthetic oligonucleotide
acacaagcgtcggatgcaaagaaatcaagggtcgcatccaatatatatgggatcaatgga

SEQ ID NO: 308871 - DNA, 55 bp, Artificial
  Synthetic oligonucleotide
acacaagctgggaccgatatatgtcagaacctaaacggtgctttaagaaaggcgc

SEQ ID NO: 308872 - DNA, 60 bp, Artificial
  Synthetic oligonucleotide
acacaaggaacagagaaattgacaatcacttattcgtcgtcaatgatgtgggagatcaat

SEQ ID NO: 308873 - DNA, 57 bp, Artificial
  Synthetic oligonucleotide
acacaaggaccgacaccacaacaagtgtaacaacagaagatataaatagggccttca

SEQ ID NO: 308874 - DNA, 60 bp, Artificial
  Synthetic oligonucleotide
acacaaggctgattggcgctcccgcactcgtgagtgggccattgccgaacttggcggggc

SEQ ID NO: 308875 - DNA, 60 bp, Artificial
  Synthetic oligonucleotide
acacaagggctaatgggtgccctactgctttggatgggcgtcaacgcacgagaccgatca

SEQ ID NO: 308876 - DNA, 55 bp, Artificial
  Synthetic oligonucleotide
acacaagggtaaatatctgagtccccgataggtaaatgtgtccccaatatatcgg

SEQ ID NO: 308877 - DNA, 56 bp, Artificial
  Synthetic oligonucleotide
acacaaggtagagacgacggagccgcagaccaaatgggcaagcacaacctaccgtt

SEQ ID NO: 308878 - DNA, 60 bp, Artificial
  Synthetic oligonucleotide
acacaagtagcatggtgtctagttctagcaacatcagtcacgttgcaaattctagtttct

SEQ ID NO: 308879 - DNA, 55 bp, Artificial
  Synthetic oligonucleotide
acacaagtatatgttactagacagggcattcaaaaggccacgcgtgatagactcg

SEQ ID NO: 308880 - DNA, 55 bp, Artificial
  Synthetic oligonucleotide
acacaagtcggttccgtgatagaggaactcgacacctcatactgtataggaaccg

SEQ ID NO: 308881 - DNA, 58 bp, Artificial
  Synthetic oligonucleotide
acacaagtgtaaggactaccaagtctgtgactccgatggattgcttcttcggtccgtc

SEQ ID NO: 308882 - DNA, 51 bp, Artificial
  Synthetic oligonucleotide
acacaataacatccgcggcgaggccaaacgagattacatccgagataccat

SEQ ID NO: 308883 - DNA, 60 bp, Artificial
  Synthetic oligonucleotide
acacaatactcttgtggaggtgagagtagaccactcagagtgaagggtttgctaatatca

SEQ ID NO: 308884 - DNA, 60 bp, Artificial
  Synthetic oligonucleotide
acacaatagaagtgttcagattaaatggcctcacggccaatgaatctgggaggctcatag

SEQ ID NO: 308885 - DNA, 60 bp, Artificial
  Synthetic oligonucleotide
acacaatagtagactatgttaatcagattgtgcaagtcatgtccaagcgatcacgttccc

SEQ ID NO: 308886 - DNA, 60 bp, Artificial
  Synthetic oligonucleotide
acacaatattatgatgatgaaccaaatggtgctataagatttacaatgggttaccaacat

SEQ ID NO: 308887 - DNA, 56 bp, Artificial
  Synthetic oligonucleotide
acacaatcaggaacagtcggttccggctttactacctgggcagattaacgttatga

SEQ ID NO: 308888 - DNA, 55 bp, Artificial
  Synthetic oligonucleotide
acacaatcgccagatgccagtgcacggcaggtgtgtacttttgctcatccaggaa

SEQ ID NO: 308889 - DNA, 60 bp, Artificial
  Synthetic oligonucleotide
acacaatctggaatgtgtcttacagtgggacaagcaaagcatgttcagattcattctaca

SEQ ID NO: 308890 - DNA, 60 bp, Artificial
  Synthetic oligonucleotide
acacaatctttaggtgctgattcctgcaagactgtaagagcctctgacgtactgcctgcg

SEQ ID NO: 308891 - DNA, 56 bp, Artificial
  Synthetic oligonucleotide
acacaatggaggtctaatagcaccaagtcgagttagcaaattaactggaaggggat

SEQ ID NO: 308892 - DNA, 50 bp, Artificial
  Synthetic oligonucleotide
acacaatgggtatcgataacgagactgcacgagttatcgatgcgtcggat

SEQ ID NO: 308893 - DNA, 56 bp, Artificial
  Synthetic oligonucleotide
acacaattactggtcccttttggtcataccagtggttccactagaacacgcaacag

SEQ ID NO: 308894 - DNA, 56 bp, Artificial
  Synthetic oligonucleotide
acacaattatatctaggagctattggttctgttagttcaggtttttggtggcaaac

SEQ ID NO: 308895 - DNA, 57 bp, Artificial
  Synthetic oligonucleotide
acacaattgacatggcagactcggagatgctcaatctttatgagagagtgaggaaac

SEQ ID NO: 308896 - DNA, 60 bp, Artificial
  Synthetic oligonucleotide
acacaatttcgttcgtgagcagtcaaagaattcgaactggatgtatcaagcccttagaga

SEQ ID NO: 308897 - DNA, 57 bp, Artificial
  Synthetic oligonucleotide
acacacaaacagccacatcgtccgctttgcttgagaccgtccgaggtaacaatacct

SEQ ID NO: 308898 - DNA, 56 bp, Artificial
  Synthetic oligonucleotide
acacacaacgcgttgtcggtattataccgttgtgttagacccgatggtaagtgtga

SEQ ID NO: 308899 - DNA, 50 bp, Artificial
  Synthetic oligonucleotide
acacacaagaaacatttaagcttgaggacctaccagatgacatgctgagc

SEQ ID NO: 308900 - DNA, 55 bp, Artificial
  Synthetic oligonucleotide
acacacaatgaacagtactttgttggaggattggaactttgggttaaccttgcca

SEQ ID NO: 308901 - DNA, 58 bp, Artificial
  Synthetic oligonucleotide
acacacaatggcatcaatcaggcaccgattataaaatggaaggctataccacaccttg

SEQ ID NO: 308902 - DNA, 59 bp, Artificial
  Synthetic oligonucleotide
acacacacattatctaggcaacttcaaaaatcttgtgaattgaacggagtatatacaaa

SEQ ID NO: 308903 - DNA, 60 bp, Artificial
  Synthetic oligonucleotide
acacacaccacgtgtatcgtaacaagacctattgtgtgcttggtgggatgccctcaggct

SEQ ID NO: 308904 - DNA, 60 bp, Artificial
  Synthetic oligonucleotide
acacacacctttccggcgagaattcgactctcatcgctaactcaatgcacaacatggcta

SEQ ID NO: 308905 - DNA, 59 bp, Artificial
  Synthetic oligonucleotide
acacacactatccagacaactacaaaaatcttgtaagttgaatggcgtgtacaccaatc

SEQ ID NO: 308906 - DNA, 60 bp, Artificial
  Synthetic oligonucleotide
acacacagacagctaccacatcagccttgctggacactgtccgaggaaataactccttgg

SEQ ID NO: 308907 - DNA, 60 bp, Artificial
  Synthetic oligonucleotide
acacacaggcacggatctatagtgtgagtggctcacgtgacgagtgttggtgtgtatatc

SEQ ID NO: 308908 - DNA, 56 bp, Artificial
  Synthetic oligonucleotide
acacacataagacattaaacaccaatctgactgcacgttacaaacataaatgtgat

SEQ ID NO: 308909 - DNA, 57 bp, Artificial
  Synthetic oligonucleotide
acacacatagtgcagcctcgggctaaagaccgagtctcaaacgacccaacttaaaca

SEQ ID NO: 308910 - DNA, 55 bp, Artificial
  Synthetic oligonucleotide
acacacatgctactcaggactagatgtcactgagtgtggcgaggtagcagcactg

SEQ ID NO: 308911 - DNA, 60 bp, Artificial
  Synthetic oligonucleotide
acacacatttcgtcaccgagaagaatacatatgcgagaatgttgcgtatctcgagatttc

SEQ ID NO: 308912 - DNA, 60 bp, Artificial
  Synthetic oligonucleotide
acacaccacctcctgggtcacaggccattggtggggattgcgcctatacgtctctggaca

SEQ ID NO: 308913 - DNA, 55 bp, Artificial
  Synthetic oligonucleotide
acacaccactcatgtcccctacaatcccaccagttccggattagtggaaagaact

SEQ ID NO: 308914 - DNA, 60 bp, Artificial
  Synthetic oligonucleotide
acacaccagggccagggatcagatatccactgacctttggatggtgcttcaagctagtac

SEQ ID NO: 308915 - DNA, 55 bp, Artificial
  Synthetic oligonucleotide
acacaccagttagttatggtttggtatctcaccaaccagtcaatttgtgttacgt

SEQ ID NO: 308916 - DNA, 58 bp, Artificial
  Synthetic oligonucleotide
acacaccatgcttgaaaacttgtacacagagattgtatatactccaatcgctacaccc

SEQ ID NO: 308917 - DNA, 50 bp, Artificial
  Synthetic oligonucleotide
acacacccagaaaaaacgacagatctagcagtagctattgccggaatcct

SEQ ID NO: 308918 - DNA, 60 bp, Artificial
  Synthetic oligonucleotide
acacacccagaaacaacgatggatctagcaatagcaattgtcggaatcccaacaatgaga

SEQ ID NO: 308919 - DNA, 60 bp, Artificial
  Synthetic oligonucleotide
acacacccagaaacgacgacagatctagcaatagtaattgcaggaatcctaacaatgaga

SEQ ID NO: 308920 - DNA, 54 bp, Artificial
  Synthetic oligonucleotide
acacacccagtggacccgttcccatcccccgctcaactactcaggtagtggttc

SEQ ID NO: 308921 - DNA, 60 bp, Artificial
  Synthetic oligonucleotide
acacacccgcctgctcagacaatgtgctctacacagccctatttagacccagcccgagtg

SEQ ID NO: 308922 - DNA, 60 bp, Artificial
  Synthetic oligonucleotide
acacaccgagaaacgatgatagctctagcaacagcaattgcaaggaccctaataatgaga

SEQ ID NO: 308923 - DNA, 54 bp, Artificial
  Synthetic oligonucleotide
acacaccgaggttaagggccaattcgggcttgggactggccgggctgtgggcaa

SEQ ID NO: 308924 - DNA, 58 bp, Artificial
  Synthetic oligonucleotide
acacaccggccgatttatctgaatattctgacgtgttagacgtatatcgtaagtcgta

SEQ ID NO: 308925 - DNA, 53 bp, Artificial
  Synthetic oligonucleotide
acacaccggtatcgtccggggggtcagtgatgttactagggggagtggaatca

SEQ ID NO: 308926 - DNA, 54 bp, Artificial
  Synthetic oligonucleotide
acacaccggtttctttcacaatactatccctgttccgaaataagctgtcagtac

SEQ ID NO: 308927 - DNA, 57 bp, Artificial
  Synthetic oligonucleotide
acacaccgtgggtgggtagaagatccaaagctcctcccagtcctagctcaattgacc

SEQ ID NO: 308928 - DNA, 55 bp, Artificial
  Synthetic oligonucleotide
acacacctccagacaactatcccttaacaactatctactgccccctgattccttc

SEQ ID NO: 308929 - DNA, 55 bp, Artificial
  Synthetic oligonucleotide
acacacctcgagtccgtgaccaccggattatacgtcgcccaccacacggcgcctt

SEQ ID NO: 308930 - DNA, 55 bp, Artificial
  Synthetic oligonucleotide
acacaccttaaccctagcgggggtcgctagggtgaaatcacattatgtgatgggg

SEQ ID NO: 308931 - DNA, 56 bp, Artificial
  Synthetic oligonucleotide
acacacctttggcagaccagtttcgtgaactgttagttggggttgattatgtgtgg

SEQ ID NO: 308932 - DNA, 56 bp, Artificial
  Synthetic oligonucleotide
acacacgaatcatgatgaatggaggtagactaaaaagatcacacataaggaggtat

SEQ ID NO: 308933 - DNA, 60 bp, Artificial
  Synthetic oligonucleotide
acacacgacatgttcatagttcgtggaaattgtgaaggtcaagtatttgatgctagatct

SEQ ID NO: 308934 - DNA, 58 bp, Artificial
  Synthetic oligonucleotide
acacacgactgaagatgttagtaggaacatgcatagcctccttggcgtgcgaggcatg

SEQ ID NO: 308935 - DNA, 55 bp, Artificial
  Synthetic oligonucleotide
acacacggccctcgcccgaactgcccgtgaaacctgttgtggacgcgcaacaagt

SEQ ID NO: 308936 - DNA, 60 bp, Artificial
  Synthetic oligonucleotide
acacacgtcaccatgaacctctctcccgaacaactgacagagctcagctccttcgtcact

SEQ ID NO: 308937 - DNA, 52 bp, Artificial
  Synthetic oligonucleotide
acacacgttctagtgggtaaccatgacatgcacttgcgtgaatgcattgtac

SEQ ID NO: 308938 - DNA, 60 bp, Artificial
  Synthetic oligonucleotide
acacactaatggttgtgatctctatttactatgcgtgcatgaaattcggttggaactgcg

SEQ ID NO: 308939 - DNA, 57 bp, Artificial
  Synthetic oligonucleotide
acacactcattggggtgaactcactgctgggattcaattggggtggcctggtgacac

SEQ ID NO: 308940 - DNA, 54 bp, Artificial
  Synthetic oligonucleotide
acacactccgcagggggcaatggagttggatactgctcttgcgtttctaggtcc

SEQ ID NO: 308941 - DNA, 60 bp, Artificial
  Synthetic oligonucleotide
acacactcgagtataggtgggaaaaattgtgtgccctccaactgaactgtgcccatcatc

SEQ ID NO: 308942 - DNA, 53 bp, Artificial
  Synthetic oligonucleotide
acacactcttacacacacctaggcagataagctgcccaggtgggactgtgggt

SEQ ID NO: 308943 - DNA, 60 bp, Artificial
  Synthetic oligonucleotide
acacactgagtacaggacgcaccactaccaacagtgcgtcgaccattccatgaagttaca

SEQ ID NO: 308944 - DNA, 50 bp, Artificial
  Synthetic oligonucleotide
acacactgcatggaacggcgatcacgaccctcagcgctgcactcgtacgc

SEQ ID NO: 308945 - DNA, 60 bp, Artificial
  Synthetic oligonucleotide
acacactgctcgctcacagcacaaagctacgattcgaggtgacttgtaatcgcaatgcac

SEQ ID NO: 308946 - DNA, 60 bp, Artificial
  Synthetic oligonucleotide
acacactgctgcagctgatagagcacgcctcgaactagccgatgctgatcgtagacgtaa

SEQ ID NO: 308947 - DNA, 60 bp, Artificial
  Synthetic oligonucleotide
acacactggtgggagcactcctgcgtgcatccacgtactacttctctgacttagagatag

SEQ ID NO: 308948 - DNA, 55 bp, Artificial
  Synthetic oligonucleotide
acacactgtctaagctcttgacagagcgacactacaaagtctcaaaggtggatgg

SEQ ID NO: 308949 - DNA, 57 bp, Artificial
  Synthetic oligonucleotide
acacactgttagagaacggtgttccggttacaagttctgtagatctggttgagacca

SEQ ID NO: 308950 - DNA, 60 bp, Artificial
  Synthetic oligonucleotide
acacactgttcgggctcggctgcagtgccggttgtggcgagcgtgtctagtcaattctat

SEQ ID NO: 308951 - DNA, 60 bp, Artificial
  Synthetic oligonucleotide
acacacttactagcttgttttcactgttgcctggtgtagcccactcattggcagtagaga

SEQ ID NO: 308952 - DNA, 54 bp, Artificial
  Synthetic oligonucleotide
acacactttacagggataacctctttaaggagtaccttaccatcaaggagcgac

SEQ ID NO: 308953 - DNA, 60 bp, Artificial
  Synthetic oligonucleotide
acacagaaaaagctgtcctgaaggtcaatgtccttactgcatgacaatgactgagtcaac

SEQ ID NO: 308954 - DNA, 58 bp, Artificial
  Synthetic oligonucleotide
acacagaaactggagcaccccaactcaatccaatcgacggaccattgcccgaggataa

SEQ ID NO: 308955 - DNA, 55 bp, Artificial
  Synthetic oligonucleotide
acacagaacggaaattattcacagcatggtccattgttgtctactccgaaactgt

SEQ ID NO: 308956 - DNA, 60 bp, Artificial
  Synthetic oligonucleotide
acacagaactccgccatatcaaccttcatcagctatccgagtcttggtaagatagaaccc

SEQ ID NO: 308957 - DNA, 55 bp, Artificial
  Synthetic oligonucleotide
acacagaagttgctgactctgggactttccgctggggactttccggggaggcgtg

SEQ ID NO: 308958 - DNA, 60 bp, Artificial
  Synthetic oligonucleotide
acacagaatttttgattagaggtgcagttggctcaggaaaatcaacaggtttgccacatc

SEQ ID NO: 308959 - DNA, 55 bp, Artificial
  Synthetic oligonucleotide
acacagaccaaattgaacgccctcttatggtgggctctgtttggaacagaagagc

SEQ ID NO: 308960 - DNA, 58 bp, Artificial
  Synthetic oligonucleotide
acacagactccgacatagacctagaagagttcgaccggcttgactcgatttggaagtc

SEQ ID NO: 308961 - DNA, 58 bp, Artificial
  Synthetic oligonucleotide
acacagactctttctctgtagtctcggaagaatcaacccaactttctcaactctccag

SEQ ID NO: 308962 - DNA, 60 bp, Artificial
  Synthetic oligonucleotide
acacagagacaaaacccattatacgatacatggaacgttaatggcagaggcgatgacgct

SEQ ID NO: 308963 - DNA, 60 bp, Artificial
  Synthetic oligonucleotide
acacagaggatacaccatataggcctaggcctaggcctcgcccacagcctccaacatatg

SEQ ID NO: 308964 - DNA, 51 bp, Artificial
  Synthetic oligonucleotide
acacagaggtcaaactgggtgcaactccccccccttccgtgggtaacggaa

SEQ ID NO: 308965 - DNA, 52 bp, Artificial
  Synthetic oligonucleotide
acacagaggtccatttgggtgcgactcccccccctcccgtgggtcaacggga

SEQ ID NO: 308966 - DNA, 60 bp, Artificial
  Synthetic oligonucleotide
acacagataattgtgtggacccaatgatcgagcccacatcgtcttccccgtccgactatc

SEQ ID NO: 308967 - DNA, 59 bp, Artificial
  Synthetic oligonucleotide
acacagattacgagtggagaggagaagaagttgccacccctcttcttaatcactccaca

SEQ ID NO: 308968 - DNA, 60 bp, Artificial
  Synthetic oligonucleotide
acacagattttgcatatagtttgggcatatgcattttaggcaggcagcttttcctcgatt

SEQ ID NO: 308969 - DNA, 59 bp, Artificial
  Synthetic oligonucleotide
acacagcaagcggcagctggacagggggtcagtcaaaattaccccatagtacagaatct

SEQ ID NO: 308970 - DNA, 59 bp, Artificial
  Synthetic oligonucleotide
acacagcaagtcccaaccctatcagcaagtgaaacaggtgcaaccctgcaaacagtacc

SEQ ID NO: 308971 - DNA, 55 bp, Artificial
  Synthetic oligonucleotide
acacagcacaggcgtttgtcccacaccgggaccgggttccaacaatcgttgtgaa

SEQ ID NO: 308972 - DNA, 60 bp, Artificial
  Synthetic oligonucleotide
acacagcactcatcagaatatctacatcatcgagttttgataattcattgtcaccattaa

SEQ ID NO: 308973 - DNA, 55 bp, Artificial
  Synthetic oligonucleotide
acacagcagacagaagcggctgctggaaaggtcagtcaaaattatcctatagtgc

SEQ ID NO: 308974 - DNA, 60 bp, Artificial
  Synthetic oligonucleotide
acacagcaggcacaagcggctgacgaaaaggtcaaggtcagtcaaaattatcctatagtg

SEQ ID NO: 308975 - DNA, 53 bp, Artificial
  Synthetic oligonucleotide
acacagcctttatccctcttcacgacgaggttttcgtcgatgtatttttagtt

SEQ ID NO: 308976 - DNA, 55 bp, Artificial
  Synthetic oligonucleotide
acacagcgcgcctgcaccttttgggccgttaacgcctactcctcgggcgggtatg

SEQ ID NO: 308977 - DNA, 57 bp, Artificial
  Synthetic oligonucleotide
acacagcgtgcgctgttatctctgataccctgcactttatgtcgacccaccaggtgt

SEQ ID NO: 308978 - DNA, 60 bp, Artificial
  Synthetic oligonucleotide
acacagctaccacagtgttgctggatgaacagggtgtggggcctctatgtaaagctgaca

SEQ ID NO: 308979 - DNA, 58 bp, Artificial
  Synthetic oligonucleotide
acacaggacaaccaactgtctcattgcgaagtcaaattccgtgatgggtccgtctttc

SEQ ID NO: 308980 - DNA, 60 bp, Artificial
  Synthetic oligonucleotide
acacaggagggatcggagtatgtcctccataacaatcgttacatgacgtcatatgtgaca

SEQ ID NO: 308981 - DNA, 60 bp, Artificial
  Synthetic oligonucleotide
acacaggagggttcggagtatctgctgcacaacaatcgttacgtgacgtcatatgtgact

SEQ ID NO: 308982 - DNA, 55 bp, Artificial
  Synthetic oligonucleotide
acacaggcatattcatgcatagtaaggtatttagacattggactgtagcagactg

SEQ ID NO: 308983 - DNA, 57 bp, Artificial
  Synthetic oligonucleotide
acacaggccttaaagaatgccagtaagctgtgtttaacggcagacatcttgggggat

SEQ ID NO: 308984 - DNA, 55 bp, Artificial
  Synthetic oligonucleotide
acacaggcgtgtacccgttcatgtggggaggggcatattgcttctgcgactcaga

SEQ ID NO: 308985 - DNA, 54 bp, Artificial
  Synthetic oligonucleotide
acacaggggttgcggggcactcttggcccatggcccagaggtggggggtaatac

SEQ ID NO: 308986 - DNA, 60 bp, Artificial
  Synthetic oligonucleotide
acacagggtgcgcgtggtatgaactgacaccagcggagaccaccgttcggctgcgcgcct

SEQ ID NO: 308987 - DNA, 57 bp, Artificial
  Synthetic oligonucleotide
acacaggtacgccccagaatgcaagcctatccttagggatgaggtaactttcagtgt

SEQ ID NO: 308988 - DNA, 56 bp, Artificial
  Synthetic oligonucleotide
acacagtcaaaggaggaatgccatctggttgctctggaactagtatctttaattca

SEQ ID NO: 308989 - DNA, 50 bp, Artificial
  Synthetic oligonucleotide
acacagtcaatgggaatacagcttgatcaacggataatactgttgtatat

SEQ ID NO: 308990 - DNA, 60 bp, Artificial
  Synthetic oligonucleotide
acacagtcacccacacttgattcatcatccactgttaaggcagcttcctcgttcatgtat

SEQ ID NO: 308991 - DNA, 55 bp, Artificial
  Synthetic oligonucleotide
acacagtccaactatacaaccgcctaggttccgcccagagaagccaaatcggctc

SEQ ID NO: 308992 - DNA, 60 bp, Artificial
  Synthetic oligonucleotide
acacagtcctcgagaagaatgtgacagtaacacactctgtcaacctatttgaggacagtc

SEQ ID NO: 308993 - DNA, 56 bp, Artificial
  Synthetic oligonucleotide
acacagtcgcagacaacatacccctttctgaggtcagagaccccacgtgttttggg

SEQ ID NO: 308994 - DNA, 59 bp, Artificial
  Synthetic oligonucleotide
acacagtctgcaacagaaggactgattacactctaggcagaataggggagatacagtgc

SEQ ID NO: 308995 - DNA, 51 bp, Artificial
  Synthetic oligonucleotide
acacagtgagtattagtaattgaggattatgtagataggcaatctaatact

SEQ ID NO: 308996 - DNA, 59 bp, Artificial
  Synthetic oligonucleotide
acacagtggcaactctctattgtgttcataaagacataaaagtacaagacaccaaggaa

SEQ ID NO: 308997 - DNA, 50 bp, Artificial
  Synthetic oligonucleotide
acacagtggcaccccctacttcaatggtaaaacactgttgggcgtccacg

SEQ ID NO: 308998 - DNA, 59 bp, Artificial
  Synthetic oligonucleotide
acacagtgtccccagattccagcttagtgcctttgctagaaggtagcggaggaagtaca

SEQ ID NO: 308999 - DNA, 55 bp, Artificial
  Synthetic oligonucleotide
acacagttatgtatgttgggctgcacacccccaattggggaatattggggtaagg

SEQ ID NO: 309000 - DNA, 59 bp, Artificial
  Synthetic oligonucleotide
acacagttatttgtggtgggctgtacaccatgcaaaggagaacactgggaccaggcgcc

SEQ ID NO: 309001 - DNA, 60 bp, Artificial
  Synthetic oligonucleotide
acacagttgcagcgcatggtctgtcaagacttagacgattacaagaggaagctcgggatc

SEQ ID NO: 309002 - DNA, 60 bp, Artificial
  Synthetic oligonucleotide
acacataaggctacttccctgattagcagaactacacaccagggccagggatcagatacc

SEQ ID NO: 309003 - DNA, 56 bp, Artificial
  Synthetic oligonucleotide
acacatacactccccacgaactgacacgggtggcttcagccctcagaaaacttggg

SEQ ID NO: 309004 - DNA, 60 bp, Artificial
  Synthetic oligonucleotide
acacatacaggacaggagtgatcggtgaactgctgtcagtatacatgaacgcaactctaa

SEQ ID NO: 309005 - DNA, 57 bp, Artificial
  Synthetic oligonucleotide
acacatacaggcgttattcacgagggtaaatccagtctagaaaccaaccttgagcaa

SEQ ID NO: 309006 - DNA, 58 bp, Artificial
  Synthetic oligonucleotide
acacataccctggaggttgtgcacagtacttcctacagtgcgtcccccatggtgataa

SEQ ID NO: 309007 - DNA, 52 bp, Artificial
  Synthetic oligonucleotide
acacatagaatctggacttaaactctgcagcaaacctcccaaccacactttt

SEQ ID NO: 309008 - DNA, 60 bp, Artificial
  Synthetic oligonucleotide
acacatatcatatgggacataggattgcaatcatcggctaccatggttgtaccctggatt

SEQ ID NO: 309009 - DNA, 58 bp, Artificial
  Synthetic oligonucleotide
acacatatcttggtgacaacatgtctcccccaccccgaaacatgcgcaaatgtgtaac

SEQ ID NO: 309010 - DNA, 52 bp, Artificial
  Synthetic oligonucleotide
acacatatgtgctagtcgtttccaactctagggtgcggtgctcatctccgtt

SEQ ID NO: 309011 - DNA, 60 bp, Artificial
  Synthetic oligonucleotide
acacatcaacaggaaagacctcactaccaaggtgttggcttatctcaaatggatcatatc

SEQ ID NO: 309012 - DNA, 50 bp, Artificial
  Synthetic oligonucleotide
acacatcagattcctccggatcagatgacgaaaatctgggtacaccacat

SEQ ID NO: 309013 - DNA, 55 bp, Artificial
  Synthetic oligonucleotide
acacatcagcccgacaaatagatccaaaaggaactctgaagtggaaataatcctc

SEQ ID NO: 309014 - DNA, 57 bp, Artificial
  Synthetic oligonucleotide
acacatcaggacgcctaagcggggtggcatctcgccggattggaccacgttactgtt

SEQ ID NO: 309015 - DNA, 54 bp, Artificial
  Synthetic oligonucleotide
acacatcataccttaacctttccttctggttcgacggctacgtctacagagcat

SEQ ID NO: 309016 - DNA, 60 bp, Artificial
  Synthetic oligonucleotide
acacatcatgtagcatgattcacgaatgggtttagttcacgcttgcgtaggggcaaatgc

SEQ ID NO: 309017 - DNA, 53 bp, Artificial
  Synthetic oligonucleotide
acacatccaaggcctcgcgctagcccgccggtggctcatcactccccctcatc

SEQ ID NO: 309018 - DNA, 59 bp, Artificial
  Synthetic oligonucleotide
acacatccacattttctcgttcactggggaagaaatggccactaaggcagattacactc

SEQ ID NO: 309019 - DNA, 60 bp, Artificial
  Synthetic oligonucleotide
acacatccagagaagtgccttgtgttagttattgtcggagataataagttgaatccacag

SEQ ID NO: 309020 - DNA, 60 bp, Artificial
  Synthetic oligonucleotide
acacatccatgctggacatttatagatgttaacatgagaaatgcattagatggcaattgt

SEQ ID NO: 309021 - DNA, 55 bp, Artificial
  Synthetic oligonucleotide
acacatcccaataggggatgctagaatagtagtaagaacatattggggtctgcag

SEQ ID NO: 309022 - DNA, 58 bp, Artificial
  Synthetic oligonucleotide
acacatcgaccccgaaccacaccacgaggggctgattgtcgacaccagagatgtggag

SEQ ID NO: 309023 - DNA, 60 bp, Artificial
  Synthetic oligonucleotide
acacatcgcaagtatgaggaggaactattttacagcggaagtgtcccattgcagggccac

SEQ ID NO: 309024 - DNA, 53 bp, Artificial
  Synthetic oligonucleotide
acacatcgctgatgacgagacttacaacagatcccgtgccgcgtatgcgatgg

SEQ ID NO: 309025 - DNA, 55 bp, Artificial
  Synthetic oligonucleotide
acacatcgtttgggggcaacctcggcagagcagtcttccaggccaaaaagagggt

SEQ ID NO: 309026 - DNA, 59 bp, Artificial
  Synthetic oligonucleotide
acacatctacgtggagcatccctagtgctcctggcttggacgtccaaataccttctgac

SEQ ID NO: 309027 - DNA, 55 bp, Artificial
  Synthetic oligonucleotide
acacatctccaaagccggctcccagcgctatcgaggccagtgaggaagctgcagc

SEQ ID NO: 309028 - DNA, 60 bp, Artificial
  Synthetic oligonucleotide
acacatctgttttcacagtatgggtgaactgactcaggcctctcctcaatgattgagtcc

SEQ ID NO: 309029 - DNA, 60 bp, Artificial
  Synthetic oligonucleotide
acacatgaacaatgcgttcagagactttgcaagttattgttgtgtttacgtagatgatat

SEQ ID NO: 309030 - DNA, 55 bp, Artificial
  Synthetic oligonucleotide
acacatgacagaccgtgatggtttgcttaatctttaggtgaacccgtacataggg

SEQ ID NO: 309031 - DNA, 55 bp, Artificial
  Synthetic oligonucleotide
acacatgcacaacagattgcactattggcatagaccgtgaaaatgcactgattat

SEQ ID NO: 309032 - DNA, 60 bp, Artificial
  Synthetic oligonucleotide
acacatgcagtgaaatagttgtggcaatgctactatttgctatccatactgtccaaaaaa

SEQ ID NO: 309033 - DNA, 60 bp, Artificial
  Synthetic oligonucleotide
acacatgcatctaatcccgtgtatgctacgttgaaaatacgtatctatttctacgactct

SEQ ID NO: 309034 - DNA, 51 bp, Artificial
  Synthetic oligonucleotide
acacatgcgtcatagaatggcaagtgtgaatgaatactcggcaaggtactc

SEQ ID NO: 309035 - DNA, 55 bp, Artificial
  Synthetic oligonucleotide
acacatgggattaggccagtagtatccactcacttgctgttaaatggcagtctag

SEQ ID NO: 309036 - DNA, 52 bp, Artificial
  Synthetic oligonucleotide
acacatggtatcaggccaacagtgagtacgcaactaatattaaacgggacac

SEQ ID NO: 309037 - DNA, 56 bp, Artificial
  Synthetic oligonucleotide
acacatgtaattatggactcctaatgaccgtgcccataacgtcttccccgttcttg

SEQ ID NO: 309038 - DNA, 54 bp, Artificial
  Synthetic oligonucleotide
acacatgtaattatgggcccctaatgatcgggcccacaatgtcttccccgttct

SEQ ID NO: 309039 - DNA, 56 bp, Artificial
  Synthetic oligonucleotide
acacatgtccctacactggatacaaaggcagagtatttcaagtaatgttcttaccg

SEQ ID NO: 309040 - DNA, 50 bp, Artificial
  Synthetic oligonucleotide
acacatgtcgacatttcgtgtcgaattgaccgtatacaatgtttcacaca

SEQ ID NO: 309041 - DNA, 60 bp, Artificial
  Synthetic oligonucleotide
acacatgtcgattggtggacgtaagatggtatgatcgtgccttattaggaatataacaga

SEQ ID NO: 309042 - DNA, 56 bp, Artificial
  Synthetic oligonucleotide
acacatgtgactgcgacgagggctgtccagcatgagaaatgtaatccgaatgagga

SEQ ID NO: 309043 - DNA, 60 bp, Artificial
  Synthetic oligonucleotide
acacatgtgtcacccaaacagtcgatttcagcttggaccctactttcaccatcgagacga

SEQ ID NO: 309044 - DNA, 60 bp, Artificial
  Synthetic oligonucleotide
acacattaaccgcttatgatcagcgagttattgaaatgacaactgagctcctagcagcga

SEQ ID NO: 309045 - DNA, 59 bp, Artificial
  Synthetic oligonucleotide
acacattaattggtcgcggtgttaagtcatctgacccaagtgctgatttgtatcaccgg

SEQ ID NO: 309046 - DNA, 54 bp, Artificial
  Synthetic oligonucleotide
acacattacaggttgctgtgcgaaccacaaactctcgagcccttaacggcaccg

SEQ ID NO: 309047 - DNA, 60 bp, Artificial
  Synthetic oligonucleotide
acacattatctcagcaaatagctatgtcacagctaattgatttagcaacattgccactgg

SEQ ID NO: 309048 - DNA, 60 bp, Artificial
  Synthetic oligonucleotide
acacattatctcattatcgtggagccgccggagcattggtggaaggatctcaacaatgtt

SEQ ID NO: 309049 - DNA, 60 bp, Artificial
  Synthetic oligonucleotide
acacattcaaaagtggcacgaacttgagcaaggagatgtacaatagatgtattaccgcag

SEQ ID NO: 309050 - DNA, 57 bp, Artificial
  Synthetic oligonucleotide
acacattcatggatccctaaaaggaatcgttccattctcaatacgagtcaaagggga

SEQ ID NO: 309051 - DNA, 55 bp, Artificial
  Synthetic oligonucleotide
acacattcttgtgtctgaacagtacgggcaacctttacccaccataatcgaccaa

SEQ ID NO: 309052 - DNA, 60 bp, Artificial
  Synthetic oligonucleotide
acacattggctaactcaatagaaagaacctcgaaagttgacagcagtatgccgtctagtg

SEQ ID NO: 309053 - DNA, 60 bp, Artificial
  Synthetic oligonucleotide
acacattggttcgcttcataatagaacagtggcaaattctgttcataatgcgcaagtgcg

SEQ ID NO: 309054 - DNA, 55 bp, Artificial
  Synthetic oligonucleotide
acacattgtgtcaagcaactgtgaaagaggtacgcacagctttgcagcggcttcg

SEQ ID NO: 309055 - DNA, 60 bp, Artificial
  Synthetic oligonucleotide
acacatttagaaggaaaagttatcctggtagcagttcatgtggccagtggatatatagaa

SEQ ID NO: 309056 - DNA, 55 bp, Artificial
  Synthetic oligonucleotide
acacatttagaaggaaagatcatcttagtagctgtacatgtagccagtggataca

SEQ ID NO: 309057 - DNA, 60 bp, Artificial
  Synthetic oligonucleotide
acacatttgacatccagtcatttgagttcgaatgggctgataattttactgacgttattg

SEQ ID NO: 309058 - DNA, 60 bp, Artificial
  Synthetic oligonucleotide
acacattttacaacttggacatcaattcccactttggctgctcagtttccattcaatgcc

SEQ ID NO: 309059 - DNA, 51 bp, Artificial
  Synthetic oligonucleotide
acaccaaaaacggcggtaaagggacttctctcacggacctcttggactacc

SEQ ID NO: 309060 - DNA, 58 bp, Artificial
  Synthetic oligonucleotide
acaccaaaatagatctctggtcttacaatgcggacgttcttgtcgctctagaaaacca

SEQ ID NO: 309061 - DNA, 51 bp, Artificial
  Synthetic oligonucleotide
acaccaaacaactgggtgcgaagcaactcacaaatgcagctgagaggtttg

SEQ ID NO: 309062 - DNA, 58 bp, Artificial
  Synthetic oligonucleotide
acaccaaactctgagaatggaatatgttacccaggagatttcgccgactatgaggaac

SEQ ID NO: 309063 - DNA, 55 bp, Artificial
  Synthetic oligonucleotide
acaccaaagcacccagcggtgaccggcactgccccacagttaaggtcgggtccaa

SEQ ID NO: 309064 - DNA, 55 bp, Artificial
  Synthetic oligonucleotide
acaccaaatgccagacttcggtcggagggataaacaccaacaaaacattccagaa

SEQ ID NO: 309065 - DNA, 60 bp, Artificial
  Synthetic oligonucleotide
acaccaacatggcggggtgatctagggtggccagcattttgctatcgtccaccagagagc

SEQ ID NO: 309066 - DNA, 52 bp, Artificial
  Synthetic oligonucleotide
acaccaactaatgtggaacggcacctcaatagagcagtcttagtgatgcagt

SEQ ID NO: 309067 - DNA, 59 bp, Artificial
  Synthetic oligonucleotide
acaccaaggaaatattggttccaatcacagatgattaagtcatattatgatgagctctg

SEQ ID NO: 309068 - DNA, 60 bp, Artificial
  Synthetic oligonucleotide
acaccaagtccattctcaacctaaggacaaacacagagactaacaatccatgtgctaaga

SEQ ID NO: 309069 - DNA, 60 bp, Artificial
  Synthetic oligonucleotide
acaccaatgagcaaaatactctgtatggctctggcgatcggtatgttaggatgggaactg

SEQ ID NO: 309070 - DNA, 60 bp, Artificial
  Synthetic oligonucleotide
acaccaatggtaattgggacaccgatacatcagtgccccctattggtgtctaatgtgcaa

SEQ ID NO: 309071 - DNA, 57 bp, Artificial
  Synthetic oligonucleotide
acaccaatttcaggggtatgtacatttgtggttctcttcaaagggcatggggtgata

SEQ ID NO: 309072 - DNA, 55 bp, Artificial
  Synthetic oligonucleotide
acaccacaccgggcaaggatgggttcttcaggctaacgaaccgcgacctgcgtgg

SEQ ID NO: 309073 - DNA, 60 bp, Artificial
  Synthetic oligonucleotide
acaccacacgtagcactaatgtatctctgtgtgccactgaggcgtctgatactaattata

SEQ ID NO: 309074 - DNA, 58 bp, Artificial
  Synthetic oligonucleotide
acaccacagcagagcaccatcttgtgctttgtctccgcatgcaacgacttctctgtga

SEQ ID NO: 309075 - DNA, 55 bp, Artificial
  Synthetic oligonucleotide
acaccacaggaacatatacccatatggttcagcctatgaggtttaggacatggtt

SEQ ID NO: 309076 - DNA, 55 bp, Artificial
  Synthetic oligonucleotide
acaccacagggccctgtactcccctccctgcgccgaactacaagttcgcgctatg

SEQ ID NO: 309077 - DNA, 57 bp, Artificial
  Synthetic oligonucleotide
acaccacatagtggtgcccagcctaaagactaagcccaggggcagaaaggccataaa

SEQ ID NO: 309078 - DNA, 58 bp, Artificial
  Synthetic oligonucleotide
acaccacatgctcgaaaatctgtatacggaggttgtgtacacacccatcttaacaccg

SEQ ID NO: 309079 - DNA, 55 bp, Artificial
  Synthetic oligonucleotide
acaccacattctgtatgggtatttgcatgtgcacctgatagatgcccaccgacag

SEQ ID NO: 309080 - DNA, 57 bp, Artificial
  Synthetic oligonucleotide
acaccaccatagaaaaagagatatgccccaaattagtggaatacaggaattggtcaa

SEQ ID NO: 309081 - DNA, 56 bp, Artificial
  Synthetic oligonucleotide
acaccacgacggacagggtaattggggctagaatcctgttatatgctccgagaaag

SEQ ID NO: 309082 - DNA, 50 bp, Artificial
  Synthetic oligonucleotide
acaccacgcgctgtctcaccggcgaaactcctgactcggtcagcctgtat

SEQ ID NO: 309083 - DNA, 57 bp, Artificial
  Synthetic oligonucleotide
acaccacggaaaatcggctctccatgtcgaggccccttgagttttgttctcatccga

SEQ ID NO: 309084 - DNA, 60 bp, Artificial
  Synthetic oligonucleotide
acaccacggatcttcattgcgaacttggtgctcttctggcgacagtgctctgggcccacg

SEQ ID NO: 309085 - DNA, 53 bp, Artificial
  Synthetic oligonucleotide
acaccacggcaatcagcgacctggagtctagatggcgctcacacttcaggcga

SEQ ID NO: 309086 - DNA, 59 bp, Artificial
  Synthetic oligonucleotide
acaccacgtacacgtaataatactatacacattggagacttcagccgtcagcgtacctc

SEQ ID NO: 309087 - DNA, 55 bp, Artificial
  Synthetic oligonucleotide
acaccactaagtccaagacgtttagtgttgtgattgacaatcaacctattcgttt

SEQ ID NO: 309088 - DNA, 55 bp, Artificial
  Synthetic oligonucleotide
acaccactagcttgggtgctggccctgtctccatttctgcggtggctgtcctggc

SEQ ID NO: 309089 - DNA, 60 bp, Artificial
  Synthetic oligonucleotide
acaccagaatatcgtggatgtccagtacctctacggcattggatctacggttgtatcctg

SEQ ID NO: 309090 - DNA, 59 bp, Artificial
  Synthetic oligonucleotide
acaccagaatgcccaaggaaccggccaggctgcggattacaaaagtactcaagcagcta

SEQ ID NO: 309091 - DNA, 53 bp, Artificial
  Synthetic oligonucleotide
acaccagatcatgtatgtgcccccgggtggcccagtgccaaatagtgctaccg

SEQ ID NO: 309092 - DNA, 54 bp, Artificial
  Synthetic oligonucleotide
acaccagcagcacctagaagtgaaacacttggtttttacccatggttacctaca

SEQ ID NO: 309093 - DNA, 54 bp, Artificial
  Synthetic oligonucleotide
acaccagctacagagtgatagaatatgaagtcaccaaagagagtctccctcgat

SEQ ID NO: 309094 - DNA, 52 bp, Artificial
  Synthetic oligonucleotide
acaccagctctagcaacaccaagtgctgagtcaaccctacaatccacaatag

SEQ ID NO: 309095 - DNA, 58 bp, Artificial
  Synthetic oligonucleotide
acaccagggaggttcagaacaattgtttgcggcctatttcctacacagattcaagtga

SEQ ID NO: 309096 - DNA, 50 bp, Artificial
  Synthetic oligonucleotide
acaccagggcgcgctacgggaccctgacggcgtacaacctcctgtacgtg

SEQ ID NO: 309097 - DNA, 55 bp, Artificial
  Synthetic oligonucleotide
acaccaggtagattcaggacaattgtctgtggactcttccctgctcagattatgc

SEQ ID NO: 309098 - DNA, 60 bp, Artificial
  Synthetic oligonucleotide
acaccaggtaggttcagaacgattgcatgtggcctcttccctgcacaagtgaaagctagg

SEQ ID NO: 309099 - DNA, 57 bp, Artificial
  Synthetic oligonucleotide
acaccaggtctttcctccttaaggctagtcccgatgtgtgaattcacatcgggcaac

SEQ ID NO: 309100 - DNA, 52 bp, Artificial
  Synthetic oligonucleotide
acaccaggttcattattcaaaaccgtactgatgagttgcttgacagatacat

SEQ ID NO: 309101 - DNA, 53 bp, Artificial
  Synthetic oligonucleotide
acaccagtaggcacagtaacgaccacagggcagaaacaccctatagaagaatt

SEQ ID NO: 309102 - DNA, 55 bp, Artificial
  Synthetic oligonucleotide
acaccagtccgggcaagagaagcgcatgcacaaatgaaggcggccgcactccgca

SEQ ID NO: 309103 - DNA, 55 bp, Artificial
  Synthetic oligonucleotide
acaccagtttgattctcccagtgatgtctgaattgggtatagatacagaaatagc

SEQ ID NO: 309104 - DNA, 60 bp, Artificial
  Synthetic oligonucleotide
acaccatagaaacgttgatgctcctagctttgatagctgtgttaactggtggagtgacat

SEQ ID NO: 309105 - DNA, 52 bp, Artificial
  Synthetic oligonucleotide
acaccatagaggcactctttcaagggccccccaagttcagacccatacgaat

SEQ ID NO: 309106 - DNA, 60 bp, Artificial
  Synthetic oligonucleotide
acaccatagaggtattcagattgaacagtctaacagctaatgaatcggggaggctaatag

SEQ ID NO: 309107 - DNA, 57 bp, Artificial
  Synthetic oligonucleotide
acaccataggtaatgactacattcctacatgtgactgcacagaagctacttattact

SEQ ID NO: 309108 - DNA, 55 bp, Artificial
  Synthetic oligonucleotide
acaccatataatacagagctcgtatgccacgtgacgaatgacctcatcacgattg

SEQ ID NO: 309109 - DNA, 55 bp, Artificial
  Synthetic oligonucleotide
acaccatatgtacacttcaaagaaagctagaggatggttttatagacatcactat

SEQ ID NO: 309110 - DNA, 60 bp, Artificial
  Synthetic oligonucleotide
acaccatatgtgaatcgtaagacctctgttaaacagccggctaaatctcgtgtatcgcga

SEQ ID NO: 309111 - DNA, 52 bp, Artificial
  Synthetic oligonucleotide
acaccatattctctttcgagagaatctatattaaaaacccaggacttcccaa

SEQ ID NO: 309112 - DNA, 60 bp, Artificial
  Synthetic oligonucleotide
acaccatatttgcctgtgtcaccttctatacctgccatatctgtactaattcacggtaca

SEQ ID NO: 309113 - DNA, 60 bp, Artificial
  Synthetic oligonucleotide
acaccatcaacaattacatacagttcaagagcaaacaccgtattgaaccagtatgtgtgc

SEQ ID NO: 309114 - DNA, 53 bp, Artificial
  Synthetic oligonucleotide
acaccatcaacgtccgtagcagaatcgaatacttcgtctaagaacaaacagtt

SEQ ID NO: 309115 - DNA, 60 bp, Artificial
  Synthetic oligonucleotide
acaccatccagcagagggcatctgcaggacaaatcagtgtacaacctaccttttcagttc

SEQ ID NO: 309116 - DNA, 60 bp, Artificial
  Synthetic oligonucleotide
acaccatccctcattacctgcgtatatgaccacgggtagatatgcgggatacctgcctct

SEQ ID NO: 309117 - DNA, 55 bp, Artificial
  Synthetic oligonucleotide
acaccatcctccagttgtttaggtatgtcgacgaacctttcttcgactgggtcta

SEQ ID NO: 309118 - DNA, 58 bp, Artificial
  Synthetic oligonucleotide
acaccatctagtgattggtaacagcggcgatccaaagtacatagatctccctgaaatc

SEQ ID NO: 309119 - DNA, 60 bp, Artificial
  Synthetic oligonucleotide
acaccatgatacctctcaacttggctacggggaagaagaacacaatggagatgtacagag

SEQ ID NO: 309120 - DNA, 60 bp, Artificial
  Synthetic oligonucleotide
acaccatggaacaaacgcaactggacacagacattgcaacactcttcttagctcaaggca

SEQ ID NO: 309121 - DNA, 50 bp, Artificial
  Synthetic oligonucleotide
acaccatggggacgtccacagaaccgaagcgctcggaccttcgagtgcaa

SEQ ID NO: 309122 - DNA, 59 bp, Artificial
  Synthetic oligonucleotide
acaccattacttttgaatgctgtgttggatcttcgattgtttttcatggaagattggtg

SEQ ID NO: 309123 - DNA, 51 bp, Artificial
  Synthetic oligonucleotide
acaccattgctttatggcgtgaggaaaacgaggtatgggatacccttggtg

SEQ ID NO: 309124 - DNA, 59 bp, Artificial
  Synthetic oligonucleotide
acaccatttcctccagtcccttgctgttgaaaccccagtgttctcaatatctctgatct

SEQ ID NO: 309125 - DNA, 56 bp, Artificial
  Synthetic oligonucleotide
acacccaacaatagatgagttcagagcatacatcgatgacaaagcaccacacctaa

SEQ ID NO: 309126 - DNA, 55 bp, Artificial
  Synthetic oligonucleotide
acacccacatgcatgaagtgcatagcactctcttatggattgcctactatgatca

SEQ ID NO: 309127 - DNA, 55 bp, Artificial
  Synthetic oligonucleotide
acacccacttctataagccagattgtgtctgcaccgttccctgaagaaactgctg

SEQ ID NO: 309128 - DNA, 58 bp, Artificial
  Synthetic oligonucleotide
acacccagagatcaggacgagtcaccaagatctccgctctcccttctacccagcagac

SEQ ID NO: 309129 - DNA, 60 bp, Artificial
  Synthetic oligonucleotide
acacccatctatcaggtgaaaattcgactttaattgcgaactcgatgcataataaagcga

SEQ ID NO: 309130 - DNA, 60 bp, Artificial
  Synthetic oligonucleotide
acacccatgcttgcggttttagcatgggtattacggcctgcgctattgacgtgcagggcc

SEQ ID NO: 309131 - DNA, 57 bp, Artificial
  Synthetic oligonucleotide
acacccatgtgtccgtccttcaggagcgcccccccttagaaaagagagtcatcacag

SEQ ID NO: 309132 - DNA, 59 bp, Artificial
  Synthetic oligonucleotide
acaccccaatatcgaggaggtggccttatccaacactggagagatccccttctatggca

SEQ ID NO: 309133 - DNA, 59 bp, Artificial
  Synthetic oligonucleotide
acaccccacatggtaaaggtgtagtgaagtctctgacgcttgggtcattgatcgccagg

SEQ ID NO: 309134 - DNA, 58 bp, Artificial
  Synthetic oligonucleotide
acaccccaccaggaattgcaaaacctacaagtagaagagatgcaatgttaggtactca

SEQ ID NO: 309135 - DNA, 55 bp, Artificial
  Synthetic oligonucleotide
acaccccaccttacatttggtgtgttgaatatttcagattccatgataccagatg

SEQ ID NO: 309136 - DNA, 56 bp, Artificial
  Synthetic oligonucleotide
acaccccacgggttcaagacaatagtttcactggttcctgtaccaatgctgttgga

SEQ ID NO: 309137 - DNA, 57 bp, Artificial
  Synthetic oligonucleotide
acaccccatactgcggcccgtgtcacccgtggtcgcaggattgttattgatgaggcc

SEQ ID NO: 309138 - DNA, 55 bp, Artificial
  Synthetic oligonucleotide
acaccccatctgccagcatggaatggaggatgatgacaaacaagtgctgggatgg

SEQ ID NO: 309139 - DNA, 53 bp, Artificial
  Synthetic oligonucleotide
acaccccccccctatataaagcctcccgctacccattgccttcccatactaca

SEQ ID NO: 309140 - DNA, 53 bp, Artificial
  Synthetic oligonucleotide
acacccccgggtgtgtgccctgcgttcgggaggacaactcctcccggtgctgg

SEQ ID NO: 309141 - DNA, 56 bp, Artificial
  Synthetic oligonucleotide
acaccccctaacactatatttgccagtggaatggaacggttatggggcacatccaa

SEQ ID NO: 309142 - DNA, 50 bp, Artificial
  Synthetic oligonucleotide
acaccccggagtgcacacaactgcgagcaaggctgctccattcgtgctcc

SEQ ID NO: 309143 - DNA, 57 bp, Artificial
  Synthetic oligonucleotide
acaccccgggaccaggggtcagatatccactgaccttcggatggtgctacaagctag

SEQ ID NO: 309144 - DNA, 55 bp, Artificial
  Synthetic oligonucleotide
acacccctcatctagtgaaattatggtatcagttagagacagagcccatagaagg

SEQ ID NO: 309145 - DNA, 59 bp, Artificial
  Synthetic oligonucleotide
acacccctctctcgaaagcaatatatattccacataggctatgtggaacttaagaatta

SEQ ID NO: 309146 - DNA, 54 bp, Artificial
  Synthetic oligonucleotide
acaccccttgggtggaaaaggagtcagccttatctattgattacaaaactgccc

SEQ ID NO: 309147 - DNA, 54 bp, Artificial
  Synthetic oligonucleotide
acacccgacaccgcagatgacaaccccgtgaacacgtttccgcccaacgtgttc

SEQ ID NO: 309148 - DNA, 57 bp, Artificial
  Synthetic oligonucleotide
acacccgcgcttgattcttgccatgcgatacccgccaggatgtgacctaaacccttt

SEQ ID NO: 309149 - DNA, 59 bp, Artificial
  Synthetic oligonucleotide
acacccgctgagtgtctaaccgcctgggcgggtgccggagctcctgagagcggagtcaa

SEQ ID NO: 309150 - DNA, 55 bp, Artificial
  Synthetic oligonucleotide
acacccgcttcgtatgggaacgtttagcaggtcaacctctttactatgtgagtaa

SEQ ID NO: 309151 - DNA, 58 bp, Artificial
  Synthetic oligonucleotide
acacccggaatgcaaatcaggggatttgtatactttgttgaaacattagcgaggagca

SEQ ID NO: 309152 - DNA, 59 bp, Artificial
  Synthetic oligonucleotide
acacccgggatgcaaatcagaggatttgtgtattttgttgaaacactagcgagaagcat

SEQ ID NO: 309153 - DNA, 52 bp, Artificial
  Synthetic oligonucleotide
acacccgtctccaaagtacgtcgccggttgaacttcgattcccccggagtga

SEQ ID NO: 309154 - DNA, 52 bp, Artificial
  Synthetic oligonucleotide
acacccgtttattcgcgtctccacaaaaatgggacgcacgttcggaccaccc

SEQ ID NO: 309155 - DNA, 52 bp, Artificial
  Synthetic oligonucleotide
acaccctagtcatataccaagacgaaaacgcaaacgtaaacgttctttataa

SEQ ID NO: 309156 - DNA, 59 bp, Artificial
  Synthetic oligonucleotide
acaccctataagcctgcatgggatggacgactcggagggagaagtgttagagtggagat

SEQ ID NO: 309157 - DNA, 59 bp, Artificial
  Synthetic oligonucleotide
acaccctcgttaaaaaccagcatgtcaccatttccccatagtcatgaccttgcgcagaa

SEQ ID NO: 309158 - DNA, 59 bp, Artificial
  Synthetic oligonucleotide
acaccctgcacgtgcggctcctcggacctttacctggtcacgaggcacgccgatgtcat

SEQ ID NO: 309159 - DNA, 52 bp, Artificial
  Synthetic oligonucleotide
acaccctgtgtgccagcatgggatggatgatgaacacagagaagtgtgaaag

SEQ ID NO: 309160 - DNA, 60 bp, Artificial
  Synthetic oligonucleotide
acacccttaggagagaagtatcatgaaatgatacaagaggaaatgaaagccgagtcacag

SEQ ID NO: 309161 - DNA, 55 bp, Artificial
  Synthetic oligonucleotide
acacccttatgggccccagtttcgactgggaccgtaatgcagggtggagcactgt

SEQ ID NO: 309162 - DNA, 58 bp, Artificial
  Synthetic oligonucleotide
acacccttgctgtataggctaggagccgtccaaaatgaggtcatccttacgcacccca

SEQ ID NO: 309163 - DNA, 57 bp, Artificial
  Synthetic oligonucleotide
acaccctttgtgatattgtcgatgagtaccatcttctagaaagttaccaagaaccta

SEQ ID NO: 309164 - DNA, 55 bp, Artificial
  Synthetic oligonucleotide
acaccgaatcctaatccgaacaacggtcctggtaccgagcttgagaagtggctcg

SEQ ID NO: 309165 - DNA, 56 bp, Artificial
  Synthetic oligonucleotide
acaccgacaggggttcaatctctacaactaaaccctttcagaacatctcgagaata

SEQ ID NO: 309166 - DNA, 58 bp, Artificial
  Synthetic oligonucleotide
acaccgaccatgatgctacccaagcatgtatatttgctggacgttacccccggagtat

SEQ ID NO: 309167 - DNA, 55 bp, Artificial
  Synthetic oligonucleotide
acaccgagaaacaggtactcaacgtcatagaggcggccatcaagcggcgcgtccc

SEQ ID NO: 309168 - DNA, 59 bp, Artificial
  Synthetic oligonucleotide
acaccgagactggagcaccccaactcaatccaattgatggaccattacctgaggataac

SEQ ID NO: 309169 - DNA, 53 bp, Artificial
  Synthetic oligonucleotide
acaccgatatgggtcttctgcgttccggcaagttgcccggaaaacgctttggg

SEQ ID NO: 309170 - DNA, 55 bp, Artificial
  Synthetic oligonucleotide
acaccgatccgcgccctccagttgaaccccaaccgacggatcatccttgcgacgt

SEQ ID NO: 309171 - DNA, 57 bp, Artificial
  Synthetic oligonucleotide
acaccgattacttctctatcccccctatcggtgtatcggtgtcttatatatactaga

SEQ ID NO: 309172 - DNA, 58 bp, Artificial
  Synthetic oligonucleotide
acaccgcccttacaaggatatcgtgggcgtgtggacggtgtgctacgggcacactgga

SEQ ID NO: 309173 - DNA, 60 bp, Artificial
  Synthetic oligonucleotide
acaccgcgaagatacacaagagaatggtacacagcctgggagtatgtaagatacaaccca

SEQ ID NO: 309174 - DNA, 57 bp, Artificial
  Synthetic oligonucleotide
acaccgcgtgttggccacaacgtacaccggtacaacggcctacagcgctggtgtgcg

SEQ ID NO: 309175 - DNA, 55 bp, Artificial
  Synthetic oligonucleotide
acaccgctctcccaaatgagctgattttaacggcgggtgatgtcaccgtggcgcg

SEQ ID NO: 309176 - DNA, 56 bp, Artificial
  Synthetic oligonucleotide
acaccggaacgagtacacaggcttaaggcctcacgtccagagcaaataacggtgtg

SEQ ID NO: 309177 - DNA, 54 bp, Artificial
  Synthetic oligonucleotide
acaccggcaaccaacagtcccgctggggcctcgggagcccgaattgtcacggcc

SEQ ID NO: 309178 - DNA, 59 bp, Artificial
  Synthetic oligonucleotide
acaccggctactcaatctgcggatccgggtcgttgcccataggtgtagccaaatatcac

SEQ ID NO: 309179 - DNA, 54 bp, Artificial
  Synthetic oligonucleotide
acaccggggcgcaataccttgtcaaggggcgtccacattgtgagacgacgtctt

SEQ ID NO: 309180 - DNA, 60 bp, Artificial
  Synthetic oligonucleotide
acaccggtcatactcaagtatattgggctccgtggacgatcatgtatccatgcaatgtga

SEQ ID NO: 309181 - DNA, 60 bp, Artificial
  Synthetic oligonucleotide
acaccgtaccacaaggatcgtgtcggctcagccataacaatagactcgtctcagggagct

SEQ ID NO: 309182 - DNA, 52 bp, Artificial
  Synthetic oligonucleotide
acaccgtaggtcaaaacttctgtgaccccttccgattgggtcaacgtgttaa

SEQ ID NO: 309183 - DNA, 54 bp, Artificial
  Synthetic oligonucleotide
acaccgttacgctcccccttgcaaacctctcattagggaggaaacttgcttctc

SEQ ID NO: 309184 - DNA, 57 bp, Artificial
  Synthetic oligonucleotide
acacctaaagggcatagcaatccttacgattgggaaaaatagaatggttgatgccta

SEQ ID NO: 309185 - DNA, 50 bp, Artificial
  Synthetic oligonucleotide
acacctaaatggcataaggcagagacacacctgttctgtgcaacagaaaa

SEQ ID NO: 309186 - DNA, 60 bp, Artificial
  Synthetic oligonucleotide
acacctaacgcggcataatttccgaaccggcatgctccaagggatcagagaagctatggc

SEQ ID NO: 309187 - DNA, 52 bp, Artificial
  Synthetic oligonucleotide
acacctaactatatgcaggcaagggtaccctaaccctaccgccaagtaggtt

SEQ ID NO: 309188 - DNA, 56 bp, Artificial
  Synthetic oligonucleotide
acacctaagatataggtgtcccaacctaccccttgatgttcgttctagtcttcagc

SEQ ID NO: 309189 - DNA, 60 bp, Artificial
  Synthetic oligonucleotide
acacctaagattacgtagataaccccatgcctggtctccactagtcgaaagcatctagca

SEQ ID NO: 309190 - DNA, 52 bp, Artificial
  Synthetic oligonucleotide
acacctaaggcatcgggagccagagccaaagtctaccaagatccatatacgg

SEQ ID NO: 309191 - DNA, 60 bp, Artificial
  Synthetic oligonucleotide
acacctaccagaatctgctgattacatcagatttggtctgtgtcatctctgatgcaccag

SEQ ID NO: 309192 - DNA, 58 bp, Artificial
  Synthetic oligonucleotide
acacctagcaaggaactgcagggcaccccgaagaaagggctgctggaagtgtggacag

SEQ ID NO: 309193 - DNA, 51 bp, Artificial
  Synthetic oligonucleotide
acacctagcggctctctagtctccacagacggacagttatttaacagacca

SEQ ID NO: 309194 - DNA, 60 bp, Artificial
  Synthetic oligonucleotide
acacctagtgggtctatgataacttcagaggctcaattatttaataagccatattggctg

SEQ ID NO: 309195 - DNA, 56 bp, Artificial
  Synthetic oligonucleotide
acacctagtgtagaaccatttgccacttttggcagtgttgagttttaccagggtga

SEQ ID NO: 309196 - DNA, 52 bp, Artificial
  Synthetic oligonucleotide
acacctatatggcctcgccgcgcgaaccggaagggaaaccggttggaaataa

SEQ ID NO: 309197 - DNA, 60 bp, Artificial
  Synthetic oligonucleotide
acacctattcaagacaacagtaaactctctgatttccgatcagctactaatgagaaacca

SEQ ID NO: 309198 - DNA, 52 bp, Artificial
  Synthetic oligonucleotide
acacctcacgaatatgggacgcggggtagtaagtcgggaactcctgcgacac

SEQ ID NO: 309199 - DNA, 55 bp, Artificial
  Synthetic oligonucleotide
acacctcaggaccaggaactagatggccaatgtgctttggatggctttggaagct

SEQ ID NO: 309200 - DNA, 58 bp, Artificial
  Synthetic oligonucleotide
acacctccagaggaccccttcagcgaacagaagagtctatccccagatgagaggaccg

SEQ ID NO: 309201 - DNA, 54 bp, Artificial
  Synthetic oligonucleotide
acacctcccagactcgcccatcgaccgtgaagcgacccttgtggacgggaaccg

SEQ ID NO: 309202 - DNA, 55 bp, Artificial
  Synthetic oligonucleotide
acacctcgctagacgaaagtcgtcgccagacctcaagtgtttttcctccgcgtat

SEQ ID NO: 309203 - DNA, 59 bp, Artificial
  Synthetic oligonucleotide
acacctcttggatgtcctgggatggttgtgacttagactactactgcaacatgggggat

SEQ ID NO: 309204 - DNA, 57 bp, Artificial
  Synthetic oligonucleotide
acacctgacgttgcttttacaagaacgcaactctctcaagtcaaagtgaagaccaag

SEQ ID NO: 309205 - DNA, 60 bp, Artificial
  Synthetic oligonucleotide
acacctgcagtcgcagctctatttccaaatgctcaaccatttgttcatcatgctacagtt

SEQ ID NO: 309206 - DNA, 60 bp, Artificial
  Synthetic oligonucleotide
acacctgcggcgcataatgagtaacattattattgcattgcaaagtgtgcgaggtgaagg

SEQ ID NO: 309207 - DNA, 60 bp, Artificial
  Synthetic oligonucleotide
acacctgctaacccattgtgacttcacaccatggctggcatggcatgttgcagccaatgt

SEQ ID NO: 309208 - DNA, 55 bp, Artificial
  Synthetic oligonucleotide
acacctgctccacaccggcattggtaccgcctcacgacccagtgaggtgtgtatg

SEQ ID NO: 309209 - DNA, 53 bp, Artificial
  Synthetic oligonucleotide
acacctggaaggtggggagggaggtctgccatcgcttcgttgttaaacggcgc

SEQ ID NO: 309210 - DNA, 51 bp, Artificial
  Synthetic oligonucleotide
acacctggcagacctcttcgaacccatctatattctacacgtacggtgctg

SEQ ID NO: 309211 - DNA, 57 bp, Artificial
  Synthetic oligonucleotide
acacctgggacacgcttagtaagtccgcgctcgagactaactcatgggagcccctct

SEQ ID NO: 309212 - DNA, 59 bp, Artificial
  Synthetic oligonucleotide
acacctgggcataaatttatcccttgccaataatggggatgactgcgtcattgtctgtg

SEQ ID NO: 309213 - DNA, 55 bp, Artificial
  Synthetic oligonucleotide
acacctgggtgcgtgagagagagaagtaccacgccgaggaacgtcgtaagtccgg

SEQ ID NO: 309214 - DNA, 57 bp, Artificial
  Synthetic oligonucleotide
acacctgtatcgcctcctgtcccccaccgtagacgaaacgtatctgcaggtgggaca

SEQ ID NO: 309215 - DNA, 56 bp, Artificial
  Synthetic oligonucleotide
acacctgtatctaaagtagcagcgcgaccggtcgaagagtttctatcttccgtgtt

SEQ ID NO: 309216 - DNA, 56 bp, Artificial
  Synthetic oligonucleotide
acacctgtccctgattaccttaggtggaacaactggcaaatctatatggaacctct

SEQ ID NO: 309217 - DNA, 54 bp, Artificial
  Synthetic oligonucleotide
acacctgtggctgttggcgtcccatccccagccacttcggctgtaccccaacct

SEQ ID NO: 309218 - DNA, 60 bp, Artificial
  Synthetic oligonucleotide
acacctgtttgggagacaatggttggttagaactgtgcaacatgcttcaactgtgcaaga

SEQ ID NO: 309219 - DNA, 58 bp, Artificial
  Synthetic oligonucleotide
acacctgtttgggaggcaatggttagttaggactgtgcaacacgccccaactgtgcaa

SEQ ID NO: 309220 - DNA, 55 bp, Artificial
  Synthetic oligonucleotide
acaccttaatcaacagaagtatgggagagttcctatcaacgcttccctacaaact

SEQ ID NO: 309221 - DNA, 58 bp, Artificial
  Synthetic oligonucleotide
acaccttaggcgacgtgcgtgcacgcgcaccaaaactccaattcctcccggaatcaca

SEQ ID NO: 309222 - DNA, 52 bp, Artificial
  Synthetic oligonucleotide
acaccttcctggcgtttaaccccggttcgggtggctttagggtcatgcgtga

SEQ ID NO: 309223 - DNA, 55 bp, Artificial
  Synthetic oligonucleotide
acaccttcgaccgctaccgttagcgtcgtggcacccacctcactgcgcatcgttc

SEQ ID NO: 309224 - DNA, 54 bp, Artificial
  Synthetic oligonucleotide
acaccttcgcctatctattaggccattcttagggtacaacccagagggggacac

SEQ ID NO: 309225 - DNA, 53 bp, Artificial
  Synthetic oligonucleotide
acaccttgaaagccatccgctcaagagtgttgaaccgacggcgaatgccttca

SEQ ID NO: 309226 - DNA, 51 bp, Artificial
  Synthetic oligonucleotide
acaccttgagtgcactccatttgttatgccaggcggcctgcaacagacgca

SEQ ID NO: 309227 - DNA, 60 bp, Artificial
  Synthetic oligonucleotide
acaccttgcactgccccactgactgcttccgcaagcatccagacgccacgtactctcggt

SEQ ID NO: 309228 - DNA, 60 bp, Artificial
  Synthetic oligonucleotide
acaccttgctgttgaaccaagttaccaattgattatcacaagcaatttttcgatagatca

SEQ ID NO: 309229 - DNA, 56 bp, Artificial
  Synthetic oligonucleotide
acacctttggactaaggtctaaatgaccacacaaataattatgtggacccagtgac

SEQ ID NO: 309230 - DNA, 59 bp, Artificial
  Synthetic oligonucleotide
acacctttggactcaaatccagatgaccacacaaataattatgtggtcctaatgacctg

SEQ ID NO: 309231 - DNA, 55 bp, Artificial
  Synthetic oligonucleotide
acaccttttattggtcattggtgccgggcttatcagagaaattgcactgcacgtg

SEQ ID NO: 309232 - DNA, 60 bp, Artificial
  Synthetic oligonucleotide
acaccttttgactggtacatcaatgagtgcaaaaagtatgacttctatatctcagataac

SEQ ID NO: 309233 - DNA, 56 bp, Artificial
  Synthetic oligonucleotide
acacgaaaaagttttaaagggcgctgctacgaatgctacagtgatggtcgtgggtc

SEQ ID NO: 309234 - DNA, 57 bp, Artificial
  Synthetic oligonucleotide
acacgaaaactacgcattggtggttacaagatgcccccgtggatatgatactaggtc

SEQ ID NO: 309235 - DNA, 52 bp, Artificial
  Synthetic oligonucleotide
acacgaaacaaggctaaaagtcaggtcggattaagccatagtacgggaaaaa

SEQ ID NO: 309236 - DNA, 56 bp, Artificial
  Synthetic oligonucleotide
acacgaacagtgtgatgtttttcttggttcgtgaccgtcgtcctacgggatcgcca

SEQ ID NO: 309237 - DNA, 59 bp, Artificial
  Synthetic oligonucleotide
acacgaactttgtgtgtcgacgaacattcgtggacagaggctggggcaatggttgtgga

SEQ ID NO: 309238 - DNA, 55 bp, Artificial
  Synthetic oligonucleotide
acacgaattcggtcatgttctttttagttcgcgatcgacgacctgttgacaaacc

SEQ ID NO: 309239 - DNA, 55 bp, Artificial
  Synthetic oligonucleotide
acacgacacgaaagagattcggtgcaaatgagatcggtgaacaaatctggaatgg

SEQ ID NO: 309240 - DNA, 53 bp, Artificial
  Synthetic oligonucleotide
acacgacccacaccaaaagtactcttaaagtaagcccattatggtcaaacgcc

SEQ ID NO: 309241 - DNA, 54 bp, Artificial
  Synthetic oligonucleotide
acacgacccgctgccccttaccatatcgaaacactgggggtcattggaacaccg

SEQ ID NO: 309242 - DNA, 57 bp, Artificial
  Synthetic oligonucleotide
acacgaccttgacaagggtagtaggcttagctcagacgcggcagccactcacccccg

SEQ ID NO: 309243 - DNA, 57 bp, Artificial
  Synthetic oligonucleotide
acacgacgaactgtttcgggccacgtctcacgacttccgtctggcttgacacgcgag

SEQ ID NO: 309244 - DNA, 58 bp, Artificial
  Synthetic oligonucleotide
acacgacgatgtttgtaggagaccctttcaatcctccaagtgacccgactgactgtga

SEQ ID NO: 309245 - DNA, 56 bp, Artificial
  Synthetic oligonucleotide
acacgacgcaggcaatcaactccgttacctagccgcctcaccactacgcgcaccat

SEQ ID NO: 309246 - DNA, 60 bp, Artificial
  Synthetic oligonucleotide
acacgactcatgctactctgcaatctggggctgatctattcaaacgaaatttggatgatg

SEQ ID NO: 309247 - DNA, 53 bp, Artificial
  Synthetic oligonucleotide
acacgacttactccccgagttgggtgacgtgactgaatcttatgctgatctcg

SEQ ID NO: 309248 - DNA, 52 bp, Artificial
  Synthetic oligonucleotide
acacgagaaggaactatactcaggggttgtcgagttactgtgctggaaatcc

SEQ ID NO: 309249 - DNA, 59 bp, Artificial
  Synthetic oligonucleotide
acacgagaagggaataaatccgaattatctgctgtcgtggaagcaagtattagaagagc

SEQ ID NO: 309250 - DNA, 60 bp, Artificial
  Synthetic oligonucleotide
acacgagaattgcagctgagtcggtcagttatgcttcaatgaaccttgagagagcgttga

SEQ ID NO: 309251 - DNA, 55 bp, Artificial
  Synthetic oligonucleotide
acacgagagatacccgctcctggacctctgtacgcctgtaccacccaagcgccca

SEQ ID NO: 309252 - DNA, 53 bp, Artificial
  Synthetic oligonucleotide
acacgagagttttgtgatgttatacgtagtaatctaccattgaatctggacat

SEQ ID NO: 309253 - DNA, 51 bp, Artificial
  Synthetic oligonucleotide
acacgagggatgccattagccggaggttccacgccaccattccacccgtta

SEQ ID NO: 309254 - DNA, 56 bp, Artificial
  Synthetic oligonucleotide
acacgagtatccgtcatacggctacccttgatgatcgtggtctttttgggcgtccg

SEQ ID NO: 309255 - DNA, 60 bp, Artificial
  Synthetic oligonucleotide
acacgagtcaaaggggaatccttgaagatgaacagatgtatcaaaagtgctgcaatctat

SEQ ID NO: 309256 - DNA, 58 bp, Artificial
  Synthetic oligonucleotide
acacgataatctattacgaacgcgaggtaggggaattacttagagcgcactgcgttga

SEQ ID NO: 309257 - DNA, 60 bp, Artificial
  Synthetic oligonucleotide
acacgatatggacgcctttaacttgcggcgacatgcgtgtgttgaggtaaggcgtattga

SEQ ID NO: 309258 - DNA, 52 bp, Artificial
  Synthetic oligonucleotide
acacgatcgttcaaaagggtgcaactcccccccccttggagggtatccaaga

SEQ ID NO: 309259 - DNA, 60 bp, Artificial
  Synthetic oligonucleotide
acacgatgaccgattagatgccctagcgttaggcattgagtatctccgtgagtccatgca

SEQ ID NO: 309260 - DNA, 50 bp, Artificial
  Synthetic oligonucleotide
acacgatgctgtggtccccacttacacagcccagtataccccaaaattgg

SEQ ID NO: 309261 - DNA, 60 bp, Artificial
  Synthetic oligonucleotide
acacgatgtcgatcgtcccagcgaatacgaacagagccctagtgcgcgcaggcactgctc

SEQ ID NO: 309262 - DNA, 55 bp, Artificial
  Synthetic oligonucleotide
acacgatgtgtcttatcattgcaatggagtactgcagactgcgcgtcgcaaagga

SEQ ID NO: 309263 - DNA, 60 bp, Artificial
  Synthetic oligonucleotide
acacgattaaattaatgcgtgtgagcacaccaggtgacggtaagtgcggtttgcacgcga

SEQ ID NO: 309264 - DNA, 60 bp, Artificial
  Synthetic oligonucleotide
acacgcaaaatgccgtgcattcgcttgcaggtggattgcgatctttagaactggaatatc

SEQ ID NO: 309265 - DNA, 56 bp, Artificial
  Synthetic oligonucleotide
acacgcaaatccagacgaggaggtcactcgagctaaagaaattgtgggaacaaacc

SEQ ID NO: 309266 - DNA, 59 bp, Artificial
  Synthetic oligonucleotide
acacgcaatagcatgtcttgtgttagtaggaaagtctctagtggcgtttgtagaactat

SEQ ID NO: 309267 - DNA, 54 bp, Artificial
  Synthetic oligonucleotide
acacgcaatataatgcatgtgtcgaatttacagctctcaccattgagcaccctt

SEQ ID NO: 309268 - DNA, 59 bp, Artificial
  Synthetic oligonucleotide
acacgcacagattaacttgtgattggatgttcggtcacaacaatggtaactatttagtg

SEQ ID NO: 309269 - DNA, 53 bp, Artificial
  Synthetic oligonucleotide
acacgcactaacacggagtgagcagtcagatacgaaactaaggatacatagtg

SEQ ID NO: 309270 - DNA, 58 bp, Artificial
  Synthetic oligonucleotide
acacgcactgtcggagaaacaacgtgggtacaagggccattctcacaattaccacaca

SEQ ID NO: 309271 - DNA, 57 bp, Artificial
  Synthetic oligonucleotide
acacgcagacattaggaataggatgtcttactacggacactacaacttttgaagagg

SEQ ID NO: 309272 - DNA, 55 bp, Artificial
  Synthetic oligonucleotide
acacgcagtaggggttctgcgccggggcgcacttgtcaaagttggcggggttgaa

SEQ ID NO: 309273 - DNA, 59 bp, Artificial
  Synthetic oligonucleotide
acacgcagtggcgaatcttggaacccaattgttggtagacaatcttacagagatggaag

SEQ ID NO: 309274 - DNA, 59 bp, Artificial
  Synthetic oligonucleotide
acacgcagtgttcgcgtgtgtcacctccaacgggtggtacgcgattgatgacgaggact

SEQ ID NO: 309275 - DNA, 55 bp, Artificial
  Synthetic oligonucleotide
acacgcatattcaacgtaacttacacatcgatccttctgtacagttcgaccaaat

SEQ ID NO: 309276 - DNA, 55 bp, Artificial
  Synthetic oligonucleotide
acacgcatccgcttcaaagatgacacttcatttgaggacattaatggtatcagac

SEQ ID NO: 309277 - DNA, 50 bp, Artificial
  Synthetic oligonucleotide
acacgcattctgggcgtcttgagctacttatagcatcagctagaaactgc

SEQ ID NO: 309278 - DNA, 52 bp, Artificial
  Synthetic oligonucleotide
acacgccacagagtcgggagataatatccacaagtttgctaacggtggaaaa

SEQ ID NO: 309279 - DNA, 60 bp, Artificial
  Synthetic oligonucleotide
acacgccattctccgcctgagctgcagtgatgacttcccctgtgcgtgaatccatgatcg

SEQ ID NO: 309280 - DNA, 60 bp, Artificial
  Synthetic oligonucleotide
acacgccattctctgcctgaactgcagtgatgtattcccctgtgcgtgaatccatagttg

SEQ ID NO: 309281 - DNA, 52 bp, Artificial
  Synthetic oligonucleotide
acacgcctgatattggattagctgactcacataatgttacagcgtcatacgt

SEQ ID NO: 309282 - DNA, 56 bp, Artificial
  Synthetic oligonucleotide
acacgcctgttgagtttgttaagaacccctaccatccttgagcgtgagttgcttaa

SEQ ID NO: 309283 - DNA, 55 bp, Artificial
  Synthetic oligonucleotide
acacgcgaataaactcggaatgacgccagcggttatcctggagtatgtgaatgac

SEQ ID NO: 309284 - DNA, 53 bp, Artificial
  Synthetic oligonucleotide
acacgcgaccaagaccccatccttcgggacaataagaaagtcctcaactttct

SEQ ID NO: 309285 - DNA, 55 bp, Artificial
  Synthetic oligonucleotide
acacgcgcagcttcggcgtgaccttccgactttccggcgaggcaaccgccaattc

SEQ ID NO: 309286 - DNA, 60 bp, Artificial
  Synthetic oligonucleotide
acacgcggcatgggcatcactcatagagttgggaaacgattttgtgttaagtctatctgg

SEQ ID NO: 309287 - DNA, 57 bp, Artificial
  Synthetic oligonucleotide
acacgcgtaacttcctctttctcacggtacgtcacatccgattaacttgcaacgtca

SEQ ID NO: 309288 - DNA, 58 bp, Artificial
  Synthetic oligonucleotide
acacgctaacagagagggggattgaggtagtaaatgctacggagacagtggaaactgc

SEQ ID NO: 309289 - DNA, 56 bp, Artificial
  Synthetic oligonucleotide
acacgctcaaacaatgatgcacttccgcctcattgcaacttcggaaccatctcact

SEQ ID NO: 309290 - DNA, 57 bp, Artificial
  Synthetic oligonucleotide
acacgctctctaccgccatcgctccggttattccgggcgatgacgcgtaagtggctt

SEQ ID NO: 309291 - DNA, 60 bp, Artificial
  Synthetic oligonucleotide
acacgcttagtaagtccgcgctcgagactaactcatgggagcccctcttcgctgtgacaa

SEQ ID NO: 309292 - DNA, 60 bp, Artificial
  Synthetic oligonucleotide
acacggaaaggacatcgtgtgctataagtctgacgtaagtcgagcttgcaacatgggtct

SEQ ID NO: 309293 - DNA, 56 bp, Artificial
  Synthetic oligonucleotide
acacggaacagcttctcacgccgctgtataattaaggttcgtgagcccattcccgg

SEQ ID NO: 309294 - DNA, 58 bp, Artificial
  Synthetic oligonucleotide
acacggaagggtaagaagtcgctcgtgaccaacgtgccaactctgacgagtggtgcga

SEQ ID NO: 309295 - DNA, 57 bp, Artificial
  Synthetic oligonucleotide
acacggaatgtgagggtcactacctagtaagatcttcgttgacgtgtggacgacatg

SEQ ID NO: 309296 - DNA, 53 bp, Artificial
  Synthetic oligonucleotide
acacggacaatgacccaggtactagcccaagggaggggactagtggcgcagcc

SEQ ID NO: 309297 - DNA, 60 bp, Artificial
  Synthetic oligonucleotide
acacggagaatatgatatggcctttagaggtttatgtgaggcaatgaacgctcacggaac

SEQ ID NO: 309298 - DNA, 54 bp, Artificial
  Synthetic oligonucleotide
acacggagaggacggtctgttgtctgcattgacccctgacgaacagcgcgaggc

SEQ ID NO: 309299 - DNA, 53 bp, Artificial
  Synthetic oligonucleotide
acacggaggcgtttccagaaccacccgtcgggcccacaccgacgtggcattcc

SEQ ID NO: 309300 - DNA, 59 bp, Artificial
  Synthetic oligonucleotide
acacggaggtgggcaaaccactacgctacgcagcagccttagctacgccggagcttagc

SEQ ID NO: 309301 - DNA, 55 bp, Artificial
  Synthetic oligonucleotide
acacggaggttccctggccatccttctactgcgacaccccaggcgttgcctgtgt

SEQ ID NO: 309302 - DNA, 54 bp, Artificial
  Synthetic oligonucleotide
acacggagttaaaagtgaaatgataccgtcaaaggtgactacttttgttcatta

SEQ ID NO: 309303 - DNA, 56 bp, Artificial
  Synthetic oligonucleotide
acacggcaaagttgggcagggggtatccgcgtggagcaagaccttctgtgccctgt

SEQ ID NO: 309304 - DNA, 58 bp, Artificial
  Synthetic oligonucleotide
acacggcaagaggcggagcgcggcgactggtgagtacgcctaagatttttgactagcg

SEQ ID NO: 309305 - DNA, 52 bp, Artificial
  Synthetic oligonucleotide
acacggcaccgtcgtgttccgacggacgtatgaatatgtccatggtaaacga

SEQ ID NO: 309306 - DNA, 51 bp, Artificial
  Synthetic oligonucleotide
acacggcacgggatatactcctacataacaggactgaccaccgataacctg

SEQ ID NO: 309307 - DNA, 55 bp, Artificial
  Synthetic oligonucleotide
acacggcagtgaggtgtgaccttgaacatgatttggtcctggggcgcatggggaa

SEQ ID NO: 309308 - DNA, 56 bp, Artificial
  Synthetic oligonucleotide
acacggcccgtgcccccattgctcgggaaaagacaggttccgctggactgacaaca

SEQ ID NO: 309309 - DNA, 58 bp, Artificial
  Synthetic oligonucleotide
acacggctcagatgaattccctacccgtgtttctagcttcgacgccctttaccatgca

SEQ ID NO: 309310 - DNA, 60 bp, Artificial
  Synthetic oligonucleotide
acacggctcttgccatgatttttcagttacacgctagtcacagatcatacataactagcg

SEQ ID NO: 309311 - DNA, 53 bp, Artificial
  Synthetic oligonucleotide
acacgggaacactattaaccccgtcccatcaggtggcaaactccaatttggac

SEQ ID NO: 309312 - DNA, 54 bp, Artificial
  Synthetic oligonucleotide
acacgggagtaagagtgccagaataaaagggattcaactggacaaggtttcagg

SEQ ID NO: 309313 - DNA, 57 bp, Artificial
  Synthetic oligonucleotide
acacgggatgggctcttctgctgttggtcgctttctcactcgaaccaaggaaacgac

SEQ ID NO: 309314 - DNA, 55 bp, Artificial
  Synthetic oligonucleotide
acacgggccaacacccctgttgtacaggctaggagccgttcaaaatgaagtcacc

SEQ ID NO: 309315 - DNA, 53 bp, Artificial
  Synthetic oligonucleotide
acacgggggtcactacgttgtctcgaaaaccctgctcgctaactgaccggaag

SEQ ID NO: 309316 - DNA, 53 bp, Artificial
  Synthetic oligonucleotide
acacggggtcacctccccccacattcctctaagggcttttgagcctagcgttg

SEQ ID NO: 309317 - DNA, 50 bp, Artificial
  Synthetic oligonucleotide
acacgggtagaacggtcagagaagccactattcggttgaagattagactt

SEQ ID NO: 309318 - DNA, 52 bp, Artificial
  Synthetic oligonucleotide
acacgggtcgtttctctcgaagttgaggcggtgcggttcggagacgttgacg

SEQ ID NO: 309319 - DNA, 58 bp, Artificial
  Synthetic oligonucleotide
acacgggtggacaaactgacacaaggccgacaaacctatgactggactctgaatagga

SEQ ID NO: 309320 - DNA, 57 bp, Artificial
  Synthetic oligonucleotide
acacgggttactgtatgcataccaacaacgcacacgggataggagcccacaatgact

SEQ ID NO: 309321 - DNA, 55 bp, Artificial
  Synthetic oligonucleotide
acacgggttaggagatttgcacgcctctccataaatatggttcgtgtgccctgcc

SEQ ID NO: 309322 - DNA, 51 bp, Artificial
  Synthetic oligonucleotide
acacggtatgcgaagcgttgtatgtcgcacttgtcacaagtctacttaggt

SEQ ID NO: 309323 - DNA, 56 bp, Artificial
  Synthetic oligonucleotide
acacggtcgtcatactgcagacagggttcttctactttgcaagatagtctagagta

SEQ ID NO: 309324 - DNA, 57 bp, Artificial
  Synthetic oligonucleotide
acacggttgcgcggttggttgcaaccccgacgtgcactggactgagttcttctacaa

SEQ ID NO: 309325 - DNA, 55 bp, Artificial
  Synthetic oligonucleotide
acacgtaaaacacccactggctttggagttgtgccacatgacacctcccagcttg

SEQ ID NO: 309326 - DNA, 55 bp, Artificial
  Synthetic oligonucleotide
acacgtacagacgtgtattctccgtcccgttgagcaacgcaccgttgcagacaac

SEQ ID NO: 309327 - DNA, 54 bp, Artificial
  Synthetic oligonucleotide
acacgtacatggttgccggaacccccggaacatataggacgggcacgtcggtga

SEQ ID NO: 309328 - DNA, 55 bp, Artificial
  Synthetic oligonucleotide
acacgtaccaacatattttatcatgctagcagttctagactacttgcagtgggaa

SEQ ID NO: 309329 - DNA, 60 bp, Artificial
  Synthetic oligonucleotide
acacgtagagaagttgagacggttcaccacatggtgaaacgtatcagctgatgagtatca

SEQ ID NO: 309330 - DNA, 56 bp, Artificial
  Synthetic oligonucleotide
acacgtataagaagtccttgacacgtgttgataaactcagggcgatttttcgacac

SEQ ID NO: 309331 - DNA, 59 bp, Artificial
  Synthetic oligonucleotide
acacgtataggaccagggaaagcattctttacagtaggagatataagacaagcacattg

SEQ ID NO: 309332 - DNA, 52 bp, Artificial
  Synthetic oligonucleotide
acacgtatggtccagtcctcaggccttacagcgcttcctccatgaccctacg

SEQ ID NO: 309333 - DNA, 60 bp, Artificial
  Synthetic oligonucleotide
acacgtcagaattgcacgaaagaaacacttggcgcttcgaaagtcagaatgcaaatgcta

SEQ ID NO: 309334 - DNA, 60 bp, Artificial
  Synthetic oligonucleotide
acacgtcagtatgacttcagtaatacgcgtacgaatgtttcgaggttactcaatgatatc

SEQ ID NO: 309335 - DNA, 60 bp, Artificial
  Synthetic oligonucleotide
acacgtccagtccttgtcgatggggcatatcgaatggtgcgcaatcttcaccagggcatg

SEQ ID NO: 309336 - DNA, 53 bp, Artificial
  Synthetic oligonucleotide
acacgtccgccctccagtccaccctagctaccccctgcaccaaacccgctaac

SEQ ID NO: 309337 - DNA, 55 bp, Artificial
  Synthetic oligonucleotide
acacgtcgaacaattggaacgaggcgtcgtacgtaatacaagtgaacgtagtcga

SEQ ID NO: 309338 - DNA, 56 bp, Artificial
  Synthetic oligonucleotide
acacgtcgaacattgaaggcgtacaaatcctaattacatccgaagggcaacagtta

SEQ ID NO: 309339 - DNA, 60 bp, Artificial
  Synthetic oligonucleotide
acacgtcgactggcagaattgcgtgtgggaggattacaatagagacctattagttagcac

SEQ ID NO: 309340 - DNA, 60 bp, Artificial
  Synthetic oligonucleotide
acacgtgacacataagttgagcgatctataaagcatgcgtcagtaagttctaatgagcaa

SEQ ID NO: 309341 - DNA, 56 bp, Artificial
  Synthetic oligonucleotide
acacgtgcaccgttgtcaacgctaagacttttgaatggacctggacgtatataaag

SEQ ID NO: 309342 - DNA, 58 bp, Artificial
  Synthetic oligonucleotide
acacgtgcgaccagggcgtcactcattgacctttgcaatcggttttgtgcgcccaaag

SEQ ID NO: 309343 - DNA, 60 bp, Artificial
  Synthetic oligonucleotide
acacgtgcgattgctcgcgccgcttacgcatagtccactttgcacgggtgtgggttatgc

SEQ ID NO: 309344 - DNA, 60 bp, Artificial
  Synthetic oligonucleotide
acacgtgctcgactgctatacagtgtttgcgccgggaggtacgcatttcattgcgatggg

SEQ ID NO: 309345 - DNA, 60 bp, Artificial
  Synthetic oligonucleotide
acacgtggcacaagctcccgattacacagatctttgagatccctgagtcaatggacccat

SEQ ID NO: 309346 - DNA, 60 bp, Artificial
  Synthetic oligonucleotide
acacgtggtggtttgcacaacaaaagcatcgaagatttaggaggcagatacggcgaatca

SEQ ID NO: 309347 - DNA, 58 bp, Artificial
  Synthetic oligonucleotide
acacgtgtatctcgatcgcgggtagcgttctggacaccgtctaacaacccatgtggga

SEQ ID NO: 309348 - DNA, 55 bp, Artificial
  Synthetic oligonucleotide
acacgtgtcattgaagctagtagtgtaaatgacactgtgctgtttaggacaactt

SEQ ID NO: 309349 - DNA, 57 bp, Artificial
  Synthetic oligonucleotide
acacgtgttcaaacgtgtactgtccgtggagaaggatacgcttatggacgacgtgga

SEQ ID NO: 309350 - DNA, 55 bp, Artificial
  Synthetic oligonucleotide
acacgttacacatcgattcgaggaaagcggataccacgtcatatcatacgattgc

SEQ ID NO: 309351 - DNA, 60 bp, Artificial
  Synthetic oligonucleotide
acacgttaggcgcctacccttcactcagcatggtgctaaacgtcatgttgcacgcagcca

SEQ ID NO: 309352 - DNA, 60 bp, Artificial
  Synthetic oligonucleotide
acacgttcccccatcactagaattgctgaaagggctactgctatgttagagtatgccgct

SEQ ID NO: 309353 - DNA, 58 bp, Artificial
  Synthetic oligonucleotide
acacgttccgtgtctaggctaggttcgctcgaatacggtttgcacgcagttatagtgc

SEQ ID NO: 309354 - DNA, 56 bp, Artificial
  Synthetic oligonucleotide
acacgtttccaacgcctcatggccctggaacttgcttcactccactttgaaccctc

SEQ ID NO: 309355 - DNA, 60 bp, Artificial
  Synthetic oligonucleotide
acactaaacaacaggcattcaaatgacacagtgcatgataggaccccttatcgaacccta

SEQ ID NO: 309356 - DNA, 51 bp, Artificial
  Synthetic oligonucleotide
acactaaataacatggggacactatatatgagacacgtgaatggtgggggc

SEQ ID NO: 309357 - DNA, 60 bp, Artificial
  Synthetic oligonucleotide
acactaaatatagtgtgccccaactgtgcagctacagcgtgacaacaatggcagacgatt

SEQ ID NO: 309358 - DNA, 58 bp, Artificial
  Synthetic oligonucleotide
acactaacagtgccttaactaacccattcgcttgctactaacaaaatggcgcgagcac

SEQ ID NO: 309359 - DNA, 58 bp, Artificial
  Synthetic oligonucleotide
acactaacatccgagctgtgtttactagatcgattcaacggagcaactaaattgccgg

SEQ ID NO: 309360 - DNA, 60 bp, Artificial
  Synthetic oligonucleotide
acactaagatagatctatggtcttacaatgcagaacttctggtggccttggaaaaccagc

SEQ ID NO: 309361 - DNA, 59 bp, Artificial
  Synthetic oligonucleotide
acactaagctacgcagcagccttagctacgccggagcttatttcgcccacgttctaata

SEQ ID NO: 309362 - DNA, 60 bp, Artificial
  Synthetic oligonucleotide
acactaatcctaagatcgctatagtgcgatatgaaccaagcgaaaatgcgaaattgtggc

SEQ ID NO: 309363 - DNA, 60 bp, Artificial
  Synthetic oligonucleotide
acactaatgatgtaagacaattggcagaagtggtgcaaaaggtaaccatggaaagcatag

SEQ ID NO: 309364 - DNA, 55 bp, Artificial
  Synthetic oligonucleotide
acactaatgtgggcctaaagttcaggcaactattgtggtttcacatttcttgtct

SEQ ID NO: 309365 - DNA, 53 bp, Artificial
  Synthetic oligonucleotide
acactaattcacaacaacactacctcatcccaaaaccctcccctttatctacc

SEQ ID NO: 309366 - DNA, 58 bp, Artificial
  Synthetic oligonucleotide
acactacaaagcaatcattcttctgtagcaacagttggcggcagcaagatcatagagt

SEQ ID NO: 309367 - DNA, 60 bp, Artificial
  Synthetic oligonucleotide
acactacaccggcatccactgttgaatctaatatgcgatggtgggaaaagcaatcgtata

SEQ ID NO: 309368 - DNA, 55 bp, Artificial
  Synthetic oligonucleotide
acactacacgaccaaatcgattactatggatatctttagggaaatcgcatcttct

SEQ ID NO: 309369 - DNA, 52 bp, Artificial
  Synthetic oligonucleotide
acactacatgacctctcttgtaaattcttgccattgtatgctagtgaggcaa

SEQ ID NO: 309370 - DNA, 55 bp, Artificial
  Synthetic oligonucleotide
acactacattataagaataaggtgtttccaattgaaaacccatctgtgacccaag

SEQ ID NO: 309371 - DNA, 60 bp, Artificial
  Synthetic oligonucleotide
acactaccaatggatgtcccactcgcacgtcagataaaggcatacagaggaccgattcca

SEQ ID NO: 309372 - DNA, 60 bp, Artificial
  Synthetic oligonucleotide
acactaccagtcagggttggtatgaacatgaatgaggatggacccataatatttgagaaa

SEQ ID NO: 309373 - DNA, 58 bp, Artificial
  Synthetic oligonucleotide
acactaccatcaattactacaaagattcggctagcaatgcggcatctaaacaggattt

SEQ ID NO: 309374 - DNA, 57 bp, Artificial
  Synthetic oligonucleotide
acactacctcatccccaccactggacaacaatcacccaatccacacccaacaaccac

SEQ ID NO: 309375 - DNA, 50 bp, Artificial
  Synthetic oligonucleotide
acactaccttcggcgcggaaagactaccctagtgggcgccttcgcacgta

SEQ ID NO: 309376 - DNA, 55 bp, Artificial
  Synthetic oligonucleotide
acactaccttttgattccgcattgaaccactgtaatttcggactattggtggtgc

SEQ ID NO: 309377 - DNA, 55 bp, Artificial
  Synthetic oligonucleotide
acactacgcattgatcattgtcgaaatttaacggtctcgtatcttcattcggtac

SEQ ID NO: 309378 - DNA, 56 bp, Artificial
  Synthetic oligonucleotide
acactactataaatgccaagtacaaattcagattcaaatggggtggtaatatgatt

SEQ ID NO: 309379 - DNA, 60 bp, Artificial
  Synthetic oligonucleotide
acactactatataccagtccaacattgagaggagccattactgtatagctgactcacatt

SEQ ID NO: 309380 - DNA, 58 bp, Artificial
  Synthetic oligonucleotide
acactactgagatattcgagaaaatagatagaataccaaacttcgtctatctttttga

SEQ ID NO: 309381 - DNA, 60 bp, Artificial
  Synthetic oligonucleotide
acactagaagaaatgatgacagcatgtcagggagtaggaggacccggccataaggcaaga

SEQ ID NO: 309382 - DNA, 58 bp, Artificial
  Synthetic oligonucleotide
acactagaatagcccttatagacgacgccaccaagtccacctgggactacatagacga

SEQ ID NO: 309383 - DNA, 60 bp, Artificial
  Synthetic oligonucleotide
acactagagatggtgaagaagtgacggcacacactacgtgctcagttaatggcgtgaatg

SEQ ID NO: 309384 - DNA, 57 bp, Artificial
  Synthetic oligonucleotide
acactagagcttttagaggagcttaagagtgaagctgttagacattttcctaggacg

SEQ ID NO: 309385 - DNA, 60 bp, Artificial
  Synthetic oligonucleotide
acactagcaaggagcatttgtgagaagcttgagcaatctggactcccagttggagggaac

SEQ ID NO: 309386 - DNA, 59 bp, Artificial
  Synthetic oligonucleotide
acactaggaaaaaggctgaaacagtacagagagctaaagcctcaaacatgtattgtctg

SEQ ID NO: 309387 - DNA, 60 bp, Artificial
  Synthetic oligonucleotide
acactaggagtattatttatatctgataatatgatacatgatgtaatcacagtgctgaag

SEQ ID NO: 309388 - DNA, 50 bp, Artificial
  Synthetic oligonucleotide
acactaggtacaggttatattgtagctgtcccatcgaatactcgtacacg

SEQ ID NO: 309389 - DNA, 60 bp, Artificial
  Synthetic oligonucleotide
acactagtacaaccaggcgataatatcaccttctcacacaatgggggtctgatagcaccg

SEQ ID NO: 309390 - DNA, 55 bp, Artificial
  Synthetic oligonucleotide
acactagtcgtccaggcagagagccctctcctaagagattgagtccagcggaagg

SEQ ID NO: 309391 - DNA, 57 bp, Artificial
  Synthetic oligonucleotide
acactataaggtgtccgatggctttttggtgggtcccattgctggtattgacttata

SEQ ID NO: 309392 - DNA, 59 bp, Artificial
  Synthetic oligonucleotide
acactatagaagtcttcagatcaaacggtctaacagccaatgaatcgggaagactaata

SEQ ID NO: 309393 - DNA, 55 bp, Artificial
  Synthetic oligonucleotide
acactatatttaaagcgccgcgcatgtactcatcataagacccactttcagggtc

SEQ ID NO: 309394 - DNA, 55 bp, Artificial
  Synthetic oligonucleotide
acactatcccatcctccaaccggatggaaaggtttatcaatggacaagaaacgga

SEQ ID NO: 309395 - DNA, 58 bp, Artificial
  Synthetic oligonucleotide
acactatcttcacttcaaactacggttgacggaaactccactgccatctccaatttga

SEQ ID NO: 309396 - DNA, 58 bp, Artificial
  Synthetic oligonucleotide
acactatgacaattttcaagctccccatattcctaacgcgcgatcttgttaactccga

SEQ ID NO: 309397 - DNA, 60 bp, Artificial
  Synthetic oligonucleotide
acactatggtggctttgtaccttgccactttaggggatgctatcactgcctttcatgagc

SEQ ID NO: 309398 - DNA, 60 bp, Artificial
  Synthetic oligonucleotide
acactatgtcgaaactcagaggaagcttctggtcttcggcaatcgctgttaacatcgatt

SEQ ID NO: 309399 - DNA, 55 bp, Artificial
  Synthetic oligonucleotide
acactatgttgggatcagtgacccgtatgtttacacagtggcgcgggtccattgt

SEQ ID NO: 309400 - DNA, 51 bp, Artificial
  Synthetic oligonucleotide
acactattatcacggtaattttgtacgccggttttatctccccttacccca

SEQ ID NO: 309401 - DNA, 57 bp, Artificial
  Synthetic oligonucleotide
acactattatggacgggcccatttctaatattgaaggagtattttctatggtcatcg

SEQ ID NO: 309402 - DNA, 50 bp, Artificial
  Synthetic oligonucleotide
acactattccaacaaatgcgtgatgtagtggggacatttgatactattca

SEQ ID NO: 309403 - DNA, 50 bp, Artificial
  Synthetic oligonucleotide
acactattccctatgaatcagagaatagtgtgtagattcattaacaatac

SEQ ID NO: 309404 - DNA, 57 bp, Artificial
  Synthetic oligonucleotide
acactattccctggcaagaggctggtatctctgccgcattaaacctggcaagatact

SEQ ID NO: 309405 - DNA, 60 bp, Artificial
  Synthetic oligonucleotide
acactattcgatagctccgatggaactctgcctatgtcacatccgccgggaacaatattt

SEQ ID NO: 309406 - DNA, 52 bp, Artificial
  Synthetic oligonucleotide
acactattctacattagacagtactcgtctattgcatctaccaatgccggtg

SEQ ID NO: 309407 - DNA, 55 bp, Artificial
  Synthetic oligonucleotide
acactcaaacggtagatttgagtaagaaagttagcgagtgtagaaacggaatcat

SEQ ID NO: 309408 - DNA, 60 bp, Artificial
  Synthetic oligonucleotide
acactcaaccatgtcctcacgccggaactccttgatggtcgagtctttgtacatgatctt

SEQ ID NO: 309409 - DNA, 60 bp, Artificial
  Synthetic oligonucleotide
acactcaactagagacactcttgagcatctcctcctgttaattggagacattatataggt

SEQ ID NO: 309410 - DNA, 60 bp, Artificial
  Synthetic oligonucleotide
acactcacattaattgccatgagatatctgcatttcttctccacggtacaccggtcgtgc

SEQ ID NO: 309411 - DNA, 52 bp, Artificial
  Synthetic oligonucleotide
acactcaccatatgccaatacctaagcatgaggaattaaagcagatcaatct

SEQ ID NO: 309412 - DNA, 56 bp, Artificial
  Synthetic oligonucleotide
acactcagtttgcaatgaatctatctggtgccctgaagaaacctatcattgtgttc

SEQ ID NO: 309413 - DNA, 53 bp, Artificial
  Synthetic oligonucleotide
acactcatggacccctaagaggaaccgttccattcttaataccagccaaaggg

SEQ ID NO: 309414 - DNA, 55 bp, Artificial
  Synthetic oligonucleotide
acactcatggatgctgcacaggcttatgctgagttacgtttgaactcacgagaga

SEQ ID NO: 309415 - DNA, 60 bp, Artificial
  Synthetic oligonucleotide
acactcatgggctcaagaagattgcttgcagaaggagtgagcaatgactgcgtttcaagg

SEQ ID NO: 309416 - DNA, 57 bp, Artificial
  Synthetic oligonucleotide
acactcattaaaataatcatcagcccaatcttgtaactcatctggaactgacgtgaa

SEQ ID NO: 309417 - DNA, 56 bp, Artificial
  Synthetic oligonucleotide
acactcattatgaggacaaaataatattggtatgggtagaaacaaattcagggtta

SEQ ID NO: 309418 - DNA, 60 bp, Artificial
  Synthetic oligonucleotide
acactcatttctccctatatagtcgatggatggcaattaaattggaccaagcaaagagta

SEQ ID NO: 309419 - DNA, 57 bp, Artificial
  Synthetic oligonucleotide
acactccaagaggacagatgaaacgtaaacttttatatgacatttcatataatgcgg

SEQ ID NO: 309420 - DNA, 59 bp, Artificial
  Synthetic oligonucleotide
acactccactcaagaggaaagtggaatcactaacaagagtattacgcgaagttctgagc

SEQ ID NO: 309421 - DNA, 55 bp, Artificial
  Synthetic oligonucleotide
acactccagacgcgcccaatgcacaagcccgtctatgacccgacgcagccatacg

SEQ ID NO: 309422 - DNA, 55 bp, Artificial
  Synthetic oligonucleotide
acactccagagcagacgggcagctgtgtcaacattggaggacaaattggcagaat

SEQ ID NO: 309423 - DNA, 59 bp, Artificial
  Synthetic oligonucleotide
acactccaggaccaggcgtcagataccccctgacctttggatggtgcttcaagctagta

SEQ ID NO: 309424 - DNA, 55 bp, Artificial
  Synthetic oligonucleotide
acactcccgaggtataactttagaccaactattcctacacaacataggatatgtt

SEQ ID NO: 309425 - DNA, 60 bp, Artificial
  Synthetic oligonucleotide
acactcccgggagcacacagtttctcacgtccgacgactttcagtcaccgtgcgctatgc

SEQ ID NO: 309426 - DNA, 53 bp, Artificial
  Synthetic oligonucleotide
acactccctcaagttggtgatcattcacacttattaccgcacggtggtgtgta

SEQ ID NO: 309427 - DNA, 60 bp, Artificial
  Synthetic oligonucleotide
acactccgactcatacatccttgcgtagttcactccttcgagtgcagtgttctccatgaa

SEQ ID NO: 309428 - DNA, 53 bp, Artificial
  Synthetic oligonucleotide
acactcctaacttcttagttacacttgtttcacttctattcagcatcctagca

SEQ ID NO: 309429 - DNA, 60 bp, Artificial
  Synthetic oligonucleotide
acactcctgatggagaggttccatcacccttcacccatgtatattgtcagggtgtcgtat

SEQ ID NO: 309430 - DNA, 54 bp, Artificial
  Synthetic oligonucleotide
acactcctggattcctaaaaggaaccgttccattctcaatactagccagagggg

SEQ ID NO: 309431 - DNA, 50 bp, Artificial
  Synthetic oligonucleotide
acactccttccccccgcggggccccccatccaaagatggaactccacccc

SEQ ID NO: 309432 - DNA, 58 bp, Artificial
  Synthetic oligonucleotide
acactccttcgagaatccgggacgtttcgtgaatctattggaagtagccatgattgga

SEQ ID NO: 309433 - DNA, 60 bp, Artificial
  Synthetic oligonucleotide
acactcgaaacagatgcagacatgtagcgtaatagatgttcgcgcctcagagttgatcgg

SEQ ID NO: 309434 - DNA, 51 bp, Artificial
  Synthetic oligonucleotide
acactcgaatgacgcagaatggggtgatactggctgctacattgttagacg

SEQ ID NO: 309435 - DNA, 52 bp, Artificial
  Synthetic oligonucleotide
acactcgactcggccccagcgattgaagcagcctacggcgtcggtcactccc

SEQ ID NO: 309436 - DNA, 51 bp, Artificial
  Synthetic oligonucleotide
acactcgaggagtggaaggcggggagacggggatcccgggcttacccacgg

SEQ ID NO: 309437 - DNA, 52 bp, Artificial
  Synthetic oligonucleotide
acactcgaggagtggaaggcggggagggggggtcggactaggtccctatgga

SEQ ID NO: 309438 - DNA, 53 bp, Artificial
  Synthetic oligonucleotide
acactcggttttggggcctacatgtctaaagcccacgggatcaaccccaacat

SEQ ID NO: 309439 - DNA, 57 bp, Artificial
  Synthetic oligonucleotide
acactctaatattgaagtcggccggtggtgaccaaaacgttggtagtgctgtgtata

SEQ ID NO: 309440 - DNA, 55 bp, Artificial
  Synthetic oligonucleotide
acactctagcaggttatgtaacatgttggtaccaaacaaatcttgttgtggcgcc

SEQ ID NO: 309441 - DNA, 52 bp, Artificial
  Synthetic oligonucleotide
acactctcagagacgtaaacgatttggcaaagtcgaaatctcaaaatcagcc

SEQ ID NO: 309442 - DNA, 60 bp, Artificial
  Synthetic oligonucleotide
acactctcataacgagatagtaaagtactagccatgagtgcagcttcatacttactaaac

SEQ ID NO: 309443 - DNA, 55 bp, Artificial
  Synthetic oligonucleotide
acactctccactattatcagagccaaaactctatggtataatgaagcacggtggt

SEQ ID NO: 309444 - DNA, 52 bp, Artificial
  Synthetic oligonucleotide
acactctccggggtgtgtcccttgcgttaacgagagtaacggcccgacgtgt

SEQ ID NO: 309445 - DNA, 57 bp, Artificial
  Synthetic oligonucleotide
acactctgcactgtcccaccgattgtttccgcaaacacccggaagccacgtactctc

SEQ ID NO: 309446 - DNA, 60 bp, Artificial
  Synthetic oligonucleotide
acactctgcatctcgctccaacatgtctggtgacatggagcacattgaagtgaagctcat

SEQ ID NO: 309447 - DNA, 60 bp, Artificial
  Synthetic oligonucleotide
acactctgtcacatgtgcaaccgttagagttagcatgaccttcaggtcaaccgaggttat

SEQ ID NO: 309448 - DNA, 53 bp, Artificial
  Synthetic oligonucleotide
acactcttattactcgcaaggtctagtgcagtagcacagcctgaatttgtcat

SEQ ID NO: 309449 - DNA, 60 bp, Artificial
  Synthetic oligonucleotide
acactcttcttgacctgattctcaatctcaggtttaagtgtggtgagaataggtgcccca

SEQ ID NO: 309450 - DNA, 60 bp, Artificial
  Synthetic oligonucleotide
acactcttgagcatctcctcctgttaattggagacattatataggtgtctctaaatggca

SEQ ID NO: 309451 - DNA, 60 bp, Artificial
  Synthetic oligonucleotide
acactctttacattacaacacatcagatcttagcattaccgcttggatctcgcgttgagt

SEQ ID NO: 309452 - DNA, 59 bp, Artificial
  Synthetic oligonucleotide
acactgaacggatggagctccgttgtggtgagggtctggttgtatggagagaggtatcc

SEQ ID NO: 309453 - DNA, 57 bp, Artificial
  Synthetic oligonucleotide
acactgacgcgagcataactgtctcgaaccccggaacgatatcgccgagatcaggcg

SEQ ID NO: 309454 - DNA, 59 bp, Artificial
  Synthetic oligonucleotide
acactgacggatgtgtacctcccagacctcgaagcatacctccacccagagacccagtc

SEQ ID NO: 309455 - DNA, 60 bp, Artificial
  Synthetic oligonucleotide
acactgactatatagtgactgtacaacgaacaggaccttttgaagttgacagagactcat

SEQ ID NO: 309456 - DNA, 60 bp, Artificial
  Synthetic oligonucleotide
acactgaggagattgctatgaggtgttacaacgataagaagacttggcaagaccagttta

SEQ ID NO: 309457 - DNA, 58 bp, Artificial
  Synthetic oligonucleotide
acactgagggggcatacagcaacgaaagtgagtggggccagacttcgccataaggcct

SEQ ID NO: 309458 - DNA, 56 bp, Artificial
  Synthetic oligonucleotide
acactgagtgatggaagcctacttttgtttgacccctataacctaacgcatgacgt

SEQ ID NO: 309459 - DNA, 56 bp, Artificial
  Synthetic oligonucleotide
acactgatcgcctacctagactccgaactctaccaatccgtcatcccgaacgggtc

SEQ ID NO: 309460 - DNA, 55 bp, Artificial
  Synthetic oligonucleotide
acactgatgataccttcagagtgcaggcatcgctacggttttccgtaggttcccc

SEQ ID NO: 309461 - DNA, 55 bp, Artificial
  Synthetic oligonucleotide
acactgcaagggacgtcaatcaaaacatgcacacacttcttggcatgggctcccc

SEQ ID NO: 309462 - DNA, 60 bp, Artificial
  Synthetic oligonucleotide
acactgcagagatgtcaggaggagtttatctgtaccaaggaagagttaactatgctacat

SEQ ID NO: 309463 - DNA, 55 bp, Artificial
  Synthetic oligonucleotide
acactgcagttgcagaacaacgaaggcttagaaaacttgacgaactggctagacg

SEQ ID NO: 309464 - DNA, 55 bp, Artificial
  Synthetic oligonucleotide
acactgcatacatatctcgactggcacaatcctctgcgtttcgtgaccgtcatgg

SEQ ID NO: 309465 - DNA, 58 bp, Artificial
  Synthetic oligonucleotide
acactgccacacgtgggtgacttgcaacatagtctaccgcacggaggtcggtacaggg

SEQ ID NO: 309466 - DNA, 55 bp, Artificial
  Synthetic oligonucleotide
acactgccccagccgagagtccccaagacaagccaacccgaagaaacagccgact

SEQ ID NO: 309467 - DNA, 58 bp, Artificial
  Synthetic oligonucleotide
acactgcccggcctgcggacgaaagtcgctcggagtcaggacttcagccatccgggag

SEQ ID NO: 309468 - DNA, 50 bp, Artificial
  Synthetic oligonucleotide
acactgccgagctcggaagaagattacttagtacgatacttgttcagagg

SEQ ID NO: 309469 - DNA, 60 bp, Artificial
  Synthetic oligonucleotide
acactgcctcaagtcggtgataatatacacaatctccctcacggaggaaattatcaggac

SEQ ID NO: 309470 - DNA, 56 bp, Artificial
  Synthetic oligonucleotide
acactgcgaagggtgtgtaggctgtatgccccggtaacatggaatcacatgctgac

SEQ ID NO: 309471 - DNA, 51 bp, Artificial
  Synthetic oligonucleotide
acactgcgactgggatgagggccatgaggcgaggccacagagcatggaatg

SEQ ID NO: 309472 - DNA, 60 bp, Artificial
  Synthetic oligonucleotide
acactgcggatgctggaagacaacgtgaacagacctgggtactatgagttactggaagcg

SEQ ID NO: 309473 - DNA, 60 bp, Artificial
  Synthetic oligonucleotide
acactgcggtgtatgtgggcatcgactggtccgaaactcatcgcattcccgcaattgaga

SEQ ID NO: 309474 - DNA, 55 bp, Artificial
  Synthetic oligonucleotide
acactgcgtgaaggcaatacggcaattagctcacaggcaactgaaggcattttgc

SEQ ID NO: 309475 - DNA, 60 bp, Artificial
  Synthetic oligonucleotide
acactgctacataataggatacatgccactgataatatgtggagagaacactttctccca

SEQ ID NO: 309476 - DNA, 60 bp, Artificial
  Synthetic oligonucleotide
acactgctacgatcattgtgccttacataaattcagtaccaatggactccatgaccagac

SEQ ID NO: 309477 - DNA, 58 bp, Artificial
  Synthetic oligonucleotide
acactgctattaatggtttggagaatgtggaattctttgatgctttggttcttggaac

SEQ ID NO: 309478 - DNA, 52 bp, Artificial
  Synthetic oligonucleotide
acactgctggtgagtatataacatgttggtaccagacgaacattgtggtgcc

SEQ ID NO: 309479 - DNA, 58 bp, Artificial
  Synthetic oligonucleotide
acactgctgttcaccttgtttaggcgtccgagacaaaatgcgtcatactgaacgtttg

SEQ ID NO: 309480 - DNA, 60 bp, Artificial
  Synthetic oligonucleotide
acactggaacgtatccaggaagcagcgcttgaagggcaggttgcacagggcgaagttaca

SEQ ID NO: 309481 - DNA, 60 bp, Artificial
  Synthetic oligonucleotide
acactggacatgcatgacgctaacgtgaagaatctgtatgaaaaggtcaaatcacaacta

SEQ ID NO: 309482 - DNA, 50 bp, Artificial
  Synthetic oligonucleotide
acactggattctttaagcgggttttccgacagcataggtggacttgttgg

SEQ ID NO: 309483 - DNA, 60 bp, Artificial
  Synthetic oligonucleotide
acactggcagatcagtcctctcaatcccccagaaccaaagagttctggagatgacacagt

SEQ ID NO: 309484 - DNA, 57 bp, Artificial
  Synthetic oligonucleotide
acactggcgtacacggcacgcctctcgcgtgacgtgttttcctgggagggacacagg

SEQ ID NO: 309485 - DNA, 60 bp, Artificial
  Synthetic oligonucleotide
acactgggtcccagcgcactcgctatgccaacgcgcgggacagcatattatccaacccac

SEQ ID NO: 309486 - DNA, 60 bp, Artificial
  Synthetic oligonucleotide
acactgggtgcagggacatcattggggacacctgatgtggctgtcaccgcaacagatgcc

SEQ ID NO: 309487 - DNA, 53 bp, Artificial
  Synthetic oligonucleotide
acactggtattcactacccagaagtgttgccatgaaggacgccctacccaagt

SEQ ID NO: 309488 - DNA, 50 bp, Artificial
  Synthetic oligonucleotide
acactggtcggaactcgcgacttccacggtcgccgcgtaagtcagtggtg

SEQ ID NO: 309489 - DNA, 55 bp, Artificial
  Synthetic oligonucleotide
acactggtgcctactacgtaatgtcagtaggggcaaagtccttcttggtccaccg

SEQ ID NO: 309490 - DNA, 55 bp, Artificial
  Synthetic oligonucleotide
acactggtgtacatctacatgtcagtttggtgacccaggagacatcatgagccca

SEQ ID NO: 309491 - DNA, 60 bp, Artificial
  Synthetic oligonucleotide
acactggtgtacatctacctgtcactttggagaccctggtgatgtcatgggtccaaaaga

SEQ ID NO: 309492 - DNA, 51 bp, Artificial
  Synthetic oligonucleotide
acactggtttgcctaaccagaaacccaaagtgccgaccctgagacaggcta

SEQ ID NO: 309493 - DNA, 60 bp, Artificial
  Synthetic oligonucleotide
acactgtaagtcagctaattaaatttgccgatgatgacttggattcggagatgaaacatt

SEQ ID NO: 309494 - DNA, 51 bp, Artificial
  Synthetic oligonucleotide
acactgtacgtgtgcctgtgagcgcaaacaacattcgctcagtcaagggag

SEQ ID NO: 309495 - DNA, 58 bp, Artificial
  Synthetic oligonucleotide
acactgtatagcttgtagttgcagaagagcttcttctttagttagatggcagtgaggg

SEQ ID NO: 309496 - DNA, 60 bp, Artificial
  Synthetic oligonucleotide
acactgtatcctacggcgattatactgagaaatattgcgagtggggagctgtctcggtct

SEQ ID NO: 309497 - DNA, 60 bp, Artificial
  Synthetic oligonucleotide
acactgtcaagaagatagatgctcaaatgttcgcgagtaacgcatgtacaaactccgtta

SEQ ID NO: 309498 - DNA, 52 bp, Artificial
  Synthetic oligonucleotide
acactgtcacaactcttcctgactaaaggatggccgacaaattccgtctact

SEQ ID NO: 309499 - DNA, 51 bp, Artificial
  Synthetic oligonucleotide
acactgtccagttacgcagaaaattagagtttttcacgtattccaggtttg

SEQ ID NO: 309500 - DNA, 60 bp, Artificial
  Synthetic oligonucleotide
acactgtcgccagaattgtttggagcataacgccgctcccggtagctacagtagctttga

SEQ ID NO: 309501 - DNA, 59 bp, Artificial
  Synthetic oligonucleotide
acactgtcgtcacgcgaatcgtatttccacctgaggcagtgaaggttgaagccttagta

SEQ ID NO: 309502 - DNA, 60 bp, Artificial
  Synthetic oligonucleotide
acactgtgcagaatcaatgccaccaattccttcataagaggtccattttctgcgcagtgg

SEQ ID NO: 309503 - DNA, 59 bp, Artificial
  Synthetic oligonucleotide
acactgtgcccgcctatcagaataccttcagacgatgaagttaaatcgctagttccaac

SEQ ID NO: 309504 - DNA, 58 bp, Artificial
  Synthetic oligonucleotide
acactgtggatgttaccattatgggtagtctactacaattggactttcagaatcccag

SEQ ID NO: 309505 - DNA, 59 bp, Artificial
  Synthetic oligonucleotide
acactgtgggacagttgccaacggagtgttgcaaacatttatgagaatggcctggggtg

SEQ ID NO: 309506 - DNA, 55 bp, Artificial
  Synthetic oligonucleotide
acactgttacaccccatgtagccatcaaatacggcatcaaatctaaatttctcgt

SEQ ID NO: 309507 - DNA, 59 bp, Artificial
  Synthetic oligonucleotide
acactgttatgagttccgcgaccttaaggttgcagcattcaagggggatgattctgttg

SEQ ID NO: 309508 - DNA, 60 bp, Artificial
  Synthetic oligonucleotide
acactgttcagtgtctatatgactagactaattaaaaatgcttgctttgatgcttatgac

SEQ ID NO: 309509 - DNA, 60 bp, Artificial
  Synthetic oligonucleotide
acactgtttggcaagttttgaacacagctgtttcagcagccgagcttgtgactccaccgc

SEQ ID NO: 309510 - DNA, 57 bp, Artificial
  Synthetic oligonucleotide
acacttacgtctccgcaagtgcaggaaccgatggactgtcgcttacccccccacagc

SEQ ID NO: 309511 - DNA, 55 bp, Artificial
  Synthetic oligonucleotide
acacttacgtctgcgcgcgcgtggggaccgctggactaccgttcacccacctacg

SEQ ID NO: 309512 - DNA, 58 bp, Artificial
  Synthetic oligonucleotide
acacttagaccagtggtagttcagggacctaatacagaatttgcattgtctctcctta

SEQ ID NO: 309513 - DNA, 50 bp, Artificial
  Synthetic oligonucleotide
acacttaggattcaagatcctatcgactggagcaggcttaaggcaaaggt

SEQ ID NO: 309514 - DNA, 54 bp, Artificial
  Synthetic oligonucleotide
acacttatccctggtgtatcggtactcaatatatagtgagtaccgaatggcatt

SEQ ID NO: 309515 - DNA, 60 bp, Artificial
  Synthetic oligonucleotide
acacttatgaggaggcaataaggactgttaggccacatgctgccatgggctggggatcta

SEQ ID NO: 309516 - DNA, 51 bp, Artificial
  Synthetic oligonucleotide
acacttatggttgtattagcagtacactacacactgctaaaactaggcatc

SEQ ID NO: 309517 - DNA, 60 bp, Artificial
  Synthetic oligonucleotide
acacttatttacgagacggagagttggttacagcgcatacaacatgttctgtcaatggtg

SEQ ID NO: 309518 - DNA, 59 bp, Artificial
  Synthetic oligonucleotide
acacttcaacggcattcctcgctccactgaggccaatctcctaggagttaggcgctacc

SEQ ID NO: 309519 - DNA, 60 bp, Artificial
  Synthetic oligonucleotide
acacttcagcctgggagcgttacacctactcgctcttcacagatgagcccggaacgataa

SEQ ID NO: 309520 - DNA, 55 bp, Artificial
  Synthetic oligonucleotide
acacttccacattacagaactgaggggcatttcatggaatttacaagagcaactg

SEQ ID NO: 309521 - DNA, 55 bp, Artificial
  Synthetic oligonucleotide
acacttcgcgtagaagaagctctctggttgcgtgagtgtcaggcaactactggct

SEQ ID NO: 309522 - DNA, 51 bp, Artificial
  Synthetic oligonucleotide
acacttctcatcctcagacctagatcaagatgcttgatccaggagaggtct

SEQ ID NO: 309523 - DNA, 60 bp, Artificial
  Synthetic oligonucleotide
acacttctgattctgtaaggttcgtcagagacgtgctcagcttaaccagtggtatgtatc

SEQ ID NO: 309524 - DNA, 57 bp, Artificial
  Synthetic oligonucleotide
acacttgaaggcggtgacaataagggaacctactgtggtgcaccaatcctaggtcca

SEQ ID NO: 309525 - DNA, 60 bp, Artificial
  Synthetic oligonucleotide
acacttgagaattgaaatcgaggtgaccactcagataattatgtgggcctaaggcacgtg

SEQ ID NO: 309526 - DNA, 55 bp, Artificial
  Synthetic oligonucleotide
acacttgatctgggacatagggctacaatcttcctgcactatggtcgtgccttgg

SEQ ID NO: 309527 - DNA, 59 bp, Artificial
  Synthetic oligonucleotide
acacttgcaaatatggtgttcacgttttgcaggtatgaggtacctgatggcaccccaat

SEQ ID NO: 309528 - DNA, 53 bp, Artificial
  Synthetic oligonucleotide
acacttgccgacatttgtaaacgtaataggttagaccgttttgcgtgtattta

SEQ ID NO: 309529 - DNA, 56 bp, Artificial
  Synthetic oligonucleotide
acacttgctgtatgtgaggaaggtgtttgcgttccggtgcctaaaggaccggacgc

SEQ ID NO: 309530 - DNA, 58 bp, Artificial
  Synthetic oligonucleotide
acacttggattcacaatgaaggttgagcctacagtggatgtattggaaaggttagaat

SEQ ID NO: 309531 - DNA, 55 bp, Artificial
  Synthetic oligonucleotide
acacttggcccgcgagcgacatccggagttttacaaagactgctgacacaggagg

SEQ ID NO: 309532 - DNA, 60 bp, Artificial
  Synthetic oligonucleotide
acacttggtttaccagtgtctcacacgacaccgttctgtgttacatcttatgactcctga

SEQ ID NO: 309533 - DNA, 60 bp, Artificial
  Synthetic oligonucleotide
acacttgtataatcaatggagcctccacatgcacgtaggcgaaagcgtgacacagttgaa

SEQ ID NO: 309534 - DNA, 60 bp, Artificial
  Synthetic oligonucleotide
acacttgtggtgtgccccactaacgagctcagaagagactggatagacaagctgcccctt

SEQ ID NO: 309535 - DNA, 53 bp, Artificial
  Synthetic oligonucleotide
acactttaatttgaattgggctccagttattgaaagcgacgtttataaacaag

SEQ ID NO: 309536 - DNA, 53 bp, Artificial
  Synthetic oligonucleotide
acactttagatagtaaaacgtggcaacaagattcaaagggttggtgttggaaa

SEQ ID NO: 309537 - DNA, 58 bp, Artificial
  Synthetic oligonucleotide
acactttagttgaagcaggtccttatgtacctaaattatcagatgaaacattcagtaa

SEQ ID NO: 309538 - DNA, 54 bp, Artificial
  Synthetic oligonucleotide
acactttcacccgtctcctcttatgggcggctttggactcaagaacccgcctcc

SEQ ID NO: 309539 - DNA, 50 bp, Artificial
  Synthetic oligonucleotide
acactttcattgaagatggtgacatggcagatattggttttggcaacatg

SEQ ID NO: 309540 - DNA, 51 bp, Artificial
  Synthetic oligonucleotide
acactttcctttcgaaggtcccactgaatgcaagccacaatgcaaacctga

SEQ ID NO: 309541 - DNA, 55 bp, Artificial
  Synthetic oligonucleotide
acactttcgttcgaagccaagataaggaaaactcgctgtacgtcctccaacacga

SEQ ID NO: 309542 - DNA, 57 bp, Artificial
  Synthetic oligonucleotide
acactttctagcaggactatttaacgagtaaacaatcaaaggctcttgagaaagcga

SEQ ID NO: 309543 - DNA, 60 bp, Artificial
  Synthetic oligonucleotide
acactttgaagatttagccgctcactggcacgcgctaggtgcggcgcaagaggcgaaggg

SEQ ID NO: 309544 - DNA, 52 bp, Artificial
  Synthetic oligonucleotide
acactttgctctgtgatattggagaatcggcctcgagcgcggaagtggagga

SEQ ID NO: 309545 - DNA, 60 bp, Artificial
  Synthetic oligonucleotide
acactttggagcaagactaatgatgcaggatcagacagagtaatggtgtcccctctagcc

SEQ ID NO: 309546 - DNA, 55 bp, Artificial
  Synthetic oligonucleotide
acacttttcaaacttgctggtcaccatttgattacaccctggaatataaaaacaa

SEQ ID NO: 309547 - DNA, 50 bp, Artificial
  Synthetic oligonucleotide
acacttttcaacttcgaggcgaagttcccttacaatcaaccatttatctg

SEQ ID NO: 309548 - DNA, 52 bp, Artificial
  Synthetic oligonucleotide
acagaaaacccccctttaaggacactcaaataacaggccctagtctacatcc

SEQ ID NO: 309549 - DNA, 59 bp, Artificial
  Synthetic oligonucleotide
acagaaaagctgtcggacccagagacgagacgcggtgccatgctttctataactagccg

SEQ ID NO: 309550 - DNA, 60 bp, Artificial
  Synthetic oligonucleotide
acagaaaatcagtcatatgctatgacctatcttgcaattcaacacattgtaagcctacaa

SEQ ID NO: 309551 - DNA, 59 bp, Artificial
  Synthetic oligonucleotide
acagaaaattctgctcttgtggagactacacccaacatttcagatttcctagtcctgta

SEQ ID NO: 309552 - DNA, 56 bp, Artificial
  Synthetic oligonucleotide
acagaaaggttgataaacaattagttacggttgtgtcaaatgcagtgaaagacact

SEQ ID NO: 309553 - DNA, 59 bp, Artificial
  Synthetic oligonucleotide
acagaaagtggattcagacctaagccccaggcttagagctataacaatatcaccaccta

SEQ ID NO: 309554 - DNA, 57 bp, Artificial
  Synthetic oligonucleotide
acagaaagtttgtggcccagtatactgcttcactcccagccctgtagtggtgggtac

SEQ ID NO: 309555 - DNA, 55 bp, Artificial
  Synthetic oligonucleotide
acagaaatcaaccggccgcaactgcattagccaacactatagaagtcttcagatc

SEQ ID NO: 309556 - DNA, 59 bp, Artificial
  Synthetic oligonucleotide
acagaaatctgccatcaacagctagatatataagacctaacttactacaagacagactg

SEQ ID NO: 309557 - DNA, 58 bp, Artificial
  Synthetic oligonucleotide
acagaaatgatgaagagtactatgattccggccgatcaggaaaaattggatatcttag

SEQ ID NO: 309558 - DNA, 60 bp, Artificial
  Synthetic oligonucleotide
acagaaatggttgaggagctgcgccgacccttgtgcggccactgtggtctgccctactct

SEQ ID NO: 309559 - DNA, 55 bp, Artificial
  Synthetic oligonucleotide
acagaaattgtgtacacacccatattgacaccagatggaacgattgtcaagaagt

SEQ ID NO: 309560 - DNA, 60 bp, Artificial
  Synthetic oligonucleotide
acagaacaacaggcgaaaatccgcaacaatgcgtgcagtgaagcgcatgataactacaca

SEQ ID NO: 309561 - DNA, 55 bp, Artificial
  Synthetic oligonucleotide
acagaacaagtacaacccaaagcgctaacctaaataaaatcgtcaattggcacaa

SEQ ID NO: 309562 - DNA, 55 bp, Artificial
  Synthetic oligonucleotide
acagaacaggcgacagcgcactgggtttgtatttcataaaccaaacatacttcca

SEQ ID NO: 309563 - DNA, 60 bp, Artificial
  Synthetic oligonucleotide
acagaacattacctaaagaatgttcactctatgtcaaagcaacaattgcatgaactgatt

SEQ ID NO: 309564 - DNA, 60 bp, Artificial
  Synthetic oligonucleotide
acagaaccagtatgtgtcctcatacatggtacaccaggatcaggtaagtcattaaccact

SEQ ID NO: 309565 - DNA, 55 bp, Artificial
  Synthetic oligonucleotide
acagaaccctttatccaagaatggtagcgcagcgggacgaaaaccaaactggaca

SEQ ID NO: 309566 - DNA, 51 bp, Artificial
  Synthetic oligonucleotide
acagaacctccagcttatcaacagcaatgggagctggcatatcaacaggac

SEQ ID NO: 309567 - DNA, 57 bp, Artificial
  Synthetic oligonucleotide
acagaacgcttatggtttcctggcaaacggtttgcctctgtattgcgatactaacac

SEQ ID NO: 309568 - DNA, 55 bp, Artificial
  Synthetic oligonucleotide
acagaacgtggtgtaaggggtaccaggctctgcgtcagcgtgtagtgcggagccc

SEQ ID NO: 309569 - DNA, 55 bp, Artificial
  Synthetic oligonucleotide
acagaactagcctatcaaacattagtgaaacggtgggagaagtacccgaatggat

SEQ ID NO: 309570 - DNA, 57 bp, Artificial
  Synthetic oligonucleotide
acagaactggggtcacccctagtgctcgacgattgttccctggagggcttgatccta

SEQ ID NO: 309571 - DNA, 55 bp, Artificial
  Synthetic oligonucleotide
acagaacttacaagagtgtttagaagtgataaaacctgttgtaatagctgggtta

SEQ ID NO: 309572 - DNA, 60 bp, Artificial
  Synthetic oligonucleotide
acagaacttgaagggaatgtcgtccacgacattgtacgcagcttcttcatcgtatgaaga

SEQ ID NO: 309573 - DNA, 58 bp, Artificial
  Synthetic oligonucleotide
acagaagactgttttaacagcgctgaagaagcgtaatgccgacgttccagagttatcc

SEQ ID NO: 309574 - DNA, 57 bp, Artificial
  Synthetic oligonucleotide
acagaagagacgaagacgcagtagacggaccatgtccatatatgactactacaagag

SEQ ID NO: 309575 - DNA, 55 bp, Artificial
  Synthetic oligonucleotide
acagaagatgattatccagagtgtaatttggcattggtagcaaatcaacctgaac

SEQ ID NO: 309576 - DNA, 60 bp, Artificial
  Synthetic oligonucleotide
acagaagccatagtgtgtgtagaactcaccagtcaggaaaggcagtgtagcttggttgag

SEQ ID NO: 309577 - DNA, 55 bp, Artificial
  Synthetic oligonucleotide
acagaagcccatttagggcattaataagttgggaaatggggcaagcaccgagtcc

SEQ ID NO: 309578 - DNA, 59 bp, Artificial
  Synthetic oligonucleotide
acagaagccttaaagatgggcgttcagctggcggcgccaactgtataggactgaccaac

SEQ ID NO: 309579 - DNA, 55 bp, Artificial
  Synthetic oligonucleotide
acagaagcgaccttaaatctgtcgtttcaaccattgcggatggggccaacaccgc

SEQ ID NO: 309580 - DNA, 60 bp, Artificial
  Synthetic oligonucleotide
acagaagctgcgaatgagatcgcacgtgtaactggagagacgtcaacgtggggaccggcg

SEQ ID NO: 309581 - DNA, 55 bp, Artificial
  Synthetic oligonucleotide
acagaaggaacacttgaaaactgcgagaccaagtgccaaagtcctttgggagcaa

SEQ ID NO: 309582 - DNA, 56 bp, Artificial
  Synthetic oligonucleotide
acagaaggcttcatcttccaagttaacacctccaagactggtgttaatgaaaacta

SEQ ID NO: 309583 - DNA, 58 bp, Artificial
  Synthetic oligonucleotide
acagaagggttagaggctctggacctaacaacgagtgcggggtatccatatgttgcac

SEQ ID NO: 309584 - DNA, 55 bp, Artificial
  Synthetic oligonucleotide
acagaagggttgtcgggtccacccattggggagctgacctcgcagtcacccctta

SEQ ID NO: 309585 - DNA, 54 bp, Artificial
  Synthetic oligonucleotide
acagaaggtatagtaggtctgtgtatggtgctacattagaggccattactaaca

SEQ ID NO: 309586 - DNA, 54 bp, Artificial
  Synthetic oligonucleotide
acagaaggtatgggccagcactgagcatcagtgaactgagcaatcttgcgaaag

SEQ ID NO: 309587 - DNA, 55 bp, Artificial
  Synthetic oligonucleotide
acagaagtaaattggttacgtagtacagtgcgttaaactgtacgactatcttcta

SEQ ID NO: 309588 - DNA, 55 bp, Artificial
  Synthetic oligonucleotide
acagaagtaagataaatagctagacgaccttggcgccaccacctggccctggtgg

SEQ ID NO: 309589 - DNA, 51 bp, Artificial
  Synthetic oligonucleotide
acagaagtatcgacggcgtaagagacgcgtgcttgaacgcacagtagcgag

SEQ ID NO: 309590 - DNA, 56 bp, Artificial
  Synthetic oligonucleotide
acagaagtgacgagaatgtgacatccatacgcagtcttgggtttggaaacattacc

SEQ ID NO: 309591 - DNA, 55 bp, Artificial
  Synthetic oligonucleotide
acagaagtggcagctccttgcagatagctccagagtgtcgcattccctttctggt

SEQ ID NO: 309592 - DNA, 60 bp, Artificial
  Synthetic oligonucleotide
acagaagtggcttttggcctagtatgtgccacttgtgagcagattgctgactcacaacat

SEQ ID NO: 309593 - DNA, 59 bp, Artificial
  Synthetic oligonucleotide
acagaagtttcgaatacaattgtagatacaactaacacaaccagttcaatagcgacaca

SEQ ID NO: 309594 - DNA, 59 bp, Artificial
  Synthetic oligonucleotide
acagaatagtggaatgcgttaattggttaaacgatcatcctacgatgcttagtatcgaa

SEQ ID NO: 309595 - DNA, 55 bp, Artificial
  Synthetic oligonucleotide
acagaatccggtctaacggactcggcgggtccgtcccgcctcacgtccatgataa

SEQ ID NO: 309596 - DNA, 60 bp, Artificial
  Synthetic oligonucleotide
acagaatctaagttttggtactatggcacctattatagatgatggtgagagtcctatctt

SEQ ID NO: 309597 - DNA, 60 bp, Artificial
  Synthetic oligonucleotide
acagaatctactagctatagagatcgcattagagggaccgagcagtgtaacacagcagtt

SEQ ID NO: 309598 - DNA, 60 bp, Artificial
  Synthetic oligonucleotide
acagaatgagcatggaatcatagacaggatcaattacacctcagggccaggaacccggta

SEQ ID NO: 309599 - DNA, 60 bp, Artificial
  Synthetic oligonucleotide
acagaatgatcgcatggcatggatcgttgctaacttcgttctcgctcccgtatgccctaa

SEQ ID NO: 309600 - DNA, 53 bp, Artificial
  Synthetic oligonucleotide
acagaatgcagagcatactgtacaaaagaggatactcgagttgctccacccgt

SEQ ID NO: 309601 - DNA, 60 bp, Artificial
  Synthetic oligonucleotide
acagaatgggaggacactcacggagccagcaacatagacaatccacagtggtgcattaag

SEQ ID NO: 309602 - DNA, 57 bp, Artificial
  Synthetic oligonucleotide
acagaatggtaagcacgtgtaataggaggtacaagcaaccctattgcatattaggaa

SEQ ID NO: 309603 - DNA, 60 bp, Artificial
  Synthetic oligonucleotide
acagaatggtgctagcaagcacaacagctaaggctatggagcagatggctggatcaagtg

SEQ ID NO: 309604 - DNA, 55 bp, Artificial
  Synthetic oligonucleotide
acagaattacataactctgtgataatgtcgggagcaaattccacgaggaaaacgc

SEQ ID NO: 309605 - DNA, 53 bp, Artificial
  Synthetic oligonucleotide
acagaattattgcgtctggggtgcggtttaactcttgaggatttagaggtggg

SEQ ID NO: 309606 - DNA, 60 bp, Artificial
  Synthetic oligonucleotide
acagaattcctagaaggaattgatctggcaacaagtgcaggatacccctacaacgcattg

SEQ ID NO: 309607 - DNA, 60 bp, Artificial
  Synthetic oligonucleotide
acagaattctcgatggaagagactgcacattaatggatgctctactaggggaccctcatt

SEQ ID NO: 309608 - DNA, 60 bp, Artificial
  Synthetic oligonucleotide
acagacaaatatgggaaaatcgagtccagtttgtctgtatctgtctctgcagtgtctatt

SEQ ID NO: 309609 - DNA, 59 bp, Artificial
  Synthetic oligonucleotide
acagacaactcatcccctccggctgtaccgcaaacatttcaagtggcccatctacacgc

SEQ ID NO: 309610 - DNA, 60 bp, Artificial
  Synthetic oligonucleotide
acagacaaggttcttgcagccgagcgctactacaccatagacttggctagttggaccact

SEQ ID NO: 309611 - DNA, 50 bp, Artificial
  Synthetic oligonucleotide
acagacaataattcattctgggtgaccacaagctgtgtccccagtctgtt

SEQ ID NO: 309612 - DNA, 60 bp, Artificial
  Synthetic oligonucleotide
acagacaatgctaaagtcataatagtgcagctaaaagaatctgtagaaattaattgtaca

SEQ ID NO: 309613 - DNA, 60 bp, Artificial
  Synthetic oligonucleotide
acagacaatgctaaagtcattatagtacagctgaatgaatctgtacgaattgattgtata

SEQ ID NO: 309614 - DNA, 57 bp, Artificial
  Synthetic oligonucleotide
acagacaatggcggcaatttcgtcagtactacggttaaggctgcctgttggtgggcg

SEQ ID NO: 309615 - DNA, 50 bp, Artificial
  Synthetic oligonucleotide
acagacaattgctgacggtaaggcccactacactgagactgtcaagcctg

SEQ ID NO: 309616 - DNA, 60 bp, Artificial
  Synthetic oligonucleotide
acagacacactcaagagctggaaaggcaacattatgcgaacacaagagtctgagtgcgtg

SEQ ID NO: 309617 - DNA, 58 bp, Artificial
  Synthetic oligonucleotide
acagacaccggccagccccttacaaagctgttctgtgcagaccccgccttggacaata

SEQ ID NO: 309618 - DNA, 59 bp, Artificial
  Synthetic oligonucleotide
acagacaccttagcagtggccgtggcaactcggtatgaggtagacaacatcacacctgt

SEQ ID NO: 309619 - DNA, 55 bp, Artificial
  Synthetic oligonucleotide
acagacacgctgttactatagaattcacaataactggtgaacatacggtattacc

SEQ ID NO: 309620 - DNA, 60 bp, Artificial
  Synthetic oligonucleotide
acagacactccacgggttcaggacagtagtttcactggttcctgcactaatgctgttgga

SEQ ID NO: 309621 - DNA, 60 bp, Artificial
  Synthetic oligonucleotide
acagacactctgtcagcaaatagtgcgcagaatgaagcttctgctcatcttggtggttgc

SEQ ID NO: 309622 - DNA, 54 bp, Artificial
  Synthetic oligonucleotide
acagacacttatattgccgataattcacttcgacatcaattctctgaatggaga

SEQ ID NO: 309623 - DNA, 60 bp, Artificial
  Synthetic oligonucleotide
acagacagatggtgacaacaatcaacccactaatcaggcatgagaatagaatggtactag

SEQ ID NO: 309624 - DNA, 60 bp, Artificial
  Synthetic oligonucleotide
acagacagcgcacagatcacgcttccaagcggtgatgcctatagaattcctcagtacacg

SEQ ID NO: 309625 - DNA, 60 bp, Artificial
  Synthetic oligonucleotide
acagacagtggacatgatacagtggtcatggaggttgcgttctctgggaccaagccctgt

SEQ ID NO: 309626 - DNA, 60 bp, Artificial
  Synthetic oligonucleotide
acagacataatgtgactaggaatctgaccatttaactgcatggtctgatggaagaattct

SEQ ID NO: 309627 - DNA, 60 bp, Artificial
  Synthetic oligonucleotide
acagacatacgcatcaggattttcggacagtacagaaatagtagagctaagacaagaaga

SEQ ID NO: 309628 - DNA, 57 bp, Artificial
  Synthetic oligonucleotide
acagacatcggcagagtattgctaataccctcttattctgtccttagacgtagatgg

SEQ ID NO: 309629 - DNA, 60 bp, Artificial
  Synthetic oligonucleotide
acagacatctacaccatagaagaccaaagactggaggacacgacccacctccagtatgcc

SEQ ID NO: 309630 - DNA, 57 bp, Artificial
  Synthetic oligonucleotide
acagacatgttttgcgagcctaggaatcttggccttgtccccagttaaactggacaa

SEQ ID NO: 309631 - DNA, 55 bp, Artificial
  Synthetic oligonucleotide
acagaccaaaactacttcgcatccgttccgagtgatctggcacaaatgatcaagg

SEQ ID NO: 309632 - DNA, 59 bp, Artificial
  Synthetic oligonucleotide
acagaccaaacggaactctttacattgacaatgcttggggtcgtcctcacattgcatta

SEQ ID NO: 309633 - DNA, 56 bp, Artificial
  Synthetic oligonucleotide
acagaccaactgatgttaaccctaaagagctttctgtataatctgaaaacccattg

SEQ ID NO: 309634 - DNA, 58 bp, Artificial
  Synthetic oligonucleotide
acagaccaagaacgcaaagacttatatgaagtcctgcttaactgccaaatgcctacct

SEQ ID NO: 309635 - DNA, 59 bp, Artificial
  Synthetic oligonucleotide
acagaccaatgcgcaacaatctcaccgaccctcctttctatccctggatgccccgctac

SEQ ID NO: 309636 - DNA, 56 bp, Artificial
  Synthetic oligonucleotide
acagaccacatcaagtgcgtagcactaaatgttagcatactccggaactggttatc

SEQ ID NO: 309637 - DNA, 55 bp, Artificial
  Synthetic oligonucleotide
acagaccagctatggcgctgccagttgtctttattaatcacaccgttgtaaacgc

SEQ ID NO: 309638 - DNA, 55 bp, Artificial
  Synthetic oligonucleotide
acagacccagacgagattcttaattcattaaatatgaaggcgtccgttggagctc

SEQ ID NO: 309639 - DNA, 53 bp, Artificial
  Synthetic oligonucleotide
acagacccccggcgtaggtcgcgcaatttgggtaaggtcatcgatacccttac

SEQ ID NO: 309640 - DNA, 59 bp, Artificial
  Synthetic oligonucleotide
acagaccccgagagcacggcactgaacatcaggcaatcaagaagtgcacaatgagcatt

SEQ ID NO: 309641 - DNA, 55 bp, Artificial
  Synthetic oligonucleotide
acagaccgattccagctccaagaagaagacataattcccaatgacagatacattg

SEQ ID NO: 309642 - DNA, 60 bp, Artificial
  Synthetic oligonucleotide
acagacctctgtgacatgacactgctaactatctatgcaaccgcagcggatatgcaatat

SEQ ID NO: 309643 - DNA, 54 bp, Artificial
  Synthetic oligonucleotide
acagaccttcactcggaatttcatcacagacactccacggaaatgcgcgacgca

SEQ ID NO: 309644 - DNA, 59 bp, Artificial
  Synthetic oligonucleotide
acagacctttgattggacggtgtgtagaaaccaacctgctgcaacggcactgaacacaa

SEQ ID NO: 309645 - DNA, 60 bp, Artificial
  Synthetic oligonucleotide
acagacgaagtaatgactgtggtagatgactttttcggatcatatgtagattctcgaaaa

SEQ ID NO: 309646 - DNA, 55 bp, Artificial
  Synthetic oligonucleotide
acagacgacacacgaacggcaaaatgtgcgtactgatacccactttcgacgcctc

SEQ ID NO: 309647 - DNA, 55 bp, Artificial
  Synthetic oligonucleotide
acagacgcactatccaccgggtacactgggaacttcgattctgtcactgattgtg

SEQ ID NO: 309648 - DNA, 55 bp, Artificial
  Synthetic oligonucleotide
acagacgcgccacgtcaaaaactaccattcaaggtcggagtctacgattgaaaac

SEQ ID NO: 309649 - DNA, 57 bp, Artificial
  Synthetic oligonucleotide
acagacgcgtttcccgtggcaccatgcgaaaggggttacatacgtttagatcacaca

SEQ ID NO: 309650 - DNA, 54 bp, Artificial
  Synthetic oligonucleotide
acagacggaacttaccaaaagcgtcgtactcacattaaagtcccaccccatgac

SEQ ID NO: 309651 - DNA, 60 bp, Artificial
  Synthetic oligonucleotide
acagacggacgaagcgaacaaatggattgcgatgggagattcatgtactattaaagtatg

SEQ ID NO: 309652 - DNA, 55 bp, Artificial
  Synthetic oligonucleotide
acagacggagcccggctccgtaaggttagtagcaatattagataccttagccaaa

SEQ ID NO: 309653 - DNA, 59 bp, Artificial
  Synthetic oligonucleotide
acagacggttacgttaactgggacattgatttgatgggatatgctcaattacggcgcaa

SEQ ID NO: 309654 - DNA, 58 bp, Artificial
  Synthetic oligonucleotide
acagacgtccatgtcgtgtgtagtgcggtctggctaaccgtaacggcgtatcggcttg

SEQ ID NO: 309655 - DNA, 55 bp, Artificial
  Synthetic oligonucleotide
acagacgtcccaacaccctacacagaaacaccgacatcggaatcggaggactcgg

SEQ ID NO: 309656 - DNA, 50 bp, Artificial
  Synthetic oligonucleotide
acagactaatgaacatgtggactcgctctgccgattagcctggcattgcg

SEQ ID NO: 309657 - DNA, 59 bp, Artificial
  Synthetic oligonucleotide
acagactaattttaggacgaggtcccaagatatgtcatacattaggagacgattcacta

SEQ ID NO: 309658 - DNA, 60 bp, Artificial
  Synthetic oligonucleotide
acagactactccaggaacatttttcggatagcgacagccaagctgtacacgaaggtctca

SEQ ID NO: 309659 - DNA, 55 bp, Artificial
  Synthetic oligonucleotide
acagactatacctctgttaactgcttcaccatgttccggagattatttggagagt

SEQ ID NO: 309660 - DNA, 55 bp, Artificial
  Synthetic oligonucleotide
acagactatatacacatgcttggggaagcctttggtagtgggtttgtagacagtg

SEQ ID NO: 309661 - DNA, 60 bp, Artificial
  Synthetic oligonucleotide
acagactcacaatatgcattaagaatcattcaagcacaaccagacaagagtgaatcagaa

SEQ ID NO: 309662 - DNA, 60 bp, Artificial
  Synthetic oligonucleotide
acagactcagcttggctgctgttctgaagatcatgtctgcaggcagcaagttccttatgg

SEQ ID NO: 309663 - DNA, 60 bp, Artificial
  Synthetic oligonucleotide
acagactccaggttgccattggacactggagctgtgaatcagtaacgaaagtgagtgggg

SEQ ID NO: 309664 - DNA, 60 bp, Artificial
  Synthetic oligonucleotide
acagactccattaaatcatggagaaaggacatactaagaactcaggagtccgaatgtcaa

SEQ ID NO: 309665 - DNA, 60 bp, Artificial
  Synthetic oligonucleotide
acagactccccagttgtcacatccagcattggctccagtgccgtgcttgaagtcgctcct

SEQ ID NO: 309666 - DNA, 55 bp, Artificial
  Synthetic oligonucleotide
acagactcctaacacttatcaatttggacgactcaaaacgttacgttatgacaaa

SEQ ID NO: 309667 - DNA, 55 bp, Artificial
  Synthetic oligonucleotide
acagactctatcaaatcatggagaaaggacatattaaggacccaagaatccgaat

SEQ ID NO: 309668 - DNA, 59 bp, Artificial
  Synthetic oligonucleotide
acagactgtgtcctggaggctatggccttccttgaagagtcccacccagggatctttga

SEQ ID NO: 309669 - DNA, 55 bp, Artificial
  Synthetic oligonucleotide
acagacttagaactggacttttcactcccgtcttcttctagttatacttatagaa

SEQ ID NO: 309670 - DNA, 60 bp, Artificial
  Synthetic oligonucleotide
acagacttgctcttagtgtgatggatgagctaaggaccttgttcccagaactgtcatcca

SEQ ID NO: 309671 - DNA, 60 bp, Artificial
  Synthetic oligonucleotide
acagactttaccatcctgtgtcctacctgtgcaaagcggccatgagtgacgaaccaggta

SEQ ID NO: 309672 - DNA, 51 bp, Artificial
  Synthetic oligonucleotide
acagagaaagacaaaacgaatctactgattggaaatggttatatattagtt

SEQ ID NO: 309673 - DNA, 52 bp, Artificial
  Synthetic oligonucleotide
acagagaaagggattgaagtagtgaatgccacagagacagttgaaactgcga

SEQ ID NO: 309674 - DNA, 60 bp, Artificial
  Synthetic oligonucleotide
acagagaaatctttggattgtgtcaatgcatatatcatgttgtaactgtatagtccacat

SEQ ID NO: 309675 - DNA, 53 bp, Artificial
  Synthetic oligonucleotide
acagagaagacgtggttaaactagttaacaaccagaagaatgcgttaataacc

SEQ ID NO: 309676 - DNA, 55 bp, Artificial
  Synthetic oligonucleotide
acagagaaggaagggaccaacagtggaaaggaccagcagagctcatttggaaagg

SEQ ID NO: 309677 - DNA, 60 bp, Artificial
  Synthetic oligonucleotide
acagagaagtgcgtcatcattgacgcaccaggcttgcttcgtgaggtgggcatctctgac

SEQ ID NO: 309678 - DNA, 60 bp, Artificial
  Synthetic oligonucleotide
acagagaataaagttcttggatctatgtgttgctatggatatgtcaagtgagtgtttagg

SEQ ID NO: 309679 - DNA, 57 bp, Artificial
  Synthetic oligonucleotide
acagagacaagcactacttcgtgcggggtggcatgccctcaggatgttccggtacca

SEQ ID NO: 309680 - DNA, 60 bp, Artificial
  Synthetic oligonucleotide
acagagacaagttggcatgagagtttatatgaagttgcgcaagattgtgcatggtggaca

SEQ ID NO: 309681 - DNA, 58 bp, Artificial
  Synthetic oligonucleotide
acagagaccaaacaaactttgactggggaatacgaggactatgtatactcagagataa

SEQ ID NO: 309682 - DNA, 60 bp, Artificial
  Synthetic oligonucleotide
acagagaccacaattatagctacggctgatgctaggggtcttatccagtcatcccgagct

SEQ ID NO: 309683 - DNA, 51 bp, Artificial
  Synthetic oligonucleotide
acagagactgtggtgccatccattggaacatcggacgtttactgtaaaatg

SEQ ID NO: 309684 - DNA, 54 bp, Artificial
  Synthetic oligonucleotide
acagagagaactccaccaacgtccccgcaatttcccgattctaccacccaagac

SEQ ID NO: 309685 - DNA, 60 bp, Artificial
  Synthetic oligonucleotide
acagagagcaccatacaatgaatgggcattagaactgttagaggagctcaaaaatgaagc

SEQ ID NO: 309686 - DNA, 55 bp, Artificial
  Synthetic oligonucleotide
acagagagcagcgggtgctataccaagtatactatcagaagcattagcagttacg

SEQ ID NO: 309687 - DNA, 60 bp, Artificial
  Synthetic oligonucleotide
acagagagcatctgcagggcaaattagcgtgcagcccacattctctgtgcagaggaacct

SEQ ID NO: 309688 - DNA, 60 bp, Artificial
  Synthetic oligonucleotide
acagagaggcagtgaaccatctgccccgagagctcattttccaggtgtggcaaaggtcct

SEQ ID NO: 309689 - DNA, 58 bp, Artificial
  Synthetic oligonucleotide
acagagagttttaaaggcttatcacccatcgcactggctcagaagaagcatgagatga

SEQ ID NO: 309690 - DNA, 60 bp, Artificial
  Synthetic oligonucleotide
acagagatacttggggaaccgtacagtgcttgccagataatggtgattatcaagaaatag

SEQ ID NO: 309691 - DNA, 59 bp, Artificial
  Synthetic oligonucleotide
acagagatcaacaggatagcagtcaatcatttacccagggagcttattttccaggtttg

SEQ ID NO: 309692 - DNA, 58 bp, Artificial
  Synthetic oligonucleotide
acagagattggcgctttgtcgtcgcgctttattactgtcaacgggggtatagtagcga

SEQ ID NO: 309693 - DNA, 60 bp, Artificial
  Synthetic oligonucleotide
acagagcaaaacagaccacatcaagtgcgtagcaccagatgttagcctactaccggaact

SEQ ID NO: 309694 - DNA, 56 bp, Artificial
  Synthetic oligonucleotide
acagagcatcccactaacgtaccatcccgccgattcagcgaggccggtagctcatt

SEQ ID NO: 309695 - DNA, 60 bp, Artificial
  Synthetic oligonucleotide
acagagccacccactgtaccaagtgcgttcgctcaatctacggcacttaatgtgtctgtg

SEQ ID NO: 309696 - DNA, 50 bp, Artificial
  Synthetic oligonucleotide
acagagccagttttagcacagatggtcttcattgacagccaagggatccg

SEQ ID NO: 309697 - DNA, 55 bp, Artificial
  Synthetic oligonucleotide
acagagccatcaaggtttccggcagtcagaagaagttggacgcttcttttgtcgg

SEQ ID NO: 309698 - DNA, 60 bp, Artificial
  Synthetic oligonucleotide
acagagcgctttggagtcttatggcattggctctgatccgtacgctgtgcgttctcatac

SEQ ID NO: 309699 - DNA, 56 bp, Artificial
  Synthetic oligonucleotide
acagagcgggatattcaggaacactacccgtccgttcatggagtcagattgcttac

SEQ ID NO: 309700 - DNA, 60 bp, Artificial
  Synthetic oligonucleotide
acagagctaagcacattagagcttgggtaccaagaccacccagagcactaccatacacat

SEQ ID NO: 309701 - DNA, 54 bp, Artificial
  Synthetic oligonucleotide
acagagctccccccggaggatgggaccccaccgagggagccaggggatgagtgg

SEQ ID NO: 309702 - DNA, 60 bp, Artificial
  Synthetic oligonucleotide
acagagctcttataagttgggaaatgggccaagcacccagtccatataatgctagagttg

SEQ ID NO: 309703 - DNA, 60 bp, Artificial
  Synthetic oligonucleotide
acagagctgaagcacgcctcaactctttctcgggcaattgggagagctatgactacctgc

SEQ ID NO: 309704 - DNA, 54 bp, Artificial
  Synthetic oligonucleotide
acagagcttataagtccattctgtccggaataaatgctgctaggttggatcctg

SEQ ID NO: 309705 - DNA, 60 bp, Artificial
  Synthetic oligonucleotide
acagagcttgggttgataccaattgagacagcatcagacttaaagcttgaaagttcatgc

SEQ ID NO: 309706 - DNA, 55 bp, Artificial
  Synthetic oligonucleotide
acagagcttggtaacactcatggttgaaacactgataacaatgaacacaggcagg

SEQ ID NO: 309707 - DNA, 60 bp, Artificial
  Synthetic oligonucleotide
acagaggatgccatcttgtggcagcggaacccagtcactcgggagcttcaggtctcgcca

SEQ ID NO: 309708 - DNA, 60 bp, Artificial
  Synthetic oligonucleotide
acagaggattgtaatcgatgctgcagctacggatctcctcgatgccacgtgcgatgggtt

SEQ ID NO: 309709 - DNA, 52 bp, Artificial
  Synthetic oligonucleotide
acagaggccaagcagcgtctacaagatgacgccccttaaggggccactggtt

SEQ ID NO: 309710 - DNA, 60 bp, Artificial
  Synthetic oligonucleotide
acagaggccaatgaaaccggatgagacacaactctggaaagcagacttgttgattgcttc

SEQ ID NO: 309711 - DNA, 57 bp, Artificial
  Synthetic oligonucleotide
acagaggccttttaaagtgaagccctcaggcttaaggcatgctaaaaacattgccaa

SEQ ID NO: 309712 - DNA, 55 bp, Artificial
  Synthetic oligonucleotide
acagaggcttcgactcattcttcgcagattactacgatcaggacggcttctcaga

SEQ ID NO: 309713 - DNA, 56 bp, Artificial
  Synthetic oligonucleotide
acagagggtgcagtgggaccaaaccaactccgtccagacttatatggtccccctca

SEQ ID NO: 309714 - DNA, 53 bp, Artificial
  Synthetic oligonucleotide
acagaggtaccttatcgaagttaaacaattcttagatggtaagcttaacaaaa

SEQ ID NO: 309715 - DNA, 59 bp, Artificial
  Synthetic oligonucleotide
acagaggtcctgatgttcctagaggctgtgagggtccatgtaaggtccagtcttttgag

SEQ ID NO: 309716 - DNA, 55 bp, Artificial
  Synthetic oligonucleotide
acagaggtcgacgcgatccggcggcgggcacttacttcacgagaggaaacgccat

SEQ ID NO: 309717 - DNA, 58 bp, Artificial
  Synthetic oligonucleotide
acagaggtggatgggcaatccacgttcagtgtaatgcaaccaaattccaccagggtac

SEQ ID NO: 309718 - DNA, 60 bp, Artificial
  Synthetic oligonucleotide
acagaggtttcgactacgattgtagatacaactagtgcaactaattcaatagcgacacag

SEQ ID NO: 309719 - DNA, 60 bp, Artificial
  Synthetic oligonucleotide
acagagtactcatttgtacggttcgtagatccattgactggttattcaaaggatgagagc

SEQ ID NO: 309720 - DNA, 60 bp, Artificial
  Synthetic oligonucleotide
acagagtagaccaatctacctgagaatcacgagtaccttcctagagtgggaaaatgatga

SEQ ID NO: 309721 - DNA, 55 bp, Artificial
  Synthetic oligonucleotide
acagagtatagcacttaaagcacaagcagtctccccaaactttaggtttcttagt

SEQ ID NO: 309722 - DNA, 60 bp, Artificial
  Synthetic oligonucleotide
acagagtccgtcttcatgcaagacgctctaatgtacttccatcccagtcaaatatgcgac

SEQ ID NO: 309723 - DNA, 57 bp, Artificial
  Synthetic oligonucleotide
acagagtctacttatcatgggtaccagcacacaaagggattggaggaaacgaacaag

SEQ ID NO: 309724 - DNA, 60 bp, Artificial
  Synthetic oligonucleotide
acagagtgacaggacaagggttgttagactactcgcgagttacatatgcatttcatctcg

SEQ ID NO: 309725 - DNA, 55 bp, Artificial
  Synthetic oligonucleotide
acagagtgagggactgaccagtccacagtgtacatcgggccatatgagcactggg

SEQ ID NO: 309726 - DNA, 56 bp, Artificial
  Synthetic oligonucleotide
acagagtgcaggacgttcttccttacccaaggttccctactcaatgacaaacattc

SEQ ID NO: 309727 - DNA, 56 bp, Artificial
  Synthetic oligonucleotide
acagagtgctatacacttggaaggatttctactaaataggtcggtaaactcaaatc

SEQ ID NO: 309728 - DNA, 57 bp, Artificial
  Synthetic oligonucleotide
acagagtggacaacctccagaccgaagcttgaagaaactctctggttagatggggaa

SEQ ID NO: 309729 - DNA, 60 bp, Artificial
  Synthetic oligonucleotide
acagagtggtaaacagacacctagccactagtgaagattggcagaggtgcgtgtgggagg

SEQ ID NO: 309730 - DNA, 55 bp, Artificial
  Synthetic oligonucleotide
acagagtgtggcacacattgtgtctgcggtgctcgctatgatacttcagatagaa

SEQ ID NO: 309731 - DNA, 59 bp, Artificial
  Synthetic oligonucleotide
acagagttcctcctcgtagagcccagattgtttaccgtatacttaggtcaatgcacagc

SEQ ID NO: 309732 - DNA, 58 bp, Artificial
  Synthetic oligonucleotide
acagagttgaatgagctaaaacgtgaactttcacagctcaaaatggagtacgaagttg

SEQ ID NO: 309733 - DNA, 55 bp, Artificial
  Synthetic oligonucleotide
acagagttggccatcctaccctgctccttcacgaccatgccagcactgtcaaccg

SEQ ID NO: 309734 - DNA, 55 bp, Artificial
  Synthetic oligonucleotide
acagagttggctggcattcataagtgattgctaattttggctgagggaagctgaa

SEQ ID NO: 309735 - DNA, 59 bp, Artificial
  Synthetic oligonucleotide
acagagttgggtacttatgtgcagggattcctagtgatactccaagaggggaagatgcc

SEQ ID NO: 309736 - DNA, 56 bp, Artificial
  Synthetic oligonucleotide
acagagtttcgtcagatacagctggaaacacggccacaaacactcaatcaactgta

SEQ ID NO: 309737 - DNA, 55 bp, Artificial
  Synthetic oligonucleotide
acagataatgggccaaattttactagtacagcagtaaaggcagcctgttggtggg

SEQ ID NO: 309738 - DNA, 55 bp, Artificial
  Synthetic oligonucleotide
acagataatgggccaaattttgtaagtcagcactttaaggcagcagtgtggtggc

SEQ ID NO: 309739 - DNA, 52 bp, Artificial
  Synthetic oligonucleotide
acagataattcaagtctctgggtaaccactaattgcataccttcattgccag

SEQ ID NO: 309740 - DNA, 60 bp, Artificial
  Synthetic oligonucleotide
acagatacaagcaggcaacctgcactggcatgctgtaaatcaggaaatgtggaaaagcat

SEQ ID NO: 309741 - DNA, 59 bp, Artificial
  Synthetic oligonucleotide
acagatacacctaccgatgccacagaggtgatacacaaattcaaactagaagatcattt

SEQ ID NO: 309742 - DNA, 56 bp, Artificial
  Synthetic oligonucleotide
acagatacccatacaaagtacaagtgaaaggaggattcgaggaatttacaagtaca

SEQ ID NO: 309743 - DNA, 58 bp, Artificial
  Synthetic oligonucleotide
acagatacggcttgtgcatgcgtactgccaaagaactggcccgtcgctacccatgcat

SEQ ID NO: 309744 - DNA, 58 bp, Artificial
  Synthetic oligonucleotide
acagatataatcagtctatgggatgaaagcctaaagccatgtgtaaaattaaccccac

SEQ ID NO: 309745 - DNA, 55 bp, Artificial
  Synthetic oligonucleotide
acagatatctaagaacttgaccttttgcacccaagacaactttagtgtatttaaa

SEQ ID NO: 309746 - DNA, 60 bp, Artificial
  Synthetic oligonucleotide
acagatattaccctgtgagtgtaacaaaacaccagtggtatgagatacaggaatcagatt

SEQ ID NO: 309747 - DNA, 55 bp, Artificial
  Synthetic oligonucleotide
acagatattcgtgtaccctctgcaacctttgcaaactcctaagccgtcactcgtt

SEQ ID NO: 309748 - DNA, 59 bp, Artificial
  Synthetic oligonucleotide
acagatcaaacgtactctttcaatggtatgacctatggaattgagcgttgtgttattta

SEQ ID NO: 309749 - DNA, 55 bp, Artificial
  Synthetic oligonucleotide
acagatcaaattgaacgccccttaatggtagggtctgtgtggaacagaagagctc

SEQ ID NO: 309750 - DNA, 54 bp, Artificial
  Synthetic oligonucleotide
acagatcaccggacatgtaaaaaacggttccatgagaatcgttgggcctaaaac

SEQ ID NO: 309751 - DNA, 55 bp, Artificial
  Synthetic oligonucleotide
acagatcagcacctgggtgagcaatgggagcgggacactcggcactgtcagggag

SEQ ID NO: 309752 - DNA, 60 bp, Artificial
  Synthetic oligonucleotide
acagatcatgattactacatcccgtcaaactcggcaggagtaaccgctttcctctcagga

SEQ ID NO: 309753 - DNA, 58 bp, Artificial
  Synthetic oligonucleotide
acagatcctacacctagggcttatgtagatttaggttcgacttctcctgtgacgatta

SEQ ID NO: 309754 - DNA, 55 bp, Artificial
  Synthetic oligonucleotide
acagatcgtcactgttatggatgacctatgccaaaacccagatgggaaggacatg

SEQ ID NO: 309755 - DNA, 60 bp, Artificial
  Synthetic oligonucleotide
acagatctagctatagccacggtgtcggcagctttgctaacctggacttatatcagtgac

SEQ ID NO: 309756 - DNA, 54 bp, Artificial
  Synthetic oligonucleotide
acagatctccctcgcctaggaaataaagaccccgctcgtcataaactggggaag

SEQ ID NO: 309757 - DNA, 55 bp, Artificial
  Synthetic oligonucleotide
acagatctgtggaaaatatttcaggggattctacttaaggagagcaagagagcac

SEQ ID NO: 309758 - DNA, 50 bp, Artificial
  Synthetic oligonucleotide
acagatgaactgcatatagggatcttaaatatgaccattagccccatacc

SEQ ID NO: 309759 - DNA, 60 bp, Artificial
  Synthetic oligonucleotide
acagatgatctcctcaaacggtgtctgccagtcggactcaacaatgattcagtttgcgga

SEQ ID NO: 309760 - DNA, 60 bp, Artificial
  Synthetic oligonucleotide
acagatgccaactatcgtcgtcaagtcgaacagaaagtaatcgattcgaacttctgatag

SEQ ID NO: 309761 - DNA, 60 bp, Artificial
  Synthetic oligonucleotide
acagatgcgagagttagtttggatccaggagtgatggagacgttagggattgcaatcaat

SEQ ID NO: 309762 - DNA, 58 bp, Artificial
  Synthetic oligonucleotide
acagatggaagattttttgcatatcgagttgaaacattcgaggaggtacctttcgatg

SEQ ID NO: 309763 - DNA, 54 bp, Artificial
  Synthetic oligonucleotide
acagatggacagtccagcctatagaactgccagaaaaagaccactggactgtca

SEQ ID NO: 309764 - DNA, 60 bp, Artificial
  Synthetic oligonucleotide
acagatggcaagactgatggagcaaaccttgcctatcaacccaccaaagaatgaggaccc

SEQ ID NO: 309765 - DNA, 58 bp, Artificial
  Synthetic oligonucleotide
acagatggccctgcggctaatagtgcggaccatcgggtttactggatacgagaaggga

SEQ ID NO: 309766 - DNA, 60 bp, Artificial
  Synthetic oligonucleotide
acagatggctggatctagtgagcaggcagcggaggccatggaggttgctagtcaggctag

SEQ ID NO: 309767 - DNA, 60 bp, Artificial
  Synthetic oligonucleotide
acagatggctgtctggcaatcggctagtggtaaggtctatctgccgccttctacaccagt

SEQ ID NO: 309768 - DNA, 60 bp, Artificial
  Synthetic oligonucleotide
acagatggtaacaacaaccaacccactgatcaggcatgagaacagaatggtactagccag

SEQ ID NO: 309769 - DNA, 60 bp, Artificial
  Synthetic oligonucleotide
acagatggttcagctatcaaaagtcctgatcctactaaaagcaataatgctggcatggga

SEQ ID NO: 309770 - DNA, 55 bp, Artificial
  Synthetic oligonucleotide
acagatgtcaaggattgcttggaccaagaagaaataacctggaattgtactggac

SEQ ID NO: 309771 - DNA, 60 bp, Artificial
  Synthetic oligonucleotide
acagatgttccggacaatgctggtgaggcgatggacatggtggcagatcaacctagggct

SEQ ID NO: 309772 - DNA, 58 bp, Artificial
  Synthetic oligonucleotide
acagattaccctgtacagaccagtattgacggtggcgttgttacgtggactggcaatg

SEQ ID NO: 309773 - DNA, 56 bp, Artificial
  Synthetic oligonucleotide
acagattatccaacatcacaaccctgggacgaaagtcaaattccgaaaacctgtga

SEQ ID NO: 309774 - DNA, 54 bp, Artificial
  Synthetic oligonucleotide
acagattatgtagagtgctcctcaaatctgattgacccctttgtgctgtttaaa

SEQ ID NO: 309775 - DNA, 50 bp, Artificial
  Synthetic oligonucleotide
acagattcaaccgttcgacctgtcttacactgggtatcttatcaaggtga

SEQ ID NO: 309776 - DNA, 59 bp, Artificial
  Synthetic oligonucleotide
acagattctctactaccctcacattgttagatacgtcagtaacacctactgtcgtatgg

SEQ ID NO: 309777 - DNA, 50 bp, Artificial
  Synthetic oligonucleotide
acagattgagagcatgattgaggccgaatcttctgtcaaagagaaagacg

SEQ ID NO: 309778 - DNA, 59 bp, Artificial
  Synthetic oligonucleotide
acagattgaggatcgcagaaggggatattccaattgctggggtgaaaagctccagaatt

SEQ ID NO: 309779 - DNA, 58 bp, Artificial
  Synthetic oligonucleotide
acagattgatatcggttcttcctccgatttttcgcaatgttgaaaatgttggtcgata

SEQ ID NO: 309780 - DNA, 60 bp, Artificial
  Synthetic oligonucleotide
acagattggaccgctttcgcctttcagctcttacaatacaagtatgtctacgatgtagac

SEQ ID NO: 309781 - DNA, 54 bp, Artificial
  Synthetic oligonucleotide
acagattgggggccactagaggctggcagaataccggcatatggagtactcact

SEQ ID NO: 309782 - DNA, 51 bp, Artificial
  Synthetic oligonucleotide
acagattgtaggctagaacaaatgtgagagtgttactgaggctatggcaga

SEQ ID NO: 309783 - DNA, 56 bp, Artificial
  Synthetic oligonucleotide
acagattgtgtcttagaagcaatggctttccttgaagaatcccacccagggatttt

SEQ ID NO: 309784 - DNA, 60 bp, Artificial
  Synthetic oligonucleotide
acagattgttggaatggcagctcctcaactctggggttggacatgcaaatgacgggtaca

SEQ ID NO: 309785 - DNA, 58 bp, Artificial
  Synthetic oligonucleotide
acagatttgtggcaccgggagagcgcccctctggtatgttcgactcgtccgtcctctg

SEQ ID NO: 309786 - DNA, 56 bp, Artificial
  Synthetic oligonucleotide
acagatttgtggcaccgggggaacgcccttccggcatgtttgactcgtctgtcctc

SEQ ID NO: 309787 - DNA, 60 bp, Artificial
  Synthetic oligonucleotide
acagcaaaaagtctctgtagttgctcaagacttataatgagccagttggtctcagtatac

SEQ ID NO: 309788 - DNA, 55 bp, Artificial
  Synthetic oligonucleotide
acagcaaactcaagcaggcgtgactgttagcgttggcggagtagacatgcgggcg

SEQ ID NO: 309789 - DNA, 60 bp, Artificial
  Synthetic oligonucleotide
acagcaaatgtttccctggcagccatagctaaccaggcagtggtcctgatgggtttagac

SEQ ID NO: 309790 - DNA, 60 bp, Artificial
  Synthetic oligonucleotide
acagcaaccaccagcaagggggagttcacaatgctaggggttcatgataatgtagctatc

SEQ ID NO: 309791 - DNA, 54 bp, Artificial
  Synthetic oligonucleotide
acagcaacgaaagtgagtggggccagacttcgccataaggcctttaacttccgg

SEQ ID NO: 309792 - DNA, 58 bp, Artificial
  Synthetic oligonucleotide
acagcaacggacatatacaatttttggagtgcaagaacaaattacagtagagaatact

SEQ ID NO: 309793 - DNA, 60 bp, Artificial
  Synthetic oligonucleotide
acagcaactaaacaatgctagcacgcagaactctagtccagctaatcaagccgtacaaat

SEQ ID NO: 309794 - DNA, 58 bp, Artificial
  Synthetic oligonucleotide
acagcaagaatgctcaaatacaattacccaacaaaatcaggttattgtggtgggattc

SEQ ID NO: 309795 - DNA, 55 bp, Artificial
  Synthetic oligonucleotide
acagcaagaggccaggggccgccaccggtgagtacgccaaaaattttgactagcg

SEQ ID NO: 309796 - DNA, 55 bp, Artificial
  Synthetic oligonucleotide
acagcaagaggtgaggggcggcgaacggtgagtacgccaaaatttttgactagcg

SEQ ID NO: 309797 - DNA, 55 bp, Artificial
  Synthetic oligonucleotide
acagcaagcggaagcggctgacagaggacagagtagtcaaaattatcctatagtg

SEQ ID NO: 309798 - DNA, 59 bp, Artificial
  Synthetic oligonucleotide
acagcaagcggcagctgacacaggaaacaacagtcaggtcagtcaaaattaccctatag

SEQ ID NO: 309799 - DNA, 60 bp, Artificial
  Synthetic oligonucleotide
acagcaagttacagtgttcaattgacaaagagcttaagccttgtgactcaggcaagtgtt

SEQ ID NO: 309800 - DNA, 60 bp, Artificial
  Synthetic oligonucleotide
acagcaagttgagcgaacatatacattatttgggcaacaagttcaagtaacagtatcaaa

SEQ ID NO: 309801 - DNA, 60 bp, Artificial
  Synthetic oligonucleotide
acagcaatggagttggagcgagcaaaatatatagaggagcgcagcgaaccgaaaacttac

SEQ ID NO: 309802 - DNA, 55 bp, Artificial
  Synthetic oligonucleotide
acagcaattggctcttagttacagtgcagggaaaagggcccagtatttcaaagcc

SEQ ID NO: 309803 - DNA, 55 bp, Artificial
  Synthetic oligonucleotide
acagcaattgttgttgattcgctaaaaccatattgtgagaaaattgatggacccc

SEQ ID NO: 309804 - DNA, 60 bp, Artificial
  Synthetic oligonucleotide
acagcacaaatcatgcattagatatttcaaaggctctatattgccagagattatgataga

SEQ ID NO: 309805 - DNA, 52 bp, Artificial
  Synthetic oligonucleotide
acagcacaccccctcaccgtattccagcaccgtgtccgtgggcaccgcaaag

SEQ ID NO: 309806 - DNA, 51 bp, Artificial
  Synthetic oligonucleotide
acagcacaccctctgctcaaccaggcggtcccggcaaaccgcagagctctg

SEQ ID NO: 309807 - DNA, 52 bp, Artificial
  Synthetic oligonucleotide
acagcacacggggttggtatggtgcctatgaagacagatcttgaactagact

SEQ ID NO: 309808 - DNA, 54 bp, Artificial
  Synthetic oligonucleotide
acagcacagcacgggaataccatggaatccgcagtcacaggccttagtagaaag

SEQ ID NO: 309809 - DNA, 54 bp, Artificial
  Synthetic oligonucleotide
acagcacagcatatagcctgtggtcagttattaataagcatttctcagatagac

SEQ ID NO: 309810 - DNA, 60 bp, Artificial
  Synthetic oligonucleotide
acagcacagctaatgtagagtgccaattgatagtagatgacgaaataaaagcacgtactt

SEQ ID NO: 309811 - DNA, 60 bp, Artificial
  Synthetic oligonucleotide
acagcaccagctctaaactcgcctaacgtggaagcatgtgggtacagtgaccgtgtgagg

SEQ ID NO: 309812 - DNA, 55 bp, Artificial
  Synthetic oligonucleotide
acagcacggatgcttaaataccattaccccaccaaatccgggtactgtggaggcg

SEQ ID NO: 309813 - DNA, 57 bp, Artificial
  Synthetic oligonucleotide
acagcacggcgtgtgtggggtggcatcaccagtgcggcaggctacgcctttaacacg

SEQ ID NO: 309814 - DNA, 60 bp, Artificial
  Synthetic oligonucleotide
acagcacgggagctagcacgccccgcgacctcgtaggcatatcgactgtagtctctaagg

SEQ ID NO: 309815 - DNA, 60 bp, Artificial
  Synthetic oligonucleotide
acagcagaaggctgggcactatgcgctagaaagaggagtgagtgtcttcaaggagttcaa

SEQ ID NO: 309816 - DNA, 50 bp, Artificial
  Synthetic oligonucleotide
acagcagacagtatccgctgtactctacgggatcgagaccagacgagcaa

SEQ ID NO: 309817 - DNA, 60 bp, Artificial
  Synthetic oligonucleotide
acagcagacatgttaccaagactcaagcggcaaaaaagggcctcgccagatcaattgtac

SEQ ID NO: 309818 - DNA, 60 bp, Artificial
  Synthetic oligonucleotide
acagcagagtcacgtctgtgaggtcgttggatagttggtattcagttctatcggaggtcg

SEQ ID NO: 309819 - DNA, 60 bp, Artificial
  Synthetic oligonucleotide
acagcagatctaggtgtttcgacttccgatgtaggaacgataatattagcgcctggacaa

SEQ ID NO: 309820 - DNA, 60 bp, Artificial
  Synthetic oligonucleotide
acagcagcaggtgttagaagctgcgtacgccatggtacagcacgtggccaagggaatacg

SEQ ID NO: 309821 - DNA, 60 bp, Artificial
  Synthetic oligonucleotide
acagcagcccgtgcttgaagactctcagccatccgcctcgagccccccccctgatataga

SEQ ID NO: 309822 - DNA, 55 bp, Artificial
  Synthetic oligonucleotide
acagcagcctttgtattggaggtgaagctctgcagctccctccttagcgcttgtg

SEQ ID NO: 309823 - DNA, 51 bp, Artificial
  Synthetic oligonucleotide
acagcagctggactcatctgggttcatgattttgcccattacggacatcaa

SEQ ID NO: 309824 - DNA, 55 bp, Artificial
  Synthetic oligonucleotide
acagcaggcccatagggtggttactacgtgtggtatttgcaactgtttagttagg

SEQ ID NO: 309825 - DNA, 51 bp, Artificial
  Synthetic oligonucleotide
acagcaggttggtggaatttaactaccttactcaaacaacctacggggtgg

SEQ ID NO: 309826 - DNA, 60 bp, Artificial
  Synthetic oligonucleotide
acagcagtgacatggggcctagtgtgcgtatggctggcatacgtttcgctcaggttctta

SEQ ID NO: 309827 - DNA, 60 bp, Artificial
  Synthetic oligonucleotide
acagcagtgtggatctagttgtgccttatgtggccccctatgatttttcccctgtgagaa

SEQ ID NO: 309828 - DNA, 52 bp, Artificial
  Synthetic oligonucleotide
acagcataacaatagagaggatggtgctttcggcatttgacgaaagaagaaa

SEQ ID NO: 309829 - DNA, 60 bp, Artificial
  Synthetic oligonucleotide
acagcataagaacttgaaaacagggaagtatgctaggcaaagatcagcacatactaatga

SEQ ID NO: 309830 - DNA, 58 bp, Artificial
  Synthetic oligonucleotide
acagcataattacggcccagggtaaatctgctgagaccgtcggaaggagcacaatccc

SEQ ID NO: 309831 - DNA, 60 bp, Artificial
  Synthetic oligonucleotide
acagcatagagcaaaaatagaggagctgagagaacatctgctgagatggggattgaccac

SEQ ID NO: 309832 - DNA, 60 bp, Artificial
  Synthetic oligonucleotide
acagcatatctatgtgggattcacagagagctggttaggaggctgaacgccgtcctccta

SEQ ID NO: 309833 - DNA, 58 bp, Artificial
  Synthetic oligonucleotide
acagcatctaacgaagatctagacctctgtagatatctgggagtaaacctgtactttt

SEQ ID NO: 309834 - DNA, 55 bp, Artificial
  Synthetic oligonucleotide
acagcatgattaggtttgtagacccgctaactggacacgcaatggatgaacaccc

SEQ ID NO: 309835 - DNA, 59 bp, Artificial
  Synthetic oligonucleotide
acagcatggagagagttagccgacgagcgatagatgtagtctcacgagtcggtcttgag

SEQ ID NO: 309836 - DNA, 60 bp, Artificial
  Synthetic oligonucleotide
acagcatggggagaactagagtggtctgccagagcaacaacaggctaactgatgagacag

SEQ ID NO: 309837 - DNA, 60 bp, Artificial
  Synthetic oligonucleotide
acagcatgtcagagagtaggaggacctagccacaaagctagaatattagctgaggcaatg

SEQ ID NO: 309838 - DNA, 60 bp, Artificial
  Synthetic oligonucleotide
acagcattacgatcaccttatactagtgctaaattttttcaggattagagcgcttagatg

SEQ ID NO: 309839 - DNA, 60 bp, Artificial
  Synthetic oligonucleotide
acagcattacggtctccctatactagcgcgaatttctttcaagattagagtgcttagatg

SEQ ID NO: 309840 - DNA, 51 bp, Artificial
  Synthetic oligonucleotide
acagcattcccttgtgggaaccgttcagaaaatacacggcgttctcaatac

SEQ ID NO: 309841 - DNA, 55 bp, Artificial
  Synthetic oligonucleotide
acagccaaggactcgagcgctattggagtaaaagaacccgttacgatttctacta

SEQ ID NO: 309842 - DNA, 60 bp, Artificial
  Synthetic oligonucleotide
acagccaatagcagctgacacaggaaacaacagccaggtcagccaaaattaccctatagt

SEQ ID NO: 309843 - DNA, 57 bp, Artificial
  Synthetic oligonucleotide
acagccaccaagcaagcggaggctgctgtccccgtggtggagtccaaatggcgagcc

SEQ ID NO: 309844 - DNA, 55 bp, Artificial
  Synthetic oligonucleotide
acagccacctggcactgagacatctagccagagagaaacatccggagttctaccg

SEQ ID NO: 309845 - DNA, 59 bp, Artificial
  Synthetic oligonucleotide
acagccagacagcgaccaaaaggattcggatggccatcaattagtgtcgaattgtttaa

SEQ ID NO: 309846 - DNA, 59 bp, Artificial
  Synthetic oligonucleotide
acagccagaccacaaggtctaccagttatgctcaccccaggttcaggacaattcctcac

SEQ ID NO: 309847 - DNA, 52 bp, Artificial
  Synthetic oligonucleotide
acagccagtgaatacgctcgacttggcgcaaatgttgaggacaggcgtgatg

SEQ ID NO: 309848 - DNA, 50 bp, Artificial
  Synthetic oligonucleotide
acagccagtttgggtctgatgtcagtcttttatcaagtttattaattatc

SEQ ID NO: 309849 - DNA, 60 bp, Artificial
  Synthetic oligonucleotide
acagccatgcaatccagagctgtcatcttgaagtatagatctggttcaggccacaagagg

SEQ ID NO: 309850 - DNA, 53 bp, Artificial
  Synthetic oligonucleotide
acagccattaactatatataggcacatacaatggctaacaaatgaatggggaa

SEQ ID NO: 309851 - DNA, 55 bp, Artificial
  Synthetic oligonucleotide
acagcccaaacaacgtgttaaacattgaggggtgtccgtcactctacaagttcaa

SEQ ID NO: 309852 - DNA, 50 bp, Artificial
  Synthetic oligonucleotide
acagcccacaacagactcatcgacccagtgtactctacataatgttgcgc

SEQ ID NO: 309853 - DNA, 53 bp, Artificial
  Synthetic oligonucleotide
acagcccagcacaagggaaccgcacgtcacccaacgcacacagacacagcacc

SEQ ID NO: 309854 - DNA, 55 bp, Artificial
  Synthetic oligonucleotide
acagcccatacgagtttgcgattgcggcaatgtgggcggagcgtcagcgttacac

SEQ ID NO: 309855 - DNA, 60 bp, Artificial
  Synthetic oligonucleotide
acagcccatagcagaacactttgcactcaaggctccggttctgatctctaaagctacggt

SEQ ID NO: 309856 - DNA, 60 bp, Artificial
  Synthetic oligonucleotide
acagccccatattcttacacccaggcaggtccaacatacagatgtggaccgcctacagag

SEQ ID NO: 309857 - DNA, 57 bp, Artificial
  Synthetic oligonucleotide
acagccccccaagtccttccagtcatgcacccacacggtgtccctcccacgcaccgc

SEQ ID NO: 309858 - DNA, 54 bp, Artificial
  Synthetic oligonucleotide
acagcccctactacttaagtagggaaaatttagtgtcttagctcacagctaagg

SEQ ID NO: 309859 - DNA, 60 bp, Artificial
  Synthetic oligonucleotide
acagcccgtccgtccattctgtgcagagagtctggtgagcacgctagcgaacataactca

SEQ ID NO: 309860 - DNA, 55 bp, Artificial
  Synthetic oligonucleotide
acagcccgtgtgggtgaatggccctcggcgctccgtgtgggatcacgaagctcag

SEQ ID NO: 309861 - DNA, 58 bp, Artificial
  Synthetic oligonucleotide
acagccctagacattcttgactacgggttaagagaccttaagtagcgatggatcatat

SEQ ID NO: 309862 - DNA, 60 bp, Artificial
  Synthetic oligonucleotide
acagccctatggctcgccgtgctactgcccccattgtccgtgccactcgaaaacagcagt

SEQ ID NO: 309863 - DNA, 55 bp, Artificial
  Synthetic oligonucleotide
acagccctttaattctagcccttaagacattggaaagtactgaatctcagagggg

SEQ ID NO: 309864 - DNA, 58 bp, Artificial
  Synthetic oligonucleotide
acagccgaaagacaagacatatcccatagctttgaaaacgtaggtttgagatggcaaa

SEQ ID NO: 309865 - DNA, 50 bp, Artificial
  Synthetic oligonucleotide
acagccgacggccccatcgtagacctgctcaactcctttgcctgccgccc

SEQ ID NO: 309866 - DNA, 60 bp, Artificial
  Synthetic oligonucleotide
acagccgcctggcactgagacacatagctaaagagaaacatccggagttctaccaagact

SEQ ID NO: 309867 - DNA, 60 bp, Artificial
  Synthetic oligonucleotide
acagccgtctcaaatctgtatattattccttgaagagatggctgtggacgttacagggga

SEQ ID NO: 309868 - DNA, 55 bp, Artificial
  Synthetic oligonucleotide
acagccgtctgtacggtagagttttgcattttcgacctgggaccaaatcagtaaa

SEQ ID NO: 309869 - DNA, 55 bp, Artificial
  Synthetic oligonucleotide
acagcctaatcaatccgaaccatgaccgtccgaatcttacttacgagttcttggg

SEQ ID NO: 309870 - DNA, 52 bp, Artificial
  Synthetic oligonucleotide
acagcctagtgaaataccataagtacaggtctagaaagaccaaggactggta

SEQ ID NO: 309871 - DNA, 58 bp, Artificial
  Synthetic oligonucleotide
acagcctatatgcatctccacaactcgagggattctcagctgaatcgagaaagctgct

SEQ ID NO: 309872 - DNA, 60 bp, Artificial
  Synthetic oligonucleotide
acagcctccttcaaggccagtagatcggtccgggcaccagagccaggcgggacatcgcca

SEQ ID NO: 309873 - DNA, 60 bp, Artificial
  Synthetic oligonucleotide
acagcctgccaaggtgctcaacggagcccaacctggtccgagatcgaggcggatttgaga

SEQ ID NO: 309874 - DNA, 58 bp, Artificial
  Synthetic oligonucleotide
acagcctgggactaaatattataaaatgcgcggtgaatggtgggatggatatgacggg

SEQ ID NO: 309875 - DNA, 60 bp, Artificial
  Synthetic oligonucleotide
acagcctgtgtgtgagtatgcacatatccaaacattaactagtgaatggggaatggtaat

SEQ ID NO: 309876 - DNA, 54 bp, Artificial
  Synthetic oligonucleotide
acagccttacaagttaacatttcaggttgtttcggttagaacagacggatctaa

SEQ ID NO: 309877 - DNA, 55 bp, Artificial
  Synthetic oligonucleotide
acagccttagccaaggccctcgccactgcacgctgacgccttacagccgatcaca

SEQ ID NO: 309878 - DNA, 60 bp, Artificial
  Synthetic oligonucleotide
acagccttagggaattgtgtcctgatggtcctcatgactaggcagctatgcaagaacctc

SEQ ID NO: 309879 - DNA, 59 bp, Artificial
  Synthetic oligonucleotide
acagccttatatgttgcaggggttcctgagctaggggctttctttgccatccttcagga

SEQ ID NO: 309880 - DNA, 55 bp, Artificial
  Synthetic oligonucleotide
acagccttcgaggtttgtgcaatgggaatttaacaatcctgcatttaatgaggag

SEQ ID NO: 309881 - DNA, 53 bp, Artificial
  Synthetic oligonucleotide
acagcgaaggacgtcgtccatcctatactcgtcacgcagtgaaagagtacgtt

SEQ ID NO: 309882 - DNA, 54 bp, Artificial
  Synthetic oligonucleotide
acagcgacaactaagggtatttacttcatccttaacgtttatcctgcacctaac

SEQ ID NO: 309883 - DNA, 52 bp, Artificial
  Synthetic oligonucleotide
acagcgacaatgcgctaaacaaaatgtaacacccctacaatggattctgaca

SEQ ID NO: 309884 - DNA, 54 bp, Artificial
  Synthetic oligonucleotide
acagcgacaccgctggtcgtgccgactctagcatcagttacgttgtctacacaa

SEQ ID NO: 309885 - DNA, 54 bp, Artificial
  Synthetic oligonucleotide
acagcgaggtaagggggccgggggttggtacggatgatggcgggatgacgctaa

SEQ ID NO: 309886 - DNA, 51 bp, Artificial
  Synthetic oligonucleotide
acagcgagtattgaacgctggtacgtatactattagggtttagtcctaata

SEQ ID NO: 309887 - DNA, 55 bp, Artificial
  Synthetic oligonucleotide
acagcgagtgcaagtatccagactacattaagatggcaaatgacccatatgggga

SEQ ID NO: 309888 - DNA, 55 bp, Artificial
  Synthetic oligonucleotide
acagcgcaagcattatcatctcaatatcagttcttcggaacaaaggactttgtcc

SEQ ID NO: 309889 - DNA, 55 bp, Artificial
  Synthetic oligonucleotide
acagcgcacgatgttacctgaacctaggttagacgatatcaatgagttcaggcgg

SEQ ID NO: 309890 - DNA, 55 bp, Artificial
  Synthetic oligonucleotide
acagcgcagaggaggtgcactacgttgggtgcggtgatttacgtaccttgatgca

SEQ ID NO: 309891 - DNA, 60 bp, Artificial
  Synthetic oligonucleotide
acagcgcatacgtggtgtgtgtaggccgcgagtttgggtaaagtgagcgcaaggcgccca

SEQ ID NO: 309892 - DNA, 60 bp, Artificial
  Synthetic oligonucleotide
acagcgccacgatgtctcacacgtgggtaaggtaatgtgtatatctgatgtcacacgtgg

SEQ ID NO: 309893 - DNA, 52 bp, Artificial
  Synthetic oligonucleotide
acagcgcgagtgggggaatttgagttcgccgcttcgcgggctcacaccaggg

SEQ ID NO: 309894 - DNA, 60 bp, Artificial
  Synthetic oligonucleotide
acagcgcgtgcaagctgatagaaacgttgtaaattatccatcaatactacacccaataga

SEQ ID NO: 309895 - DNA, 60 bp, Artificial
  Synthetic oligonucleotide
acagcgctagtaagtccaggctgaacattgaaaaggtcttgaatgtccagaccatgagaa

SEQ ID NO: 309896 - DNA, 57 bp, Artificial
  Synthetic oligonucleotide
acagcgcttttttatgcgaggcctttaggccgagcggtccccgtctgctgggtgcga

SEQ ID NO: 309897 - DNA, 60 bp, Artificial
  Synthetic oligonucleotide
acagcggactcgagctatctctaaacaatgaagctgaagatgtttctcctgaggtggagg

SEQ ID NO: 309898 - DNA, 52 bp, Artificial
  Synthetic oligonucleotide
acagcggatactatgctaacctcttcttgcatattggactgatgaccaccgt

SEQ ID NO: 309899 - DNA, 60 bp, Artificial
  Synthetic oligonucleotide
acagcggcattagtgtctcctaacattcggcaatttattctcagtgtcctgattcaacaa

SEQ ID NO: 309900 - DNA, 55 bp, Artificial
  Synthetic oligonucleotide
acagcggcatttgggtggcccaagttcggcgcccaagccgaattaacttccctgc

SEQ ID NO: 309901 - DNA, 60 bp, Artificial
  Synthetic oligonucleotide
acagcgggaatttctgttacccgcggtgaatctgtatggctcagaagcgtattctggagc

SEQ ID NO: 309902 - DNA, 58 bp, Artificial
  Synthetic oligonucleotide
acagcgggcatcagctggccaaatcagtgtacaacccactttctctgtgcagaggaat

SEQ ID NO: 309903 - DNA, 60 bp, Artificial
  Synthetic oligonucleotide
acagcggttcttcatgatagggcacggttcactcactgcagatgccggaggactcacgta

SEQ ID NO: 309904 - DNA, 60 bp, Artificial
  Synthetic oligonucleotide
acagcgtatgagcaagaggaagattgtgaaagatccctcagtgttacgagctcattacgt

SEQ ID NO: 309905 - DNA, 56 bp, Artificial
  Synthetic oligonucleotide
acagcgtcagagggaacaggcgttggcacgacaggtaccaaatttacatgttttac

SEQ ID NO: 309906 - DNA, 58 bp, Artificial
  Synthetic oligonucleotide
acagcgtccctttttacgtcatcatggaacgttacgtgttggtggcagtcgaagcaga

SEQ ID NO: 309907 - DNA, 58 bp, Artificial
  Synthetic oligonucleotide
acagcgtctcaggacttagataaacatggggcccttacaaccagcaacacagttaata

SEQ ID NO: 309908 - DNA, 60 bp, Artificial
  Synthetic oligonucleotide
acagcgtgacggtcagtatagtgagcagcagttcaactacatcatgcacgttggcacgta

SEQ ID NO: 309909 - DNA, 59 bp, Artificial
  Synthetic oligonucleotide
acagcgtgccgttagacgggtgcatgatatagaactggtccgctttgaacgctatacgg

SEQ ID NO: 309910 - DNA, 59 bp, Artificial
  Synthetic oligonucleotide
acagcgtggatcaaataatcgacttcggatatggcgaagaacgtgttgcgaaaacgcta

SEQ ID NO: 309911 - DNA, 60 bp, Artificial
  Synthetic oligonucleotide
acagcgtggtcaactggatacttgtgaagtatctctccctgtgtcagggagttaacgcaa

SEQ ID NO: 309912 - DNA, 53 bp, Artificial
  Synthetic oligonucleotide
acagcgtgtatagtgcacatcgtagaacgttgccgacccgtttggcgtgatgc

SEQ ID NO: 309913 - DNA, 60 bp, Artificial
  Synthetic oligonucleotide
acagcgtgtgtgatcaaccaaacctagtaactgcgtagcatccgactgtaacctgttctc

SEQ ID NO: 309914 - DNA, 56 bp, Artificial
  Synthetic oligonucleotide
acagcgttcgtggactactcccaaggcagtgtcatcggtggacgtgtccgaaaccg

SEQ ID NO: 309915 - DNA, 58 bp, Artificial
  Synthetic oligonucleotide
acagcgttggagtgatagatacggtcccacggttggctagagcttgggaatagtattg

SEQ ID NO: 309916 - DNA, 54 bp, Artificial
  Synthetic oligonucleotide
acagcgttttattggaatgaggggcccaaaatacttatggaggtaagttatgcc

SEQ ID NO: 309917 - DNA, 57 bp, Artificial
  Synthetic oligonucleotide
acagctaacaaatatgaatatactatagctaaacaaccatcgggaggagggtttgga

SEQ ID NO: 309918 - DNA, 58 bp, Artificial
  Synthetic oligonucleotide
acagctaatatagccccttatcccctacatatggcccatttagaagataagcgtaaga

SEQ ID NO: 309919 - DNA, 55 bp, Artificial
  Synthetic oligonucleotide
acagctaatgcagtcaataattgggatagcaacgcaagagctggtataccttcaa

SEQ ID NO: 309920 - DNA, 58 bp, Artificial
  Synthetic oligonucleotide
acagctaatgtcccgatacaaggtgaatctcacactcttgttaaacacctgtttggga

SEQ ID NO: 309921 - DNA, 60 bp, Artificial
  Synthetic oligonucleotide
acagctacaaggcgtgcctgagcaagatggaagcaaccgccttcaatgccaccgacaacc

SEQ ID NO: 309922 - DNA, 52 bp, Artificial
  Synthetic oligonucleotide
acagctactacctccaatcctgggcgaaaaccttgtttcgattcctcagtca

SEQ ID NO: 309923 - DNA, 60 bp, Artificial
  Synthetic oligonucleotide
acagctagacacactccagttaactcctggctaggcaacattatcatgtatgcgcccacc

SEQ ID NO: 309924 - DNA, 60 bp, Artificial
  Synthetic oligonucleotide
acagctaggcagctgtccataaccacgacaaacactttccctgggattgatagccagagt

SEQ ID NO: 309925 - DNA, 55 bp, Artificial
  Synthetic oligonucleotide
acagctagtggaagagtggtaccagactggtgctgtagagattgcacgctgcccc

SEQ ID NO: 309926 - DNA, 60 bp, Artificial
  Synthetic oligonucleotide
acagctatactcagaaaagcaaccagaagattggttcagcttatagtgagtggaagggac

SEQ ID NO: 309927 - DNA, 56 bp, Artificial
  Synthetic oligonucleotide
acagctatttaaagttccgcacaaataatgctaagtcaaaggatggattaagaccc

SEQ ID NO: 309928 - DNA, 58 bp, Artificial
  Synthetic oligonucleotide
acagctatttctgcatagtccgtcatgttgatcagctggataagtagtagttgtttgt

SEQ ID NO: 309929 - DNA, 59 bp, Artificial
  Synthetic oligonucleotide
acagctcaaaaaaagagctagtccctgcagtgaaaatggagaacaatagaggtcttctg

SEQ ID NO: 309930 - DNA, 60 bp, Artificial
  Synthetic oligonucleotide
acagctcatggttattgtggttctgtgatggttgcagatgctggagtttggaaaggcatt

SEQ ID NO: 309931 - DNA, 60 bp, Artificial
  Synthetic oligonucleotide
acagctccagcagtagctattgcctgaatcctaacaatgaggaagggggtcatggagtga

SEQ ID NO: 309932 - DNA, 60 bp, Artificial
  Synthetic oligonucleotide
acagctccccctattagaaagtcagattgccacaatcgagcagagtgcaccatcccagag

SEQ ID NO: 309933 - DNA, 57 bp, Artificial
  Synthetic oligonucleotide
acagctccctcttttagaaagtcaaattgccaccattgaacaaagtgcaccctccca

SEQ ID NO: 309934 - DNA, 56 bp, Artificial
  Synthetic oligonucleotide
acagctccgaagagttttaactacagctacaataacacttttaccggatgcagaaa

SEQ ID NO: 309935 - DNA, 60 bp, Artificial
  Synthetic oligonucleotide
acagctcctagggttgtggggctgctctggaaagctcatctgtaccactaatgtgccttg

SEQ ID NO: 309936 - DNA, 53 bp, Artificial
  Synthetic oligonucleotide
acagctcgagcttaaaactcgggttcttagtaaagtatgctgtcaccctattt

SEQ ID NO: 309937 - DNA, 55 bp, Artificial
  Synthetic oligonucleotide
acagctcggggaatgaagccttatacattggactgtcagttacaggctggaagac

SEQ ID NO: 309938 - DNA, 60 bp, Artificial
  Synthetic oligonucleotide
acagctctagaatgtatagattaataaactgtaatacctcagtcctaacacaagcctgtc

SEQ ID NO: 309939 - DNA, 54 bp, Artificial
  Synthetic oligonucleotide
acagctctggggttgtacccactccagaggcccacgtggcggctagcactccgg

SEQ ID NO: 309940 - DNA, 55 bp, Artificial
  Synthetic oligonucleotide
acagctctggtatataccatcttaccaatgactgccctaattcgagtattgtcta

SEQ ID NO: 309941 - DNA, 51 bp, Artificial
  Synthetic oligonucleotide
acagctgaaatgtcctcctctattgataacaacaaatataaatcctttgga

SEQ ID NO: 309942 - DNA, 60 bp, Artificial
  Synthetic oligonucleotide
acagctgacaaagagattctcacttggaatgctgcagggacgaggaccattaaaactgtt

SEQ ID NO: 309943 - DNA, 60 bp, Artificial
  Synthetic oligonucleotide
acagctgagtctcaggttatgaacacagaacataaggcttacttggacaaaactggtgct

SEQ ID NO: 309944 - DNA, 60 bp, Artificial
  Synthetic oligonucleotide
acagctgatccgaccacagcaccacgaactgagaggatgatgcgtattaattggaagaag

SEQ ID NO: 309945 - DNA, 52 bp, Artificial
  Synthetic oligonucleotide
acagctgatgtcgtgcgtctagccacccggacttacggtcgaagttataaaa

SEQ ID NO: 309946 - DNA, 60 bp, Artificial
  Synthetic oligonucleotide
acagctgatttagattacgaagtattgaaattagtgcatccactctcggtgccattcttg

SEQ ID NO: 309947 - DNA, 52 bp, Artificial
  Synthetic oligonucleotide
acagctgcactgcttgtcacattctgctttgggtgggttctcatacctgcag

SEQ ID NO: 309948 - DNA, 55 bp, Artificial
  Synthetic oligonucleotide
acagctgcattgcaagcagtctcgtactggcagcactcatcatgggtttcatcct

SEQ ID NO: 309949 - DNA, 60 bp, Artificial
  Synthetic oligonucleotide
acagctgccggtacggacactttcatcattactgctctgagcacgttttatactggttga

SEQ ID NO: 309950 - DNA, 60 bp, Artificial
  Synthetic oligonucleotide
acagctggagattataccactgaaacatacacaaaaattgtcgatattaccgacgagaca

SEQ ID NO: 309951 - DNA, 60 bp, Artificial
  Synthetic oligonucleotide
acagctggagtggaatctgctgtactgagagggttcctaattctggccaaagaagacaaa

SEQ ID NO: 309952 - DNA, 52 bp, Artificial
  Synthetic oligonucleotide
acagctggcagccactgttatgcaaaaggcatatcatgccaaggttgtgaag

SEQ ID NO: 309953 - DNA, 51 bp, Artificial
  Synthetic oligonucleotide
acagctggcatactaggaaagttgaagggggtttatgtgatagtggaggag

SEQ ID NO: 309954 - DNA, 60 bp, Artificial
  Synthetic oligonucleotide
acagctggctatgagcctttggagaccgcccgcacacgatgtcacggggctggagagaaa

SEQ ID NO: 309955 - DNA, 60 bp, Artificial
  Synthetic oligonucleotide
acagctggttctggcaccagagtctcgagcctcccgtcaactgcaaggactaggagctgg

SEQ ID NO: 309956 - DNA, 51 bp, Artificial
  Synthetic oligonucleotide
acagctgtatgatggctatccagtcgtgatagatataggacggcgtaaagg

SEQ ID NO: 309957 - DNA, 60 bp, Artificial
  Synthetic oligonucleotide
acagctgtctaggatagctggcttcaattatggagcatgatggaccccccgcaataatcc

SEQ ID NO: 309958 - DNA, 54 bp, Artificial
  Synthetic oligonucleotide
acagctgtgaatcttctacattctgggcagacgcactttgatgcacttagaata

SEQ ID NO: 309959 - DNA, 60 bp, Artificial
  Synthetic oligonucleotide
acagctgttgtacgtgacaagcgaccatgtcagttctccgctgtggagcctattgtgcca

SEQ ID NO: 309960 - DNA, 60 bp, Artificial
  Synthetic oligonucleotide
acagctgtttatctagcattacaagatgcagaacatatagttaatatagtcactgattcc

SEQ ID NO: 309961 - DNA, 58 bp, Artificial
  Synthetic oligonucleotide
acagctgtttcgcacttaatagcccactttcgtggtaccttcattgaaatacgtggca

SEQ ID NO: 309962 - DNA, 55 bp, Artificial
  Synthetic oligonucleotide
acagcttacgatccagcaaagaagctcctccagcagtatgcagagaagggacagc

SEQ ID NO: 309963 - DNA, 56 bp, Artificial
  Synthetic oligonucleotide
acagcttcgtgttgcctttaggtggttatccagttatgactggtggtacagtttca

SEQ ID NO: 309964 - DNA, 60 bp, Artificial
  Synthetic oligonucleotide
acagcttctggaatcaacatgtgcacactcatagccatggacttgggagagatgtgtgat

SEQ ID NO: 309965 - DNA, 57 bp, Artificial
  Synthetic oligonucleotide
acagcttgttacaccctataaaccagcatggaatgggggacgtggagaaagaagtgc

SEQ ID NO: 309966 - DNA, 56 bp, Artificial
  Synthetic oligonucleotide
acagctttcacaactcgatccagacacagcggtatgcttgatcacattcagaactc

SEQ ID NO: 309967 - DNA, 50 bp, Artificial
  Synthetic oligonucleotide
acagctttcggatactttgaagttttcaatttgaacccggaaaaagggag

SEQ ID NO: 309968 - DNA, 55 bp, Artificial
  Synthetic oligonucleotide
acagcttttaaaattataagcgtcagatatagtaggaaagtttgtgtccaatttg

SEQ ID NO: 309969 - DNA, 60 bp, Artificial
  Synthetic oligonucleotide
acaggaaacaacaatcaggtcagtcggaattatcctatagtgcaaaatgcacaagggcag

SEQ ID NO: 309970 - DNA, 60 bp, Artificial
  Synthetic oligonucleotide
acaggaaacagcttactatatactgaaattagcaggaagatggccagtcaaagtgataca

SEQ ID NO: 309971 - DNA, 58 bp, Artificial
  Synthetic oligonucleotide
acaggaaagataatccatgaatggtgttgcagatcctgcacgttaccccccttacgct

SEQ ID NO: 309972 - DNA, 55 bp, Artificial
  Synthetic oligonucleotide
acaggaaatggccagcaggggtctatgggattcctttcgtcagtccgaaagaggc

SEQ ID NO: 309973 - DNA, 50 bp, Artificial
  Synthetic oligonucleotide
acaggaaattggatcaacaaaaactcagaatgtcacaattaatccgggac

SEQ ID NO: 309974 - DNA, 53 bp, Artificial
  Synthetic oligonucleotide
acaggaacaagttcaactcgtccggatgcccggagcgcatgtctagctgccgc

SEQ ID NO: 309975 - DNA, 59 bp, Artificial
  Synthetic oligonucleotide
acaggaacaccaagtaccgggtctcatctgatggcaaaggcacagtctctgttaacaaa

SEQ ID NO: 309976 - DNA, 50 bp, Artificial
  Synthetic oligonucleotide
acaggaacaggatacaccatggatactgtgaacagaacacatcagtattc

SEQ ID NO: 309977 - DNA, 52 bp, Artificial
  Synthetic oligonucleotide
acaggaacgtcaacgggctaatcggaagaaagtgtaccaacctcggttgatt

SEQ ID NO: 309978 - DNA, 59 bp, Artificial
  Synthetic oligonucleotide
acaggaagcttggtacatgagagtgaaatggcaccgcttactactaatagtaatcctat

SEQ ID NO: 309979 - DNA, 55 bp, Artificial
  Synthetic oligonucleotide
acaggaagggcccttgggtatttgacttagagggaatgtactctggagtagagga

SEQ ID NO: 309980 - DNA, 57 bp, Artificial
  Synthetic oligonucleotide
acaggaaggggacacaaatggttagaaggggactcattgcggacgcacctcactaga

SEQ ID NO: 309981 - DNA, 55 bp, Artificial
  Synthetic oligonucleotide
acaggaagggtctatcgaagctgtatgatcaagttcacatcaagaaggtgataga

SEQ ID NO: 309982 - DNA, 50 bp, Artificial
  Synthetic oligonucleotide
acaggaatttgtcacctttcatgaggggggctctcaacacatcattcgtc

SEQ ID NO: 309983 - DNA, 53 bp, Artificial
  Synthetic oligonucleotide
acaggacaaattccacaacttactaaaagggaatcaaataactacaaccttca

SEQ ID NO: 309984 - DNA, 55 bp, Artificial
  Synthetic oligonucleotide
acaggacaactctgctaactaatatgaaggaggacatctacttggctgaaagggg

SEQ ID NO: 309985 - DNA, 56 bp, Artificial
  Synthetic oligonucleotide
acaggacaagacctagttttgaacttacgtttccatcgagagtcacgcattcgtta

SEQ ID NO: 309986 - DNA, 53 bp, Artificial
  Synthetic oligonucleotide
acaggacaagcaatctatgcccctcccattgcaggaaacattacgtgcacatc

SEQ ID NO: 309987 - DNA, 55 bp, Artificial
  Synthetic oligonucleotide
acaggaccaactttccagtacatggaggctaatgactactacccaacacggtatc

SEQ ID NO: 309988 - DNA, 50 bp, Artificial
  Synthetic oligonucleotide
acaggaccggaaagcgaaagagaaaccagaggagatctctcgacgcagga

SEQ ID NO: 309989 - DNA, 58 bp, Artificial
  Synthetic oligonucleotide
acaggacgatttcttcacgctaaccggctacgcaaaagatcaagttgtatgccctcat

SEQ ID NO: 309990 - DNA, 55 bp, Artificial
  Synthetic oligonucleotide
acaggactactcttaacaagagatggagggactaacactaacagtagtggtgcaa

SEQ ID NO: 309991 - DNA, 55 bp, Artificial
  Synthetic oligonucleotide
acaggactgctagatgtagcaaaggcactacaaccatgcacaggttgtcccaaac

SEQ ID NO: 309992 - DNA, 59 bp, Artificial
  Synthetic oligonucleotide
acaggactgctctgaactgcaatgattccctccagacggggttcgtagcgtcactattt

SEQ ID NO: 309993 - DNA, 60 bp, Artificial
  Synthetic oligonucleotide
acaggactgctttgaactgcaatgattccctcaacacgggattcatagcgtcactctttt

SEQ ID NO: 309994 - DNA, 60 bp, Artificial
  Synthetic oligonucleotide
acaggagaccatgttttttgtagtaagttcaagtgtgaggagacatatccagaagtgcaa

SEQ ID NO: 309995 - DNA, 52 bp, Artificial
  Synthetic oligonucleotide
acaggagacgcagccaaatttgaccttgcacatatggtgcagtgggcatttg

SEQ ID NO: 309996 - DNA, 55 bp, Artificial
  Synthetic oligonucleotide
acaggagacgggaggctttgtctccagcaaggctaagaccagtgtaaacataagt

SEQ ID NO: 309997 - DNA, 55 bp, Artificial
  Synthetic oligonucleotide
acaggagactagggtatggtggacttcaaatagtatcgtcgtattttgtggtact

SEQ ID NO: 309998 - DNA, 53 bp, Artificial
  Synthetic oligonucleotide
acaggagatgtttggcattacagtcaatcacaccgcgtgagtccgggtttgac

SEQ ID NO: 309999 - DNA, 60 bp, Artificial
  Synthetic oligonucleotide
acaggagcacccgtgaagaagagatctggattaagcaagttgtcagtagtgatccgtgat

SEQ ID NO: 310000 - DNA, 56 bp, Artificial
  Synthetic oligonucleotide
acaggagcgtattaccgagggggtgaataatatttatggctgacgtataacggctc

SEQ ID NO: 310001 - DNA, 60 bp, Artificial
  Synthetic oligonucleotide
acaggagctacactagaagaaatgatgacagcatgtcagggagtgggaggacccagtcat

SEQ ID NO: 310002 - DNA, 60 bp, Artificial
  Synthetic oligonucleotide
acaggagctacattagaagaaatgatgacagcatgccacatgcaaatataatgatgcaga

SEQ ID NO: 310003 - DNA, 54 bp, Artificial
  Synthetic oligonucleotide
acaggaggcgcagcgaggcctcgtaatgggccgacgggaccccggtccggaaga

SEQ ID NO: 310004 - DNA, 55 bp, Artificial
  Synthetic oligonucleotide
acaggaggggagggacgacgatggatgctgatgtgacccaggatctcggggtacc

SEQ ID NO: 310005 - DNA, 55 bp, Artificial
  Synthetic oligonucleotide
acaggaggtaaaaaattggatgacagaaaccttgttggtccagaatgcgaaccca

SEQ ID NO: 310006 - DNA, 59 bp, Artificial
  Synthetic oligonucleotide
acaggaggtgagcccaattgagagtaagcgtgattcgggggcaccagaagttggtgtga

SEQ ID NO: 310007 - DNA, 55 bp, Artificial
  Synthetic oligonucleotide
acaggagtaaatggttttaggttactgggagccttcatgatagcattagatagag

SEQ ID NO: 310008 - DNA, 58 bp, Artificial
  Synthetic oligonucleotide
acaggagtcactcaaaatggaggaagtaatgcctgcaaaagagggcctgctagtggtt

SEQ ID NO: 310009 - DNA, 60 bp, Artificial
  Synthetic oligonucleotide
acaggatacagagctctcatttacaattacgggagacaacaccaaatggaatgagaatca

SEQ ID NO: 310010 - DNA, 56 bp, Artificial
  Synthetic oligonucleotide
acaggatatgtccctttgggggaaggccctggagtgcgcgtaggaggcgcacccac

SEQ ID NO: 310011 - DNA, 60 bp, Artificial
  Synthetic oligonucleotide
acaggatccttgatggaagggactgcacactaatagatgccctactgggggatcctcatt

SEQ ID NO: 310012 - DNA, 60 bp, Artificial
  Synthetic oligonucleotide
acaggatcgctgacagccgttctgccgcgtctgggtccgatgacacgcggggtgccctga

SEQ ID NO: 310013 - DNA, 60 bp, Artificial
  Synthetic oligonucleotide
acaggatctccacgggggagttggtggccgtgtccacgcattgcatgagcccgtagctgc

SEQ ID NO: 310014 - DNA, 55 bp, Artificial
  Synthetic oligonucleotide
acaggatggacaagatatcataagcataatgttaacaccgagtggggtggaggcg

SEQ ID NO: 310015 - DNA, 54 bp, Artificial
  Synthetic oligonucleotide
acaggatggccgcgcccgaaaaagaaagtggtccctcctcactaatttatgtcg

SEQ ID NO: 310016 - DNA, 54 bp, Artificial
  Synthetic oligonucleotide
acaggatggctcctgtcaccccgtggctcccggcctagttggggccccacggac

SEQ ID NO: 310017 - DNA, 59 bp, Artificial
  Synthetic oligonucleotide
acaggatgtgaaatcgcaaaaagatatgtagctggtggaatgttgttttttagagctgg

SEQ ID NO: 310018 - DNA, 56 bp, Artificial
  Synthetic oligonucleotide
acaggattttcactgtcggtgcccggaagggtatatctacggagtgcttcgccgtc

SEQ ID NO: 310019 - DNA, 60 bp, Artificial
  Synthetic oligonucleotide
acaggcaagatcttaattgcttacacaccaccaggaggtagtgccccgactgatcgcaaa

SEQ ID NO: 310020 - DNA, 60 bp, Artificial
  Synthetic oligonucleotide
acaggcaatgtagggccaaccttcccctgacaggcagatcttgtacaagatgttctcata

SEQ ID NO: 310021 - DNA, 57 bp, Artificial
  Synthetic oligonucleotide
acaggcagtggttcctagacctgccgttaccatggctacccggagcggacacacaag

SEQ ID NO: 310022 - DNA, 60 bp, Artificial
  Synthetic oligonucleotide
acaggcattggggccatccctatatagattatagaaagggtctgtcgaaactatatgatc

SEQ ID NO: 310023 - DNA, 60 bp, Artificial
  Synthetic oligonucleotide
acaggccacctgcgcagtgtcatccatcgccacagaagatagtgtgcaagcgccgcccta

SEQ ID NO: 310024 - DNA, 58 bp, Artificial
  Synthetic oligonucleotide
acaggcccatacgtattaccaatcccactctgaacttcgataatgagttgacgacctg

SEQ ID NO: 310025 - DNA, 60 bp, Artificial
  Synthetic oligonucleotide
acaggccggtgggatcctgcgcacttcgcctgaaccgtgcttcgtcatccgcaaccagcg

SEQ ID NO: 310026 - DNA, 55 bp, Artificial
  Synthetic oligonucleotide
acaggcctatacaggtaatatcggcggcgttggttctatacgtggtatgacagcg

SEQ ID NO: 310027 - DNA, 59 bp, Artificial
  Synthetic oligonucleotide
acaggcctcacccacatagacgcccacttcctatcccagacaaagcagagtggggagaa

SEQ ID NO: 310028 - DNA, 55 bp, Artificial
  Synthetic oligonucleotide
acaggcctgtatcaagcgctgcctaatgcagttacggatccaccaagcgaacaga

SEQ ID NO: 310029 - DNA, 60 bp, Artificial
  Synthetic oligonucleotide
acaggcgacccataatggtgctaaatgatttctgggtggtgaatgtcagttgcatcccgc

SEQ ID NO: 310030 - DNA, 60 bp, Artificial
  Synthetic oligonucleotide
acaggcgatatcgtgtttttgtgctgactctatatgaagagcatgggaactcagcccctt

SEQ ID NO: 310031 - DNA, 60 bp, Artificial
  Synthetic oligonucleotide
acaggcgatggcagtgggaactttattaactatgatactcgacccacaaaagagtgatgc

SEQ ID NO: 310032 - DNA, 58 bp, Artificial
  Synthetic oligonucleotide
acaggcgccgcatacatatacgcggccgagaacctttcatctaccctcgcgtacgacg

SEQ ID NO: 310033 - DNA, 58 bp, Artificial
  Synthetic oligonucleotide
acaggcgtataaggtagtacctgtgaagcccccagctctctgcgtattccgctacaac

SEQ ID NO: 310034 - DNA, 52 bp, Artificial
  Synthetic oligonucleotide
acaggcgtctacgtccaattcagacggtatgtagtttaacgtggcgtacaat

SEQ ID NO: 310035 - DNA, 60 bp, Artificial
  Synthetic oligonucleotide
acaggctatgcactctcgcctctttcgtacggaaggcgcgaagggagtattcaacgctca

SEQ ID NO: 310036 - DNA, 59 bp, Artificial
  Synthetic oligonucleotide
acaggctattatgaagcagttcacccttgtaatgtcttctgtgttttatcaggaccagg

SEQ ID NO: 310037 - DNA, 58 bp, Artificial
  Synthetic oligonucleotide
acaggctcacatacaacagttctagtccatcggaggtttattgtatagtccaaggtaa

SEQ ID NO: 310038 - DNA, 60 bp, Artificial
  Synthetic oligonucleotide
acaggctctacaatacgagcgatgacacagtgtggtggtctaaggacctgttatcctctg

SEQ ID NO: 310039 - DNA, 58 bp, Artificial
  Synthetic oligonucleotide
acaggctctgtccagttagacaggcccctcctgagggcttgagtccaccggaagctgg

SEQ ID NO: 310040 - DNA, 60 bp, Artificial
  Synthetic oligonucleotide
acaggctgcttgccgagtactcgaattgcattagtctggttgcccagtcaaatggaaatt

SEQ ID NO: 310041 - DNA, 55 bp, Artificial
  Synthetic oligonucleotide
acaggctgtgtatggaatggagaatctagaaccactcgatcttaccacgagtgct

SEQ ID NO: 310042 - DNA, 56 bp, Artificial
  Synthetic oligonucleotide
acaggcttcaatcaaatcgattcagataaggtttatgatgatggtgcaccaccttg

SEQ ID NO: 310043 - DNA, 59 bp, Artificial
  Synthetic oligonucleotide
acaggcttggtcaactagttgatttgactaggttattagcttacaattatgagacacta

SEQ ID NO: 310044 - DNA, 55 bp, Artificial
  Synthetic oligonucleotide
acaggctttgcacttgcaataatcttgaaggcattgtatatgctgtcgactagag

SEQ ID NO: 310045 - DNA, 60 bp, Artificial
  Synthetic oligonucleotide
acagggaaaatatgcaacaaccctcatagaatccttgatggaagggactgtacactgata

SEQ ID NO: 310046 - DNA, 54 bp, Artificial
  Synthetic oligonucleotide
acagggaaattaaaccgtcttatagagaaaactaatcaacaatttgagttgata

SEQ ID NO: 310047 - DNA, 53 bp, Artificial
  Synthetic oligonucleotide
acagggaacctaggcaaccgggcaaggaagacacctagggatggaagacctcc

SEQ ID NO: 310048 - DNA, 59 bp, Artificial
  Synthetic oligonucleotide
acagggaagatccctactttgcagtatagccaaaggactactttgcttcttgaatcaga

SEQ ID NO: 310049 - DNA, 58 bp, Artificial
  Synthetic oligonucleotide
acagggaagcacgcgaattcatagaatccctgtccaagacagtagggtgtcccccagc

SEQ ID NO: 310050 - DNA, 58 bp, Artificial
  Synthetic oligonucleotide
acagggacaaaccctttggagcaaaacaaatgatgccggctcagaccgagtgatggta

SEQ ID NO: 310051 - DNA, 55 bp, Artificial
  Synthetic oligonucleotide
acagggacagaaggattttctaagttgccaatgtatacagcagctgtctgggcct

SEQ ID NO: 310052 - DNA, 55 bp, Artificial
  Synthetic oligonucleotide
acagggacgagagaccaggcccgccacatagccgctttgcactcctcattcgtcc

SEQ ID NO: 310053 - DNA, 57 bp, Artificial
  Synthetic oligonucleotide
acagggactaactggcatctcaatctaaggggggggactcgcgtagtgaatctggac

SEQ ID NO: 310054 - DNA, 60 bp, Artificial
  Synthetic oligonucleotide
acagggactacgacgcaaaggcggttgaagatatgcttcgctcattaacgcatgctgatg

SEQ ID NO: 310055 - DNA, 57 bp, Artificial
  Synthetic oligonucleotide
acagggactcgaaagggctttgctataatgggtggcaagtggtcaaaatgtggtatg

SEQ ID NO: 310056 - DNA, 60 bp, Artificial
  Synthetic oligonucleotide
acagggacttatcagatactttcaatctattctacagtagtgagttccttagtactggca

SEQ ID NO: 310057 - DNA, 52 bp, Artificial
  Synthetic oligonucleotide
acagggagatctccacggcggccgaatgccacaggccgcctagatctaaata

SEQ ID NO: 310058 - DNA, 55 bp, Artificial
  Synthetic oligonucleotide
acagggatactattaacaagggatgggggtaaaaacagtaatgatactgagatct

SEQ ID NO: 310059 - DNA, 55 bp, Artificial
  Synthetic oligonucleotide
acagggatactattgacaagagatggtggtacgaatgagactaacgagaccttca

SEQ ID NO: 310060 - DNA, 55 bp, Artificial
  Synthetic oligonucleotide
acagggatctactggtcagcacaactacagctcatgggtgcgacaccatagctag

SEQ ID NO: 310061 - DNA, 56 bp, Artificial
  Synthetic oligonucleotide
acagggatgctattaacaagagatggtggtaaagggaacgagacaaggaacgatac

SEQ ID NO: 310062 - DNA, 55 bp, Artificial
  Synthetic oligonucleotide
acagggcaaggaggaatatccccaggagctcctcgttctcgaccaccagtaagca

SEQ ID NO: 310063 - DNA, 54 bp, Artificial
  Synthetic oligonucleotide
acagggcaaggtaggcctggcctaggaacctatagccctttaggcagagggggc

SEQ ID NO: 310064 - DNA, 55 bp, Artificial
  Synthetic oligonucleotide
acagggcaccagcgaggagcggttcccgctgctctacatcaacggcgtcccacgc

SEQ ID NO: 310065 - DNA, 50 bp, Artificial
  Synthetic oligonucleotide
acagggcagcactttacttttggttcctgaagaccttggcagcggccttc

SEQ ID NO: 310066 - DNA, 58 bp, Artificial
  Synthetic oligonucleotide
acagggcatcaatttccagatcgctgccatcaaaaccgcgtttttgtagttctatcgt

SEQ ID NO: 310067 - DNA, 56 bp, Artificial
  Synthetic oligonucleotide
acagggcccactgggcgccagcactctggtaccgaggtacctttgtgcgcctgttt

SEQ ID NO: 310068 - DNA, 50 bp, Artificial
  Synthetic oligonucleotide
acagggcgagtcgtgttcttcgggcactatcccggcgtgtagttcgcacc

SEQ ID NO: 310069 - DNA, 59 bp, Artificial
  Synthetic oligonucleotide
acagggcgccccccagtccgcggcagtgccgcggactgggagggcatttgcctacatca

SEQ ID NO: 310070 - DNA, 57 bp, Artificial
  Synthetic oligonucleotide
acagggcgcttggcctgctggggcgggaagacgattgggactgaccaatcctactcc

SEQ ID NO: 310071 - DNA, 55 bp, Artificial
  Synthetic oligonucleotide
acagggcggcacagatactcttgtgcgaagccgttagggtcgctggctctctgag

SEQ ID NO: 310072 - DNA, 57 bp, Artificial
  Synthetic oligonucleotide
acagggctactgttaacaagagatggtggtattaacatgaccaataccaccgagacc

SEQ ID NO: 310073 - DNA, 58 bp, Artificial
  Synthetic oligonucleotide
acagggctgctattaacaagagatggtggtacaaatgtaactaatgacaccgaggtct

SEQ ID NO: 310074 - DNA, 60 bp, Artificial
  Synthetic oligonucleotide
acagggctggattggcaaagctaacacctcagtagagagggacttgaattatgtccacta

SEQ ID NO: 310075 - DNA, 52 bp, Artificial
  Synthetic oligonucleotide
acaggggaccagtcagtccgttggactaccccggacctcccgttctccacac

SEQ ID NO: 310076 - DNA, 54 bp, Artificial
  Synthetic oligonucleotide
acaggggagctataggacacaaatagaccctgacctggcagaccaactgatcca

SEQ ID NO: 310077 - DNA, 52 bp, Artificial
  Synthetic oligonucleotide
acaggggatgattcagaagatagcttattagcatatgctaggacagtgcaat

SEQ ID NO: 310078 - DNA, 55 bp, Artificial
  Synthetic oligonucleotide
acaggggcaatactggaacagacactggaggccatcttcgcgaacatagcgatcc

SEQ ID NO: 310079 - DNA, 60 bp, Artificial
  Synthetic oligonucleotide
acaggggccatacagtgatgagtctaaattggatctgagcataaagtctttatcagtgtc

SEQ ID NO: 310080 - DNA, 60 bp, Artificial
  Synthetic oligonucleotide
acaggggcctcgttcatcatgagtatgtctattgattcgaccatgtcttcgtgcctgaat

SEQ ID NO: 310081 - DNA, 55 bp, Artificial
  Synthetic oligonucleotide
acaggggcgttgatgtggcggttattccaacctcaggtgacgtcgtcgtgtgtgc

SEQ ID NO: 310082 - DNA, 54 bp, Artificial
  Synthetic oligonucleotide
acagggggacaatcaagtgctctgcacccagtacaagatacgcgagagcaggac

SEQ ID NO: 310083 - DNA, 55 bp, Artificial
  Synthetic oligonucleotide
acagggggccgctttggcactctcggtgcgtgacctccctgggggcgccgcgttc

SEQ ID NO: 310084 - DNA, 60 bp, Artificial
  Synthetic oligonucleotide
acaggggggagagtgccacactctcaagcaaggaggttttgtaagtggtgatgtcatata

SEQ ID NO: 310085 - DNA, 53 bp, Artificial
  Synthetic oligonucleotide
acaggggggtacgtcatcatgtacaggggggtacgtcaccatgtacagggggg

SEQ ID NO: 310086 - DNA, 54 bp, Artificial
  Synthetic oligonucleotide
acagggggttcaacagggtataaaccattaacacctggtgctactcagagaccc

SEQ ID NO: 310087 - DNA, 60 bp, Artificial
  Synthetic oligonucleotide
acagggggttcatcagtggtggtgaatcctagtgatagctcatggagtctcggtaagtgg

SEQ ID NO: 310088 - DNA, 55 bp, Artificial
  Synthetic oligonucleotide
acaggggtgtagcagctgggttctagaagaggcagagtgtagtgacctggacggg

SEQ ID NO: 310089 - DNA, 60 bp, Artificial
  Synthetic oligonucleotide
acagggtacagaagagcaagtactcctgactgggcaatgggactgcattgcatatcccta

SEQ ID NO: 310090 - DNA, 57 bp, Artificial
  Synthetic oligonucleotide
acagggtacattccattgggtgggcgttccaatacagttgtgaatgttggtcctaca

SEQ ID NO: 310091 - DNA, 56 bp, Artificial
  Synthetic oligonucleotide
acagggtgaaagtctgtaaaaacccggagatgttactctctgatggtataaactca

SEQ ID NO: 310092 - DNA, 59 bp, Artificial
  Synthetic oligonucleotide
acagggtgggcaagcagtaactatacaacaccaggtagctcacaaaatagtgtaagtca

SEQ ID NO: 310093 - DNA, 55 bp, Artificial
  Synthetic oligonucleotide
acagggtggtgaatcgacatctagccacacacagtgattggcagaactgcgtgtg

SEQ ID NO: 310094 - DNA, 52 bp, Artificial
  Synthetic oligonucleotide
acagggtggtggtggaaattacccgacgccctcaaccaaactgggatgtttg

SEQ ID NO: 310095 - DNA, 60 bp, Artificial
  Synthetic oligonucleotide
acagggtgtctccacacgtttgacgagctatttggtgccaggatccacagtcatggtaat

SEQ ID NO: 310096 - DNA, 60 bp, Artificial
  Synthetic oligonucleotide
acagggtgtgaagagcctattgtgctcactttgagtcctccggcccctgaatgtggctaa

SEQ ID NO: 310097 - DNA, 57 bp, Artificial
  Synthetic oligonucleotide
acagggttcttggtggagaccagggaataatcctggtgacaactggacaagggcatg

SEQ ID NO: 310098 - DNA, 60 bp, Artificial
  Synthetic oligonucleotide
acagggtttagaggacatcattgagacagtagcccaaaatgcactccaattgtcacaacc

SEQ ID NO: 310099 - DNA, 53 bp, Artificial
  Synthetic oligonucleotide
acaggtaaaatttatggtatacatgtgggtggaaatggtagacaaggcttctc

SEQ ID NO: 310100 - DNA, 57 bp, Artificial
  Synthetic oligonucleotide
acaggtaacgctgggtatctgacgggctggcaccgttccacttacgattgcggtgac

SEQ ID NO: 310101 - DNA, 55 bp, Artificial
  Synthetic oligonucleotide
acaggtaaggagtatgggctgactatgacccctgctgacaaatcaccctgcttta

SEQ ID NO: 310102 - DNA, 60 bp, Artificial
  Synthetic oligonucleotide
acaggtaatccatgcagagatacagcacttaggtcactggatggatgctacatttaatct

SEQ ID NO: 310103 - DNA, 54 bp, Artificial
  Synthetic oligonucleotide
acaggtaattggcagttcccctctttcggaaattggataccatcccaacaaaca

SEQ ID NO: 310104 - DNA, 56 bp, Artificial
  Synthetic oligonucleotide
acaggtacacgtcagggcaattgggacggcaagtacaacgagcacggccgcaaccc

SEQ ID NO: 310105 - DNA, 52 bp, Artificial
  Synthetic oligonucleotide
acaggtagacaccctgtcagtatggtagccttaacccccctagggggtctag

SEQ ID NO: 310106 - DNA, 60 bp, Artificial
  Synthetic oligonucleotide
acaggtatagtgtagctcctttagtccatcaaccatggtctgtccgtacagaagaatggc

SEQ ID NO: 310107 - DNA, 55 bp, Artificial
  Synthetic oligonucleotide
acaggtattacccaattaaagtcacaccacatgattggtatgagattcaagagag

SEQ ID NO: 310108 - DNA, 57 bp, Artificial
  Synthetic oligonucleotide
acaggtattcacataactcgttagctttgagatctttctcacggaatatcgtttctc

SEQ ID NO: 310109 - DNA, 51 bp, Artificial
  Synthetic oligonucleotide
acaggtcacttgcctgctcccaccccctggaccgttttggtcccttaatca

SEQ ID NO: 310110 - DNA, 56 bp, Artificial
  Synthetic oligonucleotide
acaggtcatctaaatataatggttgggtcagttcttcgaaagtggagaaaagcttg

SEQ ID NO: 310111 - DNA, 56 bp, Artificial
  Synthetic oligonucleotide
acaggtcccaggcaaacttggtgggttactgacaccaatgaggagggtggccaatc

SEQ ID NO: 310112 - DNA, 55 bp, Artificial
  Synthetic oligonucleotide
acaggtcctgacagtgttacacaaattgaatgttttctgaatcctagaatgggag

SEQ ID NO: 310113 - DNA, 60 bp, Artificial
  Synthetic oligonucleotide
acaggtcgcccaacttagccgagatcgctcgctatggtggatacagcacctactcgtcta

SEQ ID NO: 310114 - DNA, 53 bp, Artificial
  Synthetic oligonucleotide
acaggtcgggcgtgcctacctacacctggggtgagaatgaaacggacgttttc

SEQ ID NO: 310115 - DNA, 56 bp, Artificial
  Synthetic oligonucleotide
acaggtctcgctacttttccatgtggaaccaggcagtagatagctatgaccaggat

SEQ ID NO: 310116 - DNA, 58 bp, Artificial
  Synthetic oligonucleotide
acaggtgaaagggccatggaagtacacgcctatccgagttatcagagaggagtgtccc

SEQ ID NO: 310117 - DNA, 60 bp, Artificial
  Synthetic oligonucleotide
acaggtgacactgaactaccagactatgatgaattcagagcagggggagtgaatcccaac

SEQ ID NO: 310118 - DNA, 58 bp, Artificial
  Synthetic oligonucleotide
acaggtgacataggtgaccgtgacgacatacccttagtaagcacgcccgagggtgctg

SEQ ID NO: 310119 - DNA, 59 bp, Artificial
  Synthetic oligonucleotide
acaggtgcaagcagattatatgacggcaacgcgcgaagttgactttacagtgccagatg

SEQ ID NO: 310120 - DNA, 55 bp, Artificial
  Synthetic oligonucleotide
acaggtgcatctacaccagaccagatagcagcgtcagtccaggcgacgcatgttg

SEQ ID NO: 310121 - DNA, 60 bp, Artificial
  Synthetic oligonucleotide
acaggtgccactaatccactagagccctcagatactgtccaaaccagacatgtaatccaa

SEQ ID NO: 310122 - DNA, 60 bp, Artificial
  Synthetic oligonucleotide
acaggtgcctcttgcatcatgaggatatcaatacactctaccatatcctcttgcttgaat

SEQ ID NO: 310123 - DNA, 55 bp, Artificial
  Synthetic oligonucleotide
acaggtgcgcttgccagttgcatgggtctcatctacaataggatgggaaccgtga

SEQ ID NO: 310124 - DNA, 58 bp, Artificial
  Synthetic oligonucleotide
acaggtggacaatatgcaagtaatgaacagtcgctggttaagcgattttggaaggtta

SEQ ID NO: 310125 - DNA, 60 bp, Artificial
  Synthetic oligonucleotide
acaggtggacaatatgctagtaatgagcaggcgattgttaagcgtttctggaaggtgaac

SEQ ID NO: 310126 - DNA, 59 bp, Artificial
  Synthetic oligonucleotide
acaggtgggaggataggggcggtgccaattgatctggcaaaggggacatctggcagccc

SEQ ID NO: 310127 - DNA, 53 bp, Artificial
  Synthetic oligonucleotide
acaggtggtattaccttccaacgcaacacatcctcagatcctatggaggttgc

SEQ ID NO: 310128 - DNA, 60 bp, Artificial
  Synthetic oligonucleotide
acaggtgtgctcttcgcctatccatacgccctgcatcgatagttcgtggtcgcagcaggg

SEQ ID NO: 310129 - DNA, 53 bp, Artificial
  Synthetic oligonucleotide
acaggtgttggccctaccggtgtaataagggcccggcgctaggcacgccgtta

SEQ ID NO: 310130 - DNA, 54 bp, Artificial
  Synthetic oligonucleotide
acaggtgttggtcctaccggtgtgaataaggacccgacgtcaggctcgtcgtta

SEQ ID NO: 310131 - DNA, 56 bp, Artificial
  Synthetic oligonucleotide
acaggtgtttttatgtggagttgataagaggaagaccacaggagactagggtatgg

SEQ ID NO: 310132 - DNA, 51 bp, Artificial
  Synthetic oligonucleotide
acaggttagtaacctacgggtacagctatttactaagtttaaggagctatt

SEQ ID NO: 310133 - DNA, 55 bp, Artificial
  Synthetic oligonucleotide
acaggttcagcgagggggctaacgacccccagcaattggctggttctgggagact

SEQ ID NO: 310134 - DNA, 55 bp, Artificial
  Synthetic oligonucleotide
acaggttcgctcaagggtggggtcccatcacccatgctgagtctcgcagctcgga

SEQ ID NO: 310135 - DNA, 56 bp, Artificial
  Synthetic oligonucleotide
acaggttcgtggcaccgggagagcgcccttccggcatgtttgactcgtccgtcctc

SEQ ID NO: 310136 - DNA, 58 bp, Artificial
  Synthetic oligonucleotide
acaggttctcaagtttgatgattaattcatccacggtcattggtgggctcctagggtg

SEQ ID NO: 310137 - DNA, 51 bp, Artificial
  Synthetic oligonucleotide
acaggttctgctacgtcataactaatagagccgtcttgaagtacacggccc

SEQ ID NO: 310138 - DNA, 56 bp, Artificial
  Synthetic oligonucleotide
acaggtttaaccgctgtgttcaacggcactctcttattggaggcctatggtaccac

SEQ ID NO: 310139 - DNA, 53 bp, Artificial
  Synthetic oligonucleotide
acaggtttgaggcccgtttacgtcaggaagccaacgcagaatgggaaccccgc

SEQ ID NO: 310140 - DNA, 58 bp, Artificial
  Synthetic oligonucleotide
acaggtttgcgatttagaatcacgcactccccctgccctcttataggagtgctaaatg

SEQ ID NO: 310141 - DNA, 55 bp, Artificial
  Synthetic oligonucleotide
acagtaaatccaggtccatttgcacaaaccagatacgctccagttaattggggac

SEQ ID NO: 310142 - DNA, 58 bp, Artificial
  Synthetic oligonucleotide
acagtaacagccccggtggtaccaaactgcagtgacaccataataacatacaataaca

SEQ ID NO: 310143 - DNA, 53 bp, Artificial
  Synthetic oligonucleotide
acagtaaccaccgccacaggtctcagcgcatcaccctcacagtcagtgaccct

SEQ ID NO: 310144 - DNA, 51 bp, Artificial
  Synthetic oligonucleotide
acagtaagatttggatgccgtgagaaaacattagggtacacacattctgga

SEQ ID NO: 310145 - DNA, 60 bp, Artificial
  Synthetic oligonucleotide
acagtaagctcatggtcttacattgtggaaacatcgaactcagacaatgggacatgttac

SEQ ID NO: 310146 - DNA, 55 bp, Artificial
  Synthetic oligonucleotide
acagtaagtaacagtgatttcatatgtgttggatggtcgagcacaagttgccacg

SEQ ID NO: 310147 - DNA, 59 bp, Artificial
  Synthetic oligonucleotide
acagtaatgaccgatggaccaagtaatgggcaggcctcgtacaagatctttaagataga

SEQ ID NO: 310148 - DNA, 57 bp, Artificial
  Synthetic oligonucleotide
acagtaatgacgagtgggtacgcactgcattttcttgccaacaatccaacttacttg

SEQ ID NO: 310149 - DNA, 59 bp, Artificial
  Synthetic oligonucleotide
acagtaattggagagcaatggctagtgattttaacctgccacctgtggtagcaaaagaa

SEQ ID NO: 310150 - DNA, 57 bp, Artificial
  Synthetic oligonucleotide
acagtacaacccatccaattgcctaacaaggaggaatggacagtaaatgatatacaa

SEQ ID NO: 310151 - DNA, 55 bp, Artificial
  Synthetic oligonucleotide
acagtacagtgctccgcatatgtctaccctacttatcccgcaagataccatcgca

SEQ ID NO: 310152 - DNA, 60 bp, Artificial
  Synthetic oligonucleotide
acagtaccactagcaagggagcagtattcaagtcagatttgccaatagagagctgcgatg

SEQ ID NO: 310153 - DNA, 59 bp, Artificial
  Synthetic oligonucleotide
acagtaccggacacgcctatcctgcacttaagcctgcaggacgctaccaggtccgccta

SEQ ID NO: 310154 - DNA, 53 bp, Artificial
  Synthetic oligonucleotide
acagtacctagcaggtttgtcaactctgcctggaaaccccgcaattgcttcac

SEQ ID NO: 310155 - DNA, 60 bp, Artificial
  Synthetic oligonucleotide
acagtacgaagctttggccattcgcaaacacatacgtggcaacagagagctagcgatcaa

SEQ ID NO: 310156 - DNA, 58 bp, Artificial
  Synthetic oligonucleotide
acagtacgaatagattcgcacctccgaagcgagcggttgctcgtcaagcgaacccgaa

SEQ ID NO: 310157 - DNA, 60 bp, Artificial
  Synthetic oligonucleotide
acagtacgatctaagtacaaggatgaaagaggaatgttatgttctactaatgtgccgcca

SEQ ID NO: 310158 - DNA, 57 bp, Artificial
  Synthetic oligonucleotide
acagtacgatgtcttttttctctagaatggcgaggccagcggttcgaacagtattaa

SEQ ID NO: 310159 - DNA, 56 bp, Artificial
  Synthetic oligonucleotide
acagtactcctgggtaactccaagcgcctgggacaatcttcaaactttcgctcttc

SEQ ID NO: 310160 - DNA, 60 bp, Artificial
  Synthetic oligonucleotide
acagtactgacaaacccatacacctcctctgaaatacccatagttgctagagctgtctcc

SEQ ID NO: 310161 - DNA, 60 bp, Artificial
  Synthetic oligonucleotide
acagtagaaaagtctctagagttgctcaagacttataatgagccagtttggtctcactat

SEQ ID NO: 310162 - DNA, 55 bp, Artificial
  Synthetic oligonucleotide
acagtagatgaacagatccagtggatgtataggcaaccaaatcccgtgccggtag

SEQ ID NO: 310163 - DNA, 55 bp, Artificial
  Synthetic oligonucleotide
acagtagcaagacctgtcaaacaagatgtcaccgaaatgcctaccaacaaagcct

SEQ ID NO: 310164 - DNA, 60 bp, Artificial
  Synthetic oligonucleotide
acagtagcagcggactcctctcttggtgacaagagcctctgcggccaaaagccccgtgga

SEQ ID NO: 310165 - DNA, 58 bp, Artificial
  Synthetic oligonucleotide
acagtagcaggaaaaagtactcatgcttcagtgctagtgggccctacccctgtaaata

SEQ ID NO: 310166 - DNA, 60 bp, Artificial
  Synthetic oligonucleotide
acagtagcaggttccctgtcactggcaatcatgatagctgggatctctatatggatgtgc

SEQ ID NO: 310167 - DNA, 60 bp, Artificial
  Synthetic oligonucleotide
acagtagcagtgtgagcgacactaccatcgcttctcatgactcgggatcctcatcttcta

SEQ ID NO: 310168 - DNA, 60 bp, Artificial
  Synthetic oligonucleotide
acagtagcatgcccgatacatagtgacgttatgctaaggtcactgtctcctagtgacccg

SEQ ID NO: 310169 - DNA, 53 bp, Artificial
  Synthetic oligonucleotide
acagtagcgcgtgcgcattttgcaggtcgtgagctcaggggtaaaagaaaagc

SEQ ID NO: 310170 - DNA, 53 bp, Artificial
  Synthetic oligonucleotide
acagtagcgtaggctgctttacggtcttgcaccgcccatgcagggaagccagt

SEQ ID NO: 310171 - DNA, 57 bp, Artificial
  Synthetic oligonucleotide
acagtaggattaatattaggaaaatcatctataggaataaaaggcttagatgtatta

SEQ ID NO: 310172 - DNA, 58 bp, Artificial
  Synthetic oligonucleotide
acagtaggggaatgtccgaggtatgttaagcaagaaagtctgctattggcaacaggga

SEQ ID NO: 310173 - DNA, 54 bp, Artificial
  Synthetic oligonucleotide
acagtaggtcgctatggctagcgggggagtaggcggcacccgagagctgtttag

SEQ ID NO: 310174 - DNA, 51 bp, Artificial
  Synthetic oligonucleotide
acagtagtagtcctttattgcgtacatcaaaggatagacataaaggacacc

SEQ ID NO: 310175 - DNA, 58 bp, Artificial
  Synthetic oligonucleotide
acagtagtgctgttgaccttttacctggagaggttgaaactattgcagaagttcatcc

SEQ ID NO: 310176 - DNA, 56 bp, Artificial
  Synthetic oligonucleotide
acagtagttttactggttcctgcactaatgctgttggaggaagcgggacgaataac

SEQ ID NO: 310177 - DNA, 59 bp, Artificial
  Synthetic oligonucleotide
acagtataaggtgttgtgcaaagctgtcaattcatacgaaaaattactcgtcgcggaga

SEQ ID NO: 310178 - DNA, 60 bp, Artificial
  Synthetic oligonucleotide
acagtatacagcatttactgtgccatccattaatcatcaggaaccagataaaagatatgt

SEQ ID NO: 310179 - DNA, 60 bp, Artificial
  Synthetic oligonucleotide
acagtatccgttggataccacacctgagtcgtcccaactagtgcacgctatcactggtct

SEQ ID NO: 310180 - DNA, 55 bp, Artificial
  Synthetic oligonucleotide
acagtatctacaggtggggcactgttgatggtgtatgggatcctagagcactgac

SEQ ID NO: 310181 - DNA, 55 bp, Artificial
  Synthetic oligonucleotide
acagtatgatcagatttgttgacccgctaactgggcacacaatggatgaacaccc

SEQ ID NO: 310182 - DNA, 60 bp, Artificial
  Synthetic oligonucleotide
acagtatgtttcctcatgcagattgccatcttaacaacgactgtgacactgcatttcaaa

SEQ ID NO: 310183 - DNA, 60 bp, Artificial
  Synthetic oligonucleotide
acagtattggggtcaggaactacagaagagtgctgttagcttgctcaatgccacagccat

SEQ ID NO: 310184 - DNA, 60 bp, Artificial
  Synthetic oligonucleotide
acagtattggggtcaggaactgaggaatagtgctgtcagcttgctaaacgccacagctat

SEQ ID NO: 310185 - DNA, 60 bp, Artificial
  Synthetic oligonucleotide
acagtcaaacatgtcgcagcagtacctgtacgcccctataacgcagcgagtgaccacgcg

SEQ ID NO: 310186 - DNA, 60 bp, Artificial
  Synthetic oligonucleotide
acagtcaaaccacatggagggtttatctgcgatcacatgactttgatgcttgtatacttt

SEQ ID NO: 310187 - DNA, 58 bp, Artificial
  Synthetic oligonucleotide
acagtcaaccctattgaccctgttgcaccttcagttgtccctcttacagacacaggac

SEQ ID NO: 310188 - DNA, 59 bp, Artificial
  Synthetic oligonucleotide
acagtcaaggccaagcttctatccgtagaagaagcctgtaagctgacgcccccacactc

SEQ ID NO: 310189 - DNA, 57 bp, Artificial
  Synthetic oligonucleotide
acagtcaaggctaaactcctatccatagaagaagcctgtaaactgacgcccccacat

SEQ ID NO: 310190 - DNA, 60 bp, Artificial
  Synthetic oligonucleotide
acagtcaccaacgctttcatctcctactacgctcaccgcgtcgaaggaagatgtccgaca

SEQ ID NO: 310191 - DNA, 56 bp, Artificial
  Synthetic oligonucleotide
acagtcactcaagtgatgattggagagcatgtggatatttcccttccagtgcagaa

SEQ ID NO: 310192 - DNA, 58 bp, Artificial
  Synthetic oligonucleotide
acagtcaggaccctttgcataccacggagaagaaaaaagctgcactctaactgcaaag

SEQ ID NO: 310193 - DNA, 55 bp, Artificial
  Synthetic oligonucleotide
acagtcagtatcttatggagagcgcatccagaggcttggcagagttggtcgttgt

SEQ ID NO: 310194 - DNA, 58 bp, Artificial
  Synthetic oligonucleotide
acagtcatgggggaaactaagcacattcgaagagtttgatggcgctcaatttgtttcc

SEQ ID NO: 310195 - DNA, 56 bp, Artificial
  Synthetic oligonucleotide
acagtcattcaccaaggcttagattccaccgcccggggtctacagctcaaaggaag

SEQ ID NO: 310196 - DNA, 60 bp, Artificial
  Synthetic oligonucleotide
acagtcattgatgtacacggcactttaatttcacgagacaatgaagctagtatgttgcta

SEQ ID NO: 310197 - DNA, 60 bp, Artificial
  Synthetic oligonucleotide
acagtcattgatgtacacggtacgttaatctcgcgggacaatgaagctagcgtgctgcta

SEQ ID NO: 310198 - DNA, 53 bp, Artificial
  Synthetic oligonucleotide
acagtccacagaaagccccacactcaactccgcagcctcggcgagcccaccag

SEQ ID NO: 310199 - DNA, 54 bp, Artificial
  Synthetic oligonucleotide
acagtccataatattaaactatatggattgccctttaagcctcattcttataag

SEQ ID NO: 310200 - DNA, 56 bp, Artificial
  Synthetic oligonucleotide
acagtccataattggaaaaagtatccctaacattctaaaattgatggaaggagata

SEQ ID NO: 310201 - DNA, 57 bp, Artificial
  Synthetic oligonucleotide
acagtcccagcatgtgcccgagtcccgggaagagctctattcccaaccaacttttga

SEQ ID NO: 310202 - DNA, 55 bp, Artificial
  Synthetic oligonucleotide
acagtcccgtcgtgccacctatatccctacaaacaccctggagagtgaccttccc

SEQ ID NO: 310203 - DNA, 57 bp, Artificial
  Synthetic oligonucleotide
acagtcctacttaaagagttggacaaatcaacacccagtatatgattatattatacc

SEQ ID NO: 310204 - DNA, 58 bp, Artificial
  Synthetic oligonucleotide
acagtcgactggctgtctgaaaatcctgaggccaccttcaaatcccgtctagaccttg

SEQ ID NO: 310205 - DNA, 53 bp, Artificial
  Synthetic oligonucleotide
acagtcgaggaaacttttggctcggtttggagaccagagagggccaaccaggg

SEQ ID NO: 310206 - DNA, 59 bp, Artificial
  Synthetic oligonucleotide
acagtcgcacgtgtctcgtggaacccaacctccactccgacccagacatcctggagtgc

SEQ ID NO: 310207 - DNA, 56 bp, Artificial
  Synthetic oligonucleotide
acagtcgccaaggccactacaacaattgtctacggacgtgttggtcgttcagtccc

SEQ ID NO: 310208 - DNA, 56 bp, Artificial
  Synthetic oligonucleotide
acagtcgctattcctgtactgacacctccgactggcattacgttgacagttcttag

SEQ ID NO: 310209 - DNA, 58 bp, Artificial
  Synthetic oligonucleotide
acagtcggtctggtgactgtgtctaccgccggatattaccacgggcggtatgtcttga

SEQ ID NO: 310210 - DNA, 59 bp, Artificial
  Synthetic oligonucleotide
acagtcgtggccaccacacgtacaatctccgcagccaacacagggtcctccacagagat

SEQ ID NO: 310211 - DNA, 60 bp, Artificial
  Synthetic oligonucleotide
acagtctatagaatcaagcatgtcttattacaggttgtactatgttaaggattggtttga

SEQ ID NO: 310212 - DNA, 60 bp, Artificial
  Synthetic oligonucleotide
acagtctatatgcatctccacaactcgaagggttctcagctgaatcaaggaaattgcttc

SEQ ID NO: 310213 - DNA, 53 bp, Artificial
  Synthetic oligonucleotide
acagtctcaggaattagttcacttgtttccgccgggataaggttaggaacaag

SEQ ID NO: 310214 - DNA, 60 bp, Artificial
  Synthetic oligonucleotide
acagtctgcatctaatgcaacatggtccggttatgatgtcagtccagtaaactgcgcacg

SEQ ID NO: 310215 - DNA, 55 bp, Artificial
  Synthetic oligonucleotide
acagtctgccactggccaagcgttacggggttgtcaccgggtggaccagggccat

SEQ ID NO: 310216 - DNA, 60 bp, Artificial
  Synthetic oligonucleotide
acagtctgggagaatcgatttccattggatgcttcttgatcctaacgacacagtgacttt

SEQ ID NO: 310217 - DNA, 59 bp, Artificial
  Synthetic oligonucleotide
acagtctggggcattaagcagctccaggcaagagtactggcgttggaaagatacctaaa

SEQ ID NO: 310218 - DNA, 58 bp, Artificial
  Synthetic oligonucleotide
acagtctggggcgttaaacagctccaggcgagagtcctggctgtagaaggatacctaa

SEQ ID NO: 310219 - DNA, 57 bp, Artificial
  Synthetic oligonucleotide
acagtcttcagttaatattgatacgtataccttcaactgtccctttgaattagcaaa

SEQ ID NO: 310220 - DNA, 51 bp, Artificial
  Synthetic oligonucleotide
acagtgaaaagtctattcgttttttatagtgtggattaggaagagcgaagg

SEQ ID NO: 310221 - DNA, 60 bp, Artificial
  Synthetic oligonucleotide
acagtgaaatacaagcaatagcaataaagtcaatccactttgcaatactctatgtttagt

SEQ ID NO: 310222 - DNA, 60 bp, Artificial
  Synthetic oligonucleotide
acagtgaaattagtgcggttctccggcggagagagcatcttctggtacttagactctgtc

SEQ ID NO: 310223 - DNA, 60 bp, Artificial
  Synthetic oligonucleotide
acagtgaagaagaggctcctttggggttcggatttgggcacgatgatcagatgtgcacgc

SEQ ID NO: 310224 - DNA, 58 bp, Artificial
  Synthetic oligonucleotide
acagtgaagcaaaatgggaaatctggagcctgcaagagggcaaatgtgaatgatttct

SEQ ID NO: 310225 - DNA, 59 bp, Artificial
  Synthetic oligonucleotide
acagtgaattgaacacaatccagaaacaaattgtctggatgtggaacatgggtttgtgt

SEQ ID NO: 310226 - DNA, 60 bp, Artificial
  Synthetic oligonucleotide
acagtgacacatatgaagtgttggacaggttcttttggacgcatgactcgtcagcggggg

SEQ ID NO: 310227 - DNA, 58 bp, Artificial
  Synthetic oligonucleotide
acagtgacccacccaacaataacgacccctgcagtaccgaactgcagtgacactataa

SEQ ID NO: 310228 - DNA, 56 bp, Artificial
  Synthetic oligonucleotide
acagtgacgatcgaggtgggtcgtcctgtcggcatagcgacgggggcttcgaacgc

SEQ ID NO: 310229 - DNA, 59 bp, Artificial
  Synthetic oligonucleotide
acagtgacggtctggaggctgtaacacctgcaagcggtcacgttttggatcaagatagc

SEQ ID NO: 310230 - DNA, 55 bp, Artificial
  Synthetic oligonucleotide
acagtgacttgtagtgttttgtgggttgttgcggcggcgtccctagaggtcgccg

SEQ ID NO: 310231 - DNA, 60 bp, Artificial
  Synthetic oligonucleotide
acagtgaggttactcccaccgcagaagataatgtgatgctcattacatgtaggtttgatc

SEQ ID NO: 310232 - DNA, 60 bp, Artificial
  Synthetic oligonucleotide
acagtgatagcccagacaaaaaaatgcttccttgttacagcacagcaagaattccactgc

SEQ ID NO: 310233 - DNA, 60 bp, Artificial
  Synthetic oligonucleotide
acagtgcagaggtttcgattagccaattagaggatagactgaaatggtcatctcagtcac

SEQ ID NO: 310234 - DNA, 55 bp, Artificial
  Synthetic oligonucleotide
acagtgcatgttcagtgcaatgcaagtaaattccaccaaggcactcttatcgtgg

SEQ ID NO: 310235 - DNA, 60 bp, Artificial
  Synthetic oligonucleotide
acagtgccaacagcttatatacaatagatccatacctttttacatcggacatgtcagggc

SEQ ID NO: 310236 - DNA, 53 bp, Artificial
  Synthetic oligonucleotide
acagtgccctagcacgaagacacgtagcccgagagatgcatccagagtactat

SEQ ID NO: 310237 - DNA, 60 bp, Artificial
  Synthetic oligonucleotide
acagtgccctagcacgcacacacagagccagagcactgcatccagagtactataaagact

SEQ ID NO: 310238 - DNA, 55 bp, Artificial
  Synthetic oligonucleotide
acagtgcctctacggcgtttgatgttgtatgtgcctatacgcacgcgtgttattt

SEQ ID NO: 310239 - DNA, 60 bp, Artificial
  Synthetic oligonucleotide
acagtgccttctgacaatgtggaaaccagaaaaacttatatgcattatgatggcacagaa

SEQ ID NO: 310240 - DNA, 52 bp, Artificial
  Synthetic oligonucleotide
acagtgcggaacattaagggcacgtaggcacgtgtgtatactacaccctgga

SEQ ID NO: 310241 - DNA, 59 bp, Artificial
  Synthetic oligonucleotide
acagtgctactaatgaaactggggagtctagctgtggagggggagatgttgtgccattc

SEQ ID NO: 310242 - DNA, 60 bp, Artificial
  Synthetic oligonucleotide
acagtgctcacctccatgctcaccgacccctcccacatcacagcagagacggccaagcgt

SEQ ID NO: 310243 - DNA, 60 bp, Artificial
  Synthetic oligonucleotide
acagtgcttaccagacaatgatgattatcaggaaataactctaaatgtgacagaggcttt

SEQ ID NO: 310244 - DNA, 55 bp, Artificial
  Synthetic oligonucleotide
acagtggaaacaggagtttccgcttgtggaagacccggaagcagcagaactggaa

SEQ ID NO: 310245 - DNA, 59 bp, Artificial
  Synthetic oligonucleotide
acagtggaactttactagtagtaatcattccagaacaccagttggcatcagcaaatggt

SEQ ID NO: 310246 - DNA, 51 bp, Artificial
  Synthetic oligonucleotide
acagtggaatagaacacgatgaaactacagattctgttgtacaggtagaac

SEQ ID NO: 310247 - DNA, 60 bp, Artificial
  Synthetic oligonucleotide
acagtggatgaacagactcatcgcattcgcgtcccggggcaaccacgtctcaccgacgca

SEQ ID NO: 310248 - DNA, 55 bp, Artificial
  Synthetic oligonucleotide
acagtggccgtaacctcagtcgacatgttgcacaattcggtaatcacatccagtg

SEQ ID NO: 310249 - DNA, 55 bp, Artificial
  Synthetic oligonucleotide
acagtggcggccagtctttgcttggcaatcctgattgctggaggtttaatcctgg

SEQ ID NO: 310250 - DNA, 60 bp, Artificial
  Synthetic oligonucleotide
acagtggctacatacacagatattccgcttaattaattcatcagctacacatactctttt

SEQ ID NO: 310251 - DNA, 50 bp, Artificial
  Synthetic oligonucleotide
acagtgggaataagtaaaagtgagaggttcgaatcctccctaaccccggg

SEQ ID NO: 310252 - DNA, 60 bp, Artificial
  Synthetic oligonucleotide
acagtgggatcaggcagctgtcctatattcgaactatattgtgaatagacttcgaggatt

SEQ ID NO: 310253 - DNA, 55 bp, Artificial
  Synthetic oligonucleotide
acagtgggatctggatcaagcgcaaaaggatctggagaacgcgcggacaaggatg

SEQ ID NO: 310254 - DNA, 60 bp, Artificial
  Synthetic oligonucleotide
acagtggtgaatcgtctaatcgtcgagtgaagcgcgactcatacgcaggagtggttaaac

SEQ ID NO: 310255 - DNA, 55 bp, Artificial
  Synthetic oligonucleotide
acagtggtggatgttggtcctacacgtcccccagtggttattgaacctgtgggcc

SEQ ID NO: 310256 - DNA, 60 bp, Artificial
  Synthetic oligonucleotide
acagtggtttgttgagtaggataacttcatcctgtgctaatttgtcatcagttgagatgc

SEQ ID NO: 310257 - DNA, 52 bp, Artificial
  Synthetic oligonucleotide
acagtgtcacgttttttctggttcgtgaccgtcgtcctacaggatctcccca

SEQ ID NO: 310258 - DNA, 58 bp, Artificial
  Synthetic oligonucleotide
acagtgtcccagttaaatgcaggcagggttattgcctaagaatcactcaggaagggag

SEQ ID NO: 310259 - DNA, 60 bp, Artificial
  Synthetic oligonucleotide
acagtgtccgatagtgtgttggtctttgaactcacggatatagtccactgccgtatggcc

SEQ ID NO: 310260 - DNA, 58 bp, Artificial
  Synthetic oligonucleotide
acagtgtgctattctggttgactcgtgataggcgaccttttggtacgccaatggattt

SEQ ID NO: 310261 - DNA, 53 bp, Artificial
  Synthetic oligonucleotide
acagtgtgtctgaaatgtctgttgaagctttctatggcagatccggcttggtg

SEQ ID NO: 310262 - DNA, 59 bp, Artificial
  Synthetic oligonucleotide
acagtgtgtgctcgcgcgaaggcaccccccccctcatgggacactatgtggaaatgcct

SEQ ID NO: 310263 - DNA, 59 bp, Artificial
  Synthetic oligonucleotide
acagttaacgcgtgttatcttacataatagtgtcgaactgtatcaacagtgcctagccc

SEQ ID NO: 310264 - DNA, 59 bp, Artificial
  Synthetic oligonucleotide
acagttaaggccagacttctatctgtagaagaggcctgtaagctgacgcccccacattc

SEQ ID NO: 310265 - DNA, 60 bp, Artificial
  Synthetic oligonucleotide
acagttaatctatatgttaggaatgatggcagagatgttcacatcttatcctattctgca

SEQ ID NO: 310266 - DNA, 53 bp, Artificial
  Synthetic oligonucleotide
acagttaattgtatgggttattcatgttaagtctaatatatggggttgtttag

SEQ ID NO: 310267 - DNA, 60 bp, Artificial
  Synthetic oligonucleotide
acagttacaaccatctctcaacacaggatcagaagaactgagatcattattcaatacagt

SEQ ID NO: 310268 - DNA, 55 bp, Artificial
  Synthetic oligonucleotide
acagttactattggtactatttcaggacagactacgaatgggctctctaggcaga

SEQ ID NO: 310269 - DNA, 55 bp, Artificial
  Synthetic oligonucleotide
acagttaggagcaagatggccagtaactcagatacacacagacaatggacccaac

SEQ ID NO: 310270 - DNA, 57 bp, Artificial
  Synthetic oligonucleotide
acagttagggcaattttcactcgaattgcacagttagcttggaaaggtccaattata

SEQ ID NO: 310271 - DNA, 50 bp, Artificial
  Synthetic oligonucleotide
acagttaggttgaccagagattgtcccgttgtaaccgctactgataggac

SEQ ID NO: 310272 - DNA, 58 bp, Artificial
  Synthetic oligonucleotide
acagttatctgatttatcaataaggtgctaccgatgtcaatgtccgttaacaccggag

SEQ ID NO: 310273 - DNA, 51 bp, Artificial
  Synthetic oligonucleotide
acagttatgtcatttattaattaggtgtattacatgtcaaaaaccgctgtg

SEQ ID NO: 310274 - DNA, 55 bp, Artificial
  Synthetic oligonucleotide
acagttattatctctgctttcacttacagttgagcccattattgagagcgagggg

SEQ ID NO: 310275 - DNA, 57 bp, Artificial
  Synthetic oligonucleotide
acagttcaagagcaaacaccgtattgaaccagtatgtttgttagtacatggtagccc

SEQ ID NO: 310276 - DNA, 55 bp, Artificial
  Synthetic oligonucleotide
acagttcaagtccaaatgccgtattgaacctgtatgtttgctcttgcatgggagt

SEQ ID NO: 310277 - DNA, 60 bp, Artificial
  Synthetic oligonucleotide
acagttccttaactcccttgttgttgaatgctgtcctcagtattagatgttgcttcatgg

SEQ ID NO: 310278 - DNA, 54 bp, Artificial
  Synthetic oligonucleotide
acagttctcgaatgcaacgaagacggctctccgattgacctgaagccgatacac

SEQ ID NO: 310279 - DNA, 60 bp, Artificial
  Synthetic oligonucleotide
acagttctcgggaaagatgcaggtgcattgaccgaagatccagatgaaagtacagctggg

SEQ ID NO: 310280 - DNA, 57 bp, Artificial
  Synthetic oligonucleotide
acagttcttatatagcagtaggttcagaaagttacaacaggaggttcactcctgaaa

SEQ ID NO: 310281 - DNA, 50 bp, Artificial
  Synthetic oligonucleotide
acagttcttccgcgtctgttagctctagctcgcgcaactcccgtcgggcc

SEQ ID NO: 310282 - DNA, 60 bp, Artificial
  Synthetic oligonucleotide
acagttgacccagctggtacagaaactgcaaacgccccgctagatagtgtccatcctgca

SEQ ID NO: 310283 - DNA, 57 bp, Artificial
  Synthetic oligonucleotide
acagttgacttcttcgggtgggtgtctggactaacctcatggctaggtgggcctctg

SEQ ID NO: 310284 - DNA, 53 bp, Artificial
  Synthetic oligonucleotide
acagttgagatagtgtgcgtgctttgcaaatacagcgtcttagctgcgatccg

SEQ ID NO: 310285 - DNA, 59 bp, Artificial
  Synthetic oligonucleotide
acagttgagttcgatgtaaggaacatgctcaaaatgttgtctaacaatccaattaaatg

SEQ ID NO: 310286 - DNA, 60 bp, Artificial
  Synthetic oligonucleotide
acagttgatgatcccaaaaccaaaggacaagcgaccactgactatacaatgccccgctca

SEQ ID NO: 310287 - DNA, 59 bp, Artificial
  Synthetic oligonucleotide
acagttgatgcatttaccttaccacgtgaaacggggagcatctcatgtcgacgtttaca

SEQ ID NO: 310288 - DNA, 58 bp, Artificial
  Synthetic oligonucleotide
acagttgattaccctgcccgcgcccatacttttgatgatttttgtccggaatgtcgca

SEQ ID NO: 310289 - DNA, 55 bp, Artificial
  Synthetic oligonucleotide
acagttgcctagtacacaatacgaaacctgaggagtataatcatacacttcatag

SEQ ID NO: 310290 - DNA, 50 bp, Artificial
  Synthetic oligonucleotide
acagttgcgacgcaagtgcgagatgtttacgtacctaaggtttgatatgg

SEQ ID NO: 310291 - DNA, 56 bp, Artificial
  Synthetic oligonucleotide
acagttggacgctacgatggttcccttagtttacaatttgggaactatacacatgc

SEQ ID NO: 310292 - DNA, 60 bp, Artificial
  Synthetic oligonucleotide
acagttggatacaatcacactcatccaggagagacaggcagagtgattggtggtttcact

SEQ ID NO: 310293 - DNA, 60 bp, Artificial
  Synthetic oligonucleotide
acagttggcgaggtaaacaagcatgcatatcacaaccatgtcattaaaggaaagaggaag

SEQ ID NO: 310294 - DNA, 55 bp, Artificial
  Synthetic oligonucleotide
acagttggctctttgagaagtctggccgtgattacatccctggccgtcagctgga

SEQ ID NO: 310295 - DNA, 54 bp, Artificial
  Synthetic oligonucleotide
acagttggtctagccactgtgtccaccgccggatattatcacgggcggtatgtc

SEQ ID NO: 310296 - DNA, 60 bp, Artificial
  Synthetic oligonucleotide
acagttgtagatactacccgcagtaccaatattactatttcagctgctgctacacaggct

SEQ ID NO: 310297 - DNA, 55 bp, Artificial
  Synthetic oligonucleotide
acagttgtgactttcgaatttagtagtacagatcccagagtggactcgggaaagt

SEQ ID NO: 310298 - DNA, 60 bp, Artificial
  Synthetic oligonucleotide
acagttgttacaatgtggaagattgacttggccggcctattattgcaaggtgtgcctatc

SEQ ID NO: 310299 - DNA, 52 bp, Artificial
  Synthetic oligonucleotide
acagttgttaccttgcctgttttcccggagatcagcatttggcggaactctt

SEQ ID NO: 310300 - DNA, 59 bp, Artificial
  Synthetic oligonucleotide
acagttgttggagttcaagaatctgaacattgatcctagctaccccgaacttgtgagga

SEQ ID NO: 310301 - DNA, 52 bp, Artificial
  Synthetic oligonucleotide
acagtttaaaaacctggcatccttttaaaaaaggctgatccctttggcacga

SEQ ID NO: 310302 - DNA, 55 bp, Artificial
  Synthetic oligonucleotide
acagtttacactgggagtgccccctttactccgaagctgggcagtgtccaattca

SEQ ID NO: 310303 - DNA, 56 bp, Artificial
  Synthetic oligonucleotide
acagtttccctggtttgaccgccctttcgagctatcttgccagccctcctctctta

SEQ ID NO: 310304 - DNA, 54 bp, Artificial
  Synthetic oligonucleotide
acagtttgatcctgacaccgtggaggccagaaacggtatcgatgcaacgctcca

SEQ ID NO: 310305 - DNA, 56 bp, Artificial
  Synthetic oligonucleotide
acagtttggaagccttgacccagtagtcgtcaagggtggagcagggtcccttgcta

SEQ ID NO: 310306 - DNA, 55 bp, Artificial
  Synthetic oligonucleotide
acagtttgtagaaaagcaggccaaatgcctgctccaaaacctacctttgtggagc

SEQ ID NO: 310307 - DNA, 58 bp, Artificial
  Synthetic oligonucleotide
acagtttgttggctgaatactcaaagtattgcagcttggttgcccactcgtaggggag

SEQ ID NO: 310308 - DNA, 60 bp, Artificial
  Synthetic oligonucleotide
acagttttcgatactatgattacacaatctcagctaatttatactaatcaacttctatta

SEQ ID NO: 310309 - DNA, 56 bp, Artificial
  Synthetic oligonucleotide
acagttttcttctgacacgatggcgggaacttggactcacgtgacgtacaaatggc

SEQ ID NO: 310310 - DNA, 60 bp, Artificial
  Synthetic oligonucleotide
acagttttgatactaacaatagctgcctcataatttgcattatagttctgcactaggcct

SEQ ID NO: 310311 - DNA, 57 bp, Artificial
  Synthetic oligonucleotide
acagttttgggtactttagcttgcactgttaggttacatgcaggttcggctacagaa

SEQ ID NO: 310312 - DNA, 54 bp, Artificial
  Synthetic oligonucleotide
acataaaacaagggccaaaagaacccttcagagactatgtagataggttcttta

SEQ ID NO: 310313 - DNA, 58 bp, Artificial
  Synthetic oligonucleotide
acataaaacatattcctataaggttgcttccaaacgaggcatgtgtggtggtctcttg

SEQ ID NO: 310314 - DNA, 55 bp, Artificial
  Synthetic oligonucleotide
acataaaacatgaatttggaattccatataaccctcaaagtcaaggggtagtaga

SEQ ID NO: 310315 - DNA, 60 bp, Artificial
  Synthetic oligonucleotide
acataaaatgcaaaacaccaatacagttgtccgaaaccattgacacaatctctgatcaat

SEQ ID NO: 310316 - DNA, 55 bp, Artificial
  Synthetic oligonucleotide
acataaacaaagctgcattaatggacagtgcccgtactgcatgactatgactgag

SEQ ID NO: 310317 - DNA, 57 bp, Artificial
  Synthetic oligonucleotide
acataaacattcaccgcgtgccgtcaccgcactgcggggcctccgcataaatgtttt

SEQ ID NO: 310318 - DNA, 60 bp, Artificial
  Synthetic oligonucleotide
acataaaccacacgaaatctggtgagcactcactgcctcggtgttggctggtcagtaatg

SEQ ID NO: 310319 - DNA, 60 bp, Artificial
  Synthetic oligonucleotide
acataaaccagtaattgattcagaccatgtggtcttcaatgagagatggttgattcatgg

SEQ ID NO: 310320 - DNA, 58 bp, Artificial
  Synthetic oligonucleotide
acataaactactacagtgattccgcctcgaggtcttcaaaccgtcaagacttcgcgca

SEQ ID NO: 310321 - DNA, 57 bp, Artificial
  Synthetic oligonucleotide
acataaactggaaaccagctagtacaccccatacatatagttctcttcaaggtagaa

SEQ ID NO: 310322 - DNA, 58 bp, Artificial
  Synthetic oligonucleotide
acataaagatgttcttaatagtagtaggaggcattataggcttaagaatatgctttgc

SEQ ID NO: 310323 - DNA, 60 bp, Artificial
  Synthetic oligonucleotide
acataaagattacgataaagatcaagatataggccatttttgcctcagtcctagatgcaa

SEQ ID NO: 310324 - DNA, 57 bp, Artificial
  Synthetic oligonucleotide
acataaagctgactgtaacatcagagagcctcgccgaactgaacaagccagtacccc

SEQ ID NO: 310325 - DNA, 60 bp, Artificial
  Synthetic oligonucleotide
acataaataattgtgtggtccaagagatctggcccacattgtctttcctgtacgactatc

SEQ ID NO: 310326 - DNA, 60 bp, Artificial
  Synthetic oligonucleotide
acataaataccagcatggggaacaagctcatcatgtgtggcatgatgcacgcttatttta

SEQ ID NO: 310327 - DNA, 52 bp, Artificial
  Synthetic oligonucleotide
acataaatccatcatgcctgttcgtgcacactactatgagggctgtaagacc

SEQ ID NO: 310328 - DNA, 60 bp, Artificial
  Synthetic oligonucleotide
acataaatgcccaagttgtcgcaatggatgaggatcaatactatgaccaacttgaattgc

SEQ ID NO: 310329 - DNA, 60 bp, Artificial
  Synthetic oligonucleotide
acataacagcctcggagaatccactagttatcaacaaccgcgtgctagaattgaacattg

SEQ ID NO: 310330 - DNA, 59 bp, Artificial
  Synthetic oligonucleotide
acataacatcctagtgtacgtggcaagttatacggaggtggacatgttgtcaaggctcc

SEQ ID NO: 310331 - DNA, 52 bp, Artificial
  Synthetic oligonucleotide
acataacatgtacgtcaaatattacaggactactactgacacgtgatggagg

SEQ ID NO: 310332 - DNA, 58 bp, Artificial
  Synthetic oligonucleotide
acataacccactgaaagtttgtgataacaagttgacaattgcagggtttcctgataga

SEQ ID NO: 310333 - DNA, 57 bp, Artificial
  Synthetic oligonucleotide
acataaccccagacggttttgcttacagtcgcactttcgcaggtgtcccttcaggca

SEQ ID NO: 310334 - DNA, 60 bp, Artificial
  Synthetic oligonucleotide
acataacgactatactcaagctgataccaacagaccaaatcatgcgaacattttacgaaa

SEQ ID NO: 310335 - DNA, 56 bp, Artificial
  Synthetic oligonucleotide
acataagacaaggaccaaaggaaccatttagagactatgtagatcggttctataaa

SEQ ID NO: 310336 - DNA, 55 bp, Artificial
  Synthetic oligonucleotide
acataagagtcaattggtatggatggcatgccattccgcagcatttgaggacctg

SEQ ID NO: 310337 - DNA, 55 bp, Artificial
  Synthetic oligonucleotide
acataaggtcattatcgagtacaatgatatcgcagcagttcctttgagtatagga

SEQ ID NO: 310338 - DNA, 53 bp, Artificial
  Synthetic oligonucleotide
acataagtaattatgtggccctaatgacctggcccacaacgttttcccggttc

SEQ ID NO: 310339 - DNA, 59 bp, Artificial
  Synthetic oligonucleotide
acataagtttatatatcttaaagaggtataaatagcatgtaggactagctatagagtta

SEQ ID NO: 310340 - DNA, 54 bp, Artificial
  Synthetic oligonucleotide
acataataatttgtgacgagtgacactccacggatgcaacaaccatcttgggca

SEQ ID NO: 310341 - DNA, 57 bp, Artificial
  Synthetic oligonucleotide
acataatcaccaggcgggaccaacgtgggtctggacaggttgtgacctacgctttga

SEQ ID NO: 310342 - DNA, 58 bp, Artificial
  Synthetic oligonucleotide
acataatccacctatcccagtaggagaaatctataaaagatggataatcctgggatta

SEQ ID NO: 310343 - DNA, 55 bp, Artificial
  Synthetic oligonucleotide
acataatgtcgtccacgggaggtcttacagttactagtaatgccgtgtctttaac

SEQ ID NO: 310344 - DNA, 59 bp, Artificial
  Synthetic oligonucleotide
acatacaaatgaaggccgcagcattgaaatcagcccaatctcgacttttcgggttggac

SEQ ID NO: 310345 - DNA, 58 bp, Artificial
  Synthetic oligonucleotide
acatacaactttaacttttagttatggctgtgtgtcgctgttgtgatacttcaccagg

SEQ ID NO: 310346 - DNA, 60 bp, Artificial
  Synthetic oligonucleotide
acatacaatgcggaattgctcgttctgctcgagaatgaaaggactctagattttcatgat

SEQ ID NO: 310347 - DNA, 60 bp, Artificial
  Synthetic oligonucleotide
acatacacatggtggcacactgccctgcgaaggattcctgtgaggttagcagctgcctat

SEQ ID NO: 310348 - DNA, 52 bp, Artificial
  Synthetic oligonucleotide
acatacaccggaaacaggagtttccgcttgtggaagacccgaaagtttgtaa

SEQ ID NO: 310349 - DNA, 60 bp, Artificial
  Synthetic oligonucleotide
acatacagagatcgactcataatgtggttcgggatgttgattatactggttttatatgtt

SEQ ID NO: 310350 - DNA, 60 bp, Artificial
  Synthetic oligonucleotide
acatacagatatcagccgacggtcatgcgagattattttgagcatacattaaagacgttc

SEQ ID NO: 310351 - DNA, 60 bp, Artificial
  Synthetic oligonucleotide
acatacagcatacgtagcgacaaaaagcagatgtcttgtcagcatgcaactccataggca

SEQ ID NO: 310352 - DNA, 58 bp, Artificial
  Synthetic oligonucleotide
acatacataacaagaaatcaacccgaatggtttaggaatgttttgagcatcgcaccta

SEQ ID NO: 310353 - DNA, 60 bp, Artificial
  Synthetic oligonucleotide
acatacatcatattcgtcaaatacttgaatatcaactacaggagccccattcatgatcag

SEQ ID NO: 310354 - DNA, 60 bp, Artificial
  Synthetic oligonucleotide
acatacatgcaaactcacccagctgtcatgcttctcagaaaacacaaagtcatagtacca

SEQ ID NO: 310355 - DNA, 53 bp, Artificial
  Synthetic oligonucleotide
acataccaaactcctaccgttccttctacggtccaatgttagcccagtgcatg

SEQ ID NO: 310356 - DNA, 60 bp, Artificial
  Synthetic oligonucleotide
acataccaagctagatttggcactattatcgcaagaaattttgatacaattcgtctatca

SEQ ID NO: 310357 - DNA, 60 bp, Artificial
  Synthetic oligonucleotide
acataccaagtccattctcaaccttcggacaagcacagagaccaacaatccatgcgccaa

SEQ ID NO: 310358 - DNA, 60 bp, Artificial
  Synthetic oligonucleotide
acataccagagaacaagggcacttgtacgtactgggatggaccccaggatgtgctctcta

SEQ ID NO: 310359 - DNA, 58 bp, Artificial
  Synthetic oligonucleotide
acatacctacaagagtaagacagggcttggaagcagctttgcaataaatgggggctaa

SEQ ID NO: 310360 - DNA, 60 bp, Artificial
  Synthetic oligonucleotide
acatacctaggggctgtgaaggcccatgtaaggtccagtcgtttgagcagagggatgatg

SEQ ID NO: 310361 - DNA, 50 bp, Artificial
  Synthetic oligonucleotide
acatacctccgtggcattagttacaaggtcaccgttggagcgcttgttgc

SEQ ID NO: 310362 - DNA, 51 bp, Artificial
  Synthetic oligonucleotide
acatacgaccaggcacgatacgcttgcacccggtggacccctacgcttgca

SEQ ID NO: 310363 - DNA, 59 bp, Artificial
  Synthetic oligonucleotide
acatacgatcgatcagttgcgaaactgacggccctgattacattgttaaggctaataac

SEQ ID NO: 310364 - DNA, 59 bp, Artificial
  Synthetic oligonucleotide
acatacgccacgtgttgaagcgtgttttatcggtagataaagacacgactatgatagac

SEQ ID NO: 310365 - DNA, 60 bp, Artificial
  Synthetic oligonucleotide
acatacgctattgtggtattgattcgcgtgagttgattaatccaacaacatatggcattg

SEQ ID NO: 310366 - DNA, 55 bp, Artificial
  Synthetic oligonucleotide
acatacgtaccgagtgataccggaaacaacgccctgcactgcaaccttccagaag

SEQ ID NO: 310367 - DNA, 60 bp, Artificial
  Synthetic oligonucleotide
acatacgtgttacacgggactcgacgtcactgagtgtggagaagtcgcagcgctaatgtg

SEQ ID NO: 310368 - DNA, 57 bp, Artificial
  Synthetic oligonucleotide
acatactaataccctctctaaagacccggccaagcagaaaacacagggtggtcatca

SEQ ID NO: 310369 - DNA, 57 bp, Artificial
  Synthetic oligonucleotide
acatactacacacaggtacctgtggaagacccagacgagattgctgctgcaggctcg

SEQ ID NO: 310370 - DNA, 56 bp, Artificial
  Synthetic oligonucleotide
acatactacacggccaccttgcttaaaatacggtctgggagcctcaacgaggtaca

SEQ ID NO: 310371 - DNA, 55 bp, Artificial
  Synthetic oligonucleotide
acatactacagtgggatctggatcaagcgcaaaaggatctggagaacgcgcggac

SEQ ID NO: 310372 - DNA, 54 bp, Artificial
  Synthetic oligonucleotide
acatactaccttagagcctttaggccgcttagtagcggggttatgaaagtactg

SEQ ID NO: 310373 - DNA, 56 bp, Artificial
  Synthetic oligonucleotide
acatactacgcgccaactttcctggtcgacgcactgtattttcaaacagttcgagt

SEQ ID NO: 310374 - DNA, 51 bp, Artificial
  Synthetic oligonucleotide
acatactacttgttcagtgaatggcgttaatgacttcagttttaatggagg

SEQ ID NO: 310375 - DNA, 53 bp, Artificial
  Synthetic oligonucleotide
acatactattctagcctatggagaatggcctcaatatctctcagatgttgacg

SEQ ID NO: 310376 - DNA, 60 bp, Artificial
  Synthetic oligonucleotide
acatactccaagcctcgctcacgcgcgtcccttacttcgtgagggcacacgcgctgatca

SEQ ID NO: 310377 - DNA, 58 bp, Artificial
  Synthetic oligonucleotide
acatactccaggcctctctcctacgcgtcccttacttcgtgagggcacacgcgctggt

SEQ ID NO: 310378 - DNA, 60 bp, Artificial
  Synthetic oligonucleotide
acatactcggcgtcataagcgtggtggtaagcgtccgtttggttcgaagtatcatgatca

SEQ ID NO: 310379 - DNA, 59 bp, Artificial
  Synthetic oligonucleotide
acatactctccccacgaactctcacgggtggcagcaactctcagaaaacttggagcgcc

SEQ ID NO: 310380 - DNA, 59 bp, Artificial
  Synthetic oligonucleotide
acatactctcccgatacattaggctacgacctaatacgtgatctcatcttggttattcg

SEQ ID NO: 310381 - DNA, 60 bp, Artificial
  Synthetic oligonucleotide
acatactgcctatctgggtaaccgaatagatgcgactacagttacacactgtttgggctc

SEQ ID NO: 310382 - DNA, 55 bp, Artificial
  Synthetic oligonucleotide
acatactggtattgttcgttgtgttagtgatgttacgcgtggtccgggaattact

SEQ ID NO: 310383 - DNA, 60 bp, Artificial
  Synthetic oligonucleotide
acatactggtttggatatgactgcgacaaatctggagagtttttctccagaagacatgcg

SEQ ID NO: 310384 - DNA, 54 bp, Artificial
  Synthetic oligonucleotide
acatactgttaattaatagcaacgggaacctaattgctcctcggggttacttca

SEQ ID NO: 310385 - DNA, 53 bp, Artificial
  Synthetic oligonucleotide
acatagaacagtcagcattcgaacagacaatcacatcactccttgcaagtgga

SEQ ID NO: 310386 - DNA, 56 bp, Artificial
  Synthetic oligonucleotide
acatagaagacgcccttatatcccctagtccaactaagcggataataacagacgtc

SEQ ID NO: 310387 - DNA, 60 bp, Artificial
  Synthetic oligonucleotide
acatagacattaagaccaatgcacagatttttctaggcacattgtcaattatgcgcctga

SEQ ID NO: 310388 - DNA, 60 bp, Artificial
  Synthetic oligonucleotide
acatagagatcgggaaaagggattgcctagatctactcagcacagtagatgggctaacag

SEQ ID NO: 310389 - DNA, 51 bp, Artificial
  Synthetic oligonucleotide
acatagagatgttgcttacacccagatttctgatgagtgttttgattctca

SEQ ID NO: 310390 - DNA, 55 bp, Artificial
  Synthetic oligonucleotide
acatagagcaggatgagaggttgtcaaaacaaaagcttaacttcctgggacagag

SEQ ID NO: 310391 - DNA, 57 bp, Artificial
  Synthetic oligonucleotide
acatagagcagtatagaaaggctataactcagaaacttcaaactagtctttccctgt

SEQ ID NO: 310392 - DNA, 55 bp, Artificial
  Synthetic oligonucleotide
acatagaggccgtacaactacaagaacttaggaactcgattggatggttagaacg

SEQ ID NO: 310393 - DNA, 60 bp, Artificial
  Synthetic oligonucleotide
acatagaggctgtacagctacaagagctcaggaattcaattggatggttagaacggttag

SEQ ID NO: 310394 - DNA, 53 bp, Artificial
  Synthetic oligonucleotide
acatagaggcttgcgggtatagcgatagagtactgcaattaacactgggaaac

SEQ ID NO: 310395 - DNA, 60 bp, Artificial
  Synthetic oligonucleotide
acatagatatcatgggctttgtacaacaacgtagaaagctagagatgttcacatatatga

SEQ ID NO: 310396 - DNA, 60 bp, Artificial
  Synthetic oligonucleotide
acatagattgctacccttattacccagccaacctagttgactgctcttggagtgaatcga

SEQ ID NO: 310397 - DNA, 52 bp, Artificial
  Synthetic oligonucleotide
acatagatttggcatattgattacagaccgctcttttaacaacttctggccg

SEQ ID NO: 310398 - DNA, 60 bp, Artificial
  Synthetic oligonucleotide
acatagcacgcacgagagtgcagggtaatggtaggcctcggggtcagagatatggacaga

SEQ ID NO: 310399 - DNA, 53 bp, Artificial
  Synthetic oligonucleotide
acatagcagagccccggaccccctttcaaagcgaccgaggggggtgactttga

SEQ ID NO: 310400 - DNA, 53 bp, Artificial
  Synthetic oligonucleotide
acatagcagcccccggagccccttccaaaatgaccgaggggggtggctaggaa

SEQ ID NO: 310401 - DNA, 57 bp, Artificial
  Synthetic oligonucleotide
acatagcagctccaggacccccttccgagaagactgaggggggagcttggagagtgg

SEQ ID NO: 310402 - DNA, 60 bp, Artificial
  Synthetic oligonucleotide
acatagcaggaactactagtacccttcaggaacagatagcatggatgacaagtaacccac

SEQ ID NO: 310403 - DNA, 51 bp, Artificial
  Synthetic oligonucleotide
acatagcaggggatggtttcagattggcgtcgatacctgtgataccctcgt

SEQ ID NO: 310404 - DNA, 60 bp, Artificial
  Synthetic oligonucleotide
acatagccatccaggtgatctctaagattgtctaaattcagcatgcccatgcctgacggg

SEQ ID NO: 310405 - DNA, 60 bp, Artificial
  Synthetic oligonucleotide
acatagcgcacagtggagtatccaagggtacatctcgcgatcttgtcggtgctaatttcg

SEQ ID NO: 310406 - DNA, 53 bp, Artificial
  Synthetic oligonucleotide
acatagcttatattgattaccgtaccttaatcaaactcacagaaccctagtat

SEQ ID NO: 310407 - DNA, 60 bp, Artificial
  Synthetic oligonucleotide
acatagcttcctagtacaccctatctatcctgaggaagaggtgtgggagtctattagatg

SEQ ID NO: 310408 - DNA, 56 bp, Artificial
  Synthetic oligonucleotide
acataggacttgtctattatgcggagggtagttattccactagctctacccttaat

SEQ ID NO: 310409 - DNA, 60 bp, Artificial
  Synthetic oligonucleotide
acataggatttgtccgtcgcaaagcgaacagctcgaattacattgtttatgcctatggcc

SEQ ID NO: 310410 - DNA, 55 bp, Artificial
  Synthetic oligonucleotide
acataggtcaagttgtctcagcgtacagtaaccttcctccatctgaatcggcaga

SEQ ID NO: 310411 - DNA, 59 bp, Artificial
  Synthetic oligonucleotide
acataggtttccgtgtcaatgcaaacacagcggctctgagcaacaaagtccttgcagag

SEQ ID NO: 310412 - DNA, 57 bp, Artificial
  Synthetic oligonucleotide
acatagtaaacaagttagtacaaagggcagagaagttccgtcctctcatacactctc

SEQ ID NO: 310413 - DNA, 60 bp, Artificial
  Synthetic oligonucleotide
acatagtagcccgcactgacatacggctgttgaagccttctgtcaagaacatccacgtcc

SEQ ID NO: 310414 - DNA, 51 bp, Artificial
  Synthetic oligonucleotide
acatagtatactgtgttacgttgcctgctcttatgaacatgtttccgtacc

SEQ ID NO: 310415 - DNA, 52 bp, Artificial
  Synthetic oligonucleotide
acatagtgacagactcccaatatgttataggaattctacaaggactgcctga

SEQ ID NO: 310416 - DNA, 52 bp, Artificial
  Synthetic oligonucleotide
acatagtgactgcaaatcataaatttggacacaaccttgatggtacacagca

SEQ ID NO: 310417 - DNA, 58 bp, Artificial
  Synthetic oligonucleotide
acatagtggggcttttccatagtcacaaagccagaccacatacgtggcccttgattag

SEQ ID NO: 310418 - DNA, 54 bp, Artificial
  Synthetic oligonucleotide
acatagttacacgggtattgtagtcctggtcgtatttactgttttcgaacgcag

SEQ ID NO: 310419 - DNA, 57 bp, Artificial
  Synthetic oligonucleotide
acatagttacgcttacgtttcggttctcgatgattacgacgtactaatggtctatca

SEQ ID NO: 310420 - DNA, 53 bp, Artificial
  Synthetic oligonucleotide
acatagttcaaataaagtctactattttgggacttaacgacttagtacgtata

SEQ ID NO: 310421 - DNA, 60 bp, Artificial
  Synthetic oligonucleotide
acatagttgaacttttggtcacggacctgaggaactgctcatggcctgctagtcacacta

SEQ ID NO: 310422 - DNA, 60 bp, Artificial
  Synthetic oligonucleotide
acatagttgctgctagctcaagtctcatggctagaaaacttgaatttgggacagatagta

SEQ ID NO: 310423 - DNA, 60 bp, Artificial
  Synthetic oligonucleotide
acatagttgtcatgacaagtgggtttgcgtttcactactatgtcaacaatccacaacagc

SEQ ID NO: 310424 - DNA, 55 bp, Artificial
  Synthetic oligonucleotide
acatataaagtgagctgacatacataagtgatcgttacttctggctgtgggaagc

SEQ ID NO: 310425 - DNA, 60 bp, Artificial
  Synthetic oligonucleotide
acatataatgcagaattgctcgttctgctcgagaatgaaaggacgttggatttccatgac

SEQ ID NO: 310426 - DNA, 60 bp, Artificial
  Synthetic oligonucleotide
acatatacagtgctccgtgggattcagacgatgtatttttctttcactgtgtgtcgcact

SEQ ID NO: 310427 - DNA, 53 bp, Artificial
  Synthetic oligonucleotide
acatataccggagtgagaaccgatggagagactagcgcctgtagaaggtcaag

SEQ ID NO: 310428 - DNA, 60 bp, Artificial
  Synthetic oligonucleotide
acatatagaagacaagtataattggatgctagcgacatcactaagagcgaagaactatac

SEQ ID NO: 310429 - DNA, 55 bp, Artificial
  Synthetic oligonucleotide
acatatatagttatttctgcaatatatctcagtgcctgtccaggtgaaggccaag

SEQ ID NO: 310430 - DNA, 58 bp, Artificial
  Synthetic oligonucleotide
acatatatctcccaaacggactggtggcacaaatgtaccagcctgagcgggataaggt

SEQ ID NO: 310431 - DNA, 60 bp, Artificial
  Synthetic oligonucleotide
acatatattttgtactcactttgtgtgcgtgacacgtcactgacacacacgattttttgc

SEQ ID NO: 310432 - DNA, 60 bp, Artificial
  Synthetic oligonucleotide
acatatcacctcaggtcgtttccgatatgataaacagaaagcgattgcgcgttcacactc

SEQ ID NO: 310433 - DNA, 51 bp, Artificial
  Synthetic oligonucleotide
acatatcagaacaactttgttccagttgttggggcaagacctcaggtcaat

SEQ ID NO: 310434 - DNA, 60 bp, Artificial
  Synthetic oligonucleotide
acatatcagagaacaagagctctcgtgcgtactgggatggatcccagaatgtgctctcta

SEQ ID NO: 310435 - DNA, 58 bp, Artificial
  Synthetic oligonucleotide
acatatccactagttcagtcatttcctcgtgactgaactcatcaaacgtggagtctcg

SEQ ID NO: 310436 - DNA, 60 bp, Artificial
  Synthetic oligonucleotide
acatatccagtgctgaacgtgactatgccaaacaatgacaattttgacaaactatacatt

SEQ ID NO: 310437 - DNA, 60 bp, Artificial
  Synthetic oligonucleotide
acatatctaaggagatagcttacatacaggttataaggatgctaactgccctagaatatg

SEQ ID NO: 310438 - DNA, 56 bp, Artificial
  Synthetic oligonucleotide
acatatgaacctgcctacctaggaggcaaagaccccagagtagagaagggaccttc

SEQ ID NO: 310439 - DNA, 60 bp, Artificial
  Synthetic oligonucleotide
acatatgacaagtactacgaattaactagagatatatctgcaagactaaatattccgata

SEQ ID NO: 310440 - DNA, 51 bp, Artificial
  Synthetic oligonucleotide
acatatgagggtgactcgagcgcagggtacaatcatgatgtgtctattctg

SEQ ID NO: 310441 - DNA, 60 bp, Artificial
  Synthetic oligonucleotide
acatatgattggacattgaacagaaatcaaccggccgcaactgcattagccaacactata

SEQ ID NO: 310442 - DNA, 58 bp, Artificial
  Synthetic oligonucleotide
acatatggccatccaacaggcccgagaccttctgggtcatcgggaatagaccccactc

SEQ ID NO: 310443 - DNA, 51 bp, Artificial
  Synthetic oligonucleotide
acatatgggactaggggagcggtgcaggtccggtcgcaagtgtgtgagccg

SEQ ID NO: 310444 - DNA, 50 bp, Artificial
  Synthetic oligonucleotide
acatatgtggtcccaacaggggttttgagatgtggcgctcatcttggagt

SEQ ID NO: 310445 - DNA, 58 bp, Artificial
  Synthetic oligonucleotide
acatatgttgcccctaaaccaactggaactttcataattggacatagatttatgacta

SEQ ID NO: 310446 - DNA, 60 bp, Artificial
  Synthetic oligonucleotide
acatattacttgcggccacaaaacccttaatgttcatgcatgcttcaggcaacataagtc

SEQ ID NO: 310447 - DNA, 55 bp, Artificial
  Synthetic oligonucleotide
acatattccccggatactctgggatacgatctgttacgtgatttaattttagtta

SEQ ID NO: 310448 - DNA, 53 bp, Artificial
  Synthetic oligonucleotide
acatattccccggatactttgggttacgatcttatacgtgatttgattttagt

SEQ ID NO: 310449 - DNA, 60 bp, Artificial
  Synthetic oligonucleotide
acatattgagaacccaagagtcagaatgccaatgtttgtacggaacctgtgctgtggcag

SEQ ID NO: 310450 - DNA, 60 bp, Artificial
  Synthetic oligonucleotide
acatattgagtcaccatcgtcaatatgggtgtttgctggggcccctgataggtgtccacc

SEQ ID NO: 310451 - DNA, 58 bp, Artificial
  Synthetic oligonucleotide
acatattgcctcatccgccacaacttggggcctgaaagcgtgagggattaaactgaaa

SEQ ID NO: 310452 - DNA, 56 bp, Artificial
  Synthetic oligonucleotide
acatattgttcgcgagaacggactttacgcagaaagtgaagaaccgcgagcggact

SEQ ID NO: 310453 - DNA, 58 bp, Artificial
  Synthetic oligonucleotide
acatatttcggtaatactcttgtcactatggctatgattgcatatgcctctgatctaa

SEQ ID NO: 310454 - DNA, 51 bp, Artificial
  Synthetic oligonucleotide
acatatttctgctgtgcaaagactgcgaggtggatttggaagacttacgac

SEQ ID NO: 310455 - DNA, 60 bp, Artificial
  Synthetic oligonucleotide
acatcaaaatcatgactatggggaggacttcagagctatcaaaagccagattgatgctat

SEQ ID NO: 310456 - DNA, 60 bp, Artificial
  Synthetic oligonucleotide
acatcaaacatcgctcgtgagccaggcatgtttagtcatgataatgttaaagatgtgttg

SEQ ID NO: 310457 - DNA, 60 bp, Artificial
  Synthetic oligonucleotide
acatcaaactctggcttggaatacacaaatggctcttataagatgtcgtttgatggatta

SEQ ID NO: 310458 - DNA, 55 bp, Artificial
  Synthetic oligonucleotide
acatcaaagcactgtatgaactaaacccggacctagctggctaatcatagaccag

SEQ ID NO: 310459 - DNA, 60 bp, Artificial
  Synthetic oligonucleotide
acatcaaatattacagggctgatattaacaagagatggtggtcataacatgaataacacg

SEQ ID NO: 310460 - DNA, 60 bp, Artificial
  Synthetic oligonucleotide
acatcaaattacgttctggcctccaccaactctagtcgcatcacaccacccacagtcgca

SEQ ID NO: 310461 - DNA, 50 bp, Artificial
  Synthetic oligonucleotide
acatcaacaaccccgcaaaccttcccggctggacgcgcctgtactcgtcc

SEQ ID NO: 310462 - DNA, 59 bp, Artificial
  Synthetic oligonucleotide
acatcaacactgaatcagaggtcaatccctgaaatagctaccaggcctaaagtgaacgg

SEQ ID NO: 310463 - DNA, 60 bp, Artificial
  Synthetic oligonucleotide
acatcaacagatgccttataagttcacagctctccgctgcctatagctgcctgaagctct

SEQ ID NO: 310464 - DNA, 60 bp, Artificial
  Synthetic oligonucleotide
acatcaagacaaagaatcacactaatactgtgatgttcaagttagtgcgtgacagacgtc

SEQ ID NO: 310465 - DNA, 60 bp, Artificial
  Synthetic oligonucleotide
acatcaagactatgcaagacgacaagaagacaacaagatcaaagggatggcagtatggag

SEQ ID NO: 310466 - DNA, 55 bp, Artificial
  Synthetic oligonucleotide
acatcaagagcctccgacttacttcttgcgttaattgcctttgcgtaagcgtcgt

SEQ ID NO: 310467 - DNA, 60 bp, Artificial
  Synthetic oligonucleotide
acatcaagctgttaagtttgaatgtatctgggtctgtaattgccaggcatttggacaggt

SEQ ID NO: 310468 - DNA, 60 bp, Artificial
  Synthetic oligonucleotide
acatcaagtgtgctcgaggcgcaaagccgaaaacctaacagatatgaggtctctcaatat

SEQ ID NO: 310469 - DNA, 57 bp, Artificial
  Synthetic oligonucleotide
acatcaagttgaagaatcatacgaacagtgtaatgttttggttggttagggatcgaa

SEQ ID NO: 310470 - DNA, 50 bp, Artificial
  Synthetic oligonucleotide
acatcaattcacaacggttagcaatttcagacataggcgtcaaggattga

SEQ ID NO: 310471 - DNA, 55 bp, Artificial
  Synthetic oligonucleotide
acatcacaaatttaggcagggcattcggagttggtttcactgaccagatatcagc

SEQ ID NO: 310472 - DNA, 60 bp, Artificial
  Synthetic oligonucleotide
acatcacaagatacacaccatcctatgagaaatttactttcagtcacgagccttaagtca

SEQ ID NO: 310473 - DNA, 59 bp, Artificial
  Synthetic oligonucleotide
acatcacactaccggtaggcccacccggtgaggatgacaagccctgggtgccactcaca

SEQ ID NO: 310474 - DNA, 60 bp, Artificial
  Synthetic oligonucleotide
acatcacacttcacgaacaacaactcgtgacttccagacagaagctcaaagatgcagaaa

SEQ ID NO: 310475 - DNA, 60 bp, Artificial
  Synthetic oligonucleotide
acatcacagatcctcttgatgcggactacatgggccttgtgcgaatccatcacactggcc

SEQ ID NO: 310476 - DNA, 60 bp, Artificial
  Synthetic oligonucleotide
acatcacctcaagatctgggccgatcgctactcgttccctgccgaagtcaaaggctcgca

SEQ ID NO: 310477 - DNA, 60 bp, Artificial
  Synthetic oligonucleotide
acatcacctgacaacattgaatctcctaatgcaccatgggtctttgcttgtgctcctgat

SEQ ID NO: 310478 - DNA, 50 bp, Artificial
  Synthetic oligonucleotide
acatcaccttcttctcagaggacggagagctatcatccctgggaaaggag

SEQ ID NO: 310479 - DNA, 52 bp, Artificial
  Synthetic oligonucleotide
acatcacgttctctgatgatacctacgtctctcggcacgtgttatacacacc

SEQ ID NO: 310480 - DNA, 56 bp, Artificial
  Synthetic oligonucleotide
acatcactttttggagctggactctggaagttgatgggagttctccagggaacggg

SEQ ID NO: 310481 - DNA, 55 bp, Artificial
  Synthetic oligonucleotide
acatcagaaagttcctgagggccgtaaagccggggcggtctgggttctgcgccac

SEQ ID NO: 310482 - DNA, 53 bp, Artificial
  Synthetic oligonucleotide
acatcagaagatttggagggacctccttaacttttggactgaatttaccggga

SEQ ID NO: 310483 - DNA, 60 bp, Artificial
  Synthetic oligonucleotide
acatcagatgagctctttgctccctggacatttccatggaaaacctgtgtgctatgagga

SEQ ID NO: 310484 - DNA, 55 bp, Artificial
  Synthetic oligonucleotide
acatcagcagttagcctccttggtggccctgcaacaaacaaggactaccttcggc

SEQ ID NO: 310485 - DNA, 60 bp, Artificial
  Synthetic oligonucleotide
acatcagccaacaaacggctcgataaccatgatgaacagaataaggctatcttagtacta

SEQ ID NO: 310486 - DNA, 60 bp, Artificial
  Synthetic oligonucleotide
acatcagcgaagttgtatggtatgataaacgttgatttcctcagatatgcctcctttgtt

SEQ ID NO: 310487 - DNA, 60 bp, Artificial
  Synthetic oligonucleotide
acatcaggccctatgtaataccacccagacaagcagtcgagggtcctattatctagttgc

SEQ ID NO: 310488 - DNA, 55 bp, Artificial
  Synthetic oligonucleotide
acatcaggctcaggggatgcagccatattagaggtagctcctgaaccatccccag

SEQ ID NO: 310489 - DNA, 56 bp, Artificial
  Synthetic oligonucleotide
acatcaggtcatcctttatttaacaaagtcagggatactgaaaactcaggtaacta

SEQ ID NO: 310490 - DNA, 60 bp, Artificial
  Synthetic oligonucleotide
acatcaggtgagaaggaatggatttcaatcggtaatctaccacggatgtcgctcattcct

SEQ ID NO: 310491 - DNA, 58 bp, Artificial
  Synthetic oligonucleotide
acatcaggtttgattaccctgaagttgcaaaactccgatacaggagaagtgtcagacg

SEQ ID NO: 310492 - DNA, 60 bp, Artificial
  Synthetic oligonucleotide
acatcagtaggaattatcctctagttcagaatgctcaaggacaaatgatacatcagccgc

SEQ ID NO: 310493 - DNA, 60 bp, Artificial
  Synthetic oligonucleotide
acatcagttacaaacgactggtgtggggttcctccgtgatggcaagataaattatcagca

SEQ ID NO: 310494 - DNA, 60 bp, Artificial
  Synthetic oligonucleotide
acatcatagtcatgggacttaaatcattgatggactcacatcgtgaaagcggaggtacat

SEQ ID NO: 310495 - DNA, 60 bp, Artificial
  Synthetic oligonucleotide
acatcatagtcggttatggtgagtggccttcctactgctcagattctgacgctacagcag

SEQ ID NO: 310496 - DNA, 55 bp, Artificial
  Synthetic oligonucleotide
acatcatcaatgaaacagggtaatacacttgacgtgtgtaaaaggttgcttttcc

SEQ ID NO: 310497 - DNA, 53 bp, Artificial
  Synthetic oligonucleotide
acatcatcatatgaacgagtccttttttatcggtttcgacttagagctagatt

SEQ ID NO: 310498 - DNA, 59 bp, Artificial
  Synthetic oligonucleotide
acatcatcattgttacgtaacattggtaacatatagttatacgtgcgttttgataagtg

SEQ ID NO: 310499 - DNA, 51 bp, Artificial
  Synthetic oligonucleotide
acatcatcgctgaacggtggactcgtgagcagagggaatcgcgacatacat

SEQ ID NO: 310500 - DNA, 60 bp, Artificial
  Synthetic oligonucleotide
acatcatgcacccgtctaacggcactctgtcgtctgcgttcattgttgacggtgggacag

SEQ ID NO: 310501 - DNA, 60 bp, Artificial
  Synthetic oligonucleotide
acatcatgctcatattctttgtcctgatggtagttgtgattcccgagccagggcaacaaa

SEQ ID NO: 310502 - DNA, 60 bp, Artificial
  Synthetic oligonucleotide
acatcatggcgtatgtacacgaaggggaaggtgatggattgaaagagcttttacatctga

SEQ ID NO: 310503 - DNA, 54 bp, Artificial
  Synthetic oligonucleotide
acatcatggttgtctaccgggaagccaatctcatgctcgccagccatagagcta

SEQ ID NO: 310504 - DNA, 60 bp, Artificial
  Synthetic oligonucleotide
acatcattcgcagacacgttgcttccaaatgcatccccaacgattcgaacgcagaggctt

SEQ ID NO: 310505 - DNA, 60 bp, Artificial
  Synthetic oligonucleotide
acatcattcgtggtcccgatcatcttgaaggcactgtacatgttaacaacacgaggtagg

SEQ ID NO: 310506 - DNA, 60 bp, Artificial
  Synthetic oligonucleotide
acatcattgggccccacttgctgtgatccaagctataattgaggagtccctctcttacat

SEQ ID NO: 310507 - DNA, 60 bp, Artificial
  Synthetic oligonucleotide
acatcatttaactcatactgtccctgtttactcatacaggctagagtgagactaggcata

SEQ ID NO: 310508 - DNA, 60 bp, Artificial
  Synthetic oligonucleotide
acatccaacagtttgagcatatcgttcaactcaggcgcgcactgaccacagctactataa

SEQ ID NO: 310509 - DNA, 53 bp, Artificial
  Synthetic oligonucleotide
acatccaacccgtgagaatggtttccttaactactatgttcttaaggaatgta

SEQ ID NO: 310510 - DNA, 53 bp, Artificial
  Synthetic oligonucleotide
acatccaactttagagtttcacccacccaagaggttattagattccctaacat

SEQ ID NO: 310511 - DNA, 55 bp, Artificial
  Synthetic oligonucleotide
acatccacagctatcgacatcgttacaacagtcttcggccccttacgcctccgcg

SEQ ID NO: 310512 - DNA, 55 bp, Artificial
  Synthetic oligonucleotide
acatccacgatcttgtattcgtttatgggtgctatcgacactggggacatcctta

SEQ ID NO: 310513 - DNA, 51 bp, Artificial
  Synthetic oligonucleotide
acatccacgccttcgcctggtacgtagggggtgggtggttgaccctaaacc

SEQ ID NO: 310514 - DNA, 54 bp, Artificial
  Synthetic oligonucleotide
acatccagagttcagggacttaactcctgacttttcacttacgcaaaaggtcca

SEQ ID NO: 310515 - DNA, 58 bp, Artificial
  Synthetic oligonucleotide
acatccaggtaacgtcatggttcttggtacagcgacttctcgtagcatgggaacatgc

SEQ ID NO: 310516 - DNA, 57 bp, Artificial
  Synthetic oligonucleotide
acatccaggtcaaggaggtcacgacgaatgacggcgttacgaccatcgctaataacc

SEQ ID NO: 310517 - DNA, 60 bp, Artificial
  Synthetic oligonucleotide
acatccatcataaatcataaacagtgtgtgactgataataagcagcttgcgccgttgttt

SEQ ID NO: 310518 - DNA, 60 bp, Artificial
  Synthetic oligonucleotide
acatccatgagtccatccgctggacaaaggatcccaggcatactgaagaccatgttcgct

SEQ ID NO: 310519 - DNA, 60 bp, Artificial
  Synthetic oligonucleotide
acatccattatcaatcacaaacagtgtgcagcggataataaacagctagcaccattattt

SEQ ID NO: 310520 - DNA, 55 bp, Artificial
  Synthetic oligonucleotide
acatccattcagcccaccaccactacagcagaggtaaccagcacagcgcctcagc

SEQ ID NO: 310521 - DNA, 56 bp, Artificial
  Synthetic oligonucleotide
acatcccaaactcggaaacaggtacaggaacaatctacgtagatacctactcagaa

SEQ ID NO: 310522 - DNA, 54 bp, Artificial
  Synthetic oligonucleotide
acatcccaacattacggagtcagctctccctaccactggggaaatacccttcta

SEQ ID NO: 310523 - DNA, 60 bp, Artificial
  Synthetic oligonucleotide
acatcccaagaatgagttttggaatatgcagccgctggcttcacgctattccgaaggaat

SEQ ID NO: 310524 - DNA, 54 bp, Artificial
  Synthetic oligonucleotide
acatcccactgagagcggcttacatggaagtaaagctctattggcatttgaccc

SEQ ID NO: 310525 - DNA, 58 bp, Artificial
  Synthetic oligonucleotide
acatcccgtagcgcttcattttgtgggtcaccatatacttgggaacaagatctacagc

SEQ ID NO: 310526 - DNA, 55 bp, Artificial
  Synthetic oligonucleotide
acatcccgttcctatgggtgttggcgcagcgtcggtaccggtctcagacgttccc

SEQ ID NO: 310527 - DNA, 59 bp, Artificial
  Synthetic oligonucleotide
acatccctaggcgcataagacaagggctggaaagagctttactttaagcactgcattaa

SEQ ID NO: 310528 - DNA, 54 bp, Artificial
  Synthetic oligonucleotide
acatccctcccttttacaggctctgctaggacccaaacacccaactcaaaggag

SEQ ID NO: 310529 - DNA, 59 bp, Artificial
  Synthetic oligonucleotide
acatccgaaaagcgtccaaaggtttcgcgtgcctcgaatgcaaacgccatcgattcata

SEQ ID NO: 310530 - DNA, 59 bp, Artificial
  Synthetic oligonucleotide
acatccgacgagcttttagctccctgaatgtttggatggaaatgtgctgatcgggttgg

SEQ ID NO: 310531 - DNA, 56 bp, Artificial
  Synthetic oligonucleotide
acatccgatttacttaggttccttgcactacgatatttccttttcggatctgcgtg

SEQ ID NO: 310532 - DNA, 59 bp, Artificial
  Synthetic oligonucleotide
acatccggagctgttcggctgagttcgtggtgggaacggttaatcaatgaattgcgcag

SEQ ID NO: 310533 - DNA, 53 bp, Artificial
  Synthetic oligonucleotide
acatccggatgtggtgcgtagcaccattttcatagcattaacctataatctat

SEQ ID NO: 310534 - DNA, 56 bp, Artificial
  Synthetic oligonucleotide
acatccgggggaagctcgttccgctgataacctatggtttgacaggcctgtggccc

SEQ ID NO: 310535 - DNA, 58 bp, Artificial
  Synthetic oligonucleotide
acatccggtgaagactttcggctattttgtcagctggtttctactaccgaatgcattg

SEQ ID NO: 310536 - DNA, 58 bp, Artificial
  Synthetic oligonucleotide
acatccgttaggcaagagtacgcaataccagttggaccagtctttccaccaggtatga

SEQ ID NO: 310537 - DNA, 53 bp, Artificial
  Synthetic oligonucleotide
acatccgttctggcgacacctgtgactagtgctgataaattttcaatcgtatc

SEQ ID NO: 310538 - DNA, 55 bp, Artificial
  Synthetic oligonucleotide
acatcctaacgaataagggccgtaggcccgtcaagatggaatgaacggtcagatt

SEQ ID NO: 310539 - DNA, 54 bp, Artificial
  Synthetic oligonucleotide
acatcctagcaatattacaaagttatgtgtatggtgaaccgcacatcgcaaggc

SEQ ID NO: 310540 - DNA, 50 bp, Artificial
  Synthetic oligonucleotide
acatcctatatatctcggttcgatgcactatgatataacgtatgaaactt

SEQ ID NO: 310541 - DNA, 60 bp, Artificial
  Synthetic oligonucleotide
acatcctcatctactcatttacacatggaccacgactcagccgcagattagcttcctatg

SEQ ID NO: 310542 - DNA, 58 bp, Artificial
  Synthetic oligonucleotide
acatcctcctatacccctggcatcccatcacacggtgggtcatcatccctcacgtgct

SEQ ID NO: 310543 - DNA, 58 bp, Artificial
  Synthetic oligonucleotide
acatcctgctggctctgggggcagcattctttcagatggcggccaccgatttggacct

SEQ ID NO: 310544 - DNA, 51 bp, Artificial
  Synthetic oligonucleotide
acatcctttcggctttcttataatgccagttagacatttggctatgaagtg

SEQ ID NO: 310545 - DNA, 57 bp, Artificial
  Synthetic oligonucleotide
acatcgaaactggtacccacacactggtgacaggctaaggatgcccttcaggtaccc

SEQ ID NO: 310546 - DNA, 59 bp, Artificial
  Synthetic oligonucleotide
acatcgaatcaaggatttaagctgggaagagtttaggcaattcatcttagcacacttag

SEQ ID NO: 310547 - DNA, 55 bp, Artificial
  Synthetic oligonucleotide
acatcgacagtgtgatgggaatggttggagtgttaccagacatgactccaagcac

SEQ ID NO: 310548 - DNA, 53 bp, Artificial
  Synthetic oligonucleotide
acatcgacccgtataaagaatttggagcctctgcggagttaatctcttttttg

SEQ ID NO: 310549 - DNA, 60 bp, Artificial
  Synthetic oligonucleotide
acatcgactcagatgactcgacttagtcgatggggtattgcggggatagaagcgaaagaa

SEQ ID NO: 310550 - DNA, 60 bp, Artificial
  Synthetic oligonucleotide
acatcgactctcttggcaatgatgactacggctcattcatccgcaacccacgcgatggat

SEQ ID NO: 310551 - DNA, 60 bp, Artificial
  Synthetic oligonucleotide
acatcgagaacctgagttcttaaacaacacagaacctctctgcaatgtatccggatttgc

SEQ ID NO: 310552 - DNA, 54 bp, Artificial
  Synthetic oligonucleotide
acatcgagcatgtctgcgttcccgggagcctgcatgacaacccgggagtacacg

SEQ ID NO: 310553 - DNA, 56 bp, Artificial
  Synthetic oligonucleotide
acatcgagctagaacagtaccagcagaagtactgtacatgactcaaagggacagtc

SEQ ID NO: 310554 - DNA, 54 bp, Artificial
  Synthetic oligonucleotide
acatcgaggatagttaggaggtctaactggtgcaactcttggcgacaggcagct

SEQ ID NO: 310555 - DNA, 55 bp, Artificial
  Synthetic oligonucleotide
acatcgatctgcccgagggtccgtgatgagtgacgacccgtcgcgttactggctc

SEQ ID NO: 310556 - DNA, 60 bp, Artificial
  Synthetic oligonucleotide
acatcgcaccacttttcgtgtggaccaatcaagctggctcctgtattcatccgtgatggg

SEQ ID NO: 310557 - DNA, 60 bp, Artificial
  Synthetic oligonucleotide
acatcgcagtaaggggcgaccacagagacctaatgtcgcccgacgtgcgagactcatatg

SEQ ID NO: 310558 - DNA, 58 bp, Artificial
  Synthetic oligonucleotide
acatcgcagtccccttacgtggttgtagcgaccaacgcaatagaatcaggcgttactc

SEQ ID NO: 310559 - DNA, 52 bp, Artificial
  Synthetic oligonucleotide
acatcgctaagagggtgggaccaccactagtgagtaccggcacctcaactta

SEQ ID NO: 310560 - DNA, 52 bp, Artificial
  Synthetic oligonucleotide
acatcgctgtggcggtcatgactataaccctactgatggttagctatgtgac

SEQ ID NO: 310561 - DNA, 51 bp, Artificial
  Synthetic oligonucleotide
acatcgcttagagcatattttgtggcaccaatagcccagatcgacacaggt

SEQ ID NO: 310562 - DNA, 60 bp, Artificial
  Synthetic oligonucleotide
acatcgcttgaactcttagctccctgaatgttcggatggaaatgtgctgacctggttggg

SEQ ID NO: 310563 - DNA, 58 bp, Artificial
  Synthetic oligonucleotide
acatcggcaacggtatggtgatgggtgtcaacaacccgggtgccgccgtgtgtcaggc

SEQ ID NO: 310564 - DNA, 55 bp, Artificial
  Synthetic oligonucleotide
acatcggcccaatcccctttgttatgctatacaaggcatcctcatactttggcat

SEQ ID NO: 310565 - DNA, 60 bp, Artificial
  Synthetic oligonucleotide
acatcgggatggaatctgtggtgatttgatactgagatactcacaagggatgccttctgg

SEQ ID NO: 310566 - DNA, 53 bp, Artificial
  Synthetic oligonucleotide
acatcgggccggtcgtcaaggccggaaaggtgaccgtcgaaacgatcgaggac

SEQ ID NO: 310567 - DNA, 60 bp, Artificial
  Synthetic oligonucleotide
acatcggttaagaactttcactatgagaacactgaaatcccagcagcttctgtccagaaa

SEQ ID NO: 310568 - DNA, 59 bp, Artificial
  Synthetic oligonucleotide
acatcgtcaatggttagacaaagacacatttctgtccgtgtaaaatgcaaagtgccacg

SEQ ID NO: 310569 - DNA, 60 bp, Artificial
  Synthetic oligonucleotide
acatcgtgtcgattgtgccctttgcaacttgccgttcaaacctgctcaagatcagtgagt

SEQ ID NO: 310570 - DNA, 56 bp, Artificial
  Synthetic oligonucleotide
acatcgttagaataacgggtcaaatgcaaacattcggaccaagcaaagtacagacg

SEQ ID NO: 310571 - DNA, 55 bp, Artificial
  Synthetic oligonucleotide
acatcgttatgttggattgggccctttgagcacccactattgaggccgagtcacc

SEQ ID NO: 310572 - DNA, 60 bp, Artificial
  Synthetic oligonucleotide
acatctaactctgctccaattttggatgctgctgaaactggacatactagtaatgtacaa

SEQ ID NO: 310573 - DNA, 60 bp, Artificial
  Synthetic oligonucleotide
acatctaagataacatagccctatgcctggtctccaccagttgaaggcatcttgcaataa

SEQ ID NO: 310574 - DNA, 52 bp, Artificial
  Synthetic oligonucleotide
acatctacacagcgcatccagctgagaacatgctcaactcaaacccaagcgt

SEQ ID NO: 310575 - DNA, 54 bp, Artificial
  Synthetic oligonucleotide
acatctacaggggtattaacagcaaaggataacccggtttatgtttggtcacca

SEQ ID NO: 310576 - DNA, 55 bp, Artificial
  Synthetic oligonucleotide
acatctacatctatagttcgtgatgtttcttcgtgtcaacgtctagctccgttcc

SEQ ID NO: 310577 - DNA, 50 bp, Artificial
  Synthetic oligonucleotide
acatctaccatgaatcgcgaacaagctccccagcttgcggcatgtgtagt

SEQ ID NO: 310578 - DNA, 58 bp, Artificial
  Synthetic oligonucleotide
acatctactatagttaaatgtacatactcactaattgacgcaaacagaattggcttgc

SEQ ID NO: 310579 - DNA, 55 bp, Artificial
  Synthetic oligonucleotide
acatctagacgtggtcttgttagatttagtagggtgggcgcacgtggtaccatgt

SEQ ID NO: 310580 - DNA, 55 bp, Artificial
  Synthetic oligonucleotide
acatctagcagctgttaggataggtgtgagggtgactgcaatggttcaaggagac

SEQ ID NO: 310581 - DNA, 52 bp, Artificial
  Synthetic oligonucleotide
acatctattccacgctccagagcatctggttatggctatgagagtgacaaca

SEQ ID NO: 310582 - DNA, 58 bp, Artificial
  Synthetic oligonucleotide
acatctcaactggtcgttcaacgctagagaagcgttcacccgtctctcggataattgg

SEQ ID NO: 310583 - DNA, 55 bp, Artificial
  Synthetic oligonucleotide
acatctcacacgtgggtaaggtcatgtgcatatctgatgtcacacgtgggaatgg

SEQ ID NO: 310584 - DNA, 60 bp, Artificial
  Synthetic oligonucleotide
acatctccgccgacgctcgtcaagccacgaaggctgttcagtcacacttcccaatgctgc

SEQ ID NO: 310585 - DNA, 52 bp, Artificial
  Synthetic oligonucleotide
acatctccgtgatttgtattacggtgaaactaaactcgccttggcgcctgtc

SEQ ID NO: 310586 - DNA, 60 bp, Artificial
  Synthetic oligonucleotide
acatctcgagaatagcaattggagactgccccaagtatgtcaaacagggctctctgaaac

SEQ ID NO: 310587 - DNA, 53 bp, Artificial
  Synthetic oligonucleotide
acatctcgatttttatcgagatttaggggtttgggtggtggcgcgagcccccc

SEQ ID NO: 310588 - DNA, 53 bp, Artificial
  Synthetic oligonucleotide
acatctcgcaggggtgctgtgcgtttcagccgtctgggtcaaaagtttagcat

SEQ ID NO: 310589 - DNA, 60 bp, Artificial
  Synthetic oligonucleotide
acatctctactctgctcttagggttggcacagttgtaactgcttacgaggattgctccgg

SEQ ID NO: 310590 - DNA, 55 bp, Artificial
  Synthetic oligonucleotide
acatctctcgcggcgttgaaagcgacgctgttgccaccctccaatccttgcccgc

SEQ ID NO: 310591 - DNA, 54 bp, Artificial
  Synthetic oligonucleotide
acatctctcgctgtgccactcttagcgacgacacactcgccatcatcaatccag

SEQ ID NO: 310592 - DNA, 60 bp, Artificial
  Synthetic oligonucleotide
acatctcttttggcatgtcaatgacaacttttaattttcccacgagagaatccttgatca

SEQ ID NO: 310593 - DNA, 52 bp, Artificial
  Synthetic oligonucleotide
acatctgaactttttccaacagcagaggaatatacagattcattgatggatc

SEQ ID NO: 310594 - DNA, 60 bp, Artificial
  Synthetic oligonucleotide
acatctgagcttgatttagctccctgaatgtttggatggaaatgtgctgacctagttggg

SEQ ID NO: 310595 - DNA, 59 bp, Artificial
  Synthetic oligonucleotide
acatctgattatggcaaacaccacacttggactaaacccaccgatgactactacgaata

SEQ ID NO: 310596 - DNA, 55 bp, Artificial
  Synthetic oligonucleotide
acatctgcgtttaatacccgcagacagccgctcttcgctcacctccgccggaggg

SEQ ID NO: 310597 - DNA, 58 bp, Artificial
  Synthetic oligonucleotide
acatctgctactatggatccttcatagaaccgggctttgaacagaccttcggatttta

SEQ ID NO: 310598 - DNA, 51 bp, Artificial
  Synthetic oligonucleotide
acatctgctagtgcccgcatcctcgtgtaggagggcgtaggcatggttggg

SEQ ID NO: 310599 - DNA, 60 bp, Artificial
  Synthetic oligonucleotide
acatctgctcagaacatgttacaagtgctcggaccttgggaacgtgacgttcgtgaacta

SEQ ID NO: 310600 - DNA, 60 bp, Artificial
  Synthetic oligonucleotide
acatctggcaaaatgcactgtcaaacaagctagaaccatgatgcaatttgaactgtcacc

SEQ ID NO: 310601 - DNA, 50 bp, Artificial
  Synthetic oligonucleotide
acatctggtacttggtactaacctaggtagaaacccctataaaacgagcg

SEQ ID NO: 310602 - DNA, 58 bp, Artificial
  Synthetic oligonucleotide
acatctggtagtcccatcatcaactcccagggagtggttgtggggctgtatgggaacg

SEQ ID NO: 310603 - DNA, 60 bp, Artificial
  Synthetic oligonucleotide
acatctggtgacccaaaatacatagatctaccagccactgatgcagacaggatgtacata

SEQ ID NO: 310604 - DNA, 58 bp, Artificial
  Synthetic oligonucleotide
acatcttaaggtaacactgagactggtacttagtttctggagacaggctaaggatgcc

SEQ ID NO: 310605 - DNA, 58 bp, Artificial
  Synthetic oligonucleotide
acatcttagatgtcaagcacggatatccttacaagtggaacgtcaacgctgaaccccc

SEQ ID NO: 310606 - DNA, 55 bp, Artificial
  Synthetic oligonucleotide
acatcttatagaatgggaatacatgaatccatgtcctgccacacatgtgcggcgg

SEQ ID NO: 310607 - DNA, 57 bp, Artificial
  Synthetic oligonucleotide
acatcttatttctgacaccaacagaaaaataaccaaatgaccgatcttcaattactc

SEQ ID NO: 310608 - DNA, 58 bp, Artificial
  Synthetic oligonucleotide
acatcttccgggtcaaaggttgtgcatacgtcacaagtcacgtggaggggacacgctg

SEQ ID NO: 310609 - DNA, 53 bp, Artificial
  Synthetic oligonucleotide
acatcttccgggtctccgggttcgatatcccctttggcgggattcatttcgga

SEQ ID NO: 310610 - DNA, 57 bp, Artificial
  Synthetic oligonucleotide
acatcttcggctatagtgactcccttgtggcgttcccctacacatggaaggtttcaa

SEQ ID NO: 310611 - DNA, 52 bp, Artificial
  Synthetic oligonucleotide
acatcttgcaccttccaggttgcgtgccctgcgtgagagcggggaatcagtc

SEQ ID NO: 310612 - DNA, 60 bp, Artificial
  Synthetic oligonucleotide
acatcttgcctagttgataccaaaaacaactgggccatcataggtcgtgatgccttacaa

SEQ ID NO: 310613 - DNA, 60 bp, Artificial
  Synthetic oligonucleotide
acatcttgttcaccatcttggaaggcttgttgcctctagttaaagagagcactatcatct

SEQ ID NO: 310614 - DNA, 58 bp, Artificial
  Synthetic oligonucleotide
acatgaaaattgagtgcccccacacagtaagcttcggggaaaatagtgtgataggcta

SEQ ID NO: 310615 - DNA, 55 bp, Artificial
  Synthetic oligonucleotide
acatgaaaattgagtgcccccatacagtaagttttgggggaaacagtgtgatagg

SEQ ID NO: 310616 - DNA, 60 bp, Artificial
  Synthetic oligonucleotide
acatgaaagatataacgagaagaatgcgatattactagaacatcttaagccagttggaga

SEQ ID NO: 310617 - DNA, 55 bp, Artificial
  Synthetic oligonucleotide
acatgaaagtgtgtagattggatggtgaatgggtaacattcagagaggtccttgc

SEQ ID NO: 310618 - DNA, 50 bp, Artificial
  Synthetic oligonucleotide
acatgaagcacgggacacataacgtttgattgggaaaccattggggacac

SEQ ID NO: 310619 - DNA, 51 bp, Artificial
  Synthetic oligonucleotide
acatgaaggacatcacagctgtggctgcgcagaatactttgctggttttat

SEQ ID NO: 310620 - DNA, 54 bp, Artificial
  Synthetic oligonucleotide
acatgaatgcagcaccgacctacgtacacgtggcgggagagctaccctcgaaag

SEQ ID NO: 310621 - DNA, 60 bp, Artificial
  Synthetic oligonucleotide
acatgacaaagtcattccatccgaccctgaggagctgtatattgctgtatcactaacaga

SEQ ID NO: 310622 - DNA, 59 bp, Artificial
  Synthetic oligonucleotide
acatgacactactgctttcacgaggattacggattcgcctctaacgtactcgacctatg

SEQ ID NO: 310623 - DNA, 57 bp, Artificial
  Synthetic oligonucleotide
acatgacactcctaacgatctttgcctctgcggcggatatgcaatatccgttcggct

SEQ ID NO: 310624 - DNA, 57 bp, Artificial
  Synthetic oligonucleotide
acatgacagaagcccgtttagagcattaataagttgggaaatggggcaagcaccaag

SEQ ID NO: 310625 - DNA, 57 bp, Artificial
  Synthetic oligonucleotide
acatgacaggagttgagttacaggactgtgcatacgatggattgtatattaaaaatt

SEQ ID NO: 310626 - DNA, 60 bp, Artificial
  Synthetic oligonucleotide
acatgaccagccaagtgctgctagggcgaatggatcgcacagtgtggagagggccaaagt

SEQ ID NO: 310627 - DNA, 58 bp, Artificial
  Synthetic oligonucleotide
acatgacctgccttaaggccaaggttcagcttgtttctaaccccacattctgtggatg
